United States Patent Application Publication US 2004/0214272 A1 - sequence listing, part 61

SEQ ID NO: 355986 - protein, 98 aa, Zea mays
  Clone ID: MRT4577_87830C.1.pep
RRAARQPSRRRAPRRRTRPWPACWRGAEPTPGARRRTGRWTVATCPTDRRGGGSCSLRACSSRWATRPLLTMRGLLFYAAMQSVYGLLELLTMSTFCG

SEQ ID NO: 355987 - protein, 178 aa, Zea mays
  Clone ID: MRT4577_87831C.1.pep
PRVRPRVRPRVRGRVGFSIELHGNVIGAVETCLESFHRYHKYLNFSHPTISSKIDPHTCGWAFGMNIFDLIAWRKANATSLYHYWQEQNSDLLLWRTGILPAGLLTFYGLVEPLDRRWHVLGLGYDVDIDDRLIESAAVVHYNGNMKPWLKLAIRRYKYIWERYVNISHPYVRECMLQ

SEQ ID NO: 355988 - protein, 539 aa, Zea mays
  unsure (1)..(539): unsure at all Xaa locations
  Clone ID: MRT4577_87832C.1.pep
RSQGAHIPTFEPVPESSVSIVDDRTPEDKERWWRRGLRAISEGKLAIVLLAVGQDNGSYIEEVPREKVNFSEELLSSTLFVRQLADQMTLAKAYVILAKEQGNLQLAWELSSQIRNCQRLLSEGAVNGRAITKDEAHPIISRLARLIYKAQDSHYDISTTIVTLKNHALALEERAKAAIVQSAEFGQLAAESFPKNLHCLTVKLTEEWLRNPKHRSHSEENRNSTRLVDNNLYHFCIFSDNVLATSVVVNSTVSNANHPQQLVFHVVTDRIHFGAMSTWFLINDFKGCTVEVRCIDEFSWLNASSSPLVRQLSEAETQGYNYSAGSKNPERETKFLNPKFVSHXNHLRFYIPQILPNLEKVVFLDDDVVVQKDLTQLFSIELHGNVIGAVETCLESFHRYHKYLNFSHPTISSKIDPHTCGWAFGMNIFDLIAWRKANATSLYHYWQEQNSDLLLWRTGTLPAGLLTFYGLMEPLDRRWHVLGLGYDVDIDDRLIESAAVVHYNGNMKPWLKLAIRRYKYIWERYVNISHPYVRECMLH

SEQ ID NO: 355989 - protein, 146 aa, Zea mays
  unsure (1)..(146): unsure at all Xaa locations
  Clone ID: MRT4577_87833C.1.pep
MAASFRCSATARSYNITLLPGDSIGXEVVAIAKDVLSLANALKGIDHRFXGKLMGGSTLDAIGVLLPDETLNAAKGSDTVLLDAIGGFRVCTTHSGYQEKLWPSLPMTFIMFLAEKLILNMLQFNMSVPTPYVFMKRFFEAANAYN

SEQ ID NO: 355990 - protein, 66 aa, Zea mays
  unsure (1)..(66): unsure at all Xaa locations
  Clone ID: MRT4577_87834C.1.pep
ALRGGLMVVLPPIAPFRSSFCSPRXCARGFLLLIKTFQKTPPLXXXWRVIEVLRTHYMAKKKKKRA

SEQ ID NO: 355991 - protein, 94 aa, Zea mays
  Clone ID: MRT4577_87835C.1.pep
PLIFNARRGKNISKKGLCFRIFPTTPKKVFLRSHRFQKQPLPMFLKNVSKGAGQPLQKFGPTKPRQILVWGIFLPFLKKKTGPTKLKMPPLFFP

SEQ ID NO: 355992 - protein, 79 aa, Zea mays
  Clone ID: MRT4577_87836C.1.pep
SFKVPRSGGYHRGFNWRLSPWIELFYRAIHALNISVLQLPKSWVPGRRARTKPAHRQKRRTCSSGVDSKGICFLAEGTL

SEQ ID NO: 355993 - protein, 90 aa, Zea mays
  Clone ID: MRT4577_87837C.1.pep
PVRRDSKYKPLDIHATVFKLLCKKKNKKKKKKKKKKKKKKKKKKKKKKKKKKKKKKKKKKKKKKKKKKGGPPPWKKKRAFFFTPERAPGG

SEQ ID NO: 355994 - protein, 69 aa, Zea mays
  unsure (1)..(69): unsure at all Xaa locations
  Clone ID: MRT4577_87838C.1.pep
RTRSIRTIFSGDTNFSRGMGSSKDSDPFDGLYVGAFGPYGMEIVHLRLKFXHWNELDNENKTSYVGFFE

SEQ ID NO: 355995 - protein, 64 aa, Zea mays
  Clone ID: MRT4577_87839C.1.pep
RREETSYTICKLTYTCSNILLPLYDHYYLAECRRADRLLCRRPLLTKHVQRYRQQLAGRNQPSR

SEQ ID NO: 355996 - protein, 257 aa, Zea mays
  unsure (1)..(257): unsure at all Xaa locations
  Clone ID: MRT4577_8783C.1.pep
MAIDHESPFKELRLKNRRIMGGGGPDPEPEEEEEVATAAYAGQWPRWLQPLLSARFFAHCRTHGDSHRSGECNMFCLDCSAAGAGAGARALCSLCLAQAHRDHHTIQIRRSSYHDVIRVSDIQRFMDIAGVQTYVINSARVVFLNERPQQQRPGCKAASASANLCEVCARSLLDNFRFCSLGCKVVGCSPDAAKARSXAPPARRRRQRRRRRRXSTSSSPLRDAQKRQSFTPPTPQPAKRRKGIPHRAPFGSFIVEY

SEQ ID NO: 355997 - protein, 79 aa, Zea mays
  Clone ID: MRT4577_87840C.1.pep
RPLLLQQLYTHRIFSQCCSVPNAVILSVIFSSILRMLLNMLRLFSLPIPERGEQHTPQSACDEDEKHHQALNQPNVPSQ

SEQ ID NO: 355998 - protein, 71 aa, Zea mays
  Clone ID: MRT4577_87841C.1.pep
KAEKNKGAPRGPTKFAVPPPVYDGETGAGAAPKKKKKASEPKKESDKEKGFTPLDDKRCGFWQKEARFGFF

SEQ ID NO: 355999 - protein, 109 aa, Zea mays
  Clone ID: MRT4577_87842C.1.pep
PSPGQGKWGRWTQQGPRRSGWSLGDVLVLGAGAMAEFHILRVRVKARPSPDVGGGALPSRLWARDKNHGPRIWDRGRVREIQNRFWASVVVLAFAPSFWGSGTLAPGTR

SEQ ID NO: 356000 - protein, 91 aa, Zea mays
  Clone ID: MRT4577_87843C.1.pep
PNSKHCTNSLYMYVAQLSLSIYITINYPNNLFLPPIDRCVVPSSMNVCSQPIHPLNICTSSNNNNRSLSSTIISYLNHWTRGSARQFLTGT

SEQ ID NO: 356001 - protein, 143 aa, Zea mays
  Clone ID: MRT4577_87844C.1.pep
LSFSFWKCWTFSVVQLSGVLAGFHHRCVYLLLSSMVFGYTVACLFFPLFLLPSEDLEVCGSSAAPCEVSCVSSSFGNLLDFFFFRIASFVWDVGLLLSPFWYLCCISMCTRIFSVWVLSFSVAVAAFDGAALLACVALFGHAR

SEQ ID NO: 356002 - protein, 87 aa, Zea mays
  unsure (1)..(87): unsure at all Xaa locations
  Clone ID: MRT4577_87845C.1.pep
KLARAQTQTXIYPIXLIKTHLHTYSCXSXAYIPKIVQLSTNILSHDNPLTFYKSLNPSFLNIKPYSLIYLPVYETFKHLSKTYILNY

SEQ ID NO: 356003 - protein, 144 aa, Zea mays
  Clone ID: MRT4577_87846C.1.pep
LAHMPLSSKMDFCGFCVAWAGTHSRLDGADKQRLPPAPAGGDAEKWQRVPLPWELFQPALHIVAHCLLGTTGSDELKAQAARAAECLYWRATETMDARAVLATRSLVRLSQMVEEPIPEPSFSGAIENTAELEAMRANILNSNN

SEQ ID NO: 356004 - protein, 51 aa, Zea mays
  Clone ID: MRT4577_87847C.1.pep
LRFTTLINEYAGFFVDYTLNTVLILNYSKLITQANHIERNNYYKARDQQHG

SEQ ID NO: 356005 - protein, 322 aa, Zea mays
  Clone ID: MRT4577_87848C.1.pep
MDSSAGAGRHRVRIAVVGDVHNDWALEEDSKALRFLQPDLVLFTGDYGNENVELVRSISDLQLPKAAILGNHDCWHTHQFSEKKVDRVRLQLASLGEQHVGYKCLDFPSIKLSVVGGRPFSCGGDRLLRPRLLSKCYGVNDMAGSAKKIHDAAAGAPEGHSVVLLAHNGPTGLGSRMDDICGRDWVPGGGDHGDPDLERAISDLQREARVSIPLVVFGHMHKSLAYGRGLRKMIAFGANHIIYLNGAVVPRVKFAQTTPGHEQNQPEGSGSIAPTLRAFTIADLYEGRVEKISEVWVLVSGARTEVEEEIVLYKHPREQHML

SEQ ID NO: 356006 - protein, 195 aa, Zea mays
  Clone ID: MRT4577_87849C.1.pep
TLTIVIIPYSYGVNDMAGSAKKIYDAAAGAPEGHSVVLLAHNGPTGLGSRMDDICGRDWVPGGGDHGDPDLERAISDLQREARVSIPLVVFGHMHKSLAYGRGLRKMIAFGANHIIYLNGAVVPRVKFAQTTPGHEQNQPEGSGSIAPTLRAFTIADLYEGRVEKISEVWVLVSGARTEVEEEIVLYKHPREQHM

SEQ ID NO: 356007 - protein, 39 aa, Zea mays
  Clone ID: MRT4577_8784C.1.pep
NSQIFYRYSPYFPYSLYASYISNIGRLIEDKSTSLALEA

SEQ ID NO: 356008 - protein, 91 aa, Zea mays
  Clone ID: MRT4577_87850C.1.pep
MAAAAAVARSFLRYSGSSSLRSAAARAASRAGPVPLPRRMPSSGPRVLLSVCLESLMPMHSATASALMTSLLAAPACKGLGWLSEAGNDDL

SEQ ID NO: 356009 - protein, 133 aa, Zea mays
  Clone ID: MRT4577_87851C.1.pep
MLTIVDVEGIDRAVRANSTKVRDSPLMSFVAGFIKTFIVLTCVIFSISNLPLMFIISDIEFNIWEDDGDDQAKNLFIRRPSWSKVTMRLKMRVNPFCVKGGGGEIDGGFNRKFDSIKVAFRDHLEGLDVSQIV

SEQ ID NO: 356010 - protein, 278 aa, Zea mays
  unsure (1)..(278): unsure at all Xaa locations
  Clone ID: MRT4577_87852C.1.pep
MGPINGRRRRRLLLLAAVALAGAAVDAQPDYFNPKNFNPSMAIVMVVLVTAFFLLGFFSIYLRRCAGPPLGGXRPLPCEAAGSGARQQQLRAAAXRRMRGLDRAVLDSFPTMAYADVRAHKGALECAVCLSEFDDGDTLRLLPRCAHAFHTDCIDAWLASHVTCPVCRAILLVPDAAEPTALAAAPVTAAPDDDHAVVVDAAAAAGETEDQRLMEGGGRRAAADRQRQARAAKQQVAVPALAHHGALNFRRVAAWLRSSFTPSGRVLYSFFLQQKACT

SEQ ID NO: 356011 - protein, 61 aa, Zea mays
  Clone ID: MRT4577_87853C.1.pep
EFKMVAPSSVSVAIRHLTQNRSIGSIPFGVNEVFCQANTLMTAPNKAIMGLFPVSCSELIL

SEQ ID NO: 356012 - protein, 98 aa, Zea mays
  Clone ID: MRT4577_87854C.1.pep
SPGAPLNSGKVCVPLKVLLPQASMGNPVKKPPPKERILLFRPPVAKGPPLSVKSGSPQFGPYGPPWGSPPQLPPKGVSKISQKKKPPWMPFFFCPPGG

SEQ ID NO: 356013 - protein, 72 aa, Zea mays
  Clone ID: MRT4577_87855C.1.pep
RFWWTTENSDFKSLPMINLLYGVSCFSKIDKGPSCFDKLTILLVCIVTTSHLELLQVSKLLEQSNNNKVLLI

SEQ ID NO: 356014 - protein, 110 aa, Zea mays
  unsure (1)..(110): unsure at all Xaa locations
  Clone ID: MRT4577_87856C.1.pep
RRGLDSDSRASPAPSPFELRSLHCTRRSNRASEAALSPQPITGLCGGGNEYGQCXGEEPERKEDGTRALRRDILTPXRCAPKLKVRQVDIAAGGWHSTALTIQGDVFTLS

SEQ ID NO: 356015 - protein, 95 aa, Zea mays
  Clone ID: MRT4577_87857C.1.pep
PETGFFGSAPSLGRASGGLVWEEVFFGGSSHQVADQGYPYFIPPPVSAVDEWIQNRGGLLLPPPTFNLWLGMHVCANILGLCPGPFISLSFFGVK

SEQ ID NO: 356016 - protein, 115 aa, Zea mays
  Clone ID: MRT4577_87858C.1.pep
KKIPKTFPHYLQTHESNSTHLPDFELGCAPLWGQDVPPERPRPILLPLRLLTAHCPYSFPPPHNPVMGCGDSAASDARFERRVQWRERSSKGEGAGGLASRYPAHAVTHSRRQIL

SEQ ID NO: 356017 - protein, 125 aa, Zea mays
  unsure (1)..(125): unsure at all Xaa locations
  Clone ID: MRT4577_87859C.1.pep
PVRATPLRHAALPHGLLLVIFLRRPVAASRQAPRRGXALVRRAQLVLSREVGWCGQRAWRKLLXRLAQETRCVCSSPTAATGRVRPITFGYDAASYAKNFDDGRSPAAPRVVVGANAGDKPSGNN

SEQ ID NO: 356018 - protein, 81 aa, Zea mays
  unsure (1)..(81): unsure at all Xaa locations
  Clone ID: MRT4577_8785C.1.pep
TRILGIIKTHFRSIDSSCRATAKRLSISLFICFGTLHATSYXXKKKKKKKKKKKKKKKKKKKNKKKKKRETQRRKKKKAAR

SEQ ID NO: 356019 - protein, 79 aa, Zea mays
  unsure (1)..(79): unsure at all Xaa locations
  Clone ID: MRT4577_87860C.1.pep
MALSVGKTYDGRDYMVKDLLQADLYRLKIDLAEXQMPGLMACRALLGPYKPLGGTRILEHIYMTMQTDELIKTLTYLDY

SEQ ID NO: 356020 - protein, 126 aa, Zea mays
  unsure (1)..(126): unsure at all Xaa locations
  Clone ID: MRT4577_87861C.1.pep
LFICLVCSQLPLYGIHSGTGADSFYWMRAILTSNRGTVMELGITSIETFGMVTQLIGXSKIIEHDNSGREDRALLNGAQKLIDILITIGEAAAYVLYVMYRRVSQLVTGNAVVIILKLCFAGIIAI

SEQ ID NO: 356021 - protein, 98 aa, Zea mays
  unsure (1)..(98): unsure at all Xaa locations
  Clone ID: MRT4577_87862C.1.pep
PARTGTPGXSXAHRKSASARSGSSSTVIAAXRSDPPPPRRSRVTHAANCSSGGVRTGDGAGVMGSGSGXGRGREGEGIGGSGGETEAEQEQAGWRPDA

SEQ ID NO: 356022 - protein, 95 aa, Zea mays
  Clone ID: MRT4577_87863C.1.pep
MATGPVGATTTLGKTSRAALFPRRCGKHRRESGVRRDWGIALFNVDWINLRFGSPGRVRLFAGNGRRRSAAGAAVVWAGEQRGLWTVGSYNDGRD

SEQ ID NO: 356023 - protein, 301 aa, Zea mays
  Clone ID: MRT4577_87864C.1.pep
MLPYATAAEAEAALGRPMTPAEALWFRYTAGVSDYHLYCCNILFLFVVFTVAPLPIALLELRAPAAVSPYKLQPRVRLSRAEFVRCYKDVLRIFFLVIGPLQLVSYPAVKFVGIHTKLPLPSLAELAAQLLVYFLVEDYLNYWIHRFLHGEWGYQNIHRVHHEFTAPIGFAAPYAHWAEVLILGIPSFVGPAIVPGHMITFWLWIILRQVEAIETHSGFDFPFTPTKYIPFYGGAEYHDYHHYVGGQSQSNFASVFTYCDYLYGTDKGYRFHKTYLAKLKDLGHNDGQKGDGSGPSYVKLD

SEQ ID NO: 356024 - protein, 331 aa, Zea mays
  Clone ID: MRT4577_87865C.1.pep
MVIAVEGNGFVHDDEEDDGDRPIRYLPLGHIYSSSTPAPAPRPPAQKKPRFDDGRPPMKVYYRRRRKKLRVDESLSPPSPTTAPLAPPERDEKAGPSRRKDSLKHELLFRGPASPALDGEEPERRLGRTRRCGGAEKTVCFSEPERRRQPARPKGSVGRRWVELDIQTADPNAFVGLVCKVFWPLDDDWYKGSIAWYNEATKKHSVKYDDGEAEDLSLADERIKFFISSEEMKSLNLKLGISNQDKKGHDELLALAVSFHDYQGLDPGDLVWAKITGHAMWPAVVVDESNVPATRALKSIRLDQSMLVQFFGTHDFARIKLKQAVPFLNGL

SEQ ID NO: 356025 - protein, 120 aa, Zea mays
  unsure (1)..(120): unsure at all Xaa locations
  Clone ID: MRT4577_87866C.1.pep
ACSFSNSPSGSSPRGRGSGTTSPRRHPSSRSVKGVGELALPRPVFVSPLCCPLYPFPPRFSIGALLGACPPGIIGAHFGRFTCLSSLWSAPWPFCLLRLLLCPDNARLPAFFXXGDXLSV

SEQ ID NO: 356026 - protein, 346 aa, Zea mays
  Clone ID: MRT4577_87867C.1.pep
MEPPPLSSLQEEGEEGPTVEDSSVFSAAVVPPRPATHSHSLHKYAPLDWSAYFDEERRVAIPDTDNVFNAYTTGSEGPVVFCLHGGGYSGLSFALAASQMKDKARVVAMDLRGHGKSTTNDDLDLSIETLTNDVIAVIRTMYGDLPPAIILVGHSMGGSVAIHVAARKEIRNLHGLVVVDVVEGTAMASLVHMQKILANRAQHFPSIEKAIEWSVKGGPLRNIESARVSIPSTLKYDESRECYTYRTPLEQTEKYWKGWYEGLSDKFLSCPVQKILLLAGTDRLDRALTIGQMQGKFQMVVIRHTGHAIQEDVPEEFASHILKFISRNKIGPNGVEIPGLIKKWQQ

SEQ ID NO: 356027 - protein, 136 aa, Zea mays
  Clone ID: MRT4577_87868C.1.pep
MKQLKGFYYASLLLILFCFMFKYFLNQSCPSSSNTCSSHVNVKTSLTPPSIELLFRCKKKKKKKKKKKKKKKKKKKKKKKKKKKKKKKKKKKKKKKKGGPFRNFFKTGGGPFFKFFYIYIFIFFFIFFFLGFYLFF

SEQ ID NO: 356028 - protein, 50 aa, Zea mays
  Clone ID: MRT4577_87869C.1.pep
HPYLEPRHFVDEKAVNENHKDYMFLECIQCITEMKTGPFAEHSNQLWNIS

SEQ ID NO: 356029 - protein, 86 aa, Zea mays
  Clone ID: MRT4577_8786C.1.pep
CHRSRWFTVSIPSAQFVEREITWSLLATSPAGAGSMRCDVSQFGEFRCIAPMSLYCRVTLYNVVFPDPTSITPPPGGSCGGANVSV

SEQ ID NO: 356030 - protein, 247 aa, Zea mays
  unsure (1)..(247): unsure at all Xaa locations
  Clone ID: MRT4577_87870C.1.pep
MSAPNGPAASPMVYPVYLTGAFPQQAGDDQAQGPGIYAIQQNQLAAAMGXVLCSNXLIPLAYNIPTESVGASAGEENVQDARQQNGPQRQVVVRRFHFAFQLDLALIIKLAAVVFLFSQEGSKQRLFLLILFASLIYLYQTGAITPFLRRLQRAGGAAAHPPQAPARVENRAPLPAQNDGNEQPNGPANPDQAAENREQDAAAGNENPQEAEVEGNRRNWLGGVLKEVQLVVVGFVASLLPGFQHND

SEQ ID NO: 356031 - protein, 72 aa, Zea mays
  Clone ID: MRT4577_87871C.1.pep
SPLHTRSACKNPSLGLRMGSVATHSCQKALRLATEEIAPTILKEPLSKTKLSKLELNFVQIHNKLYSGTCAC

SEQ ID NO: 356032 - protein, 275 aa, Zea mays
  unsure (1)..(275): unsure at all Xaa locations
  Clone ID: MRT4577_87872C.1.pep
MAEADAQTQSNAHSSSPPAEASGEPIRSPQIGAPTAASPTFPLMYPMLVPGMFSQQGMDDQAQGPGIYAIQENQFMGAMGGYAPKTFIPLAYNIPTESVGALAGEEQGQDARQQNGPQRQVVVRRFHFAFQLDLALIIKLAAVVFLFSQEGSKQRLFLLILFASMIYLYQTGAITPFLRWLQRAGGVAARPPQAPXRNRAPLPAQNDGNEQPNDPANPDQAAENREQDAAAGNENPQEAEVEGNRRNWLEGVLKEIQLVVVGFVASLLPGFQHND

SEQ ID NO: 356033 - protein, 117 aa, Zea mays
  unsure (1)..(117): unsure at all Xaa locations
  Clone ID: MRT4577_87873C.1.pep
NIFFFGGFPLIDRWIWFRGKQGQRERKQRGGPKQGGRKNERTKSSGGAQHGQREKKKDMIGAGSERPHEARQGGEWNRQREGLFKEKANPGRREGGGRVWGXGRMAGRAGGISXXGG

SEQ ID NO: 356034 - protein, 247 aa, Zea mays
  unsure (1)..(247): unsure at all Xaa locations
  Clone ID: MRT4577_87874C.1.pep
MATPNGPSASPMVYPVYLSGVFPQQGGDDQAQGPGIYAIQQNQLXGDGNGLLCSNXLIPLTYNIPTESIGAPAGEENVQDARQQNVPQRQVVVRRFHFAFQLDLTLIIKLAAVVFLFSQEGSKQRLFLLILFASLIYLYQTGAIIPFVRWLQRAGGAAAHPPQAPARAENRAALPAQNDGNEQPNDPANPDQAAENREQDAAAGNENPQEAEVEGNRRNWLEGVLKEIQLVVVGFVASLLPGFQHND

SEQ ID NO: 356035 - protein, 34 aa, Zea mays
  Clone ID: MRT4577_87875C.1.pep
TARRSPLRTNGLHAGWHRSASSGRYAFKYQSMSA

SEQ ID NO: 356036 - protein, 74 aa, Zea mays
  Clone ID: MRT4577_87876C.1.pep
KPKLTFFLHTPFIDNINNYYSSAASKSALKVNQRAFLKENLLCLLFNFPVMFTRCVLYVSTKCLCICAFDLDGI

SEQ ID NO: 356037 - protein, 84 aa, Zea mays
  Clone ID: MRT4577_87877C.1.pep
GKDCLSHQSVSLPSDLQTRWGMSQPAQPGSLCPGRKCPHPPCPLWGGRASNALSLPPPPSCQAQVTGAAHASPSPAALGGPVPH

SEQ ID NO: 356038 - protein, 81 aa, Zea mays
  unsure (1)..(81): unsure at all Xaa locations
  Clone ID: MRT4577_87878C.1.pep
RATLCLPDSPGVPKGATYXTLTAPYNDGEAVEKLFEDNTEEIAAVFLEPDDGNAGLIPPQAGFLNALRDLTKQDGALLVFD

SEQ ID NO: 356039 - protein, 82 aa, Zea mays
  Clone ID: MRT4577_87879C.1.pep
PRPSDESSERPAQPECQHCLTSGACLYMTKCRHYHPRSRQTAPLTSRSELPLRLSLSKLINAAMHLLWTLMAFCTYGPTSHR

SEQ ID NO: 356040 - protein, 279 aa, Zea mays
  unsure (1)..(279): unsure at all Xaa locations
  Clone ID: MRT4577_8787C.1.pep
LLSAFLGDCLFSYPPPPLLPATTAAPRPSTRLPVPFPARLRPASLVARRLTAEAGEALSALSAAEGDDEYEAELQEEGFPSWAGGGEEEDYDHDPEIGDIMGDYFDDPKKGQTRVGMNGFPRLRSDEXWLSSSYSLASLTPSALVQMEDRIRKKRHKIVQTKTGSPNPMKVVFNKFDFSNSYIWFEFYNVLLPKDVTLISDSLRSWHIVGRLGGCNSMNMQLSQLPLDCKRLTYDALEGATVTPTSFYNIXGDLEIQDNLARVWVDIGIHEPLLLDSCL

SEQ ID NO: 356041 - protein, 44 aa, Zea mays
  Clone ID: MRT4577_87880C.1.pep
DAAVSCRRPTCTAGDRTGLPRARTCSVHYKCLLAKPRSMYIVVA

SEQ ID NO: 356042 - protein, 75 aa, Zea mays
  Clone ID: MRT4577_87881C.1.pep
GSPFCRLVRETLVELELPHLLHSCARGSLKRQEVFKKKGVFQAPYIEDPNTGVQMFESAEIIDYLKATYVLYQSS

SEQ ID NO: 356043 - protein, 81 aa, Zea mays
  unsure (1)..(81): unsure at all Xaa locations
  Clone ID: MRT4577_87882C.1.pep
RKAKQEQKRYRNLGNISRGGSGGSGNGVEKRNGPVPRSRLDPAKVLGKTLCPRIHEVPLLXPLLCKKIAQERLTVLLFLED

SEQ ID NO: 356044 - protein, 158 aa, Zea mays
  Clone ID: MRT4577_87883C.1.pep
GPVLAQCVSEPNGQGGLASSRRPQAEGRACPARRGTDRRSSLRAGATIACPAGSTVFACAQSQPFPASTALPLDCGVQHSGWLQPMLMSYDASMFVTCPDVGVRLARCPESQTRVKNAVDQACVARSCMQRRAYIKPVLLCLFVPKYVAHATFQMHRS

SEQ ID NO: 356045 - protein, 202 aa, Zea mays
  unsure (1)..(202): unsure at all Xaa locations
  Clone ID: MRT4577_87884C.1.pep
FLSMVANPASHITVIGXNLVTARAAARMGWHEAAVAIFAVGAAHYLVLFVTLYQRFLGSDSLPAMLRPVFFLFFAAPSMASLAWDAISASFDTCCKMLFFLSLFLFASLVSRPTLFKRSMRRFSVAWWAYSFPLTLLALASAEYAREVRQAAANALMLALAVLSVAVTLALMLFTALRTADLLPRDDPFDCPPQRPPRTSYA

SEQ ID NO: 356046 - protein, 83 aa, Zea mays
  Clone ID: MRT4577_87885C.1.pep
FLVLFFFCFFFSICILDPVLPLIGKRCESFFWLGDHSFFTKGPNVNTPRGSPFGGGGTGFRFSWAGTRECLLYVDPFLNGGTR

SEQ ID NO: 356047 - protein, 109 aa, Zea mays
  Clone ID: MRT4577_87886C.1.pep
FFFFFFFFFGFVFFFFFFFFFFFFFLKKKTVFYKTKGRGLSPVIPVGFPHIKILFGGKFPSPNIFSHLLFQKTNKRPLSPPAQLFLAHVRIFLCWQIPKLSNFCLTPFF

SEQ ID NO: 356048 - protein, 62 aa, Zea mays
  Clone ID: MRT4577_87887C.1.pep
RPDSGRRPFFFSIRFLALCLRHSTTGGDLQIYWQTNENPLIPGRATENAKNLNKWKNKPSQS

SEQ ID NO: 356049 - protein, 340 aa, Zea mays
  Clone ID: MRT4577_87888C.1.pep
VALGIRDLLGLFRTLGEDFRLSCLFKCQEALEVYRKLPESQFNTGWVLCQVGKAYFELVDYLEADHYFELAHRLSPCTLDGIDIYSTVLYHLNEEMRLSYLAQELISIDRLSPQAWCAVGNCFALRKDHETALKNFQRSVQLDSRFAYAHTLCGHEYSALEDYENSIKFYRCALQVDERHYNAWYGLGVVYLRQEKFEFAEHHFRRAFQINPRSSVLMCYLGMALHSLKRNEEALEMMEKAIAADKKNPLPKYQKSLILLGLMKYEEALDELERLKEIAPHESSMYALMGKIYKQLNILDKAVFCFGIALDLKPPAADLAIIKSAMEKVHLPDELMEDDL

SEQ ID NO: 356050 - protein, 161 aa, Zea mays
  unsure (1)..(161): unsure at all Xaa locations
  Clone ID: MRT4577_87889C.1.pep
MTIEQMFLMQTQAVQAIGQTLAAMQQQQQQXPQPQMPKDKRAEFMRGHPPVFAYSADSMDAEDWLCTVERELHIAQCNDREKVLYGPRLLRGAAQSWWESYLATHANPDTITWEEFRDNFRQYFPMACSGLVGGLHFLLGVISRHHFEWLGSNEAPGFDTN

SEQ ID NO: 356051 - protein, 105 aa, Zea mays
  Clone ID: MRT4577_8788C.1.pep
YLLTVAELKKKDRKFIPHISIATLYICSAHIVTPYCYYLYLSPSPSIASHYTYTLHDASKSPVQEKTELCVSPMSMKEEQSFWGIGGIKENIFILVCNVLAEHCR

SEQ ID NO: 356052 - protein, 265 aa, Zea mays
  unsure (1)..(265): unsure at all Xaa locations
  Clone ID: MRT4577_87890C.1.pep
MIRSNNHVKGKVLKLMFVFLQETDIGRQVNGLRKHPSAEVRRLVKQLIRKWKEIVDDWVRLDNSGGDGSASVMTADGDSPHKIQASASGTLQVSGFQYSPSPQRFSECHISSSTDIAFSFCIFSNAVVMYLWQYAXAAEILDGSTSEMANNGSESTMDAKRRASPVPAHHNSRQMNNNHHSTTTTTTTTTSSAPAKVTKEQKQSLVDLDRLDSARKRLQENYQEAQNAKKQRTIQVMDINDIPKPKSRNAFIRKSGSGGLPARHR

SEQ ID NO: 356053 - protein, 78 aa, Zea mays
  Clone ID: MRT4577_87891C.1.pep
FCLRSLLPSSPLGSSRGCCSPVPVLSAGSRWRCLPDQRPGARGSYLRCARPPWLARRSLSPPSRGRAWRPAVRRRLLP

SEQ ID NO: 356054 - protein, 289 aa, Zea mays
  Clone ID: MRT4577_87892C.1.pep
MEAAAAAFLSPPRVALDVRTLFSPPRCLPVSPSSQLRLAARPRALAGAKPRFLSPHREPAVDGGRGARDVVAMVVPFLRGAAWEQPPPDLASFLYKNRIVYLGMCLVPSVTELMLAEFLYLQYDDAEKPIYMYINSTGTTKNGEKLGYETEALAVYDAMRYVKVPIFTLCVGNAWGEAALLLAAGAKGNRAALPSSTIMIKQPIGRFQGQATDVDIARKEIRNVKIEMVKLLARHIGKPMEEIARDIRRPKYFSPSEAVDYGIIDKVIYNEKIQEDGGVVSELKRSNLI

SEQ ID NO: 356055 - protein, 95 aa, Zea mays
  Clone ID: MRT4577_87893C.1.pep
ERGWGFYSYKRVPKVPKGRERAPPYKTNRPGSIAPGTTFKKPKRQSPQNYSGRKHRVILQGDNWLPKTLLGRLEELGPHLPGNQKAKEFFSFHSF

SEQ ID NO: 356056 - protein, 83 aa, Zea mays
  unsure (1)..(83): unsure at all Xaa locations
  Clone ID: MRT4577_87894C.1.pep
MPPKLDPSXQVVEVFVRVTGGEVGAASSLAPKIGPLGLSPKKIGEDIAKETAKXDWKGLRVTVKLTVQNXQPKVSVVPSPPRS

SEQ ID NO: 356057 - protein, 111 aa, Zea mays
  Clone ID: MRT4577_87895C.1.pep
IENMTLPRKYVHVIDDIDSPSGGIVRINQIVFNCNNAQLMMVSETTYGWHYPNSKRTLNFIALHAIASRPHRISFTPVSLYIVTGRLSAIVPSCSLNYSSPPTDIKHKRKR

SEQ ID NO: 356058 - protein, 156 aa, Zea mays
  unsure (1)..(156): unsure at all Xaa locations
  Clone ID: MRT4577_87896C.1.pep
GTLGLGRGALTLAPLPSSTESYERSHAVLRDKRSTWFAPQSAVAVAVVAEGLLLAAVVTTSEADITCGQVSFVIAPCLSYARGTGSAPCAFCCIGVMNLKSAVSTDGNRRAGCNCLKNAVRGVRGLNAGNADSIHSKXGESIPYTISTYTDWSRVN

SEQ ID NO: 356059 - protein, 121 aa, Zea mays
  Clone ID: MRT4577_87897C.1.pep
MARTQSAVAVAVVAAVLLLAAEATTSEDAISCGKVSSAIAACLSYARGTGPGPSASCCIDVRNLKSAARTDVDRSAACNCLKKAARGASGLNASNAASIPSRGVDAIPYTISTSTDCCCVI

SEQ ID NO: 356060 - protein, 139 aa, Zea mays
  unsure (1)..(139): unsure at all Xaa locations
  Clone ID: MRT4577_87898C.1.pep
MDGLHTELALGLIGCGHGDLQTAPFVAKTYQMVCDPRTDALVRWGKGNNSFLVTDVAGFSQLLLPCFFKHGNFSSFVRQLNTYGFRKVHPDRWEFAHESFLRGQTHLLPRIVRRKKRGEGXGAGASCSSAVGGGEQHQH

SEQ ID NO: 356061 - protein, 122 aa, Zea mays
  unsure (1)..(122): unsure at all Xaa locations
  Clone ID: MRT4577_87899C.1.pep
MARTQFSVAVAVVAAVLLLAAAATTSEAAITCGLVSSAIAPCLSYARGTWSAPSVFCCSGVRNLKSAXSTAVDRRAAXCNCLKNADRGVSCLNAGIAVSIPSMSGVCILYIISIFIDCSRVY

SEQ ID NO: 356062 - protein, 58 aa, Zea mays
  Clone ID: MRT4577_8789C.1.pep
TFQLTVLDTQLPVKQAFKIMHDEVCMLLCLLELLQIVHFPSMVLVCSHFNFALFLISF

SEQ ID NO: 356063 - protein, 31 aa, Zea mays
  Clone ID: MRT4577_878C.1.pep
QAYSFNDSSRIKHQVDKSGKEPTLLTCLTSA

SEQ ID NO: 356064 - protein, 112 aa, Zea mays
  Clone ID: MRT4577_87900C.1.pep
IKNCKINHSVVGLRSCISEGAIIEDSLLMGADYYETEADKKLLAEKGGIPIGIGKNSCIRRAIIDKNARIGDNVKVFQTDVPTVKNINLDFSLGYYIILDMPFCPLIFNIYF

SEQ ID NO: 356065 - protein, 93 aa, Zea mays
  Clone ID: MRT4577_87901C.1.pep
SFHSPLSFGSSSLHLEEGLKPGRFRRASELRGVTAGARHRATRRESSAVTGCTLEPWRLLARSRLGLLDMEIRWSISQRVLQSQVRAPRPAPC

SEQ ID NO: 356066 - protein, 121 aa, Zea mays
  unsure (1)..(121): unsure at all Xaa locations
  Clone ID: MRT4577_87902C.1.pep
MARTQSAVAVALVAVVLLLAAAATTSEAAITCCQVSSAIAPCLSYARCTGSGPSSSCCSGVRNLKSASRTAADRRAACNCLKNAARGVSGLNAGNAGSIPSKCXCSIPYTISTCTDCSRVN

SEQ ID NO: 356067 - protein, 125 aa, Zea mays
  Clone ID: MRT4577_87903C.1.pep
VTDSVIGEGCVIKNCKIHHSVVGLRSCISEGAIIEDTLLMGADYYAETEADKKLLAENGGIPIGIGKNSHIRKAIIDKNARIGDNVKILNADNVQEAARETDGYFIKGGIVTVIKDALLPSGTVI

SEQ ID NO: 356068 - protein, 121 aa, Zea mays
  unsure (1)..(121): unsure at all Xaa locations
  Clone ID: MRT4577_87904C.1.pep
MARTQSAAAAAEAAAELLLAEAATTSEAAITCGQVSSAIAPWLSYARFTGXGPSASCCSGVRNLKSAASTADDRRAACNCLKNADRGVSGLNAGNAASIPSKCGVSIPYTISTSTDCSRVN

SEQ ID NO: 356069 - protein, 475 aa, Zea mays
  Clone ID: MRT4577_87905C.1.pep
MDMALASKASPPPWNATAAEQPIPKRDKAAANDSTYLNPQAHDSVLGIILGGGAGTRLYPLTKKRAKPAVPLGANYRLIDIPVSNCLNSNISKIYVLTQFNSASLNRHLSRAYGSNIGGYKNEGFVEVLAAQQSPDNPNWFQGTADAVRQYLWLFEEHNVMEFLILAGDHLYRMDYEKFIQAHRETNADITVAALPMDEKRATAFGLMKIDEEGRIIEFAEKPKGEQLKAMMVDTTILGLDDVRAKEMPYIASMGIYVFSKDVMLQLLREQFPEANDFGSEVIPGATSIGKRVQAYLYDGYWEDIGTIAAFYNANLGITKKPMPDFSFYDRFAPIYTQPRHLPPSKVLDADVTDSVIGEGCVIKNCKINHSVVGLRSCISEGAIIEDSLLMGADYYETEADKKLLAEKGGIPIGIGKNSCIRRAIIDKNARIGDNVKILNADNVQEAARETDGYFIKGGIVTVIKDALLPSGTVI

SEQ ID NO: 356070 - protein, 76 aa, Zea mays
  unsure (1)..(76): unsure at all Xaa locations
  Clone ID: MRT4577_87906C.1.pep
IWXRSLGIHXLVSSSXKSSXLHFPRKLTPQRRDMXSXASGAIXLGEYQXTQXXTSXSGVHIATAWRRTRRIPRPST

SEQ ID NO: 356071 - protein, 121 aa, Zea mays
  Clone ID: MRT4577_87907C.1.pep
MARTQSAVAVAVVAAVLLLAAAATTSEAAITCGQVSSAIAPCLSYARGTGSAPSASCCSGVRNLKSAASTAADRRAACNCLKNAARGVSGLNAGNAASIPSKCGVSIPYTISTSTDCSRVN

SEQ ID NO: 356072 - protein, 87 aa, Zea mays
  unsure (1)..(87): unsure at all Xaa locations
  Clone ID: MRT4577_87908C.1.pep
MVRTQSAVAVAVVAAVLLLSAPATTSEAAITCGQASSAIAPCLSYARRTADVPSASCCSGARNLXTAVSTAADSVAPCHCLMFAFRC

SEQ ID NO: 356073 - protein, 121 aa, Zea mays
  Clone ID: MRT4577_87909C.1.pep
MARTQSAVAVAVVAEVLLLAAAATTSEAAITCGQVSSAIARCLYYARGTVSGPSASCCSGVRNLKSADSTAADRRAACNCLKNADRGRSGLNAGNADSIPFKCGDSIPYTINTCTDCSRVN

SEQ ID NO: 356074 - protein, 85 aa, Zea mays
  Clone ID: MRT4577_8790C.1.pep
MCCCCGGDDRDHEHGCRPLGFLLGLPFALLAVLVSIVGAIIWIIGLPISCICPCCLCVTLLLEAAVELVKAPLHVMTWFTSKIPC

SEQ ID NO: 356075 - protein, 73 aa, Zea mays
  unsure (1)..(73): unsure at all Xaa locations
  Clone ID: MRT4577_87910C.1.pep
MALAHQATVHYHSFKLFITGHGGTGKTTSMKRHFTTDREKKYEPTIGEEQHSVKNTTKXGKIKIYCSDTGSQD

SEQ ID NO: 356076 - protein, 153 aa, Zea mays
  Clone ID: MRT4577_87911C.1.pep
MEEELSQMEPGAKVTLQRQASSGSLTQGPSGELRRQTSLESSPRSGRGGNRHLFGRQSSMDPNRRRGRSQSPVGSQADQDLAVPDNLDSTMQLLFLACQGDAPGVEALLRGGVDVNSINLDGRTALHVAACEGHREVVSVLLDWEANIDARDR

SEQ ID NO: 356077 - protein, 121 aa, Zea mays
  Clone ID: MRT4577_87912C.1.pep
MARTQSAVEVAVVAAPLLLAAAATTSEAAITCGDVSSAIAPCLSYARGRGFGASASCCSGVRNLKSADRTAADRRVACNCLKNAARGVSALNAEDAASIPSKCGVSIPYTISTSTDCSRVN

SEQ ID NO: 356078 - protein, 55 aa, Zea mays
  Clone ID: MRT4577_87913C.1.pep
KHAFCSQKLPISTNLCTKAFGVTLDRVLCSHTCPSISAAHNVCLHHSKASECFVI

SEQ ID NO: 356079 - protein, 111 aa, Zea mays
  Clone ID: MRT4577_87914C.1.pep
NFGENEVFFSGFQKGTRFPWDSLGKKRSTPFLFFSGLRGGPPFFWPPPLIFWPPPFGFWNSLLKPGCGFYWGPSRLFNFFWVSCLLFGLVGLNFLPPLIFFVLTPGGVFFP

SEQ ID NO: 356080 - protein, 52 aa, Zea mays
  unsure (1)..(52): unsure at all Xaa locations
  Clone ID: MRT4577_87915C.1.pep
GGPSLFFXCLAKPLKDNLYFVLYSPWGPYDGVAFFGPSSPFQAARACQNRSL

SEQ ID NO: 356081 - protein, 42 aa, Zea mays
  Clone ID: MRT4577_87916C.1.pep
MESTKVSALLALAMLALSSSPLALAWEKEEPERHSCEYGSPP

SEQ ID NO: 356082 - protein, 168 aa, Zea mays
  unsure (1)..(168): unsure at all Xaa locations
  Clone ID: MRT4577_87917C.1.pep
RPAGSLLPPPXPPNPGANPXPPPGTLPASPASPRRRPPRPPAPPPTPLAPPMPPPPXPRPDXQPPPSPMTQTPMPPPPRAWGRTLRPRTTRTSSTRPTRPVSASSSASPTSPRTHGTPSPAASSSAPSRASARSPRSPRTKPQAPESRPRPRCRWCLRLGARTRAQAA

SEQ ID NO: 356083 - protein, 207 aa, Zea mays
  unsure (1)..(207): unsure at all Xaa locations
  Clone ID: MRT4577_87918C.1.pep
GESPRRRRRGRRPREATASRRRRGGATGRATGERRAAAARRPTARASSRRRRSTTSNSNAPARSSSXPSSPRRRRRRRPPAAAAPVRARARAWPRPPSSARAQAAAPXRRRGHGRGPPRRRATPRGRRPCPGSACGTSRPLRRPRRGSRCSSRTXKRNREVARSGVPAVPRVPSPPEGAALRRARAHQKTPFVSKVFGCFLPTTAKG

SEQ ID NO: 356084 - protein, 51 aa, Zea mays
  unsure (1)..(51): unsure at all Xaa locations
  Clone ID: MRT4577_87919C.1.pep
CPKRFSPICIKKKKSRHSSRHHETXASIEAGAPSSTEVLYPFMQGHPWCLL

SEQ ID NO: 356085 - protein, 159 aa, Zea mays
  Clone ID: MRT4577_8791C.1.pep
MQEGKVVVYSSQKLKVHEKNYPTHDLELAAVVHALKTWRHYLYGQKCDIYTDHKRLKYIFTQFELNMRQRRWLQLIKDYELEIHYHPGKTNVVVDALSRKSQVNMLAAHPMLYELAKEFDRLSFRFLNNTQGVTVELEPTLKQDIRKGQKDDEKINEIR

SEQ ID NO: 356086 - protein, 148 aa, Zea mays
  Clone ID: MRT4577_87920C.1.pep
MHFLTLTTLLATASAVPTLYQRSPVGHAEPILITDYSVRKTNGTIQNVNFHIHGFQARNVSCAAGPILSLPSEAVTCGASNYRFVLSPLNGTDPNQYDLSVYHQTGFASGKYATGTVPTCCVAGGLGPQDLQCNQIRQLGPYKLTLRS

SEQ ID NO: 356087 - protein, 99 aa, Zea mays
  Clone ID: MRT4577_87921C.1.pep
PRRPVLPIQACIRTSATCSPEFFFSPSPFFPVQDGKGSAHQVGMMPAKRLFSLVKSHLPKDDYRPPVNGTRGLEAVSLCSSFLINFLKKKKKKEKKKKK

SEQ ID NO: 356088 - protein, 124 aa, Zea mays
  Clone ID: MRT4577_87922C.1.pep
MSVSMNMRQNSVSTPIRRTTNPFDSDSDSEVPSRPSRAQSAPTQHTNQSVQELEDYTLRKAEETSSKANDCVRGAEAIREDATQILLTLHRQGEQITHTHRVRADIEHDLTMSEKLLGKLGGIF

SEQ ID NO: 356089 - protein, 92 aa, Zea mays
  Clone ID: MRT4577_87923C.1.pep
LLGGSQARPRTCPGRGTVAGRDSGRLPSEGTRQVGSSHPLSGTAGYEARSTIWGRSAKESPLGRVGEQGKKEWNRRGGRWNCGRRKRAGIRA

SEQ ID NO: 356090 - protein, 61 aa, Zea mays
  Clone ID: MRT4577_87924C.1.pep
MGKIFYKAQYIFDLKELKGFQSLTRQNTPQSVLIPPNPYLLKITEQALSELIIVPLYALST

SEQ ID NO: 356091 - protein, 53 aa, Zea mays
  Clone ID: MRT4577_87925C.1.pep
KLLEVEEGVVNNAQEAEFLQKKVVEYHLEYITRPNRLFTLRHGCTFLLFQECI

SEQ ID NO: 356092 - protein, 63 aa, Zea mays
  Clone ID: MRT4577_87926C.1.pep
AHSVRQNGLNWFKGTIHRGHKSHYSLEYNFMLGLNRLNLLHVQTGAARIFDTLINRSAFRWVL

SEQ ID NO: 356093 - protein, 133 aa, Zea mays
  unsure (1)..(133): unsure at all Xaa locations
  Clone ID: MRT4577_87927C.1.pep
SRIPRADQRFDQSFGFITNRTLEIFPNLDGLARDIERSHPPLNLXRNFVNGTSPPGSVLGSVVHMKQENFDKVINPVSVAHFPKLQVXDLQLKKLEGIGFQTCFPSEIGNSTQDLVLESKILMGHKCTSLDQT

SEQ ID NO: 356094 - protein, 311 aa, Zea mays
  Clone ID: MRT4577_87928C.1.pep
MASSFNNKTSHWPSMFRSKHAAEPWQAQPDISSSPPSLLSGGGSSSTTTIGRCLKHPLSGYSGGEERTPDPKPRWNPRPEQIRILEAIFNSGMVNPPRDEIPRIRMRLQEYGQVGDANVFYWFQNRKSRSKNKLRTGQLGLGLARAPGCGAAAAPVTLQPLIPNQFQLLASPAQAPATSSSSGLTALPASTNAVIVNYDLLQGLVVPGSGSGAVVGVSTGGAPPAAVAAAPTAAQEGVAVALCITDSVTGKSVAHNVAAARLDVRAQFGEAAVLLRAVGDRGGLDLVPVPVDPLGCTVEPLQHGAFYYVLV

SEQ ID NO: 356095 - protein, 73 aa, Zea mays
  unsure (1)..(73): unsure at all Xaa locations
  Clone ID: MRT4577_87929C.1.pep
YYNXLXXXXNNTKXLYFILQSLHIIFVXFCYSLSFVQTWLVNXLPDRRRLGFGGAGRGGRRREEIVTGSSRGR

SEQ ID NO: 356096 - protein, 169 aa, Zea mays; identical to SEQ ID NO: 238747
  Clone ID: MRT4577_8792C.1.pep

SEQ ID NO: 356097 - protein, 181 aa, Zea mays
  unsure (1)..(181): unsure at all Xaa locations
  Clone ID: MRT4577_87930C.1.pep
MRWQAGDALPLPIRNTYLVFSALFASSMXYLMPRCSRKIRASWPLYWVSSAEIFSICGLVTSLIYLLIFFGIAFVQSVXSLSDXDEDFILHSXTSLTTASPTPALTSCALLRRPCGATNKMLXDYHDIMTSVVSWNIPSYVLKSMMPDCRRIAAISWKSLRRITGSXMDGLALCAFDYAYM

SEQ ID NO: 356098 - protein, 87 aa, Zea mays
  unsure (1)..(87): unsure at all Xaa locations
  Clone ID: MRT4577_87931C.1.pep
MAPPVDVAGLRPRLGDVEAPLKPRSSLSSVAEVESEPLGRXRRRPSAEARAESEHWGRAERSSSSSGSEPKSEPWVGRSGVRRLLGL

SEQ ID NO: 356099 - protein, 104 aa, Zea mays
  unsure (1)..(104): unsure at all Xaa locations
  Clone ID: MRT4577_87932C.1.pep
VLGLLVILFGYFECYYHNFCCLMFFFFFFFFLEPNPISHLYIVRNHPFHTPARSDPYQIHPASTSPTPPASPRTQPCRFAHAYLFKINWPRSYTSAQRRRCFXL

SEQ ID NO: 356100 - protein, 57 aa, Zea mays
  Clone ID: MRT4577_87933C.1.pep
MAETPHTDAVRVDIEEGRTMAYDNTPKAPFDATTPNPNSASYPYSSLDAPYNSSFYD

SEQ ID NO: 356101 - protein, 206 aa, Zea mays
  Clone ID: MRT4577_87934C.1.pep
NLILLNLGSNKLTGNIPHRITSCKSLVQLRLSDNSLTGSFSTDLCNLVNLTTIELARNKFNGPIPPQIGNCNALQRLNLANNYFTSELPREIGKLSKLVVFNISSNRLGGSIPLEIFNCTTLQRLDLSQNSFEGSLPNEVGRLPQLELLSFADNRLSGQMPPILGKLSHLTALQIGGNQFSGGIPKELGLLSSLQIAMNLSYNNLS

SEQ ID NO: 356102 - protein, 121 aa, Zea mays
  Clone ID: MRT4577_87935C.1.pep
SVLYQGRKFFWADRPRLDTVPLLELPPCASRAFCGLSVSQGVLKNCACPPSVRGRWFAWFASLAIPVGGWAHISCASGVAQGWCFSFFPCVVVEPGNVCACYFEDPRSHKKKKKKKKKKLK

SEQ ID NO: 356103 - protein, 88 aa, Zea mays
  Clone ID: MRT4577_87936C.1.pep
CIVGSAKESFIESGVRTHNTSYGVTCLVMVANHAAGRGSLFTAVAIIDGIWFGGAVGGGCLVITVVRVSPCIVGLSGKGGELDGAESG

SEQ ID NO: 356104 - protein, 169 aa, Zea mays
  Clone ID: MRT4577_87937C.1.pep
MAAASDSTHLPPSVNHDLDEMAAASDSTHLPPSVNHDLDEDDDDEEFDEDDDDLVDGTDDDGGEPLASSSEAARLEAVLRRLTADEVRIRVHQVTIRGCARTRRAAVEAAVGPDVSRAATVRDLVRAAAAAGDRLRCLGAFDTVSITLDAAPPGIPGSAVVVLIDVAEA

SEQ ID NO: 356105 - protein, 71 aa, Zea mays
  Clone ID: MRT4577_87938C.1.pep
SVPFGRFHKSGDDSTRSVYQYRVVMMRSPVSEVPSTPSVGKHLQLSEVISSQPAILMQQHHQYPIRQSSVR

SEQ ID NO: 356106 - protein, 134 aa, Zea mays
  Clone ID: MRT4577_87939C.1.pep
MLELGEIPKLSGEVRTCGTTAYVSQSAWIQSGKIQENILFGMEMDRDKYDRVLESCALKKDLENLPFGDQTVIGERGINLSGGQKQRIQIARALYQDADVYLFDDPFSAVDAHTGSHIFKECLLADLASKTVVY

SEQ ID NO: 356107 - protein, 59 aa, Zea mays
  unsure (1)..(59): unsure at all Xaa locations
  Clone ID: MRT4577_8793C.1.pep
MATKIFSLLMLLALSTCVAYATFFPKCSQAPIANLLPPXIHXIIASVXENPTLQXPYKL

SEQ ID NO: 356108 - protein, 63 aa, Zea mays
  Clone ID: MRT4577_87940C.1.pep
QVSIGPTLSTASKISPGQPVPRNKSAIGLARTATGPPPRYLMLTPEVIPAGLRRSGRRFPPPR

SEQ ID NO: 356109 - protein, 168 aa, Zea mays
  unsure (1)..(168): unsure at all Xaa locations
  Clone ID: MRT4577_87941C.1.pep
YPGRYFFHWSSNHLPGNQGYRRVSRSTAAPAPARQPAPQQRTSRARPRAAARTSAPPRPRRAPPARRRRRXPPATAAPAXTARPAPRRTPRTPCRRPLRARTRAPRLWRSYSGPRRTPAAARRPAGRQGHGWSRTSKLLPLPRRRPWLMSFREAGMERIERERASCRI

SEQ ID NO: 356110 - protein, 251 aa, Zea mays
  unsure (1)..(251): unsure at all Xaa locations
  Clone ID: MRT4577_87942C.1.pep
ADLDLVERIDGYFDVVYGTYEPKYLNWWKSKKDFVFSRQWFRGQDGAYTILQTPAGHNKRPPKHGYERTKINPLVETSELVTNSSPVTVDPSHFHGTLHRAKTQNDQNSWSAPGGEKFMIRGKTYLTDYHKVVGGDPLLELLAVDWFKVNERFDSVALHPKSLVQSEAAKKLPFILVINLQVPAKPNYNLVMYYAAERPVNKDSLLGRFIDGTNAYRDARFKLIPSIXEGYGMVKRAVGTKACLLGKAVTC

SEQ ID NO: 356111 - protein, 171 aa, Zea mays
  Clone ID: MRT4577_87943C.1.pep
WLLHKSRVIVVRDSIWCCEAKSAASDGSKDKLAEEEGNQITTASAISAAAKKLAECQETMANLSKQLHALESPANTYPSSDKEKRGTLPPSAEPDATEKKRHCEPDANATEKREHEQDSGRSPQPAKSAPTTLVVVRPTVPKSPRQSISVDTKKKKHRANLLSRLVFRKKG

SEQ ID NO: 356112 - protein, 176 aa, Zea mays
  unsure (1)..(176): unsure at all Xaa locations
  Clone ID: MRT4577_87944C.1.pep
IGYLEAGRDYLPIXSKVVGGDPLLELLAVDWFKVNERFDSVALHPKSLVQSEAAKKLPFILVINLQVPAKPNYNLVMYYAAERPVNKDSLLGRFIDGTDAYRDARFKLIPSIVEIDVDIGSSSVARSIIGLVLGYVTSIVVDLAILIEAKEEKELPEYILGTVRLNRVNPDSAVSI

SEQ ID NO: 356113 - protein, 767 aa, Zea mays
  unsure (1)..(767): unsure at all Xaa locations
  Clone ID: MRT4577_87945C.1.pep
MATAARLPTVPPSAAAGDVSEVELSEAGSPDLGSRSSGSGSGGSGRSTAEYSGWVYHLGVNSIGHEYCHLRFLVIRAKFVAMYKRDPHDNPGLEPIRKGAVSHTLMVEELGRRRVNHGDVYVLRLYNRLNQTKKGEIACATPGEARKWIEAFEQAKQQADYDLMRGXSTGTXLQNENEINLDGHRPRVRRYAQGLGKFVRIGKGPEMLLRQSSDLQGQEIVNTNFGGDTGDAFEAHEWRYVRTFNGIRIFEDISITNPKVGKVILLKSVGVVSANPDTVFEVVLDLDKHKRYEWDMLTADLELVERIDGYYDVVYGTYEPKYLNWWKSKKDFVFSRQWFRGQDGAYTILQTPAGHNKRPPKHGYERTKINPSTWEIRTLYTSGSSSPKCVVTLMLEIAPSFWGRWKRRHSNFDKSIPFALLSQVAGIREYFAANPALTSELPSTVVKSKASETLIIQSEHEDSELGDEFYDALTRGESFEDGDSDDDDDATTPKARKVKLKNVSWAIAGLALKTTKALVETSELVTNSSPVTVDPSHFHGTLHRAKTQNDQNSWSAPGGEKFMIRGKTYLTDYHKVVGGDPLLELLAVDWFKVNERFDSVALHPKSLVQSEAAKKLPFILVINLQVPAKPNYNLVMYYAAERPVNKDSLLGRFIDGTDAYRDARFKLIPSIVEGYWMVKRAVGTKACLLGKAVTCNYLRQDNFLEIDVDIGSSSVARSIIGLVLGYVTSIVVDLAILIEAKEEKELPEYILGTVRLNRVNPDSAVSI

SEQ ID NO: 356114 - protein, 125 aa, Zea mays
  unsure (1)..(125): unsure at all Xaa locations
  Clone ID: MRT4577_87946C.1.pep
YLLHEQDVLCAFLSRASPTPXVLVPCKQGLLAAVSLAPEKLSSYDRGIAPMGGAWPLYNKTMGDHAQVMMXYDVGSLFLYHCRDKSNGLXGVSVLITPFGCVHIVVCALVYAWXKAALKWCWCVY

SEQ ID NO: 356115 - protein, 92 aa, Zea mays
  Clone ID: MRT4577_87947C.1.pep
HQTHCRETPNPYKFVVDKLFLYRLFPACIVIIALQSMKAKSGDRKYPNGRDNSVAVASNVTIQDVCFKGGTLLKLYNRLCPFSECNIVEHLM

SEQ ID NO: 356116 - protein, 94 aa, Zea mays
  Clone ID: MRT4577_87948C.1.pep
RTMNAKSVDKIRRTPNKLVAPAEIQPPRIPPIGRTPMHSPPWQRLHAWCPRRGSQWQGRFMGSIYIWLGKHQVALLAKPNPRFPADLAATTEQG

SEQ ID NO: 356117 - protein, 59 aa, Zea mays
  unsure (1)..(59): unsure at all Xaa locations
  Clone ID: MRT4577_87949C.1.pep
MSGRLDVLQMNEEDVLKFLAAGTHLGATNLDFQMEQYIYQTASDGIXIINLNRTWEKLL

SEQ ID NO: 356118 - protein, 202 aa, Zea mays
  unsure (1)..(202): unsure at all Xaa locations
  Clone ID: MRT4577_8794C.1.pep
HTARLILSSCGKLGXLEEGLQAHAYMTKRGLASSACTNSYLIDMYSSVGSLRHASDAFNYMPAKDASSWTSIVAANVENGCPETAIRLFSQMEEKCRPTPEAFLSVLKACARTGLVSEAFSFFVSMTEVYKIQPSEEHYSHMIQVLSRAGMFKEAEHFIDSVVPSESGTSAWSLLSAAAQQNGNDKTVKLAGDRLARLPGGS

SEQ ID NO: 356119 - protein, 40 aa, Zea mays
  Clone ID: MRT4577_87950C.1.pep
KKQKKKKKKKIKKKKKKKKKREIKKNKKEKKKKKKKKTFF

SEQ ID NO: 356120 - protein, 74 aa, Zea mays
  Clone ID: MRT4577_87951C.1.pep
NYHAIVQSNILNCYPYKGSLLSFACLLCSNSYILIPKFNLLSFNLQFRNYANHIVFKQNRFNQHSIDHILHTNL

SEQ ID NO: 356121 - protein, 213 aa, Zea mays
  Clone ID: MRT4577_87952C.1.pep
MALATLLAHLTAGRFGRVLALTSGGAPTASAAHRVLHLLLRTSPPPPLPRLVAIARWSRAHFRAPLPLRLHALLLARLASDGGLHSLLRSELHVLAAGRLHSPASILRALPASSGPLVADMLVLALARASQPLAAYEAFLLAGADCPRYRPSAFSVNALLAALVRADRVDLADRAFRAALRRRVSPDLFTFNIVISGFCKTGQLRKAGDVAKN

SEQ ID NO: 356122 - protein, 91 aa, Zea mays
  Clone ID: MRT4577_87953C.1.pep
QVTSTQLNIKFFCCIIILSTESLLHYFSNLLLISSCNRLNLDHLSLSTNSTCNSCCRCILPKLRRLNTKALLHAHEASSRWGLLVDTACQL

SEQ ID NO: 356123 - protein, 49 aa, Zea mays
  Clone ID: MRT4577_87954C.1.pep
RPTLTVAHTGNGSTSDSANVAAKADVELHYYSLGPLTDKASKGSTTSLV

SEQ ID NO: 356124 - protein, 166 aa, Zea mays
  Clone ID: MRT4577_87955C.1.pep
PPLLPPFHADEFINGLAARGPGKFLSKRMRSNWLDLYRRFLEGPNFMPWFRQRRAAAEQEQQRLWRQARMNVDIEKLMSNMSEIERIDSFDAVERYLLREMENPGKGSADSIGACQKLKVDLQAAFNVLPKDLQQLLLSNPKRAVLLQGSQEKALGANGIGTQTSL

SEQ ID NO: 356125 - protein, 96 aa, Zea mays
  unsure (1)..(96): unsure at all Xaa locations
  Clone ID: MRT4577_87956C.1.pep
FPRASTRCFPCAWNATMARHRVAPLSKSHGKHTAKAPESCPTGHAILLPVTLCCITSFSLDECSGFSAALGSRGXXXWGLVFPPETVFSVPSRVGQ

SEQ ID NO: 356126 - protein, 116 aa, Zea mays
  Clone ID: MRT4577_87957C.1.pep
MVATATPSTGPPSSWLHELMVLYKRAWKVVYRSKQLLLTNFLEAVLVGTLLGTIYIHAGYGEAGAHKRLGLFAFTLTFLLTSTTETLPTFVTERPIVLAETAAGLYRLSSHAAAGT

SEQ ID NO: 356127 - protein, 161 aa, Zea mays
  unsure (1)..(161): unsure at all Xaa locations
  Clone ID: MRT4577_87958C.1.pep
LEAGRGSFSRCPVQFHQPAPLLLIPLLAGCSAVSLSCKAEKKLSHAMKEIKVLEAVXLNISVRDRDCRLXRIVEALEQLSVHAPHVSNDSTLIVSLSVRRLQKLVXVLCEGIECIALLXMGLNVTAHVLVTMNFNVTPCFGSGIHEHIDLGMKYDXSNGIY

SEQ ID NO: 356128 - protein, 171 aa, Zea mays
  Clone ID: MRT4577_87959C.1.pep
PRVRPDNPSAGAAYAAMFFVFGFVSPWCPASTNNPIFAEIVPEKARTTVYAMDRCFESVWASFAPPLVGILAERVFGYQPASSGTSVEADRENAAALGKAVFAEIAVPVAVCCLTYTALYWTYPADRRHAQMAALQAAAGDQDCDCEATSVAHAAGAEGLNQALLAGTRTE

SEQ ID NO: 356129 - protein, 91 aa, Zea mays
  unsure (1)..(91): unsure at all Xaa locations
  Clone ID: MRT4577_8795C.1.pep
GAGQEPALRLTETCASRIRANAVTQSIAMHWTSNDIIDLSLLNVDSNFGIRNVYLXYASACTLACPDIAHNVVETNGISLVEIDKDLIRTD

SEQ ID NO: 356130 - protein, 73 aa, Zea mays
  Clone ID: MRT4577_87960C.1.pep
MSTEEAVVAEVPVTEVPADVPADQVAEAPKANKAPKENKAPKDKNLSAANIPAAQPPYAEIIVQAIAALKERK

SEQ ID NO: 356131 - protein, 90 aa, Zea mays
  Clone ID: MRT4577_87961C.1.pep
QRRVLFFFFFFFLPCQHRATQHACPHSLIQIQASPKASYHISIREKIRVQDQSKLNKSTSQIPRTLRCYHCLRGGCGDMHDSAGRSCFFL

SEQ ID NO: 356132 - protein, 86 aa, Zea mays
  unsure (1)..(86): unsure at all Xaa locations
  Clone ID: MRT4577_87962C.1.pep
PRATACFCVPKRRRPPWTRLPPVTMLFNGVQMSVAWDSFLYMVPGXSSGXSVVWCLTFGNPHMVPLTAHVFGLLHQMNLWEKNDLE

SEQ ID NO: 356133 - protein, 91 aa, Zea mays
  Clone ID: MRT4577_87963C.1.pep
TSVTMSMHWPERKTMVERRARQISTDGAQQSPSGCNGNRRNAVQRQFLATSHQTKSCDVVIHDRCNQPLTITTRPWLLASCCPHPYLSSLL

SEQ ID NO: 356134 - protein, 93 aa, Zea mays
  Clone ID: MRT4577_87964C.1.pep
PPQDSWKTKSFIFPRLIKESSGGSHGFSGTATICMAPKELIPDGESRSESCFPPHIISIYDKQEPNPPGAGFPREGASVIKMIHQIGVIQCPI

SEQ ID NO: 356135 - protein, 101 aa, Zea mays
  Clone ID: MRT4577_87965C.1.pep
TFLDASTLSAFTQASRYFKAVATPILYRSIEVPSSTEGYLNGQNAMARLIRTLVHQPSLARHIHSIDNLPVTLHPGFVTLLFAPAFGTDPSPGPRTQLNLL

SEQ ID NO: 356136 - protein, 74 aa, Zea mays
  unsure (1)..(74): unsure at all Xaa locations
  Clone ID: MRT4577_87966C.1.pep
SSGNNAEDFFFFFFFFFXXGKPSVRNRLLAVIWPGDAIPTQRIFIFLVLVKKEWETNERSRNQRVSRAKREKDD

SEQ ID NO: 356137 - protein, 121 aa, Zea mays
  Clone ID: MRT4577_87967C.1.pep
MEHRVSPDKEDTFVLLQNAAYGHYLSLIEKETYEQEMVRKHGSRVMDHNMLPPVIPAPGETSGQEGATTHEIPNQIDDFVNNFFASGGSGHNSPICDDLTLVVNLACCDGFVMNYDGFLLL

SEQ ID NO: 356138 - protein, 88 aa, Zea mays
  Clone ID: MRT4577_87968C.1.pep
MVAKKGAAEVSKLLPDSVMLMGIDNNDLFVFAAAELLRGRLAAGQNSDPHVLLIDLLSNYLADIMDLHSIASRQFVFIFLTLVECVPF

SEQ ID NO: 356139 - protein, 252 aa, Zea mays
  unsure (1)..(252): unsure at all Xaa locations
  Clone ID: MRT4577_87969C.1.pep
MSSIARSLRPLARAATASSRRSLRPAVSRATPQIRCLSSTSPRRDAAVDISDIPPTPITHLSETEAMMGEAVAKFASEVILPKAREMDEAETMDPAVVEQLFEQGLMGIEIPEEYGGSGMNFTSAIIAIEELARVDPSVSVMCDVHNTLVNTAILKWGSEAIKKKYLPKLASSTVGSFCLSEAXSGSDAFALATKATRTASGGYXIRGXKMWITNSXEADFFIVFANLAPEKKYKGITXFXIVEKGTKGFSI

SEQ ID NO: 356140 - protein, 61 aa, Zea mays
  Clone ID: MRT4577_8796C.1.pep
QVSDEAMWHHSIVTHTINTMYQHDWHLISTNMAMEGLMNDEVLSTTYLNAEVLLRPQDVNG

SEQ ID NO: 356141 - protein, 51 aa, Zea mays
  Clone ID: MRT4577_87970C.1.pep
GPTTTTTPYLLHRLRLPHCSSTLQHNDHYLRYNHMHHPHLSPDPSDGDSTP

SEQ ID NO: 356142 - protein, 88 aa, Zea mays
  Clone ID: MRT4577_87971C.1.pep
LFLNASFFPVPVVGEASTFYALYSFNPVYIRTSPFRTPIHALNKLPILKHLNCTCLQLTWHSFCALSSGHPLSFSQCVFCISCMKRHH

SEQ ID NO: 356143 - protein, 97 aa, Zea mays
  Clone ID: MRT4577_87972C.1.pep
KHIGSQHQKSSPNNKNKTKYKKTTKKKNQKKNQKKKKGPPPPTNPFTPELNPAPIPSAFQISPIVSLFKPYLNHGQNCSPGKIAIRSHSHTTYNPKP

SEQ ID NO: 356144 - protein, 210 aa, Zea mays
  Clone ID: MRT4577_87973C.1.pep
MKALILVGGFGTRLRPLTLSFPKPLVDFANKPMILHQIEALKDVGVTEVILAINYRPEVMINFLKDFEDKLGITITCSQETEPLGTAGPLALARDKLVDGSGEPFFVLNSDVISEYPFAELIQFHKSHGGEATIMVTKVDEPSKYGVVVMEDTTGVVERFVEKPKIFVGNKINAGIYLLNPSVLDRIELKPTSIEKEVFPRIAADQKLYA

SEQ ID NO: 356145 - protein, 51 aa, Zea mays
  Clone ID: MRT4577_87974C.1.pep
VMLIFLQDAIGRKGTTSGEVREHTCLVESLCAVKVFKAHVIDAIVGGMLTI

SEQ ID NO: 356146 - protein, 75 aa, Zea mays
  unsure (1)..(75): unsure at all Xaa locations
  Clone ID: MRT4577_87975C.1.pep
LLAGCPTILLAGQFKMDSQIPEFSLKYLYXGRLQIGRGVVKYPXETHFKDSPIGPYIFYQLAQWPEAYKGGAFSY

SEQ ID NO: 356147 - protein, 72 aa, Zea mays
  Clone ID: MRT4577_87976C.1.pep
WAVSTALIVKKETKKKMGLQRGAKESKMETGAFFYLFVIKFETSCALSRPHNDLLKLQNCDQKGITMTLVGF

SEQ ID NO: 356148 - protein, 90 aa, Zea mays
  unsure (1)..(90): unsure at all Xaa locations
  Clone ID: MRT4577_87977C.1.pep
YSTRTPLGVLQHVSTCNTCGGTDEYSTPRNTCSNDGRMRRTKTISVKVTAGADSERTLRCLXEANAGRRGSPTADLYVWIDVVSDSVLKR

SEQ ID NO: 356149 - protein, 445 aa, Zea mays
  Clone ID: MRT4577_87978C.1.pep
MGRRLSATAAAAAASAEPLLPPALKRGVLIERCASHADDELQWFRSCLRWVCMDHSGPGQAALSWLLFLVLAAIVPAAAHFLLAFRASRRPFSAVVQLSLSAASAAGFLCLSSSFRRVGLRRLLHLDKLRSKSDRVRASYTARLAFSFRLLASLVAPCFAAEAAYKAWWYATSADRVPFFANDVLSDVLVCSLEMASWMYRSAIYLLTCVLFRLICHLQGLRLEDFAGSLLEEVEEGRAGVDAVLREHLDIRKQLKVISHRFRKFIVAALLIATASQFASVLLTTRRDSVDDLLNTGELALCSVVLMSGLIIILSSAAKITHQAQALTGHTTKWHACCTIEPVLEEGEPGSNQNSMIDQEPESDSDTEDSEETGDEDLLENTKIHMPHAHVISFQKRQALVTYLENNRAGITVFGFTLDRSYLHTIFMLEWTLFLWLLGKTIGFS

SEQ ID NO: 356150 - protein, 240 aa, Zea mays
  unsure (1)..(240): unsure at all Xaa locations
  Clone ID: MRT4577_87979C.1.pep
VPRGRPGPFFLPRPSPTRQPNLLRRRASSLEVKASGNVFGNYFQVATYGESHGGGVGCVISGCPPRIPLTEADMQVELDRRRPGQSRITTPRKETDTCKILSGTHDGMTTGTPIHVFVPNTDQRGGDYSEMSKAYRPSHADATYDFKYGVRAVXXXGGRSSARETIGRVAAGALAKKILKLXXGVEIXGXVSKVHQVVLPEDAVDYETVTLEHIESTIVRCPDPXYAEKMIAAIDTVRVR

SEQ ID NO: 356151 - protein, 78 aa, Zea mays
  Clone ID: MRT4577_8797C.1.pep
HTWHDTLFLIIASTGETRRGPHLILVRTMAALDILASLGESSSSWPCCNNCCACNTKHPPECQCNDMSVNGCHPECMN

SEQ ID NO: 356152 - protein, 131 aa, Zea mays
  Clone ID: MRT4577_87980C.1.pep
TYNISSSPPTNYPQPHVSVAVGLIPATVVLSPLSPHLLTARSTSTRAPLSRRRLLPGTYRPTAVPPAVRLPTSCPTATTDLSAATPPHRPPPPHATKNHAAREARKEARIGHCSLGTRSDDARGPKDHPRP

SEQ ID NO: 356153 - protein, 440 aa, Zea mays
  Clone ID: MRT4577_87981C.1.pep
MAAPVSQPPVSARASTRFLPRGIGALPESAPTSLRLSVGRRRRAASLEVKASGNVFGNYFQVATYGESHGGGVGCVISGCPPRIPLTEADMQVELDRRRPGQSRITTPRKETDTCKILSGTHDGMTTGTPIHVFVPNTDQRGGDYSEMSKAYRPSHADATYDFKYGVRAVQGGGRSSARETIGRVAAGALAKKILKLKSGVEILAFVSKVHQVVLPEDAVDYETVTLEHIESNIVRCPDPEYAEKMIAAIDTVRVRGDSIGGVVTCIARNVPRGLGSPVFDKLEAELAKAMLSLPASKGFEIGSGFAGTDFTGSEHNDEFYMDEAGNVRTRTNRSGGVQGGISNGEIIYFKVAFKPTATIGKKQNTVSREHEDVELLARGRHDPCVVPRAVPMVESMAALVLMDQLMAHIAQCEMFPLNLALQEPIGSASSASELSPNLS

SEQ ID NO: 356154 - protein, 69 aa, Zea mays
  Clone ID: MRT4577_87982C.1.pep
SFLITPKRRQCPSQVSVLIQRIPSDLKAAARHQQFDPAKEPSQALKVIHCVLLSLAPLSPRFMRVDLMV

SEQ ID NO: 356155 - protein, 121 aa, Zea mays
  Clone ID: MRT4577_87983C.1.pep
KRRPFLHEIPSSYLFRPIPTLFQESLIVSSAFFSPICCGFTPAPLHQRLPLLPSSLNLPNPASSACALDGWIPFVPSHTKSDRSATRTSGGEQPRHGSCPAAAATGTAQFESSAGSTLEPQ

SEQ ID NO: 356156 - protein, 113 aa, Zea mays
  Clone ID: MRT4577_87984C.1.pep
PKLLGFPTTCPLEGGPFFHPNRRSRIHHPCCGCTNGVFPNPPPWGAPPYNYLSKKGLYKNQQLSVEGPPIKRAPFFVSKRGENKDKVSAQKEKASQQIKTYISKKKKKKKKWI

SEQ ID NO: 356157 - protein, 55 aa, Zea mays
  Clone ID: MRT4577_87985C.1.pep
RNSARAGVKAPFFKAMAFKGFWESRFGVMREPQPNHNGHSNSVHNQTRTFDLARY

SEQ ID NO: 356158 - protein, 113 aa, Zea mays
  Clone ID: MRT4577_87986C.1.pep
GRDTMKVSGTIQSILTNAPHRKRCNQPTNSMHGGHECCFMGRLAPSIGVRVQYGHSDHNEYHQELGDNSAAGGYHPSSGDTGEPHEHADTPNHRGKGDISHLTDLLDRRLRAC

SEQ ID NO: 356159 - protein, 85 aa, Zea mays
  Clone ID: MRT4577_87987C.1.pep
EAAHDESLGAFYMRYGGLPTHRSVKPYQCFIHTHRCPQTWPSPYTSIHMVRPLLLCKLPGSQFSPPDLNLCLLKQLLRPAYPPGG

SEQ ID NO: 356160 - protein, 92 aa, Zea mays
  Clone ID: MRT4577_87988C.1.pep
NGFAFLFLENEFSNSDFPSLSGRATSGTSMSNIFPHPLFSEPTRVPPARSYTGFPFQDSLNPTPGLPSGILPQDGPIHLSRLLSFASLVSAH

SEQ ID NO: 356161 - protein, 121 aa, Zea mays
  unsure (1)..(121): unsure at all Xaa locations
  Clone ID: MRT4577_87989C.1.pep
RGLLYEYYGESWRALQVPESEXRPGRRATRSEAGGEVTDPSQRDAQMTEARRTRTCREGCHRHIVDGAVAVKPGVRGGHXNVRSSDARVDGKGSRRRGCQGCYLYSCCCCLRSGAGDLFGG

SEQ ID NO: 356162 - protein, 937 aa, Zea mays
  Clone ID: MRT4577_8798C.1.pep
MATPGRLMRHGGELFSTQPETSVLAQRLPLVTRGTPVSRYQQWPRAHLRGGCKPAGGAKTRILRKHNMTGDRGIFLARGVLTQRAYAVSLLLVTPTVVPIFAADWCMAPTHGVVLLSHFRQLLRPFASEPATPLRVRAPQFSAAVVAMAMLVRPNHYQIEEALDTVHRLLGWGTPAFARRIRAGTTPLGDLAAGEFVLFVSYHFCGLALPISPFFLLLLEEFGLQLQHLTPHSILQVAIFVHFCEMFVGVAACTSLFYQFFVLTRTNPTVTYIASLGGARWENWRNDWVIASAEVNDRLALPSDGPKLDRKQWRVKPCIVPEFGPVLDRIKELAVGGLTSLHVLGDFLKRQVMAQQGRPRLCCWFTGPSDIGRIQRGPRTDLYWGAVGNFGLQSTVLARLPTLDESGVAIRQTGGRDPDQGIHIPGAPAGGPQPTDVGPRAPLAAPSSSDKGKGPASNSSTLCVAGRSEEKTAGGTKEAEPRVQDGQRGASPPPPLLSNPAPPPPSSVSDRPPSPWGKRQQQQERQQQQQRQRAPRFQGHWKVHGPKASPSSAPVDAPPMPAAMPTGGSGSQQYTSAGNVVGDPLVATTASSASAPSPPSVAVEEVPVAFASTMRGDAGAEVAPSAPQDPPVTVEATPLGPQVPTRGPEVAMPPTATADLTAAIPLNTPSAKRTKAASCQFASERAELEQEREDFKEDIWKVSDREQEVTQKEKSLVKKKEHLDQREEAVIALHDKMKAYNTVLEKQRDKLAAAEAKLQQELADKARSIARTEESLKARETSLEKRASDLTWQEEDLAFREEMWARRNKLLDELELEAEEKGKRLEGKCGQWRSSPIPALVRPTSISDALPVLDFAADRLRRMDQILGARLETEGSRLCRSAIEYVLTCFRSHDPAVSLGPVIAGPVADAEDAAREGVQDVVDVVVRRFQRDPTDDE

SEQ ID NO: 356163 - protein, 146 aa, Zea mays
  Clone ID: MRT4577_87990C.1.pep
MVEEEITEGLKNLTVTGDAAASGGEGQRRGGGISSNRIQVSNTKKPLFFYVNLAKRYMQQHGDVELSALGMAIATVVTVAEILKNNGFAVEKKIRTSTVDINDESRGRPFQKAKIEIILGKSDRFDELMAAAAEERGEVEEGEEQA

SEQ ID NO: 356164 - protein, 51 aa, Zea mays
  Clone ID: MRT4577_87991C.1.pep
ACHSLLITNLRQLGGSFSFDLSQLTRLSCYVAFNEIDKLPPRVASSFYCGR

SEQ ID NO: 356165 - protein, 44 aa, Zea mays
  Clone ID: MRT4577_87992C.1.pep
FICTNVILHYGGGAIGPGGEIHSINAERGGTEERFLKQQQINHQ

SEQ ID NO: 356166 - protein, 112 aa, Zea mays
  unsure (1)..(112): unsure at all Xaa locations
  Clone ID: MRT4577_87993C.1.pep
CLILSPAIATVVTVAEILKNNGFAVEKXALGPSLSCRLCLIYIMAPMIHTFAALILPIEIRTSTVDINDESRGRPFQKAKIEIILGKSDRFDELMAAAAEKRGEVEEGEEQA

SEQ ID NO: 356167 - protein, 73 aa, Zea mays
  unsure (1)..(73): unsure at all Xaa locations
  Clone ID: MRT4577_87994C.1.pep
IXARGCRCMRGGSNTVRHGDQHVATALLGAAGALCHYSDTMSVPSVLTPLCDHHSESDSLGGYASTFFLLLTT

SEQ ID NO: 356168 - protein, 128 aa, Zea mays
  unsure (1)..(128): unsure at all Xaa locations
  Clone ID: MRT4577_87995C.1.pep
RPREKSKERLVGSTHPXSLQPMLMWKSPRXTALLVKKXGDDLIGQSGKVASLLHHQEXMSVLWDHADDDTRAXLPDHGLRQTFYLXDTRDLDKRVHCEKCLPEDEVIVRAXNLFKTCLPPGVSFNFGS

SEQ ID NO: 356169 - protein, 71 aa, Zea mays
  unsure (1)..(71): unsure at all Xaa locations
  Clone ID: MRT4577_87996C.1.pep
NAPFGKQRLVAPLLKEPGPPAGVVNAPHAGPGENKKVGKKKVREEASNSNGGSRRTGXHGAVCVCVPSFVV

SEQ ID NO: 356170 - protein, 105 aa, Zea mays
  Clone ID: MRT4577_87997C.1.pep
KTGLFPRKGFWPIPKKRELGKFLSGVPLAQGGVPPKINRGFLPKKPLKKGGPKKANSPKKAVNSPKKEKRGPFPPVILKAGVKKIFTLEGGGLFLNRVRKFGHWG

SEQ ID NO: 356171 - protein, 49 aa, Zea mays
  unsure (1)..(49): unsure at all Xaa locations
  Clone ID: MRT4577_87998C.1.pep
VNGKKKKNSIVHILILLXARDGEPYNFKIHNLPQKTNGHHILIFFRFPT

SEQ ID NO: 356172 - protein, 42 aa, Zea mays
  unsure (1)..(42): unsure at all Xaa locations
  Clone ID: MRT4577_87999C.1.pep
APKKXWVLRNQNFILMHYYWSYHTMISVGRRTAPSYGLVRDL

SEQ ID NO: 356173 - protein, 80 aa, Zea mays
  Clone ID: MRT4577_8799C.1.pep
WERPNCSPFLRLARNFVYPRGSVSGKFKAQILGLQKKEVGGAHRTPGQWKKKPPCSFPLPQFHCKLVKDELGHIFFCFQP

SEQ ID NO: 356174 - protein, 39 aa, Zea mays
  Clone ID: MRT4577_879C.1.pep
ITYIFFIYFSCFNIISVLSLIFFNTHNHTYFFILLLLYY

SEQ ID NO: 356175 - protein, 194 aa, Zea mays
  Clone ID: MRT4577_87C.1.pep
MDTDMDEFSNPGCGGTGGAGCDCRDCEDYWNHDHGHAKQFLLFASDHKDFLCIPWEVRRQLRNVITDGGPIKLEAPDGQMHSVKFVKFGLITLTTGWRRFVNANRIRRGDPILFVYCGSSTFKVHICSSSSHKNSLPCSQQPPNILRAVPPHDRHVLNEQMVPGPAHVGYTISLGTWLTKEQKKKVLELADSSM

SEQ ID NO: 356176 - protein, 97 aa, Zea mays
  unsure (1)..(97): unsure at all Xaa locations
  Clone ID: MRT4577_88000C.1.pep
SPSPPLSCLVASLFACRGCPRELSAAGMCAGGGVSPPAAEFSSPAGAPLWQVGRSSCAVRASILGAPSPSPGSSRVARCSRAALAPGSELRXRACAV

SEQ ID NO: 356177 - protein, 105 aa, Zea mays
  Clone ID: MRT4577_88001C.1.pep
ARRLPIFSRHGFLQPPPYRGCARAPQRMSFCGEPGRWLLRPIPRGSTLIGRPREESCTTHFLLKAPCHHLIALDKDKLHNTMLADNNHGKRDQRDVPNTLRACPS

SEQ ID NO: 356178 - protein, 109 aa, Zea mays
  Clone ID: MRT4577_88002C.1.pep
HHLKLFSFNSYFMFANATMSFEKIISSYPGPLSLVSILVSVAGCYISSLVISVGSVIINLISALLFPDVMEMEVRFQMSIRWFCSVLIHTSKRDITKEEFCRTIGRLII

SEQ ID NO: 356179 - protein, 57 aa, Zea mays
  unsure (1)..(57): unsure at all Xaa locations
  Clone ID: MRT4577_88003C.1.pep
HRCVFGLLRQSVQLTAYATVCRXNFYTTCFFAFDNLGRPVPSVFIKCQRXNGCVLRR

SEQ ID NO: 356180 - protein, 59 aa, Zea mays
  Clone ID: MRT4577_88004C.1.pep
LERLRRCRSISQNDSTRARAAARLLLYSTKAKPSLLRTKIGTGPSEGPYEALVLSHHDR

SEQ ID NO: 356181 - protein, 86 aa, Zea mays
  Clone ID: MRT4577_88006C.1.pep
LCVCVSAWCRCSDEVNPRKQPYKFSNQKLRDLGLQFRPVSQSLYDTVKNLQEKGHLPVLGERTTTEAADKDAPAAEMQQGGIAIRA

SEQ ID NO: 356182 - protein, 81 aa, Zea mays
  Clone ID: MRT4577_88007C.1.pep
RRRVMLIHVLPRPGHLPPPSIAAAAQSRRSTLLPPLLRPQCTSTSTTSHAQLLLYWFDSASSIRDQVHGMEYGSGAHEYTH

SEQ ID NO: 356183 - protein, 47 aa, Zea mays
  Clone ID: MRT4577_88008C.1.pep
IEKDNTCYGWHNCRAGHRHQCVPKNIGWKDLSLMANTRPRSPGFMYT

SEQ ID NO: 356184 - protein, 51 aa, Zea mays
  unsure (1)..(51): unsure at all Xaa locations
  Clone ID: MRT4577_88009C.1.pep
YETGTXIKKKKXIRYNSXVRSENXXRQHKCSYNFKAGXRVGYLTNTGIXKX

SEQ ID NO: 356185 - protein, 65 aa, Zea mays
  Clone ID: MRT4577_8800C.1.pep
GDPRVRINKAFFKNIPEKYSFKRCDVTLFNDPHTFYTILTIVSICRSDSFFDAFYLYIYLFFYLY

SEQ ID NO: 356186 - protein, 266 aa, Zea mays
  unsure (1)..(266): unsure at all Xaa locations
  Clone ID: MRT4577_88010C.1.pep
MAAMLVRSPPSLLLLVAVIALCASSSCVLVVPAAATMAENAVQQPAMPSSPQQPGLAATTAGQTTTATPDASSSTSAAVAALPPSSATTPSAPSGTATAATAPKKFPQPTPGGVGGGPYQQPGGVGGPYQPGGVGEPYQPGGGGHGEXPARGGGGLGAAGADARRXPSGASLGFGSNGGLGFGGPGDECCGGPGGYGWFGGPGGFGPGTYGYSGPLYXGGGAGSGGVLWTRHQRPAASRRGLCFFMRFRLAFTVLFLLLWRPIARL

SEQ ID NO: 356187 - protein, 175 aa, Zea mays
  unsure (1)..(175): unsure at all Xaa locations
  Clone ID: MRT4577_88011C.1.pep
SFFFFFFFFLWFFFFFSLFPPNTHVYFYPRRPKNKEPPTKMTQGPPPPHAPKKKRKKAPPPPLALQPXKITRGPPPKKGRALQPPAPPVKKXGPVQHPPETPPKPXPVGTPRAPPPRGGPPGGGPTHPASKGPPFGGGDQSTGQQKKPPITTPNRGPAQRPRAPRPRPPTARGPP

SEQ ID NO: 356188 - protein, 75 aa, Zea mays
  Clone ID: MRT4577_88012C.1.pep
MEAAADALPWAAQCAGMALLASSLCVVALALVLLLLRRWPWCSCHVCRAYLTGSWARDFTNLGDWHAHLLRESPT

SEQ ID NO: 356189 - protein, 223 aa, Zea mays
  unsure (1)..(223): unsure at all Xaa locations
  Clone ID: MRT4577_88013C.1.pep
HXLAYLHTGYDFPIVHCDVKPSNVLLDSDWEARVSDFGIARMLGVHLTDAAAQSATSSAFRGTIGYMAPEFAYMRTVSAKVDVFSFGVLMMELFTKRRPTGMIEEEGVPLTLQQYVDNAISRGLDGVLVVLDPDLKVVTEGDLSTVADVLSLALSCAASDPADRPDMDSVLSALLKMSKVCGRDRCLLQKRELKFVLQDLFKQRENPASDEYHPDAGRDAKVS

SEQ ID NO: 356190 - protein, 166 aa, Zea mays
  unsure (1)..(166): unsure at all Xaa locations
  Clone ID: MRT4577_88014C.1.pep
LPSQIAPACEKPALEHYTLQQEMAARNKLSSPLHVQQSADLSSAPXIVXTITAQHQHHLELHXINRXVWKTLCAYCQEQQCVAFNQLLTLNPDAYLHQQLLHXSQLGTAYCQQQQLLAFNQLDALNADAYLQEQILLPSRQLAAANRACFLTQQQLLPFYQQFAAN

SEQ ID NO: 356191 - protein, 53 aa, Zea mays
  Clone ID: MRT4577_88015C.1.pep
SINSLSTCARQFFAIPGGVCYNDDSDSDHEPDLMRHWSLEDVSWEEILDRQMK

SEQ ID NO: 356192 - protein, 41 aa, Zea mays
  Clone ID: MRT4577_88016C.1.pep
ADSGVDDSYRDAEGVLTCEYVNRRMNILNLSSFTGVTGVFL

SEQ ID NO: 356193 - protein, 135 aa, Zea mays
  Clone ID: MRT4577_88017C.1.pep
RTVSTQKGRWNGTERTVSIQSKQPPKGLYLARVTSTFATNKVRYQLPSSTHSHRHGQRVAATGSTNQNGSHHLLAWPALPCPRTLHETTPSLVVRRHHLHVLLLVLHPDQEADAHLVGVVHGVLVVLERAVLGPP

SEQ ID NO: 356194 - protein, 436 aa, Zea mays
  Clone ID: MRT4577_88018C.1.pep
DFGSRVNDAIKEFVRLFEEVTGNEFEPWERQKKFEKKSMKMYPLDMDVGVDVRHGGAALRQLGSAAAHCKLDPSVSFLLKQLCGQEIYRYALMEMAQDLPDLPIGMLTDLHLKRGEEMLLQMRRDAETVAESGPEADAFWTDASSKWFTLFPTTRPYTMRGFEQIADNVASGFETVRDINDASRLIGDAFRSTLLDDPLSECYKKLGCCISAVAEGSEDYKMVLKYLEKTYEPVEVEDVVYGVSVERIYAVESSAFPLYEEIRNLPNKILLWCGTRSSNLLRHLHKGFLPAVCHLPVPGYMFGKAIVCSDAAAEAARYGFTAVDRPEGYLVLAVASLGEEIEEVTGTPGAEEARVLEEKKVGVKGVGRKTTDESEHFSWRDGVKVPCGKLVPSANKDGPLEYNEYAVYDPKQVSICFLVGVKYEEQNMEVVPPDDQ

SEQ ID NO: 356195 - protein, 79 aa, Zea mays
  unsure (1)..(79): unsure at all Xaa locations
  Clone ID: MRT4577_88019C.1.pep
PSSIETXQRAVGKQLRLIEARDKNFHVSCAIYFIAIFISSLFQFFPCDISLSQNYILKEQSSERNFSLLSTLKLGFISL

SEQ ID NO: 356196 - protein, 44 aa, Zea mays
  Clone ID: MRT4577_8801C.1.pep
AHTSDRCPYRFIQGRLLERGQDEGVRAGQAPVLQLGALGGSVGD

SEQ ID NO: 356197 - protein, 153 aa, Zea mays
  unsure (1)..(153): unsure at all Xaa locations
  Clone ID: MRT4577_88020C.1.pep
KMKSNPCKVKWAKAYRHLHGKYMTQDTPFEFQRXRHRTQRCSPYLTEQALKTIPLIPKFRHARMGQHISYKHKPGNRKDMGKDSKDLEQDPGMLPKQLIITHSRVLATQRPRLKLFSSTHEMSLSESSAWHCVCMRFHVLTQSLSYLRNKLCS

SEQ ID NO: 356198 - protein, 159 aa, Zea mays
  unsure (1)..(159): unsure at all Xaa locations
  Clone ID: MRT4577_88021C.1.pep
SYADSSRYTTKVPTRWTLNNVSLINIKPXPQPQCECESSSSAHITHRVAIRHEPDTRIYLPDGLLHRXYLTKHLTENVPKVFGDHPFWLTMKTDDLVKDDDYILIHARWIMIGAAGADITRIGTKVGANXGPEAVCIKTGALLLDXNTPHYFGNTSPSP

SEQ ID NO: 356199 - protein, 34 aa, Zea mays
  unsure (1)..(34): unsure at all Xaa locations
  Clone ID: MRT4577_88022C.1.pep
MSYYWQXPPVMVPAEKGYPGKDGYPAAGYPPAGY

SEQ ID NO: 356200 - protein, 69 aa, Zea mays
  Clone ID: MRT4577_88023C.1.pep
QFYAKLSASLQKTAHNTSKKFLLAILTNPTKAHAISTSLGPPIIHSCTACNLHDLNRRCSTDFTKFQSH

SEQ ID NO: 356201 - protein, 52 aa, Zea mays
  Clone ID: MRT4577_88024C.1.pep
IPKCSGAAVKMRSGSMCHLSSSGWSPWLSRIHRSFESIDACLVCQAPIEVPT

SEQ ID NO: 356202 - protein, 67 aa, Zea mays
  unsure (1)..(67): unsure at all Xaa locations
  Clone ID: MRT4577_88025C.1.pep
MGALFVALGVLTITVSATCTHTSGGXGCNAQSPVHLPLPEHMPPMAHLPTTEHIPPADHLPSPVHPP

SEQ ID NO: 356203 - protein, 82 aa, Zea mays
  Clone ID: MRT4577_88026C.1.pep
HLLSVPSLTKPVALDSPVVSRVVWCCRPVGFFQNFCTFDQGCFRTCISVCSDSVLFNNPTKGWLLVSVHVHENICNFATPNC

SEQ ID NO: 356204 - protein, 83 aa, Zea mays
  Clone ID: MRT4577_88027C.1.pep
ACSSAPACCFSWGVFQGPRGGQICSCFSRGGPPPNKGVRMAVPGQGHFPFFPGGEGLVFWVICHQGACFEQNKFWGGPPQGGI

SEQ ID NO: 356205 - protein, 94 aa, Zea mays
  Clone ID: MRT4577_88028C.1.pep
ALPWSRPLAIRLSFCPRNVLRVAPSIIRSGGLPYAISKRAMFSGTRIAVGAWHCVLYVCLRVRPVVCLIDTRLLSFPVRYPLLLDSAPGSSFSR

SEQ ID NO: 356206 - protein, 72 aa, Zea mays
  Clone ID: MRT4577_88029C.1.pep
LSPDEARSQIPINRAPLLLRHQRKVAHLAIANRQRTMPDGPDNHRCPFKCTLYMLFKSVSQARRQRTSTAPC

SEQ ID NO: 356207 - protein, 197 aa, Zea mays
  Clone ID: MRT4577_8802C.1.pep
WVPRGRPGKNNSIKPSDCVGTRVTGSFPREGTIFGRKEEVDELVSWLLHRRNINPSNDEGSFTIQLHSIHSKKNIELHSIVGIGGIGKTTVAQSIYNDQRIVNAFDKRMWVSVSHNFDKINLIKEIIAHASDDKNIKLIHFNFNMLQEELQRIISNKKFLLVLDDVWYDESYGEHINREKWWELIAPMENAVAGSKI

SEQ ID NO: 356208 - protein, 161 aa, Zea mays
  unsure (1)..(161): unsure at all Xaa locations
  Clone ID: MRT4577_88030C.1.pep
VAWLLTLVGDLMLLAINCYGQGIYLQEKKGRLCAHGRSAAFENATRMVDEXTLAETLHLYYRLYWSIYKLLTNTAQGVLSSTNASXRRPFVETCEPDYGPNMTFDRYLYKQAELPNPLGDHDLAVNSILTLGRVPPLPPQDDTGPLEPDALSSLASKGDAS

SEQ ID NO: 356209 - protein, 161 aa, Zea mays
  unsure (1)..(161): unsure at all Xaa locations
  Clone ID: MRT4577_88031C.1.pep
MKVLXIDALGLLCLAGSAXTVQADGCVWQXPRYSLLGRLYMPPSHYLYDAXQPQSWTHPTDAPQVTPRQLLQILTDISVSCWAMCHGIKALRYHCSWWWTKDCWTQRHVLXTRCCXPDHAEEPVHWYQTTYGVWLASLLQQQAERELEELIAVDVEQDVTA

SEQ ID NO: 356210 - protein, 110 aa, Zea mays
  Clone ID: MRT4577_88032C.1.pep
LLDDCLLLARGSLIGTISMISFNQEGWFGRGGLIGSSRSSALRLDDFLLKAHRKLPRTSRTISVSNSFSPGMDGDTLWGQAEGRRGLHSGRFFVRHTVGVWNSCSGHWWR

SEQ ID NO: 356211 - protein, 88 aa, Zea mays
  Clone ID: MRT4577_88033C.1.pep
MVFRAVKLEQRHKHEKLISGKSFALRPGEKYYLVPSSWLSEWRAYITTTGKNISSLPEPQSLEAVVSSLICEKVNQYVSLADVVWFLV

SEQ ID NO: 356212 - protein, 44 aa, Zea mays
  Clone ID: MRT4577_88034C.1.pep
FKTVGQKIKNGWGFNKMASKNQTKVMNKPRQLRVRSHVKKLCYF

SEQ ID NO: 356213 - protein, 62 aa, Zea mays
  Clone ID: MRT4577_88035C.1.pep
KRPPVGWKKPLRGPPPKKIFWFKKKKKKKKKKKKKKKKKKKKKKKKKQKKKKKKKKKKKKKL

SEQ ID NO: 356214 - protein, 204 aa, Zea mays
  Clone ID: MRT4577_88036C.1.pep
RGPYTSATVTTWTAARLLRHTEWLHAATEEQRLLQRNDQNDAAAIDYDVLLRMDVLHRSVKEALRLHPVTPMILRRARRPFTVRTQDGSEYEVPEGRMLASPLVVNNLLQGIYRDPDVFDPDRFAAWREEDRVGGDLAYTSFGAGKHACMGEGYAYLQIKVILSHLLRNFELRLLSPFPETENMISMRPKGEVMVSYRRRSLLQ

SEQ ID NO: 356215 - protein, 327 aa, Zea mays
  unsure (1)..(327): unsure at all Xaa locations
  Clone ID: MRT4577_88037C.1.pep
LLLRATGLATTPGASNHXNLSQEVAGXVRSVVPCAMAAPPTVRGYGPASPSSSVALPRARSRVPASLVPVPTRRAPSVRLRAAVADVPRGGLQLQRREVEVLSGTVFGREEDEVLEKVGEEKVDGWIRESIAEIVRHIGEAPFLVHLFSSGDGDGEHVTVRRETAAPESWPDVRRRWGMGGQRRPDGVILVEQVAAVAVDGGASASEAARQVWGLVVQARGMEHASCYVLDTCRVRSSAGFCTHFCLARAKCFGDPVEXPAPQRLAQPPRRPPIAAXWPRLPLXLIVLXMRQGPNAMMMGPLRWQERGREAREIRIHQIFSFSSVSP

SEQ ID NO: 356216 - protein, 236 aa, Zea mays
  Clone ID: MRT4577_88038C.1.pep
TLEAGRAGLPTRYVMNYLRAACGSRQTLEEVMEGDLGAVGTAAIAVDPDRPTSSLAVHIAWIMDVLHKNLETKSKIYRGPPLASIFLMNNGKYIIHKVNDSELGVLLGDEWMKQIMSRVRRWSVEYQRGAWAKVISVLQTGGPGVGSITAKSMLQKMQMFNSYLEEICAVQSDWVIADEQLRADVKSAIVDSVMPAYRGLIGRLRSSPEAARDLFIKYTPEDVQERIQHLFEGVAK

SEQ ID NO: 356217 - protein, 49 aa, Zea mays
  Clone ID: MRT4577_88039C.1.pep
QKRHQFFNPQTGGNPLVVNFPQKQKLLPKNQFFLINPPLKKPMVGGAIF

SEQ ID NO: 356218 - protein, 88 aa, Zea mays
  unsure (1)..(88): unsure at all Xaa locations
  Clone ID: MRT4577_8803C.1.pep
DWVPPPVHLPPPVHLPPAVHLPPAVHVPPQHRYQAIFGLGLQXLFLKGGGNGQFPGLLAGHIAQQLTGMCGLQKPTPCPYAADGGGPH

SEQ ID NO: 356219 - protein, 131 aa, Zea mays
  Clone ID: MRT4577_88040C.1.pep
GVGNPGAYFQQQQFFPFNQLGALNSAGYLQQQLPFSQVGAAHPQQFFPFNPLAALNFAGYFQQQQLPPFSQLGDVSPVAFLTPQQVVPFYLPGGPNAGPLFQLQQLVPFNPPGLANPTGVYPQPIIGGAPF

SEQ ID NO: 356220 - protein, 117 aa, Zea mays
  unsure (1)..(117): unsure at all Xaa locations
  Clone ID: MRT4577_88041C.1.pep
LIPQXRXRLHRGTRSHRQARCLPQGGTDGSGAESPKRLRKDRYVGRGRERLATTRRRPPVESTIPAILPCGSVCWVRYRAGHGSDRCERSSXILLQRIQPERARERTTTRADQRCTL

SEQ ID NO: 356221 - protein, 159 aa, Zea mays
  Clone ID: MRT4577_88042C.1.pep
KKKKSFSGPKPIFGPGGLGPPPLFCQNRGARNPPSPDKKKDFKTFPPRGPRKGAIQNPNVLNPENLAPYFFWGKKFPFPSKKTFQKKKRGLEREKPPPRGQIWTQKGGEVFKQKFTFGWKKKKKNVFAPVGNTLSFSQKFKPLPVGKQLNSLKKRKFFP

SEQ ID NO: 356222 - protein, 100 aa, Zea mays
  Clone ID: MRT4577_88043C.1.pep
VSKDQTRRAHLKGAKFKNPCLRRNNPFIRAPKLNSQAGILKNRDWKNPGGPQNKRLEKNALFAKRGNKKKAPTNGPSQKVPNPNGERGPPFEGALRARGG

SEQ ID NO: 356223 - protein, 524 aa, Zea mays
  Clone ID: MRT4577_88044C.1.pep
PKLFPCIVSHRQAMLCLSSRPWLGYIHQGHFLLTPLSCDIIDSAASFSSDQCPYGVVAVEGDALRIFTIERLGETFNETAIPLRNTPKKFVVLRKKKYIAVIESDKGAFSAEEREAAKKECLDASGAAENGNANNGDPMENGDGQDGAEEGNTFPDEQYGYPKAESERWVSCIRILDPRSRDTTCLLELQENEAAVSICTVNFHDKEHGTLLAIGTAKGLQFWPRRTLAGGFIHIYKFVDEGRSLELLHKTQVEEVPLALCQFQGRLLAGVGSVLRLYDLGKRKLLRKCENKLFPRTLVSIHTYRDRIYVGDMQESFHYCKYRRDENQLYIFADDSVPRWLTTAQHIDFDTMAGADKFGNIYFARLPQDISDEIEEDPTGGKIKWEQGKLNGAPNKVEEIVQFHVGDVVTCLQKASLIPGGGECLIYGTVMGSVGALLAFTSREDVDFFSHLEMHLRQEHPPLCGRDHMAYRSAYFPVKDVIDGDLCEQYPSLPADMQRKIADELDRTPGEILKKLEDIRNKII

SEQ ID NO: 356224 - protein, 65 aa, Zea mays
  Clone ID: MRT4577_88045C.1.pep
SLLSRHRVTVRPFIDVAPCWGTTTAGRSRAAMPSCTVLELAPGFERKKMLLRTEPRGNTLNLSHC

SEQ ID NO: 356225 - protein, 94 aa, Zea mays
  Clone ID: MRT4577_88046C.1.pep
STTLALNICARQNIGAGRMLPWSLAQIHTTRNQFSHRCSQDYYNIPFLPHNTMTNLRLLYVKTLFFNPIPFNRNSQVPSYLYDPASSNNNNLYY

SEQ ID NO: 356226 - protein, 379 aa, Zea mays
  Clone ID: MRT4577_88047C.1.pep
MIASVDLDLVIGSDFSGQVLPLPLPAARRTQNPRLPAAAATRHAAMSAAAALRPIEPLPLPTGLSLSPRLKLLLTFFRADLTVRPLDEWQLKSALLAFLRDPPLPLPLLPDSDLSVSRLPDLQKRRREEPVASGVLHVRDLSFLRPRKGDGEAEEMTGEQEKYFEWRSTLVQKLEGIELNLEGVKFRMTVEIPSSDDFRTMKKSWEDFYSSELLNSRNPVRKIAKRPDTIVVRGVPSRWFAETRVSSKPSTLVTHTVFSALGKIRNLNISNDDEIEAKGHGVNKGLISGLNCKVQVQFESYNDFQDAMKALCGRSLEKEGSRLKVDYDVTWDCEGFFRISQYEPVRNNLEERDSLASVNSQRKHHTSRIESDYRKRFRE

SEQ ID NO: 356227 - protein, 59 aa, Zea mays
  unsure (1)..(59): unsure at all Xaa locations
  Clone ID: MRT4577_88048C.1.pep
TKLYKVPANQATIPILSTLKIATSPRRKNDPDNDNSIEGGGGGELKXXKAQLLLKCQNS

SEQ ID NO: 356228 - protein, 77 aa, Zea mays
  Clone ID: MRT4577_88049C.1.pep
SRTVSVGAWAVRGGRYLREQARELASPAAIPGLVCSPDRPSKFAGSVVSAGAGQRVLPWWGLGRIGFYSTVDGGREP

SEQ ID NO: 356229 - protein, 73 aa, Zea mays
  unsure (1)..(73): unsure at all Xaa locations
  Clone ID: MRT4577_8804C.1.pep
SPSPPPXRGRSAGVGWAXXTXGYIHPPIHSLMGSMTGKNRLPDWYTYTNKTHPLVSAREKKKHKETKKPEAPT

SEQ ID NO: 356230 - protein, 43 aa, Zea mays
  Clone ID: MRT4577_88050C.1.pep
KKKKKKKKKKKKKKKKKKKKKKKKKKKKKKKKKKKKKKKGRPL

SEQ ID NO: 356231 - protein, 68 aa, Zea mays
  unsure (1)..(68): unsure at all Xaa locations
  Clone ID: MRT4577_88051C.1.pep
SWLEEPMVKAAFEKFGGRMKEIEGFIDECNNNPELRNRCGAGFLLFXLLKPFSNPGVTGRGIPNSISI

SEQ ID NO: 356232 - protein, 132 aa, Zea mays
  Clone ID: MRT4577_88052C.1.pep
GNVFFKKTARKKPGPLLENLRVGGSLFEPRFPVFNKKGGWRLVAPFFKSLGGRRAFKIFFGNGINPSIFETCLTPKKKIGPRIKNYGLQIIGRPMGGFQLKKIGGFGMGKVLKFSLATGGTRGRGKGVNVFD

SEQ ID NO: 356233 - protein, 112 aa, Zea mays
  Clone ID: MRT4577_88053C.1.pep
QPTTSLKIQMTKARDEVPVRDQGRAPEAIAAHATLSLLPCNGGLPPAVTKRGQEPMPCTRSGRKYRTDLTCSRTLQCRRPPDALPDSLRAYHRLDGSLGDRALEEPHSMPHE

SEQ ID NO: 356234 - protein, 80 aa, Zea mays
  Clone ID: MRT4577_88054C.1.pep
WIMEEDGAVDLGTQLEPGTCPRPYPRGLGGVARGSRESGRRGGRTGVRGCRRCAACRRNSPESRGRRGERDGWGMRMGFA

SEQ ID NO: 356235 - protein, 83 aa, Zea mays
  Clone ID: MRT4577_88055C.1.pep
MGGDHGGHGPSGGDFRQKVWSMTGGPYCRPVHWRRNTAIAMVGIFLVCIPIAMKSAELEQRPHHPVRPIPSQLWCKNFGKKEY

SEQ ID NO: 356236 - protein, 105 aa, Zea mays
  unsure (1)..(105): unsure at all Xaa locations
  Clone ID: MRT4577_88056C.1.pep
APRPRRGRTRGRIAWAGARQXMRGVILFEETLYXEEQDGNPFVDVLKEGGVXPGIKGGGGGIFFVXSDKETTTEGLDVLGVRVCLXYEVGGGFVMWGGGLXIXPN

SEQ ID NO: 356237 - protein, 73 aa, Zea mays
  Clone ID: MRT4577_88057C.1.pep
RPVEKSVVARSLEGGILSDVVDKARTPHVMNNESRGVARDPSVTCPHATLLVLVLLLSVLPPPRPSTSTTTGN

SEQ ID NO: 356238 - protein, 79 aa, Zea mays
  unsure (1)..(79): unsure at all Xaa locations
  Clone ID: MRT4577_88058C.1.pep
KKKKKKKKKKKKKKKKKKKKKKKKKKKKKKKKKKKKNKKXKIKKKLILKKHIKLQKNKIISLIFYIINTYYSPISLYFL

SEQ ID NO: 356239 - protein, 74 aa, Zea mays
  Clone ID: MRT4577_88059C.1.pep
KYFVTPLPRSPFPYTILHPRNMALYHTTKLHPNKLTHQMHELDILPIHSFSSHQYLLYNLLLKLHKIPTRDLNN

SEQ ID NO: 356240 - protein, 73 aa, Zea mays
  Clone ID: MRT4577_8805C.1.pep
QLQQNLAEGKFPSPVWFMTRMPSFTASPSWEFLFLFFFLLKTEVRRTCSRYSEPHMSPLCSVLVTLNPTCHHF

SEQ ID NO: 356241 - protein, 37 aa, Zea mays
  Clone ID: MRT4577_88060C.1.pep
LGQRDLRNNSLLCRHCGSLLFRCNHMQNYSNIRCCRR

SEQ ID NO: 356242 - protein, 146 aa, Zea mays
  unsure (1)..(146): unsure at all Xaa locations
  Clone ID: MRT4577_88061C.1.pep
PGPTNPSTPCPTPCPHYSLRYPFSYHGGSNILSLLCHPITLIFIEPFFLIICYHYSPYLNNFFFFFPITLFHPFLTKNIFKFFFFPYFFYIIYLLFISYYYFLLXLLFCVLFLYFFIFYYFFYFLFFFYFFFFFFFIXFYLFFFLI

SEQ ID NO: 356243 - protein, 83 aa, Zea mays
  Clone ID: MRT4577_88062C.1.pep
VTLGKVCFAECFTGTLGKIYFKNFLGTGGFRLLLFYNLRNGLHLFFFLLNYGILVFFFQGTKGKALLFFWGLSSKIRFFDGKV

SEQ ID NO: 356244 - protein, 58 aa, Zea mays
  unsure (1)..(58): unsure at all Xaa locations
  Clone ID: MRT4577_88063C.1.pep
VGPQRHVSGGFCFGVPGSPGIACFYLAFSGGAPFGVSFPCGRLGRFENXCSCCFVICN

SEQ ID NO: 356245 - protein, 39 aa, Zea mays
  Clone ID: MRT4577_88064C.1.pep
TLRCTTIYIHDPCQKQARKHQASTDSISMPHSRIFLHGR

SEQ ID NO: 356246 - protein, 143 aa, Zea mays
  unsure (1)..(143): unsure at all Xaa locations
  Clone ID: MRT4577_88065C.1.pep
SRPAGIPPLLSACLLRLHFNLCTLAAQSRLSPVLSQKTHINMXVLPIVHSGQATTTGDLIYSLARHLTDRAVDSYDTACAEMNHRLFKRRWXLDKLKADXQRCITIDIAPGDIDTTEYYCTPFDAPAHADFITNMITATSQTD

SEQ ID NO: 356247 - protein, 87 aa, Zea mays
  unsure (1)..(87): unsure at all Xaa locations
  Clone ID: MRT4577_88066C.1.pep
TYETAGASEQRRADRSIDRAGQIDELQRLPRPAQGLQRRLRLRPSIDWIHGAQXQANATVFVAKFFDRADLVXSLAAVHSYTTTXGN

SEQ ID NO: 356248 - protein, 68 aa, Zea mays
  Clone ID: MRT4577_88067C.1.pep
MPLFEMWLPPVPGEGAVAAAGGLFLDGADAAAHGALLAAMPGCSLSFALRYQRCRGSPPGFLSLTMPV

SEQ ID NO: 356249 - protein, 123 aa, Zea mays
  Clone ID: MRT4577_88068C.1.pep
QQTPAVDGGFISLELRDSLAIVTRRRGTGHREPSDPRRAHQIRSGRPAERYAARPVHSAINGADLITPKSPPIRPIKIERIRFMHEALLPLLISDVRVTINGPHRFTQSRPKHGGAALTRGGA

SEQ ID NO: 356250 - protein, 76 aa, Zea mays
  unsure (1)..(76): unsure at all Xaa locations
  Clone ID: MRT4577_88069C.1.pep
VGQAPPFLFGLFFFIHPNTWYLFLTFFQMQALMXCXRCALQCLWALVVLQLXRCALGPASAIYPVRLLPRPREFGP

SEQ ID NO: 356251 - protein, 54 aa, Zea mays
  unsure (1)..(54): unsure at all Xaa locations
  Clone ID: MRT4577_8806C.1.pep
VELKKMIDRGSRAREGGEEPRVIFKRPEGEXTHPVTSSTLPLTERTRAQLFFVG

SEQ ID NO: 356252 - protein, 262 aa, Zea mays
  Clone ID: MRT4577_88070C.1.pep
MVLLFVEKLLVGLLASVMVAIAVSKIRGRKLRLPPGPVPVPVFGNWLQVGDDLNHRNLAALSRKFGDVFLLRMGQRNLVVVSSPPLAREVLHTQGVEFGSRTRNVVFDIFTDKGQDMVFTVYGDHWRKMRRIMTVPFFTNKVVQQYRHGWEAEAAAVVDDVRLDPKAATDGIVLRRRLQLMMYNNIYRIMFDRRFESMDDPLFLRLKALNAERSRLAQSFEYNYGDFIPVLRPFLRGYLNRCHDLKTRRMKVFEDNFVQERK

SEQ ID NO: 356253 - protein, 160 aa, Zea mays
  unsure (1)..(160): unsure at all Xaa locations
  Clone ID: MRT4577_88071C.1.pep
LPVGPAPSPGRPPGGXPPXGCGPPGPLSQPFRPHCGHQRFGIFAVPSVGHPPXGLLASASPPPPPPLVGASSGSWGPPVVGGPGFLPRGPCWGGGGPGRGWPLPAPVPPAPLPPPPPWRPPSPSPPFPVLPLWPPPPPPPPLFFFVRTPSSVPLFLVWDA

SEQ ID NO: 356254 - protein, 214 aa, Zea mays
  unsure (1)..(214): unsure at all Xaa locations
  Clone ID: MRT4577_88072C.1.pep
SLDDGGDGADVSLPRGVVRRRRRPRRRSSGGRIRRRPDPGSPHRARTXTGDAGRRGXRARATRGTRRRPRRRPTRRLATAASPARRRRPQTLSSRAAATAPRRGCHCQRNPPPXRRRGGNRKPSTATQEQTEEEGQAVFPRSKNPTXPRCHHHHRPDRSPRRRRRSRAPLRLCSPRCASRGSPRLRLQPLRPKSRSRSRSHSLRACRRRALRRR

SEQ ID NO: 356255 - protein, 67 aa, Zea mays
  Clone ID: MRT4577_88073C.1.pep
HGAPGSLYSSSNVFAIRSASSGLLCGHARHIDIGCASRRRSIARIDRSRVARADFTLRSGLIMITTP

SEQ ID NO: 356256 - protein, 38 aa, Zea mays
  Clone ID: MRT4577_88074C.1.pep
INTFSFLFKKKKKKFRPPLIYLLNLSINSFRYLHSFHL

SEQ ID NO: 356257 - protein, 220 aa, Zea mays
  unsure (1)..(220): unsure at all Xaa locations
  Clone ID: MRT4577_88075C.1.pep
MFPAPRCAVSLSQAHTNASGTSTCGGVGGGGGMKALRHPTASQVRRLCKQGRLDGARLLLLDALPSPPPPPLYNALLIAYVARALPEHALRLYALLNHAARPTPRSDHYTYSCALTACARTRRLRLGKSVHAHLLRRARSLPDTAVLRNSLLNVYASCVRYRGDGSVDVVRRLFDAMPKRNAVSWXTLFGWYVKTGRXQXALXDVVRMLEDGIKPTPVSF

SEQ ID NO: 356258 - protein, 83 aa, Zea mays
  Clone ID: MRT4577_88076C.1.pep
GRRILYILWSTSSTQGNSLMRYVSFNHNLPIGLRGMQVELCATEAREDNPHDNNDQHGSASGSCIMDTAYHCGLERHHRLEAA

SEQ ID NO: 356259 - protein, 98 aa, Zea mays
  Clone ID: MRT4577_88077C.1.pep
CICCFLLERSRVSRSPSCSVSAGAWILVIASPENMQQVNYGPYKGLGHRVCASVCVLVLNSPVHACGRVHPQRLWPWGTGVALSLCWGACLVGTSVWS

SEQ ID NO: 356260 - protein, 100 aa, Zea mays
  unsure (1)..(100): unsure at all Xaa locations
  Clone ID: MRT4577_88078C.1.pep
VVLTCSLTHPDRIXKFTEVMLTPTHLAISMEXSAGGELFERMXMLGGLSEDEARFFFQQLTSRVISCQSAQIRQQDLDLENTLLEHPRSPPLNIRDFGYS

SEQ ID NO: 356261 - protein, 54 aa, Zea mays
  Clone ID: MRT4577_88079C.1.pep
MAPRLKAPGPEGKNYTRQVMTMMTQVRENHLMKTHYKYLKADQKVRKFHWWIVH

SEQ ID NO: 356262 - protein, 52 aa, Zea mays
  Clone ID: MRT4577_8807C.1.pep
QPDSLVYPAIPYAAWLYGVSNNTRTNFSPSWSINLPESLACNNMHMCNNCLS

SEQ ID NO: 356263 - protein, 51 aa, Zea mays
  Clone ID: MRT4577_88080C.1.pep
TRHQQPTGCLSIVVTTMPHKSSIEISGSTVIPRYHINTGMQVAKNLPLTVK

SEQ ID NO: 356264 - protein, 74 aa, Zea mays
  Clone ID: MRT4577_88081C.1.pep
TAGYDQDMDGIAYGPHAIWIERSCCVYQQTRSMLDVRVRIRQCLERSSGSIYWIMRHGTSLACHTPNMAFDTPV

SEQ ID NO: 356265 - protein, 23 aa, Zea mays
  Clone ID: MRT4577_88082C.1.pep
EANSYRLKLAKDIQTKLLTTDCT

SEQ ID NO: 356266 - protein, 63 aa, Zea mays
  Clone ID: MRT4577_88083C.1.pep
KTKHPPFLSIYNQLLQRGLFYFFLLHTHTAQKIPTNPKNSPLNPTIAQTKYNSLHPPHPPYTY

SEQ ID NO: 356267 - protein, 190 aa, Zea mays
  unsure (1)..(190): unsure at all Xaa locations
  Clone ID: MRT4577_88084C.1.pep
MGGQGDGPERGIRSXTAYFCVGGWYRHRGEIIVIDHLKRRAPSCVGCTDSWRLLGDAAKRHVGMNPINDGCGAXRFIGKRFSDCSVWSDIRVWSFKDIAVPGEKAMIDVLHKGEENHFVAVQICSMDLIKSAXIDEDYFVRMIQNAVVTVPAYFCESQRYATLDAGXVIAVLNVLRIIDEPTAADIAYGR

SEQ ID NO: 356268 - protein, 452 aa, Zea mays
  Clone ID: MRT4577_88085C.1.pep
MVLEATMICIDNSEWMRNGDYAPSRFQAQADAVNLICGAKTQSNPENTVGVMTMAGKGVRVLVTPTSDLGKILACMHGLEVGAEANLAAAIQVAQLALKHRQNKRQQQRIIAFIGSPVKYDKKVLETIGKKLKKNNVALDIVDFGESDDEKPEKLEALIAAVNSSDSSHIVHIPPGENALSDVLLSTPIFTGEEGGSGFAASAAAAAATGASGFEFGVDPNVDPELALALRLSMEEERARQEAIAKKAAEDTSNTEHNNVPSSNSDSVMAEGEPASNAAAGDKEQPKQALAMSMEGGASGSAAVTDSAMAEAGAVDPDLALALQMSVQDANMSSDTDMSKVFEDRTFVSSILNSLPGVDPNDPSVKDLLASLHSQGEVPRTAENFLALCASGYYDSTVFHRNIKGFMGLHLGTKFADEFRESQGSTLCSAGANSRPNANGSRFFITYAKQPF

SEQ ID NO: 356269 - protein, 173 aa, Zea mays
  Clone ID: MRT4577_88086C.1.pep
PNVDPELALALRLSMEEERARQEAIAKKAAEDTSNTENINASSSNSDSVMAEAELASNAAAGDKQEQPKDDDDLLQQALAMSMEGGASGSAAVTDSAMAEAALQMSVQDANMSSDTDMSKVFEDRTFVSSILNSLPGVDPNDPSVKDLLASLHSQGEQEKKEDKSDKTEDEKN

SEQ ID NO: 356270 - protein, 390 aa, Zea mays
  Clone ID: MRT4577_88087C.1.pep
MVLEATMICIDNSEWMRNGDYAPSRFQAQADAVNLICGAKTQSNPENTVGVLVTPTSDLGKILACMHGLEVGAEANLAAAIQVAQLALKHRQNKRQQQRIIAFIGSPVKYDKKVLETIGKKLKKNNVALDIVDFGESDDEKPEKLEALIAAVNSSDSSHIVHIPPGENALSDVLLSTPIFTGEEGGSGFAASAAAAAATGASGFEFGVDPNVDPELALALRLSMEEERARQEAIAKKAAEDTSNTEHNNVPSSNSDSVMAEGEPASNAAAGDKEQPKDDDDLLQQALAMSMEGGASGSAAVTDSAMTEAGAVDPDLALALQMSVQDANMSSDTDMSKVFEDRTFVSSILNSLPGVDPNDPSVKDLLASLHSQGEQEKKEDTSDKTEDEKN

SEQ ID NO: 356271 - protein, 400 aa, Zea mays
  Clone ID: MRT4577_88088C.1.pep
MVLEATMICIDNSEWMRNGDYAPSRFQAQADAVNLICGAKTQSNPENTVGVMTMAGKGVRVLVTPTSDLGKILACMHGLEVGAEANLAAAIQVAQLALKHRQNKRQQQRIIAFIGSPVKYDKKVLETIGKKLKKNNVALDIVDFGESDDEKPEKLEALIAAVNSSDSSHIVHIPPGENALSDVLLSTPIFTGEEGGSGFAASAAAAAATGASGFEFGVDPNVDPELALALRLSMEEERARQEAIAKKAAEDTSNTEHNNVPSSNSDSVMAEGEPASNAAAGDKEQPKDDDDLLQQALAMSMEGGASGSAAVTDSAMAEAGAVDPDLALALQMSVQDANMSSDTDMSKVFEDRTFVSSILNSLPGVDPNDPSVKDLLASLHSQGEQEKKEDTSDKTEDDKN

SEQ ID NO: 356272 - protein, 121 aa, Zea mays
  unsure (1)..(121): unsure at all Xaa locations
  Clone ID: MRT4577_88089C.1.pep
KXGGGFIKNFPYKKKGFGGFFFFGKNFGGGGKKIFGKKQFFWFLLFFRGGPWWEGQRAKNFFCFPKFFEKGRENFSPPVCWGGKIKGGFFFGGFGGSFVGFFGAXXGSKTGCSRLGGGGQK

SEQ ID NO: 356273 - protein, 137 aa, Zea mays
  Clone ID: MRT4577_8808C.1.pep
ALLGARFCLQPRGDSFTRRSLFDCLVAGAVPVLFWRRSAYLQYGWYLPVDGREGEWSVFIDRDQLRAGNLTVRGVLADIPESRVRLMRKRVVKMIPGLVYSAAGVEGIGGGMKDAVDVMVDGMLRRVAEQRPRWRTT

SEQ ID NO: 356274 - protein, 107 aa, Zea mays
  unsure (1)..(107): unsure at all Xaa locations
  Clone ID: MRT4577_88090C.1.pep
SVMLHMNLGDIQCEVFCNQVPRTAENFLALCASGYYDSTVFHRNIKGFMVXGGDPIGSGNAGXSIWAXKFADEFRESQGSTLCSAGANSRPNANGSRFFITYAKQPF

SEQ ID NO: 356275 - protein, 400 aa, Zea mays; identical to SEQ ID NO: 356271
  Clone ID: MRT4577_88091C.1.pep

SEQ ID NO: 356276 - protein, 103 aa, Zea mays
  unsure (1)..(103): unsure at all Xaa locations
  Clone ID: MRT4577_88092C.1.pep
REPQRTRTPTTSXRPKRQPTGQTPEPTDDAXPSQAPKRTPPWAAASRWPPPSPPPPPQQMPPQMPPRPRRKPVRTRLTSCWTCTSTGTRTRTRTPTPATWTAT

SEQ ID NO: 356277 - protein, 404 aa, Zea mays
  Clone ID: MRT4577_88093C.1.pep
MVLEATMICIDNSEWMRNGDYAPSRFQAQADAVNLICGAKTQWVQSNPENTVGVMTMAGKGVRVLVTPTSDLGKILACMHGLEVGAEANLAAAIQVAQLALKHRQNKRQQQRIIAFIGSPVKYDKKILETIGKKLKKNNVALDIVDFGESDDEKPEKLEALIAAVNSSDSSHIVHVPPGENALSDVLLSTPIFTGEEGGSGFAASAAAAVATGASGFEFGVDPNVDPELALALRLSMEEERARQEAIAKKAAEDTSNTENINASSSNSDSVMAEAELASNAAAGDKQEQPKDDDDLLQQALAMSMEGGASGSAAVTDSAMAEAGAVDPDLALALQMSVQDANMSSDTDMSKVFEDRTFVSSILNSLPGVDPNDPSVKDLLASLHSQGEQEKKEDKSDKTEDEKN

SEQ ID NO: 356278 - protein, 106 aa, Zea mays
  unsure (1)..(106): unsure at all Xaa locations
  Clone ID: MRT4577_88094C.1.pep
APETRSRPPRRPWTCXHPAPRFXVGPPGSKITHGWVPPQKVYYEVAPSAQKADNYGGFIIWGRYYDKLPHYTSMVKDYALLDFSTQFKTNMHANWGNPFDLAPRPI

SEQ ID NO: 356279 - protein, 96 aa, Zea mays
  Clone ID: MRT4577_88095C.1.pep
WHPRILFSRPVRTPVEPSTGVHLLLPPTPDNRPPWRVGAPGRRPDASRPAARLQGPHQGRGREPELRLTPGRANAPPWPHGRGARQGGARRRGIRR

SEQ ID NO: 356280 - protein, 53 aa, Zea mays
  Clone ID: MRT4577_88096C.1.pep
GLALAGPTHALHPLSHSSRVDPMLPVLKKRSCPCGTVHAKPPTATRRAGWPPA

SEQ ID NO: 356281 - protein, 102 aa, Zea mays
  Clone ID: MRT4577_88097C.1.pep
MSSTAGQVIKCKAAVSWEAGKPLVIEEVEVAPPQAGEVRLKILYTSLCHTDVYFWEAKGQTPLFPRIFGHEAGRIVESVSEGVTHLKPGDHALPVFNRECGD

SEQ ID NO: 356282 - protein, 38 aa, Zea mays
  Clone ID: MRT4577_88098C.1.pep
MSSQVVVPPDYLADCTRSHASSPRVSPTVRPRVCARVG

SEQ ID NO: 356283 - protein, 94 aa, Zea mays
  Clone ID: MRT4577_88099C.1.pep
ATVLFSPTNALPTIYTNFYDSACDPFISTALLLAYHLFLVLQFNHATLGTKTQICWVPALLLDWSTLNFVLDMATCTVLSIKKRWYASSSPRVR

SEQ ID NO: 356284 - protein, 65 aa, Zea mays
  Clone ID: MRT4577_8809C.1.pep
TSSHKGGVPAWGGGHFRQTKFCVNRYMFPGGVQQHSFTYKSPEGLLHKHFFIFSGARGGITSNKK

SEQ ID NO: 356285 - protein, 95 aa, Zea mays
  Clone ID: MRT4577_880C.1.pep
SCPVCTVETSVSSTETNGVVSYCIRCFLARGALYRFEYAGNPRLFLAKARGGTSTLDAYDPDYTEARQARYLLTNGFRRYNLIKSNCEDFAIYCT

SEQ ID NO: 356286 - protein, 134 aa, Zea mays
  Clone ID: MRT4577_88100C.1.pep
PFPEVPRFIVAFGGQKTVIKVGLEGSFFRGRFGPVNGGPMFPKEFFRFFKSGSPPLRGAALWPSFFPLLKPKGGAGPLVISPFFSRVKFFPAPGIKKTGRVGFPPPPGFPPLGFWGGWGSLPTASILCPFFFFF

SEQ ID NO: 356287 - protein, 120 aa, Zea mays
  unsure (1)..(120): unsure at all Xaa locations
  Clone ID: MRT4577_88101C.1.pep
TRIMVQYEGKERHFMPEEIXSAMVLAKMRETAEVYLGKTVKNAVITVPVYFNNSQRQATIDAGAIAGLNVMRIINEPTAAALAYGLEKMPVSNKRRTVLVFDLGGGTFDVSLLNIDPGVD

SEQ ID NO: 356288 - protein, 44 aa, Zea mays
  unsure (1)..(44): unsure at all Xaa locations
  Clone ID: MRT4577_88102C.1.pep
PFLPVKKIMVVSPKVVVNKGPPLILFFKVPYXFPIQKWTMPSVK

SEQ ID NO: 356289 - protein, 100 aa, Zea mays
  unsure (1)..(100): unsure at all Xaa locations
  Clone ID: MRT4577_88103C.1.pep
VVWLSAGEEEGRSVAFARSAGDGVFHSVVLHVVVDPSNQGLRLGRAVIXCLVSSRAHGXCNIVLYAXTRVVGFYRLLEFGMDPFGIRGMAYNRKCATTAA

SEQ ID NO: 356290 - protein, 53 aa, Zea mays
  Clone ID: MRT4577_88104C.1.pep
NVGSSQHKILVDSFLSIASLLENSDYMLNAEPIVPCFHLNILFMLGAKLTFFL

SEQ ID NO: 356291 - protein, 242 aa, Zea mays
  unsure (1)..(242): unsure at all Xaa locations
  Clone ID: MRT4577_88105C.1.pep
KSLWVSNAKPARTSPHRYRIDPSRKAAMEFASRSRPTTTAADDEENDCLRRFPDHPPSQPQGHGEPNTSGVDAALLARRQKLLLELLKGSIQQGLILRELVETEHAMGFIAGSHNPVPALPQDFLRCWTPSMSTLEAHLRQPCPCGCGNSMAVRAPPVNPHLERSSHAPEQTRPGNDAEQHQEDRSSGVRTHPFNGHXKLCHSPSKQTPVPGKAGVNQMRPSSGHQQAIVWEKIGVEGVHNM

SEQ ID NO: 356292 - protein, 408 aa, Zea mays
  Clone ID: MRT4577_88106C.1.pep
MAATTPYKPKRILITGAAGFIASHVAIRIVNRYPEYKVVVLDKLDYCSNLKNLLPVMGSGGNNNFKFVKGDIASADLVSFILATEGIDTVMHFAAQTHVDNSFGNSLEFTKNNIYGTHVLLESCRTAAQIRRFIHVSTDEVYGETDGDAVVGNHEASQLLPTNPYAATKAGAEMLVMAYGRSYGLPVITTRGNNVYGPNQFPEKLIPKFMLLAMRGQRLPIHGDGSNVRSYLYCDDVAEAFEVVLHRGEVGHVYNIGTKKERTVMDVARDISGLFGLRPEEAIQFVDNRPFNDQRYFLDDEKLKGLGWRERTRWEDGLRKTMEWYVANPDYWGDVSGALLPHPKAGGVSVSVTTDHGARGSSEMLDDRFISIPSSPGAATVAGDDDDGAPAAMPYSNGGATNGTTTVH

SEQ ID NO: 356293 - protein, 232 aa, Zea mays
  Clone ID: MRT4577_88107C.1.pep
APHLPACLPPLLAVPRHLLLLLLALVPAFFCSARLVIAALLLRPPAVSTSTSPPSSFSSSPSSRSSRASPVRSGTVVRGASGVGVRFPVSAFRRKGWVLSVGITRPSLRETVPHLCSGLISVRAARLVWWFVCASTVGPKIPSSFRAVTGAVFSGEKIWLEGLVLANKHHTRIECAAPVPIDEIRVWISSVIWFHQAPLDSKYRFQGQGFPFEELSLREEEGKEEEVNGIAV

SEQ ID NO: 356294 - protein, 113 aa, Zea mays
  Clone ID: MRT4577_88108C.1.pep
MNCRSKGNTTRDAGIDATAARANKNANKGTAGRTANKSRKKSVTRSLKVRLQLIVRHMKQGLNKDRYAQGARTYVAVYLDYLLDYVLDQVLDLANDNDKDHMMTRNMLLDMLM

SEQ ID NO: 356295 - protein, 55 aa, Zea mays
  Clone ID: MRT4577_88109C.1.pep
MLAYCAAEELKRFKTPMSDTGAPPTRMFFFCAEKKKSPPASPFWIKGGWDGRNIF

SEQ ID NO: 356296 - protein, 77 aa, Zea mays
  Clone ID: MRT4577_8810C.1.pep
EAGSPACPARTCLLAPPPFRFRGPGLVTSTSLTLQEDLWPHEELSRTRQEHYPPLEDDSPRPIMRRPEYKYTDLTGR

SEQ ID NO: 356297 - protein, 154 aa, Zea mays
  Clone ID: MRT4577_88110C.1.pep
RHMATLELGKRVHQLSRGGVQAGAIRLKRPSVWLPSRLPATPPILAHSTRLPHARAPFADCIPLARHAAVCVHEEGKEVILMQKNFLSGRWKRIVHTTQGGRQWRRSYPPRVGLFVASDGVWNAPCREGGDGGDHTLVPPPPLWLRAASRILRR

SEQ ID NO: 356298 - protein, 173 aa, Zea mays
  unsure (1)..(173): unsure at all Xaa locations
  Clone ID: MRT4577_88111C.1.pep
GFLLVASNLTSTKLRSDYRHRLLSLCSDVGLVAESKSGRSGADLMGPLLPAVADICSDFDPVSTVEPSLLKLFRNLWFYVVLFGLAPPIQNNEAPTKPXSTSLGTAESSSAIALQAVAGPYMWNSQWSVAVQRIAQGTPPLVVSSVKWLEDELELNTLHNPGSRGGNGNENSA

SEQ ID NO: 356299 - protein, 76 aa, Zea mays
  Clone ID: MRT4577_88112C.1.pep
SARGLSRHFFTQEAQLDDRGIACRRWAALKSDGAENETGCSLERQVTQMPRHIRTGHQGNAQAVRKHYIRLSLCIL

SEQ ID NO: 356300 - protein, 70 aa, Zea mays
  Clone ID: MRT4577_88113C.1.pep
MGISRPLALLLELLIAVVGATAEEPVVAADSVAVAVEADRSSRRYQDRRRQCSPYHMDQLPGPRSASDRT

SEQ ID NO: 356301 - protein, 111 aa, Zea mays
  unsure (1)..(111): unsure at all Xaa locations
  Clone ID: MRT4577_88114C.1.pep
QRSGSSGTHSPIRTLALYSSTSSSDTSNAMVAQLHASLSSPLILKLIRQTKITCRGRLLASQACTGKTALCMGITKSVGXLRRPSATXTASQILSFDISKTAAMTYARPSP

SEQ ID NO: 356302 - protein, 104 aa, Zea mays
  unsure (1)..(104): unsure at all Xaa locations
  Clone ID: MRT4577_88115C.1.pep
EHNSSNIQQEKRESVYHYDNREKVQNDEANTAREEQLQRXPTTATXKDLRHAALLPNRALDQAETPPVHSSHPADPADPADALPLPADTLPSPATDGDHINLFL

SEQ ID NO: 356303 - protein, 72 aa, Zea mays
  unsure (1)..(72): unsure at all Xaa locations
  Clone ID: MRT4577_88116C.1.pep
MEEEEYSAEISNEQDGETEXNAGESDVFXPVDVDAACLRRVRMIFDSEEDAFQFYVTYGCHAGFGTTRTSNN

SEQ ID NO: 356304 - protein, 159 aa, Zea mays
  Clone ID: MRT4577_88117C.1.pep
MFHLRTCAAKLRPLTASQTVKTFSQNRPAAARTLGQIRCFTSPVAAEPFLSGTSSNYVEEMYYAWLENPKSVHKSWDIFFRNTNAGAPPGTAYQSPLPLSPGSLSAMARAQPLVEAQPNVDKLVEDHLAVQSLIRAYQIRGHHVAQLDPLGILDADLDS

SEQ ID NO: 356305 - protein, 224 aa, Zea mays
  unsure (1)..(224): unsure at all Xaa locations
  Clone ID: MRT4577_88119C.1.pep
MGMQSVCGGAGRWRRAVAWWGAVLVLAHLLNCGSAGLLDTNPGLAYNFYATTCPSAEATVRSITWAQVAGNQALPGQLLRLHFHDCFVKGCDASILLDNAQSEKTAPPNGSLGGYPVIDAIKAQLEKACPGVVSCADIVALAARDAVSYQFKASLWQVETGRRDGPVSLASNTGALPSPSAGFNXLLQSFAXRGLDVNDLVALFGAHTSARXSCSAPRQAVQGN

SEQ ID NO: 356306 - protein, 261 aa, Zea mays
  Clone ID: MRT4577_8811C.1.pep
MVSADTIRTAIGVIGNGTALVLFLSPVPTFVGIWKKRAVEQYSPIPYVATLLNCMMWVLYGLPLVHPHSMLVVTINGTGMLIQLTYVALFILCSAGAVRRRVVLLFAAEVAFVVALAALVLTLAHTHERRSMLVGIVSVFFGTGMYAAPLSVMKLVIQTKSVEYMPLFLSLASLANSICWTAYALIRFDLYITIPNGLGVLFALGQLGLYAMFYKNTKQIMEARRRKADQQSTMMEVVTDASATPPPPPNNNNGGGGGNGY

SEQ ID NO: 356307 - protein, 90 aa, Zea mays
  Clone ID: MRT4577_88120C.1.pep
DIVVFAVAWSRPMSIFISFLVNTSLNRFVMCEPHLPPLRFLEPQASSTQILGNGALEPWKWVRFESPLAQVCLPIFYSNRVVKKRKAAAA

SEQ ID NO: 356308 - protein, 59 aa, Zea mays
  Clone ID: MRT4577_88121C.1.pep
MIDVVLNDRLLKNVRFKCNYDDTICYLNNLFTSHTVTRPYNILIHNCYNIYNYHITLKD

SEQ ID NO: 356309 - protein, 198 aa, Zea mays
  unsure (1)..(198): unsure at all Xaa locations
  Clone ID: MRT4577_88122C.1.pep
MGLQSVCGGAGRWRRAVAWWGAVLVLAHLLSCGSAGLLDTNPGLAYNFYATTCPSAEATVRSITWAQVAGNQALPGQLLRLHFHDCFVKGCDASILLDNAQSEKTAPPNGSLGGYPVIDAIKAQLEKACPGVVSCADIVALAARDAVSYQFKASLWQVETGXRRDGPXVSLASNTGALPSPSXXFTXLLQTSPQGGLD

SEQ ID NO: 356310 - protein, 217 aa, Zea mays
  unsure (1)..(217): unsure at all Xaa locations
  Clone ID: MRT4577_88123C.1.pep
MGMQSVCGGAGRWRRAVAWWGAVLVLAHLLSCGSAGLLDTNPGLAYNFYATTCPSAEATVRSITWAQVAANQALPGQLLRLHFHDCFVKGCDASILLDNAQSEKTAPPNGSLGGYPVIDAIKAQLEKACPGVVSCADIVALAARDAVSYQFKASLWQVETGPPXTAPVSLASNTGALPSPSAGFNXLLQSFAXRGLDVNDLVALFXAHTIGKASCSS

SEQ ID NO: 356311 - protein, 48 aa, Zea mays
  Clone ID: MRT4577_88124C.1.pep
IWQSPSAMHLLGRELERLNMCVLFIRQYRFLLPPEMHSGSQRKDECVG

SEQ ID NO: 356312 - protein, 89 aa, Zea mays
  Clone ID: MRT4577_88125C.1.pep
EHLGAVDDAFTRPDSVECIRKVNAMADRYWDLYAGDGPERDLPGHLLTYPVAVATDGSVNQLPGMEFFPDTQARVLGAKSDYLPPILTT

SEQ ID NO: 356313 - protein, 88 aa, Zea mays
  Clone ID: MRT4577_88126C.1.pep
VITKFCSERIAKYAFEYAFLNNRKKVTAVHKANIMKLADGLFLESCREVAKKYPGIQYNEIIVDNCCMQLVAKPEQFDVMVCVFTFIN

SEQ ID NO: 356314 - protein, 70 aa, Zea mays
  Clone ID: MRT4577_88127C.1.pep
GLRSRLPAPIKTEFTSCRLFCTCFNISAQSAILCHLRQFLVISFLYVLSEWKCKNIHNMSTLVCTVTVIT

SEQ ID NO: 356315 - protein, 53 aa, Zea mays
  Clone ID: MRT4577_88128C.1.pep
GRRGGVGVDSADGCEPSVHMSTRYCSDDLTLFFLLVRTLRPSGHCTCPFIAMQ

SEQ ID NO: 356316 - protein, 168 aa, Zea mays
  unsure (1)..(168): unsure at all Xaa locations
  Clone ID: MRT4577_88129C.1.pep
FGTRLELKCRRSSTTSPPPXAPFGTWSAPPXPPQHPMSVASLPPXAPGPEQPAADPPPSPPPIRRSPGRPLVSGPSPDHGXLPPSPSXHVRPPASGGSXSPPSPPAPPPYSLPTLGASLPSLPPSQSPPPSPHPRRTRGPAPXRLTRRPRSTRRPGRGPPVPPPRCST

SEQ ID NO: 356317 - protein, 93 aa, Zea mays
  unsure (1)..(93): unsure at all Xaa locations
  Clone ID: MRT4577_8812C.1.pep
LKTKVDQVILEQEDAVWEFYNNLFGSAVQREFTLDLQSFDTPSVDLEXDDLDQPILEEEVWATIKSLTYDKTPGPDGFTGRFFKVAWNVIKGQ

SEQ ID NO: 356318 - protein, 78 aa, Zea mays
  unsure (1)..(78): unsure at all Xaa locations
  Clone ID: MRT4577_88130C.1.pep
ECGQLSDADLFEATYPAAARRLHEDWMDDPAIPIVTGSLGKGCKSCAATTIGQSVRDLTATTIGQSLXLRDIHTWKDV

SEQ ID NO: 356319 - protein, 151 aa, Zea mays
  Clone ID: MRT4577_88131C.1.pep
SKGSPRAVEATATTPTATGHTTPPLGLGVRLHARFLPQAIHPIRSKMKADGTSQQKREQATQQGIHESYYRDMTVMFGKWEFDPMALPEPPCPVHLWQGDEDGLVPVVLQRYLAGKIGWINYHELPGTGHFLSSVPGLGDNDLRTLFSDKQ

SEQ ID NO: 356320 - protein, 362 aa, Zea mays
  Clone ID: MRT4577_88132C.1.pep
MWVTSMPQVWDEEGAAKGGAVTPAPAAAMLGSLAGWLSRTVQPQPPAPRVCGTAGGPPVTAPRLRLRDGRHLAYCESGVPRDQARFAGVFSHGFTGSREDSVRASQEVAEELGVYMVGFDRAGYGQRDPNPNRSVKSAALDVEERADALGLGPKFYLRGISLGCHAVWGALKYIPDRIAGAAMMAPVVNYWWPGFSPELAAEVYAKHEVGDQWALRVSHHAPGILHWWMEQSWLPTSTVVAGTTPLPNERDAEIRSKMKADGTFQQKREQATQQGIHESYYRDMTVMFGKWEFDPMALPEPPCPVHLWQGDEDGLVPVVLQRYLAGKIGWINYHELPGTGHFLSSVPGLGDNVLRTLFSDKQ

SEQ ID NO: 356321 - protein, 303 aa, Zea mays
  Clone ID: MRT4577_88133C.1.pep
MSAAASSATACFLSPLPPPRRPRHFLRHLARAAVTKPEPASASSLALPSPWLWARRLCELVPAEAGGRLLSSAAGSLIVALASASLVLGDTGAASAFVVSTPRKLQADELATVRLFQENTPSVVYITNLAVRQDAFTLDVLEVPQGSGSGFVWDKSGHIVTNFHVIRGASDLRVTLADQSVYEAQVVGFDQDKDVAVLGIKAPKNKLRPIPVGVSADLLVGQKVYAIGNPFGLDHTLTTGVISGLRREISSAATGRPIQDVIQTDAAINPVNRGGPLLDSSGNLLGGNTAICWPSGASSGVGF

SEQ ID NO: 356322 - protein, 85 aa, Zea mays
  Clone ID: MRT4577_88134C.1.pep
ILYEPIYKIPRTRYLTEVLHPQPDLHRMKDIARAGVLDLVVIEFEGENIYPLLAGLTTSPCKHSGIALCSARKTNYFDKILELDI

SEQ ID NO: 356323 - protein, 15 aa, Zea mays
  Clone ID: MRT4577_88135C.1.pep
YSGFWWLENSHLSRE

SEQ ID NO: 356324 - protein, 106 aa, Zea mays
  Clone ID: MRT4577_88136C.1.pep
MSVAPHFNLGLVPRDMNGSIPVSSANSSGPSIGVSSLVTDGNSSLSGGAQFQHSTSMNADSFMRLPSSPMSFSSNNISGSSVIDGSTMQQSPPSEQMQKRRSSSAT

SEQ ID NO: 356325 - protein, 76 aa, Zea mays
  Clone ID: MRT4577_88137C.1.pep
VLIPGSAQSNSPTKHTSLTTNNIQHAKVLSRDAIFNQHLAEITTSSTTKASTWIASINLHALQALKDQFCLIHYNY

SEQ ID NO: 356326 - protein, 70 aa, Zea mays
  Clone ID: MRT4577_88138C.1.pep
ARQIYLWFPRPEKSGSVFTMNELDGPNPKSTLLLRKPRISSDGKLIYYYCRLNYYMNGMDNCSEFIYIMS

SEQ ID NO: 356327 - protein, 46 aa, Zea mays
  Clone ID: MRT4577_88139C.1.pep
CGKKTVEGVSYFLNCKALENELLQITLYIKNIITGSWYINLVNIKT

SEQ ID NO: 356328 - protein, 72 aa, Zea mays
  Clone ID: MRT4577_8813C.1.pep
WPEFPYHHMELSSVVVGEVLQEVRPDRVMGLVVGAGLGIRHLCVQDKSDASGSGSQHIRRSGLGCEPRSAVE

SEQ ID NO: 356329 - protein, 112 aa, Zea mays
  unsure (1)..(112): unsure at all Xaa locations
  Clone ID: MRT4577_88140C.1.pep
EYVADCCQACLDQATNAKPGELKCNIWVYCPSEFGCFXQDKYEHKHQECWLKQADHPKLNFKDKXKYSEPYKXARPNAPVVVPWMSGVICACTTSYQTNSIETQELIRLVLC

SEQ ID NO: 356330 - protein, 74 aa, Zea mays
  Clone ID: MRT4577_88141C.1.pep
MALTTRGAAASDPSLGFLTKRDTEVKLPRATRVKNKTPAPIQITADQILREAREGEEPEMRPPTGNMTEPARCV

SEQ ID NO: 356331 - protein, 68 aa, Zea mays
  Clone ID: MRT4577_88142C.1.pep
WITYTYLQIPSPLHIAETLRTSGIILAYMPYKLKYRVSFSQYAPGPSLLHLYANPICLAPQNYIQLSL

SEQ ID NO: 356332 - protein, 156 aa, Zea mays
  unsure (1)..(156): unsure at all Xaa locations
  Clone ID: MRT4577_88144C.1.pep
LLLRLPLGTSNPWICLSDSLELHXDWDADCGAGKTYPXNGGTAPENALLTLKNRPCDVGAVSSSXTAEHAHARRHFADIHIFMGMQLADIVPXTHSWDITHEIRTVHHTTDISHVGSVXFLLDSGXHKEDLRPPTLETVAVQMMVGSERVKDFGAT

SEQ ID NO: 356333 - protein, 89 aa, Zea mays
  Clone ID: MRT4577_88145C.1.pep
NPDPKKAHGSPFFFPLKKVVVPKGRAPNSKSVVFLGGLFSHSRDQNCDPFPSFKKIPTKLGDQGIKLFEFSKGKNPKHLFGKKKGPLTH

SEQ ID NO: 356334 - protein, 71 aa, Zea mays
  Clone ID: MRT4577_88146C.1.pep
ARSQTDTSSSVRTKDSSKHNHSGSRSKRHAVLLREHFHCNAYLNEDDEPKPHPPNYKHTQQSESNFPIYNI

SEQ ID NO: 356335 - protein, 53 aa, Zea mays
  Clone ID: MRT4577_88147C.1.pep
ALSLCFVRGHVGARSPRLYFFLFPQLRLVRTEPTLLRCCWGSFLKKIALPFVV

SEQ ID NO: 356336 - protein, 53 aa, Zea mays
  unsure (1)..(53): unsure at all Xaa locations
  Clone ID: MRT4577_88148C.1.pep
NEIHICGHRVWLLHVLEAFVVMXTLTEXLYLLMLHTGLFSGSGGYRNHYYGVY

SEQ ID NO: 356337 - protein, 84 aa, Zea mays
  Clone ID: MRT4577_88149C.1.pep
LKIPLISRRNFKSSWKIKAPKNLRSRTPPPPPKKGYHLHTTGTGFFPQHKYPASTCTWEDQLGAVPATGVRHSPPPLGKPLPGP

SEQ ID NO: 356338 - protein, 85 aa, Zea mays
  Clone ID: MRT4577_8814C.1.pep
CALYCASAEGGIMVRVDPSGVHLACRRPRTGKGRPRNGRTSGGYGGQRGRPSATGASSTDRSRSLFFLFFFTSVPDEHVQQQMDL

SEQ ID NO: 356339 - protein, 96 aa, Zea mays
  unsure (1)..(96): unsure at all Xaa locations
  Clone ID: MRT4577_88150C.1.pep
GLMEFKTVXEVIQKANNTRCGLAAGIVTKNIDIANTVLRSIRAGAIWINCYFAFDPDAPFGGYKMSGFGKDMGMDPLEKYLQTKPVVPPLYNPPWL

SEQ ID NO: 356340 - protein, 47 aa, Zea mays
  Clone ID: MRT4577_88151C.1.pep
FYFDPRVAYYFIHFLTYILSVNTYQHITIPWINIHPSFLNNLTIFIT

SEQ ID NO: 356341 - protein, 51 aa, Zea mays
  Clone ID: MRT4577_88152C.1.pep
GAGGPLFLFKVFPQGVSFSPKRFLIRQHCLKAPQEFLFKKKKQQKKKNPHP

SEQ ID NO: 356342 - protein, 580 aa, Zea mays
  unsure (1)..(580): unsure at all Xaa locations
  Clone ID: MRT4577_88153C.1.pep
MASLTPGILLKVLKNINSDVKVCGEYRSILLQVISIVPAITGSELWPDHGFFIKVSDSSHSTYVSLSKEDNELIXSNKLQLGQFIYVEKVQSSVPVPVLVGVRPVPGRNPCIGNPKDLMQMSTPSGITEAPDHQRRTSKSADMSESEKENLQRKVVIKEQKAVVASRYMLGVSSNNGKITSLNSSIDSDKSNGGSTISEPNKKSVAPKVRQEAKPQERPNDTSTGNAKLVSTKQEISKGTRKNGGASPSPNGCAVVKKQMPKESKKESATERRSPPKLDKSSPTPARTSPTKLGPAVKQNGNSSPGPVPSISTVKRRVTETISWDSLPTSLIKSGKAVVRRKNIALTVAAEAQREAAAAAYLVKGLGIFSEIRGSYEADPQAAMTKFFQLHRLIVEQSAVWNAYSPEPSKEPXGEGEAVVEEGYYRVPQPPEQQSXVHATQALRIPTKTVPXSEKAEWAREDGFKEMCRSWVALRRESRSWFLSFLEDALESAGFVMEGGSRKNARERVRGRGQANGGDGGGRIAARLSQLKETSDWLDQQLQLQGEADGSAETVERLKRKVYQCLLGTVETAASALEGR

SEQ ID NO: 356343 - protein, 78 aa, Zea mays
  Clone ID: MRT4577_88154C.1.pep
SFGGDLLSVANSFLLSFGICFLTTAQPFGLGEAPPFLRVSLLISCFVETNLVLPVDVLFGIPESNHQALFFNLFRRYG

SEQ ID NO: 356344 - protein, 122 aa, Zea mays
  unsure (1)..(122): unsure at all Xaa locations
  Clone ID: MRT4577_88155C.1.pep
PAALRLLNRIPMHFGATAVVLQWQHSVAIIITVIQYAFCRSLVSAFIIMPSSVAIRSSEKKNLPCLHSKASIGWNFFQPLFRNTLSQSVDWLILTKSFASHGLPXLLFSVWRILVDFRKKWK

SEQ ID NO: 356345 - protein, 58 aa, Zea mays
  unsure (1)..(58): unsure at all Xaa locations
  Clone ID: MRT4577_88156C.1.pep
IAQTVDYRRXRWCHNRAAATADDAFSRRSVLLSRLYRASGSCSXYCRADASLVRSVQL

SEQ ID NO: 356346 - protein, 129 aa, Zea mays
  Clone ID: MRT4577_88157C.1.pep
HASEYFEHSKTHFSKHITNNRRAVSTKRWSLLALIALFASATNAAIIPQCSLAPRSIITQVLPPCTSMSLEHPPVQAYMLQQAIAGSGLQQPICQLQQQSLAHLTIQTIATQQQPQFLPTLNHLTMVNP

SEQ ID NO: 356347 - protein, 54 aa, Zea mays
  Clone ID: MRT4577_88158C.1.pep
FQVDTAPKIKNLGKRKRGSYFPLCFFFFFFFFQEKGGPNLKPRGKNPPMNQFLL

SEQ ID NO: 356348 - protein, 42 aa, Zea mays
  Clone ID: MRT4577_88159C.1.pep
QPMIKRRRCYKWAVIVRLLIGKITVMTEVMHKVNEAISNTLS

SEQ ID NO: 356349 - protein, 206 aa, Zea mays
  Clone ID: MRT4577_8815C.1.pep
MAGPAPDRAALTVGPGMDMPIMHDSDRYELVRDIGSGNFGVARLMRDRRTTELVAVKYIERGEKIDENVQREIINHRSLKHPNIIRFKEVILTPTHLAIVMEYASGGELFERICKNVRFSEDEARYFFQQLISGVSYCHSMQVCHRDLKLENTLLDGSDAPRLKICDFGYSKSSVLQSQPSTTVGTPAYIAPEVLLKKEYDGKIAD

SEQ ID NO: 356350 - protein, 35 aa, Zea mays
  unsure (1)..(35): unsure at all Xaa locations
  Clone ID: MRT4577_88160C.1.pep
SIVNGDCRLLCTLLACWLXCSQHSNNFAAPFTLQE

SEQ ID NO: 356351 - protein, 110 aa, Zea mays
  Clone ID: MRT4577_88161C.1.pep
LASWSGTGCSAASSSPSGATARGGEYGRKAGNHASGGHWHASKLQIVLRSFEFHLILPLPFGDFIHETSIRIRLDTNICICLGDTTDCSGQWMMFLCINSGVDGMMLMGE

SEQ ID NO: 356352 - protein, 73 aa, Zea mays
  Clone ID: MRT4577_88162C.1.pep
TYTHTHTHTHTHSFLSAKELRNPSPEGRQLAAPIKAWWSKVMAGSCETSINPGRKCFTFSSFPSLYEARPTSA

SEQ ID NO: 356353 - protein, 85 aa, Zea mays
  Clone ID: MRT4577_88163C.1.pep
NDQSDSPPPRPRAPCSLLQSLTPLAPAAPPPPTLTTLRERVSRLRTGERHAPPLPRDPLRRHRRSDGSVVGAAVRAGRAVRLRVP

SEQ ID NO: 356354 - protein, 72 aa, Zea mays
  Clone ID: MRT4577_88164C.1.pep
RAYRRQYLLSLATPYPGHKGYRLVLSWSRDLPRRCTRNLLTTASPSIRPSYTNTLQFLNPKDWYQHLITFYN

SEQ ID NO: 356355 - protein, 153 aa, Zea mays
  Clone ID: MRT4577_88165C.1.pep
WNLLVDILGKAAMFEPMWDAIRSMKQEGGGGLVSVATFASVFASYCAAGNIKDAIAALDVMDRYGLKHDAVALNSLLSAICRVEGRAQDAQDVFERTKATIPPDGDTFAILLEAWEKEGNAVRAKSVFGEMVVRIGWDAANVSANFAAHGVEV

SEQ ID NO: 356356 - protein, 468 aa, Zea mays
  unsure (1)..(468): unsure at all Xaa locations
  Clone ID: MRT4577_88166C.1.pep
MITAEEKSPEREEEEEEANPRAEAFLEIICRVPAGEVEAALSACGIGPTAEVEELVLKSRECYKRPKSAVRFFRWAGQSVSHTAYAWNLLVDILGKAAMFEPMWDAIRSMKQEGGGGLVSVATFASVFASYCAAGNIKDAIAALDVMDRYGLKHDAVALNSLLSAICRVEGRAQDAQDVFERTKATIPPDGDTFAILLEAWEKEGNAVRAKSVFGEMVXASAGTQPXVSAYDSFLSTLVRGGLLDEAFKFLQVMRSKGCLPGINFFSTAVDLVVRKGDYLNAVAIWHMMVSEAGLVPNFSMYSAMIGLHCNAGSIDDALGLLDEMPLNGVFANSVTYNTILEGFIKHRKAREAESFLTEMSKNEQLPTASNCAAAISLFFKEFNPSAAIDVWRCIVEHNITPAEDSAKELIAGLLEFGRFTEVTKRADEMIDMRVELSRSTMENMKRAFAKAGRHQSYDNIARRLKRY

SEQ ID NO: 356357 - protein, 111 aa, Zea mays
  unsure (1)..(111): unsure at all Xaa locations
  Clone ID: MRT4577_88167C.1.pep
PARHSRVDPASGLSLSAPCGCARLVGRCRRRRLYPGVAAFVGLLAAVVPPPGCVLSVCFFFAPFGSWMAVAGVMGLLVGGLRRELSLAPVLLAXVVSPLGTLLRFPLGLRV

SEQ ID NO: 356358 - protein, 65 aa, Zea mays
  Clone ID: MRT4577_88168C.1.pep
DGSTSTATKLMNTPRMSSPVFRARDFFHEKTSSSTNTTSSGIVASSRRIILENCDYERNSRSSRV

SEQ ID NO: 356359 - protein, 125 aa, Zea mays
  unsure (1)..(125): unsure at all Xaa locations
  Clone ID: MRT4577_88169C.1.pep
TRRXPATTGNLRRAGDITEDDKAAKMLIDTPGQTRDRAKAKAEDDTLIIQGEHKKDEGAEGASRSNSNGRGKQTIASSYDKQMALPDEGDKSKERDQXKNGRAHRQPDQHPWGTHGQGRAGATDK

SEQ ID NO: 356360 - protein, 63 aa, Zea mays
  Clone ID: MRT4577_8816C.1.pep
CYVAISLYRSNWRLETRYAYAASLYMAKNITSHIMSCFPLMGLLRSVKQATLFMCLVLFAAQS

SEQ ID NO: 356361 - protein, 73 aa, Zea mays
  Clone ID: MRT4577_88170C.1.pep
DEPQRVRQQLFPAPVLLAVLALPHHFPSLPFPFLYQAKHRPYYELSHPLRLNEECQLPQLRLKREWGIRATAT

SEQ ID NO: 356362 - protein, 79 aa, Zea mays
  Clone ID: MRT4577_88171C.1.pep
SMTVLILDEMVLLWTSSMWPRLAGLSDHDHLDAVCDRRSYHRDRGSPGIVISLIGSVYDQADALHRDYRDSERSCSKSL

SEQ ID NO: 356363 - protein, 233 aa, Zea mays
  unsure (1)..(233): unsure at all Xaa locations
  Clone ID: MRT4577_88172C.1.pep
YGRPXHDPLYGRPANDPPYGRPANDEPYGRPANDTPYGRPANDTPYGRPNNKPHDSVDYFSKRREYPSGSPFASDAPPSASYDRYAASARLPTREMPLPVSPGADYMSHRSYHDHMPTDSYSSRGIQQLGLSRAGNSNMQQLGVTRAGNSNAYDYTEAVGQMHGREDYQRVADVTGYXSSSVELRIPNSSLESIVXGAGGVNLAEIRQISGARMKLLEAHPGSLESIMEIQGM

SEQ ID NO: 356364 - protein, 174 aa, Zea mays
  unsure (1)..(174): unsure at all Xaa locations
  Clone ID: MRT4577_88173C.1.pep
AVISVLIVAAGTGEFEAGISKNGQTREHALLAFTLGVXQLIVGVNKMDSTEPPYSETRYEEIKKEVSSYIKKIGYNPAAXPFVPISGWHGDNMLEPSDKMPWFKGWTVERKEXKTEGKCLIEAFDAILPPSCPTDXPLRLPLQDVYKIXGIGTVSVGRVXTGILKPGLVWVFDQ

SEQ ID NO: 356365 - protein, 63 aa, Zea mays
  Clone ID: MRT4577_88174C.1.pep
CRNIVRVPLDIPSARLLLGQMCAAMHATRHRADVLHAFPRHLCRIGGRFHRHNHVNGRLVHSF

SEQ ID NO: 356366 - protein, 62 aa, Zea mays
  Clone ID: MRT4577_88175C.1.pep
WFPLVNNGLYMVHAKLQWGSWASTVEIEGCSCFHNLRRAKAHMSTLWKGEIVVLPPGKTGER

SEQ ID NO: 356367 - protein, 119 aa, Zea mays
  Clone ID: MRT4577_88176C.1.pep
PLGPPRLFLFFFRLFFFVEFLRDNFFSRGTVFPFFSPSFFSPPFWKNWSPSRSRFEFSGLPPGSQIFFFCNNLMDPLPSSLARFFFLLPAFSNFFSPLPLGGIFTISLNYPFNWKGFFF

SEQ ID NO: 356368 - protein, 119 aa, Zea mays
  Clone ID: MRT4577_88177C.1.pep
NFVFVKKKMAPPPKNWGVPLKNRESKKKENREGPNQKKRFKKFGGKNFASPWRLRAKKNLNPFLRKKRIKNFPKFSQKGGWNISNPSEGGGNKKKWEKIFPAKGFNRPKTLLTPRVNGW

SEQ ID NO: 356369 - protein, 184 aa, Zea mays
  unsure (1)..(184): unsure at all Xaa locations
  Clone ID: MRT4577_88178C.1.pep
MEPAGARKEWRAVPDSSLRSNGAEDAAEHGKLGQSEERAIYEEGAGGLGDFCTITIDGSGGLSEDILQQRLQSVARQREELQQVEIELRAQAIAHPQIIEAQQSFQAAAKEHAAAVAKIKEQLHEREQYILELEMKLNDKDRELNALKIDHQTVWANQDLLREQTXELASVRRERDNSEAERAQ

SEQ ID NO: 356370 - protein, 197 aa, Zea mays
  unsure (1)..(197): unsure at all Xaa locations
  Clone ID: MRT4577_88179C.1.pep
MEPAGARKEWRAVPGSSLRSNGAEDAAEHGKLGQSEDRAIYEEGAGGLEDFCAITIDGSGGLSEDILQQRLQSVVRQREQLQQVEMELRAQAIAHPQIIQAQQSFQATSKEHAAAVAKIKQEQLHEREQYILELEMKLNDKDRELNALKIDHQTVWANQDLIREQTXELATVRRERXHSEAERAQHLTQIHELPRHL

SEQ ID NO: 356371 - protein, 116 aa, Zea mays
  unsure (1)..(116): unsure at all Xaa locations
  Clone ID: MRT4577_8817C.1.pep
RIRLRPREDRSPKWANANAEELIACERDYPDQVMDLRQLSKEPLSYLTGEFPADYGWDTAELSADPETFVKNRXLEVIHSRWAMLGALGCDFPXLIARNGVKLGDVXWCKDESQIF

SEQ ID NO: 356372 - protein, 89 aa, Zea mays
  Clone ID: MRT4577_88180C.1.pep
QTIPPRQWEGSCLTTSRSRKTKGPKAHFTCIFFRSKKNNMGHGSPGSNPTEKKGIIGHFLAPTPLSLSLSLSLNRWIPGPATTLSSRPF

SEQ ID NO: 356373 - protein, 318 aa, Zea mays
  Clone ID: MRT4577_88181C.1.pep
MMRMLYRIPVLDRDVQEKKKNIKSHVGRVEPQEQNAESKVERAASDKQPEPQSRQHKPSNFPPTTQLNLKNSATENPNVVNQVDTMKSVTGGFGSQLPRVPKEPALLDERSLLACIVRAVPAGPEGGIRISSTLPNRLGKMLAPLHWHDYKKQYGKLDDFVASRPELFVIEGDFIHLREGAQQIISATTAAAKIAAATASSAPYSSLLPSVAVTPVAQSTRQKRGPAVDSRSSNAILSGNGFTDQFNIIQGVSDVPVSGKVRNTLDNGFLGEVRTGQPSVLTAAANGARHDKGTNNVIQGYGGKQQGRSTGMAYLSRR

SEQ ID NO: 356374 - protein, 67 aa, Zea mays
  unsure (1)..(67): unsure at all Xaa locations
  Clone ID: MRT4577_88182C.1.pep
VVLISTTPDRESFVSRGVXPTLADPPHASXSTSVRNGSVXNAALEDGKASGVVTSYNRDFTCHKVGD

SEQ ID NO: 356375 - protein, 42 aa, Zea mays
  Clone ID: MRT4577_88183C.1.pep
GGRQRFNKQAKSIAMVFRLQRNHTSLGEESILACPSRMDQQG

SEQ ID NO: 356376 - protein, 99 aa, Zea mays
  Clone ID: MRT4577_88184C.1.pep
NHRLIQTSWLPRSQTKTETAKARLLAAAVLRKASILIYRRAGSTAATSCCILEGISKMHSAASEMGEGAWCLASCRFILGIRDHFHHGIVHKALLLLVQ

SEQ ID NO: 356377 - protein, 53 aa, Zea mays
  Clone ID: MRT4577_88185C.1.pep
NCARQDTVFNTNSRLYQCLSSSTTCVAVQVGQRLPCTDVEPQEQGCLASFRYV

SEQ ID NO: 356378 - protein, 105 aa, Zea mays
  Clone ID: MRT4577_88186C.1.pep
YICCYPCLAFFELKQTSMLCLLVERVIHASSFSKLRSSVMDQSISSNALRAALRANSRDDNLLSLHPVHSELCDLACTCRRRPSRWHGGIYVIAAVFVVVVELPG

SEQ ID NO: 356379 - protein, 143 aa, Zea mays
  Clone ID: MRT4577_88187C.1.pep
HGLLVTVYINSEIGRHVYISVVVEPQVRFSTQTGARKSVKENMCPWHSCIPQSQNARICRWRSVSSARRWCHARFRCNRLGAMLGVCVEGRLGLPPVSGLLARPVGAFARLVRASLPILWISLLVECARPDPLVLKEYVGPAA

SEQ ID NO: 356380 - protein, 60 aa, Zea mays
  Clone ID: MRT4577_88188C.1.pep
IDTHEMTELKKEQRAKPYPLLRKSRSSRPPTHILFIYTIIIVFIVMLVLLCSSIEQLLVN

SEQ ID NO: 356381 - protein, 85 aa, Zea mays
  unsure (1)..(85): unsure at all Xaa locations
  Clone ID: MRT4577_88189C.1.pep
GGDFLKGGWVGVFFGGETGVFIGLGPRVFGLARLFSWGIGDAILGGGGYLNGGRGVYRGGDGINGLILVSKTRKRFCVCLCXGCF

SEQ ID NO: 356382 - protein, 366 aa, Zea mays
  Clone ID: MRT4577_8818C.1.pep
MAGPAPDRAALTVGPGMDMPIMHDSDRYELVRDIGSGNFGVARLMRDRRTTELVAVKYIERGEKIDENVQREIINHRSLKHPNIIRFKEVILTPTHLAIVMEYASGGELFERICKNVRFSEDEARYFFQQLISGVSYCHSMQVCHRDLKLENTLLDGSDAPRLKICDFGYSKSSVLHSQPKSTVGTPAYIAPEVLLKKEYDGKIADVWSCGVTLYVMAVGAYPFEDPEEPKNFRKTIQRILNVQYAIPDYVNISPECRHLISRIFVGDPAMRITITEIRNHSWFLKNLPADLMDDDSMSNQYEEPDQPMQTMDQIMQILTEATIPPACSRSINVLADGLDMDDDMDDLDSDSDLDVDSSGEIVYAM

SEQ ID NO: 356383 - protein, 57 aa, Zea mays
  Clone ID: MRT4577_88190C.1.pep
QYHFACSSKANGVCMNSVLFSNRIPIPPLVCDKPISHGNPVKKKFRSPMEIIRLFRF

SEQ ID NO: 356384 - protein, 105 aa, Zea mays
  unsure (1)..(105): unsure at all Xaa locations
  Clone ID: MRT4577_88191C.1.pep
RKTGPEPTNIFLLRGQNGPGRAXAGDFSSGGIGTPGGGIKGXKTTKPPPPQRGGEGLTSPAAPFSKRGPPQGGGGPEPGGTRGPGGSGWPSPSGNPPPGPGGAPR

SEQ ID NO: 356385 - protein, 91 aa, Zea mays
  Clone ID: MRT4577_88192C.1.pep
MAAVVAAVEAGVVAVASGRGCSSRLVRGLYWRLRAVLRRLRSERARRGRRFSFHYDALSYALNFDDGRAAPAPAPAAADLVLAPGDNDALR

SEQ ID NO: 356386 - protein, 38 aa, Zea mays
  Clone ID: MRT4577_88193C.1.pep
AQHFTHCVSGHLPKVGAWVVDYYLKNIRGEHCTTLDDI

SEQ ID NO: 356387 - protein, 651 aa, Zea mays
  unsure (1)..(651): unsure at all Xaa locations
  Clone ID: MRT4577_88194C.1.pep
NRGNYGSRGLLKKATDVFQEGVAVPGTVKEFKLVFEAGLQFEQSMLAAKLEAAEEEGAEDENEGGGRKSGMDKLSKKFLNEFWLNDEDDTDLRMARFERLLDRRPELLSSVLLRQNPHNVEEWHRRVKLFEKDPARQVATYVEAVKTVDPMKAVGKPHTLWVAFAKMYEKHSRLDSAEDIFKRATQVNYKAVDHLASIWCEWAEMELRHNNFDKAIELMRQATSEPSVEVKRRAAAEGDEPVQMKVHKSLKLWSFYVDLEESLGTLDSTRAVYERILDLRIATPQIILNYAYLLEEHKYFEDAFKVYERGVKIFKYPHVXKAIWVTYLTKFVHRYKRSKLERARELFHEAVQQAPAEEKKPLYLQWAKLEEDYGLAKRAMNVYDESVRAVPGSEKMAMYEIYIARAAELFGVPRTRQIYEQAIESGLPDKDVLTMCMKFAELERSLGEIDRSRAIYVHASNYADPNNPDFWKKWNDFEIQHGNEDTFREMLRIKRTVAASRSQTHFILPEYLMQKDQKLNLDEAVDTLKRAGVPEDEMAALERQLATGPSTAPPAAPSTAPASANRMMNFVSAGVEAQVESSRQQAANNEDIELPDESDDEEPDVQIAEKSVPAAVFGELGKRAAENNEESSGAQGNEQLGALERIKRRRQ

SEQ ID NO: 356388 - protein, 47 aa, Zea mays
  Clone ID: MRT4577_88195C.1.pep
RPVVICNMNRTLRVAQIHYGWATTAYCGRLEACASSAGVFSGGRNPS

SEQ ID NO: 356389 - protein, 216 aa, Zea mays
  unsure (1)..(216): unsure at all Xaa locations
  Clone ID: MRT4577_88196C.1.pep
PNRAVVSHSFLSKMLPRLSLLFHSLFVSLSIARDSNSNSNSTTNNNQYAATSGTVWATPHDSYSSSIGVLGCKIDTNRVAYWPNSVDCDNICISLTYQDRSVYLLRIDQSQGAHDVSYDAWNYLYTGYSATDKPTAGGPIEMTFENVDASKCKHLIDTKGSKLPLSAANSMNFLTSCLDRKDSTWVADNYVLYNILDSICTLXHDEKCELDYPXRT

SEQ ID NO: 356390 - protein, 54 aa, Zea mays
  Clone ID: MRT4577_88197C.1.pep
YLEHLRIELFQCRVIVAQEGKCSEGSHRSLLKQWDGYSSSIGLTGKRPAQGSVH

SEQ ID NO: 356391 - protein, 110 aa, Zea mays
  unsure (1)..(110): unsure at all Xaa locations
  Clone ID: MRT4577_88198C.1.pep
SLPLLSVASFWSLCRLRLPLLLPWPGPRVAPVLFSLXVPGPLVLLVVAVASXGVGVGVPXRVALVVAVRVGLVPGRRXFVSVVARVLAFXPALVPVLGVVLRNPEXLPVV

SEQ ID NO: 356392 - protein, 175 aa, Zea mays
  Clone ID: MRT4577_88199C.1.pep
MSATDHLVMARVIQDVLDPFTPTIPLRITYNNRLLLPSAELKPSAVVSKPRVDIGGSDMRAFYTLVLIDPDAPSPSHPSLREYLHWMVTDIPETTSVNFGQELIFYERPDPRSGIHRLVFVLFRQLGRGTVFAPEMRHNFNCRSFARQYHLSIATATHFNCQREGGSGGRRFREE

SEQ ID NO: 356393 - protein, 366 aa, Zea mays
  Clone ID: MRT4577_8819C.1.pep
MAGPAPDRAALTVGPGMDMPIMHDSDRYELVRDIGSGNFGVARLMRDRRTSELVAVKYIERGEKIDENVQREIINHRSLKHPNIIRFKEVILTPTHLAIVMEYASGGELFERICKNVRFSEDEARYFFQQLISGVSYCHSMQVCHRDLKLENTLLDGSDAPRLKICDFGYSKSSVLHSQPKSTVGTPAYIAPEVLLKKEYDGKIADVWSCGVTLYVMVVGAYPFEDPEEPKNFRKTIQRILNVQYAIPDNVNISPECRHLISRIFVGDPATRITIPEIRNHSWFLKNLPADLMDDDSMSNQYEEPDQPMQTMDQIMQILTEATIPPACSRSINVLADGLDMDDDMDDLDSDSDLDVDSSGEIVYAM

SEQ ID NO: 356394 - protein, 120 aa, Zea mays
  unsure (1)..(120): unsure at all Xaa locations
  Clone ID: MRT4577_881C.1.pep
FIFSPPLPPSRFSHTAAGISEAARPSPPAKKHSKLSKSFWRRHNKKXSCRAGSLGAWSRLQWALQRTKEPSLFGTPALRGLARRRRFDPVALVVKGCNLSSLPKYTFTEXPLGDRGAFVK

SEQ ID NO: 356395 - protein, 46 aa, Zea mays
  Clone ID: MRT4577_88200C.1.pep
DPKRKATSYRYTQEKNATMPEKATDISKKIPTAAHLPCTLKLIPVG

SEQ ID NO: 356396 - protein, 193 aa, Zea mays
  unsure (1)..(193): unsure at all Xaa locations
  Clone ID: MRT4577_88201C.1.pep
WEPRGRPGVHRVIFLQYLSATDPLVMARVLQDVLDTFTPTIPLRITYNNSQVLAGAELKPSAVISKPRVDIGGNDMRTFYTLXVLIDPDAPSPSHPSLREYLHWMVTDIPETTSVNFGQELVFYERPDPRSGIHRLVFVLFRQLGRGTVFAPEMRQNFNCRSFARQYHLSIASATHFNCQREGGSGGRRFREE

SEQ ID NO: 356397 - protein, 108 aa, Zea mays
  unsure (1)..(108): unsure at all Xaa locations
  Clone ID: MRT4577_88202C.1.pep
MFLNQITNIPTPFSINYNXHIGSLLGITLRIQLISGILISMHYTSSIREAFDSVIHLTRDVQNGXFIRRIHINGASLFFVLIYLHIGHDIFNSSFXXQYMNIWNLYSF

SEQ ID NO: 356398 - protein, 67 aa, Zea mays
  Clone ID: MRT4577_88203C.1.pep
KKWIQGCPQGDHLALSGFCYVKSKVKGCWVLAPFLDYPRVPFGARIFEAFMPILFSIKDPRNYFERF

SEQ ID NO: 356399 - protein, 39 aa, Zea mays
  Clone ID: MRT4577_88204C.1.pep
DLFKMGGRWFFFFLKNIFFSLFFFFFFFFFFFFFFFFFF

SEQ ID NO: 356400 - protein, 40 aa, Zea mays
  Clone ID: MRT4577_88205C.1.pep
AEERSVRCLAIGLQAEGCPEHEHMHEDPSQNCGAAVLEPN

SEQ ID NO: 356401 - protein, 134 aa, Zea mays
  Clone ID: MRT4577_88206C.1.pep
GAFTGEVSAEMLVNLGVPWVILGHSERRALLGESNEFVGDKVAYALSQGLKVIACVGETLEQREAGSTMDVVAAQTKAIAEVAESTRIIYGGSVTAANCKELAAQPDVDGFLVGGASLKPEFIDIINAATVKSA

SEQ ID NO: 356402 - protein, 204 aa, Zea mays
  unsure (1)..(204): unsure at all Xaa locations
  Clone ID: MRT4577_88207C.1.pep
GNVPSSXLXEVVVSPPYVFLPVVKSQLRQEFQVAAQNCWVKKGGAFTGEISAEMLVNLGVPWVILGHSERRALLGESNEGLKVIACVGETLEEREAGSTMDVVAAQTKAIAEKIKDWSNVVLAYEPVWAIGTGKVATPAQAQEVHASLRDWVKINVSPEVSESTRIIYGGSVTAANCKELAAQPDVDGFLVGGASLKPEFIDII

SEQ ID NO: 356403 - protein, 250 aa, Zea mays
  Clone ID: MRT4577_88208C.1.pep
MGRKFFVGGNWKCNGTADQVEKIVKTLNEGNVPSSDVVEVVVSPPYVFLPVVKSQLRQEFQVAAQNCWVKKGGAFTGEISAEMLVNLGVPWVILGHSERRALLGESNEFVGDKVAYALSQGLKVIACVGETLEQREAGSTMDVVAAQTKAIAEKIKDWSNVVLAYEPVWAIGTGKVATPAQAQEVHASLRDWVKINVSPEVSESTRIIYGGSVTAANCKELAAQPDVDGFLVGGASLKPEFIDIINAATV

SEQ ID NO: 356404 - protein, 253 aa, Zea mays
  unsure (1)..(253): unsure at all Xaa locations
  Clone ID: MRT4577_88209C.1.pep
MGRKFFVGGNWKCNGTTDQVEKIVKTLNEGNVPSSDVVEVVVSPPYVFLPVVKSXLRQEFQVAAQNCWVKKGGAFTGEISAEMLVNLGVPWVILGHSERRALLGESNEFVGDKVAFALSQGLKVIACVGETLEQREAGSTMDVVAAQTKAIAEKIKDWSNVVVAYEPVWAIGTGKVATPAQAQEVHASLRDWLKTNVSPEVAESTRIIYGGSVTAANCKELAAQPDVDGFLVGGASLKPEFIDIINAATVKSA

SEQ ID NO: 356405 - protein, 105 aa, Zea mays
  Clone ID: MRT4577_8820C.1.pep
KLGYLEAGRGGTKLRSREGQKKMRSLASRVVCFCMISSLFISAFAASRQPAIFQSDYADDPSPAPTPHRPHAAPIPPGDSRIWMNSHDGGTSTLPRDAATPSASR

SEQ ID NO: 356406 - protein, 40 aa, Zea mays
  Clone ID: MRT4577_88210C.1.pep
SIIKRKTRGFSCVYWNCKLETLRKATLAELVRWSLPELVR

SEQ ID NO: 356407 - protein, 253 aa, Zea mays
  Clone ID: MRT4577_88211C.1.pep
MGRKFFVGGNWKCNGTTDQVEKIVKTLNEGQVPPSDVVEVVVSPPYVFLPVVKSQLRQEFHVAAQNCWVKKGGAFTGEVSAEMLVNLGVPWVILGHSERRALLGESNEFVGDKVAYALSQGLKVIACVGETLEQREAGSTMEVVAAQTKAIAEKIKDWSNVVVAYEPVWAIGTGKVATPAQAQEVHASLRDWLKTNVSPEVAESTRIIYGGSVTAANCKELAAQPDVDGFLVGGASLKPEFIDIINAATVKSA

SEQ ID NO: 356408 - protein, 383 aa, Zea mays
  unsure (1)..(383): unsure at all Xaa locations
  Clone ID: MRT4577_88212C.1.pep
MCNEILGNYTKKEDQLMTTAFGTRPKRRLNRVMDTLNFEYPDYKRLDKGAEGVKRKRIVSILSRQAARVDETGEEAPLTPSAAEAAEILKRKEQPSATEEKVKEQKKQRIVNVMEAIEQTLSSASAAKVAIHADTKAEAEGAAEAKDADEAETTMSDIDRLVSDVFADVTVETNVAPEETMATVPDKEKEIVKTPSDEGDFDLRHVGGQELSEEDKEELKEYSMLLSKALRMQQDSEDMKHKVIVKGLEEKIKELETYLEEKTILLQIAESSLAESRSQNTKLSEELNEARSILDESSRCFDQETKKLKKRVEAKTEKNTKLYESIKDLRNKCVDFATRCADRLKGIFNSFGAASEKFTPSTEDXPRAFNHIENKVEALDEVI

SEQ ID NO: 356409 - protein, 253 aa, Zea mays
  Clone ID: MRT4577_88213C.1.pep
MGRKFFVGGNWKCNGTTDQVEKIVKTLNEGQVPPSDVVEVVVSPPYVFLPVVKSQLRQEFHVAAQNCWVKKGGAFTGEVSAEMLVNLGVPWVILGHSERRALLGESNEFVGDKVAYALSQGLKVIACVGETLEQREAGSTMDVVAAQTKAIAEKIKDWSNVVVAYEPVWAIGTGKVATPAQAQEVHASLRDWLKTNASPEVAESTRIIYGGSVTAANCKELAAQPDVDGFLVGGASLKPEFIDIINAATVKSA

SEQ ID NO: 356410 - protein, 116 aa, Zea mays
  unsure (1)..(116): unsure at all Xaa locations
  Clone ID: MRT4577_88214C.1.pep
LLAFNTAWNFLHPFPLKDLICLFQKGFQSYSQSIHLLDALVGSSGSSMSCRWIEVIVTASVCHCRLGYALTGLVGHYXNGDPPHVAVLVELVRPGLPREGSVGEERVIEEELSVGG

SEQ ID NO: 356411 - protein, 242 aa, Zea mays
  Clone ID: MRT4577_88215C.1.pep
VLIGSNGTADQVEKIVKTLNEGNVPSSDVVEVVVSPPYVFLPVVKSQLRQEFQVAAQNCWVKKGGAFTGEISAEMLVNLGVPWVILGHSERRALLGESNEFVGDKVAFALSQGLKVIACVGETLEEREAGSTMDVVAAQTKAIAEKIKDWSNVVLAYEPVWAIGTGKVATPAQAQEVHASLRDWVKINVSPEVSESTRIIYGGSVTAANCKELAAQPDVDGFLVGGASLKPEFIDIINAAAV

SEQ ID NO: 356412 - protein, 254 aa, Zea mays
  unsure (1)..(254): unsure at all Xaa locations
  Clone ID: MRT4577_88216C.1.pep
MGRKFFVGGNWKCNGTTDQVEKIVKTLNEGQVPPSDVVEVVVSPPYVFLPVVKSQLRQEFHVAAQNCWVKKGGAFTGEVSAEMLVNLGVPWVILGHSERRALLGESNEFVGDKVAYALSQGLKVIACVGETLEQREAGSTMDVVAAQTKTIAEKIKDWSNVVVAYEPVWAIGTGKVXTPAQAQEVHAXSLRDWLKTNVSXEVAESTRIIYGGSVTAANCKEIAAQPDVDGFLVGGASLKPEFIDIINAATVKSA

SEQ ID NO: 356413 - protein, 253 aa, Zea mays; identical to SEQ ID NO: 356409
  Clone ID: MRT4577_88217C.1.pep

SEQ ID NO: 356414 - protein, 110 aa, Zea mays
  Clone ID: MRT4577_88218C.1.pep
QNAFTAALNRALLQTPRGGPRTLGDGDRPKPQDDQCQEGAAAVSTKQQRTTGCRATSDHNEAVVDGTTHEGRGQCSSAAHVRSQTQGQGAVTGGVLQLRGVGPIRQGVHT

SEQ ID NO: 356415 - protein, 196 aa, Zea mays
  unsure (1)..(196): unsure at all Xaa locations
  Clone ID: MRT4577_88219C.1.pep
PRSNLAPARRRAQPSPSCMVVRRFPVPRSHPATALLSCAELPCCGFFPTRFFVGHRCSLMLELTGRRSLALFHVRAPLAQLGACPTRPPTRPPTRPVRRLAPCCARPGPDARSPLFLSGPAMEFAATPTVLPTCARPSTCACPRLALALACLLIVTAARSLFVYRVSCVLAFAIEPFEPFFPARPRRTRIPDVGXM

SEQ ID NO: 356416 - protein, 38 aa, Zea mays
  Clone ID: MRT4577_88220C.1.pep
FGPLGPFKKKKKKKKKKKKKKKKKKKKKKKKKKKKNPT

SEQ ID NO: 356417 - protein, 113 aa, Zea mays
  Clone ID: MRT4577_88221C.1.pep
TPRSNPCACRGHVSVYMNTTYALMPEEKRKMNLGKQSRTTSMEECAAFSRSTRLTVQTILANNEENHGTDYINYDDIFDSLNDRGPLLPVRRVQPLSTSRSTTPPPRSLIRRM

SEQ ID NO: 356418 - protein, 71 aa, Zea mays
  Clone ID: MRT4577_88222C.1.pep
PHLIRAGRLGGSCHQWQGMAIRLGAATAQGFAGPADKKQCDGVTHVVDMNDYSDLNGLTKVNMLGVRMTVY

SEQ ID NO: 356419 - protein, 37 aa, Zea mays
  Clone ID: MRT4577_88223C.1.pep
ILFRTNSVFKRIGFYFLASGGKTRSFFLNLQSNIVPI

SEQ ID NO: 356420 - protein, 68 aa, Zea mays
  Clone ID: MRT4577_88224C.1.pep
TLGGGKKGSGFPGLGQHSRKQVPPGKKIKGPRVIPFNRAKCWGLGTKRLGLLLSYPKGGHPFAFFFRG

SEQ ID NO: 356421 - protein, 69 aa, Zea mays
  Clone ID: MRT4577_88225C.1.pep
QKNKKKKKKNKTQQKKQKKHHKTTPKQTKLTPHKKKTKTNQQPEQKPKTPKTPPPFFFIFFQFFYLPLL

SEQ ID NO: 356422 - protein, 82 aa, Zea mays
  unsure (1)..(82): unsure at all Xaa locations
  Clone ID: MRT4577_88226C.1.pep
KPPPPYFXPFPSAPPIFPFKXPLKPFXSFPIPFPFENFFPLPNSPPFPTRNPXFXPVPPFAPPPPLNPFAPPPPFHLKTPFP

SEQ ID NO: 356423 - protein, 164 aa, Zea mays
  unsure (1)..(164): unsure at all Xaa locations
  Clone ID: MRT4577_88227C.1.pep
MEGAISTSPGARLAVVTGGNKGIGLEVCRQLAGNGITVVLTARDETRGAAALEELRALGLSDVVFHLLDITDASSIARLAGFLKARFGRLDILINNAAFGGVEYARGPAAAAGSVTSEEELXAWIGIRGLNXVEEYPGTYDAARRLLLTNYYGTKHVIEALLPL

SEQ ID NO: 356424 - protein, 65 aa, Zea mays
  Clone ID: MRT4577_88228C.1.pep
LPADRIYYNNNYFIVTFICLYGVFFIRLYRIFPVSTSIAGTGGRRRRRLPTPCKSVVLPRTILAV

SEQ ID NO: 356425 - protein, 37 aa, Zea mays
  Clone ID: MRT4577_88229C.1.pep
YACSHYWASQKLWLSELVDCYYMPCSFNPNLKKSKLE

SEQ ID NO: 356426 - protein, 184 aa, Zea mays
  Clone ID: MRT4577_88230C.1.pep
LFAEEEEESDLSDNFIVKTCQKFIPVTVELIPMFLLPDYYDDNRFFTNQDGVWKATPLLLTLAVIELSDIAFAVGIGINIYVIQIDSIPAVFGVTRDPLIILSSNIFAISGLRSLYVLVSESMGELEYLQPAIGIVLGFIGTKMIFDFFGYHIPTEASLAIVTTCLSGGVILSLRKASKEKGDK

SEQ ID NO: 356427 - protein, 126 aa, Zea mays
  Clone ID: MRT4577_88231C.1.pep
CVESSTCRLVSVLPSFLICGLWWQGTMYIADASCFFCTFVCQAASGQFRNQAAGPTSQIIVVCRLSAMFESMINAHRFSYHSLLSHEPPAHAPWIQCLVPRSAEDPSHCSLFVCCVVHWSRAYGFR

SEQ ID NO: 356428 - protein, 36 aa, Zea mays
  Clone ID: MRT4577_88232C.1.pep
SRMGALNTNKVTVTLKQRPRENPFRSLTYLSGNKSP

SEQ ID NO: 356429 - protein, 109 aa, Zea mays
  Clone ID: MRT4577_88233C.1.pep
MAAKIRVVMKSFMSQSNQVAGLLPFTKKVGLPESRALYTVLRSPHIDKKSREQFSMHVKKQFVELTAKPHELHKKFFWLKRLRIPGAQYEVQISFKTRLDMASLRSQAP

SEQ ID NO: 356430 - protein, 59 aa, Zea mays
  Clone ID: MRT4577_88234C.1.pep
HGSHHLFRDIVPQAIIIRLIIVHSRYLLHNYYLATHQRRHATSHTCGHIVSSRGPRTRG

SEQ ID NO: 356431 - protein, 109 aa, Zea mays
  Clone ID: MRT4577_88235C.1.pep
MAAKIRVVMKSFMSQSNQVAGLLPFTKKVGLPESRALYTVLRSPHIDKKSREQFSMHVKKQFVELTAKPHELHKKFFWLKRLRIPGAQYEVQISFKTRLDMASLKSQAP

SEQ ID NO: 356432 - protein, 110 aa, Zea mays
  Clone ID: MRT4577_88236C.1.pep
MAAKIRVVMKSFMSQSNQVVGLLPFTKKVGLPESRALYTVLRSPHIDKKSREQFSMHVKKQFVEQTAKPHELHRKFFWLKRLRIPGAQYEIQISFKTRLDMAGLRSQAPC

SEQ ID NO: 356433 - protein, 84 aa, Zea mays
  Clone ID: MRT4577_88237C.1.pep
SIASAQWQLDVRHASVSSPTFCLSASACAPTGSSSVASYWLTFPAMIDGAQLRSDLSDTLYCSSRHFILYSHLHMHSGIFDIIL

SEQ ID NO: 356434 - protein, 100 aa, Zea mays
  Clone ID: MRT4577_88238C.1.pep
RSGAQGYSSTFVHPHDPNSNNHLIVPGKAPVIVAKGGFSGLFPDSSDFAYRILGTISSPDTVMWCDVRLTKDGDGICLPSINMDNCTMIDNVFPEGKKTY

SEQ ID NO: 356435 - protein, 78 aa, Zea mays
  unsure (1)..(78): unsure at all Xaa locations
  Clone ID: MRT4577_88239C.1.pep
VGNSTSXQEMFRRVSEQFSAMFRRKAFLHWYTGEGMDEMEFTEAESNMNDLVAEYQQYQDATADEEYEDEDEQEAVSE

SEQ ID NO: 356436 - protein, 130 aa, Zea mays
  Clone ID: MRT4577_8823C.1.pep
MVTATNSGSDFSSNTMWASRRGLLRFNIQLLKISSRDDGELQLEEAMEGRCSHGVELGRGGSRGARQAAPTTSAKGNGALAEQRWMLGELRRWPASQLKGGRAQENEGSRGWLDNQSLKKRAQTAPRCAA

SEQ ID NO: 356437 - protein, 400 aa, Zea mays
  Clone ID: MRT4577_88240C.1.pep
MREILHIQGGQCGNQIGAKFWEVICDEHGIDATGRYAGDSDLQLERVNVYYNEASGGRFVPRAVLMDLEPGTMDSVRSGPFGQIFRPDNFVFGQSGAGNNWAKGHYTEGAELIDSVLDVVRKEAENCDCLQGDYYFLALFSVIRVNPVGGVRFSPDLSLSALYDICFRTLKLSTPSFGDLNHLISATMSGVTCCLRFPGQLNSDLRKLAVNLIPFPRLHFFMVGFAPLTSRGSQQYRALTVPELTQQMWDAKNMMCAADPRHGRYLTASAMFRGKMSTKEVDEQMLNVQNKNSSYFVEWIPNNVKSSVCDIPPRGLKMAGTFVGNSTSIQEMFRRVSEQFTAMFRRKAFLHWYTGEGMDEMEFTEAESNMNDLVAEYQQYQDATADEEYEDEEEEENVAE

SEQ ID NO: 356438 - protein, 507 aa, Zea mays
  Clone ID: MRT4577_88241C.1.pep
MREILHIQGGQCGNQIGAKFWEVICDEHGIDATGRYAGDSDLQLERVNVYYNEASGGRFVPRAVLMDLEPGTMDSVRSGPFGQIFRPDNFVFGQSGAGNNWAKGHYTEGAELIDSVLDVVRKEAENCDCLQGDYYFLALFSVIRVNPVGGVRFSPDLSLSVKYLVACQDWSMGHQSMTAYVVKLTEFKISLNHGFQVCHSLGGGTGSGMGTLLISKIREEYPDRMMLTFSVFPSPKVSDTVVEPYNATLSVHQLVENADECMVLDNEALYDICFRTLKLSTPSFGDLNHLISATMSGVTCCLRFPGQLNSDLRKLAVNLIPFPRLHFFMVGFAPLTSRGSQQYRALTVPELTQQMWDAKNMMCAADPRHGRYLTASAMFRGKMSTKEVDEQMLNVQNKNSSYFVEWIPNNVKSSVCDIPPRGLKMAGTFVGNSTSIQEMFRRVSEQFTAMFRRKAFLHWYTGEGMDEMEFTEAESNMNDLVAEYQQYQDATADEEYEDEEEEENVAE

SEQ ID NO: 356439 - protein, 445 aa, Zea mays
  unsure (1)..(445): unsure at all Xaa locations
  Clone ID: MRT4577_88242C.1.pep
MREILHIQGGQCGNQIGAKFWEVICDEHGIDATGRYAGDSDLQLERVNVYYNEASGGRFVPRAVLMDLEPGTMDSLRSGPFGQIFRPDNFVFGQSGAGNNWAKGHYTEGAELIDSVLDVVRKEAENCDCLQGFQVCHSLGGGTGSGMGTLLISKIREEYPDRMMLTFSVFPSPKVSDTVVEPYNATLSVHQLVENADQCMVLDNEALYDICFRTLKLATPTFGDLNHLISATMSGVTCCLRFPGQLNSDLRKLAVNLIPFPRLHFFMVGFAPLTSRGSQQYRALTVPELTQQMWDAKNMMCAADPRHGRYLTASAMFRGKMSTKEVDEQMLNVQNKNSSYFVEGIPNNVKSSVCDIPPKGLRMSXTFVGNSTSIQEMFRRVSEQFTAMFRRKAFLHWYTGEGMDEMEFPEAESNMNDLVAEYQQYQDATADEEYEDEDEEEAVSE

SEQ ID NO: 356440 - protein, 445 aa, Zea mays
  Clone ID: MRT4577_88243C.1.pep
MREILHIQGGQCGNQIGAKFWEVICDEHGIDATGRYAGDSDLQLERVNVYYNEASGGRFVPRAVLMDLEPGTMDSVRSGPFGQIFRPDNFVFGQSGAGNNWAKGHYTEGAELIDSVLDVVRKEAENCDCLQGFQVCHSLGGGTGSGMGTLLISKIREEYPDRMMLTFSVFPSPKVSDTVVEPYNATLSVHQLVENADECMVLDNEALYDICFRTLKLSTPSFGDLNHLISATMSGVTCCLRFPGQLNSDLRKLAVNLIPFPRLHFFMVGFAPLTSRGSQQYRALTVPELTQQMWDAKNMMCAADPRHGRYLTASAMFRGKMSTKEVDEQMLNVQNKNSSYFVEWIPNNVKSSVCDIPPRGLKMAGTFVGNSTSIQEMFRRVSEQFTAMFRRKAFLHWYTGEGMDEMEFTEAESNMNDLVAEYQQYQDATADEEYEDEEEEENVAE

SEQ ID NO: 356441 - protein, 60 aa, Zea mays
  Clone ID: MRT4577_88244C.1.pep
PALSQSKDPTLASVGRFTMHTRPYKNVLAPVASRVGLDRSGGLFLDRVPLYTGSENINIY

SEQ ID NO: 356442 - protein, 445 aa, Zea mays
  Clone ID: MRT4577_88245C.1.pep
MREILHIQGGQCGNQIGAKFWEVICDEHGIDQTGKYAGDSDLQLERINVYYNEASGGRYVPRAVLMDLEPGTMDSLRSGPYGQIFRPDNFVFGQSGAGNNWAKGHYTEGAELIDSVLDVVRKEAENCDCLQGFQVCHSLGGGTGSGMGTLLISKIREEYPDRMMMTFSVFPSPKVSDTVVEPYNATLSVHQLVENADECMVLDNEALYDICFRTLKLTTPTFGDLNHLISATMSGVTCCLRFPGQLNSDLRKLAVNLIPFPRLHFFMVGFAPLTSRGSQQYRALTVPELTQQMWDSKNMMCAADPRHGRYLTASAMFRGKMSTKEVDEQMLNVQNKNSSYFVEWIPNNVKSSVCDIPPIGLKMSSTFVGNSTSIQEMFRRVSEQFTAMFRRKAFLHWYTGEGMDEMEFTEAESNMNDLVAEYQQYQDATAEDEEYEEEEEEEEET

SEQ ID NO: 356443 - protein, 166 aa, Zea mays
  unsure (1)..(166): unsure at all Xaa locations
  Clone ID: MRT4577_88246C.1.pep
CGNQIGAKFWEVICDEHGIDVTCRYAGDSDLHLERVNVYYNEARGGRFVPRAVLMDVEPGTMDSLRSGPFGQIFRPDNFVFGQSGAGNNWAKGHYTEGAELIDSVLDVVRKEAENCDCLQGIXFCHLFAPPNLISRAVEFVVQLTMNVLCTVEFAKWPVLLLSIGL

SEQ ID NO: 356444 - protein, 311 aa, Zea mays
  unsure (1)..(311): unsure at all Xaa locations
  Clone ID: MRT4577_88247C.1.pep
MREILHIQGGQCGNQIGAKFWEVICDEHGIDQTGKYAGDSDLQLERINVYYNEASGGRYVPRAVLMDLEPGTMDSLRSGPYGQIFRPDNFVFGQSGAGNNWAKGHYTEGAELIDSVLDVVRKEAENCDCLQGFQVCHSLGGGTGSGMGTLLISKIREEYPDRMMMTFSVFPSPKVSDTVVEPYNATLSVHQLVENADECMVLDNEALYDICFRTLKLTTPTFGDLNHLISATMSGVTCCLRFPGQLNSDLRKLAVNLIPFPRLHFFMVGFAPLTSRGSQMYRALTVPELTQQMXDSKNMMCAXRPRHGRYL

SEQ ID NO: 356445 - protein, 252 aa, Zea mays
  unsure (1)..(252): unsure at all Xaa locations
  Clone ID: MRT4577_88248C.1.pep
MREILHIQGGQCGNQIGAKFWEVVCAEHGIDPTGRYAGDTDLQLERVNVYYNEASCGRFVPRAVLMDLEPGTMDSVRSGPYGGIFRPDNFVFGQSGAGNNWAKGHYTEGAELIDSVLDVVRKEAENCDCLQGFQVCHSLGGGTGSGMGTLLISKIRGEYPDRMMLTFSVFPSSKVSDTVVEPYNATLSVHQVVXNADECMVLDNEALYDICFRTLKLTTPSFGDLNHLISAHMSGATCCLRFRGSXHSELRS

SEQ ID NO: 356446 - protein, 71 aa, Zea mays
  Clone ID: MRT4577_88249C.1.pep
QKTLPAHVFCAFQLIHPSVYVGPSIESMQGVLGGLFAESVNNDRVMFASADLWNAVCKDKHDIAHMIFHKQ

SEQ ID NO: 356447 - protein, 130 aa, Zea mays
  Clone ID: MRT4577_8824C.1.pep
MASSPSSLLHGVAILALICCSLSCSAAAGDVVALDGRRNQWKPPPTPLPGKQHTPVSPVPTPATPVPGRPVTPNPPVSVPPAPSTPVRRYPVTPSASTPICVPRPPPVQREVSALSPHRKTLQKAVKNVL

SEQ ID NO: 356448 - protein, 68 aa, Zea mays
  Clone ID: MRT4577_88250C.1.pep
ARTPLELSPVAAIGHSNVWHSHPKNYGPGSTACRMCANAHGLIRKYGLMCCRQCFRSNAKDIGFIKYR

SEQ ID NO: 356449 - protein, 78 aa, Zea mays
  Clone ID: MRT4577_88251C.1.pep
PLVIVPGMNPGPHPPLFHPLPPVLIAPYQGPAKAAPQYFAPGPPFPSKCPSPVLKRWPPPSGPILRIWFKNFRGADVF

SEQ ID NO: 356450 - protein, 224 aa, Zea mays
  Clone ID: MRT4577_88252C.1.pep
MHSTNLLLEEPIRMASILEPSKTSFFPAMTKIVGTLGPKSRSVDTISSCLKAGMSVARFDFSWGDAAYHQETLENLKLAIKSTKKLCAVMLDTVGPELQVVNKSETPISLEENGTVVLTPHRGQDASSSLLPINFSGLAKAVTPGATILVGQYLFTGSETTSVWLEVSEVKGDDVVCIIKNTATLAGSLFTLHCSQIHIDLPTLSDEDKDVRNYSRNCDLYILV

SEQ ID NO: 356451 - protein, 79 aa, Zea mays
  unsure (1)..(79): unsure at all Xaa locations
  Clone ID: MRT4577_88253C.1.pep
NRQNYHARTACKRLPKGALTAHGRSLSAFYACTVLHGGGGGDVFHNKSRQLKRMGTTHSELDQGAPNGGQANIQGSXTG

SEQ ID NO: 356452 - protein, 64 aa, Zea mays
  Clone ID: MRT4577_88254C.1.pep
VKGLFPMLADPRHPAESTSNTNESVLKVALDHGKACGVIKSHDRVVVCQKVGDSSVVKIIELDD

SEQ ID NO: 356453 - protein, 235 aa, Zea mays
  unsure (1)..(235): unsure at all Xaa locations
  Clone ID: MRT4577_88256C.1.pep
MLLRLSFIALVLSINACVAKTPSPPTNIRSLFSVPAGTQLDYPPTDVPGPYPREPWIAAYQKAKHAGLIPSLPQSQDEDGSAVYPASYRGHICNPGLNRCNSSVDVISAPAGRAGISFDDGPQPPSMPLLEYLKSQSQKATHFLIGSRIINNPDTFQAIDKAEHHLAVHTYSHPMMTTLSDIEIVGELGWTMQLIHDRSRKGVICAHWRPPYGDIDQRVQAIAKHVXLKSILWLY

SEQ ID NO: 356454 - protein, 131 aa, Zea mays
  unsure (1)..(131): unsure at all Xaa locations
  Clone ID: MRT4577_88258C.1.pep
SRWATLFALPRTREYXXVPMALPFHXWFQXXRRFFMPFXEFNGMFYHXXTVHSXFASLHXQXXYXXLXLMHEMRXXXSALNLKYPFGXALCLLSGLXGVELGLAFHLWXGLXKLVXXDISXLXSFPNLGXI

SEQ ID NO: 356455 - protein, 41 aa, Zea mays
  Clone ID: MRT4577_88259C.1.pep
KEKFIIGHALNVEDIYSVDWQLTLDPVANVANIKRVDLMYK

SEQ ID NO: 356456 - protein, 132 aa, Zea mays
  unsure (1)..(132): unsure at all Xaa locations
  Clone ID: MRT4577_8825C.1.pep
HSLIQSLIILEDTILLGLLERAQVMYNXDSXYDRNGYPLNXYEDSLFEHMVIQTENLHAHGVRYDMPHEHTIFPDDLADTPVTTMQDARRLHPIADXVSISAKIMCETLPGLLXKXSDSNAGSTALCDTSCL

SEQ ID NO: 356457 - protein, 106 aa, Zea mays
  Clone ID: MRT4577_88260C.1.pep
PLYRRYPPRSGPCLSWFASFMILQTCSIPLDLTSGLRSVSLPHLQQAHHPRPMCTGPFLVSPLSGQVVGQRVRVLCESTGGSPPSLVTHRAIARAHEGWLCKSSSR

SEQ ID NO: 356458 - protein, 76 aa, Zea mays
  Clone ID: MRT4577_88261C.1.pep
PLHLQILSQLTIHRYMWPAAIPSVQGYTLWCTPGITPPACDCSLPQLVPTHTGKGPGHILCTVRRPEGARASSEFL

SEQ ID NO: 356459 - protein, 79 aa, Zea mays
  Clone ID: MRT4577_88262C.1.pep
GSVLPCEAPRHGARCRPTISRRPVVSLVVVEAEPFFQPVCRRPPLRLMLSQLEKLWRYESARIIGRVCTDWENGKHTCT

SEQ ID NO: 356460 - protein, 87 aa, Zea mays
  Clone ID: MRT4577_88263C.1.pep
TPKNVPPLRPPRVGPMWYPEGVGNFPLKGKEEGFHLFCDTNWTKSCQNKGEPGPKCKAYPNQNPVICFWGTPKIDSWGLKEGVFVFP

SEQ ID NO: 356461 - protein, 62 aa, Zea mays
  Clone ID: MRT4577_88264C.1.pep
IRAKVATFGFGGPTEVTSGGNALKFYASVRLNIRRIGLVKKGEEVLHMFGIYLISLVSYYNV

SEQ ID NO: 356462 - protein, 66 aa, Zea mays
  Clone ID: MRT4577_88265C.1.pep
RNTGGSASRGRQRLSLMQIRLFAFRFARSRSSAPAALCSSGPRSILERRASSWRIRSRAEDLGLQA

SEQ ID NO: 356463 - protein, 119 aa, Zea mays
  unsure (1)..(119): unsure at all Xaa locations
  Clone ID: MRT4577_88266C.1.pep
MSPCSSGNNAEFFFFFFFFFFFLGNEELCMENPDPRFHAQFLVVFPQPYSPXSPNNPPSKPXFGAFSPTPPPAPSKPVPPPPLXXXXXITXSXXXLPSPPXPPPPXSPPPXXPPXPPPF

SEQ ID NO: 356464 - protein, 201 aa, Zea mays
  Clone ID: MRT4577_88267C.1.pep
DWFTHNTTANWASSTELMEVSNKTPWPSTGKNASWPMRTTLLSPSPELAGFFFDSLDNANTCRDAVSVVKQVSAFAWLVLLNLCQIFPQQIQPLYIAFVGTPVIAAAGSLQATLSRRRRLLVILVLLSVAVLSGYRHLYLLNRRRLLLGDGGRARRRRGGSVAAGIFGWEEAGDETEGAGAVALTMGEPHQSREWGSTGSC

SEQ ID NO: 356465 - protein, 58 aa, Zea mays
  Clone ID: MRT4577_88268C.1.pep
ACPPSGRITMITLIRFHMLSLVLWGLLWIFSGRSISHRSGCHNMGSPIGKHHEQLFLE

SEQ ID NO: 356466 - protein, 70 aa, Zea mays
  unsure (1)..(70): unsure at all Xaa locations
  Clone ID: MRT4577_88269C.1.pep
MTSGPSGKIMLLPEEDPNATHIMIATGTGVAPFRGYLRRMFMEDVPXTYRFGGXLAWLFLGVANSDRLLY

SEQ ID NO: 356467 - protein, 98 aa, Zea mays
  Clone ID: MRT4577_8826C.1.pep
PLFSPFRTRGGAPKKKNRSRCPLSCAPSDSGPQIWSPVALASSSSSLTISGRSPSVCFSPNDPIYSAELPRWSSHPSSPTSLRVVYPSQRWSIRSVWG

SEQ ID NO: 356468 - protein, 91 aa, Zea mays
  unsure (1)..(91): unsure at all Xaa locations
  Clone ID: MRT4577_88270C.1.pep
CISGRTDPPRRGSLIRIALRFTRXGIGKWDEARETAGTERAYSTAHLRRRRTFDRTQHLELKILGYKTALRQEYEEGSENSVPKDHTKPAK

SEQ ID NO: 356469 - protein, 88 aa, Zea mays
  unsure (1)..(88): unsure at all Xaa locations
  Clone ID: MRT4577_88271C.1.pep
HXQHHQSIHIYNVYPTIYLITITITISISFTDTNNSSTSNYYFFNTYQDPPNNINIFLYPYSTFKKPFIMYNNILLIFDFIHLKTLSQ

SEQ ID NO: 356470 - protein, 34 aa, Zea mays
  Clone ID: MRT4577_88272C.1.pep
EWHEGTTKHCLRLQCCPWRLTKMEFKVLKCAPHC

SEQ ID NO: 356471 - protein, 232 aa, Zea mays
  Clone ID: MRT4577_88273C.1.pep
MYDDDDEPSSISMSLELFGYHNGGDEAADGSGSASALSLQLAFDDDSFVKGGCECDDSGGGGASAADYYYYGSWAGAYGGSGATSSGSNSSVLSFEQAGSGGQRHHLVYGEDGCALWMDDAGAGMVVEHPPPAQQQQQHGSGCDFGLIGSSPDDAGLHIQLEPGTVQLPAKAPPHKRARRDGDQVQAAAAAKKQCGGVGARMKSKQAKLAAPAPTKDPQSVAAKVRREKIAE

SEQ ID NO: 356472 - protein, 32 aa, Zea mays
  unsure (1)..(32): unsure at all Xaa locations
  Clone ID: MRT4577_88274C.1.pep
DQLEDEMQEKDGLLEELETLKAQAQASQETIX

SEQ ID NO: 356473 - protein, 32 aa, Zea mays
  Clone ID: MRT4577_88275C.1.pep
MDVQCNASEGKVDMDEMVATPVQDGQQPKSST

SEQ ID NO: 356474 - protein, 103 aa, Zea mays
  Clone ID: MRT4577_88276C.1.pep
SASMKSSTTTVSTNVQQLQDELEDEMQEKDGLHEEVETLKAQAQASQETIDSMKRSMKGNNNLLRHILSFNRGQVPPSLSLVDHNRTCSLLDAIVASYNMLNI

SEQ ID NO: 356475 - protein, 32 aa, Zea mays; identical to SEQ ID NO: 356473
  Clone ID: MRT4577_88277C.1.pep

SEQ ID NO: 356476 - protein, 254 aa, Zea mays
  unsure (1)..(254): unsure at all Xaa locations
  Clone ID: MRT4577_88278C.1.pep
MVNNYPVLCSLPAAQGTSLFSALHPNRQSLSYGDSSTGVGFGTRPSRETFNTSLGSSNEPQTSNYMELRHEQTINRILPYDPSNGTLLPRPRITQLQIPNSGRTFFGPPAVIPNNILVGHGVALSEGTYSGFPVDSLSSTDVVMSLMQSPFQLPTNSDHSEQQCNGQTSTQLQQFVTRCQPSRTNSFDLNSCDELIQNFISQISNSGGASTPLSPRKWVKIRAALKLASVGRLSRRXPHCNPPRPRLVPIHEHS

SEQ ID NO: 356477 - protein, 80 aa, Zea mays
  Clone ID: MRT4577_88279C.1.pep
RGQLTNKAYQNIITQPMFQNMLSHRRHSPCQSAFYTYDSLIEAASKFPGFGTTGDEQTRRRQLAAFFGQTSHETTGRWAT

SEQ ID NO: 356478 - protein, 84 aa, Zea mays
  Clone ID: MRT4577_8827C.1.pep
SITFFRDCTAAHLKHTFPCSKTNASTPLPGHATKLPPLGSLRDRAWGRSDPSRPVRPLLIRIKLSLEMAMGTRNPMGFYPIRVR

SEQ ID NO: 356479 - protein, 69 aa, Zea mays
  Clone ID: MRT4577_88280C.1.pep
PTMLGKTPFGASCPRHPPLTIPVPLSQPRERISSASHIFSRNNGGNAVMRRGALYLSQAEKISGRENGG

SEQ ID NO: 356480 - protein, 168 aa, Zea mays
  unsure (1)..(168): unsure at all Xaa locations
  Clone ID: MRT4577_88281C.1.pep
MLAYQDLLXGDAAXLSDSFTYNELXNAILREVEGKRVTXGPVNVDIAANPSAEGGEDERADDTAVNVADIVDTFRLQEQPPFDEKSFVSYILKYIKNLTAVLEPKKANEIXKGVEGATKYLLNKLNDLQFCAGXSMKDDAXVLFAYYNDAATNPTFLYVSHGLNEIKC

SEQ ID NO: 356481 - protein, 82 aa, Zea mays
  Clone ID: MRT4577_88282C.1.pep
CAELRGLLISQREKRLLCLRPFPGRCRFLYFRWPVCFPSSFRATVRPAIILIYFPGLVLRRLHFLFLVPVFRQLLTHNLFYP

SEQ ID NO: 356482 - protein, 79 aa, Zea mays
  Clone ID: MRT4577_88283C.1.pep
VKRRVLVPVQFLVFHGVLLVPLRSIWPKRACNPRVNYHVRSLCQLSPSRLVRVWSWLQPLWSSVTGPNSAVVRLQGCPD

SEQ ID NO: 356483 - protein, 68 aa, Zea mays
  Clone ID: MRT4577_88284C.1.pep
IRIQQHLEHKRSVHCLMPTGPKFLHASAIHIFFALLPVSSPPIFLRTQALLPAQKNTRSSTLNPCAMG

SEQ ID NO: 356484 - protein, 88 aa, Zea mays
  Clone ID: MRT4577_88285C.1.pep
MASKGVLFLALNLLFFTVANACGSCPTPTPPVEPPPPPPATPPPSSSSGKCPLNALKFGVCVVFDVPIKFNALFFYCGKRAPKGYMCA

SEQ ID NO: 356485 - protein, 134 aa, Zea mays
  Clone ID: MRT4577_88286C.1.pep
MASKGVLFLALNLLFFTVANACGSCPTPTPPVEPPPPPPAATPPPSSSSGKCPLNALKFGVCVNALGLVKGEAGKVPAEPCCNLIKGLADFEAAVCLCTAIKGNVLGVVFDVPIKFNALVNYCGKCVPKGYMCA

SEQ ID NO: 356486 - protein, 134 aa, Zea mays
  Clone ID: MRT4577_88287C.1.pep
MASKGVLFLALNLLFFTVANACGSCPTPTPPVEPPPPPPAATPPPSSSSGKCPLNALKFGVCVNVLGLVKGEAGKVPAEPCCNLIKGLADFEAAVCLCTAIKGNVLGVVFDVPIKFNALVNYCGKCVPKGYMCA

SEQ ID NO: 356487 - protein, 134 aa, Zea mays
  Clone ID: MRT4577_88288C.1.pep
MASKGVLFLALNLLFFTVANACGSCPTPTPPVVPPPPPPSATPPPSSSSGKCPLNALKFGVCVNVLGLVKGEAGKVPAEPCCNLIKGLADFEAAVCLCTAIKGNVLGVVFDVPIKFNALVNYCGKCVPKGYMCA

SEQ ID NO: 356488 - protein, 134 aa, Zea mays; identical to SEQ ID NO: 356485
  Clone ID: MRT4577_88289C.1.pep

SEQ ID NO: 356489 - protein, 137 aa, Zea mays
  unsure (1)..(137): unsure at all Xaa locations
  Clone ID: MRT4577_8828C.1.pep
NNTEAHSVSNDKTLARPFLISMASPIIQSPVVYKLVVIKESPRHTHRIXGSTTDPPQTAFHVWSPRMAAIGPARGPEPVSTRCTFAVPQLSVPTCGSTVGGLGACTMPTPPWPGTAEIPRGPRGRCPTAGTARAGAP

SEQ ID NO: 356490 - protein, 60 aa, Zea mays
  Clone ID: MRT4577_88290C.1.pep
RMEGALPPAYRICPIGVCGGGTLHPRGLCVDLRFHSSTYSCAFTDAPLRRRHRMPFWISI

SEQ ID NO: 356491 - protein, 60 aa, Zea mays
  unsure (1)..(60): unsure at all Xaa locations
  Clone ID: MRT4577_88291C.1.pep
WEAPMIINPPSKDKPCIYAFDSLKYIGNDLWQVKSGTLFDNIIITDDPXLSXTLAEETRG

SEQ ID NO: 356492 - protein, 105 aa, Zea mays
  Clone ID: MRT4577_88292C.1.pep
GLLDNQQIFREKIFQTSRSHCCVPPGISGLIAKFSLSILQKQIKQGGEPLYFFGSPAPPQPESGEVFVLPESPTSSALCFPFGVPVACCALWLVARLAALAGPAL

SEQ ID NO: 356493 - protein, 96 aa, Zea mays
  Clone ID: MRT4577_88293C.1.pep
AWSRPRYTRTRVEISLADSSENMLADTYVWSDAEDLNLYGEWNFEEWKKLHMKDFLAMTNGFMHELEQPESKTRVETYQEFMQQQEQPAPGTQVEG

SEQ ID NO: 356494 - protein, 183 aa, Zea mays
  Clone ID: MRT4577_88294C.1.pep
MAMKPAAAAPPTPAAAHSVFVYGSLMADEVVRTILKRVPPAAPALLPNYHRFNIKGRIYPAILPVESKRVAGRVIMGVTDEELQLLDAFEDVEYTRTRVEISLADSSENMLADTYVWSDAEDLNLYGEWDFEEWKKLHMKDFLAMTNGFMHELEQPESKTRVETYQEFMQQQEQPAPGTQVEG

SEQ ID NO: 356495 - protein, 90 aa, Zea mays
  Clone ID: MRT4577_88295C.1.pep
KPGCGKGPPDQPPRPVTGPLKKVLYALSPEKPGQKKKWGAPRSYPVGFLLLRSKVVPARSCFPNDAGEKKVVLFVIKRIASMFLNQMGGG

SEQ ID NO: 356496 - protein, 79 aa, Zea mays
  Clone ID: MRT4577_88296C.1.pep
YNASDYASGQVEHCTGHACNCTQSIRRVISDLHPSLRLVSSMADLGFDRGNNVLPTLPCYVGTHSTKSSSTDIIRHINS

SEQ ID NO: 356497 - protein, 121 aa, Zea mays
  Clone ID: MRT4577_88297C.1.pep
ASEPSFQYAERQLDLRGPKTTHGGRAGTQSRRYTRRSPAGTCDYRMTLPAGRGSWTSSRDSRCSPTCNTTLTEARKLNTRSRIALHTMIAVLLRPMWSALTTTLSIDDRRGGANYLDTLDR

SEQ ID NO: 356498 - protein, 128 aa, Zea mays
  Clone ID: MRT4577_88298C.1.pep
SSFFLWVFFMGFKRADPTQIHINHSGCGVVRYLMAPPQGLGALTTFHKKGGMKPMLHKKKPPWALFTAPIVLNGSPHSWAPLVGPIQTLPATLLYVQSIGEVHVRTPGWQAQDLDPPPNVLDGSVRVM

SEQ ID NO: 356499 - protein, 56 aa, Zea mays
  Clone ID: MRT4577_88299C.1.pep
GAHRHTSVRELQQRVIVHVGLVDGERARDCCTGRDWPMQRSPITESSTWPASRDPM

SEQ ID NO: 356500 - protein, 130 aa, Zea mays
  Clone ID: MRT4577_8829C.1.pep
FWFNSKRVWIIISCNRLHYCSPVLDVGYYAPQIQEHIGSPRAQQERKCFAQAQTYYNCLPCHSGRRVGWVLHAAGSRSRSRASPVQGRALRPGALAVARPQRRGARGRRGRAIQPRCRPGRHGVDLLEHR

SEQ ID NO: 356501 - protein, 195 aa, Zea mays
  Clone ID: MRT4577_882C.1.pep
PPPPPPLPPLVLSLFLLPLLYLFFRSGSKGRSTQGARNAPGPPKQLPVLGNLLQLDGRSHRYFQSLTQKYGPVAQVQLGRVRMAVVATPEAVKEVLRTNDLHCCSRPNSPGARMLSYNFLDVAFGPYSDYWRAMRKLLVLELLSMRRVQSFAYARAAEVDRLVSSLAGIPPGTPVDLSEKLYALSNGIIGTEALR

SEQ ID NO: 356502 - protein, 70 aa, Zea mays
  Clone ID: MRT4577_88300C.1.pep
LSPKNPFFLRNPQVCPGLVLPVLNLGNPGVLVPFPGVRIPPCAPPRVRVPNHWLFPPFWECRFGPLFPPL

SEQ ID NO: 356503 - protein, 53 aa, Zea mays
  Clone ID: MRT4577_88301C.1.pep
QGTSNSGRFRGTVPVGSCCLLNMRLWIESAVAAPLAGIMESGSRFSGCTGFDY

SEQ ID NO: 356504 - protein, 428 aa, Zea mays
  Clone ID: MRT4577_88303C.1.pep
MALRLSAPFLTSRFTPSQALAPRRRTRARSFSPSADARAACFKRPYTSVLIIPTGVGAAVGGFAGDALPVARAVAGVADCVISHPNVLNAAMLYWPMPNTLYVEGYALDRFAEGSWALQPVHQNKVGLVLDSGIEEDLRLRHLQIADATRASLGLPVVEYIVTDAPLEIKTWFDPRCGKSTGSVGNSDSLLRAVDALVKHSDVNAVAVVARFPDDDPEDSDCYREGKGVDLLAGVEAIISHLVVKEFKIPSAHAPAVLPPPLSPLVCPRSAAEEIGHTFLPCVLAGLSNAPQYVMRSGTLDHGCIVAGDVDSVILPKDSCGGDGTLAFARAARKDKPLIITVQENETVLDDTPDKFGIEVLNVRNYWEAIGVIAAHKAGVNPHALRRRGIDHLKSPQRSYSAYSASPKPSARPPVHDKVQRQQLVRQI

SEQ ID NO: 356505 - protein, 50 aa, Zea mays
  Clone ID: MRT4577_88304C.1.pep
SLRTRTTSKEECDLDYTPRQIQATIGGVVRFLYSRFGPCNERGEREQGVV

SEQ ID NO: 356506 - protein, 96 aa, Zea mays
  Clone ID: MRT4577_88305C.1.pep
VQELFLFLYVSEPTHTGYSRLCEQASINTKYGCFISFFIPSSYQMGVTTEAVRSDECQVCDPGWCDGWGRLVTPEFACDRQSHQPSFWRQINPPPS

SEQ ID NO: 356507 - protein, 62 aa, Zea mays
  Clone ID: MRT4577_88306C.1.pep
LLQINHPLYLLLSNTFSLIRTVRSQILTHLPSSTSRLTYSSTSPLFLYTILCLESTPFIFYK

SEQ ID NO: 356508 - protein, 607 aa, Zea mays
  Clone ID: MRT4577_88307C.1.pep
MAALPSPALPSSAPVPSPPGANLSTSLTPASTPDPAATPSSSTPLTVAVKKAAGQQRDQQGLRVPVWQRLSGMDGPGHQDLQRKGSVWRRITPSQSAAGTESSTQSALMAASSGATAPELRSMRKRRRAKRRRGVVEQELLPLPPPSDHDAPLVMQEEAGSDGSSVEPTCVLELSIGMAQEEVALRRALYVMVVGTRPKVLGAEVVEEVARCFGIDADSLAIHQAMPEDFLLFLPNEDTATRVFNEGKVFRGPRFNLQFKRWSRFTHATAGALPFLVDVQIWGIPAHAWARSTAEHLLHDSCLVSDIHPATALKSDLSSFKLRAWCFDPKKLHRNMKLYIAEPGMVTSEKRCLSYNISMAAIPVDASSRAEDSPPPPHRLMARIQMETMNAIDRIPRLGILVKALSRLVSGSGDITGGDMLKKMHSQVDIVTDFADGLSGQHSNGFDGLEMRSGTGPLDLAIHVPPQHNAMCAGLLELSGAGSPQARLVWGTVDTTGTASPQIHNGSLELAQFCPPLIPLPQTDRPLKVYYKKKKGNRQRLMEESQESATRHNIHTKSLQKNQDQCGGTGDTSEISMCVDFFKKITRHISNLLLTPSNDNLSIKWLE

SEQ ID NO: 356509 - protein, 52 aa, Zea mays
  Clone ID: MRT4577_88308C.1.pep
IISKGSMIPKHFYIFYLFILSFFLIHILGLYMQAIRFLGSVLATARSDAWAK

SEQ ID NO: 356510 - protein, 235 aa, Zea mays
  unsure (1)..(235): unsure at all Xaa locations
  Clone ID: MRT4577_88309C.1.pep
MSSWRLPRPVVGLGAKRIRRGSSVRLELEAQKTSRTQQNSSLTSLPLPLPLPLCGPNNLSLSLSLSLFFLSALQTISPSPSLLSKTNETKQETEKSPSPVAVAVAVAARIMSAAAAAEVGKEKGAATPGPGPGPGGACELCGAAARVYCGADEATLCWGCDAQVHGANFLVARHARSLLCRGCARPTPWXAAGPRLGPTVSLCVRCVRRGPRAVARRGHEDMRGAADRDADDAPH

SEQ ID NO: 356511 - protein, 40 aa, Zea mays
  Clone ID: MRT4577_8830C.1.pep
FQHLDCVPVLEDLTNPDRPIGVVSVDGAFVRTTALACTEP

SEQ ID NO: 356512 - protein, 95 aa, Zea mays
  Clone ID: MRT4577_88310C.1.pep
QGVSSPQRMAHGASGTTRNISPFKMTTELATKSSRSLLFYLRSYRYRHGAIYRATRNTISGRICLADGTLGSPHSRTFLSSNSKTAFPNLIKAPI

SEQ ID NO: 356513 - protein, 104 aa, Zea mays
  Clone ID: MRT4577_88311C.1.pep
KPRAHFYPFYIWLSPDAQRVDDLHGPHQSQAHRRRELVPGLLSSVPPQVSGCNMLLVLWCALYAIVYWHVHSPFFKVYFVQIKEGVRRSTFWVFPIPYHLKINW

SEQ ID NO: 356514 - protein, 34 aa, Zea mays
  Clone ID: MRT4577_88312C.1.pep
YSFYVWGEGKTPLLKGLLEKEHNQNNTLSSLMIK

SEQ ID NO: 356515 - protein, 98 aa, Zea mays
  Clone ID: MRT4577_88313C.1.pep
ASGTSSRCNRTSYSPRPLGFSAACAPLASSLAVTAGVISLRRSWRHPSRLFPLWPSVHWSSSLSLPGLGRSSSLLSLGHSRNSRLKLPRVASLRLCVK

SEQ ID NO: 356516 - protein, 146 aa, Zea mays
  Clone ID: MRT4577_88314C.1.pep
FPQTPDRSFLNWNKGGPTLFINGFQGDKGPPPGGPSLGFWGGFLGGPPPGVCLWPPQDLVSGIFLKVENPFLFLKTKPLFFRGGGFFFFPPKPPGPCKKNGGPNFLNPKRFPAPLFFFLEKTKGWFQTSMAPFPPQKKPLGPAPPP

SEQ ID NO: 356517 - protein, 67 aa, Zea mays
  Clone ID: MRT4577_88315C.1.pep
KAHQMCDLKWKAHTHVFSGGYMIIRSGKSILDQLAYIKTTTGKKIYDTLATKLENTCFAVPKHCFPS

SEQ ID NO: 356518 - protein, 54 aa, Zea mays
  Clone ID: MRT4577_88316C.1.pep
CLASMQSGLFGLSDTVFHLVVVRRSVLPAALAGVRLVGPPLVSVCSLSEACRFI

SEQ ID NO: 356519 - protein, 39 aa, Zea mays
  Clone ID: MRT4577_88317C.1.pep
FNLDLPRELYACTSTPGANATLSIWSRCTPWLRVKTVKQ

SEQ ID NO: 356520 - protein, 97 aa, Zea mays
  unsure (1)..(97): unsure at all Xaa locations
  Clone ID: MRT4577_88318C.1.pep
RRLVPAAGASPPPLVPRRAGASPXPGPRRAPAVAAXASHPRXXPPGHGAFVSQCRCRRWRRLRIAVGHGAKXRVCRAAEFECRVRRGRGXWGAXPGR

SEQ ID NO: 356521 - protein, 105 aa, Zea mays
  Clone ID: MRT4577_88319C.1.pep
ARYVSAHRPAERNLVFSRRGGARLIDIHGLHVNEAIPILKGELPALKSPARAAGKRMQVMVWVGIGPPPRGFRIGRLPIVVEQFLLDEGLQYTQPQGGLLRVMVY

SEQ ID NO: 356522 - protein, 69 aa, Zea mays
  Clone ID: MRT4577_8831C.1.pep
IENEQGSPSRDLHRAAHCPCSFDSAIGPQRRPARNSAQSPASDMIYSALLALGSAASSVYSPACTMCGR

SEQ ID NO: 356523 - protein, 86 aa, Zea mays
  Clone ID: MRT4577_88320C.1.pep
QGLIRQKEGYLGSIRKVWFSNKQAITANPIFTPFLCYLISLLSTLPPSTTGRKPVASELPQLHPQGRDSCTMMLRCGFANGDISTG

SEQ ID NO: 356524 - protein, 106 aa, Zea mays
  Clone ID: MRT4577_88321C.1.pep
ELSESVRGVLRGYPRLRLTHGRMVLEVRPTIKWDKGKALEFLLESLGFADCSSVLPVYIGDDRTDEDAFKVLRRRGQDQGVGILVSKHPKETSASYSLQGPAEVRP

SEQ ID NO: 356525 - protein, 62 aa, Zea mays
  Clone ID: MRT4577_88322C.1.pep
MFTRLCHTVEHNARSIGPSGDEDHCIRLDAQLVEIADDYGDQLFWTYLSFVQGGIAARELPL

SEQ ID NO: 356526 - protein, 310 aa, Zea mays
  unsure (1)..(310): unsure at all Xaa locations
  Clone ID: MRT4577_88323C.1.pep
LAAGGFFVVDVDEERAASWMARHPSALGRFERIVAAAEGKRIVMFLDYDGTLSPIVDDPDAAFMSETMRMAVRSVAKHFPTAIVSGRCRDKXQVFEFVKLAELYYAGSHGMDIKGPAAAKASSSSRHAAKAKGVVFQPASEFLPMIEEVHERLVQTTRCIPGAKVENNRFCVSVHFRRVDEKMWGELSESVRGVLRGYPRLRLTHGRMVLEVRPTIKWDKGKALEFLLESLGFADCSSVLPVYIGDDRTDEDAFKVLRRRGQDQGVGILVSKHPKETSASYSLQGPAEVMEFLLRLVEWKRLSRARLRLQ

SEQ ID NO: 356527 - protein, 250 aa, Zea mays
  unsure (1)..(250): unsure at all Xaa locations
  Clone ID: MRT4577_88324C.1.pep
MAMAAPHVSHSQPPVGRAALFAHPTTAQSSSPLRLPLHRAAVRPVRLYAVSTDAAPAPATAAAAMDAVAEWGLTPLAEADPEVYDLIEREKRRQRTGIELIASENFTSLAVMEALGSPLTNKYSEGMPGARYYGGNEVIDEVEELCRARALKAFHLDPASWGVNVQPYSGSPANFAAYTGLLQPHERIMGLDLPSGGHLTHGYYTAGGKKISATSIYFSSLPYKVSSDTGYVDYDRLEEKXMDFRPSSLS

SEQ ID NO: 356528 - protein, 60 aa, Zea mays
  Clone ID: MRT4577_88325C.1.pep
GRKCKVVPLGQWHFPLSPPEGVRHRSICSAVPKKKKKKKKKKKKKKKKKKKKKKKKKKKK

SEQ ID NO: 356529 - protein, 74 aa, Zea mays
  Clone ID: MRT4577_88326C.1.pep
RTKVSHNNTVVEHQELQGSHVAGCGMYANGERYKSGTLEHQKVIVHAGRRSDSIPAAAIKCRCPIHEPRPQAWT

SEQ ID NO: 356530 - protein, 68 aa, Zea mays
  Clone ID: MRT4577_88327C.1.pep
VLRSQKKHLKCDQLGRPRTTIKTRVTSIPTTPRNRVSNHILSSLLRGAQLMISSTLMIISAASVADRS

SEQ ID NO: 356531 - protein, 41 aa, Zea mays
  Clone ID: MRT4577_88328C.1.pep
EIEVLKSCISLEVLQSYIALRILLIFLFYSGTDRRISNLTY

SEQ ID NO: 356532 - protein, 198 aa, Zea mays
  Clone ID: MRT4577_88329C.1.pep
IAAVVATSTCTHCQREIPSSNIDLHSVHCARNLQKCEHCGEMVPRKLMEEHYNENHAPVNCSLCKETLRPEILDLHKSEQCTQRMVACAYCEYELPAIDIHEHQDVCGNRTEFCQTCKNYIRLREWIGHEMQCHVSSNGSEESSSARTIPEREVRPPPPVRPVRAVPAAQHRRLLFTIAVTGIAVMVGSILFQKEESF

SEQ ID NO: 356533 - protein, 116 aa, Zea mays
  Clone ID: MRT4577_8832C.1.pep
LCSPFWCLGLCLHGAVFAALGSLPSFPVSFCHSPVSLSCVACLPMFFVGPFLLSFRRPTCFVCCSFPLPAFVLPFFFSLCLSSPFLRARACWLGAPLALGPARACAVSVSPCRAFR

SEQ ID NO: 356534 - protein, 82 aa, Zea mays
  Clone ID: MRT4577_88330C.1.pep
QGKIIKFVHVIFADMDLGGFLHIRKAGIAFLNSDFFANSGVMVKQSFVCMYQQLKCKHDIIIVEYRNNYLLYLIAKSETVLL

SEQ ID NO: 356535 - protein, 68 aa, Zea mays
  Clone ID: MRT4577_88331C.1.pep
QFMLRLQIWTSVVFSTLEKLEEPFELSFFATSGVMVKQSFVCMYQQLKCKHDIIIVEYINNYLLYLIV

SEQ ID NO: 356536 - protein, 258 aa, Zea mays
  unsure (1)..(258): unsure at all Xaa locations
  Clone ID: MRT4577_88332C.1.pep
IRHEADVSHWIPKRISGVLEGHQVAYVSCGTWHTALVTSRGQLFTFGDGTFGVLGHGNRESFSCPREVESLSGLKTIAVACGVWHTAAVVEVIVTQSSSSMSSGKLFTWGDGDKHRLGHGDKEPKLKPTCVASLIDYDFCRIACGHSLTVGLTTSGQVLSMGNTVYGQLGNPRSDGKLPCLIEDIMGEHVVQVACGSYHVAVLTNKSEVFTWGKGANGRLGHGDVEDRKIPTLVESLRDGAVRHIAXCGSNFTSAICN

SEQ ID NO: 356537 - protein, 107 aa, Zea mays
  Clone ID: MRT4577_88333C.1.pep
QGHPHQFGRQLSHAGAGRRAHDSHATTLWLRQRVRRRLLHDCHLRHRRYHHPRMSLTAPARPAANHRRCLDRARSSSRSRSATRFQDPPLAVVVVSSPVVASATRSS

SEQ ID NO: 356538 - protein, 79 aa, Zea mays
  Clone ID: MRT4577_88334C.1.pep
GKKKKTRQACQPPSRPSFRRRCRHHRLYKTLIRSRHGGCCGGHLAPSYATTATPTFYCCAQRAHPPGLCHKRRGGDRKE

SEQ ID NO: 356539 - protein, 437 aa, Zea mays
  unsure (1)..(437): unsure at all Xaa locations
  Clone ID: MRT4577_88335C.1.pep
MNAPRWTSTCKIAPYANHSYQTGKQNRLHVLPSDDLQFAHRDHAAGTEKPNFEKVGSGAIPSADLCIKDDFDKRFQEDLDEAVRQSLGCDAYPAGTISTSNGTEVYGTGLKNAAGEYNCFLNVIIQSLXWHIRRFRDEFLKTSLLHKHVEDPCAVCALYGIFIDLSKASKGQREAVAPTSLRIALSKSYPNSKFFQEGQMNDASEVLGVIFECLHKSYTSRTVYHGVSHEKNSIGSWDCANISCITHNLFGMDVYERMNCHNCKMESRQLKYTSFFHNINASSLRTAKMMCPDSSFDELLKVVIMNDQLACDQDVGGCGTPNHIDHILSNSPHVFTVVLGWQNNKERVDDISATLAGISTEIDISIFYRGLDQGSKHTLVSVVCYYGQHYHCFAFKDGRWVMYDDQTVKVIGSWGDVLVMCEKGHLQPQVLFFEAAN

SEQ ID NO: 356540 - protein, 86 aa, Zea mays
  Clone ID: MRT4577_88336C.1.pep
PATSLGTQRPLLLVGSRRPRSTRSLCHTLRGPGRRAEGLVWALGGPLLVLPASSSPTWDSSQGSEAFRCWEQGRRVGVEQPPLCVG

SEQ ID NO: 356541 - protein, 83 aa, Zea mays
  Clone ID: MRT4577_88337C.1.pep
KKLVTYTVVPESIHQVSVGKSKYIYSSTNVTLSLIFMFSHLRNYTILYLMPFLRAAHVDVIIYLSKLNYKNGLISTCTSFLIA

SEQ ID NO: 356542 - protein, 48 aa, Zea mays
  Clone ID: MRT4577_88338C.1.pep
LWLFLNIFAVSTFFPNDTLLLAILQHLNPQPSNHTQQKHHATQTPLST

SEQ ID NO: 356543 - protein, 201 aa, Zea mays
  unsure (1)..(201): unsure at all Xaa locations
  Clone ID: MRT4577_88339C.1.pep
QVTYARRYGVFFYSNATAFVASVVTINLLLMQSLSRHRGWLRXCSLQAVMILNQLGLMAAYAAGSCRELAMSAYVVALVAMVALYVCAHVLLFALCALRRRGAVAADDAAAPAQAPPDEEPGAVERSRKYLLIFATLVATVTYQAGLSTPGGFLSNSQDDGDHLAVAGDPVLPGRFMGFFYFNTTAFVASLGVIMLLMSRT

SEQ ID NO: 356544 - protein, 49 aa, Zea mays
  unsure (1)..(49): unsure at all Xaa locations
  Clone ID: MRT4577_8833C.1.pep
SSVVIQRWCSSSTRFNASLNRETSSSLSWSVVRSLVXRQQLHRSQMLIF

SEQ ID NO: 356545 - protein, 56 aa, Zea mays
  unsure (1)..(56): unsure at all Xaa locations
  Clone ID: MRT4577_88340C.1.pep
GLMLETPLLMDIGIMPITKGRQTDXKEWSELFSKAGFREYKILKEFGARVAFKVYP

SEQ ID NO: 356546 - protein, 114 aa, Zea mays
  unsure (1)..(114): unsure at all Xaa locations
  Clone ID: MRT4577_88341C.1.pep
MATGSSFLQECHSARCHTLAKAKIHIEQXRGKEYELXNAQKAKESRQLIANKKSVQMMNRPMKIESDGNLDPKKGGAVLDSTKTIGLTSVKXWDDWHIVGFPGXXLLSXSGSGF

SEQ ID NO: 356547 - protein, 97 aa, Zea mays
  Clone ID: MRT4577_88342C.1.pep
VNCMPRNIPLIIEYVAFLGLICCLIIYNTNIVFLSIIIAFVALEIMMESFQVQLKQKIAHIYNAIFLLSALITNIISNGFYLSTVFPVFFMAVLLFV

SEQ ID NO: 356548 - protein, 67 aa, Zea mays
  Clone ID: MRT4577_88343C.1.pep
TQPNGGLVIGYSLACQQPAFLCSDLFSFAGLVVRYLSFFFPPFRLCSETAQRFKVLLYCLPMLLLIT

SEQ ID NO: 356549 - protein, 74 aa, Zea mays
  Clone ID: MRT4577_88344C.1.pep
QRRVRGMCAASMQGLLRICTYVFDDGVKLSSLISIPLWIYPVSVAHVVLTPKALFRKKKKKKKKKKYSALLPLL

SEQ ID NO: 356550 - protein, 110 aa, Zea mays
  Clone ID: MRT4577_88345C.1.pep
VHVHHQPIHVSDGGFLGSFYHNLQESPRNHPGTNPRARVRATQRQMPKHWLATTDAGLNMYTRPPPPYRSPELFHVAPASIKESEHRSQTLFCNRFIVSHAEKLIPDIFC

SEQ ID NO: 356551 - protein, 102 aa, Zea mays
  Clone ID: MRT4577_88346C.1.pep
RESGQGPKAGKKKKKKKKARTGRPPGQDSPHGQLQQRGPARPQSECGQESSPGARAQVLCEPTLGRGRPPSGPDPVAARGAVNESGWLGMQHKSAGTNPCLG

SEQ ID NO: 356552 - protein, 78 aa, Zea mays
  Clone ID: MRT4577_88347C.1.pep
DDTYPHEILDYEAVVRRGKADLRRSPTLARNCHQSVATETRSLQGTHTAGADNSPAPPEPIHHPRRDVPPASRLTHQV

SEQ ID NO: 356553 - protein, 45 aa, Zea mays
  Clone ID: MRT4577_88349C.1.pep
NLIEQKKKKKKKKKKKKKKKKKKKKKKKKKGKKRRRESKLKKQSK

SEQ ID NO: 356554 - protein, 59 aa, Zea mays
  Clone ID: MRT4577_8834C.1.pep
LCHGKYKTGSFSATPSVCKFRKRLSIHVAQVLATYLPVHLVQQSHKEGLGLLCSLDLAI

SEQ ID NO: 356555 - protein, 40 aa, Zea mays
  unsure (1)..(40): unsure at all Xaa locations
  Clone ID: MRT4577_88350C.1.pep
GHRVREVHVFSKLHGSVCRKMSHIACFHLRSSPLVFFFFX

SEQ ID NO: 356556 - protein, 52 aa, Zea mays
  Clone ID: MRT4577_88351C.1.pep
YLVHLDSSFFAHFMCREVHARVRVVHLALIRVTPQEVSRLMFCVIKIHMTRI

SEQ ID NO: 356557 - protein, 137 aa, Zea mays
  Clone ID: MRT4577_88352C.1.pep
DNSIFCITSVNSNTLPLSDVSFLEFCIKQSTTEAEILLHENIGSLDRNHEFIDKFLNYKAFLSADVIHMAFQAPSSRGDGAGWANPAAAARGGTVIDAELDGGGKKKGKKGKKVSAAVLGFNVASNRIMMGEIQNVD

SEQ ID NO: 356558 - protein, 179 aa, Zea mays
  unsure (1)..(179): unsure at all Xaa locations
  Clone ID: MRT4577_88353C.1.pep
VRRKQPGDGHLPAIAIDLEATYSCVGVSQHDRVEIIANDSGQTSHSLRVVTIACHPTAAAALIXDAXQNHGDMNPINXVVDAKSLSAXQFRDASGPSDIPWSAFKVISRPGEKPMIVVQHKGDATPIAAQEISSMALIKMPEIAEPYLDSTTKNAVSTVPAYYNDPERPXTKDAGRARL

SEQ ID NO: 356559 - protein, 673 aa, Zea mays
  unsure (1)..(673): unsure at all Xaa locations
  Clone ID: MRT4577_88354C.1.pep
MSEKELNSGSTIIMGSASDEAKNLHEPPLDPKSENLSSDISGQVQESNLSAEDTPPGITAAVATEVKVTDTQETKKAEKKRKQKKKQAAADAGKGTSKAVVAQQPRXQETEVDNSDIGGNKHDLTDGTEELFWGSPITVQNEILPSKSFPEEHDADKAESQFSSLSSDPHSMASQRAWKQPTQGLRLKSLLEIQAEEQLRAQKGLTTETAKPAASVPSISWNGISISSEQHYGGSNISLGSMESAVERNKRSQLHDLLAEEVLARSSIADNENNANDAFFSPLSPAAVQADAPALDDNDFIEAKDKKNKKRSAKTKASTVKAPSPVVSFDPPAISMPSEKGKSAKQAQQELEILPAPPSGPSFGDFVLWKSDQTSSVPAPAWSNDSAKVQKPLSLRDIQREQERRTVSIQQQAPSPTPAKVAPNQRSHVNASSWQASGPPPSQAVAPVQMSSNAPSHSRSSAEDDLFWGPSEHSKQDTKQSEFPSLLSQSRSSMMKDHSALNRQKSQAGRLPVPSAATANQSGKGKAEATNKQTEAMDFRDWLDSEWAKLTGTNDVSFLEFCIKQSTTEAEILLHENIGSLDRNHEFIDKFLNYKAFLSADVIHMAFQAPSSRGDGAGRANPAAAARGGTVIDADLDGGGKKKGKKGKKVSAAVLGFNVASNRIMMGEIQNVD

SEQ ID NO: 356560 - protein, 276 aa, Zea mays
  Clone ID: MRT4577_88355C.1.pep
MTRRNGCTIYVGNLPGDIREREVDDLFYKYGRIVEIDLKIPPRPPGFAFVEFEDARDAEDAIYGRDGYNFDGHRLRVELAHGGRGTSSFDRSSSYSSAGQRGASKRSDYRVMVTGLPSSASWQDLKDHMRRAGDVCFTDVYREAGATIGIADYTNYEDMKHAIRKLDDSEFRNAFSRTYVRVREYDARRSRSRSRGRNRSKSRSRSHSHSYSRSRSRSYSKSRSPRSRSASESKSPVKARSPSRSPPISPRRDKSASRSPARSKSLPRSCSPAKSE

SEQ ID NO: 356561 - protein, 52 aa, Zea mays
  unsure (1)..(52): unsure at all Xaa locations
  Clone ID: MRT4577_88356C.1.pep
LKXXCGGGVFLFENLINRGVEVVVFFGKKKKKLKKKKVKIKIKKKTIFFLFQ

SEQ ID NO: 356562 - protein, 55 aa, Zea mays
  Clone ID: MRT4577_88357C.1.pep
FWSFLCCLVPSSSSGTQSYQHGGTFTARMDLDRGHACLYVLQLSGTSSGRNRAKE

SEQ ID NO: 356563 - protein, 41 aa, Zea mays
  Clone ID: MRT4577_88358C.1.pep
MMQTLLVFEADDKKKKKKKKKKKKKKKKKKKKKKKKKKQKP

SEQ ID NO: 356564 - protein, 46 aa, Zea mays
  Clone ID: MRT4577_88359C.1.pep
MLNLMFYLLLLQLGRIVEIDLKIPPRPPGFAFAEFEDARDAEDAIY

SEQ ID NO: 356565 - protein, 81 aa, Zea mays
  Clone ID: MRT4577_8835C.1.pep
MAQQRLLALLLVAALLVLSCSQGLVEARKVQVRRAPLGGGRLLPEAMMAYTTTDYGPPTANTNTHGGMVPSPDDPSSPPTH

SEQ ID NO: 356566 - protein, 61 aa, Zea mays
  Clone ID: MRT4577_88360C.1.pep
ESPPEACEREQGGDFGTPRGEPPTPPTGDLLAGPQPQGPAPATPSPSRRHRSDVGGYQEGG

SEQ ID NO: 356567 - protein, 94 aa, Zea mays
  unsure (1)..(94): unsure at all Xaa locations
  Clone ID: MRT4577_88361C.1.pep
PFRRVPPRLPSGCIPXSHVNLPLNVLGTRXGSHXMHSAMHSIPXSAVEPDRVVPEQPKELLPRLVYEFFRITATSSCSTYSDSDSSMDLCSCPF

SEQ ID NO: 356568 - protein, 66 aa, Zea mays
  Clone ID: MRT4577_88362C.1.pep
RGPLGPGFGFKPQRIWAQRAPPPPWVPGRGPWQVPPPPLKAREGRGPFGFYPWSEKDLWFIVGAFL

SEQ ID NO: 356569 - protein, 160 aa, Zea mays
  Clone ID: MRT4577_88363C.1.pep
IVQDIPNPLPENLPMVLIKPPEACSTAEVYKRFRLEQTSQADPMTLLEEITQNGISQDVCVNDLEPPAFEVLPSLKRLKKRIIAAGRDDYSAVFMSGSGSTIVGIGSPDPPAFVYDDEDYKDVFVSEACLLTRDENEWYREPISANATSAKEGLQASVAD

SEQ ID NO: 356570 - protein, 100 aa, Zea mays
  unsure (1)..(100): unsure at all Xaa locations
  Clone ID: MRT4577_88364C.1.pep
MEPAEAYQDRSDPGKRASSKQFGEDALKAGMAGDGGMHDPSDKTHSFCGGGSPRGSPTNAGLKEHLTDDGVNTLNVXLNDHWHGTSKTLCVSNIDHCYEC

SEQ ID NO: 356571 - protein, 215 aa, Zea mays
  Clone ID: MRT4577_88365C.1.pep
MACSAHLVSQSLYSSHRASPGGPRNLRSQGRPPARASPSARPGSRVSGCRGVSLRVAASFEQGRRQIDKDAGMTRLNLFSPCKINVFLRITGKRPDGFHDLASLFHVISLGDTIKFSLSPSKSRDRLSTNVPGVPVDESNLIIKALNLYRQKTGTNNFFWIHLDKKVPTGAGLGGGSSNAATALWAANQFAGCIASEKDLQEWSGEIGSDIPFFF

SEQ ID NO: 356572 - protein, 404 aa, Zea mays
  Clone ID: MRT4577_88366C.1.pep
MACSAHLVSQSLYSSHRASPGGPRNLRSQGRPPARASPSARPGSRVSGCRGVSLRVAASFEQGRRQVEVSYDPQARFNQIADQIDKDAGMTRLNLFSPCKINVFLRITGKRPDGFHDLASLFHVISLGDTIKFSLSPSKSRDRLSTNVPGVPVDESNLIIKALNLYRQKTGTNNFFWIHLDKKVPTGAGLGGGSSNAATALWAANQFAGCIASEKDLQEWSGEIGSDIPFFFSRGAAYCTGRGEIVQDIPNPLPENLPMVLIKPPEACSTAEVYKRFRLEQTSQADPMTLLEEITQNGISQDVCVNDLEPPAFEVLPSLKRLKKRIIAAGRDDYSAVFMSGSGSTIVGIGSPDPPAFVYDDEDYKDVFVSEACLLTRDENEWYREPISANATSGKEGLQASVAD

SEQ ID NO: 356573 - protein, 502 aa, Zea mays
  Clone ID: MRT4577_88367C.1.pep
MELVEGELGRFAMIRGEEPTQTYNRLKTLVNKIRSYGSIRWTDHDVVRLMLRSFTVIDPHLVNLIRENPRYTKMMPEEILGKFVSERMMQPVAGRRCQVPSKVAQVEAASLNEDEMALIIKRFKTALKGRKEYPNKSKTRGNRSCFKCSKTGHFIANCPDNVNDQEQEKSGKKEKKKSYRKAKGEAHLRKEWDSDCSSSDSDDEGLAASAFNKSSLFPNERHTCLMAKEKKVIVRETPKYTTSSDDDSSDDEVDYTDLFKGLDRAKVDKINELIDSLNEKDRLLEKQEDILYEEHDKFVSVQKSLALETKRNEMLSSELSVCHESISSLKILNNDLNAKLEVANKSSSCVEHVVVCNRCKDFDIDACDKHLASITKLNDEVASLNAQLKTCKIDFDKLKFARDAYTVGRHPSIKDGLGFRKEAKNLTSQRAPIPNKEKGKAPMASSIQRNHAFIYDRKCSRNVHYNRSYVDYNDSHATFASSSTFVHGRPRKSNGVHHVPRR

SEQ ID NO: 356574 - protein, 133 aa, Zea mays
  unsure (1)..(133): unsure at all Xaa locations
  Clone ID: MRT4577_88368C.1.pep
RGHPEEHAETHQAKLPSNDTTRATKXXARLAXLALFVSATNAFIIGGGALAXFFXXPQAXPPXTAGGGEHPAAQAXRXQQAXAASAXQQPENTRQQQXXAQXTRQTNATQQQQQXXPARSQXDGGNPGADXQQ

SEQ ID NO: 356575 - protein, 43 aa, Zea mays
  Clone ID: MRT4577_88369C.1.pep
LQINSSSIGVIVVLSAQLTTKATLYESSHGMSKKTVCATPPEF

SEQ ID NO: 356576 - protein, 40 aa, Zea mays
  unsure (1)..(40): unsure at all Xaa locations
  Clone ID: MRT4577_8836C.1.pep
TLFXXNKNLHMCEKQCTGLGDITFLCKRSYYHALFSGIHA

SEQ ID NO: 356577 - protein, 60 aa, Zea mays
  Clone ID: MRT4577_88370C.1.pep
TCSQKEGYPRPSFPDLSLSGRRRLRQGPRPLPSYTRSPSPSTSTMSVVTSLVMDRNSYQN

SEQ ID NO: 356578 - protein, 203 aa, Zea mays
  Clone ID: MRT4577_88371C.1.pep
FRPPAPGASSSPTNLSIDRSSFSFSMAVDLTPRQPAKAYGGDGGAYYEWSPAELPMLGIASIGAAKLALAAGGMSLPSYSDSAKVAYVLQGKGTVGIVLPEATKEKVVAVKEGDALALPFGVVTWWHNTPESATELVVLFLGDTSKGHRPGQFTNFQLTGASGIFTGFSTEFVGRAWDLKEDDAAKLVSSQPASGIVKLTAGQ

SEQ ID NO: 356579 - protein, 94 aa, Zea mays
  Clone ID: MRT4577_88372C.1.pep
WPPNLSSPSFPAEKEVVLKPPGLKTRNYPVFFKNLGVPPLSMGLWFGYPPLGEKPRFQMCFKFGGGVFPWAMFLGGRVGFGFNPKLNMQFSPWF

SEQ ID NO: 356580 - protein, 131 aa, Zea mays
  unsure (1)..(131): unsure at all Xaa locations
  Clone ID: MRT4577_88373C.1.pep
MAATEYFVALLGGARLPADLLPRRSSACHQKVKIQDAPRVCLHRARVGCEDTSASGGDQLIEDLKAKWDAFDDKPTVLLYGGGAXRSIWMTTGDGAAINAEPLLPKIPELDDLDYTAWFVDRYLTLQANDE

SEQ ID NO: 356581 - protein, 84 aa, Zea mays
  Clone ID: MRT4577_88374C.1.pep
MDKLETICWHTLDVIIRTFLALFVVFLLGQCLIHMLYFGSTKKEKKFNSLSVRSQLKLSHPDHVLVKNAAASEATFERALQAVA

SEQ ID NO: 356582 - protein, 103 aa, Zea mays
  unsure (1)..(103): unsure at all Xaa locations
  Clone ID: MRT4577_88375C.1.pep
TPACTAYRECSEFVFRGVSNKPPCARRGPAILSGLLCGVTHATQPSDVARSSVPFALIMEEERSGSRSEVRGGGVCGEGTGAGSRLNHSASYXRAADVVPSSR

SEQ ID NO: 356583 - protein, 57 aa, Zea mays
  Clone ID: MRT4577_88376C.1.pep
KCDICIFSLLIFLFTQVGLGEYKHNNPFKCFSRSVWDRRPAKKDKFPHVINEKERNY

SEQ ID NO: 356584 - protein, 40 aa, Zea mays
  Clone ID: MRT4577_88377C.1.pep
KPCKHPTACKTTYEFHELLDNGMDGYLNARHFMARYCDEF

SEQ ID NO: 356585 - protein, 77 aa, Zea mays
  Clone ID: MRT4577_88378C.1.pep
AFSPAQVTADYPSRSMTSCINNKKNSRVNFVICTLISRKDQPTAFIVGLQVELWWMHKHATDSVYTISSRSCSPTRP

SEQ ID NO: 356586 - protein, 51 aa, Zea mays
  Clone ID: MRT4577_88379C.1.pep
HFPLIKGWNENKFCRVLVVQQCRNFAQTFDDKKFFETILGSFCKPFKRFNT

SEQ ID NO: 356587 - protein, 63 aa, Zea mays
  Clone ID: MRT4577_8837C.1.pep
HAFLGWYSTSTSATPTNPVAEYDDVPPYYWIIYFFERGCMHLSLSLYVIMQCEDTHYHVWYDQ

SEQ ID NO: 356588 - protein, 112 aa, Zea mays
  unsure (1)..(112): unsure at all Xaa locations
  Clone ID: MRT4577_88380C.1.pep
RPQAPDRKPGTTHAAGHHHTHHKLKERRKREGKKNTGRKKNQXEKGKEPAEWEDSQAQAILEAENANQQPKSHPKDRNNNNARQTESTGSRKAGVTKQPYRRRKAGRKNHAR

SEQ ID NO: 356589 - protein, 53 aa, Zea mays
  Clone ID: MRT4577_88381C.1.pep
SLICLAPGSASTLCSCHYEFKRLDFTALGRPSILVTKVARYGQDSWCEIQPSI

SEQ ID NO: 356590 - protein, 96 aa, Zea mays
  unsure (1)..(96): unsure at all Xaa locations
  Clone ID: MRT4577_88382C.1.pep
PLFLSLIKILSTHSLLYHRYVSILRDTYTINHISTLSIYINNPNYYNLNPLLSHLIXSITPILIFNTTLNIXIYYFHTNLITYSIIHFILSSYPPN

SEQ ID NO: 356591 - protein, 65 aa, Zea mays
  Clone ID: MRT4577_88383C.1.pep
IWVSKGAFFLEKKWFGFIDHDFRLQGIFFLGEKGFFGLKFKQGLWAPERVWPSCNKTFFWRGASL

SEQ ID NO: 356592 - protein, 73 aa, Zea mays
  Clone ID: MRT4577_88384C.1.pep
ETHVLRALRAPHARERVGCACLISAQILTRLLELLDKIHTQLDREGHELALCVTGYSGGPKGSVLRLLNAAQI

SEQ ID NO: 356593 - protein, 94 aa, Zea mays
  Clone ID: MRT4577_88385C.1.pep
FGFSTRAPVLGGSWFCSLGSLLLCYPLASRRYIHSPGLPTRSAVARPPMARYLPCGLCRWRGLEVARGARAGPAAPTAGPGLGTRYAHCAGVLT

SEQ ID NO: 356594 - protein, 65 aa, Zea mays
  unsure (1)..(65): unsure at all Xaa locations
  Clone ID: MRT4577_88386C.1.pep
MAYRGLVFYMTVGGAPAGRIAMELYANEVPKTAENLRALCTGXKGVCKYGKPLHYKDCTLHRVIP

SEQ ID NO: 356595 - protein, 103 aa, Zea mays
  unsure (1)..(103): unsure at all Xaa locations
  Clone ID: MRT4577_88387C.1.pep
LLXALGGSVFLXPVGHLSVVPPVAYLPQLLLAFNPLALPTVTAYQQQQLQQFLLSLIQLAMVNPAAYLQQLQLLSSSPVAVVNAPTYLQQQLLQQIVPLPGPR

SEQ ID NO: 356596 - protein, 56 aa, Zea mays
  Clone ID: MRT4577_88388C.1.pep
ICWPELQAASSHLYSNRGSLASQRLHTSCSHSHSRTDELTHTHVLEVELTYYLLWS

SEQ ID NO: 356597 - protein, 91 aa, Zea mays
  Clone ID: MRT4577_88389C.1.pep
LVRPIVLCHVSSHLILSSSGSKELHVFPPVINSTVEPYINVLSQPYLPLKGLFLSNKNSPHPSPVQLLMHILITDNFGTIKCKKLQCHNVC

SEQ ID NO: 356598 - protein, 89 aa, Zea mays
  Clone ID: MRT4577_8838C.1.pep
PLSEQYFASRPRSGHSAACAQRHVGIEDALRPATDPTDARSTAQVTSLYERCQETNSSDHVMEAFNTTDASMDKPTPTTRRMISYHPLT

SEQ ID NO: 356599 - protein, 95 aa, Zea mays
  Clone ID: MRT4577_88390C.1.pep
MVTASSFCWEMRRPRRVHLLACLVVLAVILTSGPFVETSMARMMIRGVDPPRELLPALAVVVAAEADDGRRSAVKATAEGRGKREVPGGADPQHH

SEQ ID NO: 356600 - protein, 202 aa, Zea mays
  Clone ID: MRT4577_88391C.1.pep
VPLTEEEVEELVVEFLEVESKAAQAQESLEKESLDKIETEVRLELSERLQGDELESAVSTEMEQFQMQWENELDDLEIRSSILLEQLDAAGIELPRLYKTIESQVPNVCQTEAWKSRTHWAGSQVPEEATQSIKKADEYLQSCRPVRRKHGRLLEEGASGFLAGKVPVGDDDSVKCHEKSWSSFNELIKSKESAENTFGSSN

SEQ ID NO: 356601 - protein, 431 aa, Zea mays
  Clone ID: MRT4577_88392C.1.pep
GITPLAAALRLLFTKNAMNWFAHPYLAFLMFVPTSLIGLLLPRLTWGLSEQAHFWGAFGLYSLITMVYTLAGLSGGFLTFFISMSMLLGRFISRIIRKQWSQQSPRSLVAYVLPMTPCLLYGLYYGGFLIQFLIEKMGMMGSLPKPYGYFVPDVIVGAVVGLVVGWCFGPLSPVASRWLSKTSIIHGFLQITVVALAISSQLFPYSTGAPKRVVLQHTFVTDANNIVDSSYGFSVVDSNSLEFLFNNAPEAAKWLKDNSELSFEEKYRSDRSSWLALYPVPFLFSGSLKFQAQTEEIKKYYQHFPQLAVQEIWDNNGQRRVHLKLALGSLSEIWTSVLNITGPLSNWSFADNMLPAPQTVSGGPPSYICRLSGKSDVDWSFWLEANSSESLRVDVAVLDQYLVDSTKKLKSLFPSWADLTAFTTFFSTYHL

SEQ ID NO: 356602 - protein, 39 aa, Zea mays
  Clone ID: MRT4577_88393C.1.pep
IQSIKNNGSTDFLHALTKPVLHHTHLTTWLRHTMGSRYL

SEQ ID NO: 356603 - protein, 107 aa, Zea mays
  Clone ID: MRT4577_88394C.1.pep
MAGAQCGTGPRAGPLLLVLVLVLCGFLVLLVPAARRGDDDETEEFPVASSASSSSWHWHAADGRRRALPRPAAATWPWRPAQPRARGRWNSAGQDGKHEVPSGPNPD

SEQ ID NO: 356604 - protein, 56 aa, Zea mays
  unsure (1)..(56): unsure at all Xaa locations
  Clone ID: MRT4577_88395C.1.pep
FHHAXRSTSSLTTYWTVYMEGHDICTHGVYKVRHGRNQSKRIRDSSWGGATANTPV

SEQ ID NO: 356605 - protein, 50 aa, Zea mays
  Clone ID: MRT4577_88396C.1.pep
SVLLSEDRASKIADINVWRGVISQGQTTTNCYQQALFACLLAGDVYHFCA

SEQ ID NO: 356606 - protein, 483 aa, Zea mays
  Clone ID: MRT4577_88397C.1.pep
MEGGADAFGSSTAPLAWHDFLERMRQPSAAEFVKSIKGFIMTFSNRAPDPEGDSTAVQEFLENMEGAFRAHTPWAGSSEEELESAGEGLEKYVMTKLYNRVFASVPEDVKSDEELFEKISLLQQFIRPENLDIKPEYQNETSWLLAQKELQKINMYKAPRDKLACILNCCKVINNLLLNASIVSNETPPGADEFLPVLIYVTIKANPPQLHSNLLYIQRYRRQTRLVSEAQYFFTNILSAESFIWNIDGESLSMNELDFQRRMDSAREHMLGLSADSEYQDNQANPDVQDRRSQSLGANRNSDVSLSLKDHVQGSGQDMRRDSDVTVSGKQVEQVQSISDLEKKGTAELLNEDDLNKKFQEYPFLFARAGDLTIADVESLLNSYKQLVLRYVALAQGMGVSPETTLTQNGQTSDLVVSEEPENLDSVVKDNENSAIINKNVDDVISLNHRSEAVDTEASEQMNQRTAVDSSDDLKALGQPENA

SEQ ID NO: 356607 - protein, 176 aa, Zea mays
  Clone ID: MRT4577_88398C.1.pep
MAHARYSHRRTGLLLAVAVAVVVVASLVAAADASSFGFDLHHRFSPVVRRWAEARGGPLAADRWPARGTPEYYSALSRHDRARRALAGGADDGLLTFAAGNDTYQSGTLYYAEVELGTPNATFLVALDTGSDLFWVPCDCRQCATIPSANATGPDAPPLRPYRPLGSSTSEQVGCD

SEQ ID NO: 356608 - protein, 55 aa, Zea mays
  unsure (1)..(55): unsure at all Xaa locations
  Clone ID: MRT4577_88399C.1.pep
QAIYGLVPQPILKQHXQSGQVAGLLEAQIVQHLRAMCGLQQPTQCPYTAPGGVPH

SEQ ID NO: 356609 - protein, 91 aa, Zea mays
  Clone ID: MRT4577_8839C.1.pep
LETGSILDHKRAPRLARAPFLPKEFPLGRPLAPYIKGCRPFLHFPYKVITAHGWGLLLLSRRKASWLFTTRGISHVPSAWPEVFPPSLVAS

SEQ ID NO: 356610 - protein, 177 aa, Zea mays
  Clone ID: MRT4577_883C.1.pep
MSDPPGETDHNHRDGKHRRSHLHHLNVQVPPVASNIGCFAGCFRPSPTSSSSPAAHGTNCHGHGHGHGHRHADRPASPSLIRSPSAWIKAKGQSLGSGRHARRRSQDFQYDALSYARNFDEGGSGTDGVGEEEATSDALKHRCFTSRLPTSPPPESPSGMATSGNGKAAETGRHELE

SEQ ID NO: 356611 - protein, 88 aa, Zea mays
  unsure (1)..(88): unsure at all Xaa locations
  Clone ID: MRT4577_88400C.1.pep
LEAGREPVHKQVLRLVVLWATAAYDXTLXWSRTVAIPPDAPLCDLDRMPSAPIRKLSARLSQDPRGEDCPLAIPDGDTICRRITLMRR

SEQ ID NO: 356612 - protein, 182 aa, Zea mays
  unsure (1)..(182): unsure at all Xaa locations
  Clone ID: MRT4577_88401C.1.pep
GYLEAGLAGILLPILPPGDVGLAITTVYLHPKIVKFLKAGKGVILLQGRFTGRNGDIVRGFKEGTRDRTYGLCLGPCLTKYHMKAIRLDSAEITENKSRVLCFIMLVMFALLMTTRYTLDVNFKDVAIGGSYALSILDKNVGACKMLEAHLEERVKTGXNRGIFTELRFYMLLLPNEAALGV

SEQ ID NO: 356613 - protein, 63 aa, Zea mays
  Clone ID: MRT4577_88402C.1.pep
LVPPRTRPRTGCSGENKLGLIGFDIQYHRKISIPFTPPRPPHLFNSWTLEKQKQSHERLELEP

SEQ ID NO: 356614 - protein, 51 aa, Zea mays
  Clone ID: MRT4577_88403C.1.pep
ADPISDPISTASVVREYDGQYMDDQGLTKYVGDLLGQEHNARVGEELYPRT

SEQ ID NO: 356615 - protein, 64 aa, Zea mays
  Clone ID: MRT4577_88404C.1.pep
SYAYTDSLFLSLTKLDKGGAWETRGNGTGNPRDQYANCRHLEGRQHFRDALMQEHPQDHALQAP

SEQ ID NO: 356616 - protein, 38 aa, Zea mays
  unsure (1)..(38): unsure at all Xaa locations
  Clone ID: MRT4577_88405C.1.pep
IARSEPAHDDATFFNPMYLSXDVXVLIRLTSGCSNVIR

SEQ ID NO: 356617 - protein, 169 aa, Zea mays
  unsure (1)..(169): unsure at all Xaa locations
  Clone ID: MRT4577_88406C.1.pep
KLKKKREGGGEGGGGGGEGGARTPPTPEGGERKKARKKGTEGHKCKKSKKSKNDPEKRKDPSAPMAQYTDPPGQHGKTGSPGRQPKXKEPKGTEGLQHXNPKSNGARGPDRPXGQKGKGGKRAERGRPGGEADRPTRPKGPRGTYELQKRKNTLLGLGRPSDPGPDHPT

SEQ ID NO: 356618 - protein, 60 aa, Zea mays
  Clone ID: MRT4577_88407C.1.pep
PIGFRNWYFIQKGVKLIPRENVFWSNQEGVKLNTQIGEWLPKIFVLTNFVFEQMNFTYAL

SEQ ID NO: 356619 - protein, 74 aa, Zea mays
  Clone ID: MRT4577_88408C.1.pep
TISYSSFSTKKKIHEVSSYFLFVALALHKLSYIIRINSHHEKIKSIENGRGCVSQLTVPRRAPVAKSCSCRQPT

SEQ ID NO: 356620 - protein, 104 aa, Zea mays
  unsure (1)..(104): unsure at all Xaa locations
  Clone ID: MRT4577_88409C.1.pep
VAIAIFDGTKLEDIVPSSPSCVISHVIRTKSQMTDICQEGLVSVLASHGTTKDNPILPVNHAAVVHIKXGFESGKALSEAVQSAMEEQQICALKNVGPKYPPRR

SEQ ID NO: 356621 - protein, 58 aa, Zea mays
  Clone ID: MRT4577_8840C.1.pep
TGPNSRATLRSFHEPVSSLRVQFRPLGPSKSNRLACLHHQAVNYTLRAPKDNYSMHMI

SEQ ID NO: 356622 - protein, 69 aa, Zea mays
  Clone ID: MRT4577_88410C.1.pep
LCIPETTWWFFHRQLAITSCKIVFGSDLVDTVNLLFFRIISSGTDDNFQDIGSTELFLPYYRAFWFDEE

SEQ ID NO: 356623 - protein, 48 aa, Zea mays
  Clone ID: MRT4577_88411C.1.pep
DSKKYIYSLKTLTHAGIRRTSCSVQKRRQLIAARVSSSSSSSDRAQLI

SEQ ID NO: 356624 - protein, 66 aa, Zea mays
  unsure (1)..(66): unsure at all Xaa locations
  Clone ID: MRT4577_88412C.1.pep
SCLLHPAITXALXPASLAIPKTPSSAFLPVLFELDFYLHVYFTYLXPCFLFNCSCWTIWSPSLASL

SEQ ID NO: 356625 - protein, 76 aa, Zea mays
  Clone ID: MRT4577_88413C.1.pep
TTSCCCPTSAAGTNETRKAMADLRVRELEGARAQQAVVDSGGRTFPGSNKELPGASADTALGIKFKRFGFDLIAAG

SEQ ID NO: 356626 - protein, 39 aa, Zea mays
  Clone ID: MRT4577_88414C.1.pep
CREGKLRSTESGRRQTVIETWSLLLMHRPCLVGQSHSHL

SEQ ID NO: 356627 - protein, 104 aa, Zea mays
  unsure (1)..(104): unsure at all Xaa locations
  Clone ID: MRT4577_88415C.1.pep
GEVIGTAQLHSAPKNGDAQQRPXFNGSVKLPDIPGAKINVCMPSDAQHVEDTNMMSLDYMDAVALNTINNDRRLAYRLAYKSRTLLGSEAIIKQLTRSLATDVN

SEQ ID NO: 356628 - protein, 43 aa, Zea mays
  Clone ID: MRT4577_88416C.1.pep
HSSRPLPMSYPPSPNFCPVKLGISDGQKLSCYNLNSDLRDVKI

SEQ ID NO: 356629 - protein, 74 aa, Zea mays
  unsure (1)..(74): unsure at all Xaa locations
  Clone ID: MRT4577_88417C.1.pep
MSAYCRKYNDEPIKNAAYIDTPSMGILAANDSTGTIGXRLSSINVKNVEENRRTLPELLFCCPGALQYINRVIL

SEQ ID NO: 356630 - protein, 95 aa, Zea mays
  Clone ID: MRT4577_88418C.1.pep
LGELGRQPRRHQRSGSVVSSLSSSERDQNVRRLNGSFISVSLPPEMDKLKDVCMPVTGFTVTLQKSKPVATDYRSITIYPRKPVELSPFQIQTNF

SEQ ID NO: 356631 - protein, 79 aa, Zea mays
  Clone ID: MRT4577_88419C.1.pep
PPFLSFTIERTKARFLMYDWLREKGLVPPNFALSPLLACSDKRFFKYLVLKHQEGPEVWEKLKKEVAADKNARCASDHD

SEQ ID NO: 356632 - protein, 78 aa, Zea mays
  Clone ID: MRT4577_8841C.1.pep
SPLFTLELFLKHPHFFLNGGQKGLENLAKPGLGGGGKALGGTEPYLAPQGIDLTERKPGKGKRALELLGFFFNKPFTF

SEQ ID NO: 356633 - protein, 73 aa, Zea mays
  unsure (1)..(73): unsure at all Xaa locations
  Clone ID: MRT4577_88420C.1.pep
MDTLLFVFAGVGSAIAYGQLTNGGALDPAGLVAIVNAHALALFVGXSFAANILGRHLNAGVTFGLXAAGGHIT

SEQ ID NO: 356634 - protein, 148 aa, Zea mays
  Clone ID: MRT4577_88421C.1.pep
LAMASNDNVAVASEVSNAVTKLNYHLATALTGSGSGSENAATTVVTLAGKNSGATMEAAAAGDVEDLVVVGSADAEEHDEGHGQDDEEVVVEENVVITAYANSNYQAVNNSVLVAGSCAVDDPGVHVVVVEHVDEIRDYDEDIDGQEF

SEQ ID NO: 356635 - protein, 144 aa, Zea mays
  unsure (1)..(144): unsure at all Xaa locations
  Clone ID: MRT4577_88422C.1.pep
MASNDNVAVASEVSSAVAKLNDHLATALTGSGSENAGTVITLAGKNSGATMEAAAAGDVEDLVVVSSVDAEEHDEGHGHQDNEEEEVXENVVITAYANSNYQAVNNSVLVARSCAVDDPGVHVVVVEHVDEIRDYDEDIDGQEF

SEQ ID NO: 356636 - protein, 80 aa, Zea mays
  Clone ID: MRT4577_88423C.1.pep
APVLGGHWAKIVMHKLSCLLIQEKLVRYHVCKGADVRIVKPIRNSNLMLWSTTRGENHGVHVKWRMLSLTALCRADPLPH

SEQ ID NO: 356637 - protein, 49 aa, Zea mays
  Clone ID: MRT4577_88424C.1.pep
PFKPWTRGCSSCTYRSPFASAVLYHVNSAAFFDQCTVPRRRHGQDCSKL

SEQ ID NO: 356638 - protein, 116 aa, Zea mays
  Clone ID: MRT4577_88425C.1.pep
PGLLSDRGSRHGDGRRPSTSTNVRTHAWLVVALARRHTAYYYDCTNHHYNPPHAVPCMTSASTPLHMPCMASYLALQDCTVLYPPSTSANVLKQRRTCRDPALNGKETRGRAVQFL

SEQ ID NO: 356639 - protein, 157 aa, Zea mays
  Clone ID: MRT4577_88426C.1.pep
RNHQALFDWYHNNFSPHDDGSRLLDLLGRTTTTTKKPSTTAATTTKSLLTSVSGLAVVLNLLRRTKSYRPRSCLRTRSSHYSATPKRISRRRRSRTSSRKGLHREACWPTRHRRQPPTISSRVHMRRSTASLLAGATFRASRRKAGATDRQTCDRHW

SEQ ID NO: 356640 - protein, 95 aa, Zea mays
  unsure (1)..(95): unsure at all Xaa locations
  Clone ID: MRT4577_88427C.1.pep
THASDGEYFHKLSDXTFIHTDSKPANIQIGDDMKPKATESGLVQHAPAXDGKCVFVXTRHVGTIGYLEPYYTLTVPVTTKADVIRLCDILIELIT

SEQ ID NO: 356641 - protein, 66 aa, Zea mays
  Clone ID: MRT4577_88428C.1.pep
PFFFVFFLEKSLVRGATGPHYAKTKKGLLPTLFVFVQPGEKGKFYKPVNFGATMGCGKLGNPLHFP

SEQ ID NO: 356642 - protein, 97 aa, Zea mays
  Clone ID: MRT4577_88429C.1.pep
YRDLTSRSLHDSVQFNTMITSFSLHIAAGYIEHASFVRSSCLCSGEREEIARVFAVRLMDVKRERERERRILDGVFARPGPPGLALCYGFPFLRHGR

SEQ ID NO: 356643 - protein, 372 aa, Zea mays
  Clone ID: MRT4577_8842C.1.pep
MVCHLLGWSAAALAGRIHAGAVFLGDLVVGEFVLFTSYISCGLALPISPFFLLLLEEFGLQLQHLTPHSILQAAIFAHLWENSRDDWVIASAEANDRLALPSDGPRLDRKQWRAKPSLAPEFQFVLDRIKSLEAGGLTSMHVVGDFLKRRIAPLQQRAHLCCWFTGSNDIDRIQRGLGTDLSWVEDGDFGHGADPRRTQHHGSPDRQPGPPSWDPDLRCVGWRPPDCWRVPQRPRQSFPRFHRGPPPQAAPGCRRRRGDVGCAAPTDRLFRTPPPAPAIGAEEVGSQKCQRTAGGAEETGSQAQGAQRRANPPPPQPSGPPPPQPPPLSGPPPPTPPVDDLPQGYQQKQQQQQQQKQRSPRFQGRWKVQGPK

SEQ ID NO: 356644 - protein, 76 aa, Zea mays
  Clone ID: MRT4577_88430C.1.pep
IIIGSLKIQWGSTPPPHTKHNIHPKNHFHTITPQNYPKHHNRHQTNTSQDPTTYRRPTCPKNPSYTSNFGPLKPTL

SEQ ID NO: 356645 - protein, 89 aa, Zea mays
  unsure (1)..(89): unsure at all Xaa locations
  Clone ID: MRT4577_88431C.1.pep
MTFNIFSILMLLALSACVANATIFPQYSQAPIAALFDPYLPSMTDLVCENRTLXPYRIHQATLTCNLPLSHLLFQQSPVLSLVQSSVQT

SEQ ID NO: 356646 - protein, 76 aa, Zea mays
  Clone ID: MRT4577_88432C.1.pep
VTRTPYGLQLCTEVLVLDRPYVQQSYVFPRALRTYGQHPRVNISSETYLSNVLLVGEYIPFSILAEVFVGHAVINQ

SEQ ID NO: 356647 - protein, 181 aa, Zea mays
  unsure (1)..(181): unsure at all Xaa locations
  Clone ID: MRT4577_88433C.1.pep
MESSRIIVASLLLLLLAFAATAEARVVRELIGENACQQTCNQVHFKKMCQSLTKLPKVTTPRELLLASMRVAAEKAKEAKSRVDEYAARSHEGRPMESILSSCSSGYDNVVQTLEETEKIVATQGTQVDLNTKLSDAVTSAGDCDNAFQDFPEMKDPFLAMQRNVWRLVDNXLNIXVVVKQ

SEQ ID NO: 356648 - protein, 113 aa, Zea mays
  unsure (1)..(113): unsure at all Xaa locations
  Clone ID: MRT4577_88434C.1.pep
LAGPQQYLPXNELAAVNKQEQRQQQQLGPMKQLAGVSRRPLVIQRQRWRSCRPLAPSAGTLSQGQQWQPSNQRAMTKPAAVNQXPIIGGASLRVQMRDSSIIKLLCDEGRCPR

SEQ ID NO: 356649 - protein, 97 aa, Zea mays
  unsure (1)..(97): unsure at all Xaa locations
  Clone ID: MRT4577_88435C.1.pep
KHWGLGNKKIVTIQPAEKAQDVVLXKTKTKKQNALKKFNQKFVKRKRFHKMAKAVXNQVSDNYNRPDMTKQVLERISXVNHSIQDAKTGVKKKNRQS

SEQ ID NO: 356650 - protein, 72 aa, Zea mays
  Clone ID: MRT4577_88436C.1.pep
MRVMLVALSLLTVAASATSTDTISGCGCQTPAATHLPTSMHMTPTIQLSAPVHIPSSVHLPTAVHLPPPVHV

SEQ ID NO: 356651 - protein, 65 aa, Zea mays
  Clone ID: MRT4577_88437C.1.pep
TDKAYSGKLGSTDGSPAERPSSDATQDFFRHGPEIHQRAVPELPSPPTASGLHWQGGPRHGADTT

SEQ ID NO: 356652 - protein, 71 aa, Zea mays
  Clone ID: MRT4577_88438C.1.pep
PNLRHNFVFHSKPPKGTNRDKNSRFLIPLHPTAPRAFFIFVQPTDSRTFPRRGPPLNIGTGPRGGPNFPNR

SEQ ID NO: 356653 - protein, 78 aa, Zea mays
  Clone ID: MRT4577_88439C.1.pep
TRPICIRLPRPTILNPTMHYIGGCLHEQARDILMLELARLNCGQGRALHLMELNDLSLPSMALYNTATPADTPYPARD

SEQ ID NO: 356654 - protein, 83 aa, Zea mays
  Clone ID: MRT4577_8843C.1.pep
GGVFFFFFLVRDQILIVCKFQSSRHRRTVNEATHLAEKLLQDNSNGLCSSTSTMGGICNCGGTDKLALIAKWLAHLFFFLCKF

SEQ ID NO: 356655 - protein, 98 aa, Zea mays
  Clone ID: MRT4577_88440C.1.pep
VAIELLLFADADYDVRAVAGYHRRSLLVIQRILCHAGYFSRTIPVYLLTRQRRLTYTLSRTSALYLLMTYRGPISLDSTGETLCSLGACYCDRDWIWH

SEQ ID NO: 356656 - protein, 42 aa, Zea mays
  Clone ID: MRT4577_88441C.1.pep
QRSTASSTAALDASADILPGRAAYDRDTRQERRAEARERRSP

SEQ ID NO: 356657 - protein, 49 aa, Zea mays
  Clone ID: MRT4577_88442C.1.pep
LMVFYDYSKQNGITKQHTKGHRAVCYNCLMVFYDYRSAGCEVLFTLLAF

SEQ ID NO: 356658 - protein, 101 aa, Zea mays
  unsure (1)..(101): unsure at all Xaa locations
  Clone ID: MRT4577_88443C.1.pep
LLTLIAITTKASIIAQRSLAATSIIPQFLPPITSIAFXHPSTQAYLLQQAIAATMLQQPIAQXQQQSLAHLTIQTIATQHQQQLLPALSHLTMVNPVGYLQ

SEQ ID NO: 356659 - protein, 54 aa, Zea mays
  Clone ID: MRT4577_88444C.1.pep
KSGSPHPRSIKASTFFYLQGGKRTLTLFFPPMFPVSQSTKLSTKEWTLSPFDFY

SEQ ID NO: 356660 - protein, 68 aa, Zea mays
  Clone ID: MRT4577_88445C.1.pep
EDQIPTRLKHYLKEKRTRPKSIMLSNFFNYTYKKKALGIFYKKKCGFAGPANYFINTEKAKAESNSNC

SEQ ID NO: 356661 - protein, 60 aa, Zea mays
  Clone ID: MRT4577_88446C.1.pep
ERTSHRRRGEMKSLAHNLLNESSTCLHGRAIPTRVLRCLYLSCQNCLDLLLLLPQQGNRE

SEQ ID NO: 356662 - protein, 59 aa, Zea mays
  Clone ID: MRT4577_88447C.1.pep
ALNVQREPHRACGVGAGGRSHGAVAAEHHVHRLVGSQGRRDHGGTDTRGLLSQIGRSAT

SEQ ID NO: 356663 - protein, 269 aa, Zea mays
  Clone ID: MRT4577_88448C.1.pep
RGRPGWGKGGKDKNTAILWHGTVHAREWVTTMTVEYLAYQLIAGYGKDSNVTSFVDNYDFYLIPVVNPDGFVYSQTQDRLWRKNRAPPLPGANTSHPCWGVDLNRNWPHEWQGVGSSNNSCTQTYRGPSPGSEPEMSGMQHFADKLADSHGLKLFIDWHSYSQLILSPYGYSCEVVPETNAEHVELMSATADAIESVYGTKYTTGPTCQTIYATNGGSSDYVYDVSGAEWSLAFELRDTGTYGFILPPEQILPNCEEVWAGMQVMLSMI

SEQ ID NO: 356664 - protein, 147 aa, Zea mays
  unsure (1)..(147): unsure at all Xaa locations
  Clone ID: MRT4577_88449C.1.pep
PPLKGTKTGGPPPGGAPLKKGGPPGPGNFGPGNFCPFSLPPATGPPWLPRRGGQWGPKIFARNGWGPPGKNPKGVFFCQGPPPHFFFSPWPPGGPGFPPPPGPPFFWPPXGPPPPGGVFIFQKNYPPQPWGPFPPPKKEGGGLPSFL

SEQ ID NO: 356665 - protein, 100 aa, Zea mays
  unsure (1)..(100): unsure at all Xaa locations
  Clone ID: MRT4577_8844C.1.pep
ASPVLKQPDFIGPGVNVGGAWPFKXANNKHRRXTVTTTTQHGAAAATFNSVSGTCMFGPHLSGIATCHKSAHPDWSAAEIKTGILDTGYVVYGNNKNQGD

SEQ ID NO: 356666 - protein, 63 aa, Zea mays
  Clone ID: MRT4577_88450C.1.pep
YIAGDDKIEVPKESRPDHGFHATSSAQHGGLHVRLQQLGPDQRPLGPVAIHHLHNAHGVREHQ

SEQ ID NO: 356667 - protein, 150 aa, Zea mays
  unsure (1)..(150): unsure at all Xaa locations
  Clone ID: MRT4577_88451C.1.pep
DDDERRTVGTGAGSSSRSWDDDAHSPPQQHGRSGNSEAPPLLLRESELELTLALGCFGGAAPGKKEASSTSVDSRTSVSSSSTESGSAGSPERGVRRRLPPPVVSDDHRVGAAGPAXLTTTSRAGQRLDHEAGGLPQPPCWLHKCLNLAR

SEQ ID NO: 356668 - protein, 54 aa, Zea mays
  Clone ID: MRT4577_88452C.1.pep
CQKGFSCPNKACFFVGPRNWAPNWFVKLGVSNFPSPFHPELVCNVKRGGVPMKA

SEQ ID NO: 356669 - protein, 58 aa, Zea mays
  Clone ID: MRT4577_88453C.1.pep
QWNSAPKVMAKNSLKPTCNFGSKYTTYPGCVKCRAAKLEGDITEVIFLRLEKNPQSQT

SEQ ID NO: 356670 - protein, 605 aa, Zea mays
  Clone ID: MRT4577_88454C.1.pep
MAEVLSGSHEHRLSSALDGHYDEKRKSNVEYTEDEKKAVIAALKKKALSASQKFRHSMKRGRKSSKVMSISILDEREPEEVQAVDAFRQLLVLEELLPSQHDDYHMMLRFLKARKFDIEKAKQMWSDMLKWRKEFGADTILEEFEFEEADKVAECYPQGYHGVDKEGRPVYFERLGQIDVNRLMQVTTMDRFVKNHVKEFEKNFAVKFPACSIAAKHHIDQSTTILDVQGVGMKQFSKAARELIGMLQKIDGDNYPETLCRMFIINAGQGFRLLWGTVKSFLDPKTTAKIHVLGNKYQSKLLEVIDASELPEIFGGTCRCEGGCMKADKGPWKDPEIMKMVQSGDGRCGSLGTASFEAPEKMICEDDTYPKKQALFDGETQLAGDEHSQSQKISRGRIEHPHVSPLHEELIPTSIHTPGSPYSCDVPMVEEAIDAICKSHGTPPDEKIAITKAIINVSNGSKPPLFAGIIALVMSIATMVRLTRSMMPGKVLGAAIGGATLSEGKSKVQERQRSKLSEEAVEEAEDAVSAKRLSELEEKVIALLTKPASMPADKEEVLQAAVSRVSALEEELAATKKTLQETLERQLEIVAYIEKKKKSKRFFRW

SEQ ID NO: 356671 - protein, 548 aa, Zea mays
  Clone ID: MRT4577_88455C.1.pep
GPSRVSLNCPISFRRIKTPIKGRLCKHYQCFDYDNYMEMNSRKPNWRCPYCNTSSSFTDLRIDQKMMKILEETGDDVTDVLVFADGSWKVVPAQDEKSDRHRGDTIQQAGDAVETGSPSRDVIDLINGNDDGDMQMDWASAPEDSKPVLNSQDLSVSDYLTDFPMTAQTEDLNRGDGNNGGSNMASTSRQNLLLPPTSGLGSSSLGTLESILPQNVLHPVITDAVSPSLETSSASGMQHVSQETHCGTVQLQPQIGPVHGSEVRRLPIPRNPRREPIGVQGLTVPPQNPGSSTRLQPNILNCPPPIPLSSPSSSTYQAHQVKNPDSVIASRNSGSGPLPRTPSVAAASLHLQSTARDIRNTSSHLPSRVVGLPAPHLMGARPPPGISVQAGGANAYRTMQQTPTMDPLRHTRMSMNQTALAAAGQTTAAAYVRPTQADIQNHLFPVQQSQAPRSQQVPRTTTPPLQRAPPHLQPPSVPPTVPSTPQAGPSHGLPPELPVDDSWRPTGQMRGSLTGNAYSSAIRHYRGHSEQQQGEPRPPNTSGARRPQ

SEQ ID NO: 356672 - protein, 63 aa, Zea mays
  Clone ID: MRT4577_88456C.1.pep
TRSLGSRSCISLGAATRSESRLEKKRGRARIRVCVERASAMRRANVVVESMPVSLKEMSSRHI

SEQ ID NO: 356673 - protein, 69 aa, Zea mays
  unsure (1)..(69): unsure at all Xaa locations
  Clone ID: MRT4577_88457C.1.pep
QGPPYKVFXFKLDPPHKNKAPGGGGRGLLSLQRGTPPWPRLSKTPLLLPFGNLGQEGFQPFLNPKGGGG

SEQ ID NO: 356674 - protein, 88 aa, Zea mays
  Clone ID: MRT4577_88458C.1.pep
ELQPNRKMENRFAKIRELDSKGKKRNPLVLEEFQWENECVDEALGATEGLQGRNVLGLVVVWLGRPLLLSLIQGPMFILGSVQGMLKM

SEQ ID NO: 356675 - protein, 67 aa, Zea mays
  Clone ID: MRT4577_88459C.1.pep
FSTTKKAAFRKRCFPYAALGFDNWLLGGKSLRQKPSQTHPYYHHHNGTTTGRVPVRCILTPHLKEES

SEQ ID NO: 356676 - protein, 43 aa, Zea mays
  Clone ID: MRT4577_8845C.1.pep
INLMNVQISLAMCNSYLRNTFAYSKAKSRIAEETFYLTKHNML

SEQ ID NO: 356677 - protein, 97 aa, Zea mays
  Clone ID: MRT4577_88460C.1.pep
QLGILVAGRPEKLELIYSVSAKSSQHTSCFVAGLLGRRSQASNQAGCMLSSTSLLLVCPLMLLSANLPRIYSASFLFVGVVLIFFLEDIYIMHLLFL

SEQ ID NO: 356678 - protein, 151 aa, Zea mays
  Clone ID: MRT4577_88461C.1.pep
TWVEISFHGASVKAEQNVSKGIVCASTELANENIPRQSNTTKRVQMPSVPILRATYNKIGPQDFSNHIRTNYPTISGEKLGILLPEHNARGLANISEMRQSFQSSMFTFADKLINCIAENCSCCKANGHKQCILKSENQNNCTNLANIPMQ

SEQ ID NO: 356679 - protein, 57 aa, Zea mays
  Clone ID: MRT4577_88462C.1.pep
KLLLLPSNVACGTFTTNTIRLSIARYHSSTTTFFTCSNVPLKINVTLTCRRVTLLML

SEQ ID NO: 356680 - protein, 58 aa, Zea mays
  Clone ID: MRT4577_88463C.1.pep
RYASGSDEAETYLTRPAADPPRPRVLRRRPPKGFSHRACGSVSSLWCKPSDRKEELTS

SEQ ID NO: 356681 - protein, 35 aa, Zea mays
  Clone ID: MRT4577_88464C.1.pep
STPDVYHKVVPQIPVKSGGPHGAGVLGLHLEGPFI

SEQ ID NO: 356682 - protein, 97 aa, Zea mays
  unsure (1)..(97): unsure at all Xaa locations
  Clone ID: MRT4577_88465C.1.pep
MAKINIGIXNGFGWIGRLVDRVDLQSDDLHLGGGNDLFINTDYMTYMFKYDTVHGQWKHHEVKVKDSKTLLFGEKEXAVFGCKNPEEIPWGSVRAEY

SEQ ID NO: 356683 - protein, 55 aa, Zea mays
  Clone ID: MRT4577_88466C.1.pep
LWMSLVSPVLSFARSPSSTMYLVESGAFAPDPWGHQVPDPVLSSLRMYSSLLFRF

SEQ ID NO: 356684 - protein, 99 aa, Zea mays
  unsure (1)..(99): unsure at all Xaa locations
  Clone ID: MRT4577_88467C.1.pep
FFRDKFEXANRHVDNLDVVYRFFDNSEVQYRNFXQHPDPYIFPWAPGGLYFPKNPPPPQGFEFFFNFGKEAHLTKFFQTGAKFSQFQIIFFLIKFFFEK

SEQ ID NO: 356685 - protein, 65 aa, Zea mays
  Clone ID: MRT4577_88468C.1.pep
FPYVLLIATWKLKYGLYIATLEITTGHCTTMLGNITVHRRSIRWQLMISRNSVSYSLHQHRSHCC

SEQ ID NO: 356686 - protein, 67 aa, Zea mays
  Clone ID: MRT4577_88469C.1.pep
NTPFPLPLQVFSITLLTRTKRKRSSKTGDDLLHALQPPVSEQIPPACPELEYREPASLQLGDVDGLA

SEQ ID NO: 356687 - protein, 106 aa, Zea mays
  unsure (1)..(106): unsure at all Xaa locations
  Clone ID: MRT4577_8846C.1.pep
YHYYGRLDTNREALDGMNHHSSLLTLEGQKFQCQSIFAGDIGSLPLQVCKNTIVTXHCQASDPKRGRLIFVAGSYSPSKDTPQIPSIPYVWRESSSRSRMFRLNYC

SEQ ID NO: 356688 - protein, 141 aa, Zea mays
  unsure (1)..(141): unsure at all Xaa locations
  Clone ID: MRT4577_88470C.1.pep
SSICYTSGTTFTPQGAVLAHGNLIAYVPRPRLRIKFYHSDLHISHLPLAHIYHRANHLTSLDYGAAIGFYHRDNSNLNHYLSVIRPTTYARVSRXLYYNLHAAVANAVQQSARLRXTLYHPEYNATRHAMINHRIHIPIWD

SEQ ID NO: 356689 - protein, 72 aa, Zea mays
  unsure (1)..(72): unsure at all Xaa locations
  Clone ID: MRT4577_88471C.1.pep
SGSTSVREVESWIWFMSQLKKLLGNMXVLAICSDAXKGLMHAVTHCFPYAEKRECFRHLMGNYVKSYSGSEH

SEQ ID NO: 356690 - protein, 646 aa, Zea mays
  Clone ID: MRT4577_88472C.1.pep
QYGDVQTFDTSCKSHGIVTVSYYDIRAAQDAVRAVHNKPLGLMKLDVQFSLPKENVPNKDPNNGTLVVSLIDSSISSHDLLQKFSVYGDVKEIYKSPTSCNKKFVEFYDIRAAQEALNDLNKGEISCSQIKVEHSFSGGAGSCFAEQYSGEQKQNAVAHQLKNSPPGTIGKLDTKSWDSSTVHNLYSPVRPQHDKSQHGFSVNPPQKLSSPIRIESTQQHSNQTAFGEHSGSLGHGNFGGGLQAFHPHSLPECHNGICNGYNSMTLNARNSNFRFTEGIDYNNHKVDHSDLHGHSSDQNEAIRVAGIGSCPLHGHHYTWSNSNGFPQSPSAPMMWPNFQQPVHMHCYPAMPPHIRRSAAHPMDQHHLGSAPNSVGGFANAHSFHPGSLESVGFPGSPQLYPSDLSVFASARGNYRETMFSAISAGFPSIQQILHATNGRNPMMHVSTSYDATNDRIRSRRHDGNAAQSENKKQFELDLDRIAKGEDSRTTLMIKNIPNKYTSKLLLAVIDENHRGTYDFIYLPIDFKNKCNVGYAFINMTDPQQIVPFYKTFNGKKWEKFNSEKVASLAYARIQGRNALIAHFQNSSLMNEEKWCRPMLFHKDGPNAGDQEPFPVGNNVRSRSGRNRPLSSGSETTKEASPSTSPN

SEQ ID NO: 356691 - protein, 64 aa, Zea mays
  Clone ID: MRT4577_88473C.1.pep
KFSMAPPKTLNSKVGPYCSRPLSQGWPLKFWEREKKKKKKKKKKKTKKKKKKKKKKVLCVVTTA

SEQ ID NO: 356692 - protein, 77 aa, Zea mays
  Clone ID: MRT4577_88474C.1.pep
VPGACMSMDTGVLFLLCLFFFSFASFFLVFSGPCFVGSNFRFLPRHLPLSFRLHSSKQRSVIFLQLLFRSLYLLCML

SEQ ID NO: 356693 - protein, 50 aa, Zea mays
  Clone ID: MRT4577_88475C.1.pep
TTGLADLRTISNRDMGIWMLACCKSTMTSLKLFKDTSSVLNYKLGASFVC

SEQ ID NO: 356694 - protein, 79 aa, Zea mays
  Clone ID: MRT4577_88476C.1.pep
LNFSTHHLLYDSLHNGGSLILSTYSPRTRGEDRYTLKASRPLSLHLALSVLRSRGSTRPPVRNEYTRRPSLVRHLTPKL

SEQ ID NO: 356695 - protein, 119 aa, Zea mays
  unsure (1)..(119): unsure at all Xaa locations
  Clone ID: MRT4577_88477C.1.pep
PKDDKDALRTXPKWFVPXIEVXRAATNAXDRDANSGKHPCVNVHSLMALHCMNXKGTPIEEFMDNVRLIVGNIKMIMLPQLCELDNDVYNNXMTSNLAGSRNPSLDYKFKGTEINMACY

SEQ ID NO: 356696 - protein, 94 aa, Zea mays
  unsure (1)..(94): unsure at all Xaa locations
  Clone ID: MRT4577_88478C.1.pep
LVLIIGVTKKFCRANKRPESGHAXVXYTCCHSGCNTIPSSGSRVVHNNQMNIGNTKMNYFFITNINKKIINPYQWSILIKIKKNKKLYFMGGPL

SEQ ID NO: 356697 - protein, 89 aa, Zea mays
  Clone ID: MRT4577_88479C.1.pep
FWVFLHMGCIIHTSIYFRNANNISDEYTTTLHLVSKTPPAKIDPLIFVKSQVQLFLVQSVKKKTKVKVGKPDTTTPKQPHCCKKGLLPN

SEQ ID NO: 356698 - protein, 44 aa, Zea mays
  Clone ID: MRT4577_8847C.1.pep
MAGRLLANLIVMGGTVVGRAMLQAYRQAIVSECSLLLPRQKKKT

SEQ ID NO: 356699 - protein, 70 aa, Zea mays
  unsure (1)..(70): unsure at all Xaa locations
  Clone ID: MRT4577_88480C.1.pep
PSVVGVFSPIAPKFALMYPKGAFVPWYLGKGMEKGGFFXAPEALAALQKDFKEVGPEFYKGEDGPKGSEF

SEQ ID NO: 356700 - protein, 58 aa, Zea mays
  Clone ID: MRT4577_88481C.1.pep
KTQEMMNGSYGCRTYFIAPHTGRSKKVEKRLICYKIQLDGMIKRRNTNSAIRNWLSKA

SEQ ID NO: 356701 - protein, 127 aa, Zea mays
  Clone ID: MRT4577_88482C.1.pep
NSARGTRARHAGDDGGAQARALSDGGAVPISAAASAAPPPASCQSPRALASGPPHTGRRPCVRASRSPPASGGPLTAPSPGGCTARRVRPAGSGSQQPLLYQGGRTALVALMPQRSVTRPLSAEACA

SEQ ID NO: 356702 - protein, 87 aa, Zea mays
  unsure (1)..(87): unsure at all Xaa locations
  Clone ID: MRT4577_88483C.1.pep
PTRPRTRGVFFCMRRRIRRCGRSFIPVRIGFXHGLFYRRRSCDLWLWRLRSTWCRWPWTIFPGLMGGGLVCGLITIRVCGLSSLFCL

SEQ ID NO: 356703 - protein, 89 aa, Zea mays
  Clone ID: MRT4577_88484C.1.pep
MKSSTLLAILVLQALLVSAAVAKGPAGPTTKKQCWCGECTSWSGVWTCDDLLTKCAATCKNCVPVSTDKGATKYRCRDFLPENCGCKIH

SEQ ID NO: 356704 - protein, 87 aa, Zea mays; identical to SEQ ID NO: 353352
  Clone ID: MRT4577_88485C.1.pep

SEQ ID NO: 356705 - protein, 393 aa, Zea mays
  Clone ID: MRT4577_88486C.1.pep
MACGGKGGTGWSSLPADLLLSIFALLPADAHRVRFRAVCADWGAAAAAWRPRPWLVGSRTDRSGQGASEISSFWLAPSVALLPFAANVPSGLEYLSSSHGYLALSDPRISPKVILLLNPLTGRRVRLPPIGFFKKWLDLTTIVLSGDPATATEWAAVAVGFPTTCLAYYSSVTGAWTRLDFSVTGYAAVEHYRGRFYVAFKSSICICEVDGDAPAVIPLEHVDANGDAVVSDNDKLPGEGRRVVETHLVECDRQLLLVSVHDDVMYNSDDDMAGVDDGGIKIGSGFARAVEVHRVDWLGDRTVRLVRVVDLGWNSLFLGRNRAFALSRAEFPWYRARVNRIYLVDRGHPDGVVRVLGMERQRGRHLEILTIKPDDGRRESAGWARRGWFFPNY

SEQ ID NO: 356706 - protein, 202 aa, Zea mays
  Clone ID: MRT4577_88487C.1.pep
MQIPIWGAKQARSSISIHYKWSDWTKFRVEPAEDDISNSSDQIPIWGAKRARNSTSIQTDWRDWANLGDGPAGLIAERLLANDVADYICFRAVCRPWRLCCTDPRTHCILERRFHPLHWIMLRETGGSPRCRFMNMSTGCSRYVHLPELCGHDVFGPTTEGLLVLLDRATWVVRLLNPLTRQAVDLPPATALMSKSDLKEAS

SEQ ID NO: 356707 - protein, 107 aa, Zea mays
  Clone ID: MRT4577_88488C.1.pep
VLLEMRGSGTAEIERALSAIHQRRRVAISLPHWGVAPQLIAGTDLILTVASRNLRNIDHERLVVVPPPFEIPSFDFIFVWHQRRDGDQALGWLRECMRAVVTVGTLD

SEQ ID NO: 356708 - protein, 162 aa, Zea mays
  Clone ID: MRT4577_88489C.1.pep
EEQPGPKKYGKGDWRNISRNYVQTRTPTQVASHAQKYFIRLNSGGKDKRRSSIHDITTVNLTDDERAPSPSRSSLITTTSQPNAPAPAAAVIGGPFSSAAAAEAKQHQHGAGNLPPNRTSVVPAVYRMDDSQDHGLQCGPLRHQLVASHHSVLVVEVGSKRW

SEQ ID NO: 356709 - protein, 676 aa, Zea mays
  unsure (1)..(676): unsure at all Xaa locations
  Clone ID: MRT4577_8848C.1.pep
MTHFGTVHATTLPSARTHCAPTAQRDPRGPCPLTACAECPRPPPADPASASALRRPRSPPAKWRRGALPSPPSRSSSGSTGPSSAASRSPPSSSCSPPSPRSPRPRSPSPPRPSLGPXSAPTFAQAETMYNRPIWKPPPRRARMPSPRAFRLTRDMVAARARDGVIVVTFGNYAFLDFILTWVRHLTDLGVDNLLVGAMDTKLLRELYFRGVPVFDMGSRMVTEDAGWGSPTFHKMGREKVLLINALLPFGYELLMCDTDMVWLKNPLPYLARYPDADLLTSSDQVIPTVTDDSLENWREVTGAFNIGIFHWRPTEPAKRLAKDWKDLVISDDKLWDQNAFNDLVRKKFGQPVQGDDLVYSYDGKLKLGVLPASIFCSGHTYFVQGMYKQLHLEPYAVHTTFQYAGTEGKRHRLREAMLFFDQPSYYDSPGGFLSFKPNIPKSLLLDGAHTVESHFELVNYQLKQIRTALAVASLLKRTLVMPPLWCRLDRMWFGHPGILEGTMTRQPFLCPLDHVFEVHVMLKDLPKEEFGQHIDFREYSFLENPSLPKEVKDSLLEVELCDEHSSRCSAIDEIDKHGPFLLPRNSTEEKLLDLLSSYKDVKIIQFSSMVDAFGGFADAAVEKKFRNRVNRYVGLWCCVEFREIGHIYYDMYWDEKPGWKPHPPETREQDHPPWS

SEQ ID NO: 356710 - protein, 83 aa, Zea mays
  Clone ID: MRT4577_88490C.1.pep
FFFFFFFFSFFFFFFFFWGKSETVHLEPNWPGDRGKITETFAFVYFSPKAFQNKTNLRLRWSWKTGSSHVGAGHIFWMLLLNS

SEQ ID NO: 356711 - protein, 74 aa, Zea mays
  Clone ID: MRT4577_88491C.1.pep
MFKRSNSGVNLKFESASGTAGTMSSARSFLSSLSMDGSVASLDAKSSSFHLIGGPAMSDPLNAQHPSRRRCTSR

SEQ ID NO: 356712 - protein, 67 aa, Zea mays
  Clone ID: MRT4577_88492C.1.pep
MTTSRRLADRKIARFEKNITKRGSVPETVKKANDYPVGPILLGFFVFVVVGSSLFQIIKTASNAGLF

SEQ ID NO: 356713 - protein, 68 aa, Zea mays
  Clone ID: MRT4577_88493C.1.pep
MSSEYPGDHQIISGGDREKELAAGGPPGASAHVVEGSSAGKQPNQYASSQSSSADSKDTIGSHGTFGI

SEQ ID NO: 356714 - protein, 67 aa, Zea mays
  Clone ID: MRT4577_88494C.1.pep
IQKRIGGNNHLLQILVPRRLQYLFIRTSRQWLQIVVRGSNIYCSLVQSTASFSSGYFKPYPVTFKIV

SEQ ID NO: 356715 - protein, 67 aa, Zea mays; identical to SEQ ID NO: 356712
  Clone ID: MRT4577_88495C.1.pep

SEQ ID NO: 356716 - protein, 228 aa, Zea mays
  unsure (1)..(228): unsure at all Xaa locations
  Clone ID: MRT4577_88496C.1.pep
PRVRPRVRPRVRPRVRPRVRKLGSQPDLILIHNPFVPPKGKLVEFWKILEEMKDSGELTASLGVSNFRPQDFKELLSXTSSINPXCNQLEYHPYVLEALEPVFKIQQEHGILTEAYGPLSPLLRHKTGGPIKPILERIAQRLSKETGKDVDAAAALLLWTRAKGVVAVTASGNEGRIAKLAQTQELPDLSKEEVEEIEQAGRKVYFRAYDEHMCVDYENNPKGLPEDL

SEQ ID NO: 356717 - protein, 80 aa, Zea mays
  unsure (1)..(80): unsure at all Xaa locations
  Clone ID: MRT4577_88497C.1.pep
MVCTNNAMGASGCWGXFCMGHGEKEESKGIDAKAFGPGGCFDITKMGASGNGKTDSTKAVQDAWXSVCGCTGXQTNLIPK

SEQ ID NO: 356718 - protein, 375 aa, Zea mays
  Clone ID: MRT4577_88498C.1.pep
MGVGKVLNDVKPYLAMVLLQVGFAGMYIVAVASLKRGMSHFVLVVYRNLCATAVMAPFALWFERNARPRMTITIFLKIMGLAMLEPVLDQNLYYMGANLTSAGFASALINILPAVTFVMALVLRMEKVRLRSVHSQAKIAGTVLTVAGAVLMVLYHGPVVQFPWSKGQHHHDSAGGQGANSAAGGGGFLTGIITIVIACVCWSAFFVLQANTLKSYPAELSLTALICLMGSLMSGSVALVAERRNTQAWVIGFDTRLFTAVYAGIVCSGVAYYVQGIVSRQRGPVFVTAFNPLCMIITAVMGSIILKEEITLGSVIGAAIIVLGLYALIWGKSKDSVADVSASGGSKGAAAAAAIELPITLAQPNGNGNCKHEVG

SEQ ID NO: 356719 - protein, 68 aa, Zea mays
  unsure (1)..(68): unsure at all Xaa locations
  Clone ID: MRT4577_88499C.1.pep
CIDYAMRSLILXVLFCVVHSEKAKSLDNDAKSTGSGVTIDITMLGAFGIGNTDSTYAVQYALASACGG

SEQ ID NO: 356720 - protein, 109 aa, Zea mays
  unsure (1)..(109): unsure at all Xaa locations
  Clone ID: MRT4577_8849C.1.pep
THSSAGTLTDSLDFLYLNLLNTXTYTLYQKWHTLNSTILHFLFSIQALVFNSKPYFNKPFYSMHANTSHLDNKSLTYNQDTFLHSYTTILYTLPNPPNNLHDLFTSHFL

SEQ ID NO: 356721 - protein, 155 aa, Zea mays
  Clone ID: MRT4577_884C.1.pep
AHHDTNPNPHRRPTPQPHSRRIDSDGTRWSIHGPPVDLAHPRAAGLVLVVVRRQCSLIHRSSSSTSELKFLAHQPTTSTRPRSRPAHIPACCTSPCCCCAAAAYSRRHSPNQPPGLRPLAAPSGGPASCLAPSDGPASTASCSWPCPAPPPSGEM

SEQ ID NO: 356722 - protein, 56 aa, Zea mays
  Clone ID: MRT4577_88500C.1.pep
KARQSTTTIRRHRKQTSPWPWLPPPPLLLHYALNYLSSISVITPSTILRLHDQVIY

SEQ ID NO: 356723 - protein, 76 aa, Zea mays
  Clone ID: MRT4577_88501C.1.pep
SRFLIPSLLANMANDDDPVDGENPRSFTASMITRWQKLRRGFSARPSAQNGDLPLLRKQNYHQSFAHKLAGVTVSS

SEQ ID NO: 356724 - protein, 107 aa, Zea mays
  Clone ID: MRT4577_88502C.1.pep
LKKDLQPIKETVQASSILEMKDNKIRKHDDWVKWVIPRESNPDVPSSSASVPRPDVNNLTAHLGGMDLQDSASSAGAVEPKHNDVVQNGSPSGNEEAAVAEDSSDQQ

SEQ ID NO: 356725 - protein, 75 aa, Zea mays
  Clone ID: MRT4577_88503C.1.pep
SRLARKLLASRAKTLLFKAGMAKIIHHARVLIKHRYMMVGSQLVHIPSFMLRIQIRKYIDYLLSISFKKMVLFKG

SEQ ID NO: 356726 - protein, 77 aa, Zea mays
  unsure (1)..(77): unsure at all Xaa locations
  Clone ID: MRT4577_88504C.1.pep
NTPNITFQNHHIILPILQHSTLDQYIKVSLSQPIDSLLLTKEMTHQHKIYISTSSHSKXTXYNIIPKSYTTTPLNFP

SEQ ID NO: 356727 - protein, 114 aa, Zea mays
  Clone ID: MRT4577_88505C.1.pep
MKRLLAHGQSGCPSRTLVGRIPALPVLCNNVLPDHRYYSAEKHDDDTTLGEIGDKARSTAEEFLRVAKEKTDDVAEGAKETLHETKEAVVGESDDEKEKFKRRVEEGKYHHQKK

SEQ ID NO: 356728 - protein, 68 aa, Zea mays
  Clone ID: MRT4577_88506C.1.pep
NLNPHLIPPKHPPFPLLLIISLPPSSNIFHLNSNLTLPLLSLIPIFFLPSLFHTLSPPISLPFISSFF

SEQ ID NO: 356729 - protein, 103 aa, Zea mays
  Clone ID: MRT4577_88507C.1.pep
KGGTPGPLLVGIFPRGASNLLGPPIFGLAYCLARFGGGKRLQGLHSFGLLASCGRRKDRQGWLPLRNSSLLGFLLMALRPGGRRCSGSRRTEPFLKKLLASYG

SEQ ID NO: 356730 - protein, 67 aa, Zea mays
  Clone ID: MRT4577_88508C.1.pep
SIDYRLLTADWITCSYNSMAMGRPEEVIDLALYAHTDRPCQIDLRSHLLLILKEHTYRYFVYISVRV

SEQ ID NO: 356731 - protein, 89 aa, Zea mays
  Clone ID: MRT4577_88509C.1.pep
TWEMTATFGVASSKISDRAMKRVFMRAVDALKCITHQQSDGGRRIVEGEHLELPVTEPRDTDRSRESCEKEERDTGYVFAGFRREEGRV

SEQ ID NO: 356732 - protein, 153 aa, Zea mays
  Clone ID: MRT4577_8850C.1.pep
PPLFADFFCAKRGGVVSPVVLDGNFVLFFNGGGKEGVASFGGSWGAFFSSVGPWPKVFFRVAPEFSVPLGCCLVLGPSLVAFLPTGLWAVFPVVFFCAPPIIFSFFPCLFLFLLFFFSGWFLGFLSFLSWKSKKKKKKKKKKKKKKKKKKKKK

SEQ ID NO: 356733 - protein, 56 aa, Zea mays
  Clone ID: MRT4577_88510C.1.pep
TMYVHRSVLSCAAIAIWIWRVDFTNKLKALSSCIHYDSRTSKAMRLGNVKNKLCAF

SEQ ID NO: 356734 - protein, 125 aa, Zea mays
  unsure (1)..(125): unsure at all Xaa locations
  Clone ID: MRT4577_88511C.1.pep
KPIKPHKRPRTTKQETRKRKRTQKTNGLSPGVGETQKTRGKTGNPTGKRAENTTQKKGGSPHKRHPRPKTQSPGDEKGGEXGTENKFPQEKTKTKKTPRRGPNPEPQKTAARGQKNAPKKGPPPT

SEQ ID NO: 356735 - protein, 575 aa, Zea mays
  Clone ID: MRT4577_88512C.1.pep
AAHGFCKTLTASDTSTHGGFSVPRRAAEDCFPPLDYSQQRPSQELVAKDLHGTEWRFRHIYRGQPRRHLLTTGWSAFVNKKKLVSGDAVLFLRGDNGELRLGVRRAAQLKNGSAFPALYNQCLNLGSLPNVAHAVATKSVFHIYYNPRLSQSEFIIPFSKFIKSFSQPFSAGSRFKVKYESDDASERRCTGIIAGIGDADPMWRGSKWKCLMVRWDDDVDFRQPNRISPWEIELTSSVSGSHMSAPNAKRLKPCLPHVNPDYLVPNGSGRPDFAESAQFHKVLQGQELLGYRTHDNAAVATSQPCEATNMQYIDERSCSNDASNIIPGVPRIGVRTPLGSPRFSYRCSGFGESPRFQKVLQGQEVFHPYRGTLVDASLSNSGFHQQDGSHVPTQASKWHAQLHGCAFRGQQAPAVPSQSSSPPSVLMFQRGDPKMSPFEFGHFHVNKKEDRRAMFVHAGGIGGTEQTTMLQAHHVSGGTGNRDVTVEKSHPAVAAASDNREVSKNSCKIFGISLTEKVPAMKEKGCGDINTNYPSPFLSLKQQVPKSLGNSCATVHEQRPVVARVIDVSTVDMMI

SEQ ID NO: 356736 - protein, 65 aa, Zea mays
  Clone ID: MRT4577_88513C.1.pep
ITAFLQITPTFLGFNNSFKLIMFIQVPNSVLLLSLLHWAGCKFFMLLQSCENVFSGLLILLFKYP

SEQ ID NO: 356737 - protein, 88 aa, Zea mays
  Clone ID: MRT4577_88514C.1.pep
PSMSNRYESDNTVSMLPLSLVIKKKKKKKKKKKKKKKKNRGGEKKNFFLKRTKTNKTIIKLDWWGLQSAYFGLFPSIGGPFGLPFKGP

SEQ ID NO: 356738 - protein, 152 aa, Zea mays
  Clone ID: MRT4577_88515C.1.pep
IAPLGNQVKFPEVFWPPKFPFPRAIALYISWVGCKRLPQGQGCFLCPPFFFFLGPAACIFCKKPGLMGGKKKQKRVVIFVFLPPKAGLIFYLWVGSGKFGSEGNPPLYFCFWVFYLPQGQNCFVKKKKKKKKKKKKKKKKKKKKKKKKKNRG

SEQ ID NO: 356739 - protein, 118 aa, Zea mays
  Clone ID: MRT4577_88516C.1.pep
EKVFVGPLPNQFQALVGIFLVEILSPPPPPQGFLGQGGPKKWTLDPKGQEGFKRFGGGLSQIKKRVVPINGGPPPKNQKGPGGFPFTVFFPHPPHPKGDPPGIPPKGISKRISLLVFF

SEQ ID NO: 356740 - protein, 74 aa, Zea mays
  Clone ID: MRT4577_88517C.1.pep
MSSLGTKVWKDKDEQASTITSITVAHRLSTVINADTIVVMEKGKVVELGNHQELISAEDGVYSRLFHLQSNMKE

SEQ ID NO: 356741 - protein, 40 aa, Zea mays
  Clone ID: MRT4577_88518C.1.pep
ASAYLYQLPRFGLQDIISNDTVGYCTGLLMAPLVLNTRGS

SEQ ID NO: 356742 - protein, 99 aa, Zea mays
  Clone ID: MRT4577_88519C.1.pep
PFNKSLACSWSGSGGEAQIFSATPARAAPCSEGPVLFGEFGGNDYSFSWKADCAGEGEDDGAGGGASLVGGGSGCGEGARTSGAGNLPPMHPISSHVPS

SEQ ID NO: 356743 - protein, 87 aa, Zea mays
  Clone ID: MRT4577_8851C.1.pep
AAFLGIVLCAELFYRTFLARGRRRANNPPPRPKPCTVIRNLNRLGELPHRSMNELSKRDGQLMQLRVESFTVVTGTAADMANLFHKT

SEQ ID NO: 356744 - protein, 95 aa, Zea mays
  unsure (1)..(95): unsure at all Xaa locations
  Clone ID: MRT4577_88520C.1.pep
LDEVLECTTSVSSGMTSSLVEPSQVDGGSSSSVTKEDVXLDSLVMCQAGXSKTIADAISSKLAAIHHVSQAIKSLRWNRQLQNNTQHGCGDSADT

SEQ ID NO: 356745 - protein, 230 aa, Zea mays
  unsure (1)..(230): unsure at all Xaa locations
  Clone ID: MRT4577_88521C.1.pep
PAGSPAVKIYILIHKMDLVVPTARESVYDERIRVVRQKTFEYGNSVGIAASSIELTPFATSIWDQSLYKAWASIIHDLVPNLSVIERNLANLGLAIEAEELLLFERTSFLAVSSWTSSEGQRNPTEDRLERMSNIMKHFKQSISRFTGTPRNAEQFIRMEHKAGPRFSLFILKFTTNTYXLMVVLPPGEARFNAAMLNCQIAXEHFRVLDGXPVIQPANATTPCWPKCDY

SEQ ID NO: 356746 - protein, 115 aa, Zea mays
  Clone ID: MRT4577_88522C.1.pep
PPYRWYPPRVPGPCPVFFLPHVVGPHGRACGSPLILLLPRLPLFPWGLVLKCRCPMGLLGPHCRPPILGFEFGRFLFLMPKKKKKKKKKKKKKKKKKPKKKKKKKKKYSALLPLL

SEQ ID NO: 356747 - protein, 94 aa, Zea mays
  Clone ID: MRT4577_88523C.1.pep
NEFGVPPSPANFIQPGKQPLSSMCQTIMVGQDGQVRMVVGADGGTQITTATALAIIYNLWFGSHVKRAVEEPRLHNQLLPNVTTVQRNIDQAVT

SEQ ID NO: 356748 - protein, 226 aa, Zea mays
  Clone ID: MRT4577_88524C.1.pep
MSGVFGRVFGKSKEQSQATALASLDKLNETLEMLEKKENLLVKKANLEVEKAKNFTKAKNKRAAIQCLKRKRLYEQQIEQLGNFQLRIHDQMIMLEAAKATTETVDALRTGASAMKAMHKSTNIDDVDKTMDEINDNMENMRQIQDLLSAPMGAAADFDEDELEAELADLEGEELEAELLAPTTTAPSTAPVRVRVPTAQQSTRPSGQSSKAEDDELAALQAEMAM

SEQ ID NO: 356749 - protein, 82 aa, Zea mays
  Clone ID: MRT4577_88525C.1.pep
PPGTSSPSPGIRSSRLFPRLQGTQDLSSSPWVIYWLCIVIHSSYLLGTTSPSDRRAPVSRAREERGRRRPVALGVGLETVQP

SEQ ID NO: 356750 - protein, 77 aa, Zea mays
  Clone ID: MRT4577_88526C.1.pep
SFLTCVPFHFSSLIRERTRGELCSGCASEQVHVVCEGDILFQFIYYRVCVSYFAGGWINPCFFYSGWVSFFLMWSGG

SEQ ID NO: 356751 - protein, 138 aa, Zea mays
  Clone ID: MRT4577_88527C.1.pep
ETSLESCALVAMISLLLLSCRVVAKARRAGHQRGRSGPLLQLLGLQRHLAPSPLPTVPALPAVAAEPADPRWMPRCASVPPPMPTPELVPGYGARQEVREVPSGAGGEWTVERRRGRQQRRRAAGESGGDKQGAGDGD

SEQ ID NO: 356752 - protein, 35 aa, Zea mays
  Clone ID: MRT4577_88528C.1.pep
IVRNLFFILLFIYFFFLSHESDHESENEWVDPGIR

SEQ ID NO: 356753 - protein, 76 aa, Zea mays
  Clone ID: MRT4577_88529C.1.pep
KYLWDQSLSVRNRQIQGSLELHAQLFKWNVKGRRSSSVPFRAIFKVHDAENLLTRAGFTPPGVDVDHYTVRYNNGL

SEQ ID NO: 356754 - protein, 75 aa, Zea mays
  unsure (1)..(75): unsure at all Xaa locations
  Clone ID: MRT4577_8852C.1.pep
EIKEFQKFNGPVIPFGPLVRVVKEVTNFVTNGKVXRYTAKALLALQEATEFHLIELVEMANLGAIHAXRVTIMQK

SEQ ID NO: 356755 - protein, 81 aa, Zea mays
  Clone ID: MRT4577_88530C.1.pep
LGPSRPAGLVVPFPCSVGWRCNLMAFSSNNSWWRTTFLIQTFSGNLMVFSGNNYIQDFFFIFAIFVSLSDLSCLYLFYQGA

SEQ ID NO: 356756 - protein, 88 aa, Zea mays
  unsure (1)..(88): unsure at all Xaa locations
  Clone ID: MRT4577_88531C.1.pep
ADRPLKRLLVPILVPEKCXDQLFVQWDLLHVPCLKILLSKGLGLGIVAGSLLVKLPQVFKILGAKSAEGLILQSVMLELVALTGTMVY

SEQ ID NO: 356757 - protein, 77 aa, Zea mays
  Clone ID: MRT4577_88532C.1.pep
GHTSKVRFWMLTARRTHDPSSSFNCWGVDRCWDYALRLLFLFLLEIREVDVMIGVYQTILYHIRCEFFLFPFMIYLV

SEQ ID NO: 356758 - protein, 51 aa, Zea mays
  Clone ID: MRT4577_88533C.1.pep
AMIQGTIILFLLVQLSLFNKFAKLNTSAYFQQEILLPFGQVATTSPDILLT

SEQ ID NO: 356759 - protein, 51 aa, Zea mays
  Clone ID: MRT4577_88534C.1.pep
ETTTIFFIAWSLDIERVTSTTLYAISKARFTLELVRIQVNLHGINSVEVGL

SEQ ID NO: 356760 - protein, 68 aa, Zea mays
  Clone ID: MRT4577_88535C.1.pep
NSPRYHDLISFGFGIGLIRKHIFPIHICTFLLHYFLKMGFGIPRGIPIQGLWVWRIGLIINQLLQIQI

SEQ ID NO: 356761 - protein, 51 aa, Zea mays
  Clone ID: MRT4577_88536C.1.pep
PERAMVTKARGPNPRFLGGARARIGSRPGLSGYGGFPASLRNVLPAGLEVP

SEQ ID NO: 356762 - protein, 87 aa, Zea mays
  Clone ID: MRT4577_88537C.1.pep
IERAFIQGSSTWGSTKLWVKTRPRCPGGLLKNHLPHKPYNFFGRPPPPWGGGDPLDNPGRQKKKTSPGLSSRGTNGSPVRGRSPSGY

SEQ ID NO: 356763 - protein, 84 aa, Zea mays
  Clone ID: MRT4577_88538C.1.pep
DPTKATLIHLTLSLLAAGARFTFAAADRSTTPTPDPFPSAVLVRPPPTHMFPAFKTRRPHELLADAISILALLQWPIQLAQVWT

SEQ ID NO: 356764 - protein, 49 aa, Zea mays
  Clone ID: MRT4577_88539C.1.pep
LPRLLLGVLRPQGPFHWLSPFDRTRRGGPPRSSLPNGRRAEFPREFPVP

SEQ ID NO: 356765 - protein, 65 aa, Zea mays
  Clone ID: MRT4577_8853C.1.pep
STKKHHFFLRINLEQILTGVTASIDPQSMLVDCKVALCQLLELCSSSAPADPCISQQVLCIDGCC

SEQ ID NO: 356766 - protein, 135 aa, Zea mays
  unsure (1)..(135): unsure at all Xaa locations
  Clone ID: MRT4577_88540C.1.pep
AVEVEDKKVPXGDKPRNPSGRVEGRSHAPGGLAIRFLFQGGQTHIVPVNVAQVGLSHWRFITRDHGPGWSTRQGPPGPLQLRVVVTGGFHGKWVWADPEVLPRRGGAGEVFDTGVQIPDVAQEGCFPCDPPEWEE

SEQ ID NO: 356767 - protein, 82 aa, Zea mays
  Clone ID: MRT4577_88541C.1.pep
AFWPSAEQSLKSKLPKRPPGPLGGIFAPAGGGGGGTCKFGFWNRSARNFRRIFMRIPCGTHAKTYAMKAAVTKVSVPGCRLI

SEQ ID NO: 356768 - protein, 85 aa, Zea mays
  Clone ID: MRT4577_88542C.1.pep
KPSLSLPLSASQNPQNQILVSIILPNKTIPLYPLVIVLSPIFKFCPKFTPTLKKYSPQSFLTPPTQPITEVYPPLRLWKSKSPSF

SEQ ID NO: 356769 - protein, 197 aa, Zea mays
  unsure (1)..(197): unsure at all Xaa locations
  Clone ID: MRT4577_88543C.1.pep
NSARGPTSPESSAQPSSNPPSAPTSPSSPPRHPFSPPXPPPPLPXPPLRSPSSAXPPPHPLXPRSPXPPPPGAAPAPPXPPRXPPPGPLPSPPALLPAPPPLPPRRPPRPQLARPRPRPVSAPPRRRTGCSTTCARAXSPPTPTPAPRSSQRSPARMTATARRGVRRNGQGGSPPPRTTTPCCTCASRPTPRKPSDR

SEQ ID NO: 356770 - protein, 73 aa, Zea mays
  Clone ID: MRT4577_88544C.1.pep
TTDAPLLDPLIFLPPYQDEIPMTGPSPPHVQRLLVTRLSAPSFMSGATSPWRLNTVYDIRLLAYPRLCNLRSP

SEQ ID NO: 356771 - protein, 70 aa, Zea mays
  Clone ID: MRT4577_88545C.1.pep
IGDATDALGARCLGPGASATGVLSSQRKVRGHPPHSPRSPACIWSPWVELGGIWGAGGTARFLSGGYAAG

SEQ ID NO: 356772 - protein, 89 aa, Zea mays
  Clone ID: MRT4577_88546C.1.pep
FLLSPPLYVDFVFHVQHDCTHVEKGGRDSVALFWPCLSDGCICFAFSPPLVLFWGNLHDFIAAFARHSAKSCIQNSFFLLLLPILKLTF

SEQ ID NO: 356773 - protein, 205 aa, Zea mays
  Clone ID: MRT4577_88547C.1.pep
MEGSAVPAPLRTRVCIIGSGPAAHTAAIYAARAELKPVLFEGWMANDIAAGGQLTTTTDVENFPGLPTGIMGIDLMDNCRAQSARFGTNILSETVTEVDFSARPFRVTSDSTTVLADTVVVATGAVARRLHFPGSDTYWNRGISACAVCDGAAPIFRNKPIAVIGGGDSAMEEGNFLTKNGSQVYIIHRRDTFRASKNMQARALS

SEQ ID NO: 356774 - protein, 135 aa, Zea mays
  Clone ID: MRT4577_88548C.1.pep
KNGTPGWAVCLPPTPGGGGPLPRSPPWGEYGSPQNHGGCFFVSPTPWGKRPPPCPGAPGCPKKKKKGPPPGPPVFLGVRPSNPQFYNSSSRGPPFFLWGCPSFSFCLNSPPGRPPGGVPCVNTLFFPKQNSSFFF

SEQ ID NO: 356775 - protein, 159 aa, Zea mays
  Clone ID: MRT4577_88549C.1.pep
FFFFFYQLNTIHELVFTSTTRIHEPLFTSITGIHEPTHKTQHMWTSPEILEGTQWSRRGWPSQLIIVVSWRAVAGLNTIVILANCHGDGARRSAWAELGGVSSSQLGGGRRGRQSAGSSAWAAVGGAMVVGGAAVGGGAGRRSAVADRRWPQLLGWLDR

SEQ ID NO: 356776 - protein, 275 aa, Zea mays
  Clone ID: MRT4577_8854C.1.pep
RGRPATRKIIFLSSLLPLLSEYDDLQPSVLDAQSIVSNLKVLFKHLQERLIVTEDRLRESRYQITPWHTELSNNTSNPVSTNPPAGKALVTTSKSSLDIVSQTVYPHVQSPMSSPVQARGDWGAFGNKNHQDISNEVPIRNAGHDDKGGTSLSSRSQYRTDVPPQVSQDSAEAQNTQEPSTRWGLGDSSNLASGLEDANPSYPYLPTVLEEPGSSFSEAAEDDPLPGIEGLRITGEPFPGQELQAGGYSINGTTTCNFEWVRHLEDGSVNFIEGA

SEQ ID NO: 356777 - protein, 102 aa, Zea mays
  unsure (1)..(102): unsure at all Xaa locations
  Clone ID: MRT4577_88550C.1.pep
AGGGTRPRRSPHKQXPRRSTTSRTTHRPAPPNPARRRTANIPQNRKRREPPSTHPRESNASSTKRVQEAASRPRGARHPAAERTRAGEGRRGSPPLSPVRIQ

SEQ ID NO: 356778 - protein, 118 aa, Zea mays
  unsure (1)..(118): unsure at all Xaa locations
  Clone ID: MRT4577_88551C.1.pep
SVERRPFNNARGALTPKCALGHSSPACISLLDPKGLASLXYQAFRCNTTHGTLITCTPTAAYGILXQIPVLRRLTGHYYPPKIAFPTAXGCXVSPLGLHRLYRAESMSVSLTIRSEIA

SEQ ID NO: 356779 - protein, 45 aa, Zea mays
  Clone ID: MRT4577_88552C.1.pep
PNKVAFPIGEPPSPGIISACHMNQDQDRILHGLFCRNSYRLDLGH

SEQ ID NO: 356780 - protein, 99 aa, Zea mays
  Clone ID: MRT4577_88553C.1.pep
APTTWGGPVDNEYKSRTGQSEIPVQSDEASIERTEYDAGGDSDKQLEKDENDAIDRSNIMDERTRGAAKKPGAYTEPGDEEDVDKLTAGGQDGTSLGRQ

SEQ ID NO: 356781 - protein, 135 aa, Zea mays
  Clone ID: MRT4577_88554C.1.pep
PRVRSVASAAWASRGAGAQGQQARGGTGTAAASASTLGRTLEAIGEPESPSQSQVSSSASFGRKVARSRSVGCGSRSFSGDFLERLYNGFGDCTLRRVESHREPKPHRMRGGCCCGSLGNHGAGADDADDEDEDD

SEQ ID NO: 356782 - protein, 62 aa, Zea mays
  Clone ID: MRT4577_88555C.1.pep
RRPSRRRACVAANDKLLVIGGQEGDFMAKPGSPIFKCVRRSEVCWKGLRCLRSDVRCWAWCR

SEQ ID NO: 356783 - protein, 278 aa, Zea mays
  Clone ID: MRT4577_88556C.1.pep
RPGCTPGLAFPSPISLRLAAAARALSCDVSQQSVQSLASLPLVVASLLSRNIKSRLLLRDPEKASSLFGKQDESVLQVYKADTRNPNDLDPQMFEGVTHVICCTGTTAFPSKRWDGDNTPERVDWDGIRNLVSALPQTVKRLVLVSSIGVTKYNEIPWSIMNLFGVLKYKKMGEDFVRNSGIPFTIIRPGRLTDGPYTSYDLNTLLKATAGERRAVVIGKGDKLVGEVSRLVVAEACIQALDIESTEGQIYEINSVKGEGPGTDPEKWEELFRSVQSD

SEQ ID NO: 356784 - protein, 91 aa, Zea mays
  unsure (1)..(91): unsure at all Xaa locations
  Clone ID: MRT4577_88557C.1.pep
PPFVFFFLYQXKRWCNPPLPKLPPHPLPPTSFSTTLPHSFPCAHSVPPHFLSVLLPHSFLCPFHPFEKITYSILSTPCPSQYIPSLFFPYH

SEQ ID NO: 356785 - protein, 336 aa, Zea mays
  Clone ID: MRT4577_88558C.1.pep
MAVGCFNHVLSPLVPSPPGRRVRAALRCRWHRHPLTAVSLRRLPCGAAAGRGTRRLAAAAESQAVQEQPARAEEAGGAGAAEASSKLVLVVGGTGGVGQLVVASLLSRNIKSRLLLRDPEKALSLFGKQDENLLQVYKADTRNPNDLDPQMFEGVTHVICCTGTTAFPSKRWDGDNTPERVDWDGIRNLVSALPQTVKRLVLVSSIGVTKYNEIPWSIMNLFGVLKYKKMGEDFVCNSGIPFTIIRAGRLTDGPYTSYDLNTLLKATAGERRAVVIGKGDKLVGEVSRLVVAEACIQALDIESTEGQIYEINSVKGEGPGTDPEKWEELFRSARSD

SEQ ID NO: 356786 - protein, 60 aa, Zea mays
  Clone ID: MRT4577_88559C.1.pep
RDDQNSKIKIAEISSTPLLHTEKSCPNQLTLQKGLLRRSPRLPQLQLLWPRTPLPHHLLL

SEQ ID NO: 356787 - protein, 126 aa, Zea mays
  unsure (1)..(126): unsure at all Xaa locations
  Clone ID: MRT4577_8855C.1.pep
RGGYFKQPYRPRIQTPQQPPCSPPPGGKRQTKATTPKKGPPPTKXNPNHGPPPKNPPTKKKPPTXTNPPKAPKGPKKLPPTTRVTPGTNPTKAPQQPGAPPGGAHPRGKPQQMKPKRRPGGPPKPE

SEQ ID NO: 356788 - protein, 61 aa, Zea mays
  Clone ID: MRT4577_88560C.1.pep
SGPSRITSGGTSLVSRNREGPFMLACRVGALHLGCLLFVKPCGVLQRRESVTCKFQKHGGV

SEQ ID NO: 356789 - protein, 303 aa, Zea mays
  unsure (1)..(303): unsure at all Xaa locations
  Clone ID: MRT4577_88561C.1.pep
MKKAVSVRGGGKGGTAPTDLLVCFAARQHLALMPKPICSPSRATMDKAAAARRRQLQLQLPGASAAAGGARVRGGSSPMFRGSKAKQRAEEEEEPQSPKVTCAGQIKVSRPKKVKPASTAAAKHSSDGAGGARSWLTVMEEIERLHGRRKKAGWLENLGIRRDALPFVGGALRSLRSKARCFGSLHAAAVDSSADSDGNGNDAAGRGSERGPEXSAAASVFYKWLMVLEGDQEPLEQDETRYDEEFGQGEDVERQVGKETDEGTNGPTSAPPPNALLLMRCRSAPATGLSMSRRRTCEQLAGV

SEQ ID NO: 356790 - protein, 71 aa, Zea mays
  Clone ID: MRT4577_88562C.1.pep
LCVVSMRLGWHADLKTTLDLSSLAGSLQGKDLGSGGAHCYLDIKLFAGVLGDLLTKTTLESYLDEDPRGEI

SEQ ID NO: 356791 - protein, 261 aa, Zea mays
  Clone ID: MRT4577_88563C.1.pep
DASAHASDGTCMEIMVTQQRQDLKMNIPALRKLDAMLLEYLDSFEGEQEFWYASKDADEQGKGNVPRQDDRWWLPTVRVPPSGLSYAYRKWLQNHKDLVAQVLKAAMAINAYVLMEMEVPESYMESLPKNGKSTLGDSAYKLITDDCFDAEELLRSVDLSDEHSIVDLKNRVEASVVIWQKKMTHKDSKLSWGHNARHEKRGMFEGRAENVLLLIKHRFPGIAQSALDISKIQCNKDVGLAILESYFRALESLAFTVMVRI

SEQ ID NO: 356792 - protein, 66 aa, Zea mays
  Clone ID: MRT4577_88564C.1.pep
PHVRTKFISIIITSSLQSKHRKWLLQTSLAATLNTEHMERQLLLVLISSNLLSFKGFYCLQHHWKL

SEQ ID NO: 356793 - protein, 180 aa, Zea mays
  Clone ID: MRT4577_88565C.1.pep
MSAPMEISFDPHPSHPALPAFPSSPPLEPAAAATPPAVSSSPQPSAEAVVAPTPPDDKVLVSVEVLLHATSTSRAEDVRAAVERMLESRSLSYVDGPVQIPPDNSFLLEHVKRIQICDTDELIENHKILLFWQVKPVVHVFQLNEDGPGEEPSEDDTLSSFNEWALPAKEFDGLWESLLY

SEQ ID NO: 356794 - protein, 51 aa, Zea mays
  Clone ID: MRT4577_88566C.1.pep
HCLQKTQSDLVLGINKVKVSMYSIARCAVPFFYFKLNFYEQFSLQCINIVF

SEQ ID NO: 356795 - protein, 129 aa, Zea mays
  unsure (1)..(129): unsure at all Xaa locations
  Clone ID: MRT4577_88567C.1.pep
VPCGLIACSLFYVSYSFWLNKTAGQVNKKNIAWDSVKIKTFGXGVHPRHFQIGGLITGAELDEKIPLSAQEVLIVWMRTAALPTCRLLHRRIEGGSMESDEITVVIQNNFYTFSFGGSHALVLCTTLWI

SEQ ID NO: 356796 - protein, 180 aa, Zea mays
  Clone ID: MRT4577_88568C.1.pep
RASSLCLEHYSDSICGRRRSRPRSALTSSPSSPSCAQPSSCSHLLIPWPLPFSSACFLAVVGSVPQSRPGFWHITSFAPRRPCSRSSLARRAPGVHGYGMAASSLRFAPSPAAVSSTHRHRPARFAHGACARIVDGALAFSLLAASLLTPPLATPYCSVSYSTCSAHQCIYLFAGRTRLV

SEQ ID NO: 356797 - protein, 94 aa, Zea mays
  Clone ID: MRT4577_88569C.1.pep
RIAFTACGSAAYGVVERKKSKIMAHTSRVLAGDSWGSTHRSVGSNLTEHNVSLRLAQSANAVLYLWMKLLLPTELETPNLSYAHNIPHSAAYCH

SEQ ID NO: 356798 - protein, 124 aa, Zea mays
  Clone ID: MRT4577_8856C.1.pep
SLLGSRNSNLSVLSESLSLVGGPFRSLVCSVVDLSSSVLPVLVLFLCSCMDAAVSFVYSQFRSCYLAYFGQGQVPIDRRAMLSGKVASASGGGPHAVGIKSPRPRCAGGLLKVGNYPRENSELR

SEQ ID NO: 356799 - protein, 63 aa, Zea mays
  Clone ID: MRT4577_88570C.1.pep
CIVQLDMCKMIMSNLYTIMDSHVSNTEGIFSMSIQDMICVKEHQVSRSLLILSEKIRCRQIYT

SEQ ID NO: 356800 - protein, 222 aa, Zea mays
  unsure (1)..(222): unsure at all Xaa locations
  Clone ID: MRT4577_88571C.1.pep
MGGCFSVHGDVRGGMEGVGGGARTQGGAASSSAQQGGPNDAVDYFFQTRGLRGLYTPIELSFSASKLRNTDSFSKSDPMLVVYTNIKGKLEEIGRTEVILNSLEPSWITKVTMSYQFEIVQQLIFRIYDVDTKYHNTPVKTLNLTQQDFLGVACCNLSEIVTKFNRSLTLNLQSDCGHGLHGNMTVHAEESDSSRMAVEMTLRCVNLXNXDVFSKXDPFLDI

SEQ ID NO: 356801 - protein, 128 aa, Zea mays
  Clone ID: MRT4577_88572C.1.pep
METGIHQEYLGTCYSRRFLVLNLTVVYDLDDHTTIGDRVHARGLGPPPIPVDQFGLQKLVDAITFMMKPEVKDKAVELAKAMESEDGVTGAVRAFLRHLPSKAEEQSLPQSSGFLEFLGPLSKCLGCS

SEQ ID NO: 356802 - protein, 138 aa, Zea mays
  Clone ID: MRT4577_88573C.1.pep
MGSGISLKYLPCCYSRRFLVLNLVVVYDLQCPTTIVPFFGDQPFWGDRVHARGLGPPPIPVDQFGLQKLVDAITFMMKPEVKDKAVELAKAMESEDGVTGAVRAFLRHLPSKAEEQSLPQSSGFLEFLGPLSKCLGCS

SEQ ID NO: 356803 - protein, 608 aa, Zea mays
  unsure (1)..(608): unsure at all Xaa locations
  Clone ID: MRT4577_88574C.1.pep
MADEEGGSGVAGGRGGEALAASAPNGDRSGNSPLAVPSSSADDRGFHRSSTMPLPVVIKNDEIANETAGPSSSERSRTERRRQNNPADDPAKQLLDERIPIKKKLKMLDRIATVKDDGTVVVDVPSLEPTIVGGSGTEDIYTEVAVEDTLDGTEIPYRPPMQIVILIVGTRGDVQPFVAIGKRLQDYGHRVRLATHANFKEFVLTAGLEFFPLGGDPKILAEFMVKNKGFLPSGPSEIPIQRKQMKEIIFSLLPACKEPDPDTGIPFNVDAIIANPPAYGHTHVAEALKVPIHIFFTMPWTPTNEFPHPLSRVKQPAGYRLSYQIVDSMIWLGIRDMINEFRKKKLKLRPVTYLSGSQGSGNDIPHGYIWSPHLVPKPKDWGPKIDVVGFCFLDLASNYVPPEPLVKWLQAGDKPIYVGFGSLPVQDPQKMTEIIVKALEITGQRGIINKGWGGLGTLAEPKXFVYLLDNCPHDWLFLQCKAVVHHGGAGTTAAGLKAACPTTIVPFFGDQPFWGDRVHARGLGPPPIPVDQFGLQKLVDAIKFMTKPVVKDKAVEVAKAMESEDGVTGAVRAFLRHLPSKTEEPSPPQPSGFLEFFLGPLSKCLGCS

SEQ ID NO: 356804 - protein, 85 aa, Zea mays
  Clone ID: MRT4577_88575C.1.pep
SLGGQHWQIFYGKNNPPIGWVTLAPEAKNPMPEKGSPRGGGFLSISKPHFGELGGGPFGDKKKSLFIRSIFFNKGAENRATQQGF

SEQ ID NO: 356805 - protein, 52 aa, Zea mays
  Clone ID: MRT4577_88576C.1.pep
HEQNLIWSSNLAGIELFLITGKDHLYALLKGIVCTPRHHGGSFIDDSGSILA

SEQ ID NO: 356806 - protein, 76 aa, Zea mays
  Clone ID: MRT4577_88577C.1.pep
TRPLSDAYAPVALLHDRDCHEDHNYSTPTPANHGTDEEVSILSYLGGCQHRERVYYIDHREGIGICSHGVYRDYTA

SEQ ID NO: 356807 - protein, 74 aa, Zea mays
  Clone ID: MRT4577_88578C.1.pep
GFLLVLADPMNLPVKALRNCSEVSLCPLGTYIMCPHVNLCSCQRRHLIHGILQVVRVYHLYVRRTVRNHSFPCL

SEQ ID NO: 356808 - protein, 82 aa, Zea mays
  Clone ID: MRT4577_88579C.1.pep
CIIVSSACPFFFLLINLAPTGFPAFKHSGGAVSDFMVKAESTPIATGTMNHQTDYLVLKTCCTGRNPWGCRFQNKQPALHLT

SEQ ID NO: 356809 - protein, 553 aa, Zea mays
  Clone ID: MRT4577_8857C.1.pep
LGTSRPAGNKKHLADYSVKEAQILDDKYKLEKRIAYMRMAFDQQQHDLIDAASKALSYRQDIIEENIRLTYALQAAQQERSIFLSSLLPLLSEYDDLQPSVLDAQSIVSNLKVLFKHLQERLIVTEDRLRESRYQITPWHTELSNNTSNPVSTDPPAGKALVTTSKSSLDIVSQTVYPHVQSPMSSPVQARGDWGAFGNKNHQDISNEVPIRNAGHDYKGGTSLSSRSQYRTDVPPQVSQGDSTAVNFDFDPHGQNPPFKGLSRNDVLDGSDSAEAQNTQEPSTRWGLGDSSNLASGLEDANPSYPYLPTVLEEPGSSFSEAAEDDPLPGIEGLRITGEPFPGQELQAGGYSINGTTTCNFEWVRHLEDGSVNFIEGAKQPSYVVTADDVDTLLAIEVQPLDDRKRKGDFIKVYANGQRKISCDPETKELIKRTLDIGHVTYEVQVQLPQVRFLDIWEPAVLAIKREGYSIKCNGQRGVLITEKFQQGTAIHIPYGRPTEFSITSAASADGVSYNLKPVENTLLRDTIVLVLRLFKNMALERRGRRKKGLFFK

SEQ ID NO: 356810 - protein, 118 aa, Zea mays
  unsure (1)..(118): unsure at all Xaa locations
  Clone ID: MRT4577_88580C.1.pep
RILSILNCNIYAHYCTHNNIRILCLLILLAPSTSTISPTIFPQCLQAPITSLLPPYLSPSLSYACXNPILQPYRIQQAISAGILPISPLFLQQSSTLLQQLPLVHLLAQNNMAQQLLQ

SEQ ID NO: 356811 - protein, 108 aa, Zea mays
  unsure (1)..(108): unsure at all Xaa locations
  Clone ID: MRT4577_88581C.1.pep
TSPSPAGDFHLHRRTFPPLLPSRAMAQTVVLKVGMSCEGCVGAVKRVLGKMEXVESYDVDIMEQKVTVKXNVTPDDXLQTVSNLCYKTSIWEDEAVTIVSATNDGDTA

SEQ ID NO: 356812 - protein, 47 aa, Zea mays
  Clone ID: MRT4577_88582C.1.pep
INTHFWTVLGWKLIGLDTSNYSRFCSSRSVHRVLFLKLCNSVKNNQI

SEQ ID NO: 356813 - protein, 77 aa, Zea mays
  Clone ID: MRT4577_88583C.1.pep
VMSWPSLMSVSYGGAVGTIEGVEADGVNGLFGNDVDHGLLLPFSAQLVVGVQLLPVLRLVVALFSVSVLRHCHPAAI

SEQ ID NO: 356814 - protein, 101 aa, Zea mays
  Clone ID: MRT4577_88584C.1.pep
LGIKSEEFLKFSCDMEYIRGGDGLVVFSVLIKYFAAHAHGKGHVTHDVGGPTLAKEGILQGNGARCAKGCPPCKDYKSYCCIRRRTHARYSTLAEWSHACF

SEQ ID NO: 356815 - protein, 204 aa, Zea mays
  unsure (1)..(204): unsure at all Xaa locations
  Clone ID: MRT4577_88585C.1.pep
KVCLTQEMELSKAFSGQRTLLSAILSMLSLSFSTTSLLSNYWFVGTQKVPKPLCEKGLAAKCFDMPVSLDGDTNTSTQEVVQYNWETGDDRFSFRSFRSGMWLSCEETVEEPALLHPQSWKQFRALRSSGTAAAKGERCRSFIELTPPAKRGEKGLLEFATLQGPCHPTLRFGGKRLMEKASLPSPPLGXCGKNPMVIPGNADH

SEQ ID NO: 356816 - protein, 34 aa, Zea mays
  unsure (1)..(34): unsure at all Xaa locations
  Clone ID: MRT4577_88586C.1.pep
NSGDLTGKYLGXFSDISSSKLKRYAGYMARYKDS

SEQ ID NO: 356817 - protein, 84 aa, Zea mays
  Clone ID: MRT4577_88587C.1.pep
PTRPDRCNGLAYICYICALGVTIFVVFSQRKFTNSFYKLCYSTGRLAGANSVSDKICSRHKLAKLIPRSFCSSNQLCYFDAVFF

SEQ ID NO: 356818 - protein, 91 aa, Zea mays
  Clone ID: MRT4577_88588C.1.pep
LGSELSRLIVDRTFPITSFVSLTYSSSAASAEPHTGTSASSSAAPSPVPASTSRLPVLPQIRAPRGRGFTTTAAAEEGAARTAPATGDDVA

SEQ ID NO: 356819 - protein, 49 aa, Zea mays
  Clone ID: MRT4577_88589C.1.pep
IFGKTFLKKKKKKKGVFFFFKDTMTRKRFNPKRDKGGHNHLKIFFGIRN

SEQ ID NO: 356820 - protein, 130 aa, Zea mays
  unsure (1)..(130): unsure at all Xaa locations
  Clone ID: MRT4577_8858C.1.pep
MEVPNPPTGXCHKNVEXIHDDRNLCAYHHRRISXRQCEMHQGDDSHVHDFNIMRACDRXQAIPMKQGALTSGRVRIMIRRGSPWFPSYGRNNGDRRXQSVRVCYWNQDLSVINLRLEKKWANDLPGIPDT

SEQ ID NO: 356821 - protein, 101 aa, Zea mays
  Clone ID: MRT4577_88590C.1.pep
MQFTRLTLLAVTALFSMGEACKCYGTKGNLNNGATHKCCNDYKGVYSGNDCKAGSISEHLSGFDRCCKGQGSDCDFPRLASTEAKMVKAVKHVEIKTAYSG

SEQ ID NO: 356822 - protein, 84 aa, Zea mays
  Clone ID: MRT4577_88591C.1.pep
SGSLMTCSSSWWSMSRSRLAAEVYRTARLPSDQSVASATGLLPTVPTISSSCSSSSPLQDLRFSIMWSSCGGYAWWSGHCIARL

SEQ ID NO: 356823 - protein, 141 aa, Zea mays
  Clone ID: MRT4577_88592C.1.pep
ASASGSPSSMRIPGSSSTIPTDTSSGGGDGWARLRRATVGEGDFGDDLRAAGDRRRNACHTRRHGRRHNDIDDSVPACSSLGEARTSFRKFEEGNGGQGSRGRGWRRRGHEAIYRHPWRHGVRGRRGREREGKDWRVQEGV

SEQ ID NO: 356824 - protein, 68 aa, Zea mays
  Clone ID: MRT4577_88593C.1.pep
APAMWTLECISGLPDTLRADLHKNIFPSWHPVNKSATQQFKLLKICVVNTHQLQEKPNAILWYPSSMP

SEQ ID NO: 356825 - protein, 64 aa, Zea mays
  Clone ID: MRT4577_88594C.1.pep
GNKQQILGRPSRVCFNRATRFTLFLFCTPHFGLGVYLDPLRGPVKGKTFFNSQRAMTQASVLPS

SEQ ID NO: 356826 - protein, 210 aa, Zea mays
  Clone ID: MRT4577_88595C.1.pep
ALGSKKNTRTPPLGRTSRLHSSPREGARIASIQRTKKTSELKDERNKGDDEFINKPLPYYGNLATIFGNSVASGRFAKTSNDPLAVDDGEDVQKEGCIATSSAVHENDPAATSATKPSKKAKREDNGTEFLVEAFQHATQTLASAIKEAANKPLPAGLFEAVDNIPGFEIAHKSKYYSHLVSNPDIAHAFMDVPLLYKVSMITDFVNEKF

SEQ ID NO: 356827 - protein, 33 aa, Zea mays
  Clone ID: MRT4577_88596C.1.pep
HSNEVSSWLGLKGTSLTESDRPIYCFFFEFFFF

SEQ ID NO: 356828 - protein, 272 aa, Zea mays
  unsure (1)..(272): unsure at all Xaa locations
  Clone ID: MRT4577_88597C.1.pep
MSTPAAAAKQYFCYQCNRTVLIAASAVAAGELSCPECHGNFLEEVTIPAPTFIQLPFPFAXPPXIPTASTAPRPAPAAGTGRPPSFSSSSAATSRSEPRYISSILNSFVGPXTTQQDQRLQHTFXAPGTATHRNEPEPFDPVMFFQNYIQSLVEGGANIQVLFDDASASLGSGPGLGRLGGASFGDYFVGPGLEQLIEQLAENDPNRYGTPPAAKSALSSLPDVVVTHTIVARRMVAHPAARIDQKSAGGSPFGDLLRSLQYIRVTMTIHLQ

SEQ ID NO: 356829 - protein, 233 aa, Zea mays
  Clone ID: MRT4577_88598C.1.pep
PGTPTTQQRPRGCWITRRRRICLPCSSSSLAPGSALCQNGHVACFSCWSRLTNKCHICSSDANFVRNIALEKVVESVKSSCSYAKWGCNKLVSYACRNAHEESCLFAPSMCPIPGCGYRGFTGWWSGHFLTNHNSDGLRFSYGQCFDVSLEMSVPFLVLLAEDDHLFIFINKNVIPFGHALSVCCLRTGNLNWNFLYEMRATSKGNTKNSLQLKASVTNTREWRGLNPTEVFL

SEQ ID NO: 356830 - protein, 327 aa, Zea mays
  Clone ID: MRT4577_88599C.1.pep
MAKFSFNDADEDPPTFSSEGEKRKRDDGPGEAAASGGPSKARILTVEGEEQDGGAVVGAGRAEGNGSKGVETVVGGEADGISVRIDPDVLDCSICFDPLQPPLYQCQNGHVACFSCWSRLTNKCHICSSDANFVRNIALEKVVESVKSSCSYAKWGCNKLVSYACRNAHEESCLFAPSMCPIPGCGYRGFTGWWSGHFLTNHNSDGLRFSYGQCFDVSLEMSVPFLVLLAEDDHLFIFINKNVIPFGHALSVCCLRTGNLNWNFLYEMRATSKGNTKNSLQLKASVTNTREWRGLNPTEVFLLVPYAFSKSSKLTLNVSIERVADVK

SEQ ID NO: 356831 - protein, 86 aa, Zea mays
  Clone ID: MRT4577_8859C.1.pep
PSPCFFTGRFWPFWNLPLFGFNNPPQVFREFQGALNSFRGAFPRVIGFANFKQTQWVSFLASRPPGRDLSGPPGRPPPASFSSWVG

SEQ ID NO: 356832 - protein, 114 aa, Zea mays
  Clone ID: MRT4577_885C.1.pep
MVIPPPARAPAITKFLKPYILKMHFTNSFVSAQVIHTPTATVACSASSQEKLLRPSMESTRDVAAAAKIGKLLGERLLFKGIPAVSVSMSRDQKYHGKVKAVIDSLRGVGVKLL

SEQ ID NO: 356833 - protein, 58 aa, Zea mays
  Clone ID: MRT4577_88600C.1.pep
CYGNFVNPCHPRNKLCSKNILAMVYWGEMIKGQKYLIYLRAQWFNHKFLKQKHKCPRV

SEQ ID NO: 356834 - protein, 100 aa, Zea mays
  Clone ID: MRT4577_88601C.1.pep
PSGLGGAHDPAQGWVQIYSEYIGCFFLNGSWFPPKVGHQGCCIKKFLSKGIFFVVVGGTFWVLLDIRLLALGGNSNPLFGVGDWWELIMGMGCTYAFPLG

SEQ ID NO: 356835 - protein, 69 aa, Zea mays
  unsure (1)..(69): unsure at all Xaa locations
  Clone ID: MRT4577_88602C.1.pep
MAPAVQDRLPFLASPPPARERGRNPSLAEMLRLVGAATVDPADDDGSASAFSLPLPXRTPPPPRPTVTR

SEQ ID NO: 356836 - protein, 38 aa, Zea mays
  Clone ID: MRT4577_88603C.1.pep
RHYTAVLAVKLSDYSNNMSPDVRASDRPMPQTVRDATS

SEQ ID NO: 356837 - protein, 85 aa, Zea mays
  Clone ID: MRT4577_88604C.1.pep
RGTKSSIGGTCGTYTKQIHGRGGGNIFRIVLQDRPSLQPPGGLEKKTLPFFLIKGGAPLDHPLTMPLFLKKKPFFFFYGLLKYLG

SEQ ID NO: 356838 - protein, 82 aa, Zea mays
  unsure (1)..(82): unsure at all Xaa locations
  Clone ID: MRT4577_88605C.1.pep
PTHACRSSRCCCSFHKKGGXGETRKINADFKPFQVKFKIRLAVKTDYRASIRLINQDKNKYNTPKYTFVVRFTNKDITVQII

SEQ ID NO: 356839 - protein, 62 aa, Zea mays
  Clone ID: MRT4577_88606C.1.pep
VAKSQNINWKKGEQSTLKTFGKKGLGSSFYLTKETKSKGAPPRGPPGGAPPGPQPGKTAREN

SEQ ID NO: 356840 - protein, 230 aa, Zea mays
  Clone ID: MRT4577_88607C.1.pep
MNDADVSKQIQQMVRFIRQEADEKANEISVSAEEEFNIEKLQLVEAEKKKIRQEYERKEKQVEVRKKIEYSMQLNASRIKVLQAQDDLVNKMKDDAMKELLLVSHNHHEYKNLLKDLIIQGLLRLKEPAVLLRCRKDDHHHVESVLHSAKHEYASKADVHEPEIFVDHDVYLPPAPSHHDAHGQFCSGGIVLASRDGKIVFESTLDARLEVVFRKKLPEIRKLLFGQTAA

SEQ ID NO: 356841 - protein, 76 aa, Zea mays
  unsure (1)..(76): unsure at all Xaa locations
  Clone ID: MRT4577_88608C.1.pep
PTVVXKPALGCPAQQAQMGAILAPLVVVLGERLPFAVLGASGIVGGLLFFYLPETMNKPLYDPMAGLEEGEKSVIK

SEQ ID NO: 356842 - protein, 211 aa, Zea mays
  unsure (1)..(211): unsure at all Xaa locations
  Clone ID: MRT4577_88609C.1.pep
ISLKSDLKVVASNTRERAVTKPRSGGEGGLLDXLEGHYDFYGDYDRNPDNVDIHDVFVWPIFLTALMLLHLTDPSTHAGGIRDAPYEVYYFLLDRREDALGDILCYLCWVDSVDLSARLVYSVGWKVEVVLQMFSRTMQVIGHGRVQKRGPAHLDKHVQDFLMAPFIVMLEVKFRIAAEFLCHTTDSIDESWIPRPPMPIFESYIVMTHLT

SEQ ID NO: 356843 - protein, 119 aa, Zea mays
  Clone ID: MRT4577_8860C.1.pep
KKKKKKKKKKKKKKKKKKKKKKKRGGGPFKGPNFTTRGWEGKYFFYGAPKINSPARGLKRWERENPGGPPIKGPGGTSPFPRGGKKKKGPTGSPFQKVGHPKGKWDPPFDGAIKRGGGG

SEQ ID NO: 356844 - protein, 158 aa, Zea mays
  Clone ID: MRT4577_88610C.1.pep
DATRQFPAGFCGASDGHERGEPRGARVLKRTVGHSVANDGPRHPARFSMGDGGVACAVRSVESFRAGALVRRGGAGEAMPDKGERAHGHRHQHQHWKNQQSATAADLEEGELLNGEAGTNGLPERSMPPKKWRKVLAASTAAVEVEPGEIVSTKQAVP

SEQ ID NO: 356845 - protein, 74 aa, Zea mays
  Clone ID: MRT4577_88611C.1.pep
QIERERHSPLLIPVKSKQAWPWRPWAWAGATSLLLPQRRQGAAPWSGERRGAPCNGARVILGQLRRTCPPMWLS

SEQ ID NO: 356846 - protein, 66 aa, Zea mays
  Clone ID: MRT4577_88612C.1.pep
FSVVSTCTICNVSLLLPFRVFVWTLWYCKVHGHDRQGKHMYPPLEGCAWRHCPVYTAGSCMYFTPI

SEQ ID NO: 356847 - protein, 81 aa, Zea mays
  Clone ID: MRT4577_88613C.1.pep
MGTTACAPMASQVVKSSTVQSRPRGVSGAALTRPRPRFSVVKAAMQPEKATYQVVQPINGDPFIGSLETPVTCSPVIAWCV

SEQ ID NO: 356848 - protein, 98 aa, Zea mays
  Clone ID: MRT4577_88614C.1.pep
SPPPIFVFMDGVIGFFVPPIFPLVPPFFLGLLENGAPCSGIILSPIFKSSSPKTKFWLGQKNLTGFLYPKRGRINKKPDGFNIFSGQPVSSPHVPPPI

SEQ ID NO: 356849 - protein, 132 aa, Zea mays
  Clone ID: MRT4577_88615C.1.pep
IRQHHAEPRREPFHCGRRRCGRERRPSIGGWRGAAGGRVEAEPGAGDELDPEDAGPAPPAQPHRLLLQLCLPAPPPPAPGLRKHLLEELEQAFPEDVEAYREIRATSAAEAKRLAQSQGTLPNGDVKMKAEH

SEQ ID NO: 356850 - protein, 185 aa, Zea mays
  unsure (1)..(185): unsure at all Xaa locations
  Clone ID: MRT4577_88616C.1.pep
MQNTVANPSAAAAAAGNGGVQASGAGGERPEDASKQNLAQVTSSIQKTLGLLHQLNLTVSSFNSASQLPLLQRLNALVAELDTMQKLAEGCNIQTXMRLIDDGKNPDEFTRDVLNSCIAKNQITKGKTDAFKGLRKHLLEELEQAFPEDVEAYREIRATSAAEAKRLAQSQGTLPNGDVKVKAEH

SEQ ID NO: 356851 - protein, 187 aa, Zea mays
  Clone ID: MRT4577_88617C.1.pep
MENVAANPSAAAAAAGNGVQASGAGGERPEDASKQNLAQVTSSIQKTLGLLHQLNLTVSSFNSASQLPLLQRLNALVAELDTMQKLAEGCNIQVPMEVVNLIDDGKNPDEFTRDVLNSCIAKNQITKGKTDAFKSLRKHLLEELEQAFPEDVEAYREIRATSAAEAKRLAQSHGNLPNGDVKVKAEH

SEQ ID NO: 356852 - protein, 127 aa, Zea mays
  unsure (1)..(127): unsure at all Xaa locations
  Clone ID: MRT4577_88618C.1.pep
PSRRDIQGTFRYIYICVCITTLVGGGTGPAHGTXCATTCTPAPSQLKLMLQSTDQLPINMGFTGKGNTSKPEGLAEIIKAGAMGLKLHEDWGTTPSAIDNCLSVAEDFDIQVNIHTDTLNESGCVEH

SEQ ID NO: 356853 - protein, 178 aa, Zea mays
  Clone ID: MRT4577_88619C.1.pep
AVAAAGNGGVEASGAGGERPEDASKQNLAQVTSSIQKTLGLLHQLNLTVFFFNSACQLPLLQRLNALVAELDTMQKLAEGCNIQVPMEVVNLIDDGKNPDEFTRDVLNSCIAKNQITKGKTDAFKGLRKHLLEELEQAFPEDVEAYREIRATSAAEAKRLAQSQGTLPNGDVKMKAEH

SEQ ID NO: 356854 - protein, 66 aa, Zea mays
  Clone ID: MRT4577_8861C.1.pep
RGQPATLAGEALVLVNFYPTFGKTLKKPRRPFEKDRLNPDLKLVGKFGLRCKPKLWPVQIALTPFR

SEQ ID NO: 356855 - protein, 102 aa, Zea mays
  unsure (1)..(102): unsure at all Xaa locations
  Clone ID: MRT4577_88620C.1.pep
MLYSMLLLSHIHILHSTQWLRHQLCSLWLHKDRGSVYTTIAHCTTILAHLTIHTIAXRHTQHQFLPALSHLPMVNPVAYLQQQLLASNPLVLANVVANQQQQ

SEQ ID NO: 356856 - protein, 102 aa, Zea mays
  Clone ID: MRT4577_88621C.1.pep
LMDNANGNVMLHVGFSPDSVLELASVTCEGNASASHDVMLHENPTDAGALNDGDPSALSTSDYEKEHASSLMNLEQHARSTLHEDTRKEEGVPSHGIVENDI

SEQ ID NO: 356857 - protein, 78 aa, Zea mays
  Clone ID: MRT4577_88622C.1.pep
SWFQASHRHLLAVTFVSRSCDPHEVRNECSKPEVVSPYEGSVFPASTVGSGLQGWELCITVDFWWSWCFPVGNRSEAT

SEQ ID NO: 356858 - protein, 108 aa, Zea mays
  Clone ID: MRT4577_88623C.1.pep
QPAARNLDDGTSPSSAASMRADLVAVRPTSHSCFPLFVFCFLSVSRAELQPPGNWFLADRVLHLGCAPERARADLLLSLVSKSVRVLSCTSVIYLFISSHCSGRLLWD

SEQ ID NO: 356859 - protein, 64 aa, Zea mays
  Clone ID: MRT4577_88624C.1.pep
PTSLHPPIHFSAAATFMHGDQRRGFFFPDFPLTQNYLFNGFSYTICVPSLCFQVVRIIVSTFLG

SEQ ID NO: 356860 - protein, 134 aa, Zea mays
  Clone ID: MRT4577_88625C.1.pep
APSPSVSLRTRSKKTAAVASSTMALCSTAFSGKAVNVPSSSAFCEASLTMRKTAGKAKPAGASGSPWYSPDRVLYLRPLSGEPPSYLTGEFPGYYLWNTPGLSENPHTFVMNLELDVIHSRWAMLDALSCVYPE

SEQ ID NO: 356861 - protein, 133 aa, Zea mays
  Clone ID: MRT4577_88626C.1.pep
HHTRHSPRPHIPQRKLPTQKRIRRVILRQTPKRMLMSRSPLIKINTMTRRLSRIQIIRRTRRRRLSRRLTITLRPIPIRLLRNSGLSNILRRPFMRPSGTTFSRRILQARPIHYNTRLPRHRHPTKRILITGP

SEQ ID NO: 356862 - protein, 55 aa, Zea mays
  unsure (1)..(55): unsure at all Xaa locations
  Clone ID: MRT4577_88627C.1.pep
VPNGGNSGAVVXLVELAVELVTELGLAVALPAAAAVDRVKTATTTTRNITVVGMP

SEQ ID NO: 356863 - protein, 79 aa, Zea mays
  Clone ID: MRT4577_88628C.1.pep
QRKQHAQANYKSSVTDPACMPEELRTRKWKDLPQTILIIQFSVGSRRTYVEMNQFLLWRQRRVLRRRRRTKIKKVTWRP

SEQ ID NO: 356864 - protein, 137 aa, Zea mays
  unsure (1)..(137): unsure at all Xaa locations
  Clone ID: MRT4577_88629C.1.pep
MAGIDLNTVEEEDEEEAEALPLPGPGGRGAVCLELWHACAGPVPPLPRKGSAVVYLPQGHLEHIGGDAARGAAAAAVPPHVLCRVVDVTLHADGATDEVYARVSLLPEDEDAEKRAQXGAGPGGRGPPRRRGRXRHE

SEQ ID NO: 356865 - protein, 68 aa, Zea mays
  Clone ID: MRT4577_8862C.1.pep
LCEHFFVFSPLRNGSGRVRWEYQSDNTPNKQPLEFRHFTPHQTKPGRLTRLIHLLDPGITRSLHQTRG

SEQ ID NO: 356866 - protein, 97 aa, Zea mays
  unsure (1)..(97): unsure at all Xaa locations
  Clone ID: MRT4577_88630C.1.pep
PKGVVHCHXGIFLVXXXALVEWAVPPRPTYLWTLPMXXTXGWCFPWGMAAVGGTNVCLRRVDAAEVYDAIARRGVDHLCGAPVVLNMLANAPHAARR

SEQ ID NO: 356867 - protein, 48 aa, Zea mays
  Clone ID: MRT4577_88631C.1.pep
QDATNVGDEGGFAPNIQENKEGLELLKTAIVNPVILVKRIFNTSSRSR

SEQ ID NO: 356868 - protein, 43 aa, Zea mays
  Clone ID: MRT4577_88632C.1.pep
QKKKKNKKKKKKKKKKKKKKKKKKKKKKIKKKKKKKKIKGGPF

SEQ ID NO: 356869 - protein, 66 aa, Zea mays
  Clone ID: MRT4577_88633C.1.pep
CHPYIHGHLYFAQDAPASYDSCPVQYSYVQLVQCMSSDCVFSASLSTSSKGYCMTTLLALLILVGS

SEQ ID NO: 356870 - protein, 51 aa, Zea mays
  Clone ID: MRT4577_88634C.1.pep
LPSLGYKTDTFSIDNPGQPATKLELENKPIAGPRPHRKSATEPLKADDPSI

SEQ ID NO: 356871 - protein, 49 aa, Zea mays
  Clone ID: MRT4577_88635C.1.pep
TSLAGILVTSNHKRVCLPQIGLTTGPLVQDLQCNKHFDLKTTWERRLIF

SEQ ID NO: 356872 - protein, 133 aa, Zea mays
  Clone ID: MRT4577_88636C.1.pep
MAVPLLTKKIVKKRVKQFKRPHLDRYKCLKPSWRRPKGIDSRVRRKFKGCTLMPNIGYGSDKSTRHYLPNKFKKFVVHNVSELELLMMHNRTYCAEIAHNVSTKKRKEIVERAAQLDIVVTNKLARLRSQEDE

SEQ ID NO: 356873 - protein, 113 aa, Zea mays
  Clone ID: MRT4577_88637C.1.pep
MAVPLLTKKIVKKRVKQFKRPHLDRYKCLKPSWRRPKGIDSRVRRKFKGCTLMPNIGYGSDKSTRHYLPNRTYCAEIAHNVSTKKRKEIVERAAQLDIVVTNKLARLRSQEDE

SEQ ID NO: 356874 - protein, 46 aa, Zea mays
  unsure (1)..(46): unsure at all Xaa locations
  Clone ID: MRT4577_88638C.1.pep
LFTXLFHPDSHCHNHSIHYRPRACSGYYGYGNESQDGTIELNRGPR

SEQ ID NO: 356875 - protein, 133 aa, Zea mays; identical to SEQ ID NO: 356872
  Clone ID: MRT4577_88639C.1.pep

SEQ ID NO: 356876 - protein, 91 aa, Zea mays
  Clone ID: MRT4577_8863C.1.pep
GHDQPQFYGGEEYVLESIQSGSTDNLQGVRQREATAAVQSDEKDLNVGLRSCSQIETLKKHRVGINIAEPSGPSVITARLPDDTEQLCYER

SEQ ID NO: 356877 - protein, 171 aa, Zea mays
  Clone ID: MRT4577_88640C.1.pep
MPSRSGSRGRRPRPAPEVAAPTAVQVSSSGSSEEGSDEEEERSPGGSASKYKAAESEAEAEDPCLPSCPICMVVWTADGAHRVSCIPCGHVYGRHCLEMWLLQYGKKKAPCPQCGKRYTQNNIINLYVPEIVVPNNDLENQVLSLRERNEYLEKQQAKLLEEIKEHKVPHR

SEQ ID NO: 356878 - protein, 164 aa, Zea mays
  Clone ID: MRT4577_88641C.1.pep
VAAPTAVQVSSSGSSEEGSDEEEEDGNKGSGDGARSPGGSASKYKAAESEAEAEDPCLPSCPICMVAWTADGSHRVSCIPCGHVYGRHCLEMWLLQYGKKKAPCPQCGKRYTQNNIINLYVPEIVVPNNDLEKQVLSLRERNEYLEKQQAKLLEEIKEHKVPHK

SEQ ID NO: 356879 - protein, 101 aa, Zea mays
  Clone ID: MRT4577_88642C.1.pep
SLTSTTSPSSPSTPSPTSGDGGSSISNEASTFLDIVRVYHKMEHSLTSTPPPRLAAEMHYVVSRVLGRDRLLRAPSQLQWMRRCIRPPRIAVVAEAHRTRG

SEQ ID NO: 356880 - protein, 76 aa, Zea mays
  Clone ID: MRT4577_88643C.1.pep
RQLRSQPYLYWVRLGLFRLGVHVHGLANGVGGVAYAASVAFQGVPNWGPGIIFRRCVLVVVTFVVRSHVRTSVQVL

SEQ ID NO: 356881 - protein, 141 aa, Zea mays
  Clone ID: MRT4577_88644C.1.pep
ERPPVSGGLAFWAAGAGGSIARVVSGGWLVVVPGCETCGQARLGLIGQVGLVGLFLVLSGGRVQFFRVGRASFFLMGRSWGFLLFFVQDPPPPGGLFPGAELLAKVFWGWKVERKRLDKKTRKKKKRREKKIKKKKKKKKK

SEQ ID NO: 356882 - protein, 426 aa, Zea mays
  unsure (1)..(426): unsure at all Xaa locations
  Clone ID: MRT4577_88645C.1.pep
MEMEQLCSLLRDLDALKQHPDDLTSTIDRMRERLVAMMNPAAGAASRSKIKDMSAEVVDNNPYSRLMALQRMGVVENYERIRDYSVAIVGIGGVGSVAAEMLTRCGIGRLLLYGTSTVELANMNRLFFRPEQVGMTKTDAAXQTLSGINPDVVLESYSLNITTVKGFETFLASLKAQSSHERSTGVNLVLSCVDNYEARMVVNQACNELGQTWMESGVSEDAVSGHIQLLVPGETACFACAPPLVVASGVDERTLKREGVCAASLPTTMGVVAGLLVQNALKYLLNFGQVSRYLGYNSLKDYFPAMEMRPNPQCSNPACVLRQKEYMESKPARDAAAKTKMEAEASTENECPVHLDNEWNISVVDDEETETSSIRNTPDILPEGLVRELPDADSYAGPAAPVSSSAIDDDDDLEELQRQLDALNAS

SEQ ID NO: 356883 - protein, 113 aa, Zea mays
  Clone ID: MRT4577_88646C.1.pep
FLAVLAAKGGLKYIDPLGERFVVLLRDHKGEIKVVVRPVFSPPRGGGKDPREPLRDTLGETKIFLVDQKIASGPMGGLVFEFGQKGLDFSIRTRGKQRGGFLGHPLDFYHPFG

SEQ ID NO: 356884 - protein, 73 aa, Zea mays
  Clone ID: MRT4577_88647C.1.pep
SYGQMETGQPIQYPNTKAELNSSTQQTRPVYLGISLPPRSRMDVDGIIHRLKKPPSPPAGRLISRGELTSLSA

SEQ ID NO: 356885 - protein, 94 aa, Zea mays
  Clone ID: MRT4577_88648C.1.pep
GSVLLFHAFQPKKVLSLQINFFHMYVYTHNSDLWNYNLLLQINLFTCMNDTSVAFFLVKRSYYGEYINLVVLLLVLLVRGAEEARQRGAELKEE

SEQ ID NO: 356886 - protein, 101 aa, Zea mays
  Clone ID: MRT4577_88649C.1.pep
FAAANYNSTGLNCVYIHTCEKINLQGQVKIPHVRLGKLHVLLSPFLFLTNLVYLTAPFWVETRGIIALILRDFIQRGNWPLPKPVFHTCKTLLVRCMIYED

SEQ ID NO: 356887 - protein, 59 aa, Zea mays
  Clone ID: MRT4577_8864C.1.pep
YEKDTDKQVHRRDPNTLKLNNRRSTFERTERDVTKTANNYFSGQALQEGATTPRRLTAA

SEQ ID NO: 356888 - protein, 58 aa, Zea mays
  Clone ID: MRT4577_88650C.1.pep
MSTPARKRLMRDFRRLQQDPPAGISGAPHDNNIMLWNAVIFGPDDTPWDGGEIPSSQL

SEQ ID NO: 356889 - protein, 352 aa, Zea mays
  Clone ID: MRT4577_88651C.1.pep
MDSDYIASLLMGSSAPALSFAAVDAGFLDTLRGGGGGGGLFGVPAEAGCGGGSPEGSSVSDPAWARARDYGNARKRKAPPTGSAGGKEACLSKVAEANGPDGKRCRVGASDSPVKPKEEEAAAAAAASGALVEVKAQKKGKGKSSKPAVEPPKDYVHVRARRGQATDSHSLAERVRREKISQRMKFLQDLVPGCNKVVGKALMLDEIINYVQSLQQQVEFLSMKLATVNPELDFSNLSTLLHKDMYQQPCGGPSASSVFPLESAGAAFPFCEQADLFHSFGSGGSGSGSGMEDQCSLSLLLDTALPHAASPQFAFQKQQRDLWEDGLQHALPTPTTGSEQRQEEDGLLVPDP

SEQ ID NO: 356890 - protein, 45 aa, Zea mays
  Clone ID: MRT4577_88652C.1.pep
FHRPAFLSAEINIQIPAKAGFYKSTSLLLGGGVTYKPDPLFLASK

SEQ ID NO: 356891 - protein, 484 aa, Zea mays
  Clone ID: MRT4577_88653C.1.pep
MTSAVLAGRNEVHQAHQHHRQWAGARVPLMPKPSSNPNPRRHRAGPNPIPSGSPPEPRAAPAVAAEPSPSPSGHLNFRPSEMTPAEARHLRARLTSELCRVRAFLSRIDSWQDGQRRRRGPEPPARGPSPPPALVEAMRKRCADILMRLRRSKKSVWFNSPVDVEGLKLHDYRAIIRSPMDLGTVKQNLTAGRYPSHEAFAGDVRLTFNNALRYNPPDHHVHRYAGNLLASFEGMYKEAVSWFEQQRQQLEPPMQPDLPPPPQLPVVSVPVQAPPRMGGGGRRPKPKAREPNKREMDEEEKQKLRVEIENLPEEKMLNVLQIVQKRNSDPAFTGEVVELDFDELDMETLWELDRFVVNWRKALKKSQRNSMVNGDAAAAVNGDAIDVTVVPDDDDMVEVAVNPSVAVEIGESADVPEKEMEAEMVDDYVDIGDEMPTVNYQSVEIERDSPAAASSSSGSGSGSSSSSDSDSDSDSDGDDASAPH

SEQ ID NO: 356892 - protein, 130 aa, Zea mays
  unsure (1)..(130): unsure at all Xaa locations
  Clone ID: MRT4577_88654C.1.pep
XXFFFFFFFFFFFFFFFLFPPPFFFFWPRRTSSQRARPNTIASSFTQRGXWVPAPPKXPRPSYETRPAYSXIXXPYETYXTHXGTFFFCISGRRTCAXRFSSQWHDISLRVXRLSPRPRAPIISPLPRSA

SEQ ID NO: 356893 - protein, 49 aa, Zea mays
  Clone ID: MRT4577_88655C.1.pep
FHKNGRAGYFLGPHPTFHINHVLDLHKYQGVLIKNMPLAFLRKPCMNEE

SEQ ID NO: 356894 - protein, 94 aa, Zea mays
  unsure (1)..(94): unsure at all Xaa locations
  Clone ID: MRT4577_88656C.1.pep
STEGEKQKKKNSITEKYCHWEFLNETKPIWMINPKQVNKTNYNQFYKNTFNEFIDTLAYTHFTTLGEVXFLSVLYVPXISPLINQQIMNPYTKN

SEQ ID NO: 356895 - protein, 93 aa, Zea mays
  unsure (1)..(93): unsure at all Xaa locations
  Clone ID: MRT4577_88657C.1.pep
MPIGVPKVPYRIPEMNXSTSIDLYNVIYLEMTLFLGQEIPFXITTHITRLILYLNTQDGHTHMNLYINSPNGLLISSITLIDTIHTSTLDIYS

SEQ ID NO: 356896 - protein, 161 aa, Zea mays
  unsure (1)..(161): unsure at all Xaa locations
  Clone ID: MRT4577_88658C.1.pep
VVANQQQQXLNQFVPLLSQLAMVNFTAYVQHQQLLSFSPLAVGNAPTFLQQQLLQQIVPALTQLDVPNPVACLQQLLPFNQLIVSSFGAYLQQRQQLLNPLVVANPLFAAFLQQQQLLPYKQFSLIMPVLSRQQPIVGGAIFSDYIWDVLENGALTPTCVS

SEQ ID NO: 356897 - protein, 159 aa, Zea mays
  unsure (1)..(159): unsure at all Xaa locations
  Clone ID: MRT4577_88659C.1.pep
MATTATEAAPALEQQVNDHGKHNTRHSEVGXDSLLKSDYLYQNILXTSVYPGEAESMKELREATDKHPWNLMTTSADEAXILNMLIKLICAKKTMEIGVYTLYSLLATWFALAEGXTILAMDIHRENYKTXWACTCIKKGGVTHKIDFREGPALPVLDD

SEQ ID NO: 356898 - protein, 49 aa, Zea mays
  Clone ID: MRT4577_8865C.1.pep
FQIWVKFAYGQLNINNITDPTPFPFPDLNYSFRNSAKKPCTNPMKFHFN

SEQ ID NO: 356899 - protein, 95 aa, Zea mays
  unsure (1)..(95): unsure at all Xaa locations
  Clone ID: MRT4577_88660C.1.pep
FANHNFARRVLYQSEKHSQXQLMGSSTSNPPIKVDTLSNQLYYPKRPLFKTVIADCLARSNCTTFGRKDDFTRPEYFNGQNAIVAVNVHQGFNQK

SEQ ID NO: 356900 - protein, 84 aa, Zea mays
  Clone ID: MRT4577_88661C.1.pep
ITRFGMVILCRQGEALPVQHTIRPACHHGLKPPLGLEINACFRLEPQHIKHYEEAFFLGEVVFYYENTYLLFVKCDGSNKRRIC

SEQ ID NO: 356901 - protein, 291 aa, Zea mays
  unsure (1)..(291): unsure at all Xaa locations
  Clone ID: MRT4577_88662C.1.pep
MLSLPLRRRRRLLRFCARRNPTFLRLSIAASAAALSTAPTVASAVVTPISDRLRVLRSLHAVAPDHPLSHPLPSSAHICLAAHLAARARLFAHSRRLLSRLLGAGHRPHLAASLVDILHRAALALGPHRSALPSVFDTLLSLLADHGLLDDAVRALARVRQLRVPPNTRTCNHILLRLARNRQGGLVRRLFEHLPAPNVFTFNIVIDFLCKQGELVEARALFVRMEAMGCSPDVVTYNSLIDGYGKCXELXKVXLLVSEMRKSGCAADGVTYNALINCFSKNWVDREGLQL

SEQ ID NO: 356902 - protein, 67 aa, Zea mays
  Clone ID: MRT4577_88663C.1.pep
RRIKWHQTPALQFSVMRKIRSQLTQSAYDMCLVLGELGYASPSTVLGENRCLRLQPKNTHRPRAAAD

SEQ ID NO: 356903 - protein, 155 aa, Zea mays
  Clone ID: MRT4577_88664C.1.pep
ICAPLWKLLALAAGFTIQPATGRCNVSRSRRAALLLPSSRRGPAAMATYAPPATPWTEIPLCLGLDVVTWSRQRQQSHVMSPTMRGQVPRGTVALASLTAFTSIQSWRSTREGVVNSLMAWFSFSESDATCLCLYQNAIRKAFTDGWPWPASKGQ

SEQ ID NO: 356904 - protein, 97 aa, Zea mays
  Clone ID: MRT4577_88665C.1.pep
FLGQVKLLLLVEWNDECWRYTYKRHSPRSCRPSSARLSYFFLLLAAHLPTHSHTATLTALAVTDVRRTPLRRYMIVGLYRCLNSFNGFIPTSIQISK

SEQ ID NO: 356905 - protein, 87 aa, Zea mays
  Clone ID: MRT4577_88666C.1.pep
RCCAGLRPGSVCPRGRGVARSRRAWSPVRVLWPRAPVGGLGVCRGGARRALVGCACDFPQSVGWFGEKKKKKKKKIKKKKKKKSLYS

SEQ ID NO: 356906 - protein, 132 aa, Zea mays
  Clone ID: MRT4577_88667C.1.pep
SPVSIPAASARKQLSAVDENPNRPLVMEEVRISNLDEEPSAPAPAPAPTPVIAAPFAAHAAAVDHLALCSTGRIGPHAPVDIPTNKILSLPDASPANAPVFARRVFSAAVPAMVPTKKTATVPCPSLAKAPV

SEQ ID NO: 356907 - protein, 88 aa, Zea mays
  Clone ID: MRT4577_88668C.1.pep
TGSGKAHHGLNILLQGRPTPQRASGPEERHGTPLLEPKKKSLLCTPETPPFQKPWRLNTWEQPVTKKAQGPYVRGVAETPHLASGHRG

SEQ ID NO: 356908 - protein, 124 aa, Zea mays
  Clone ID: MRT4577_88669C.1.pep
KILLKGKSDRLDIRDIASQCGNQEKGGNFWIKLNINQTGFYRVQYDDKLAAALQNALQAKKLSVMDKIGIVEDSLALSMACKQTLTSLLRLLYAYREEADYSVLSHINTASLSIAKISVDATPG

SEQ ID NO: 356909 - protein, 225 aa, Zea mays
  unsure (1)..(225): unsure at all Xaa locations
  Clone ID: MRT4577_8866C.1.pep
LVPRAGLDLISKGLPIVLLAHLRHLVTVHILMMCTYVEAXREFQRFLLXISQVKQHHQNSPHHDQILNKNAPMTMLMAIRLSLCTPNKLXIAENVITQLKXNYNDHTRLMHSYDDETYAAYEELFSNACPWVITPTPANMDDAVPNYNQNAYRXLTLKLYLYEKSHXQWLCVIPSYPHLYPTVTIKQLDQYMKLDESTLKCILMTYYDQMHADDRAPKIRSESIL

SEQ ID NO: 356910 - protein, 100 aa, Zea mays
  unsure (1)..(100): unsure at all Xaa locations
  Clone ID: MRT4577_88670C.1.pep
MSEATVRVIXLWTSPFMICVMISMXLIRRPSSQCDAEVVRTKTHLQLMSNQVQNNMPVHHQQGKRIYQSQMIVYXIDEVXSSGSXAXLPLDAHAHSVDQC

SEQ ID NO: 356911 - protein, 127 aa, Zea mays
  unsure (1)..(127): unsure at all Xaa locations
  Clone ID: MRT4577_88671C.1.pep
ADKTIGGGSDASNTLLRETGAGKDVPRATLVDLDPTDIDEVRTGTYRQLCHPEQLIMGKEDAGNNFARVHYTHWQGHCXCALTRIRKLXAHNCTDLQGFLGFNAAGGGTVSGLGSLLLERLAIDYSK

SEQ ID NO: 356912 - protein, 38 aa, Zea mays
  Clone ID: MRT4577_88672C.1.pep
RPGLLAASPPPSSSFSYPRASDNPAEDNMLKLSQIILY

SEQ ID NO: 356913 - protein, 38 aa, Zea mays
  Clone ID: MRT4577_88673C.1.pep
FGTRPRGADSREAYLQHARARLYLLCVSLNTPNWISLS

SEQ ID NO: 356914 - protein, 38 aa, Zea mays
  Clone ID: MRT4577_88674C.1.pep
VACSGEVGVSQSDQGGPPGWETAAKPPRSTPPTPSQQC

SEQ ID NO: 356915 - protein, 428 aa, Zea mays
  Clone ID: MRT4577_88675C.1.pep
MATLPMALSPAAISPFTTLPLYYSSRPHRRLLARFFSVASAPGGAKGHRPAASAVEVGGVKIAREDVVKEDDPTNNVPDNIFSKIGLQLHRRDNHPLGILKNTIYDYFDKNFTGQFDKFDDLCPLVSVKQNFDDVLVPSDHVSRSYNDTYYVDGQTVLRCHTSAHQAELLRHGHTHFLVTGDVYRRDSIDSTHYPVFHQMEGFRVFSPDEWSGSRLGGTAYAAAELKKTLEGLARHLFGAVEMRWVDTYFPFTNPSFELEIYFQDDWLEVLGCGVTEQEILKRNGRRDHVAWAFGLGLERLAMVLFDIPDIRLFWSNDKRFTSQFSEGKLGVKFKPFSKFPPCYKDMSFWINDAFTENNLCEVVRGIAGDLVEEVKLIDNFTNKKGMTSHCYRIAYRSMERSLTDEEINNLQLNVREAVKDKLEVELR

SEQ ID NO: 356916 - protein, 202 aa, Zea mays
  unsure (1)..(202): unsure at all Xaa locations
  Clone ID: MRT4577_88676C.1.pep
MACSLHRRENHPLGXILKNTIYDYFDKNFTGQFDKFDDLCPLVSVKQNFDDVLVPSDHVSRSYNDTYYVDDQTVLRCHTSAHQAELLRDGRTHFLVTGDVYRRDSIDSTHYPVFHQVLLFCRTHLNFLNEVCFGNLXTXMEGFRVFSPDEWSGSGLDGTAYAAAELKKTLEGLARHLFGKSFVACSLSFEGMTKLILVSDKL

SEQ ID NO: 356917 - protein, 350 aa, Zea mays
  Clone ID: MRT4577_88677C.1.pep
MRPLIRTARCWLLRARVRAMATLPMASPAAAIPSSATRPVASPSSRSHRPLNRFFSVAPAPVGAKGLRAAASAVEVGGVKMAHVGPEWSHDMTYDDTGHTDVAKRSALQLHRRDNHPLGIIKNTIYDYFDKNFTGQFDKFDDLCPLVSVKQNFDDVLVPSDHVSRSYNDTYYVDGQTVLRCHTSAHQAELLRHGHTHFLVTGDVYRRDSIDSTHYPVFHQMEGFRVFSPDEWSGSRMGGTAYAAAELKKTLEGLARHLFGAVEMRWVDTYFPFTNPSFELEIYFQDDWLEVLGCGVTEQEILKRNGRRDHVAWAFGLGLERLAMVLFDIPDIRLFWSNDKRFTSQESFVP

SEQ ID NO: 356918 - protein, 155 aa, Zea mays
  unsure (1)..(155): unsure at all Xaa locations
  Clone ID: MRT4577_88678C.1.pep
PAGRARPGGQRAGSARTGPPPREATRHQEHGGGRTAGARPGEGGRHGTPTQAKPGRKEGXGRXPEPXXXXXXTGEEXGXGREEXNXXGXRXSXEEKGGNGEXPESXATXTTEQXXXXXRRGQXKGGDXSTRGKEXRRTKXARRKGEQEXRRPRGA

SEQ ID NO: 356919 - protein, 116 aa, Zea mays
  unsure (1)..(116): unsure at all Xaa locations
  Clone ID: MRT4577_88679C.1.pep
QRFTVNPAGYWQQHLLPFRQVGSAYCQQQQFLPFNQLGALNPPGYFQQQILLPFSQLVAANRASFLTQXQLLPFXQQFGDNPATLLELQQVLTFVQHALTEPTASYQQRIIGGALF

SEQ ID NO: 356920 - protein, 44 aa, Zea mays
  Clone ID: MRT4577_8867C.1.pep
GWPAPGPKKTAKKLGLVAFCTVGASSGDQVTTVIRCRAKWFWLD

SEQ ID NO: 356921 - protein, 127 aa, Zea mays
  Clone ID: MRT4577_88680C.1.pep
MTKQKIVIKLSMPSEKSRSKAMVLVARTDGVSSMEIAGDGKDQLVVVGVDVDTVCLVMCLRKKLGYADILKVEEVKDKNPPEGPKVVDPLPYYCPCYYGYYCHHHNNPWCSHPYVVYVRVQNTHFIF

SEQ ID NO: 356922 - protein, 83 aa, Zea mays
  Clone ID: MRT4577_88681C.1.pep
KLCPSLDPFLIFKRELLPLPVLLFTSKNHTMFRQVQGRSSFFPSKELPYFMVGLPSSINFIYKKFVDITKEDLDLRDNNEERE

SEQ ID NO: 356923 - protein, 83 aa, Zea mays
  Clone ID: MRT4577_88682C.1.pep
SAGVSSMEIAGDGKDQLVVVGVDVDTVCLVMCLRKKLGYADILKVEEVKDKKPPEGPKVVDPLPYYCPCYYGYYCHHHNNPWC

SEQ ID NO: 356924 - protein, 37 aa, Zea mays
  Clone ID: MRT4577_88683C.1.pep
HIPGPESVFRSQDLDITHARSTGGYRSDTIRHSVRVG

SEQ ID NO: 356925 - protein, 198 aa, Zea mays
  Clone ID: MRT4577_88684C.1.pep
PAVPGFFLLLFILSFVFIKMTEKFKKNQHVSIKKSRIGSLLLGLFTTFIVLGAIILEADSRSKGIKSPEQWYGIMKSHPYERKLSDLRSPCPMVNTLANHGFLPRDGRDVKPSDIYNVLSLLRIPPIFSVGIIAFAYSKYNEAVPDKHSLSQFGFTDKINLNQLSVYDVLEHDVSLTRYDTALPPHNTTYLGLNSLNG

SEQ ID NO: 356926 - protein, 156 aa, Zea mays
  Clone ID: MRT4577_88685C.1.pep
IFAKLHHCDLHKTINKCFSKRTVEEIIDALEQEISNVSDKWVAATIKSLKKASPTSLKISLRSIREGRTQTLGECLRREYRVVCHVLRGTFSRDLSEGFRAVLLEKDNKPEWIPPRLEQVPDEAVEQYFLRIDDPQWEDLNLPARLPHRRNIESKI

SEQ ID NO: 356927 - protein, 66 aa, Zea mays
  Clone ID: MRT4577_88686C.1.pep
RGFFFFFFFFFFFFFFFFFFFFFFFFFLKKKKQTRFFTKPFGFHEDFGGNPPGWGVSDGGGPSTLL

SEQ ID NO: 356928 - protein, 77 aa, Zea mays
  Clone ID: MRT4577_88687C.1.pep
AQRTIIGSDKLKSNFCYHTMGIEKIWSHSSYGIKIQQKAADLSNKYHQKSQGRMPVGESQGIPAYSALLPLLKGEFW

SEQ ID NO: 356929 - protein, 382 aa, Zea mays
  unsure (1)..(382): unsure at all Xaa locations
  Clone ID: MRT4577_88688C.1.pep
MATLPREGAAAADSDQLLVEAHGSTRTLILNRPKQLNALSSEMIKGLLWYFTAFEKDDGVRLLIMKGNRRVFCSGGDIAQCARCLYNGNWKWVDDFFQNEYLLNYIIATYIKPQVSILSGIVMGGGAGVSIHGRFRVATDNTVSSTNMSQIFAMPETALGLFPDVGASYFLSRLPGFYXVLADRLLTYLSPGEYVGLTGARLDGAEMLACGLATHFVPSKRLPLLEESLKKLDTSSTFAVSGIIDQFSQRPLVKDSSSLNRMETINKCFSKRTVEEIIDALEQEISNVSDKWVAATIKSLKKASPTSLKISLRSIREGRTQTLGECLRREYRVVCHVLRGTFSRDLSEANMKHFAHCSSNHLRSSSLYAVVFVGQQATVPNI

SEQ ID NO: 356930 - protein, 138 aa, Zea mays
  unsure (1)..(138): unsure at all Xaa locations
  Clone ID: MRT4577_88689C.1.pep
MLSLSRAIGRRLFSSAEAASTAAVRTAQNPLEEFFEVERSTEEGQXPPHYGRSWKASELRLKSWDDLQKLWYVLLKEKNMLMTQRQMLHSESMRFPNPERISKVKKSMCRIKHVLTERAIAEPDPRRSSEMKRMINAL

SEQ ID NO: 356931 - protein, 77 aa, Zea mays
  Clone ID: MRT4577_8868C.1.pep
LKLSGAFYKIFWVFNPNPQIFKSCEPNDFPLPDSPPRTLEVNWRLTSSDTYATGCVTDERSHSATAKSAKIAPMEDA

SEQ ID NO: 356932 - protein, 67 aa, Zea mays
  Clone ID: MRT4577_88690C.1.pep
LPVHKPDFLIGQDRVRSSALPPISLFPPRKKYSMDSGFYRHAEFRCKWARFEFSKLVVIMKMQFVSV

SEQ ID NO: 356933 - protein, 223 aa, Zea mays
  unsure (1)..(223): unsure at all Xaa locations
  Clone ID: MRT4577_88691C.1.pep
LEAVRQVDVVICAVSTKQVLEQKPLIRAIKEAGCVKRFIPAEFGADPTKVQICDMDYGFYEKKIEIRHSIESEGIPHTYICCNFFMRYLLPSLVQPGLDAPPRDEIKIFGEGNTKGVFVKENDVAKFTICTIEDPRTLNKTLYLRPPGNVFSMNELADLWESKLKKSLXKDAPFPLKMDLIFIYSAFVKGDHTYFEIDLSMEGTQLYPHVNYTTVNEYLDTLV

SEQ ID NO: 356934 - protein, 157 aa, Zea mays
  unsure (1)..(157): unsure at all Xaa locations
  Clone ID: MRT4577_88692C.1.pep
RLRVLGSYYTVDLSVRALLALYASATSANICHLLATLCGTEXPHFLLPVTXWDKIRPSNQGYLLQQAMADKVXASMAPIAALPERHVQCIPLIQHXQPVLPALSPHNMVNXPAVYLXQQLLALNPLALHNLVANHSHKLLQQLLSEVCQLIMENPAA

SEQ ID NO: 356935 - protein, 92 aa, Zea mays
  Clone ID: MRT4577_88693C.1.pep
GSLTSSGFKTFATSNAVVARNSFTQELVVHATIAGTFDVAKRETQKSKSYPLAASPIVPRPKQQQRQRQLQPFDAHRFKTLPKTSIENKSPK

SEQ ID NO: 356936 - protein, 315 aa, Zea mays
  unsure (1)..(315): unsure at all Xaa locations
  Clone ID: MRT4577_88694C.1.pep
MSREAARTRSRVLVVGATGRLGGNIAQASLAAGHPTFALVRXTTSXPDSPVLEPLVAAGATLLQGSLEDYSSLLEAVRQVDVVICAVSTKQVLEQKPLIRAIKEAGCVKRFIPAEFGADPTKVQICGMDYGFYEKKIEIRHSIESEGIPHTYICCNFFMRYLLPSLVQPGLDAPPRDEIKIFGEGNTKGVFVKENDVAKFTICTIEDPRTLNKTLYLRPPGNVFSMNELADLWESKLKKSLKRLYVTEEQLLKEIHXIETAKDAPFPLKMDLIFIYSAFVKGDHTYFEIDLSMEGTQLYPHVNYTTVNEYLDTLV

SEQ ID NO: 356937 - protein, 108 aa, Zea mays
  Clone ID: MRT4577_88695C.1.pep
TAAYEDLAPLHLRRYPCSHDLRETNRVVWYSASSESKNMAGTVDGGGGVGHSGAVGLPWWGTNDGDGVNQQRRAPPYRLGVAIKCGACLSRSRIGGEKGVPGRPRGTQ

SEQ ID NO: 356938 - protein, 65 aa, Zea mays
  Clone ID: MRT4577_88696C.1.pep
LFNSSQPTAVFSTAHSPQQLFSQPQPNQTNPKAFPHLYWDTVMVGKTYERRPKQPIGQATPGDQD

SEQ ID NO: 356939 - protein, 65 aa, Zea mays
  Clone ID: MRT4577_88698C.1.pep
VSHQVALYWQTFELLASHRSRCTCSCCGVWYQHMVTQINFSTMQHITEQANKIQSAKKVSPQSSS

SEQ ID NO: 356940 - protein, 140 aa, Zea mays
  Clone ID: MRT4577_88699C.1.pep
NPHTCPGPCFEGGVKPNPVDAKGGGVFQSPPPLPKPTLKFLNKVVSLFGGTQLPGEKPGVTPNRAQRGALQLSPRKSAQAQQKSPFSGSPAPFATRPSGLRDLGSVNQAPGGTTYCFRRRIFFGQKTVGPGTGHLGPTLP

SEQ ID NO: 356941 - protein, 89 aa, Zea mays
  unsure (1)..(89): unsure at all Xaa locations
  Clone ID: MRT4577_8869C.1.pep
MREGISIHLGQAGIQVGNPCLELDWLXMGFKVNGKSPGTRTLGEGEKVLTTFLMKTGAGKTGPRPVLVDLEPLVFDKGETGTXRQVFQP

SEQ ID NO: 356942 - protein, 402 aa, Zea mays
  unsure (1)..(402): unsure at all Xaa locations
  Clone ID: MRT4577_886C.1.pep
MEQGGKMAHGWAARDASGLLSPYSFSRRVQGDDDVTIKVLFCGICHTDLHIIKNEWGNAMYPVVPGHEVVGVVTDVGHGVSKFKAGDTVGVGYFVDSCRSCESCSTGHENYCPDLVLSSNGVDHHHHDGGASASATTKGGFSDVLVVSQDFVVRVPESLPPDGAAPLLCAGVTVYSPMVQYALNGPGKHLGVVGLGGLGHLAVKFGKAFGMTVTVISSSPAKREEALGRLGADAFLVSHDASQMKAAAATMDGIIDTVSAGHQIVPLLALLKPMGQMVVVGAPSTPLELPAYAIITGGKRVAGNGVGSVADCQAMLDFAAEHGVTADTEVVPMDYXQHRHRAAGEERCQVPLRRRRRGQPDGYRCLEAWMRSSIESCSSRRCAWCEIVCSCRLFVGGCGSIN

SEQ ID NO: 356943 - protein, 51 aa, Zea mays
  Clone ID: MRT4577_88700C.1.pep
SHRSFTVYITSTHMLRTASGIDSRMATTTTRVQLISVRTLCYLEQQFSFNN

SEQ ID NO: 356944 - protein, 202 aa, Zea mays
  Clone ID: MRT4577_88701C.1.pep
ILTPCRRCPLMLAELLSNGCSRVSPSPVSLPVSISARELLYRAQQPPFCATRPRPTHTQSVAGTPSALMSFFFVNIHQPAPILATNHTRPDPRLPGTSRPSLCPTPRSTWPHARLLVVQSIQASTSTYAPLLLTWTEAAKLSNSIAPLRSGRALLGFSGARAVHRPSPLTGILHSSPYHADALPYLAVRRGRQWPSSMPHLL

SEQ ID NO: 356945 - protein, 98 aa, Zea mays
  Clone ID: MRT4577_88702C.1.pep
YIYTHLSEFPKRFVELSAYLDIMPVQNGQRRAVPVPSTPELARSIVHSVLNDHDTRYRQRYVDVMANDQARHTFENQPILVVYIQTYLVDREFFAVAT

SEQ ID NO: 356946 - protein, 114 aa, Zea mays
  Clone ID: MRT4577_88703C.1.pep
GGSGSGRLGGLPPAFMQTASYMGGGHHGVSSFTLGPGCCWAKFLPGPGGLSGCMLVCRVRVAPCPTPTVWSVPWGPLVGSPSAVRTHNRCCSCDETIQMHGFNLSKKKKKKKKN

SEQ ID NO: 356947 - protein, 93 aa, Zea mays
  Clone ID: MRT4577_88704C.1.pep
ILRYINFVYYFFFRIWKCNFLFMVGHIHHPKNFIIELQLISNLKEGTINDVLLVAGGWVCKSKLEKGRQMLKDMHGRSVGLTHERNAQEDAVL

SEQ ID NO: 356948 - protein, 170 aa, Zea mays
  unsure (1)..(170): unsure at all Xaa locations
  Clone ID: MRT4577_88705C.1.pep
PRQSVSRGCTWGSPRTTALTTMLLLMLLXCPELILATXLLTMFLIRIRNWSYKPRYPPHMTTNINNTNADDADEHDEELDTEPTTRNTKGERMRDNIMNNVVRRIQTEIQDMATHRDTQQAMVKSMDTWTTPGSALFCVLAXMVSYVTPYETTAELRGVYGRRHPRMKHR

SEQ ID NO: 356949 - protein, 105 aa, Zea mays
  Clone ID: MRT4577_88706C.1.pep
FHETTPRAATSQSLMDERGKKKKKGPFWNNNPRPRRNFTGAFPSRGPASHPPRNMNGGRGNKFPWGATASVYSEHQGQQPKKTQHRGSLHQTTRRVGPWGALWRP

SEQ ID NO: 356950 - protein, 101 aa, Zea mays
  Clone ID: MRT4577_88707C.1.pep
MPAPTPPRNQPKRRRPLALPAVCPCEGIAPEPLLASVVSLTADVASRRAGDASAFPVLRRGTRQAVRLAGLLLAFLEEIQDATATLSYSAVNGLTDLHPPM

SEQ ID NO: 356951 - protein, 235 aa, Zea mays
  unsure (1)..(235): unsure at all Xaa locations
  Clone ID: MRT4577_88708C.1.pep
MLDRSALCTARTVGAWTRNASSRAASRFASTXTSAEGAASAWKNNXSPRGATIFAVGSTAWYWHLYRRDVDAMTPAEQSLHPTQYPWEHEKWYKTYDHAALRREFQDYREDCASCHSISRVPYRALGGKFMTVDEAKALAEENEYDTEPNDQSEIEKRPGKLSDYMTAPYKNDEAARAANNGALPPDLSLMGRDRHGGXHYIFSLVTDYPEEPPACADVQDGLNXQPYVPGTGLP

SEQ ID NO: 356952 - protein, 81 aa, Zea mays
  Clone ID: MRT4577_88709C.1.pep
PAGQRRLLERMLGRALLLLHARHVLLRLSCRQGWGGAGAASRSILQSRRMHEDVFGVITSHELTMIHLFFFLPFRVCSPVL

SEQ ID NO: 356953 - protein, 57 aa, Zea mays
  Clone ID: MRT4577_8870C.1.pep
ILNQTPPCQFLNLDGQLPCRGRRFLLMKHQRPVSWVKTSVPLHSPTVYEARYSRLAG

SEQ ID NO: 356954 - protein, 89 aa, Zea mays
  unsure (1)..(89): unsure at all Xaa locations
  Clone ID: MRT4577_88710C.1.pep
MAAADVKYRSLGGRLAWGTSYESMENASSLXGKILESKVITLRTTDRARALXFGTLSYENSMLDAEKNMNGKDLDGRNITXHQAQPRGH

SEQ ID NO: 356955 - protein, 99 aa, Zea mays
  Clone ID: MRT4577_88711C.1.pep
PVGTRRTRGEADHRPNRKSGRQGTDMDMRPCLLNAFFSKRFGHAQVMPRGTSKVIAAPPTNLRDLRHTLPSLRDDNPWRTIGRLIADRPLGAAELWFGL

SEQ ID NO: 356956 - protein, 166 aa, Zea mays
  Clone ID: MRT4577_88712C.1.pep
GRAYRPVGPAACQSPRSQGRRTLPMVKPRKTRTSAPDPPVNAVRLPWHPPAPAVPAAVLISLAALLIRVLVSVGPYSGQGAAPKFDDYEAQRHWMELTLHLTPADWYRRPAGVRPGRRRQRLLLVPDPQVPLQEQAAHRTAGAGPCARRVAGPLRQQRPSRCSRNP

SEQ ID NO: 356957 - protein, 98 aa, Zea mays
  Clone ID: MRT4577_88713C.1.pep
IPLRLLLHVMTFVPLVLWHSVPLTARQSTTNSNIKELSTPSLDQAEILETCHHSLGATGAALTHTSDNQLPSTSAGRSSTSNSSKTTFWLMLNLHKHS

SEQ ID NO: 356958 - protein, 60 aa, Zea mays
  Clone ID: MRT4577_88714C.1.pep
SKHKNHALKTKPKAQNLTMWSKPCSCLPNNACCNNQRPCLKNLDVRSKTYQLEGLPSQGG

SEQ ID NO: 356959 - protein, 259 aa, Zea mays
  Clone ID: MRT4577_88715C.1.pep
EALQREINEANAVVNWTDRAPYAYWKGNPKVGAERLLLLRCNASGERDWNARVYAQDWGEEVRHGFRGSDLSKQCTHRYRIYIEGRGWSVSEKYILACESVALMVRPRFHDFFSRGLSPLRHYWPVRGDRGMCRSIKHAVDWGNAHADRAQEMAGNASRFIREELTMDRVYDYMFHLLTEYARLLRYRPAVPRGAAEVTVESMIRGRRGLERQFMVDTLAASASGDGPCRLKPAYSPEELQALRRARADAVRQVEAWEI

SEQ ID NO: 356960 - protein, 130 aa, Zea mays
  Clone ID: MRT4577_88716C.1.pep
ENLVTGPGPILRDQDRLGELADPRLGGQYPKDDFVRVCTIAAACVSPEANQRPTMGEVVQSLKMVQRSVEFQESVPTPPARPNVRQSSTTYESDGTSSMFSSGPFSGLSPFETETIPRTAVFSEDLHEGR

SEQ ID NO: 356961 - protein, 102 aa, Zea mays
  unsure (1)..(102): unsure at all Xaa locations
  Clone ID: MRT4577_88717C.1.pep
VRPRVRPRVRTXRGKKQLRLKKNSDKKKKGKKWHKGNNSLRGGGKDNKQFHRGGGSLDKWYNYKPLELHGTVVNDASGNLDGFKAGKTDPYCGTSYLKKSLT

SEQ ID NO: 356962 - protein, 118 aa, Zea mays
  unsure (1)..(118): unsure at all Xaa locations
  Clone ID: MRT4577_88718C.1.pep
MVDKLCDDVEADPRPEXGSXKLRKVTTDRPIVINKDEDGGSYKRAQWMPTTPTTPVTPSSTSSTTTACGAGNVWRSVFHPRSNLDTKGMGANLFDRPQTNSPTVYDWFYSDETRRNHR

SEQ ID NO: 356963 - protein, 88 aa, Zea mays
  Clone ID: MRT4577_88719C.1.pep
AQAHFCSGWADCQKYSLQSSQGFFRLRSAFQSATVQGRQSLCVDHAVLDHEQFSIVLYPASAALVIELTRVQKHPLRQRDQAARKDLA

SEQ ID NO: 356964 - protein, 140 aa, Zea mays
  Clone ID: MRT4577_8871C.1.pep
AGAAQDPPTSFGPARRRLSRAIDCSEHQDVLARFCGRIRRLVVAGAASAGRRPRVTLQGFPGGPEAFELVARFCYTDGGRCGVVTAGNACVLRCAAEFLDMAAAENAAEAEAAPSLVRMTENALEEMPHWPWHTVVDAVK

SEQ ID NO: 356965 - protein, 64 aa, Zea mays
  Clone ID: MRT4577_88721C.1.pep
RILHCSWSLMHFWKGKCAPASLAVLCVFFVIQEKCCFCSVTPIFRPLTEKKKKKRPPRPRLWSP

SEQ ID NO: 356966 - protein, 99 aa, Zea mays
  Clone ID: MRT4577_88722C.1.pep
MNPLDVIRSKKWRIHHAVDLAESAETSRGEAVPSMSEGVTPPAPDAPYVRYGEVLGPQDTPQARDVSVEDHDVDQILNLGSNVLSEEASCGTGKATSFC

SEQ ID NO: 356967 - protein, 63 aa, Zea mays
  Clone ID: MRT4577_88723C.1.pep
MHSYHISNTSVDRGHDPRTWQPCKGPQKQIGMGTPLSKDRMSKAVLVKGPFLKFGMFYRNKKY

SEQ ID NO: 356968 - protein, 79 aa, Zea mays
  Clone ID: MRT4577_88724C.1.pep
TCPPGQLFARGPLSSDPPFLALGGDQKVGFPCNLYPPPKYFWVFIFLTPLFPNALLVFYKTHNIYPFGLPPRCFFVFLP

SEQ ID NO: 356969 - protein, 64 aa, Zea mays
  Clone ID: MRT4577_88725C.1.pep
QVVPGRVEVEEEQRGRFQECLVAGRKEAHGWAARGVCGRLWGWQLSRRVQRDDGVRMRVVLWRV

SEQ ID NO: 356970 - protein, 35 aa, Zea mays
  Clone ID: MRT4577_88726C.1.pep
NMSLTEFIPYITNHVVAHAIRTHNHPLMHDIIYHY

SEQ ID NO: 356971 - protein, 293 aa, Zea mays
  Clone ID: MRT4577_88727C.1.pep
MDPKGKGIVINDKEKESFVNEPKDDKPTDSGSGHKRRDGKKKKTRRIKEIVYYDDNDESSSSQKDDDNNYEKKKTINSNFSFDYSRIPHSSNAHLLSIPLGTSTIRYTKMTPEEILGKFVSGRMMIKEARYVDDALNGPIQEPQTIALKATRSKEALPSKVAQVEAAGLNVEEMTLIIKRFKTALKGRKEHPNKNKTKGKHSCFKCGKIGHFITNCPDNDSDQEKKSGKWEKKKNYKKAKGEAHLGKEWDSDCSSFDSDNEGLATTTFNKSSLFPNKHHTCLMAREKKVLMMI

SEQ ID NO: 356972 - protein, 678 aa, Zea mays
  Clone ID: MRT4577_88728C.1.pep
MDPRGKGMVVNEKEKESFVNDPKDDKSTNSGSSHKRKDGKKKKTRRIKEIVYYDDSDESSSSQKDDDNDYKKRKTVNSNFSFDYSRISQSTNAHLLSIPLGKPPQFDGEDYGFWSHKMRSHLFSLHPSIWEIVESGMQFDSTDSPIFINEQIHKNAQATTVLLASLCRDEYHKVSGLDNAKQIWDTLKISHKGNNVTMLTKMELVEGELGRFAMIRGEEPTQTYNRLKTLVNKIRSYGSTRWTDHDVVRLMLRSFTVLDPHLVNNIRENPRYTKMSPEEILGKFVSGWMMIKEARYVDDALNGPIHEPQTVALKATRSKEALPSKVAQVEAVGLNEEEMALIIKRFKTALKGRKEHPNKNKTKGKRSCFKCGKIGHFIANCPDNDSDQEKKSGKWEKKKNYKKAKGEAHLGKEWDSDCSSSDSDNEGLATTAFNKSFLFPNEHHTCLMAKEKKVCTRNNTTYASSSEDESSDDEIDYSCLFKGLDRTKVDKINELIDVLNDKNMLLEKQEDLLYEEHDKFVEAQNSLALEIKRNEMLSCELSTCHDSISSLKSINDDLNAKLEIANKSTSCVEHVATCNRCKDFNIDACSEHLVSISKLNEEVASLNAQLKTSKNDFDKLKFARDAYTVGRHPSIKDGLGFKRKVKNLTSHKASISIKEKGKAPMANSIQKNHAFLYH

SEQ ID NO: 356973 - protein, 120 aa, Zea mays
  Clone ID: MRT4577_88729C.1.pep
MALIIKRFKTTLKGRKEHPNKNKTKGKRSCFKCGKIGHFIANYPDNDSDQEKKSGKWEKKKNYKKAKGEAHLGKEWDSDCSSSDSNNEGLAATAFNKSSLFPNEHHTCLMAREKKVLMMI

SEQ ID NO: 356974 - protein, 87 aa, Zea mays
  unsure (1)..(87): unsure at all Xaa locations
  Clone ID: MRT4577_8872C.1.pep
MAGHVLWGGKENPAGVNNAKFHRLARLADVKHNRRTNALLKIVRVVDAKEQVVAWTLNHLTLDAVXARRKKLYQAQVWGKPWLDFKE

SEQ ID NO: 356975 - protein, 112 aa, Zea mays
  unsure (1)..(112): unsure at all Xaa locations
  Clone ID: MRT4577_88730C.1.pep
DARADAEAPTQPKTGRSGGINKGXGDTKRELPXRPAHRKGKATKRXTKXRGPNREXAGWAPKEKRXTEXQKXGKDKRXXKXAKRKXGTHKRAKKKREEKKGEHRKRRTAETH

SEQ ID NO: 356976 - protein, 97 aa, Zea mays
  Clone ID: MRT4577_88731C.1.pep
GVVCSSLKDGVGCQTKLGCPFNSINYINKSTCIVRLTAHQGYRSSFICWPLPGRLRRETVPIIDLLSRLIQVCTGTEGALMTSVHDCSFFVSVTNLQ

SEQ ID NO: 356977 - protein, 236 aa, Zea mays
  Clone ID: MRT4577_88732C.1.pep
IVNPVYGSVGLLWSRQWHRCADAVEAVLRGDPVVQVDAGSDAAAAPPLLAGARPPPPAAFDIRHVPRDPDATAADLLRAGRKRFKRAGSSSNASKAKPLPLELEGKAGNNERASPSPPPTQQREAEELQPVPMVVEPEHGEESAGSHDHHLQLQGWSEEDTDVEAASHVSQAEAEPPASSQSQVLVADQEEEEVGLELTLGFEPVVRQQPRSSRCDKSGLSAASSLIGLRLQLPAA

SEQ ID NO: 356978 - protein, 523 aa, Zea mays
  Clone ID: MRT4577_88733C.1.pep
MSDLNALSSYGSSLLPLWLHAEVHLKQLDSSISKLEMNYHADSEPRNSKTEVAEHRAPDDADLITPSNGEALKYEVCAGITIDANMKIGKPASTSQNSQDRDNAAVPPKIESDNDEDMDVEMEVDEDNVEEQAQCSSVPEKEHPPSEQLSSSNLPSFEVPTPPEDNSVPPPPPEEEWIPPPPPEHEHEPAPPASPEEPAASYVQVDTIPQPYIAQENVGYTISGMEYYSTEGTNANYYMQVSEPHVLQAQHSYYAPVSGSGISVSVDGTSIAPESYYTYPSVTVAASAVAAEHSGYYASSVSAISSSAADIKTSSASLVSANSNSDLKNPDNVISNDASIVPFTQAVVATSAAGTTSVLESSTQPSSSTTNQTKVIRNKKRVVGITSSLRSNKKVSSLVDKWKAAKEELRDEEEDEPETALEALERKRQKEIEEWRKQQIAFGHAQENANFVPVRGDWRDRVKRRRAEAKKESKDDIVVASLSSSKQHKGSPDLAELSKGLPTGWQVSILDCIISDANIVCCV

SEQ ID NO: 356979 - protein, 800 aa, Zea mays
  Clone ID: MRT4577_88734C.1.pep
QKHQQHVASVVQRLAREKDKWLSSSPDAMKINMEFLQRCIFPRCVFSMQDAVYCATFVQTLHSLGTPFFNTVNHIDVLVCKTLQPMICCCTEFEAGRLGRFFHDTLKMAYYWKSDESVYERECANKPGFAVYFRYPNSQRVSYSQFVRVHWKWSSRITKALNQCMESKEYMEIRNALIVLTKISSVFPVIRKSGVNLEKRVAKLKGDEREDLKVLATGVAAALAARKSSWLSEEEFGGGHIDLKPATARSVLGNQSADLSMAKDQNARAKSVENRHERSEGAMKPDVQQKKSTVASNGSDILIQSSSVQGKSSVVARAMDEPPKPVSDEGVKVSTKSTSEFETRATQKRAGNAGKVMKHDVAKEDAKAGKPTSWNVNQQVSTVDREVSHAADAAQETSTTISNGNLHPAPHKVSSSSQRNAVTHNGAANPSVESTDMIDSPVRQQKRPPVEEQDRSGKRRKGENEPDLSEHHVDKEKSLDSRGGDKFRSVDHEKSANEEQNLRAGKIKEKSDDKYDRDPREKLDRGERRRGEDAIERSTDRLSDRRERSIERMQERGTDKALEKGREDRNKDERNKVKYAEPSVDRTHSSDERFRGQSLPPPPPLPASFVPQSVGANRREEDADRRGGSSRHVQRSSPRHDEKERRQSEENISSFQDDGKHRREEDIRDRKREDRDTLSNKVDDRDREKGTSLKEDSDPSNVSKRRKIKREQTLEAGEYAPSAPQPPSHGSGSSQLSDIRERERKGVISQHRISHADDLPRTHGKDMTSKSSRRESDQMHEREWEEEKRPRTETKRKHRK

SEQ ID NO: 356980 - protein, 75 aa, Zea mays
  Clone ID: MRT4577_88735C.1.pep
LKWLYNKVTPPNPAGPTPSAAEESGARSYNNSARPPDPLPGRRRGRRGGVGHRGVRARPGEGNRHVLGGRWVQKQ

SEQ ID NO: 356981 - protein, 82 aa, Zea mays
  Clone ID: MRT4577_88736C.1.pep
RPGPSLLTPAPTSPETAPHCNRRSRPPHRCPRSRSSAPTTSSSTPSTSTTPAPPTLIPPSITPGEYNKGELTYIHRLTSYGE

SEQ ID NO: 356982 - protein, 46 aa, Zea mays
  Clone ID: MRT4577_88737C.1.pep
KKLSKLLKNKTTNFVCKYMVHSYVISAVIDEDNVCVIGMLEVIELF

SEQ ID NO: 356983 - protein, 118 aa, Zea mays
  Clone ID: MRT4577_88738C.1.pep
RIISNKEIESAPKRNIATKTQEESIKDGSDPVSPDHSPDWNRAKDHTPTVPNPSPSHHSIVTGPRVHSLMRSGGAGTRVAPWRHGSEDSFHSGAGPAPTAARGTRGRTRGGPGGRPRG

SEQ ID NO: 356984 - protein, 79 aa, Zea mays
  Clone ID: MRT4577_88739C.1.pep
YSQEYGTKQGQLEGTTKVVEQNPVWRHGSICTRTSVPSFADLPSGPPALPPATPSFSPASTVGSSSLILAGPVIFHPML

SEQ ID NO: 356985 - protein, 79 aa, Zea mays
  Clone ID: MRT4577_8873C.1.pep
SQPSAQMDNTQRFGFGGVLLSVKAGYCGRLAAHDAGYCAYATGKIRGGRRGLGGANIPGRALLELHAGSVESSGFALHT

SEQ ID NO: 356986 - protein, 67 aa, Zea mays
  Clone ID: MRT4577_88740C.1.pep
PGGPLVHQYILISVHHLTKHIMSRGQRKQVLAPEPRVPRRLRAPSTMYCYLSIHPHKRDTSMSALLE

SEQ ID NO: 356987 - protein, 63 aa, Zea mays
  Clone ID: MRT4577_88741C.1.pep
QNQARLDRVNSTSSVQIHSRTIHQLPDSHTLYYTPMLMTGSGTRRCWTSAVAPSTSGWTRTTI

SEQ ID NO: 356988 - protein, 60 aa, Zea mays
  Clone ID: MRT4577_88742C.1.pep
AGRACISALFCSTTSMTTRPDGSASTPAAAAAAAGHGRGGVRRQGRQLPPRRAGQPQSAV

SEQ ID NO: 356989 - protein, 115 aa, Zea mays
  Clone ID: MRT4577_88743C.1.pep
ANVFLRWLLHFHGFMNRLLAGELFLTKLDIQRAIPLVPKTEADIHNSAHNLFKDIEIVISDVDMAIVSDVMLVYLPATTIALQPPLPKNTRAIANFFYNWPDNTFQIAMAGTSFS

SEQ ID NO: 356990 - protein, 130 aa, Zea mays
  Clone ID: MRT4577_88744C.1.pep
RLFVLSTLSPFAAGGITNGGPVKSTPSRGKVEGPLFTCLGPPKKSFRGVTVPFLGLGAWSGPRVPVFVVFLLTGPKKKNRVLSKTGLALWAVGFFQSPPFGGNPIFFLGGFFSPGVIGPKGVRVFLAPPP

SEQ ID NO: 356991 - protein, 120 aa, Zea mays
  Clone ID: MRT4577_88745C.1.pep
QFSNGGSFEHRRTLLPSFVQYSSASERGSAIPPCWFKNMGVLQNIQRVFYDNIRDHFHQSPIRMLTSCGGCHGAGFLGIEASGRGGIRTSSISWAQLFFLLPDLAQRPPSMAHNLTHSWE

SEQ ID NO: 356992 - protein, 68 aa, Zea mays
  Clone ID: MRT4577_88746C.1.pep
SGPPFFFFFFFSHVFFKQRILRVGEGIYSSSVLFINHKNFCILPWDIPRLKRLVYNTMTWHAFARSVI

SEQ ID NO: 356993 - protein, 96 aa, Zea mays
  Clone ID: MRT4577_88747C.1.pep
SPPHGTVQVSSHLSSPSRPLNGFRTPPPRHAMTPLYCRGVASTRAELITVTTAPSPSIRFGPAPTLTMSASTSASTTTAQRRRSRSLRLPLVCLDG

SEQ ID NO: 356994 - protein, 66 aa, Zea mays
  Clone ID: MRT4577_88748C.1.pep
MSAPQQGRQSPEPENQSDAQKGQQAQPNQQGGETETQQKSDDQKSGLPSNPTHILEKHSEETTSKK

SEQ ID NO: 356995 - protein, 76 aa, Zea mays
  Clone ID: MRT4577_88749C.1.pep
SQHVITKSHTNFHSCIDQKTPLTSKLSYNFGSSGVAPDFLLYPIILACDMSPFASFKSFDNTTFTAMVKKKVASTN

SEQ ID NO: 356996 - protein, 84 aa, Zea mays
  Clone ID: MRT4577_8874C.1.pep
RLMGRDNGRSDCQCGGANVRKGDSCRPVCFYSSFRKGHLSQRDSVTLSQAFSMVGRVKSNAREINIGDIFDGLGSCLDGDVQRR

SEQ ID NO: 356997 - protein, 73 aa, Zea mays
  Clone ID: MRT4577_88750C.1.pep
FGSEFTTMAGRRLRDAVKAVLTSDNSGEFNNIHVVLAGLTNTYSQYITTFEEYEIQRYEVCICAAHLMFSLRT

SEQ ID NO: 356998 - protein, 258 aa, Zea mays
  unsure (1)..(258): unsure at all Xaa locations
  Clone ID: MRT4577_88751C.1.pep
ALTTNSTTPDHGGHWCSNSSGVQVQEMSSRGPDPAPPGDEQETAEELLERVRGMVPAAAAAARAAGGFPGRWKAIAAKLDALPACLSDLSSHPCFARNSLCRELLQSVAATLADAAELAARCREPPADGKLRAQSAVDALSGRLDLGLRDCALLVKTGVLSDAAGPSPPPEEAPDVRELLARLQIGHAEARGRAVDALLDALRRDERGVLAALGRASVAALVQLLTASAPAVXREKAATAVCQVAGSGASEALLVSTP

SEQ ID NO: 356999 - protein, 44 aa, Zea mays
  Clone ID: MRT4577_88752C.1.pep
AINNFTYTLLSGVTISNGLHSLHANRLTCPLFNLFHMLKLTCTY

SEQ ID NO: 357000 - protein, 60 aa, Zea mays
  unsure (1)..(60): unsure at all Xaa locations
  Clone ID: MRT4577_88753C.1.pep
RVRTGTGCRNIERYQKPXQPKLXAVNDTAKRLGISSIHDTTSAGSDHPTSCCSAGEIMAV

SEQ ID NO: 357001 - protein, 90 aa, Zea mays
  Clone ID: MRT4577_88754C.1.pep
EQPHMVLTLDPGPFYTYCLPSPTFFKNDFIDINNLLSNPLIILPSNRTAPPTAISLFFYKFISPKRAPIYCFFVTQPLYFIMQPYFIPAD

SEQ ID NO: 357002 - protein, 62 aa, Zea mays
  Clone ID: MRT4577_88755C.1.pep
PKAKRTAEDIHVELIRFPPALSGRYLIIMTPLIMANTPVSVQDTNTFLYLANIRYWRRAYTP

SEQ ID NO: 357003 - protein, 283 aa, Zea mays
  Clone ID: MRT4577_88756C.1.pep
MEVSLFHQIEARYPASLFKQQLVDQVEKVYGVISDKIKKELNPLLELCIQDPRTYSNQAKALMSPSSGLGQQDQLMHWLSIVKIFNSYLHVLRANHVPSILVHKLFTQIFSVVNVQLFNRLLLRRECCSFSNGQYIKDGLTQLRYWCNDVSQEFADSAWVALRHIRQAVDFVVISLKPIRTWEEICNDICPALSLQQLERIVGMYWDDLKGTNVTSAEFMSSMRAMLREESNSVSSFSVLLDDDSSIPFSLEDISKSMPNIEETSVNDLLPFIRENQSFAFLL

SEQ ID NO: 357004 - protein, 124 aa, Zea mays
  Clone ID: MRT4577_88757C.1.pep
GNSYFYDKSTCLLAWRLFLSKKKFTLDPPAANPLGPSKRAPPLKCMPPPFTVISEHAWIRAPAFASSEELPKVNVASPVFDYKDSVLKFTTQKVFLKTPQALLGVGVIPIPILKCIPLYLRGFS

SEQ ID NO: 357005 - protein, 103 aa, Zea mays
  Clone ID: MRT4577_88758C.1.pep
RIRCFGKAYRLAQDSSVSAVAPVFCPAGAAERCHVRVICARCSPHHSSSSRGCDMGIGNGRTPRVGTWESEWQNQEWQPTPYRLNSTMLLMSTTQCISLLCTA

SEQ ID NO: 357006 - protein, 129 aa, Zea mays
  Clone ID: MRT4577_88759C.1.pep
LVPWAQQRGGAPRQQAPSSAPVVGRARRRPVRGTASAPAAARSKRLDRRRRGGPGKPPRGALCFGQPRGRGPLLRDAKTPGLRRSLLKFRAPPPASVYKFPRGRSPMNARACACMLDFSPPLAVACSGI

SEQ ID NO: 357007 - protein, 129 aa, Zea mays
  Clone ID: MRT4577_8875C.1.pep
LMMNIRHRQHITTRIIKLMTHLPKLCHHTINTPKPTHPIRNHLRHLLIHIINNRTRNPIHHIIPRRPIHAKRIRRMRQNTIPMRRTPIHLQRKTHPRILIRRLMSMNTKLHTNTKHRKHSNLLRRRSST

SEQ ID NO: 357008 - protein, 140 aa, Zea mays
  unsure (1)..(140): unsure at all Xaa locations
  Clone ID: MRT4577_88760C.1.pep
KKKKKKKREKKKKKKKKKKKKXKKKKKKKKKEKKEKKKKKKKKKKEKKKKKKKKKKKKKKEKKXXKXKKKKXKKKKKKKKKKKKKREKEXKKRKRRKKRREEEXRXPXQKPTKXEQDGKPSARMELNWQAGFIPAHSARG

SEQ ID NO: 357009 - protein, 60 aa, Zea mays
  Clone ID: MRT4577_88761C.1.pep
SGDKLYYKGCTNLHEFLHNNITKGFSEFLQERILWQLSSFSFGILDNSYTSGWPSGVKMT

SEQ ID NO: 357010 - protein, 107 aa, Zea mays
  unsure (1)..(107): unsure at all Xaa locations
  Clone ID: MRT4577_88762C.1.pep
KLGIRLVTVAAGSPLPFAGEPISGGLXDQDAAIPGQMGQKGEANSTYGTGACILVNTGEEPTQSSDGLVSTIVYKLGPAGPTNYALAGSIGLAGASFEXVRDRLGII

SEQ ID NO: 357011 - protein, 193 aa, Zea mays
  unsure (1)..(193): unsure at all Xaa locations
  Clone ID: MRT4577_88763C.1.pep
HEPTTNPMPPHRAGGAAGGGDTSAFFAATLVLWAVSVGFEIGVRGRRELAPVAAGFAFFQAANTAVRGSVSRDPLFVNTAVSLLHSSLTSVSAALHIFTCXRKVRRMVGFRDFDRTVVKLEWVLNWTTFVTARVICHILITYKLISDAHKFGKGIELPLALLGMAGMNLLNIFLGLDLLKAFTRERNKQNHQD

SEQ ID NO: 357012 - protein, 308 aa, Zea mays
  unsure (1)..(308): unsure at all Xaa locations
  Clone ID: MRT4577_88764C.1.pep
SPPTVRPPSAARPALCGCGSPFAIXPTTNPVPPHRAGGAAGGGDTSAFFAATLVLWAVSVGFEIGVRGRRELAPVAAGFAFFQAANTAVRGSVSRDPLFVNTAVSLLHSSLTSVSVIFVLANQWRNKGLENMFEHEELFGGSWIGAYSALCFSCGYFAYDQLDMLRYRLYSGWLPGILMHHLILLICFTLALYRNVTINYLNLSLVCELHSIFLHVRKVRRMVGFRDFDRTVVKLEWVLNWTTFVTARVICHILITYKLISDAHKFGKGIELPLALLGMAGMNLLNIFLGLDLLKAFTRERNKQNHQD

SEQ ID NO: 357013 - protein, 278 aa, Zea mays
  Clone ID: MRT4577_88765C.1.pep
MPPHRAGGAAGGGDTSAFFAATLVLWAVSVGFEIGVRGRRELAPVAAGFAFFQAANAAVRGSVSRDPRFVNTAVSLLHSSLTSVSVIFVLVNQWRNKGLENMFEHEELFGGSWIGAYSALCFSCGYFAYDQLDMLRYRLYNGWIPGILMHHLILLICFTLALYRNVTINYLILSLVCELHSIFLHVRKVRRMVGFRDFDRTVVKLEWVLNWTTFVTARVICHILITYKLISDAHKFGKGIELPLALLGMAGMNLLNIFLGLDLLKAFTRERNQQSHQD

SEQ ID NO: 357014 - protein, 445 aa, Zea mays
  unsure (1)..(445): unsure at all Xaa locations
  Clone ID: MRT4577_88766C.1.pep
FVREMLHNAKADIATLRVDKNSSLVLQTALKLSSGDDNELHHIISILLGYDEYKTVQTRDYSEKMDEIVTLLEESAYSHLLEVIVEVAPDGLRNGMLARSLKGALFAISSHHCGNYVVQAFISSTKTSDQMNQIWEELGPNMKELLELGKTGVVASILAACQRLETYRLESSQALAAALSSDSESTESIVARILFLENYLHERSNWKWILGAKMSILGCLMLQSIFQYPHQYIRPYVASLLAMGDDQILQISKDSGXARVLXESFLXSSATAKRKFNVFGKLQGHYGXIAMNPSGSFLVEKCFTASNFSHKEAIVAELLAVQSDLSKTRHGFHLLKKLDVDRYARRPEQWRASRTSKETTQKKFEAEFGSNSQSTGQIVKEKFSQSRMKKRKQKEKVDKITEDARSNKSDFSQKGNSKRPESGSASSEGGSSDKGPLSEGASASM

SEQ ID NO: 357015 - protein, 112 aa, Zea mays
  Clone ID: MRT4577_88767C.1.pep
MEKILILLLVALSVAYAAPGPRGIIINLENGELCMNSAQCKSNCCQHSSALGLARCTSMASENSECSVKTLYGIYYKCPCERGLTCEGDKTIVGSITNTNFGICHDAGRSKQ

SEQ ID NO: 357016 - protein, 68 aa, Zea mays
  Clone ID: MRT4577_88768C.1.pep
SALGAGIKTCFLSINCLVGHCNKQTIAKLLVSKTHIFVNDAAIISRISQFMSFTIMDDKGFRAPHLHR

SEQ ID NO: 357017 - protein, 44 aa, Zea mays
  Clone ID: MRT4577_88769C.1.pep
QKPWTFFSSAPHTRTRHKCLTPKPSNLHSTKHSSQWMGIGRRRR

SEQ ID NO: 357018 - protein, 73 aa, Zea mays
  Clone ID: MRT4577_8876C.1.pep
SKEGRWLSSDTLLTRCGSTLSITIPGGGGGGLWYGSNLILYLRLHCRASLMLLTGEFPGEIRLIYSCCCLKHS

SEQ ID NO: 357019 - protein, 48 aa, Zea mays
  Clone ID: MRT4577_88770C.1.pep
PLTPNHMHEQQLQQQQDQVLNVRVLMDGRPGLVNGIAEGIQAYILADG

SEQ ID NO: 357020 - protein, 67 aa, Zea mays
  Clone ID: MRT4577_88771C.1.pep
KQFLGKKICLSLKRGAPPKKKKKNRVSFFVRKKKKRKKNDMSINISSYLYGEYSTTQQAQEEGDRKS

SEQ ID NO: 357021 - protein, 111 aa, Zea mays
  Clone ID: MRT4577_88772C.1.pep
DPRVLPGIIPVDFDSDSIPSCDYKSPATIAMRAAHVGEGARVSSSAEPGSPVVRGASPRRAGQVRGFGRAGFRPELRIGRTFCHGASSRREPHRLCPDSCEVTNLEEQVGT

SEQ ID NO: 357022 - protein, 84 aa, Zea mays
  Clone ID: MRT4577_88773C.1.pep
MAGPMEREGRDAAEKPLLVRVGGSGGSQGGSASSSSVAVVVGCTAIAVAGSFEFGMSIGYSSPTQLGIMRDLRLSLAEYSVFGS

SEQ ID NO: 357023 - protein, 123 aa, Zea mays
  Clone ID: MRT4577_88774C.1.pep
DLADDDPGWPRACDLLHHTDGWRVQALKTCRVEAIDMNSHKLNMHVISIPAVHFVKYHACMVCISRNNPQLCKLCVCIDVLASTCAESLHVPYMSRLVLVICLVVLITDGCTFMIQVPSNIIV

SEQ ID NO: 357024 - protein, 67 aa, Zea mays
  Clone ID: MRT4577_88775C.1.pep
SLDVTEVEPYSLDAVAFFVLSGRHKHQRTRPLKWLLPDDMHPICCNKDTAQARCVPAGDKPTIGEVP

SEQ ID NO: 357025 - protein, 37 aa, Zea mays
  Clone ID: MRT4577_88776C.1.pep
PSPAAMVRVIQAAGVSEERRCVCLLELLSKRRERHKL

SEQ ID NO: 357026 - protein, 65 aa, Zea mays
  Clone ID: MRT4577_88777C.1.pep
PTAQGVPQPLWRFRCLSALGMIPEIWPISSIHPYLCIYVIMHVSVARPIMCGLTKNIVLHNKVLV

SEQ ID NO: 357027 - protein, 48 aa, Zea mays
  Clone ID: MRT4577_88778C.1.pep
HRHWVSVSQSVLLKGSALPAPAYKTTPKTVTMSLKFSIYTCLPIPTKV

SEQ ID NO: 357028 - protein, 87 aa, Zea mays
  Clone ID: MRT4577_88779C.1.pep
MKFNPFVTSDRSKNRKRHFNAPSHIRRKIMSSPLSKELRQKYNVRSMPIRKDDEVQVVRGHYKGQQIGKVVQVYRKKYVIYIERVQR

SEQ ID NO: 357029 - protein, 50 aa, Zea mays
  Clone ID: MRT4577_8877C.1.pep
EWGTSDWSFFNFPGLQTNMICLNEKYTLLSRDIRYETHYHYVHTTTWNYR

SEQ ID NO: 357030 - protein, 83 aa, Zea mays
  Clone ID: MRT4577_88780C.1.pep
IAEKGSDELKDENKAISSNSKELKVFLRNKKENYDKLDEINRELNSRLSSLKEDYTYLKVNHDNLLLLMRLHSYTFTFLGPLN

SEQ ID NO: 357031 - protein, 610 aa, Zea mays
  unsure (1)..(610): unsure at all Xaa locations
  Clone ID: MRT4577_88781C.1.pep
VTEIHLPGEGLRGALPVGALGGLNKLAVRRCXXDDXSGPLPRDLASCVELRVINLQSNLLSGELPVEVLALPALTQLNLAQNRLSGRISPAIAKNGRLQLLFLNGNRLTGELPNVSMPSLTALNVSFNNLSGEIPKSFGGMPSTSFLGMPLCGKPLPPCRAPGSEASPSQPPTPTLRPEAPAPTDNRGRGRHHLAGGAIAGIVVGCAFGFLLIAAVLVLVCXRCGGSRDRHTAAVTPXGGAGPAQQRGNEPQRLXPRVSDARPPPPPSVPPPPAVSAAAAGRKKLFFFGRIPRPYDLEDLLRASAEVLGKGTHGTTYKAAIESGPVMAVKRLKETSLPEREFRDKVAAIGGIDHPNVVPLQAYYFSKDEKLMVYEFVAMGSLSSMLHGNRGSGRSPLSWESRRRIALASARGLEYIHATGSMVTHGNIKSSNILLSRTVDARVADHGLAHLVNPAGAATTTRVAGYRAPEVVADPRRASQKADAYSFGVLLLELLTGKAPAHAVLHDEGVDLPRWARSVVKEEWTSEVFDTELLRHPGAEDEMVEMLRLAMDCTEPAPDQRPAMPEIVARIEGLGGTASTSTATARSGRSASVDEADDRPLRTTGSIRQS

SEQ ID NO: 357032 - protein, 61 aa, Zea mays
  Clone ID: MRT4577_88782C.1.pep
IKQQDPVEVSDAVKRAVARSLISTYGGNDPTKDDDAVETSQWQDQMPFHTYSCELKGLSQR

SEQ ID NO: 357033 - protein, 52 aa, Zea mays
  Clone ID: MRT4577_88783C.1.pep
FFKKKKQLATLLKVHKTGPACTSVHKTGLIATEDQKFQTLAGLGFKLIKPLS

SEQ ID NO: 357034 - protein, 73 aa, Zea mays
  Clone ID: MRT4577_88784C.1.pep
SGEGISNPYYHNLKYYHYQLKYNQLITHITISYYSANHLFILKPPYLFTQHPIFKILLFSFVNSQHYNPTYYN

SEQ ID NO: 357035 - protein, 183 aa, Zea mays
  unsure (1)..(183): unsure at all Xaa locations
  Clone ID: MRT4577_88785C.1.pep
VPTKQTYTSMIAGYCRLGKLTSALKVFERMVHHGCLPDSITGGXLISSLCKESSLEEARALFEPMLDKHLVPCDVTRVTLAYEYCRRDKITIAVSFLDRLDKRQQAHTADALVRKLSTVGNLDAASLFLKNVLAKHYAVGHATYPSFINSCYESNRYALASEISEKISKRISGFKKKDTAVIA

SEQ ID NO: 357036 - protein, 45 aa, Zea mays
  Clone ID: MRT4577_88786C.1.pep
FSFLTLFFFFFFIFFFFSPGTDFNWFILTSKIYYFLLALSPKKPL

SEQ ID NO: 357037 - protein, 25 aa, Zea mays
  Clone ID: MRT4577_88787C.1.pep
HILCINIRLLSFNIVDPILVLIELL

SEQ ID NO: 357038 - protein, 65 aa, Zea mays
  Clone ID: MRT4577_88788C.1.pep
KKLGLHTEKLFSLAYNTSIRGNTTSNYKRSISLAPNNVDPDYDDTRSCAQATTQSLCKTNLSTST

SEQ ID NO: 357039 - protein, 62 aa, Zea mays
  Clone ID: MRT4577_88789C.1.pep
LDTLQFSRFCTIKSKSALFKENSDKNFAMWETELKLNTLRSFFWGGGGGEWSGGKSHGPTHG

SEQ ID NO: 357040 - protein, 114 aa, Zea mays
  Clone ID: MRT4577_8878C.1.pep
HWGHRTERGCLYKKNTVCKKVFFISPHILFFTPLFIYTHARACGAPPTAAHFSAPLLRTLVFYPLGSCTVERIAVLCPPRSCTKRFCTCFPICLLRPKKKKKKKKKSTLRCSTA

SEQ ID NO: 357041 - protein, 88 aa, Zea mays
  unsure (1)..(88): unsure at all Xaa locations
  Clone ID: MRT4577_88790C.1.pep
HRLASTPPRPSLPPDPPPSTTATTPIPXATHHHHQPAHHPHYQPHQHRLAQPEVRKLVNHVQSQFSDINLGTTEHLMNFIANDPDGFV

SEQ ID NO: 357042 - protein, 154 aa, Zea mays
  Clone ID: MRT4577_88791C.1.pep
NPLVLAKVGANQQQQQLQQFLPGVSQQAMVNPIAYLQQQQLFLFSPPAMGNAPTNLQQQLLQQQLLQQIGPALTQLVVANPVAYLQQLLPFNQLVGSKFGGDLQQRQQLLNPPAGANPLGGAFLQQQQLLPNNQFFFMNPALWWQQPIVGGAIF

SEQ ID NO: 357043 - protein, 50 aa, Zea mays
  unsure (1)..(50): unsure at all Xaa locations
  Clone ID: MRT4577_88793C.1.pep
VLAKFQKLXCSPPPRKNSVFCKFFFSFSSSLQKNKASCYTLTHSFVNFCE

SEQ ID NO: 357044 - protein, 56 aa, Zea mays
  Clone ID: MRT4577_88794C.1.pep
PPQVVESRCPQLALYPRQRVSSREGPQVACLQAQARQLVRHRPQVVQRQLHIICAL

SEQ ID NO: 357045 - protein, 94 aa, Zea mays
  unsure (1)..(94): unsure at all Xaa locations
  Clone ID: MRT4577_88795C.1.pep
KAXHANTTEKAPRKAERPPTKAPQKXKDTKATRDGKGDGEEEKQXXHTXRXXQQQSKGEETHRRRARGXPPTRDRXAKHKQTXTPXGGPTKGDP

SEQ ID NO: 357046 - protein, 64 aa, Zea mays
  Clone ID: MRT4577_88796C.1.pep
RPNHPRGQANETRTADTTESPRTMVTIPPSAATLLLLGTANTPEARNTPELTHEDQLQRTCNQL

SEQ ID NO: 357047 - protein, 322 aa, Zea mays
  Clone ID: MRT4577_88797C.1.pep
GVAPPLPLLVMPRFRFASMTPGGVLTATARRAWMPQEVDADCVGSSDAWLVGARQAGGECFLVNAFSHEVHHLPRLGDSDLSHSACSLRKVVLSGSPQSGPECIVAAFAFCRSKPELALWRPGMKSWCVWQHSLIAGHIDMAFYQGRLYMLWRFTPSLFVFEIAEDGHGVKFSRMKDCLLEKLLATPLGSSHVLSCNMVEWHGRLLLIIRYYGGYQVRHRVLKVQVFAIDLNTKPNSLTEIHSFGGDCVFVGSGGCKSFPAGQYRGVEGDLIYFVPDHYNPHDAFVYNMMDGKTRFIAEPLPCSISAPEQSSGFPVWLFPPE

SEQ ID NO: 357048 - protein, 119 aa, Zea mays
  unsure (1)..(119): unsure at all Xaa locations
  Clone ID: MRT4577_88798C.1.pep
MTIASVKSSSSSSEVPIADRTFFFFSEVAEGAIATIIGYPFAKNCGKCSNFLYRITASXTDLVKVFYHSNCLTCILRMPSYNENPFSPQCIHSFXFLTVHRSLDCCLHYYLVERVYSSF

SEQ ID NO: 357049 - protein, 71 aa, Zea mays
  Clone ID: MRT4577_88799C.1.pep
KIGNCNLLIITTFLQSFTMSDYYHLWLDLLPFYTKLEIKQWFSARLLNHRSRLRNCRPVFVCKTRTMVRRM

SEQ ID NO: 357050 - protein, 62 aa, Zea mays
  Clone ID: MRT4577_8879C.1.pep
EAIFNGTHFFFINVRVANLTCPANSAQPPPNPSIKHTIITIKSMFVDCHHPLLQLCAPSTNN

SEQ ID NO: 357051 - protein, 137 aa, Zea mays
  Clone ID: MRT4577_887C.1.pep
IRGAPYPYFDHLQEKNAQEPTSPSPGGVRGGRQNPGGTPKSPVRPPVTNLSSSHLGGGAPLKHGSYLWFSGPQPGKKKVESPPQPGNEPFLRHHKKSPPGKVGPLLTSVSPPTKSEGYKKKGGLKCLECPGKPPIWG

SEQ ID NO: 357052 - protein, 78 aa, Zea mays
  Clone ID: MRT4577_88800C.1.pep
SVSTIAMSTCFVELFSSLTSCLAIVPSRRALSLRLFSKGIYKRHFCMSQRYIRALRRLFLRFVSEFKEVKEVNNGSMF

SEQ ID NO: 357053 - protein, 80 aa, Zea mays
  unsure (1)..(80): unsure at all Xaa locations
  Clone ID: MRT4577_88801C.1.pep
VFEWVFIACAICSMRCRWVRVDPASCIYTYGAYDSXLWAVGVCINKIKGVGLPFHVGGEKKKKKKKKKKRERKGKKKKIF

SEQ ID NO: 357054 - protein, 108 aa, Zea mays
  Clone ID: MRT4577_88802C.1.pep
FRPFVGFREVRLVNKESRHPGGDPHVLCFVDFDNPAQATIALEALQGETSYICGYGLCSCVDFLILYFVDFQFCMYMFVKFYHACCMSIVCREACFGIGKFLFIPHLT

SEQ ID NO: 357055 - protein, 52 aa, Zea mays
  unsure (1)..(52): unsure at all Xaa locations
  Clone ID: MRT4577_88803C.1.pep
ATAAGTNLTVDYISVLASEIAPYSALSCERCPGRLGGTQSEXXXXKAGKRKE

SEQ ID NO: 357056 - protein, 101 aa, Zea mays
  Clone ID: MRT4577_88804C.1.pep
RRDGHGQASSNQAQGGGYPAPPPYYHGQYPPYYPPPPPYGGYMPAPRMPYPPQYPPYQPMLAQPAQAQASSSRQPPHAGGGQQQPPDGPPAQQQPQQPNQN

SEQ ID NO: 357057 - protein, 340 aa, Zea mays
  unsure (1)..(340): unsure at all Xaa locations
  Clone ID: MRT4577_88805C.1.pep
MAHRLLRDAQADGWERSDFPIICESCLGDNPYVRMLRAEYDKECKICARPFTVFRWRPGRDARYKKTEICQTCCKLKNVCQVCLLDLEYGLPVQVRDTALAINSNDAIPRSDVNREYFAEEHDRKAAAGIDYDSSYGKARPNDTILKLQRTSPYYKRNRAHVCSFYVRGECTRGAECPYRHEMPETGELSQQNIKDRYYGVNDPVALKLXLGKAGEMPSLQPPDDETIRTLYIGGLDSRITEQDLRDQFYAHGEIESIRMVLQRAIAFVTYTTREGAEKAAEELANKLVIKGVRLKLMWGKPQAPKPEEDESGRLGQVSHGGLLPRAVISQQQPQQPIQN

SEQ ID NO: 357058 - protein, 493 aa, Zea mays
  Clone ID: MRT4577_88806C.1.pep
MAHRLLRDAQADGWERSDFPIICESCLGDNPYVRMLRAEYDKECKICARPFTVFRWRPGRDARYKKTEICQTCCKLKNVCQVCLLDLEYGLPVQVRDTALSINSNDAIPRSDVNREYFAEEHDRRARAGIDYDSSYGKARPNDTILKLQRTAPYYKRNRAHVCSFFVRGECTRGAECPYRHEMPETGELSQQNIKDRYYGVNDPVALKLLSKAGEMPSLTPPDDETIRTLYIGGLDSRITEQDLRDQFYAHGEIESIRMVLQRAIAFVTYTTREGAEKAAEELANKLVIKGVRLKLMWGKPQAPKPEEDESGRLGQVSHGGLLPRAVISQQQSGDQPQPPGMEGQQQQAAPASYYFNIPAPPATERTVYPSMDPQRMGAIVKPHDSEGKPGPQQAGQAQASSNPAQGGGYPAPPPYYHGQYPPYYPPPPPYGGYMPPPRMPYPPQYPPYQPMLAQPAQVQASSSRQPPHAGGGQQQPPDGPPAQQQPQQPIQN

SEQ ID NO: 357059 - protein, 61 aa, Zea mays
  Clone ID: MRT4577_88807C.1.pep
ALPSIWRLGATRSLCRTTASRGWPGNRSSGLCSSPSIRLGKGCGLFSGSSSTTLDIGMAGW

SEQ ID NO: 357060 - protein, 181 aa, Zea mays
  Clone ID: MRT4577_88808C.1.pep
ATIRLRTREGIQAPDAARANSLSANSPRITPGRPIRSRNSGREDLNSPRASNQQPAEFSAMVAQEGGCMVSMGFLEPSTGRAGRARLRGSSAAQFTAGAWGKRIASWEEPSIPSDIPPPPTSSQFKKACGKHARAPFSTRPTPRSSGEGHAPTTILRRPRRGRGTVVWRERERREVVERER

SEQ ID NO: 357061 - protein, 92 aa, Zea mays
  unsure (1)..(92): unsure at all Xaa locations
  Clone ID: MRT4577_88809C.1.pep
SSRFGSSRVFVQKHVPRFGXHPYDLLKQNRPIRISRMGTASEYFTIHRQYQASSQEEVPKIRVHDVVYGSMKTCRKFEVLSWRSPIPPYYSY

SEQ ID NO: 357062 - protein, 74 aa, Zea mays
  Clone ID: MRT4577_8880C.1.pep
APISCRGLLPVLVIRLVLFLETIYAFSPNMLCHQEKGLNCPFCCSGWHSSFLLFVCKVSHNVILGILHTLFSAA

SEQ ID NO: 357063 - protein, 109 aa, Zea mays
  unsure (1)..(109): unsure at all Xaa locations
  Clone ID: MRT4577_88810C.1.pep
FGLGWGXSPGFVRWXACGSRVFARPLGPALVRFCVGLPARSPSLVVRVAGARFVLWPCLGLSGRSXLLSLPLXXLXLSPVGSVPPPVPKAFPLLCXSFXXXRKKIVNKG

SEQ ID NO: 357064 - protein, 61 aa, Zea mays
  Clone ID: MRT4577_88811C.1.pep
TYFTYVIRCLCSCLDLGVLGVCTPASATSNPCRAAPTLFSMKEFSVASALRTGHGINRVRW

SEQ ID NO: 357065 - protein, 78 aa, Zea mays
  Clone ID: MRT4577_88812C.1.pep
SEPRQPWSYSSVPSGSGSGLAQFVRLYEQGSMHRSPFRPFSQSCAVGATHFHVRPMNSPCFRYRWIEYFLRYTSFYLS

SEQ ID NO: 357066 - protein, 178 aa, Zea mays
  Clone ID: MRT4577_88813C.1.pep
RTEVTLLKRRQSGLSERLLPQARSVGGALQVKRKAMVRHYRAYAGNVGERCGRCSWLSSPIYGQTGSAIPRSLAGATGTAACGSLTPARAEDTRRTRSLSACRWAPAVSHSQSAPWPHLRSSSASRNAPCASARARRSPRRRCRWRWVARGSGIGLPWGLGHCVGCMGCRHAHTPPRA

SEQ ID NO: 357067 - protein, 74 aa, Zea mays
  Clone ID: MRT4577_88814C.1.pep
QRSQHSCFSVKKKKKKKKKKKEKRKKKKKKKKKKKKKKKKKKKKKKKKKKKKKKKKKKKKKKKKKKKKKKGGLF

SEQ ID NO: 357068 - protein, 85 aa, Zea mays
  unsure (1)..(85): unsure at all Xaa locations
  Clone ID: MRT4577_88815C.1.pep
ATXQQRGALDRKVAGSPRPXRHGRSAXPFXRGCXFLGGGMGEXSRGVTVVRREHXXREGGCGRTKXXREXGKTEXEPGRRGXEPG

SEQ ID NO: 357069 - protein, 42 aa, Zea mays
  Clone ID: MRT4577_88816C.1.pep
WILSTSEAVYLIFQNLENLLSHSCSIYHITDHCLFGKIRKLS

SEQ ID NO: 357070 - protein, 103 aa, Zea mays
  unsure (1)..(103): unsure at all Xaa locations
  Clone ID: MRT4577_88817C.1.pep
MAARGFSILMLLALSACVANATIFPQYSQAPIAALLPPYLPSMTASICKNPTLKPYRLQPAIRTXTLPLSPLFFKQSPPLSLVQSLAQTIGAQQLQQLALPVI

SEQ ID NO: 357071 - protein, 64 aa, Zea mays
  unsure (1)..(64): unsure at all Xaa locations
  Clone ID: MRT4577_88818C.1.pep
NYKGGLQFPVGRIARFLKAGKYAERVGAGAPVYLAAVLEYLAAEVLELAGNASRDXXETXIXPR

SEQ ID NO: 357072 - protein, 54 aa, Zea mays
  Clone ID: MRT4577_88819C.1.pep
QRNTVVSVFLVDCVWLMASCFHLQQLLPFTASFTAKMFLSTIMVVLFSFYIIVQ

SEQ ID NO: 357073 - protein, 392 aa, Zea mays
  Clone ID: MRT4577_8881C.1.pep
MGIVAAATTAAATCTSRLLHHHATYHRHQLRYSASPFPLSLHCGSGRREAAARALLPDRVTPFSYGVDEDADDHPREECGLVGVVGDPDASSLCYLGLQKLQHRGEEGAGIVAVGGDGKLKSVTGLGLVADVFGDPSRLASLPGPAAIGHVRYSTAGAAASLRNVQPFLAGYRFGQVAVAHNGNLVNYQALRNKLEARGSIFNTSSDTEVILHLIATSLSRPLLARVCDACERLAGSYSLLFLTADKLFAVRDPHGFRPLVMGRRRNGAVVFASETCALDLIDATYEREVEPGEVVVVDRRDMSVASACLVPHRPRRACVFEHIYFSLPNSVVFSHAVHERRTAFGQALAEESPAPGADVVIPVPDSGFYAALGFARASGLEFQQGLIRWHY

SEQ ID NO: 357074 - protein, 109 aa, Zea mays
  unsure (1)..(109): unsure at all Xaa locations
  Clone ID: MRT4577_88820C.1.pep
IKLKRFDEAIAQCXLFLSKNQSNVKALFRREKVKFEFGQPESPREVFLKAKKYSPECKEIIRELGLLADQDKAIFRKQKXLYKGLFGPSPEPKPKKSKSLVVFCQARGS

SEQ ID NO: 357075 - protein, 67 aa, Zea mays
  Clone ID: MRT4577_88821C.1.pep
RLILSSSTTYTRFSEYMEISLTSWVKQTCLPHLRTLRRPFAASATPSSPPTTISLATVNVWWWRRGR

SEQ ID NO: 357076 - protein, 94 aa, Zea mays
  Clone ID: MRT4577_88822C.1.pep
ADGQLDPVFNPKLSSSYAVVPCTSDTCAQLDGHRCHEDDDGACQYTYKYSGHGVTKGTLAIDKLAIGGDVFHAVVFGCSDSSVGGPAAQASGLV

SEQ ID NO: 357077 - protein, 73 aa, Zea mays
  unsure (1)..(73): unsure at all Xaa locations
  Clone ID: MRT4577_88823C.1.pep
YSSRVFVFVYQXAMAPCDLDTFLFXPGCLGALXISFNPLKTXXXXXXNXXIFFXXKKKKXXKKXXXKKKKKXK

SEQ ID NO: 357078 - protein, 39 aa, Zea mays
  Clone ID: MRT4577_88824C.1.pep
MAEKGCLKRLQKEYHALCKEPPPQVVARPLPNDILEWRK

SEQ ID NO: 357079 - protein, 150 aa, Zea mays
  Clone ID: MRT4577_88825C.1.pep
GPEDYMFLGAKEKRGPPPFGGVFFIRNPWFSPLPKDGAFPPLLGVEAKETPKWGHVFPKFALSSKSPTRVSVGGVNPFYMSLIDKYFPAKLKWLKGGAWPGPGWMDPQGPPKSGGSKGPCPIYIYIASESGLWAMAGLFFSELRGGPPPF

SEQ ID NO: 357080 - protein, 20 aa, Zea mays
  Clone ID: MRT4577_88826C.1.pep
LVNFLLDIAAKGQCKRTTVL

SEQ ID NO: 357081 - protein, 133 aa, Zea mays
  Clone ID: MRT4577_88827C.1.pep
MSLSEKLEAARVALGKRKERERELQAAQAQPLPVPAKAEPRKPAPACAAAAGGGDNKLLAGHLAHEFLVHGTLLGRRIEPSRGAPAPAQAPARAEPDPKRRYAEVSWLLMARGAHVPGVVNPTQLGRWLQIKE

SEQ ID NO: 357082 - protein, 129 aa, Zea mays
  unsure (1)..(129): unsure at all Xaa locations
  Clone ID: MRT4577_88828C.1.pep
MKVLIVALALLALAASAACTTSGRCGCQTPPLHLPPPFYLPPPFYLPTQQQPKPWQYPTQPPHLSPCQEFXSCCVSRVRCPFLSQCSQILKHQCSPAERPYCXPRGQPLKQHCCHQIKHVEPMFRYQAT

SEQ ID NO: 357083 - protein, 97 aa, Zea mays
  Clone ID: MRT4577_88829C.1.pep
RGRPVRENPNSFSLLLLLPLQQAAANPPGRPQGVWPTVPAFPWPPVLLLLSFLQPMELVIRRWFPLPEMVSRLWGAVINLLKLGSRPHLLESLTVCE

SEQ ID NO: 357084 - protein, 199 aa, Zea mays
  unsure (1)..(199): unsure at all Xaa locations
  Clone ID: MRT4577_8882C.1.pep
MGIVAAAAAATTCTSRILYRYAAAGSDRHNRHHLRCYASPYPLSLRCGSGRREAAARALLPDRVTPFSYGVDEDADDHPREECGVIGVVGDPDASSLCYLGLQKLQHRGEEGAGIVAVGGDGKLKSVTGLGLVADVFADPSRLASLPGPAAIGHVRYSTAGAGASLRNVQPXLAGYRFGQVAVAHNGXLVNYQALRNKL

SEQ ID NO: 357085 - protein, 102 aa, Zea mays
  Clone ID: MRT4577_88830C.1.pep
APRAPLCFHKATPLTPPKGKAHRRGRPPKNPALGPPRRPPRRARAPQGPLRRGAGVHPAARGKKTDPPRPHSNCNPRPSAPDTKPTWGGDPLKKTLHQGPVG

SEQ ID NO: 357086 - protein, 403 aa, Zea mays
  Clone ID: MRT4577_88831C.1.pep
MDESGVKKEISLLGLVTLSHLSPKGSGHFTVVLNRERAASDRLKRMPMLFDDYRDEDFYGLPQKYCIVARGAKIEAITYMYETVKHFDNLLHEKHVYKMHNVKFGLHPGEFNFRHLNGLMELCLNQQTIVEPYNVPIQMASFPKQIFLNLADIAELPNRTLVGGLYISLKFGGDLLNKNALRWALAKEDYGIIIRTMFRRFRRQECLEPSDHTAIHFNPFHHNTHYFGRILAPAASSFLILSCVCWTGNTNTQGYIVADENGSKSLGPNVDAKEFSLSDGCSTIDFTNFATQDGDEKVNVNQDDDSDWLQRNETFKADDVFTTRDLLTPGGVHETVGNTPNHNLERAAYFRERYKNLTPTEREFRRERLRLYNNTPKRKGSKIEYIRKHRALLADENRLEGGE

SEQ ID NO: 357087 - protein, 216 aa, Zea mays
  unsure (1)..(216): unsure at all Xaa locations
  Clone ID: MRT4577_88832C.1.pep
VLSASXDQXRAITYMYETVKLSTICSYEKHVYKMHNVKFSLHPGEFNFRHLNGPMELCLDQQTIVEPYTVPIQMAPFPKQILLNLADIAELPNRTLVDIMAVVVHLDTIHRTMWGPFRKIVIMDARGYLHIIKVWGDLLNKNALRWALAKEDYGIIIGTMFRRFRRQECLESSDHTAIHFNPFHHNTHHFRPIQKALVALNNRQFAVTFLEEERRR

SEQ ID NO: 357088 - protein, 57 aa, Zea mays
  Clone ID: MRT4577_88833C.1.pep
KKRANTSHFFFFPHPELGIMHYLYLSKHNRDSNLFYEFCQSKGDIQVYRWKFSLFNT

SEQ ID NO: 357089 - protein, 104 aa, Zea mays
  Clone ID: MRT4577_88834C.1.pep
GAPSFVAWWGIWWFPLPLQDVRSLCSTAIGSPFICLRCSRYKAALYSFTVSVGGSVCSRGGGISLVSPLHHSPCCIACVSISNEGSEPVRIQDIAPVAVASGSS

SEQ ID NO: 357090 - protein, 329 aa, Zea mays
  unsure (1)..(329): unsure at all Xaa locations
  Clone ID: MRT4577_88835C.1.pep
RVGGRVGGRVGEHHFSKEXIMSSLERAKKRNRAALGTPKVPNVKWEDVGGLEDVKKVILDTIQLPLMYKHLFSSKLRKRSGVLLYGPPGTGKTLLAKAVATECSLNFLSVKGPELINMYVGESEKNVRDIFEKARSARPCVIFFDELDSLAPARGVDPRVRGVMDRVVSQLLVEIDGLSDNSQDLFIIGATNRPDLLDSALLRPGRFDKLLYVGVNTEASYRERILKAQTRKYKLHKNVSLLSVAQRCPPNFTGADIYALCADAWFHAAKRSVETFEIDPSRSNEASAEEVIVEIDDFITVLGDIAPSLSLDELQNYEQLRQKIEGPSR

SEQ ID NO: 357091 - protein, 142 aa, Zea mays
  Clone ID: MRT4577_88836C.1.pep
VRNKISWLEARLGARDLCDDIVHDNDDTVQSEEHWFVRRCRGLWAMAGERLGFTDEERLRKLQTKKLVLASRLSDYKEGCAPGAGVAFVVFKDVYTANKAVKDFKMERKKTPIGRFFPVMELQLERSRWKVERAPPASDIYW

SEQ ID NO: 357092 - protein, 58 aa, Zea mays
  Clone ID: MRT4577_88837C.1.pep
CCITVEPSYPLMEGATPPNPGASPPSPTPAPAVWHNYYSCPDRNICCRIYDYGSYCFA

SEQ ID NO: 357093 - protein, 693 aa, Zea mays
  unsure (1)..(693): unsure at all Xaa locations
  Clone ID: MRT4577_88838C.1.pep
NSARGVDQALNEYFKFDRFLARGDVFGIQNSWKCGSSCCLACNKQDNKLNPRNMIYFKVTGMEPSDEPILRVNCNETALVLGGAASAAIPPYSFFASSGNSVPLHSEVVEHLASVIAPALCPSDILPKIKFSTFLYGPPGCGKRTVVRHVANHLGLLVGQLSXRDLETSXEGGTYCXLATTFKEAQKYSPCIILLRHFDAIGNASSNEGPQSEQSGIASNIESVIKQYIGQRWVAKDSLPGKDVNGSSYLVEPECVSSLQIILVATADSSEGMQQSIRRCFRYEIDMKTMNEEQRNKLISETLQGIPKVADESICDKFLKDLAAQTSGFMPRDILALVADAGVSFAHKIAAGNDSKAISKHTEVLPESSSATQNEEHHFSKEDIMSSLERAKKRNRAALGTPKVPNVKWEDVGGLEDVKKVILDTIQLPLMYKHLFSSKLNKPSCLVLXRPPGTGKSPFSPLRGGQCPCALMEGGGLPLXQRTIFESXKNVRDIFEKARSARPCVIFFDELDSLAPARGSSADSGGVMDRVVSQLLVEIDGLSDNSQDLFIIGATNRPDLLDSALLRPGRFDKLLYVGVNTEASYRERILKAQTRKYKLHKNVSLLSVAQRCPPNFTGADIYALCADAWFHAAKRSVETFETDPSRSNDASAEEVIVEIDDFITVLGDIAPSLSLDELQNYEQLRQKIEGPSR

SEQ ID NO: 357094 - protein, 208 aa, Zea mays
  unsure (1)..(208): unsure at all Xaa locations
  Clone ID: MRT4577_88839C.1.pep
RPLFPPLLLSFPSLLGFPRSLPPPLSLPLPLPLPLSYHISSPLLGPTAFHPLPSFPASAVPSSAVALREAHGGGPRQPNRRHIAFSPARICRRARRPYPPKPPPARRSSSNTTTMSLACLVCHGMSSSSHSLRSYSVSSSEEESRCGAAVACLARRVTPAGTSTSAGTSKVTPFPPIVSGQXARRALLDFNAAVLCPGTLLEIGTLTK

SEQ ID NO: 357095 - protein, 323 aa, Zea mays
  Clone ID: MRT4577_8883C.1.pep
MDGEEAPLGALNLAEYAPAGARTVDCYRRIRKIGEGTYGEVFEAVDIITGERAALKKIKLDDGKEGFPRQILREIKLLKKLDHENIIRLKEIVVSPGSAHGTGGSDDHIYRGDIYMVFEYMDHDLKKVLHHSAPSQVKVYMGQLLKGLQYCHANNVLHRDIKGANLLITGGKLLKLADFGLARLFTRDGTLTNHVITLWYRPPELLLGATSYAEPVDIWSVGCIFAEFLLKKPLFPGRTEQEQLSKIFELCGSPNEESWPGVSKLPLYKTMTIRPATPTKRSLRDILQNFDCPAVELIERMLILNPSQRISAQDALGAAYFIN

SEQ ID NO: 357096 - protein, 53 aa, Zea mays
  Clone ID: MRT4577_88840C.1.pep
DARAAAGEVVDTMSPSLASKNTLMIMRFKIPTDWPYDDHVRTKETLICPRLMH

SEQ ID NO: 357097 - protein, 92 aa, Zea mays
  Clone ID: MRT4577_88841C.1.pep
HVFGAARHDRGPQVVVRRRRRLDLNRNANEVLMRGRRRLLLVVVLKGRRRHGGHGRIEKHHVGRPRRGRAAVASVAARDARLHLYLNPKLKY

SEQ ID NO: 357098 - protein, 91 aa, Zea mays
  Clone ID: MRT4577_88842C.1.pep
RLLARALQPCLPFLQGKAAKPSESNNQCCDGVRTLYAAADTRPDRQATCRCLKAAYVQVHAVLSAAQELPGDCGLSLSYNITPDIDCDKIE

SEQ ID NO: 357099 - protein, 119 aa, Zea mays
  Clone ID: MRT4577_88843C.1.pep
MKTTSSGIAVVLLVAMLAVQSAVADISCSDVLNDLSPCLPFLQGKAAKPSESNNQCCDGVRTLYAAADTRPDRQATCRCLKAAYVQVHAVLSAAQELPGDCGLSLSYNITPDIDCDKIE

SEQ ID NO: 357100 - protein, 330 aa, Zea mays
  Clone ID: MRT4577_88844C.1.pep
MESPTSTASRPDFYDFLDRMRRPAAADLFRSIKSFLVSFSFHAPNAEEDGSKVQAFLAEMESAIRDHPLWANATDQEIDHALEGLEKYVMTKLFDRTFGTSTEDAVTDMDISEKIGLLQQFVKPHHLDIPKVLHNEASWLLAVKELQKINSFKAPREKLLCIMSCCQVINNLLLNISMSNDRTLSGADEFLPILIYVTIKANPPQLHSNLKFIQLFRRETKLISEVEYYLTNLISAKMFIIDVSAHSLSMEESEFQKHMESARLATQVSVASPSSSQGLPTSARANQEETDMAGLLIILFNLFGEVCLTMNLHSKTVFFFVTKQNVFFFV

SEQ ID NO: 357101 - protein, 52 aa, Zea mays
  Clone ID: MRT4577_88845C.1.pep
QVPASPLDLQANHVEISPSVQALAETRKKYMSSRWVRAAVYPMFSTTGVVLG

SEQ ID NO: 357102 - protein, 197 aa, Zea mays
  unsure (1)..(197): unsure at all Xaa locations
  Clone ID: MRT4577_88846C.1.pep
SPKLQQPVDRRQETTTAICNCISGAGRCTNHAPPPXHRESTIKSCIYYASPTTEQVLGKTHKSRISNSGRKSTKSCVYNYKQVLDGTHKSGISTFNRESTTSCIYNYNNVRDDRDNMNSPRSGTKHKQKAHGQRAKESGREEQPSATPGIEEEREPKSKSTGKNRHGRRESPAVLRRSSSPSSLSKQSVQNGKGEKT

SEQ ID NO: 357103 - protein, 76 aa, Zea mays
  Clone ID: MRT4577_88847C.1.pep
TTIKCSSRHSLNITRLLRLMHLLRRTITTLNRNSLTISLILSPLRLRPTPPRNSQPFRLTPTTTALRARARRRDSY

SEQ ID NO: 357104 - protein, 95 aa, Zea mays
  unsure (1)..(95): unsure at all Xaa locations
  Clone ID: MRT4577_88849C.1.pep
MVGVPPLEAELFDIDRTMPIHHPLHHRPTXDMLLHLHYNNRMPITPELGIHNMAPLINQHIRHLLFPDFDQHPLNAFFNEKEALFTKNSINLLLE

SEQ ID NO: 357105 - protein, 60 aa, Zea mays
  Clone ID: MRT4577_8884C.1.pep
LLILASYTTSYLNILLLLHKNLIYTTRLFLYLYLQQITILTISFPFYSSLCEPNFIPSVL

SEQ ID NO: 357106 - protein, 71 aa, Zea mays
  Clone ID: MRT4577_88851C.1.pep
RPLGNQKKKKIGFQRRSKKNKKETVTFLSMIGNKFQLKWTLPSSTNLSPKFKICLKKELTPRGRPRGRGRV

SEQ ID NO: 357107 - protein, 54 aa, Zea mays
  Clone ID: MRT4577_88852C.1.pep
RIPLRIQGTCGSLIFKVKQFLCVNLLDNCISAPCSCYSGCLTARRGMIQRRQLP

SEQ ID NO: 357108 - protein, 77 aa, Zea mays
  Clone ID: MRT4577_88853C.1.pep
KSEGHVQDQGLNNADLIPGGLKAQTVSIPVEDELGDYARARGFEIFDKMCSEKERVQMSEAALTAKARMALSMGDSD

SEQ ID NO: 357109 - protein, 52 aa, Zea mays
  Clone ID: MRT4577_88854C.1.pep
LARRSSAYGDPRTYMRQLCNSIHQGWMISGDGCEAGTAARSGGAGGGVRLEA

SEQ ID NO: 357110 - protein, 54 aa, Zea mays
  Clone ID: MRT4577_88855C.1.pep
ALHASHQNTTLDSSNFHYTFLVSIGVESELKQAQTASTHKLKIKNTQSQINTQK

SEQ ID NO: 357111 - protein, 72 aa, Zea mays
  unsure (1)..(72): unsure at all Xaa locations
  Clone ID: MRT4577_88856C.1.pep
GTAGAMDGLEVALRIRELSNTCWLLVLVAVEASGVDDTVRDMCRRAGVDGLIHKPXTLPXLGAQLQRVLQNN

SEQ ID NO: 357112 - protein, 161 aa, Zea mays
  unsure (1)..(161): unsure at all Xaa locations
  Clone ID: MRT4577_88857C.1.pep
GVEGTFSQDVLTVAPPVAVQDFTFFCLDAGASDGMPEVGTLDLSRDRNSLPSRLAGSASAAFSYCMPQYPDCAGFLSLGDDATVRGDNCTXHAPLLSSDDPDLANMYFIDVXGMSXXDVDXPIPSGTFXNNASTMVEGGTTLXMLGPDADTPVGDALRKAM

SEQ ID NO: 357113 - protein, 219 aa, Zea mays
  Clone ID: MRT4577_88858C.1.pep
MPIAFDFAQKCVIVTGGNRGIGRAISETLAKASANVAIIYHSAKDAEDVAAEIAKEHGIKCQAYKCDVGDTDLVKSTFKKIDEEMGPVTGLVANAGVSVVKDALEMKKEDFSFVYDVNVWGQFACAQAAADLWTKSGFKHGSIVLTSSMSSQIVNRGIHQVFYNSSKAAASSIVKQLAVEWADKGIRVNALCPGYVATDQTSHMDPKLLEWEKKELVPL

SEQ ID NO: 357114 - protein, 43 aa, Zea mays
  Clone ID: MRT4577_88859C.1.pep
GTNWNDNLIVNIFLHAYHVVGTVTRALYNLSLILRATLYRWEN

SEQ ID NO: 357115 - protein, 31 aa, Zea mays
  Clone ID: MRT4577_8885C.1.pep
KTRRDRTRTANQLKKIQLFFFTTYYQGGVRG

SEQ ID NO: 357116 - protein, 56 aa, Zea mays
  Clone ID: MRT4577_88860C.1.pep
ILCNKIYSGSYNFLVSHTRFGYLNKKFRMRIWLESCNSFLFNMDITNVIKFKYMIA

SEQ ID NO: 357117 - protein, 56 aa, Zea mays
  Clone ID: MRT4577_88861C.1.pep
GSKRLLSQVCVSLSISTQGPRLNTLCFNTHSCGSSGVETIYTPEGSCAAYSSLPGA

SEQ ID NO: 357118 - protein, 168 aa, Zea mays
  unsure (1)..(168): unsure at all Xaa locations
  Clone ID: MRT4577_88862C.1.pep
RTFHNYKGLAYPIIGNGRSILFWEDQWNKSIPSQQYPELFSFAKSTKLSIAEAKEQDHLFRIFQLPICEQAYXQYLELHVVWEQIDLSTVKDRWRYIWDSDSYSTKKAYRHLMGRTHAHSIYKCLWKNKCQPXHKVFYWLWLKNRLNTRNMLXRKNMTLESYSCENCL

SEQ ID NO: 357119 - protein, 298 aa, Zea mays
  Clone ID: MRT4577_88863C.1.pep
MADFGDELFLDVGDDGFGDLSYVSFSESIELDLACPRDVFSAGFDPETLTHIPGSPISFDSDPDLRHLSPSLTCSPPFWGCLDDAASFEWEEIADAALGVGGGAGGAGGGGQGLEGDADADADVFGFLDEREMLGVMEGIDSGDDDSIFSDEPPFDFGDGDTELEGIFRSGVGWELLPVPLDEDEFEVLPGHVVEVGGAPPAALAVVERLQVVAVRGEEVVQECAVCKEGMEQGELTTGLPCGHFYHGACIGPWLAIRNTCPVCRYELPTDDPEYEKRRTRRHSAGGSTPQLGAPMQV

SEQ ID NO: 357120 - protein, 104 aa, Zea mays
  Clone ID: MRT4577_88864C.1.pep
APAPGGVKEPQRFRPGTVALREIPQCQKSPQVLIRQLPFQRLVRELAQEFKPGLRFQSSPVPPLQEASQAYLVGLFQDTNLCAPHAKGVTLMPKGIQGRPPYPC

SEQ ID NO: 357121 - protein, 67 aa, Zea mays
  unsure (1)..(67): unsure at all Xaa locations
  Clone ID: MRT4577_88865C.1.pep
MEYSTPPPMIGNYHHPNAHRVLNEKIVYEEXLFEXRHNHIHHHHPETHERVKVVEYEQVPDNRIVYE

SEQ ID NO: 357122 - protein, 180 aa, Zea mays
  unsure (1)..(180): unsure at all Xaa locations
  Clone ID: MRT4577_88866C.1.pep
MRAGWTEVDGLLLFKGKIFIPDASELWATLLADAHDSGHEGVQKTLHWCRVSFYNSXTRLXLIKEFVRGCSICQRNKSEHLHPAGLLQPLPVPSEVWSDISMDFVEGFPEVGGKSVIFVDRFSKFAHFIPLGHPYTAASVSQAFFDSIVRLHGLPCSIVSDRDTVFTSSFWSELGKGEML

SEQ ID NO: 357123 - protein, 39 aa, Zea mays
  Clone ID: MRT4577_88867C.1.pep
NTVDKDSERAVTKNERIAFAREYGCLPLECSARTKVHVE

SEQ ID NO: 357124 - protein, 259 aa, Zea mays
  Clone ID: MRT4577_88868C.1.pep
VQNSCLGWFRAISLSHVTHSENGCRGAYKAQVFATGTISSFFATNMPIHYFRSKTHVWGGFAQFRCRTSPISKTGVGCIQSTSFCHRNHFFVFRNEHAQSTTLGPKLMFGVEKNNFVAARHPFRKRLSGVHTKHEFLPPEPFLRFFATNMPNPLLQVQNSCLGWFRAISLSHVTHSENRCMGCIQSTSFCHRNHFFVFRNEHAQSTTLGPKLMFGVISRNLVVARHPFRKRVSGAYKARVFATGTISSFFVTNMPNPLL

SEQ ID NO: 357125 - protein, 208 aa, Zea mays
  Clone ID: MRT4577_88869C.1.pep
RPGSPNSFPASPVAPPSALLSSLQRPAPRLLRPWPAPCVGLPCELLTSSSPELSLPCRRARSASPSAVAPWLSARPWRSRFPDLLLAWPRRAPCWAKVSSLLGFCQACELLYALCSLSFSSSQLASCPQPWMSAGPCSHPWLPPWSAGLRSPCSVPLPCSSPARRRFTHARMLMRTSTPTRVHLHQQHLLQPRHHLPQSRRHPFHLGQ

SEQ ID NO: 357126 - protein, 141 aa, Zea mays
  Clone ID: MRT4577_8886C.1.pep
GGQKKGVGPIYKKGGEKKGLPGGENGAPPKRGGAAPEGKKFSLKKGTPWGLKKFWGPWFQKQQKGVPGGVFCSPILGNTIFPGAQSLLFGGGAGGPGKNQGIPPPFGGNGETPEILGKTVPPQFFPQKVFEKPKRVALKEK

SEQ ID NO: 357127 - protein, 71 aa, Zea mays
  Clone ID: MRT4577_88870C.1.pep
FIYDGCLSLNLQRLNRNNPRKRHKQVYTTKYDNSGSWPLDITERCLNLQYLVSQSPELWINKEHWSRTCDI

SEQ ID NO: 357128 - protein, 254 aa, Zea mays
  Clone ID: MRT4577_88871C.1.pep
FLAISLSHVTHSENVCRVHTKHEFLPPEPFLHFLQRTCPIHYFRSKTHVWGCFSQFRCRTSPIPKTGVGCIQSTSFCHRNHFFVFRNEHAQSTTLGPKLMFGGGFAQIRCRTSPVPKTGVGVHTKHEILPPEPFFVLLNEHAQSTTLGPKLILGWFRAISLPHVTHSENGCRAAYKHEFLQPEPFLRFSQRTYPFHYFRSKTHVDADINTNTSTSTPAAPSPAQAPPLPPGPVTRARARELNYIMLLKNEGPEE

SEQ ID NO: 357129 - protein, 109 aa, Zea mays
  Clone ID: MRT4577_88872C.1.pep
GPKLMFGIVLHNFVVARHPFRKRVSGCIQSTSFCHRNRFFDFRNEHGQSTTLGPKLMFGVDADINTNTSTSTPAAPPAQAPPLPPGPVTRARAREFNYIMLLKNEGPEE

SEQ ID NO: 357130 - protein, 103 aa, Zea mays
  Clone ID: MRT4577_88873C.1.pep
RTCPIHYCRSKTHVWGGFAQFRCRTSLILKTVVGVHTKHEFLPPEPFLRFSQRTCPIHYFRSKTHVWGGFAQFRCRTSPILKTVVGVHTKHEFLPTELMRTSL

SEQ ID NO: 357131 - protein, 259 aa, Zea mays
  Clone ID: MRT4577_88874C.1.pep
SENGCRVHTKHEFLSPEPILRFSQRTCPIHYFRSKTNVWGGFVQFRCHTSPIPKTGVGVHTKHDFSPPEPFLRFAQRTCPTHYFRSKTHVWGGFAQFRCRTSPNPKTGVGVHTKHEFSPPEPFLRFSQRTCPIHYFRSKTHVWGGFAQFRWRTSPVPKMGVGVHTSTSFCHRNHLFVFRNEHVQSTTLGPKLIFGVVSQFCCRTSPIPKMGVGSHTKHEFLPPEPFRRFCNEHAQSTTLGPKLMFGEVSRNFDVARHPF

SEQ ID NO: 357132 - protein, 214 aa, Zea mays
  Clone ID: MRT4577_88875C.1.pep
MEASEAAPAAAATVMEAEDVSGGKGEWYVLGERALMVPYTREHVPRYHDWMQDPALLEATASEPLSLSQEFEVHRSWTLDPLKHTFIVLDKELIEGEFVPGNPHIEAMVGDVNIYMNDSDDVQIAEIEIMIAEHKSRGKGIGQEAILLMMAIAVEKYGIHTFRAKISESNMASLKLFRKLGFKDASYSVVFKEVTLEAPADSLPLRFPLTIGDW

SEQ ID NO: 357133 - protein, 202 aa, Zea mays
  unsure (1)..(202): unsure at all Xaa locations
  Clone ID: MRT4577_88876C.1.pep
SQNSCXGIVSQKFRCRTSPIPKTGIRVHTKHKLLPPEPFVRFSQRTCPIHYFRSKTHVWGGFVQFRCRTSPIPKTGVGVHTNHEFLPPEPFLRFSQRTCPIHYFRTKTHVWGGSAQFRCRTSPIPKTGVGVHTKHEFLTPEPFLRFSQRTCPIHYFRSKTHVWGGFTQFLCSTSPISKMGVGLHSKHEFLLPEPFLCFSQRI

SEQ ID NO: 357134 - protein, 70 aa, Zea mays
  Clone ID: MRT4577_88877C.1.pep
YRIAISAYTYAYKHVPHYRYFSFNDNTFRFGHRYTADPVDSTYATYGRLTLFSLADDPHDAFFPYMLEYA

SEQ ID NO: 357135 - protein, 34 aa, Zea mays
  Clone ID: MRT4577_88878C.1.pep
CLTKLCPETNSKTYVQEAPASAVAGTEPPGHGGP

SEQ ID NO: 357136 - protein, 205 aa, Zea mays
  unsure (1)..(205): unsure at all Xaa locations
  Clone ID: MRT4577_88879C.1.pep
MEASEAAPAAAATVMEAEDVSGGKGEWYVLGERALMVPYTREHVPRYHDWMQDPALLEATASEPLSLSQEFEVHRSWTLDPXFRTAPPPSGLHRFSFVVDLAEFLFCLLACLFAERTFIVLDKELIEGEFVPGNPHIEAMVGDVNIYMNDSDDVQIAEIEIMIAEHKSRGKGIGQEAILLMMAFAVEKYGIHTFRAKISESNMAS

SEQ ID NO: 357137 - protein, 54 aa, Zea mays
  Clone ID: MRT4577_8887C.1.pep
ARVQTAPANAIRVTYRIMGTGTLPLKELWVDPYSFRSRLENNITNVIIQALSLT

SEQ ID NO: 357138 - protein, 127 aa, Zea mays
  Clone ID: MRT4577_88880C.1.pep
PDLLLAWPRRAPCWAKVSSLLGFCQACELLYALCSLSFSSSQLASCPQPWMSAGPCSHPWLPPWSAGLRSPCSVPLPCSSPARRRFTHARMLMRTSTLTRVYLHQQHLLQTRHHLPQSRRHPFHLGQ

SEQ ID NO: 357139 - protein, 83 aa, Zea mays
  Clone ID: MRT4577_88881C.1.pep
VYASGGSSWILDSGFTNHMTGEKKMFTSYVKNKDSQDSIIFGDGNQSKVKGLGKIAISNEHSISNVMRTSTPTRAHLHQQHLL

SEQ ID NO: 357140 - protein, 186 aa, Zea mays
  Clone ID: MRT4577_88882C.1.pep
LEGEFPHVSLPLFCATGHVLKLFLTPPLHLIHVIYFPRIQLLETSFTRCVEHPGNHPRHPSHHCTTARFVLLAGLLQHQERSLLLVDVRFSQTRELPSNSNTLLASLSLQAIVSLVLAKVGRVLSFARQRLQSSFLFHGCTLTDSSAWPWSSVSCVPVLGRRVTCSSVLMPCTLRLVELAGVVIYY

SEQ ID NO: 357141 - protein, 102 aa, Zea mays
  Clone ID: MRT4577_88883C.1.pep
PSFLSFILFILFIYLFYLFIYFILFYFFFYFFFFFFNWRPWGHESQTNMDKFHLAKQEKTPDKTLGEIGEPPKPELYFTLLNPGKEHRGIKTQKGYNPMGGN

SEQ ID NO: 357142 - protein, 84 aa, Zea mays
  Clone ID: MRT4577_88884C.1.pep
WSMLTGLDSFDCCARGCAPPGSHPEGPVVPTDLPARRYASHYAGLLAIRAWEVALLPMRRGTITVARHSLPSCFPSLVASLLSN

SEQ ID NO: 357143 - protein, 79 aa, Zea mays
  Clone ID: MRT4577_88885C.1.pep
IKPKLSPTRHPNRVPTREMVPKSGREGLTTIDEVVMTHSLMVVAAGCRLDLLASDHLRVSSSRLFRPDLWQTVDRPFLQ

SEQ ID NO: 357144 - protein, 49 aa, Zea mays
  Clone ID: MRT4577_88886C.1.pep
GRQRGAIKMGYLKTDEEFLKRGKSGGTCCIVALLRKGRLVVYNIGDCHV

SEQ ID NO: 357145 - protein, 205 aa, Zea mays
  unsure (1)..(205): unsure at all Xaa locations
  Clone ID: MRT4577_88887C.1.pep
YAPSLMIGAAVGAVFGGSAAXIXINSALPGNAAVAQPQAYALVGMAATLASVCSVPLTSVLLLFELTKDYRILLPLMGAVGLAIWVPSVVNQPNDSEPSGFRTSRRGYSSMSPEERNGSLRQGDVVDDLELSIIQTDMSNYGTYNAEMLLEDLKTXQNCALVVDPEDFLEGIITLGDIRRMGYGLHVESFINGDHSKADDNSFFI

SEQ ID NO: 357146 - protein, 388 aa, Zea mays
  Clone ID: MRT4577_88888C.1.pep
YSARGLGGLGAGIIALKYPGILYWGFTNVEEILHTGKSASAPGIWLLTQLAAAKVVATALCKGSGLVGGLYAPSLMIGAAVGAVFGGSAAYLINSALPGNAAVAQPQAYALVGMAATLASVCSVPLTSVLLLFELTKDYRILLPLMGAVGLAIWVPSVVNQPNDSEPSGFRTSRRGYSSMSPEERNGSLRQGDVVDDLELSIIQTDMSNYGTYNAEMLLEDLKVFQAMSKIYVKVLPSATVTEVLNLLHDRQQNCALVVDPEDFLEGIITLGDIRRMGYGLHVESFINGDHPKADDNSSSISSCLTRGFQYRGSERGLLTCFPDTDLTTAKSLMEARGIKQLPVVKRGVAHRTAGKRRPIALLHYDSIGCCVREEIENWKTIYQRLAC

SEQ ID NO: 357147 - protein, 186 aa, Zea mays
  Clone ID: MRT4577_88889C.1.pep
RPGNNPALVAIGEVTKQIFKENPDFFPIKPMDYGRFLVISLGTGSAKFEANYNAQTAKSWGLLGWLLGSGSTPLVDIFTQASADMVDIHISAVFKALHSEQNYLRIQDDTLQGTLSSVDVATKENMEKLARVGDMLLKKPVSQANLETGHMVPACHRAEMTNEEALKRFAKLLSDERRLRKARSPK

SEQ ID NO: 357148 - protein, 46 aa, Zea mays
  Clone ID: MRT4577_8888C.1.pep
VIKGATSCFHMVPSRKFQTRPIENYMVKLISGSQLFTVNLKKNCRF

SEQ ID NO: 357149 - protein, 72 aa, Zea mays
  unsure (1)..(72): unsure at all Xaa locations
  Clone ID: MRT4577_88890C.1.pep
PRVRPRVRLSVPVFADAPLNKLVPTATDSLHGVAQVDRXMNKRLVTQQTASVLYVSFGCMVAMDPHEFEKLA

SEQ ID NO: 357150 - protein, 53 aa, Zea mays
  unsure (1)..(53): unsure at all Xaa locations
  Clone ID: MRT4577_88891C.1.pep
XRXAAXVXWAPXXXSXCALPRRDPARSYXSRGAVPSGXVLGAGXSAKHARXGL

SEQ ID NO: 357151 - protein, 64 aa, Zea mays
  Clone ID: MRT4577_88892C.1.pep
KWPPKRKHETTFLHQLTLQQSTQTNMEKRIWTIGPRWSVQELVFIYIIYMYNIYRSIYFVYRKR

SEQ ID NO: 357152 - protein, 93 aa, Zea mays
  Clone ID: MRT4577_88893C.1.pep
PYQDDAVRTSARDRSMLTPIARSRTRCIHQRLHHLSMHKCLTCLLTDDCPLLFKFTTIEFGVLVCHSTDVHQLGTENAMHTPRISFYGRYGIR

SEQ ID NO: 357153 - protein, 52 aa, Zea mays
  Clone ID: MRT4577_88894C.1.pep
TNCWFDIYVNISLPCFNFAHSYYREPIGSLLVLWVFCLKRSHGICLHLPYQT

SEQ ID NO: 357154 - protein, 107 aa, Zea mays
  Clone ID: MRT4577_88895C.1.pep
RFPRGTRTTSGWLVCLSPPPSPPAATAILTPPVAPQPRPRKTVAPPVDGVDLQLQLQLQHKHALAVQHSSVARAVIPKLLRRSKYRVTPPPPHAARGAQALAGPRRN

SEQ ID NO: 357155 - protein, 75 aa, Zea mays
  unsure (1)..(75): unsure at all Xaa locations
  Clone ID: MRT4577_88896C.1.pep
ARRARRSSSRLMXXSXSXSIARSYSLNSSTVMSAYIDRVVAATIMFLIAIGGYWRPAAAALHNSITSLKTSSICC

SEQ ID NO: 357156 - protein, 123 aa, Zea mays
  unsure (1)..(123): unsure at all Xaa locations
  Clone ID: MRT4577_88897C.1.pep
PPLVLSRAFPAPPTRPGILPLSGVCGRRGPVVSSYSSFVYPRVPPPDGALRLAAHFAAVFGXLPVWGFRALFPXXCLXQGAPLLVRVRLVFGVAAAPRLCLLVVGRALIHYRXPXAWVVPGFR

SEQ ID NO: 357157 - protein, 73 aa, Zea mays
  Clone ID: MRT4577_88898C.1.pep
PSILMVLVHGSRPTISGFPSDGRKLSKHPLVGTHFDDSLIFPLQPDKTQSPMYIKWHLVIQTCTLFLHLNNTS

SEQ ID NO: 357158 - protein, 65 aa, Zea mays
  Clone ID: MRT4577_88899C.1.pep
QRLTWLIDPSCTRLMGGSDLKEQRFWELYMEFNAKNIIVKPYIVHTVLTDYYSMDIYLNYQTSLD

SEQ ID NO: 357159 - protein, 38 aa, Zea mays
  Clone ID: MRT4577_8889C.1.pep
TEKGRPLLMIQTNVPIGIDTQVHNHTHMHIFALLFTTL

SEQ ID NO: 357160 - protein, 114 aa, Zea mays; identical to SEQ ID NO: 356832
  Clone ID: MRT4577_888C.1.pep

SEQ ID NO: 357161 - protein, 976 aa, Zea mays
  unsure (1)..(976): unsure at all Xaa locations
  Clone ID: MRT4577_88900C.1.pep
MHSPVLLATRADFDDLHEAHMPCYALVCSRMLVPLDDAPSLDIPPAVVNLLQEYADVYPTDLPPGLPPLRGIEHQIDLIPGASLPNRAPYRTNPDETKEIQRQVQTLLDKGYIRESLSPCSVPVLLVPKKDGSWRMCVDCRAINNITVRYRYPIPRLDDMLDELSGAVIFSKVDLRSGYHQIRMKLGDEWKTAFKTKFGLYEWLVMPFGLTNAPSTFMRLMNEVLRAFIGLFVVVYFDDILIYSKSIEEHLEHLRAVFDALRAARLFGNMEKCTFCTQRVSFLGYVVTPQGIEVDSIKIAAIREWPTPTTVTQIRSFLGLAGFYRRFVRDFSSIAAPLHELTKKDVPFAWSDSQEVAFSTLKDKLTQAPLLQLPDFNKVFELECDASGIGLGAVLLQEGKPVAYFSEKLSGASLKYSTYDKELYALVRTLHTWQHYLWHREFIIHSDHEALKHIRTQTNLNRRHAKWVEFIESFPYIIKHKNGKDNVIADALSRRYTMLSXLDFKIFGLHTVKDQYVDDADFKDAFGHCSNGIPWGKFHIQDGFLFRANKLCVPASSVRLLLLQEAHGGGLMGHFGVYKTHEVLAAHFFWPRMRADVEHLVARCTTCQKAKSRLGNHGLYMPLPVPSSPWPDISMDFVLGLPRTKKGRDSIFVVVDRFSKMAHFIPCHKTDDASIVAELFFREIIRLHGIPKTIVSDRDAKFLSHFWRSLWAKLGIKLLFSTTCHPQTDGQTEVVNRTLSTMLRAVLDKNLRRWEDCLPHVEFAYNHATHSSTKMCPFQIVYGYIPRAPIDLISLNAANAPHVDASAHVEQMISIHEQTKQNIAATNAKNQVAGSKGRKHVTFEPGDMVWLHLRKDRFPTLRRSKLMPRAAGPFKILTKINDNAYTLDLPAEFGVSTSFNVADLKPYAGEDEELPSRTTSVQEGEDDADINTNTSTSTPAAPSPAQAPPLPPGPVTRARARELNYIMLLKNEGPEE

SEQ ID NO: 357162 - protein, 90 aa, Zea mays
  Clone ID: MRT4577_88901C.1.pep
RPTWSMHIVTNTKMCLNTYHVYLCRSIEYTLPNNEKQSIIPYEGHVDFAHHDPQKSISNRGGLATQSHWVELIKVYPLILPQYQRQLRNQ

SEQ ID NO: 357163 - protein, 552 aa, Zea mays
  unsure (1)..(552): unsure at all Xaa locations
  Clone ID: MRT4577_88902C.1.pep
CPHQFNTLKDKLTQAPLLQLPDFNKVFELECDASGIGLGAVLLQEGKPVAYFSEKLSGASLKYSTYDKELYALVRTLHTWQHYLWHREFIIHSDHEALKHNRTQTNLNRRHAKWVEFIESFPYIIKHKNGKDNVIADALSRRYTMLSXLDFKIFGLHTVKDQYVDDADFKDAFGHCINGIPWGKFHIQDGFLFRANKLCVPASSVRLLLLQEAHGGGLMGHFAVYKTHEVLAAHFFWPQMRRDVERLVARCTTCQKAKSRLSNHGLYMPLPIPTFPWLDISMDFVLGLPRTKKGRDSIFVVVDRFSKMAHFIPCHKTDDASKVAELFFREIIRLHGIPNTIVSDRDAKFLSHFWRSLWNKLGTKLLFSTTCHPQTDRQTDVVNRTLSTMLRAVLDKNLRRGEDCLLHIEFAYNRATHSSTKMCPFQIVYGYIPRTPIDLFSIDAEDAPHIEAVAHVEQMSDLHEQTHQNIAAANAKYQVAGSKGRKHVTLCWSEGRNATLRSKSPLLSRCSDRDKAGRDTLRLIGTRRRPATKASHSAASSSSEAHVRSGPL

SEQ ID NO: 357164 - protein, 122 aa, Zea mays
  unsure (1)..(122): unsure at all Xaa locations
  Clone ID: MRT4577_88903C.1.pep
KGAKKGGGPKKPGGPXPKAGKEPNNRPTSXQGTPPKVDPTAETKPKGQPXQGTPXGPQTHGGKPTPLGPGQRQKGHPPLPKGPGEEKTHPQKPGGNKPWAPRPGEPRPQTKKGHRTEPPEAP

SEQ ID NO: 357165 - protein, 169 aa, Zea mays
  unsure (1)..(169): unsure at all Xaa locations
  Clone ID: MRT4577_88904C.1.pep
MDTLVTLYHGGSVEQDVYGNVSFYAMKNVTVMFDERPSFGQIFARACEEISCNLNDPSISIEGLLSHVTSGTVVRRLISIASEDDWVKYVKIVKTIVPPCLDXVVVRKLSFSHCNAPVGLSPQMPNACRSEAPLPELPEEVVXVPDAQSASNEFKISRPVRGXVCGSSN

SEQ ID NO: 357166 - protein, 313 aa, Zea mays
  unsure (1)..(313): unsure at all Xaa locations
  Clone ID: MRT4577_88905C.1.pep
MLSLAAHITPLSYSATALTYSNPDPSLPHPQSPPPPAPXASCAPRSLCFRRRRSSRLAAERTRRPTMAAAISLEAGGALAHDLGSAVVTGGVALALLKFFEELAKRGVFEQKLSRKLVHISVGLVFMLFWPLFSSGWYTPFLAALAPGVNIIRMLLLGLGLMKNEAMVKSMSRSGDYRELLKGPLYYAATITFATSLLWRTSPVAIALICNLCAGDGIADVVGRRLGKEKLPYNPNKSYAGSIAMAVAGFLASVGYMHYFHTFGFIEETWYMALSFLVVSVAAALVESHPISTELDDNLTVPLTSFLVGSLIF

SEQ ID NO: 357167 - protein, 36 aa, Zea mays
  Clone ID: MRT4577_88906C.1.pep
KRLMEILRGIFKLHSRSTKCERDKKSYNPFFSRTLY

SEQ ID NO: 357168 - protein, 313 aa, Zea mays
  Clone ID: MRT4577_88907C.1.pep
MAGAHDMVDAQLQEVRGQVDGLAADIRTMHERLDSTITSTTERFNQLDLAQTATRTTLDTILARLDALTTKMEQEYGGDTEQDDGDRRGRARRVVRHPPNDLFSKIKFKIPSFNGKYDPAAYLDWELEVEQKFSCHDIPANSQVKAAISEFTDFALIWWREYKQKLPINSVITWTQLKTAMRHRFVPSYYARDLLNKMQRFQQGSQSVEDYYQELQKGMLRCGLVESDDAAMARFRGGLNREIQDILDYKDYFDITTLFEYACKAEREVQGRRSKTYTNSLAGRGPTHSSTPSSPAPSTPSTTSRTGTTKPVA

SEQ ID NO: 357169 - protein, 139 aa, Zea mays
  Clone ID: MRT4577_88908C.1.pep
LGTSRPAGKTFSFLNSRRWLSGRGSAVVLLLCFLLLHSQMARAATYTVGDSGGWTFNTVAWPKGKLFRAGDTLAFNYSPGTHNVVAVNKAGYDSCKTPRGAKVYKSGTDQIRLAKGQNYFICNYVGHCESGMKIAINAA

SEQ ID NO: 357170 - protein, 63 aa, Zea mays
  Clone ID: MRT4577_88909C.1.pep
GSWRRMANLAWKCASPECARRIILPSHATQKRATDAERRPQNTGELNLPSIQKKVPTYPREMA

SEQ ID NO: 357171 - protein, 101 aa, Zea mays
  Clone ID: MRT4577_8890C.1.pep
MATRAALVAGRRAAGQDGLALLSSGCRREGARPSSPHKSSSATEREGHGDATAAQVEAALNRKNADVVDVDRSGSATLVPADARRGAGVKWVPYQELAFLF

SEQ ID NO: 357172 - protein, 107 aa, Zea mays
  Clone ID: MRT4577_88910C.1.pep
ARGGGKAASSSSASANLCEVCARSLLDNFRFCSLGCKVVGCSPDAAKARNWLLRAADGDGSTTSSSAPRNADRKLSFTPPTPQPTLPTKRRKGIPHRAPFGSLIVEY

SEQ ID NO: 357173 - protein, 106 aa, Zea mays
  Clone ID: MRT4577_88911C.1.pep
QIMIIDYKLTYPSGTATAVLINGFHTTHGDATAKQQVNGFTKYFAISFFWSFFQWFYSGGDNCGFSQFPTFGLRAWKQTFFFDFSLTYVGAGMICSHLVNLSLLLG

SEQ ID NO: 357174 - protein, 49 aa, Zea mays
  Clone ID: MRT4577_88912C.1.pep
ILILFSSSIYLIRQLPNVLQMPERSNVLRYLVGAIAFVRHLAIGVLNKF

SEQ ID NO: 357175 - protein, 139 aa, Zea mays
  unsure (1)..(139): unsure at all Xaa locations
  Clone ID: MRT4577_88913C.1.pep
FEHSKSHHSNHICYNLSTLGARILSLRALIALFASATNAYIIPQCLLAPSSIITQLLQPVTSMGFEHPPVQVYKLQQAIAAMRLQQPISQLQQQLLAHLTIQTIASQQHQLFLPTLSHLAMVKTAAYLQQQXLLASNPL

SEQ ID NO: 357176 - protein, 99 aa, Zea mays
  Clone ID: MRT4577_88914C.1.pep
AVWVAAHCPSSSMCISFVLALLSSCGEYVKQSVLSLSSFQGLFGVRFVFFFPFPSVPFFFLPFLPAGGNPKKFLKNPQKKKEGGRRQCSSSTRVINSGP

SEQ ID NO: 357177 - protein, 64 aa, Zea mays
  Clone ID: MRT4577_88915C.1.pep
WKRKCVTGLFPHYSYKAGVCPYWFIPKTNYTNPSTYENLGTQENVFLNTPLVPIWFIFRVLVPL

SEQ ID NO: 357178 - protein, 45 aa, Zea mays
  Clone ID: MRT4577_88916C.1.pep
YPMRQGSILQNMYKRLLSCDYSRANIVPTRRYNVESPLQPCGLCM

SEQ ID NO: 357179 - protein, 121 aa, Zea mays
  unsure (1)..(121): unsure at all Xaa locations
  Clone ID: MRT4577_88917C.1.pep
TIVTMLNDERKPSALPDNCKVGAXFATGNVLAGYQSLRTDMFFWPAYKTXCWPEICHVKSLEXTAQYDGQNLASAAYLQRITIMQALIFWTRNLSRYCVERHTXILLYAVLDAQLIATLIA

SEQ ID NO: 357180 - protein, 72 aa, Zea mays
  Clone ID: MRT4577_88918C.1.pep
MADGRCCTFLEILFAIILPPLGVFLRFGCCRIEFCICLLLTILGYVPGIIYAIYVLVALDSDQHEREYYTLA

SEQ ID NO: 357181 - protein, 78 aa, Zea mays
  Clone ID: MRT4577_88919C.1.pep
IKVGCEPIPAENYEGFMMDTSSLAIPRAHALCSTLACWRYKRRLSHREDKGREGQTSFILPVVGRSTLAAHRGARVQA

SEQ ID NO: 357182 - protein, 52 aa, Zea mays
  Clone ID: MRT4577_8891C.1.pep
DAMGYPLILLKANQLGEAISFFFTTTYLGPYSNAQYAYSVLSLNKFNRDRFV

SEQ ID NO: 357183 - protein, 42 aa, Zea mays
  Clone ID: MRT4577_88920C.1.pep
KKLGFIPYLPKGTHDHSPGACTYGPKEPDPTNTVNPRRRKKQ

SEQ ID NO: 357184 - protein, 63 aa, Zea mays
  Clone ID: MRT4577_88921C.1.pep
FPMTSRIAHKTVRAMQASPDLCQQSGVKSRSRTASRWASHRGLVRPQIRKRQRRKRERLPNDA

SEQ ID NO: 357185 - protein, 101 aa, Zea mays
  Clone ID: MRT4577_88922C.1.pep
MQFSITTILAFAATAAFAAPLEERQVGLCSSGNPVCCATDVLDLADLDCSPPTVTPAGVNEFIDTCSSVGQQAKCCLIPILGQALICSDVNPTAPAPSAAA

SEQ ID NO: 357186 - protein, 236 aa, Zea mays
  unsure (1)..(236): unsure at all Xaa locations
  Clone ID: MRT4577_88923C.1.pep
SRRKSLLCSPVPVLELTEDVYDDPAALTRTPSLAGSSYLGTQAFXLSKLTLREKNPSSDLSQXLSENYQSCQRPFNADDIDDVKKHXKMMNLTTSEXLSYGGREALGXISSVKXNGTSXIXRCQVXLIPDKDEEKNHAAYMKAAIDILTKVDHPFIVHVKYSFLTKNRLYLVLDLIIGGHLILQIDHQGMXYNQELAPLKAAEIVSAVYHLHANVSMHMDLKPAKILLGADDHAML

SEQ ID NO: 357187 - protein, 58 aa, Zea mays
  Clone ID: MRT4577_88924C.1.pep
FGCINEVCVSIQQVVSFMLNITMSDPPPLRIPPLGFLSGEKSFVIKKKKKKGGAGNRT

SEQ ID NO: 357188 - protein, 106 aa, Zea mays
  Clone ID: MRT4577_88925C.1.pep
PPNKFFIQKLHGGLPVSKKKFCSGMLKKQWGKRGGKKFRGGSIFGLFKTPILARGGTLKLLTLAPIPPPIFLFFLKNGTGGGPKPQLVGTLKAPKTRPQTLFFGPF

SEQ ID NO: 357189 - protein, 133 aa, Zea mays
  unsure (1)..(133): unsure at all Xaa locations
  Clone ID: MRT4577_88926C.1.pep
PAPRGPHPAEAPPQQHGPRRQPHGGREAAPAEAQEEGRDAAPREAAEDQEAEETRRQTDAPPERRAPGGQXDGXXXKKRPXANPQXXXXGKEKNSPQRSQDGXRGHGGXGEQHAEGSGQXAHTAVFCRPPPPP

SEQ ID NO: 357190 - protein, 109 aa, Zea mays
  Clone ID: MRT4577_88927C.1.pep
GFLGGSSWELTPRGLNSAKPGLASRNLPKCGEPPPLYKTQTPWIRGGEFIVYPPQANRTLQINRGPKLLKPKTWTGLPFLFLEKSKWMVPNKHVRCVFKNKTMSAGRSS

SEQ ID NO: 357191 - protein, 45 aa, Zea mays
  Clone ID: MRT4577_88928C.1.pep
CAMHQLSSTIQEVRVPKRSSPCLVKIGLVLAIGDRKEDLRFERSP

SEQ ID NO: 357192 - protein, 77 aa, Zea mays
  Clone ID: MRT4577_88929C.1.pep
YIFPVHWQFGQLDQHPIDGYLSHTELAPLRAPLIPMEHCTTRFFETCDLDNDKYIALEEWAGCFGIKEQDINKDLVI

SEQ ID NO: 357193 - protein, 161 aa, Zea mays
  unsure (1)..(161): unsure at all Xaa locations
  Clone ID: MRT4577_8892C.1.pep
LVITNAGALSLSLAGTAACSRVRPLTEAPLWQARRSSSELPPQEQQRHRAGGXGDATAAQVEAALNRKNADVVDVDRSGSATLVPADARRGAGDEWVPDQETGVFVPADEESSGPGDGGVADVGGARGQAPSVLDQAVFVREEHMEDVERPAVGVDDAGAA

SEQ ID NO: 357194 - protein, 251 aa, Zea mays
  Clone ID: MRT4577_88930C.1.pep
MPKETINNPLEGGLVRLKYTFRFVDQFVESDDDWLESVEATSDELLGAYSKTEDNALSAAFRGRKKKRLNRVFDAIGFVYPDYRYPLRGQKRKGAVSVKEVASAASSEPMPKRKKVKVLTHRPCYIEPAIVSDFGGETSSATEAREPTHLQNIEEPAAMPEMEKIEEPRAEETRTSEVLSPSARVEVSMPKAQKDLTTTPKRKRMINVLDVLETIKSSSSTPKRAAEASKTQIEETETGPSEPAKKKSLEI

SEQ ID NO: 357195 - protein, 273 aa, Zea mays
  Clone ID: MRT4577_88931C.1.pep
FITDELKFKKVVTYRPQAAHDSQVASVKIDIGFAKEAPILGIFGMNVYHKDRLIMPFWKVLQEGSSRGRSVVGVLEANFIEPAHDKQDFERTPLFIRLETRLRQIIIDFWKERCHLIGYQPMDPHLRSQYKATLKESVGPAPVHHKASSVRRTGGLSSNLLPETYDDITTVGLANNGSHLQSSDQAQENNMDSEVLDEDLVEIGSSGVLDPSFIEKLSEENIALFSRREELRQRDTQLKQTIGDLELELEETKKKCGQLAAQLKAWKNQQHLP

SEQ ID NO: 357196 - protein, 71 aa, Zea mays
  Clone ID: MRT4577_88932C.1.pep
KKEVRSACCSAQGMEEPAASTLNVKGNVFVDHRTATKAYLSGASLRPRTRRYTTTTNTDRKPKVTRKHGCI

SEQ ID NO: 357197 - protein, 72 aa, Zea mays
  Clone ID: MRT4577_88933C.1.pep
HTVTVDRDSAYSLVASSSPCTCTSSPGSATLGLHFTCDKADMLVAVHAITQVLANSTYSSASDLAIQFSVQA

SEQ ID NO: 357198 - protein, 223 aa, Zea mays
  Clone ID: MRT4577_88934C.1.pep
HTHASVSFLKYWYSKCSLKTMAETDSESPRRFLRASCSCQWECLKVLSSSSCYLIGLVLTPNESVRCEAHPSNAECILVTVLELNHWGIQWNFVADLQDVSDGITPSPKWVDFQLSDVFLACLNTAGFVAIWNVKTGGLVTSFSVLQQCRTDLEMPLRSSMSIVTNLDEGNIHVENFVGRMFKRLVLASYSYLLAVVDEVGVVYVFYADDILNFKANVHENFD

SEQ ID NO: 357199 - protein, 69 aa, Zea mays
  Clone ID: MRT4577_88935C.1.pep
SSSALVASSRICSRCLRGHPLNRLPAPPRNSKQETPGPLRTIASFPQISSPRPRADLQVLARLGEENKT

SEQ ID NO: 357200 - protein, 98 aa, Zea mays
  Clone ID: MRT4577_88936C.1.pep
ASEGCRTHCRCWRAKGVAVAGLASLVAAVHLVVRGGVGLRASTAAARLGRARCLARAVRGGPWPDAGAATREEEGLAMVSSLALARGWLGPMPKRARP

SEQ ID NO: 357201 - protein, 112 aa, Zea mays
  unsure (1)..(112): unsure at all Xaa locations
  Clone ID: MRT4577_88937C.1.pep
NGSPLVFHLLVRPLLGGAPDAAVXGKPAEQLAKVLDVFEGPLAPNKYLPGGGFTLADANPGSFLFFLSKTPKAGVVPARPPVKAWWEAIFARPAFQKTVAAIPLPPPPSSWG

SEQ ID NO: 357202 - protein, 137 aa, Zea mays
  Clone ID: MRT4577_88938C.1.pep
ETRAGGGLKYRNFFRGRENPNKIGPGGKKGGGGSRIPGNKGLLHLPQEKLKPGGKTFLNGRGGKKTPRFLDGAWTTGIWPTKGGPGLSGGKLYGWKKGGPANMPRSPEKTPGGKNHIPFLGEPFWRGGNRALTRDWG

SEQ ID NO: 357203 - protein, 91 aa, Zea mays
  unsure (1)..(91): unsure at all Xaa locations
  Clone ID: MRT4577_88939C.1.pep
TSSSRPSLSTATGTSSTPTPRSDPSRCSCALTPSRARSTTTTTEARAAGIAVLIIIISTWLLQQLVTSGRPTTNQSICARTYNRIHGELXY

SEQ ID NO: 357204 - protein, 44 aa, Zea mays
  Clone ID: MRT4577_8893C.1.pep
YRICVASNSSNNKKLRLPLHCEISGLLSSFVRVGGRVGRPGLSF

SEQ ID NO: 357205 - protein, 69 aa, Zea mays
  Clone ID: MRT4577_88940C.1.pep
PKKGLFKWDQGLFKTQTPKRPPTRFGFNQAPFFDQFARSMVKITQMKVLPGNPEKVPLNCPVGNPPRVF

SEQ ID NO: 357206 - protein, 60 aa, Zea mays
  Clone ID: MRT4577_88941C.1.pep
GGRSRPCRSKRAGFGFLGPGPSSRKVRVCAQMAKSMSSLGRIALLGTSPLSAISFSHSAE

SEQ ID NO: 357207 - protein, 52 aa, Zea mays
  Clone ID: MRT4577_88942C.1.pep
PEPAGHPSVHKQSTMLARQNTCELGERWVEGYSLEIERHSIRETYKVQNDDA

SEQ ID NO: 357208 - protein, 59 aa, Zea mays
  Clone ID: MRT4577_88943C.1.pep
GSASTRSHPLESAGARSHPLGSASTDTPPLGSALVRTSAGTSSQTGAEGPASWSKHDSR

SEQ ID NO: 357209 - protein, 114 aa, Zea mays
  unsure (1)..(114): unsure at all Xaa locations
  Clone ID: MRT4577_88944C.1.pep
DNNTTPENAPGGIKKGKQGGPHDAIQNPPKQADTKKXATHLQKRKQAKEAQAQAQAQARQEQDDQPEPEQQQDPNTQPAHDKAGNRGRKRPPNATNGTTDGGHKRNDEATEEDG

SEQ ID NO: 357210 - protein, 76 aa, Zea mays
  unsure (1)..(76): unsure at all Xaa locations
  Clone ID: MRT4577_88945C.1.pep
SKDPTIHPPVYFHPREQNKASYTKRGWVVTLTFLDLPENATFTHTSRGSGXQPPPSVHLPTTMHMPPTVYLPPPEH

SEQ ID NO: 357211 - protein, 54 aa, Zea mays
  unsure (1)..(54): unsure at all Xaa locations
  Clone ID: MRT4577_88946C.1.pep
MGCDYKCGCAVPCPGGKDCRCTSGSGCHREHTTCCFWEHCXVSPCTCGLATMPF

SEQ ID NO: 357212 - protein, 54 aa, Zea mays
  Clone ID: MRT4577_88947C.1.pep
ASILVRTCRSMLCSVHRVEDGNVFLICSECPQVHGVSHRLREHFVQIRSDRSCR

SEQ ID NO: 357213 - protein, 67 aa, Zea mays
  Clone ID: MRT4577_88948C.1.pep
SLRVQTSGCKSAGVKVFSAGASSSSTTVVVWTLPLAIGGYDKVYGFTNEFRVFLEPRANKKLRLSKG

SEQ ID NO: 357214 - protein, 69 aa, Zea mays
  Clone ID: MRT4577_88949C.1.pep
SLYILYLKPGEIKPEYTATVTEPHLCKHYKGWLGLVSIHGNGHISDRTTSPWEVSLTENFYYLFNHQNR

SEQ ID NO: 357215 - protein, 66 aa, Zea mays
  Clone ID: MRT4577_8894C.1.pep
LPPSFCTPRSMHVNYVLPSVFKKDLCNGVRFFVHWGRRFDFISSVKRNQLFHSNTCKCNLKFSSAP

SEQ ID NO: 357216 - protein, 200 aa, Zea mays
  Clone ID: MRT4577_88951C.1.pep
MDESEEHSNGGGHPHPHHGYEWKFPAALSANTTSVHVTALDGVVNVNSLFTVAVFVGLSLATPGQLRSLAGDPRCDAGPGVARSLLVLEVVAFSSFLFSSLVAQGLKLALNLINSKDPHDAARAHIDARVLRLGMLASAVGSVVGCVFLMTSMVMVVQVRLGTLSCPTDRAAAKAAAGLVGLVTTALAFYVGTVFYTFTH

SEQ ID NO: 357217 - protein, 212 aa, Zea mays
  Clone ID: MRT4577_88952C.1.pep
MKEPNVSCPVSIHPRSEEHSNGGGHPHPHHGYEWKFPAALSANTTSVHVTALDGVVNVNSLFTVAVFVGLSLATPGQLRSLAGDPRCDAGPGVARSLLVLEVVAFSSFLFSSLVAQGLKLALNLINSKDPHDAARAHIDARVLRLGMLASAVGSVVGCVFLMTSMVMVVQVRLGTLSCPTDRAAAKAAAGLVGLVTTALAFYVGTVFYTFTH

SEQ ID NO: 357218 - protein, 155 aa, Zea mays
  Clone ID: MRT4577_88953C.1.pep
GGRYAPLWVGLCGSPHPTPQAQGLVVGVSGRGPFSHPPSPPALAFSFLFLAPRVSLLVCGLGARPYSCSFSFFFAPPVFALFFSGYFFGWYCEWKPISLTHWLRPCLRPGWPRGWAPFRCPPVRRSWPLPTPPRAGKKKKKKKKKKKKKKKKKKA

SEQ ID NO: 357219 - protein, 116 aa, Zea mays
  unsure (1)..(116): unsure at all Xaa locations
  Clone ID: MRT4577_88954C.1.pep
GSRPAPSAPQEECPPICKLPXLXXANCAGGRTRSGLVPLPPPPPLLRAYPLQNNQTEPTTDAGIVLLLRSYHCSEKMDAAAHTADLDKPLAFQVGQPEEHNQERVHQPIVSKERPR

SEQ ID NO: 357220 - protein, 39 aa, Zea mays
  Clone ID: MRT4577_88955C.1.pep
KSHKKKKNKKKKKKKKKKKKKKKKKKKKKKKEKKKKKSG

SEQ ID NO: 357221 - protein, 41 aa, Zea mays
  Clone ID: MRT4577_88956C.1.pep
EASCHTPEIRVRLLLRTMCLVTYFSKIISLPGNQSSLVYLS

SEQ ID NO: 357222 - protein, 52 aa, Zea mays
  Clone ID: MRT4577_88957C.1.pep
WQPVLIHIRHVRCELEEVPLAQLSWHSGYDCVAGYLFKDRKPPLCMQPTATG

SEQ ID NO: 357223 - protein, 64 aa, Zea mays
  Clone ID: MRT4577_88958C.1.pep
GSASQASRLLTRSTARHCFHSGCSTDARSHWSAHACYSASWRNIGFEHSNICWDVSRFYMTLRC

SEQ ID NO: 357224 - protein, 451 aa, Zea mays
  unsure (1)..(451): unsure at all Xaa locations
  Clone ID: MRT4577_88959C.1.pep
MGEGEAEVKGGVLQGRYELGRVLGHGNFGRVHAARDLRTGRAVAVKVLDKDKMLRTGMMEQIKREIAVMKRVSHPNIVELHEVMATRSKIYLALELVRGGELFARIVRAGRVKEDVARRYFRQLIHAVDFCHARGXVYHRDLKLENLLLDDAGNPQVVDFGLSALGRHARSDGLLHTLCGTPGYVAPEVFRNKGYDGAKADIWSCGVILYVLLAGSLPFPDDNVAAMFRKMSRGDYRCPPWLSTEARRLIPKLLDPDPDTRITIAQLVETPWFNKPSVSRSVRAAAAASGATEPPAEXLLRKGRXDKDEPPETMNAFHLISLSAGFDLSPLFDVEGGPARGPREGGMRFATREPASGVVSRLEEVAARGGGRMRVTKSGARGVRLEGAERGGRKGRLAVAADIFCVAPSVLVVDVKKDGGDSLEYRSFCSEELRPALKDIVWAADPQPAVV

SEQ ID NO: 357225 - protein, 45 aa, Zea mays
  Clone ID: MRT4577_8895C.1.pep
PTQSICFDERWVISHHTPDLALVHARACLEIMVTQTDTPMTYHEQ

SEQ ID NO: 357226 - protein, 87 aa, Zea mays
  unsure (1)..(87): unsure at all Xaa locations
  Clone ID: MRT4577_88960C.1.pep
YFFFFFFFFLGTVNVGTLYASLATXKKEGHNKRGQRGLFTQGEQNKQAKNTACQEERSVAGNQVAEEAVVHCQPDSRAGRKKPKRGG

SEQ ID NO: 357227 - protein, 190 aa, Zea mays
  Clone ID: MRT4577_88961C.1.pep
MSGAIAELLKESGATDIWICDSKGIVGKHRTDLNSKKQSFAVDAEGTLADAMAGADVFLGVSAPGVVTKEMVQSMAKDPIVFAMANPIPEIQPELIQEDAAVIATGRSDYPNQINNVLAFPGVFRGAIDCRASIITTTMCIEAAKAIASLVHSNTLDSEHIIPSVFDNRVATTVASAVQLAARNEGVAGQ

SEQ ID NO: 357228 - protein, 48 aa, Zea mays
  Clone ID: MRT4577_88962C.1.pep
FWKVRQLQCSVTWRWCLHVSEAAFCRPDVCSPTYAWLRAVPQVSFELT

SEQ ID NO: 357229 - protein, 141 aa, Zea mays
  unsure (1)..(141): unsure at all Xaa locations
  Clone ID: MRT4577_88963C.1.pep
YTSKRVSMTFGVLIGITCLGAHCSFGVHISKVASVNLDEGANEQDDILADLRGNAXACNMIYEAFAPEKYSKPKEDXSEHERSDFIWRKYXIKXLLFKTKFSCPSLLTVKHIHQQQSSSVSLHGLCHLFRICWWRNERDAK

SEQ ID NO: 357230 - protein, 108 aa, Zea mays
  Clone ID: MRT4577_88964C.1.pep
SILHANVLYLLPAYGTTGLNGKLPKADALTTTPKISDMVLLASILLDTYTKSFTPSQTLLLLYPTRWPLKLTLRYMFSLITQMLSRIPTLSLSIYTNPLVTLLTIFIE

SEQ ID NO: 357231 - protein, 64 aa, Zea mays
  Clone ID: MRT4577_88965C.1.pep
YKIRTSSNARVFNIAYSRRLNRSVGDLVFRITFHVDVFIYIHIHSHAFDSARTLTQHSVQTSSI

SEQ ID NO: 357232 - protein, 195 aa, Zea mays
  Clone ID: MRT4577_88966C.1.pep
SRSSCIFLRWRLGPKRLQNQLIQPTTAEEEIQLSQPPNLEDKTVEELLNIDPDMFPEEGCTVTISSIVQNSRWWYPSCSRCHKSSSQTSTGYHCTSCGCTDIKFRYKLSFIATDGTCEAEFFCFDSIARKIVGEPWGNLVTAVTTSESPSSPSRYCVSEIYSCSCHQYVSLLCHEQSILYSIYFNKSWKTDLHTI

SEQ ID NO: 357233 - protein, 46 aa, Zea mays
  unsure (1)..(46): unsure at all Xaa locations
  Clone ID: MRT4577_88967C.1.pep
MTTMAPKTEDDIMKEKNPRTLXEDNIALLKTYGLRANSTSIKKVEK

SEQ ID NO: 357234 - protein, 119 aa, Zea mays
  Clone ID: MRT4577_88968C.1.pep
AVSACIDCLLSLFFNCSAHACSTRKSSPAQTCMHRFDCVQVQRAYPVKGVAVFAHADPLVHQNGERVQACAPKKLLGCMPGRRSNHHSFTHSDGSHKFLTQSSRVVMDEPVACNRSPGR

SEQ ID NO: 357235 - protein, 195 aa, Zea mays
  Clone ID: MRT4577_88969C.1.pep
IAGIPEAHTYYNRLQNNDLQLIQPTTAEEEIQLSQPPNLEDKTVEELLNIDPDMFPEEGCTVTISSIVQNSRWWYPSCSRCHKSSSQTSTGYHCTSCGCTNIKFRYKLSFIATDGTCEAEFFCFDSIARKIVGEPWGNLVTAVTTSESPSSPSRYCVSEIYSCSCHQYVSLLCHEQSILYSIYFNKSWKTDLHTI

SEQ ID NO: 357236 - protein, 176 aa, Zea mays
  unsure (1)..(176): unsure at all Xaa locations
  Clone ID: MRT4577_8896C.1.pep
IVFQESGANFYTPAPVSLSNELVTVWDPELGRTNPSEHKQLKLARSLTRGIVDRDLKPSSNERKLLQTIIKFPPTRTLEVDEKQLVWKXFRFSLMSEKKALTKFVRSVDWSDNQEAKQAVELIGKWEMIDVADALKLFLPEFERXRIRGYAVAYLXRADDEXLQCYYFXVVQALWL

SEQ ID NO: 357237 - protein, 235 aa, Zea mays
  Clone ID: MRT4577_88970C.1.pep
RDISLHPSGVPSSPSLSRLFSSLLFFVTVGVGNSASAQILRLLSACSTVLFVWLQNNDLQLIQPTTAEEEIQLSQPPNLEDKTVEELLNIDPDMFPEEGCTVTISSIVQNSRWWYPSCSRCHKSSSQTSTGYHCTSCGCTNIKFRYKLSFIATDGTCEAEFFCFDSIARKIVGEPWGNLVTAVTTSESPSSPSRYCVSEIYSCSCHQYVSLLCHEQSILYSIYFNKSWKTDLHTI

SEQ ID NO: 357238 - protein, 58 aa, Zea mays
  Clone ID: MRT4577_88971C.1.pep
SKSDGAPDRCAKSKHHFGGDDISCLLSSLMRCHHPLCHVAYLNILEHVIVPRFFRCYR

SEQ ID NO: 357239 - protein, 39 aa, Zea mays
  Clone ID: MRT4577_88972C.1.pep
CTSTEMANTIGQSVNHESMITFKLNPCFTLTCTTLNRNM

SEQ ID NO: 357240 - protein, 195 aa, Zea mays; identical to SEQ ID NO: 357235
  Clone ID: MRT4577_88973C.1.pep

SEQ ID NO: 357241 - protein, 92 aa, Zea mays
  Clone ID: MRT4577_88974C.1.pep
VLVFLGSVHHVGAGLAGIHDGSRLHGSPYGCLGQFARHSFSPLSGLLRFPVSHLPPAASTSSSPCRRPPISAWRCCLLIRALTALEPNSELT

SEQ ID NO: 357242 - protein, 193 aa, Zea mays
  Clone ID: MRT4577_88975C.1.pep
GRYLRSQAQHFCTSLTGDSITSSTSMTSLAASRSNSLSTAGKEPMAAGVSRRASLSSDAGGLPLDLLTSMADSNGQISAAVMERLTAATAAEPYDSVKHAFVSYGSCITDLGESWKYRSRLWYGVGIPPKSDIFGGGGSGWESWRSILEKDSNGIWIEFPLVKKSVAVLQALLLDESGLGGGLGIGGGSGPGM

SEQ ID NO: 357243 - protein, 49 aa, Zea mays
  unsure (1)..(49): unsure at all Xaa locations
  Clone ID: MRT4577_88976C.1.pep
REVELXWITHPSLLDLTREADEEAFFAGERKGEKELGQGRSKTATRKIY

SEQ ID NO: 357244 - protein, 151 aa, Zea mays
  unsure (1)..(151): unsure at all Xaa locations
  Clone ID: MRT4577_88977C.1.pep
NPAAYLQQQLLASNPLALANVVANQPHLQLQQFLPALSHLAMVNPSAFLQQQPLLSSSPXLPGPNALSFLHQQLFPPIXPSGTQPSWPNPSAPLPHLLPFXHLPMPPPPATLPSGRPFLYPLPVANPLVTAFLQQHQLLPYNPPSFLKNVM

SEQ ID NO: 357245 - protein, 684 aa, Zea mays
  Clone ID: MRT4577_88978C.1.pep
MSQDKKTVAETKLTEEEKLLEEKTAGFVESIAKTNTEKITKEILEGLSEDTDDSDNYDVESGGKDSEDRPWRPSHAVFGKSTIKQSHLDNMRGSFVARSGASYPVPTFRKRWSGAWMEEWFYVKNDLKVREDIKEIIMRPIWSRFGLRKLKVEIDEATEACRRAFGTVCSFIGTRDLLQEHIAYRIWPLIDSWEMPKETIVNPSEGGLVRLKYTFKLGDKFVEPNDDWVKCIENTSDELLGTYSKTEDNALYAAFGSRKKKRLNRKRKGTTSGKVAASAAPDEPAPKSKKLKVLTHRPRYIEPAVVPEFGGETSSTAKPKEPISPTQKAENPAVMPKVPSAELAEPKTDKTEEPRIGGTKILEVLSPSAKVTVPKAQKGLAATPKRKRMASVLDVLESVKASSSIPSWKIAEASKMQIEAETKPAEVEAAVSQASAEARPSKPAEKKPSEIEEKATEEEAIEQTLPEKVVAPAPKALKESIEYIIHHASGKRLSKEEEREAQHYSQKLKYPKGALVFNGSEEEDFLYCLPDSKDISVCWEMVRSFGFPTLEDGLSVLSKDELADSLAYNSIKQCPQGTEKYRRRRMHNSSEQPSLGIAELRASKERCFEKSVECVKKIKASFANVGAYSNEDNFIRGDPEGVIEWISGEAEAFEEILSDRGDRLCIFWCERGCSRFGEGSLRTR

SEQ ID NO: 357246 - protein, 96 aa, Zea mays
  Clone ID: MRT4577_88979C.1.pep
MVGTKQTVGKSTEGKVPRKQFATKVARRFAPTTGGGKKLNRYRPETVAFRGIRRFKKSTELLIRKLPFQRLVREIAQDLKTDLRFQSHAGLALQEA

SEQ ID NO: 357247 - protein, 84 aa, Zea mays
  unsure (1)..(84): unsure at all Xaa locations
  Clone ID: MRT4577_8897C.1.pep
HASGALCSASTSTLSPVASLQPAWTTTSRSWRYCRMARTASVCDLGNSVFINHXTSSKEYNLKPIGDAGPVTEAGGIFAYARKT

SEQ ID NO: 357248 - protein, 113 aa, Zea mays
  unsure (1)..(113): unsure at all Xaa locations
  Clone ID: MRT4577_88980C.1.pep
MAAEGWLRPAAEVXNCPACSSGLPLIPPATSGPVTDAQTLXVSPELGAGGGPAMELMGVPKKKVSKYKKGLRKGPKALKPVPAIVRCMCCCRMKLPHSYSCSGERGNSSESNS

SEQ ID NO: 357249 - protein, 66 aa, Zea mays
  Clone ID: MRT4577_88981C.1.pep
IQNITMITTSGAFPYTLSFVTDSFTTSTAPTNAATHINSAAQGSSSQIFNSGVAKNVEQPSGWSGY

SEQ ID NO: 357250 - protein, 115 aa, Zea mays
  Clone ID: MRT4577_88982C.1.pep
ITGCDDCDRLERRCPAPYYKGAIEHLFLFTPPHYPIRSISHRVEHHRTVGLSSPTSGGDLGHPPRRAAYLLQGMHTGQRWTPPQIRLNARIEPHDRDDITSFATRSCATHRLTNL

SEQ ID NO: 357251 - protein, 140 aa, Zea mays
  Clone ID: MRT4577_88983C.1.pep
TGASAEVLTQIKELPSGATEMVQFNWLLLIGSVIISTFIKSLNRLEGENILPPRCYKRQHAGVPLGEEENGRQGGACPPGSAAAPVAWLPNPEPFRITRAGARGLVASRVAMGRMTRGREGGELLRLRAVGGVGPVAPSR

SEQ ID NO: 357252 - protein, 69 aa, Zea mays
  Clone ID: MRT4577_88984C.1.pep
GLGPMYGGRVKGRARPKCLCLFLMGFLTHQSRALVARVRAGSQVVREQISSEIEDDPCACRCEQNSQIK

SEQ ID NO: 357253 - protein, 41 aa, Zea mays
  Clone ID: MRT4577_88985C.1.pep
APTKNNEGVYKREKVQCNIRYSPIHTSKLGIFKIFQQDELY

SEQ ID NO: 357254 - protein, 54 aa, Zea mays
  Clone ID: MRT4577_88986C.1.pep
PQMRESMGSQSSRTRVCKVECDTDPSYGTASGLYDCAASVDEAVNDSTLTYSRR

SEQ ID NO: 357255 - protein, 221 aa, Zea mays
  unsure (1)..(221): unsure at all Xaa locations
  Clone ID: MRT4577_88987C.1.pep
MASAKSSRSRPAGHSGVFPVNAAAGAGGSDGGVQLADKLKIFKTDNFDPDAYVQSKCRAMDEKEIRHLCSYLQDLKKASAEEMRRSVYANYAAFIKTSKEISDLEGELLSVRNLLSTQSALIHGLSEGVQIDSLTTGPEGSAEQDISSVEDQEPSEIWKWSTDFPDMLDVLLAERRVDEALDALDEAERIAADAKQKGTLSTTDILALKXGISENRQKLAD

SEQ ID NO: 357256 - protein, 89 aa, Zea mays
  Clone ID: MRT4577_88988C.1.pep
SHLGSSVLDTCLQDIVDRRLHSFSPQALQCLRIAPNTVSQISSPPSLPAEEGKRHVKIILIPRISSPSVENRNHTMTRMEDAATSSGED

SEQ ID NO: 357257 - protein, 110 aa, Zea mays
  unsure (1)..(110): unsure at all Xaa locations
  Clone ID: MRT4577_88989C.1.pep
RXRRQRVRSPQPRSRTAVTFSGLMAXTPADAGRICVSVSDGLNLTGGLNLARQPVSRGSPRRTDYCGTCPVCFKVQCDLLGTNLACPGNLTLSLLRMALHPAHTLDLSLK

SEQ ID NO: 357258 - protein, 79 aa, Zea mays
  unsure (1)..(79): unsure at all Xaa locations
  Clone ID: MRT4577_8898C.1.pep
FFFFSFLFFFLSIKWQNINLSQNWRXPMKSLSSKMXIKLSSLDRTVNXRNSSELTALSLNFTPLHLTMESEVEAMQSTP

SEQ ID NO: 357259 - protein, 113 aa, Zea mays
  Clone ID: MRT4577_88990C.1.pep
EHRTPRCSAFHSSAARLTKQTGAILLIPSEAIQVEQALIVKIPILSNIFFLTKQTGHGTSPYRSCQAVPKHPESGTDSPAMPAMELVAGAVSPKLAAANLVAGPDDWGLGVAL

SEQ ID NO: 357260 - protein, 54 aa, Zea mays
  Clone ID: MRT4577_88991C.1.pep
RRSVSELHSALSKNMIEQKSCTSLPENRQRSKLFIRQEHIRMPRADINRRILCY

SEQ ID NO: 357261 - protein, 107 aa, Zea mays
  Clone ID: MRT4577_88992C.1.pep
MRSLIAIYLMDKHDGKHIKKNILSWASFSGGGCVLDLFRTRLDPTMVEALVCTKDWIDGARKGSKAKCVAIPDMVCEMEELEAIAINLSLEDEDLDDDHDEGPKASL

SEQ ID NO: 357262 - protein, 129 aa, Zea mays
  unsure (1)..(129): unsure at all Xaa locations
  Clone ID: MRT4577_88993C.1.pep
HSSSSTSXPASNQSPKLSHGASXASSTSRSTTCSSSTAMAPTTRASASAWSPERSPSGPSSSSPPCSSTSSRRSRTRLPSAGRSTSSSSTAQXASCSSSWPSTATAAPPAEASRPTTRCTAAGYTVVQN

SEQ ID NO: 357263 - protein, 94 aa, Zea mays
  unsure (1)..(94): unsure at all Xaa locations
  Clone ID: MRT4577_88995C.1.pep
MRNSMRERIWLHIVQAGIQGXEPCWVLHCLEDGGQADGDMTGDGSNEGGDDAFSATVSETDAGKDVLGAVEADVVPNVRTEAXTETYRQVQHTE

SEQ ID NO: 357264 - protein, 114 aa, Zea mays
  unsure (1)..(114): unsure at all Xaa locations
  Clone ID: MRT4577_88996C.1.pep
PVEIAWLVAGPGFFGAAGMNWTTLPPKVTSNVVAGANPLKAKAAFASLRQLNLTXPLPFGFVKERLEFLDVDKCECKSTLVEGGGNRVAIETAXSHVKVSPXAGGGLLVKWTRV

SEQ ID NO: 357265 - protein, 208 aa, Zea mays
  Clone ID: MRT4577_88997C.1.pep
ILSRRAHPSHLSAAPLSQSVTRLLFLPSAGLILSLSLRGETGGERGKKRNRNQPVLFAWIAVLASCSETLGQFLIRNALEMIQRGENVRLESIFYGGLDIHDRHRDMRLDIDNMSYEELLALEERIGNVSTGLSEEAVIKLLKQRKFSSWRLKASLDPEPCCICQEEYVDGDDLGRLDCGHDFHAGCIKQWLVVKNVCPICKNTALKA

SEQ ID NO: 357266 - protein, 338 aa, Zea mays
  Clone ID: MRT4577_88999C.1.pep
TRPVIRPKARVRDKPPHFQSAFDDTQEVIPVVSSLNLQYQHPVNVSSVPPAANRFTGHGASSSRAGSLENRILGSEEVPRRYAAPANYSDLVPPPAVDPRRLVPEPSNWSSDVRGTAISGSIIPPVSRTNNSATVNPPAGFNHQNLTRRHPRNLSEEIGRLSGALRGHQPPRLRSGFLLERQGDGVWGVPLSTRGREGRRLMEIRNALEMIHRGENVRLESIFYGGLDIHDRHRDMRLDIDNMSYEELLALEERIGNVSTGLSEEAVIKLLKQRKFSSWRLKASLDPEPCCICQEEYADGDDLGRLDCGHDFHAGCIKQWLVVKNVCPICKSTALKKT

SEQ ID NO: 357267 - protein, 74 aa, Zea mays
  Clone ID: MRT4577_8899C.1.pep
QWASHNTGNKLQWEMISQEAWAYVYTCIAEMQRSHWPYLLLGVGVVFFIFDPAPTVSGTHGRALRSVTSGAAER

SEQ ID NO: 357268 - protein, 114 aa, Zea mays; identical to SEQ ID NO: 356832
  Clone ID: MRT4577_889C.1.pep

SEQ ID NO: 357269 - protein, 135 aa, Zea mays
  Clone ID: MRT4577_88C.1.pep
GAARGVGEVPRGEHGEPRTPRHRRCHPPRRRIRSFPHGRPRGGCRVALDSWNRAELWEDRKREYSTRLFVQASTRCPLPLPCLKQARRRRAHSRTRTRSWRHDDGIVWVCVLNHIYVTVVNHTVVNINRRTVQLL

SEQ ID NO: 357270 - protein, 190 aa, Zea mays
  Clone ID: MRT4577_89000C.1.pep
EIGRLSGALRGHQPPRLRSGFLLERQGDGVWGVPLSTRGREGRRLMEIRNALEMIQRGENVRLESIFYGGLDIHDRHRDMRLDIDNMSYEELLALEERIGNVSTGLSEEAVIKLLKQRKFSSWRLKASLDPEPCCICQVFSVLHSFSKLCAFFSSVGHDVSFTYINHIELLKNVHFVVSNYVHWAFSWFT

SEQ ID NO: 357271 - protein, 64 aa, Zea mays
  Clone ID: MRT4577_89001C.1.pep
QPIATTPTRISHITSALSVSKKESPTTHTHTHTHTQKYFFFFLLETNERIPLIIIWIMNHDIHM

SEQ ID NO: 357272 - protein, 58 aa, Zea mays
  Clone ID: MRT4577_89002C.1.pep
KKHKRVRLWTGKPHNVWHFHLCWDRNVLFRPLYWFSAKHMNHGILKNQIFPQPRKAAS

SEQ ID NO: 357273 - protein, 71 aa, Zea mays
  unsure (1)..(71): unsure at all Xaa locations
  Clone ID: MRT4577_89003C.1.pep
LVRDHQAGTXTPSVAAAAAPAPAPAPRPSIYPPMGALRDEECANLLALLXTGCVPLEDAVADLHSTRAPRS

SEQ ID NO: 357274 - protein, 75 aa, Zea mays
  Clone ID: MRT4577_89004C.1.pep
DAAAEREEYLTLEQQEYRQQVDMLKKQLVESKAARTARVNRKPIGMDSDSSSDSSSDEEDDNTDFAVDWRAQHLK

SEQ ID NO: 357275 - protein, 44 aa, Zea mays
  Clone ID: MRT4577_89005C.1.pep
MAGRIVECSWNKEEKLWACVRIRSDKSTPNDINTYRKVMSIYHG

SEQ ID NO: 357276 - protein, 105 aa, Zea mays
  Clone ID: MRT4577_89006C.1.pep
PTRPPTRPPTRPEIQEDLQEVDDRLEEEEIDAAAEREEYLTLEQQEYRQQVDMLKKQLVESKAARTARVNRKPIGMDSDSSSDSSSDEEDDNTDFAVDWRAQHLK

SEQ ID NO: 357277 - protein, 58 aa, Zea mays
  Clone ID: MRT4577_89007C.1.pep
KTHKPKKQKKIKKKNERKKKSVNTNKNNTHKAMTSTLLTLYFSIIRPNSTYLASLLQI

SEQ ID NO: 357278 - protein, 47 aa, Zea mays
  Clone ID: MRT4577_89008C.1.pep
CLNPRTSHLFNYNHPHFLLQCHSNKKVRQYKQGAQPSLNTKINVPKI

SEQ ID NO: 357279 - protein, 47 aa, Zea mays
  Clone ID: MRT4577_89009C.1.pep
RREKRATMGVDLRWSGAVISAETYTGDEGRLRGKEERRRPANLRLND

SEQ ID NO: 357280 - protein, 64 aa, Zea mays
  unsure (1)..(64): unsure at all Xaa locations
  Clone ID: MRT4577_8900C.1.pep
FSSKGFFSGFVAYLLGPPFFRHXVSFRKARGSLWWGKFRLFRANTKNEGFFSPPFNLKKFFPPV

SEQ ID NO: 357281 - protein, 135 aa, Zea mays
  Clone ID: MRT4577_89010C.1.pep
IRPRQPAIGSSPTPRQTTARFILNPRRTRASVDTHRGYIHPRPAADARFRFIPNLRRTRDSSRRSPLLQPYDGSRLPVPLLILPHPSLKRPHYTRFVFGSTIDALRLSTKISSHKKVDSAQNMKHVDRPRLILSV

SEQ ID NO: 357282 - protein, 209 aa, Zea mays
  Clone ID: MRT4577_89011C.1.pep
GNSNIASGELILFPYCANQEDLATYQRWTTRDTVAVADVFLSVNSPSVFRLRYGWFSLVELGAGVSDISLTHFEDCMRPEVIQVKSPSGDKACVQKDGTLLSNCTHESYPCSSMLLHMTPSSTGKNSELPDQPANVPPSQFGSQKQAHVPITQAFEDDQGMNCVAISAVEWADTLTNISFGHLLTEASKGTHLDCGGTSPPGSKKVQTL

SEQ ID NO: 357283 - protein, 173 aa, Zea mays
  unsure (1)..(173): unsure at all Xaa locations
  Clone ID: MRT4577_89012C.1.pep
DAENFIFIDTANDQYRAGYGGARTTPRRERKLGARDHPANSEDLPEAADWRDNGAAAEDKDQGGSGSGRALSTKAAAEGSSQSATGXLXSSPEQERADCDTPYKQGCNEGRTDQASETITNKGGIDTEKDDPHKGTDGRXDGNTKNAKGATIDSREEEPASEDKSLNEGRGPP

SEQ ID NO: 357284 - protein, 180 aa, Zea mays
  Clone ID: MRT4577_89013C.1.pep
MADTSLFVFRRGLDMAYLLLYVDDIVLTTSSHDLLRRIISSLQQEFAMKDLGELHHFSGITVERRSQGLFLHQRQYTVDILEHAGMADWLGFQFLSHMTPSSTGKNSELPDEPANVPPSQFGSQKQAHVPITQAFEDDQGMNCVAISAVEWADTLTNISFGHLLTEASKGTQVWTAEELV

SEQ ID NO: 357285 - protein, 85 aa, Zea mays
  Clone ID: MRT4577_89014C.1.pep
GHLVEHVQDHQSVEEVTWYMLSRHAYWGQLAVHFLALQGCGRTEYTALCAKTFSTIHQRDTTRREQWYRQRIDMSGEHFPGRLRG

SEQ ID NO: 357286 - protein, 126 aa, Zea mays
  unsure (1)..(126): unsure at all Xaa locations
  Clone ID: MRT4577_89015C.1.pep
WPLAPPPQQLVAAAALAAVLLLLAAGAGTASAAVSCGEETSAEKTRLGNTMGSAETPSTACCNEVRSLNSXASDSADRHATCNCLKSMTDRLGGADNMCNDSNIPGNCGAPDTVPIRPTVNCTKIN

SEQ ID NO: 357287 - protein, 64 aa, Zea mays
  Clone ID: MRT4577_89016C.1.pep
KQTVFARYSILALHISKYEYRPSPLFGRKYLLNLCFCSTLSPKCAQTILDHISQTKGLVRCLPG

SEQ ID NO: 357288 - protein, 85 aa, Zea mays
  Clone ID: MRT4577_89017C.1.pep
MLKNKQSMPVNIRASMQQQQQQASARNRRLAQQMENRPSVQAALKLKQKSLKQRLGKSNIQARLGRPIGALARGAIGGRSLPIIQ

SEQ ID NO: 357289 - protein, 85 aa, Zea mays
  Clone ID: MRT4577_89018C.1.pep
DQHSLARTTTGNAKKKRDRPQPVRKKKKKLGNWRQRTQVTEFHPKRGFELKQINFGTGAFDSDRSQKFLRGFYWAHKGNIELWVN

SEQ ID NO: 357290 - protein, 249 aa, Zea mays
  unsure (1)..(249): unsure at all Xaa locations
  Clone ID: MRT4577_89019C.1.pep
MPPKKAIAPVAAIAPLDINQEGLPLREARNQKRKAISPTPQEEGLDQEIRDLEAIHQHVERKREKMLWLAELQKKIDEATKEMRHITQDWQGQRLHQREFRQESPSYDDVWYDDFHHSNFAFDDASPLAAELAQAPMVPNEIVIEAMIKGLRPRPTAQYFARKPPQTLEKLMQKMDEYIRTDNAFRQRREEVYRYSKMTRGFXGILHPRHVRTIHNPSSSDNKGNQTQGHQHNSQSSGTQKSSFRPPAL

SEQ ID NO: 357291 - protein, 224 aa, Zea mays
  Clone ID: MRT4577_8901C.1.pep
MNQFAPQQSSLAMDSGESSAASNAAHAAMAVDYAPEVAGCVSSMVDLGGAAGVESQRLFLARRTALEMLRDRGYSVPEDELARTLPEFRAWWSETPEIERLSFSTTLASDESNEVRIVFCPPEPVKIAAIREVYVRIKEENLSCLILILQSKITSRARESIKEMFKFKVDVFQITELLVNITKHVLKPKHEVLTAEEKAKLLKQYNVVDSQLPRMLETDEVARY

SEQ ID NO: 357292 - protein, 73 aa, Zea mays
  Clone ID: MRT4577_89020C.1.pep
SNPTSISQDLILKRSFSTSGRQHLLRENRSGLQSIRPFYNKSRNIILTPQHRKGFEINRIQYLRRYNDPRCRL

SEQ ID NO: 357293 - protein, 77 aa, Zea mays
  Clone ID: MRT4577_89021C.1.pep
GVERRKDDQAKFQLLFRWGRITILKVSILCSSSSIFPCNQSQMTVNDPKLEKLFCKKNYSTTSFKRKRKGCIPGCIE

SEQ ID NO: 357294 - protein, 71 aa, Zea mays
  unsure (1)..(71): unsure at all Xaa locations
  Clone ID: MRT4577_89022C.1.pep
KKKKFXXNPXXLRGIFQLEYPGVLLSLLFPVCEESPQLRASRPYNEIITKKHRCKSGKSNNKPQSTSTNKG

SEQ ID NO: 357295 - protein, 121 aa, Zea mays
  Clone ID: MRT4577_89023C.1.pep
MEYRRVKDQESYDAISQKDIESPDGRSLSSTAATSPLGTAGGSKGKNSWKQKSIVTIALTLLTSSQAILIVWSKRAGKYEYSVTTANFSVEALKCLLSLLALYRTWNSQGVTEDNRLSTSF

SEQ ID NO: 357296 - protein, 204 aa, Zea mays
  Clone ID: MRT4577_89024C.1.pep
MEGRAEAQPFLLTLLLVLSTAVTPILSLSVPDDEGARDRDKPKGPKPADPAKTKPFHPAAKPKNPKPPKGGTGYPAPGHQPAKSPFYPPGGGPSKGPGTRPAVTRSAVGGPSKGPGTRPAVTRSAVGGPPVTYPAITGPSTTPAGGGPPVTYPAVTGPSTTPAGGGPPVAYPPVTGPPATTPPVTGPAVTYPPGGGGGRLTPGP

SEQ ID NO: 357297 - protein, 1850 aa, Zea mays
  Clone ID: MRT4577_89025C.1.pep
MAHRTVRCTPDMSGAPATSSVPLEYDRWSSDLWATPDVRWRTGQLLFIVRCASMGKPDVCARCGAFNASAGGDGPPPVFDGDDFPYWKIRMEAYLEAIDIGVYKAATQGFPEPRDLTNLVGDEFNYEKWNAKAKNTLFRGLCKDVFNRVRNHKNAHDLWMDICALHEGTRSEREERYHIAMRKLNSIEMLTNENANAMYSRLNILVEEVNGLGLTQISQPDVVRKILSVLPIDKYGHIVTVLHQMDLSVTTPTQILGKINAHEMYMHINDKEESSSKRKDLALKANHERKGKAKIQVEEESSSDDDLDANIALMVRKTTKMLKKLNREGIKFDSRKKKFFSNKRKPISEMDCYNCGELGHLAHQCNKPKKNKFKGKKEDDSDDEKKEKKFFKRKDGKQNRFHKKKNGKAYIVGDWLTDIESSSGSSSSEEENDEKVAAIAGDFSSPPPSPSSTAHLCLMARGERKVQNDINIDDDSDSDSDEEFASPSYDELADLLKEYTQIIRKSKAKCDRLKNENESLNAKYDIVIKASDEIKEENKTMSSTVNELTNSLKDAKEKYDKLNEANRELQNRLVKIKEDYTQIKFDHDNLLVENELLSCKTHEAINPVVKLDVATSCDDLIQEEQTSLHAELTEKVEVLTLDNQKLKNYLTDATTRGKVAIENNDFNNELAVDNQRLKNEVKKLKSENEHLATSVQKFNKGQYLQNELLMNTVMKNNKSGIGYNAFVQKKAITQYKPKQTHKPIKCFECGNEGHFAHNCKAKPPTPLPKHSRPFAFNAHYVLRKVVNGKIKVNYKTGGSHWVIDSGCTQHMTGNPRMFTSLDENVDGQDKITFGDNSKGKVQGLGKVAISNDLSISNVLLVAPLSFNLLSVGQLCDLGLKCLFTPSEGFRYNNLYLVDFTSEDADLRTCLFTKASLGWLWHRRLAHVGMSTLKKVLKKDMVRGLKDVVFEKDKPCSACQAGKQVANTHPTKAFMSTSRPLELLHMDLFGPTNYVSAGGNLYCLVIVDDFSRYTWVFFLHDKSEVASIFKKFAKKAQNEFDCKIKKIRSDNGKEFDNTNIHEYCDEIGIKHEVSATYTPQQNGVVERKNRTLITLARTMIDEYNTPERFWAEAVNTACYASNRLFPHRLLAKTPYELLNGKKPDVSFFRVFGCKCYIYKKRHHLGKFQRRCDIGFLLGYSLKSKAYRVFNHATGVVEETYDVEFDETNGSQGALENLDDVGDEPLREAMKNMPIGAIKPKEDEEEVQIIDRPSSSNVPQDDEKDERHANEDTFVSHEQARVQAEDVDAPGSSSQVVDRRNSSLLQAHPQNQIIGSPSQGVITRSHKHANFIEHHSFVSCVEPTCIDDALQDPDWVNAMHEELNNFTRNEVWTLEKPPQDARIIGTKWVFRNKQDDQGVIVRNKARLVAKGFSQVEGLDFGETFAPVARLEAIRILLAYASCYDIKLYQMDVKSAFLNGFINELVYVEQPPGFEDPRYPNHAYRLSKALYGLKQAPRAWYERLRDFLIEKGFKIGTVDTTLFTKKHNGDIFICQVYVDDIIFGSTNDYHCKEFGELMSKEFEMSMIGELTYFLGFQVKQMKDGNFLSQEKYTKDLLKRFNMEKCKPIKTPMPTNGHLDLDEGGNPVNQTLYRSMIGSLLYLTASRPDIMFSVCMCARFQSNPKKAHLRAVKRILRYLRHTTSVGLWYPKGATFDLIGYSDSDYAGCKIDRKSTSRGCHLLGTSLVSWTSKKQNSVALSTAEAEYIAAGACCTQILYMKQTLLDYGVVLEKVPLLCDNESAVKIANNPVQHSRTKHIDIRHHFLRDHVAKGDIILEGVRSEDQFADIFTKPLDKTRFCMLRNELNILDLRNFM

SEQ ID NO: 357298 - protein, 1348 aa, Zea mays
  unsure (1)..(1348): unsure at all Xaa locations
  Clone ID: MRT4577_89026C.1.pep
MFGGDGPPPVFYGDNFPYWKIRMEAYLESIDIGVYKAATQGFSSPRDPTNPVGDEFNYEKWNAKAKNTLFRGLCKDVFNRVRNHKNAHDLWMDICALHEGTRSEREERYHIAMRKLNSFEMLANENANAMYSRLNILVEEVNGLGLTQISQPDVVRKILSVLPIDKYGHIVTVLHQMDLSVTTPTQILGKINAHEMYMHINDKDESSSKRKDLALKANQERKGKAKVQIEEESSSDDDLDANISLMVRNTTKMLKKLNREGIKFDSXERRNSFLXRKPISEMDCYNCGELGHLAHQRNKPKKNKFKGKKEDYSDDEKKEKRFFKKKDGKHKRFHKKKMERXIVGDWLTDIESSSGSSSSEEENDEXSCRHRWGLLFTTXPSPSSTSHLCLMARGERKXDSDTDEEFASPSYDKLADLLKEYTQIIRKSKAKCDKLKNENESLNAKYDIVMKASDEMKEENKTMSSTVNELTSSLKDAKDKCDKLNEADRELKDRLVKIKEDYTKIKFDHDNLLIENELLSCNTHEAINPVVKIDVATSCDDLSQGEQTSLHDELTEKVEVLTLDNQKLKRYLTDATTRGKVAIENNDFNNELAMDNERLKXEWYWIQCFCAKESYYSIXSQSRLISLSNALNVEKKVTLPTTAKPNHQLPCLSTQEYLLSMLIMXLRKVANGKVNYKTGGSHWVIDSGCTQHMTGNPWMFTSLDENVDGQDKITFGDNSKGKVQGLGKVAISNDLSISNFLLVAPLSFNLLSVGQLCDLGLQCLFTPIEVIISKMDDESMVFKGFRYNNLYLVDFTSEDVDLRTCLFTKASLGWLWHRRLAHVGMSTLKKVLKKDMVRGLKDVVFEKEKPCSACQAGKQVANTHPTKAFMSTSRPLELLHMDLFGPTNYVSVGGNLYCLVIVDDFSRYTWVFFLHDKSEVTSIFKKFAKKAQTEFDCKIKKIRSDNGKEFDNTNIHEYCDEIGIKHEVSATYTPQQNGVVERKNRTLITLARTMIDEYNTPERFWSKAYRVFNHATVMVEETYDVEFDETNGSQGALENLDDVGDEPLREAMKNMPIGAIKPKEDEEEPTCIDEALQDPDLVNAMHEELNNFTRNQVWTLEKPPQGTRIIGTKWVFRNKQDHHGVIVRNKARLVAKGFSQVEGLYFGETFASVVRLEAICILLAYASCYDIKLYQMDVKSSILNGFINELVYVEQPPGFEDPRYPNHAYRLSKALYGLKQAPRAWYERLRDFLIEKGFKIGTVNTTLFTKKHNSDIFICQVYVDDIIFGSTNDYHCKEFGELMSKEFEMSMIGELTYFLGFQVKQMKDGNFLSQEKYTKDLLKRFNVEKCKPIKTPMPTNGHLDLDEG

SEQ ID NO: 357299 - protein, 96 aa, Zea mays
  Clone ID: MRT4577_89027C.1.pep
LNAFNDHFLLDHPEHFLNNQSFNYDPDSQRAWAWAPPFLAGTDAAITTTGGAKGEGPPTLSNGGTFTTTTGLACDVIGRRKPNPRDRRGKHRHYNL

SEQ ID NO: 357300 - protein, 60 aa, Zea mays
  Clone ID: MRT4577_89028C.1.pep
MASETETFPLQDEINQLFSLIINTFYSNKEIFLRELISYSSDAMVLIWFESIPDKSKLDA

SEQ ID NO: 357301 - protein, 561 aa, Zea mays
  Clone ID: MRT4577_89029C.1.pep
MPRTKNVSAPGGGDDEDPRRPFRQVKGKTVYLEQQEGRKKRRTDRAARAAAAAAAAAAQAELGDQLQAPSDQIAYRVRCFASRPRSSTHTSASTPPPTLPAPVTPIAPSTSTAIPATSTTPASTAPPPPPAPASAPPVPPPRFRERDETEVRPLASDPRLFDLQRAIAARVRRFRYVPVESWLPAQRDPAAGDLFSTRIQESFFRAQISAQIALRVHRLLDLPAFLLAAGADSEAHLTYLPGLQTLLTISGRYVEEWVRVFYASVWIDPDHHWMRFRFEREDVAITASQIRQLFGFHESTTRLHSLCYGTSDPPRRPHGGVAPGTAHVAALFRPPFSYGSRRSPADFTTAAKFLYELIRRTLLPRMGYREATTHIQLWLLGALVSHSEFDVVDFLICEIEDTVLDGIRARRQLPYAHYLCHIFAQLIQPPRFQGTLEASRLVFGSYRPAPEIPVPASAPVFDSQAEDAALRQFDTQGTAADDDDDDDFGVLPPPPPPMPPRSHDHEAGSSSAALAPPQAMDPALASILAHLAAEQARLSERMLSMFQNMQDRQDALQQQLL

SEQ ID NO: 357302 - protein, 56 aa, Zea mays
  Clone ID: MRT4577_8902C.1.pep
AWINLCSLSAFASDIAPWDPTSPLAALPGISHPVFPPQACFSVIFCPPPQRLCSFV

SEQ ID NO: 357303 - protein, 135 aa, Zea mays
  Clone ID: MRT4577_89030C.1.pep
MAVLGFILLSPFWSLAGAAAVVESATGFTPLRRSFQLLSTARLAALSSFLVFAAGIGVTLWGFGGVAAERYDAGAGWAGMAPVVVKAGAGLVLLPAPDAVRDGGQRCALHALSARCTRELAGLDLHMRSPTCMFS

SEQ ID NO: 357304 - protein, 1706 aa, Zea mays
  unsure (1)..(1706): unsure at all Xaa locations
  Clone ID: MRT4577_89031C.1.pep
MSGGDGPPPVFDGDDFPYWKIRMEAYLEAIDIGVYKAATQGFPEPRDPTNLVGDEFNYEKWNAKAKNTLFRGLCKDVFNRVRNHKNAHDLWMDICALHEGTRSEREERYHIAMRKLNSFEMLTNENANAMYSRLNILVEEVNGLGLTQISQPDVVRKILSVLPIDKYGHIITVLHQMDLSVTTPTQILGKINAHEMYMHINDKEESSSKRKDLALKANHERKGKAKIQVEEESSSDDDLDANIALMVRKTTKMLKKLNREGIKFDSRKKKFFSNKRKPISEMDCYNCGELGHLAHQCNKPKKNKFKGKKEDDSDDEKKEKKFFKRKDGKQKRFHKKKNGKAYIVGDWLTGIESSSGSSSSEEENDEKVAAIAGDFSSPPPSPSSTSHLCLMARGERKVENENESLNAKYDIVIKASDEIKEENKTMSSTVNELTNSLKDVKEKYDKLNEANRELQTRLVKIKEDYTQIKFDHDNLLVENELLSCKTHEAINPVVKLDVATSCDDLIQEEQTSLHAELTEKVEVLTLDNQKLKNYLTDATTRGKVAIENNDFNNELAVDNQRLKNEVKKLKSENEHLATSVQKFNKGQYLQNELLMNTVMKNNKSGIGYNAFVQKKAITQYKPKQTHKPIKCFECGNEGHFAHNCKAKPPTPLPKHSRPFAFNAHYVLRKVANGKIKVNYKTGGSHWVIDSGCTQHMTGNPRMFTSLDENVDGQDKITFGDNSKGKVQGLGKVAISNDLSISNVLLVAPLSFNLLSVGQLCDLGLQCLFTPSEVIVTKIDDESMVFKGFRYNNLYLVDFTSEDADLRTCLFTKASLGWLWHRRLAHVGMSTLKKVLKKDMVRGLKDVVFEKDKPCSACQAGKQVANTHPTKAFMSTSRPLELLHMDLFGPTNYVSAGGNLYCLVIVDDFSRYTWVFFLHDKSEVASIFKKFAKKAQNEFDCKIKKIRSDNGKEFDNTNIHEYCDEIGIKHEVSATYTPQQNGVVERKNRTLITLARTMIDEYNTPERFWAEAVNTACYASNRLFPHRLLAKTPYELLNGKKPDVSFFRVFGCKCYIYKKRHHLGKFQRRCDIGFLLGDEPLREAMKNMPIGAIKPKEDEEEVQIIDRPSSSNVPQDDEKDERHANEDTFVSHEQARVQAEDVDAPGSSSQVVDRRNSSLLQAHPQNQIIGSPSQGVITRSHRHASFIEHHSFVSCVEPTCIDEALQDPDWVNAMHEELNNFTRNEVWTLEKPPQDARIIGTKWVFRNKQDDQGVIVRNKARLVAKGFSQVEGLDFGETFAPVARLEAIRILLAYASCYDIKLYQMDVKSAFLNGFINELVYVEQPPGFEDPRYPNHAYRLSKALYGLKQAPRAWYERLRDFLIEKGFKIGTVDTTLFTKKHNGDIFICQVYVDDIIFGSTNDYHCKEFGELMLKEFEMSMIGELTYFLGFQVKQMKDGNFLSQEEYTKDLWKRFTXEKCKPIKTPMPTNGHLDLDEGGNPVNQTLYRSMIGSLLYLTASRPDIMFSVCMCARFQSNPKKAYLRAVKKILRYLRHTTSVGLWYPKGATFDLIGYSDSDYAGCKIDRKSTSRGCHLLGRSLVSWTSKKQNSVALSTAEAEYIAAGACCTQILYMKQTLLDYGVVLEKVPLLCDNESAVKIANNPVQHSHTKHIDIRHHFLRDHVAKGGIILEGVRSEDQLADIFTKPLDKTRFCMLRNELNILDLRNLM

SEQ ID NO: 357305 - protein, 1126 aa, Zea mays
  Clone ID: MRT4577_89032C.1.pep
MSGGDGPPPVFYGDDFPYWKICMEAYLEAIDIGVYKNATQGFPEPRDPTNLVGEEFNYEKWNVKAKNTLFRGLCKDVFNRVRNHKNAHDLWMDICALHEGTRSEREERYHIAMRKLNSFEMLANENSNAIYSRLNILIEEVNGLGLTQISQPDVVRKILSVLPIDKYGHIVTVLHQMDISVTTPTQILGKINAHEMYMHINDKEESSSKIKDLALKANQERKGKAKVQIEEESSSDDDLDANITLMPKKNKFKGKKEDDIDDEKKEKRFFKRKDGKHKRFHKKKNGKAYIVGDWLTDIESSSGSSSSEEENDEKVAAIAGDFSSPPPSPSSTSHLCLMARGEWKVQNDIHITDDSDSDSDEEFASPSYDELADLLEEYNQIIRKSKAKCDKLKNENESLNAKYDIVMKANAKDKCDKLNEANRELKDRLVKIKEDYTKIKFDHDNLLVENELLSCNTHEAINPVVKIDVATSCDDLSQGEQTSLHDELTEKVEVLTLDNQKLKRYLTDATTRGKVAIENNDFNNELAVDNERLKNEVKKLKSENEHLATSVQKFNKGQYLQNELLMNTVMKNNNSGIGYNAFVQKKVTTQYKPKQTHRPIKCFECGKEGHFAHNCKSKPPTPLPKHSRPFAFNAHYVLRKVANGKVNYKTGGSHWVIDSGCTQHMTGNPRMFTSLDENVDGQDKITFGDNSKEKVQGLGKVAISNDLSISNVLLVAPLSFNLLSVGQLCDLGLQCLFTPIEVIVSKMDDESMVFKGFRYNNLYLVDFTSEDADLRTCLFTKASLGWLWHRRLAHVGMSTLKKVLKKDMVRGLKDVVFEKDKPCSACQAGKQVANTHLTKAFMPTSRPLELLHLDLFGPTNYKFAKKAQNEFDCKIKKIRTDNGKEFDNTNIHEYCDEIGIKHEVSATYTPQQNGVVERKNRTLFTLARTMIDEYNTPERFWAEAVNTACFASNRLFPHRLLAKTPYELLNGKKPDVSFRVFRCKCYIYKKRHHLGKFQRCCDIGFLLGYSLKSKAYRVFNHATGVVEETYDVEFDETNGSQGALENLDDVGDEPLREAMKNMPIGAIKPKEDEEEVQNIDMPSSSNVPQDDEKDERHANEDTFVSHEQARVLSHPGFRGTKTQART

SEQ ID NO: 357306 - protein, 2493 aa, Zea mays
  unsure (1)..(2493): unsure at all Xaa locations
  Clone ID: MRT4577_89033C.1.pep
MSGGDGPPPVFYGDDFPYWKIRMEAYLEAIDIGVYKAATQGFPQPRDPTNLVGDEFNYEKWNAKAKNTLFRGLCKDVFNRVRNHKNAHDLWMDICALHEGTRSEREERYHIAMRKLNSFEMLANENANAMYSRLNILVEEVNGLGLTQISQPDVVRKILSVLPIDKYGHIVTVLHQMDLSVTTPTQILGKINAHEMYMHINDKEESSSKRKDLALKANHERKGKAKMQVEEESSSDDDLDANIALMVRKTTKMLKKLNREGIKFDSRKKKFFSNKRKPISEMDCYNCGELGHLAHQCNKPKKNKFKGKKEDDSDDEKKEKKFFKRKDGKQKRFHKKKNGKAYIVGDWLTDIESSSGSSSSEEENDEKVAAIAGDFSSPPPSPSSTSHLCLIARGERKVQNDINIDDDSDSDSDEEFASPSYDELADLLKEYTQIIRKSKAKCDRLKNENESLNAKYDIVIKASDEIKEENKTMSSTINELTNSLKDAKEKYDKLNEANRELQNGLVKIKEDYTQIKFDHDNLLVENELLSCKTHEAINPVVKLDVATSCDDLIQEEQTSLHAELTEKVEVLTLDNQKLKNYLTDATTRGKVVIENNDFNNELAVDNQRLKNEVKKLKSENEHLATSVQKFNKGQYLQNELLMNTVMKNNKSGIGYNAFVQKKAITQYKPKQTHKPIKCFECGNEGHFAHNCKAKPPTPLPKHSRPFAFNAHYVLRKVANGKIKVNYKTGGSHWVIDSGCTQHMTGNPRMFTSLDENVDGQDKITFGDNSKGKVQGLGKVAISNDLSISNVLLVAPLSFNLLSVGQLCDLGLQCLFTPSEVIVTKMDDESMVFKGFRYNNLYLVDFTSEDADLRTCLFTKASLGWLWHRRLAHVGMSTLKKVLKKDMVRGLKDVVFEKDKPCSACQAGKQVANTHPTKAFMSTSRPLELLHMDLFGPTNYVSAGGNLYCLVIVDDFSRYTWVFFLHDKSEVASIFKKFAKKAQNEFDCKIKKIRSDNGKEFDNTNIHEYCDEIGIKHEVSATYTPQQNGVVERKNRTLITLARTMIDEYNTPERFWAEAVNTACYASNRLFPHRLLAKTPYELLNGKKPDVSFFRVFGCKCYIYKKRHHLGKFQRRCDIGFLLGYSLKSKAYRVFNHATGVVEETYDVEFDETNGSQGALENLDDVGDEPLREAMKNMPIGAIKPKEDEEEVQXSLTSLLHQXPQDDEKDERHANEDTFVSHEQARVQAEDVDAPGSSSQVVDRRNSSLLQAHPQNQIIGSPSQGVITRSHKHANFIEHHSFVSCVEPTCIDEALQDPDWVNAMHEELNNFTRNEVWTLEKPPQDARIIGTKWVFRNKQDDQGVIVRNKARLVAKGFSQVEGLDFGETFAPVARLEAIRILLAYASCYDIKLYQMDVKSAFLNGFINELVYVEQPPGFEDPRYPNHAYRLSKALYGLKQAPRAWYERLRDFLIEKGFKIGTVDTTLFTKKHNGDIFICQVYVDDIIFGSTNDCHCKEFGELMSKEFEMSMIGELTYFLGFQVKQLKDGNFLSQEKYTKDLLKRFNMEKCKPIKTPMPTNGHLDLDEGGNPVNQTLYRSMIGSLLYLTASRPDIMFSVCMCARFQSNPKKAHLRAVKRILRYLKHTTSVGLWYPKGATFDLIGYSDSDYAGCKIDRKSTSGGCHLLGRSLVSWTSKKQNSVALSTAEAEYIAAGACCTQILYMKQTLLDYGVVLEKVPLLCDNESAVKIANNPVQHSRTKHIDIRHHFLRDHVAKGDIILEGVRLQFRMPRTKNASASGGGDDEDPRRPFRQVKGKTVFLEQQEGRKKRRSDREARAAAAAAAAAAQAALGDQPDIPSDQIAFRARRLASRSRSSTHTSASTPPPTLPAPVTPIAPSTSTAIPTTSSTPASTATPAPAPASAPPVPPPRFRERDETEVRPLVSDPRLFDLQRATAARVRRFRYVPVESWLPAQRDPAAGVLFSTRIQESFFRAQMSAQIALRVHRLLDLPAFLLAAGAESEAHLTYLPGLLSFLTISGRYVEEWVRVFYASVWIDPDHHWMRFRFEREDVTITADQIRQLFGFPESTTRLHSLCYGTSDPPRRPHGGVAPGTAHVAALFRPPFTDGSRRSPADFTTAAKYLYELVRRTLLPRMGYREATTHIQLWLLGALVSHSEFDVVDFLICEIEDTVLDGIRARRQLPYAHYLCHIFAQLIQPPRFQSTLEASRLVFGSYRPAPEIPVPASASVFDSQAEDAALHQFDTQGTAADDDDDDDDFGVPLPPPPPMPPRSHDHEAGSSRAAPAPPPALDPALASILQTLTQQQQTLTQQQQTLTQQQALLAAEQARLSDRMLSMFQSMQDRQDALQQQLIQDRAESRAFMALMLQHSGISAPPVQSAPPSSLYAPVVPSILSAPPAVTSPLRPVTLAFTSPVLSSVCPQPLVPPASAVTTTVVAVSVTASVPVAPAALPASESVPAPASTTDPGSETDSDPPSAFALLPRPRPDAPPPPPPASGV

SEQ ID NO: 357307 - protein, 2511 aa, Zea mays
  Clone ID: MRT4577_89034C.1.pep
MSGGDGPPPVFDGDDFPYWKIRMEAYLEAIDIGVYKAATQGFPEPRDATNLVGDEFNYEKWNAKAKNTLFRGLCKDVFNRVRNHKNAHDLWMDICALHEGTRSEREERYHIAMRKLNSFEMLTNENANAMYSRLNILVEEVNGLGLTQISQPDVVRKILSVLPIDKYGHIVTVLHQMDLSVTTPTQILGKINAHEMYMHINKEESSSKRKDLALKANHEKKGKAKIQVEEESSSDDDLDANIALMVRKTTKMLKKLNREGIKFDSRKKKFFSNKRKPISEMDCYNCGELGHLAHQCNKPKKNKFKGKKEDDSDDEKKEKKFFKRKDGKQKRFHKKKNGKAYIVGDWLTDVESSSGSSSSEEEDDEKVAAIAADFSSPPPSPSSTSHLCLMAKGERKVQNDINIDDDSDSDSDEEFASPSYDELADLLKEYTQIIRKSKAKCDRLKNENESLNAKYDIVIKASDEIKEENKTMSSTVNELTNSLKDAKEKYDKLNEANRELQNRLVKIKEDYTQIKFDHDNLLVENELLSCKTHEAINPVVKLDVATSCDDLIQEEQTSLHAELTEKVEVLTLDNQKLKNYLTDATTRGKVAIENNDFNNELAVDNQRLKNEVKKLKSENEHLATSVQKFNKGQYLQNELLMNTVMKNNKSGIGYNAFVQKKAITQYKPMQTHKPIKCFECGNEGHFAHNCKAKPPTPLPKHSRPFAFNAHYVLRKVANGKIKVNYKTGGSHWVIDSGCTQHMTSNPRMFTSLDENVDGQDKITFGDNSKGEVQGLGKVAISNDLSISNVLLVAPLSFNLLSVGQLCDLGLQCLFTPTEVIVSKMDDESMVFKGFRYNNLYLVDFTSEDADLRTCLFTKASLGWLWHRRLAHVGMSTLKEVLKKDMVIGLKDVVFEKDKPCSACQAGKQVANTHPTKAFMSTSRPLELLHMDLFGPTNYVSAGGNLYCLVIVDDFSRYTWVFFFHDKSEVASIFKKFAKKAQNEFDCKIKKIRSDNGKEFDNTNIHEYCDEIGIKHEVSATYTPQQNGVVERKNRTLITLARTMIDEYNTPESYWAEAVNTACYASNRLFPHRLLAKTPYELLNGKKPDVSFFRVFGCKCYIYKKRHHLGKFQRRCDIGFLLGYSLNSKAYRVFNHATGVVEETYDVEFDETNGSQGALENLDDVGDEPLREAMKNMPIGAIKPKEDEEEVQNIDRPSLSNVPQDDEKDERHANEDTFVSHEQARVQAKDVDAPGSSSQVVDRRNSSLLQAHPQNQIIGSPSQGVITRSHRHASFIEHHSFVSCVEPTCIDEALQDPDWVNAMHEELNNFTHNQVWTLEKPPQDARIIGTKWVFRNKQDDQGVIVRNKARLVAKGFSQVEGLDFGETFAPVARLEAIHILLAYASCYDIKLYQMDVKSAFLNGFINELVYVEQPPGFEDPRYPNHAYRLSKALYGLKQAPRAWYERLRDFLIEKGFKIGTVDTTLFTKKHNGDIFICQVYVDDIIFGSTNDYHYKEFGELMSKEFKMSMIGELTYFLGFQVKQMKDGNFLSQEKYTKDLLKRFNMEKCKPIKTPMPTNGHLDLDEGGNPVNQTLYRSMIGSLLYLTASRPDIMFSVCMCARFQSNPKKAHLRAVKRILRYLRHSTSVGLWYPKGATFDLIGYSDSDYAGCKIDRKSTSGGCHLLGRSLVLWTSKKENSVALSTAEAEYIAAGACCTQILYMKQTLLDYGVVLEKVPLLCDNESVVKIANNPVQHSRTKHIDIRHYFLRDHVAKGDIILEGVRSEDQLADIFTKPLDKTRFCMLRNELNILDLRNFIRQVKMPRTKNASASGGGDDEDPRRPFRQVKGKTVYLEQQEGRKKRRSDREARAAAAAAAAAAQAALGDQPDVPSDQIAFRARRLASRSRSSTHTSASTPPPTLPAPVTPIAPSTSTAIPTTSTTPASTASPAPAPASAPPVPPPRFRERDETEVRPLASDPRLFDLQRATAARVRRFRYIPVESWLPAQRDPAAGVLFSTRIQESFFRAQMSAQIALRVHRLLDLPAFLLAAGAESEAHLTYLPGLLSFLTISGRYVEEWVRVFYASVWIDPDHHWMRFRFEREDVTITADQIRQLFGFLESTTRLHSLCYGTSDPPRRPHGGIAPGTAHVAALFRPPFSDGSRRSPADFTTAAKYLYELIRRTLLPRMGYREATTHIQLWLLGALVSHSEFDVVDFLICEIEDTVLDGIRARRQLPYAHYLCHIFAQLIQPPRFQSTLEASRLVFGSYRPAPEIPVPAYAPVFDTQAEDAALRQFDTQGAAADDDDDDDFGIPPPPPPPMPPRSHDHEAGSSSAAPATPQAMDPALASILQTLTQQQAQLAAEQARMSERMLSMFQTMQDRQDSLQQQLIQDRAENRAFMALMLQHSGISAPPVQSAPPSSLYAPVVPSILSAPPAVTSPLRPVTLAFTSPVLSSVCPQPLVPPASAVTTTAVAVSVTASVPVAPAALPASESVPAPASTADPGSETDSDPPSAFALLPRPRPDAPPPPPPTSGV

SEQ ID NO: 357308 - protein, 1568 aa, Zea mays
  unsure (1)..(1568): unsure at all Xaa locations
  Clone ID: MRT4577_89035C.1.pep
MSDGDGPPPVFYGDDFPYWKIRMEAYLEAIDIGVYKAATQGFPEPRDPTNLVGEEFNYEKWNAKAKNTLFRGICKDVFNRVRNHKNVQDLWMDICALHEGTRSEREDRYHIDMRKLNSFEMLANENVNAMYSCLNILVEEVNGLGLTQISQPDVVRKILSVLPIDKYGHIVTMLHQMDLSVTTPTPILGKINAHEIYMHINDKDESSSKRKDLALKANQERKGKAKVQIEEESSSDDDLDANIALMVRKTTKMLKKLNREGIKFDSRKKKFFSSKRKPISEMDCYNCGELGHLAHQCNKPKKNKLKGKKEDDSDDEKKEKRFFKSKDGKHKRFHKKKNGKAYIVGDWLTDIESSSGSSSSKEENDEKVASIARDFSSPPPSPSSTSHLCLMARGERKVQNENDLTDDSDSDDEFASPSYDELADLLKEYTQIVRKSKAKCDKLKIENESLNAKYDIVMKANAKDKCDKLNEANRELKDRLVKIKEDYTKIKFDHDNHLVENELLSCNTHEAINPVVNIDVATSCDDLSQGDQTSLHDELTEKVEVLTLDNQKLKRYLTDATTRGTVAIENNDFNNELAVDNERLKNEVKKLKTENAHLATSVQKFNKGQYLQNELLMNTVMKNNKSDIGYNSLVQKKATTQYKPKQTYKPIKCFECGKEGHFAHNCKAKPPTPLPKHSRPFAFNAHYVLRKVANGKVKVTFRGNPRMFTSLDENVDGQDKITFGDNSKGKVQGLGKVAISNDLSISNVLLVAPLSFNLLSVGHLCDLRLQCLFTPTEVIVSKMDDESMVFKGFRYNNLYLVDFTSEDAYLRICLFTKASLGWLWHRRLAHVGMSTLKKVLKKDMVRGLKDVVFEKDKPCSACQDGKQVANIHPTKAFMSTSRPLELLHMDLFGPTNYVSACGNLYCLVIVDDFSRYTWVFFLHNKSEVASIFKKFAKKAQNEFDCKIKKIRSDNGKEFDNTNIHEYCDEIGIKHEVSATYTPQQNGVVERKNRTFITLARTMIDEYNTPERFWAEAVNTAYVSFWVFGCKCYIYKKRHHLGKFQRCCDIGFLLCYSSKSKAYQVFNHATGVVEETYDVEFNETNGSQGALENLDDVGDEPLREAMKNMPIVAIKPKEDEEEVQNIDRPSSSSVPQDDEKDERHANEDTFVSHEQARVQAKDVDAPGSSSQVVDRRNSSLLHANPKDQIIGSPSQGDPDSVNAMHKELNNFTHNQVWTLEKPPQDARIIGAKWVFRNKQDDQGVMVRNKARLVAKGFSQVEGLDFGETFAPVARLEDICILLAYASCYDIKLYQMDVKSAFLNGFKNELVYVEQPPGFEDPRYPNHAYRLSKALYGLKQAPRAWYERLCDFLIEKGFKIGTVDTTLFTKKHNGDIFICQVYVDDIIFGSTNDYHCKEFGELMSKEFEMSMIGELTYFLGFQVKQMKDGNFLSQEKYTKDVFKRFNMEKCKPIKTPMPTNGHLDLDEGGNPVNQTLYRSMIGSLLYLTVSRPDIMFSVCMCARFQSNPKKAHLRAVKRIIRYLKHTPSIGLWYPKGATFDLIGYSDSDYTGCKIDRKSTSGXCHLLGRSL

SEQ ID NO: 357309 - protein, 410 aa, Zea mays
  Clone ID: MRT4577_89036C.1.pep
MERVFSMEEIPNPYWAPPHPQPAAGGAVAAPGGVGGAGDAAGAMNRCPSEWYFQKFLEEAVLDSPGPVAGVGRSSGQAGVEAAESKPLGAAAPASVSSSVVDPVEYNAMLKQKLEKDLAAIAMWRASGAAPPDLSATAASLPSVGVPHAAPLKPVGGTESLVQNMLAGAPVGGSGPHVVQIADIPVKQTTSSSSREQSDDDDMEGDAETNGNGNPVQQRQQRRKQSNRESARRSRSRKAAHLNELEAQVAQLRVENSSLLRRLADVNQKFNEAAVDNRVLKADVETLRAKVKMAEDSVKRVTGMNALYPAVSDMSSLSMPFNGSPSDSASDGTVPIQDDLNSYFANPSEIGGNNGYMPDIASSVQQDDNFVNGYQAAGKMGRTDSLQRVASLEHLQKRMCGGPASSGSTS

SEQ ID NO: 357310 - protein, 49 aa, Zea mays
  Clone ID: MRT4577_89037C.1.pep
FMHRTDRCSGHSGCEVSPSRVLRGMAVYVRCSGASDCSLGTIPRSHVCG

SEQ ID NO: 357311 - protein, 57 aa, Zea mays
  Clone ID: MRT4577_89038C.1.pep
WRNAVPRKKKKKKKKKKKKKKKKKKKKKKKKKKKKKKKKKKKKKKKKKKKKKGGGRF

SEQ ID NO: 357312 - protein, 40 aa, Zea mays
  Clone ID: MRT4577_89039C.1.pep
ISVSLINQGIAYTNLSLEFCLPLADTLCSSFLYRVFYSHI

SEQ ID NO: 357313 - protein, 69 aa, Zea mays
  Clone ID: MRT4577_8903C.1.pep
NTMYVPLPQLLLRKPSSRLWLFIRMMSLLCSLATVTYAHMLVCVLYAACIYYLYPGGIIFWWNPQTIFF

SEQ ID NO: 357314 - protein, 681 aa, Zea mays
  unsure (1)..(681): unsure at all Xaa locations
  Clone ID: MRT4577_89040C.1.pep
MARNREVVILLLDVGPSMHGVLLEVKNVCLTLVHKKLVYNRSDEVGIVLFGTKGTCNELAKDIGGYKHVTVIHDIKVVDEGTAQALQNLPLGSAPGDFLDSIVVGLDMVIRKFGITKGKRRLCLITSAQELLRDPPEGTKEDQVDTIADMLKKHNIKMECIIFREPGVHHNDIMEENDRLLHQFRNRSVAKVVQVDNPTSLLGALKTRNVLPVTVFRGDLEVNSNFKIKVWVYKKTAEEKFPTLKKYSDKAPPNDKFASHEVKVDYEYKSVVEPDKVVPPDQRIKGYLYGPQVIPVSNAEWEAVKFKPEKGVKLLGFTDRSSVPRHQFMKDVCLFIPEPGNMKASLAVSAIARAMHRVNKVAIVRCVWRQGQGNVAIGVLTPNISSVNNIQDSFYFNVLPFAEDIREFQFRSFSSLPSSSQPTEEQQEAADNLVKMLDLAPPGREVLKPEFTPNPILERFYSYLDLKSKQPDANVPPLERSLRRITEPDPDVVGQQTQLIQNLSKAFVLKENPKKKKARTQDMLAYTGAGDQAKSVEDRVLXKYTSFNRECCGXRDSNPVQDFEAMLAKRSSSTWTQKAIGDMQNYIAALLQNSSDGGNYQKALECFASLRKACIIEQEPQEFNQFLTGIYERLKEGDAAKFFQLLSSKNISLINKEEAPDSDVTEEMARSFYLKREKASQ

SEQ ID NO: 357315 - protein, 292 aa, Zea mays
  unsure (1)..(292): unsure at all Xaa locations
  Clone ID: MRT4577_89041C.1.pep
TIQDSFYFNVLPFAEDIREFQFRSFSSLPSSSQPTEEQQEAADNLVKMLDLAPPGREVLKPEFTPNPILERFYSYLDLKSKQPDANVPPLERSLRRITEPDPDVVXQTQLIQNLSKAFVLKENPKKKKARTQELLAYTGAGDQAKSVEDRVLENTHPSTENVVAIRDSNPVQDFEAMLAKRSSSTWTQKAIGDMQNYIAALLQNSSDGGNYQKALECFASLRKACIIEQEPQEFNQFLTNIYERLKEGDAAKFFQLLSSKNISLINKEEAPDSDVTEEMARSFYLKREKASQ

SEQ ID NO: 357316 - protein, 67 aa, Zea mays
  Clone ID: MRT4577_89042C.1.pep
KHKVRPLRGINKRKNTYNFISNSWIQTGAPQMHAHFVEMASTRAANILLPNRRSRHLKETYSNYLLC

SEQ ID NO: 357317 - protein, 75 aa, Zea mays
  Clone ID: MRT4577_89043C.1.pep
RFSVSVRLAARFSRPFFSSPVCGQVRARSASRRPPPGGAGPPTRASVTHPRLAFSVKQAAVYSSVEWYYFSCPAA

SEQ ID NO: 357318 - protein, 114 aa, Zea mays
  unsure (1)..(114): unsure at all Xaa locations
  Clone ID: MRT4577_89044C.1.pep
KLWFFAILMNYFFCNLFLFXLRFGVFFFFXLMTFINKVFFFTYSVIFLNFYLFVNIYSYSWLSFSFFIYLFFLVGFFXIIVFFIFFFVFILLYYYFTFFLFFFFLFFFLLLLFI

SEQ ID NO: 357319 - protein, 524 aa, Zea mays
  unsure (1)..(524): unsure at all Xaa locations
  Clone ID: MRT4577_89045C.1.pep
MDGSKAKKVAAKKFGGPRKKSVTKSIKAGLQFPVGRIGRYLKKGHHTPSSPTRPLPSRRRLFCLREPSHISAKMREILHIQGGQCGNQIGAKFWEVVCDEHGIDPTGRYTGTSDLQLERVNVYYNEASCGRFVPRAVLMDLEPGTMDSVRTGPYGQIFRPDNFVFGQSGAGNNWAKGHYTEGAELIDSVLDVVRKEAENCDCLQGFQVCHSLGGGTGSGMGTLLISKIREEYPDRMMLTFSVFPSPKVSDTVVEPYNATLSVHQLVENADECMVLDNEALYDICFRTLKLTTPSFGDLNHLISATMSGVTCCLRFPGQLNSDLRKLAVNLIPFPRLHFXFMVGFAPLTSRGSQQYRALTVPELTQQMWDAKNMMCAADPRHGRYLTASAMFRGKMSTKEVDEQMINVQNKNSSYFVEWIPNNVKSTVCDIPPTGLKMASTFIGNSTSIQEMFRRVSEQFTAMFRRKAFLHWYTGEGMDEMEFTEAESNMNDLVSEYQQYQDATADEEGDYEDEEEGEYQQEEEY

SEQ ID NO: 357320 - protein, 71 aa, Zea mays
  Clone ID: MRT4577_89046C.1.pep
TSHSILTYALRFGSKNNRKAKLARIATERGTFDGNHGDKHLPLHPASLPKVLGRTTIYPLQVHSLVLPKAD

SEQ ID NO: 357321 - protein, 60 aa, Zea mays
  Clone ID: MRT4577_89047C.1.pep
KTFNSSFDEMHRRQSSWVIPDKDLRERTCNLVVQTIVPTYRSYMQNYGALVEQEGNASKY

SEQ ID NO: 357322 - protein, 49 aa, Zea mays
  Clone ID: MRT4577_89048C.1.pep
SFFFFLVKESHVHGLSTNIEVSMVHRIMGSNSCGQNKRRAPVRLAFIYN

SEQ ID NO: 357323 - protein, 76 aa, Zea mays
  unsure (1)..(76): unsure at all Xaa locations
  Clone ID: MRT4577_89049C.1.pep
EDAGDRPERVXPHSRQNYAPEEYDLSQAQRRNYDEFAHKHSQKPESAELMLRLAALGDGRHDQRPLPXDEXEGXYL

SEQ ID NO: 357324 - protein, 75 aa, Zea mays
  Clone ID: MRT4577_8904C.1.pep
FQSARFLGKETRFVTWGAPPLPHLKKLGVFLFKTPPLVNWPNKDPRFCKTFWYLKNVLLIKGLFPGGRENFVLKN

SEQ ID NO: 357325 - protein, 108 aa, Zea mays
  Clone ID: MRT4577_89050C.1.pep
FKAPPLPITFLEGGIFLKFFLFFGGAQTPQSFKNYRRVSLTGLTCLPPGFFFPRVLTPPAPSFFWKFFLWPKIFGPLLCKNGPVFAPLPPNLFFTHFCGGFSQFPGVS

SEQ ID NO: 357326 - protein, 519 aa, Zea mays
  Clone ID: MRT4577_89051C.1.pep
MENIGYLEAGRGTQTHTLHRGDMVGNNTVASLFYYSLLIICAAAWHADASQADRLREFIRSRRNSPSEADKGTFEVANMGHSVASSLLSTSYSDSEQSALKAADKITALPGQPDGGVDFDQYAGYVTVDEKNGRALFYYLVEAPQDASAKPLLLWLNGGPGCSSLGYGAMQELGPFRVNSDNKTLSRNKAAWNNVANVIFLESPAGVGFSYSNTSSDYGLSGDRRTAADAYLFLANWLERFPEYKSRPFYISGESYAGHYVPELAATILTQNSYNSRTAINLRGILVGNPLLDSYMNLKGAVAYYWSHGLMSDEVFDNITRHCKYDSSDGVACSGALEAVDPGQIDPYNVYAPICVDAANGAYYPTGYLPGYDPCSDYYTYSYLNDPAVQNAFHARMTSWSACANLNWTDAPISMVPTVAGLIEKKLPVWIFSGDFDSVCPLPATRFSIHDLNLHVTTPWRPWTVNMEVGGYVQQYQGGFTFASVRGAGHMVPSSQADRALVLLDSFLKGVLPPYVQEQ

SEQ ID NO: 357327 - protein, 148 aa, Zea mays
  unsure (1)..(148): unsure at all Xaa locations
  Clone ID: MRT4577_89052C.1.pep
WGNPLSFQDPYFYPAPSKTSPWEKPFXNFFFKXKGLNGEFFPPFPKGGGAFFXTKKFSRVFLGAKFAFGPNWDWVFGTPKGTFFSPGGDSKGSNGVPFGPFFFFPEKNNGGEKKIXKAPPFFXFSKKKIDAPPPKLPEKKTLFYSPPE

SEQ ID NO: 357328 - protein, 173 aa, Zea mays
  unsure (1)..(173): unsure at all Xaa locations
  Clone ID: MRT4577_89053C.1.pep
EREREVLASFGPLESHAPPPHSSIPQPSRSPPPPAAAPPTRGKPPAVALASPRQKPSGSEFPAASVASMANPGLGLGLAPPGAEPSAGAPPSSRRAPRLAKRRHVPASSRSRAPQASAGIWNPFGGGGGTDRQTGGXVFGAASAVSQQPLEPAVSGASPTEAPFVFGSMRESL

SEQ ID NO: 357329 - protein, 99 aa, Zea mays
  unsure (1)..(99): unsure at all Xaa locations
  Clone ID: MRT4577_89054C.1.pep
XFFFXXNADDYTYWCIYKKNNLTFTNPTLKHPETESIRYTSFGTQHLDHFKNVLPKAVSKGSCTKEKPASPTARVFLPTTKSPERGDIRTEHNSFLGGA

SEQ ID NO: 357330 - protein, 105 aa, Zea mays
  unsure (1)..(105): unsure at all Xaa locations
  Clone ID: MRT4577_89055C.1.pep
TLFLHIVMELFPRRELFERILGEGHYXSPPLLISSTTTCRGSKEGFHLLCVIHXRDLKPHNFLFVNTAAEAPLKATDFGLYMFYKPRDKYSDVLGSPYYVAPEVL

SEQ ID NO: 357331 - protein, 118 aa, Zea mays
  unsure (1)..(118): unsure at all Xaa locations
  Clone ID: MRT4577_89056C.1.pep
HNTDRFWDIKFDKGVLHIPRILVHXGSKLLFLNLIAFEQCHMDIAXPGGNNITSYAIFMDNLINSAEDVKYLHDRGIIEHWLGSDAEVADLFNRLCQEVVFDIXDSYLSGLSXQVNRY

SEQ ID NO: 357332 - protein, 83 aa, Zea mays
  Clone ID: MRT4577_89057C.1.pep
ILLRAFFSFTPIWGARVGRYLLLVPRSPEPASQPEAEMRWSALLWEAELVRRAGVDKLLLQDAAGRGGGLTWYTTSRSDAAVE

SEQ ID NO: 357333 - protein, 62 aa, Zea mays
  Clone ID: MRT4577_89058C.1.pep
QRFTTGSYDDWNSYYGCTALSVLPGHVSVKKSCSVSIITSSSLLSRTCHSIVHSVIYYLELL

SEQ ID NO: 357334 - protein, 91 aa, Zea mays
  Clone ID: MRT4577_89059C.1.pep
MARCLKSCSVHGLWLLSMILLASCVVHAHIINGRQSNTGSLTMTTTGEASMIIGDEKDAICYIKAALYCCKRTIQCYQDIAQCLRNCRKNV

SEQ ID NO: 357335 - protein, 130 aa, Zea mays
  unsure (1)..(130): unsure at all Xaa locations
  Clone ID: MRT4577_8905C.1.pep
MNVLFVGLALLALAASAASSSSGGCGCQTPPLYLPPTIYMPPPFYLPPQQQAXPWLYPTQPPLLIPCQQFGSCGVCSVGSPFLGQCVXFLRHQCSPAETPYCSAQCQALQQLCCHQIMQVEPLLRFQATY

SEQ ID NO: 357336 - protein, 195 aa, Zea mays
  unsure (1)..(195): unsure at all Xaa locations
  Clone ID: MRT4577_89060C.1.pep
MSQVHALSDDQVGGEIKKMTAFIRQEAMEKVNEIRVKDDDELAIEKSKLAHQEQVSIDASDYKKVKRVIMXQQIARSTVSNKSRLRILSARQELLNRLFXDTEKKLCDISEDKNKNHSILKNLILEGAYDLNEDKLQVKARKADIDLTDNAIEEAHTEIEKNLSRDVAITIGESDPLPEASAGGAINVGTNGKID

SEQ ID NO: 357337 - protein, 62 aa, Zea mays
  Clone ID: MRT4577_89061C.1.pep
YIDKKMFAERGLSAEKGCQYFVKEKGVYFYVGLLNEGVQISGNKIKIVFLFAKKTKQKKTPY

SEQ ID NO: 357338 - protein, 35 aa, Zea mays
  Clone ID: MRT4577_89062C.1.pep
AYNAGSDTSVIVPWLREIYCCKVFCFTAEAGRGAI

SEQ ID NO: 357339 - protein, 89 aa, Zea mays
  Clone ID: MRT4577_89063C.1.pep
MERYEVIKDIGSGNFGVAKLVRDVRTKELFAVKFIERGNKIDENVKREIMNYRSLRYSNIVKLKEVVINTKNINIFMKYNDEDELFERI

SEQ ID NO: 357340 - protein, 63 aa, Zea mays
  Clone ID: MRT4577_89064C.1.pep
EFLESNTASLSVQQEKRLKQMGATVRNASGYLNSLNVKGVRDAAARALMAEMTVNQISDLVTF

SEQ ID NO: 357341 - protein, 57 aa, Zea mays
  Clone ID: MRT4577_89065C.1.pep
SAPMDTARCLFICNFSQYESPPHFFCFKKNLQQPCVFWQCGICRIEKAVLVVLTHSY

SEQ ID NO: 357342 - protein, 47 aa, Zea mays
  Clone ID: MRT4577_89066C.1.pep
KGLKSLIKIVLVYGKASHHVYVSGEGQSCVVRQSQWSPHMPHQDLGD

SEQ ID NO: 357343 - protein, 77 aa, Zea mays
  unsure (1)..(77): unsure at all Xaa locations
  Clone ID: MRT4577_89067C.1.pep
EHRTTSVNTKNXDGSVLPLLLTILPLCSPPHMPLSYVSTVGIALHFSRQQALALFRSHWQIIQLASSKVPGSFFARA

SEQ ID NO: 357344 - protein, 73 aa, Zea mays
  Clone ID: MRT4577_89068C.1.pep
MDHKEAGFQAHEVPILCINNCGFFGSAATMNMCSKFHTEMITNHDQAKLAAFSIDSIMNGSYAVMVPVVACIN

SEQ ID NO: 357345 - protein, 256 aa, Zea mays
  unsure (1)..(256): unsure at all Xaa locations
  Clone ID: MRT4577_89069C.1.pep
PQTDLLLSGAYRWAGDANTFTGDECIELVCSPNNPDGAIREAVVRSAGAKAIHDLVYYWPQYTPITGAAAHDIMLFSVSKLTGHAGTRLGWALVKDREVARNMVYFVDRSTTGVCKESQMRATKILGVVSDAYEXSRRPGPGXGAVPRLFDFALRRLEERWRILRATVAATGAFSLPEETSGYCNFAKQTVTACPAFAWLRCEKEGVEDCAELLAGHNIVGSGGEQFGGDARCVRINMLDRDNVFDMLVQRLSSIN

SEQ ID NO: 357346 - protein, 88 aa, Zea mays
  Clone ID: MRT4577_8906C.1.pep
PLLLDVQQGALDRPPSLLLEHVSEEPLPHTYWTLYFSFFPDAAYLVSVVDTSMVTHTERGLSVHAPPHLKLIRMDALVKRTGTLLQTH

SEQ ID NO: 357347 - protein, 78 aa, Zea mays
  Clone ID: MRT4577_89070C.1.pep
PAGTRPIGSRRSAAPSSSPSPHRASGSSQDDLVYYLITYRTRLGRNDREGTTKPGFLSKSGCWRGGRAHFYFPHIQRE

SEQ ID NO: 357348 - protein, 61 aa, Zea mays
  Clone ID: MRT4577_89071C.1.pep
LEPAGGGYYRYITTPPSLYASRSTPLPEASPVRPIEFKPKNQNNSRESIRRRVKWACRRRT

SEQ ID NO: 357349 - protein, 65 aa, Zea mays
  Clone ID: MRT4577_89072C.1.pep
SVQYSSVDCVHQESSIDNDSHHPFKDANYRMPGFVVKSFQSVSCSLFHHKCSFHRVPPIFNQRVP

SEQ ID NO: 357350 - protein, 218 aa, Zea mays
  unsure (1)..(218): unsure at all Xaa locations
  Clone ID: MRT4577_89073C.1.pep
MSQSKVSVSAVRDTVKTIRAGSEEKKRNFVETVELQIGLKNYDPQRDKRFSGTIKLPNIPRPNMSVCVLGDAFHCDQAKAAGMEFQSVEDLKKLNKNKKLIKKLAKKYDAFLASEALIKQIPRLLGPGLHKAGKFPTPISHSDEITAKADELRSMVKFQLKKVPCLGCAIGNIGMDDEQLVANIMLAINFLVSLLKKNWQNVKSLYLKTSMGKPXRLY

SEQ ID NO: 357351 - protein, 40 aa, Zea mays
  Clone ID: MRT4577_89074C.1.pep
LFRTGLAIEWGMCASSVFSQGARRECRLTSGGYSSCAVSS

SEQ ID NO: 357352 - protein, 764 aa, Zea mays
  unsure (1)..(764): unsure at all Xaa locations
  Clone ID: MRT4577_89075C.1.pep
MPLSPSLSPPPNATAAAALPLLLLLVCASSIAAQPLASSQAKALLRVRRLLFYPPALEPLRGAPDPCALPPAPALAVACEGGQVTALSVLGDRDPDAAWRAALPASFSSEALFTTLTRLPALARLSLVGLGAWGPLPGAKLRRLQALQQLNLSSNYFYGAVPDGLARLYSLQSLVLSWNWLNGTVPSLSGLQFLEELDLSHNRLGPAFPDVGRSVARLVLDDNNFTGGIPAGVSSLGLLQYFDVSGNQLQGWIPSSVFALPALRYINLSRNRLAGQLPATTACAEALAFVDVSANLLTGARPPCMRGNSSARTVLVAGNCFADAKQQRASSYCNPGALAAVXAAAAGQRRRRRAGDGEGXEIGMVLAIAGSVVGAALLIALAMVVVLRRARRQRPXDHPAEXPAATPTNKADGWKAPAKATQKIITPADKRHASQAARVNTLEVPAYRVCTLEELQEATDNFSSSNLIKTSPLAQDYNGQLQDGSRVLVRCLRLKPKYSSQSLVQYMEIISKLRHRHLVSIIGHCIVSDEENPNNASSVYLVSECVTNGSLRSHLTEWRKREMLKWPQRVCAAIGIARGVQFLHNLTAPGFVQNNLNIEHILLDKTLTSKISNFSLPMISTSKNGKILSETPFAVHEDNDIGSAQNAAQGDKEDIYQIGLILLEVITGKPTESQSQLESLKAQLSEALTEDPDRLKDMADPAIHGTFAVDSLSTVAEIALKCTAGDPSDRPSIDDVLWNLQYSMQVQDGWASSESLGLSVKSQV

SEQ ID NO: 357353 - protein, 113 aa, Zea mays
  Clone ID: MRT4577_89076C.1.pep
VSTCDVADLATHSQYLDLRVAETIPLKHNMNTLKREAAERRGQIVLTCIEVSTIYWKHRYPNDMINLWCNNPMICPHLLYCLGEGCNTTLALLFTHMMLTSAIDACSQGTPLT

SEQ ID NO: 357354 - protein, 65 aa, Zea mays
  unsure (1)..(65): unsure at all Xaa locations
  Clone ID: MRT4577_89077C.1.pep
MVGGPAAVSVLTNIAKEAGGSSPVCRSVRLLRDGGQRPVIFDRFXRGVVPRRPTGEGTHLLSPWL

SEQ ID NO: 357355 - protein, 45 aa, Zea mays
  Clone ID: MRT4577_89078C.1.pep
YDEENPRSVTKCEHHFHLCCILEWMERKDTCPVCDQTILVDEMSE

SEQ ID NO: 357356 - protein, 57 aa, Zea mays
  Clone ID: MRT4577_89079C.1.pep
GRPPLHRYPEPTRTPVDTNRERTTSFSPGNWWRCCAHGDSGLRSAPPTNNPWLHLRL

SEQ ID NO: 357357 - protein, 72 aa, Zea mays
  Clone ID: MRT4577_8907C.1.pep
KTTHVPRKLEKRKEGGPLAPPIEDQFASGRLLACISSRPGQCGPADGYTLEGKELEFSMKKLQRKKGKSPVA

SEQ ID NO: 357358 - protein, 68 aa, Zea mays
  Clone ID: MRT4577_89081C.1.pep
CSCPSRLAACLPWCSRARFLSGLSGAASVASPGVVGGAGVRALAGCGWRFSAPAMLCSRSRGSPRFFR

SEQ ID NO: 357359 - protein, 107 aa, Zea mays
  Clone ID: MRT4577_89082C.1.pep
LDHKHTICIKHPWIPEGRHHQNISSRETGSSSHVTYMYEQSIREIACNQREIALVKHSISSLESGSNRSQAGRGIDMSSLQYLTCIDNLHPRRVVKMHTHRNQPPWR

SEQ ID NO: 357360 - protein, 51 aa, Zea mays
  Clone ID: MRT4577_89083C.1.pep
LAGIKLSTNISQTFANNQQIAPTLETKTCWKASHPEPHIIQQQHYLLILYL

SEQ ID NO: 357361 - protein, 117 aa, Zea mays
  unsure (1)..(117): unsure at all Xaa locations
  Clone ID: MRT4577_89084C.1.pep
HDLHASDCLEELRPGDHFEIQWRKXKDFPYGWWYGVVGHQESCNGNEHLCRCHQDDTVVLEFQHYAPGSRWRQTTVGRKDHREKGDETDGFYGGIRKLHTKDEISTWRRFWPVDVLN

SEQ ID NO: 357362 - protein, 55 aa, Zea mays
  Clone ID: MRT4577_89085C.1.pep
GVFGVRNRSVQNKVVQYGSIPQNWWMTSFFISVFGLRNKVIHLLLTPHFFIWFVE

SEQ ID NO: 357363 - protein, 232 aa, Zea mays
  Clone ID: MRT4577_89086C.1.pep
DGGQKEASDLVKVCTSVLEFEASRDGLYFVPEDNASEQSSDKGRAWHQTFLNLLARLDAAFHSFTCAEQEWKLGQLSLEAAGKGLFSANNQVSVVSVKANSALVNLQDVLGAMYGHACEASALLSGFKHVSQDCTALTSECGSLLEEVLAIADGLHDVYTLGKEAAAAHSSLMTNLSKANTILFPLEVCLCADVTVMSEAISNEREKTMLVCLLFMERHYTNLIILKGKLAK

SEQ ID NO: 357364 - protein, 45 aa, Zea mays
  Clone ID: MRT4577_89087C.1.pep
IVMSVQDQAVEQGRQYRHAGLHHSSRLRWVYGQSIGLWTHFMDAQ

SEQ ID NO: 357365 - protein, 201 aa, Zea mays
  unsure (1)..(201): unsure at all Xaa locations
  Clone ID: MRT4577_89088C.1.pep
GRHRDRLPFPLSGRLGISHGFEQPLGHLAKRPTVLHRITATFDMCSCFSERSRRRNICTCFTPYKSGCCTRHYVTQRICTRSSAASAAIAVCSVATRVVATALSDSSGSPSLYCIFLVSRTXSSAAANTAADPCAAQRVPLLNCAEMLTPAQVSWPHEAIDVCSERTIRDQGLSCWSRRNTSYKAVXFPTPVLNVLLNDYC

SEQ ID NO: 357366 - protein, 98 aa, Zea mays
  Clone ID: MRT4577_89089C.1.pep
VEASNPMDSDQNLNCKVILLVNIVLLLYVIEDLPHDNLNRRIHLENHLNNLYLSHYLHPIIGDHQIILPSLLLLSMRAGVQVWWGGGVTYGRCAITQW

SEQ ID NO: 357367 - protein, 50 aa, Zea mays
  Clone ID: MRT4577_8908C.1.pep
LDTLNNILYSLTTITYPLASLHFTFLITHYKFYPYYTTHTITIFKTILIT

SEQ ID NO: 357368 - protein, 90 aa, Zea mays
  Clone ID: MRT4577_89090C.1.pep
PKPAPSPYVRALKELQVSEEHTLVLEDSPVGIRVGVAACTPVVGVAMRNPHKSLVKAGPALLVKEYKDHKLWAALEEIHEEEDKPKKVSE

SEQ ID NO: 357369 - protein, 249 aa, Zea mays
  unsure (1)..(249): unsure at all Xaa locations
  Clone ID: MRT4577_89091C.1.pep
LGTSRPAGVASSMRLIDFPSFIRTTDPDDAVLALVLRSMECHRTVPSAVIFHTLEEMESQVMSALSAILPPAYAIGPLPLLLSGAGGGGDPAIHVSGSSTSLSKENRACLEWIDGKRHNSVLFASFGSLAKLAHEQLVELAWGLANSGYEFLWVIRSDQQXAGXTAEPSWPPEFLAETEGRGCVTSWCPQEAVLXHDAVGAFLTHCGWNSMLQSVXAGVPMLCWPVAADQQTNXRLACTEWXVGVELGE

SEQ ID NO: 357370 - protein, 72 aa, Zea mays
  Clone ID: MRT4577_89092C.1.pep
SSGCCPNAGNTTNGKSGLLNPKSDKTRTPGNTPGPTGNAPNNKASPVGKTTTTPPISTPTTSSTKVHKHIYY

SEQ ID NO: 357371 - protein, 51 aa, Zea mays
  Clone ID: MRT4577_89093C.1.pep
LWESRVIMGNRPNQISPLFCFCHETCPSRKGSQIIVGRNYVKVKRPFCFAR

SEQ ID NO: 357372 - protein, 234 aa, Zea mays
  unsure (1)..(234): unsure at all Xaa locations
  Clone ID: MRT4577_89094C.1.pep
MASKHIEVMTCFIAITALAFRPCASAVAMYGGCSNGVATXYGPAKGAGSDGDAXCGYHDVVDQPPXFSSMITAVRQSIFQHGKGCVTCYQVKCTGHKPCSGSPVTMIITDLCTDATSQAETVHFQLTVTAFGAMANTGQADNVRXVDRLQFQDTRRACNXNVLDIVFRMDIVSYANYLAMVIQYDAGYGDLRVVDMNHSGAATSTPMQRSXRAVCEYKYGSTNLQXPLSDRLTS

SEQ ID NO: 357373 - protein, 38 aa, Zea mays
  Clone ID: MRT4577_89095C.1.pep
PPRRNPSSSLPVKRSLSVGLSANGGRHLEALPRILMLA

SEQ ID NO: 357374 - protein, 100 aa, Zea mays
  unsure (1)..(100): unsure at all Xaa locations
  Clone ID: MRT4577_89096C.1.pep
MREMFAVLTLLALAASASLHALQARGCGXHPMASVHLPDAXYMTASVYQTPAVHLXPPEHVTAPGHMPPXAYVQPSAHLSSAPXQYHTKTAQPQPHPEPH

SEQ ID NO: 357375 - protein, 81 aa, Zea mays
  unsure (1)..(81): unsure at all Xaa locations
  Clone ID: MRT4577_89097C.1.pep
GGLGANPKVLRLVRGLPGKNHPFYARKARQNFVNYRALPPEEDLGALLRGAXTHSKWVLPKNSINPGKVGVGLKAFTNGPL

SEQ ID NO: 357376 - protein, 89 aa, Zea mays
  Clone ID: MRT4577_89098C.1.pep
TRGKGREGQAGAYPGQGAGGEKTPGPGAGPPTLTKAWKWGSTCFLSGVWLEPRSAPRPPSGPAACQVTRALCFGVNAGVGWQARSRGER

SEQ ID NO: 357377 - protein, 73 aa, Zea mays
  Clone ID: MRT4577_89099C.1.pep
PQKVVVNAGFLGNSYNGSFCPQMFLAAIAIASPPASLVGGSNINVFQAVCNRVDVGEKHAVLLMCNHTEQSLT

SEQ ID NO: 357378 - protein, 104 aa, Zea mays
  unsure (1)..(104): unsure at all Xaa locations
  Clone ID: MRT4577_8909C.1.pep
YGVAIGRKKKPPAAKKDNAEGQKVEAPPEEPKKSTHVPRKLXKPKEGGPLAPPIEEQFASGRLLACISSRPGQCGRADGYTLEGKELEFPMKKLQRKKGKSPVA

SEQ ID NO: 357379 - protein, 98 aa, Zea mays
  Clone ID: MRT4577_890C.1.pep
TWELALKNIRGGLSPQGGILGNPILVSGGAPPLDPSKKKLSFFESGAFQKTTLFFPSTGGPPPTPKNLKNGLLSCNKKGDFFLLQKSLWHPFGKGPPS

SEQ ID NO: 357380 - protein, 237 aa, Zea mays
  unsure (1)..(237): unsure at all Xaa locations
  Clone ID: MRT4577_89100C.1.pep
KKKKXKKKKXKKQKXKKXKKKKKKKTKQKQKKKTKKKXKKKKKXKKKKKKXTKXKKKKKKKKNKIKNKKKKKKKKKKKKKQXKKNKKKKKKIKKNKKKNKKXKKKKKKKKNKKKKKKKXKNKKKKXKKKKKLKIKNKKKXKNKKXKKNKYKNKIKKKKKKSKNKKKIKKIKKQEKKXKKIKXKKQKNXLKIIXKKNKKKKEKXKRILYINKKKEXXKKKELKKKRNKKKIKKKEIHL

SEQ ID NO: 357381 - protein, 115 aa, Zea mays
  Clone ID: MRT4577_89101C.1.pep
LPPPRGVLCGQELYQGGVEAKHGAFRLGVGAPTPRKRPWAFPRGSHPVQGSFCPQPGRPSPWRSPGPGPYQNPCTRCTYCLPPPLLLAPVGPPPRKPPSMTGASQLAPAHSPACR

SEQ ID NO: 357382 - protein, 76 aa, Zea mays
  unsure (1)..(76): unsure at all Xaa locations
  Clone ID: MRT4577_89102C.1.pep
GGGAGEQATVVAKFDKLMNHSKILMRKQWLHGIVDEAHTKRLPHXAAWCHSLWYALKHNADRALTYSHGEPVTCCA

SEQ ID NO: 357383 - protein, 98 aa, Zea mays
  Clone ID: MRT4577_89103C.1.pep
IKLLALRLLLNHLIFSFNELLLSYFYLLVTRILGHKLFSVRSEKPPVHEVVRVRGGSSTTARNFAHHSQSLCPPTVHAPTVGLGESPGTLIEPKCGRQ

SEQ ID NO: 357384 - protein, 247 aa, Zea mays
  unsure (1)..(247): unsure at all Xaa locations
  Clone ID: MRT4577_89104C.1.pep
MEGDEMLRVKLGRQGLEVSKLGFGCMGLTGVYNAPVPDQAGIDIIKHAFEAGITFFDTADAYGPHTNEVLLGKMGELKKLVEEGKVRYVGLSEASADTIRRAHAVHPITAVQLEWSLWTRDIEEDIIPVCRELGIGIVPYSPLGRGFFAGRAAVERVPSESLLSKHPRYSGENLEKNKVLYTRLEMLSKKYGCTPAQLALSWVLHQGXDVVPIPGTTKAKNLDENIGAVKVRLSKEDLERISGAFPA

SEQ ID NO: 357385 - protein, 158 aa, Zea mays
  Clone ID: MRT4577_89105C.1.pep
MGLTGVYNAPVPDQAGIDIIKHAFEAGITFFDTADAYGPHTNEVLLGKSKHPRYSGENLEKNKVLYTRLEMLSKKYGCTPAQLALSWVLHQGEDVVPIPGTTKAKNLDENIGAVKVRLSKEDLEEISGAFPAGEVAGSRLLGVLEPFSWRLANTPPPK

SEQ ID NO: 357386 - protein, 341 aa, Zea mays
  Clone ID: MRT4577_89106C.1.pep
MEGDEMLRVKLGRQGLEVSKLGFGCMGLTGVYNAPVPDQAGIDIIKHAFEAGITFFDTADAYGPHTNEVLLGKALKHFPREKVQIATKCGIAGFDASGMRVKGTPDYVRACCEASLQRLATDYIDIYYQHRIDQSVPIEETMGELKKLVEEGKVRYVGLSEASADTIRRAHAVHPITAVQLEWSLWTRDIEEDIIPVCRELGIGIVPYSPLGRGFFAGRAAVERVPSESLLSKHPRYSGENLEKNKVLYTRLEMLSKKYGCTPAQLALSWVLHQGEDVVPIPGTTKAKNLDENIGAVKVRLSKEDLEEISGAFPAGEVAGSRLLGVLEPFSWRLANTPPPK

SEQ ID NO: 357387 - protein, 83 aa, Zea mays
  Clone ID: MRT4577_89107C.1.pep
PRGFFLGLGSHATPQVFYIFLARVFPVPHFGGTCFNRFGVIVTPVFFFRTPVFPNNSLGNAIALPGVFLYSQPKGFKPNPKGV

SEQ ID NO: 357388 - protein, 46 aa, Zea mays
  Clone ID: MRT4577_89108C.1.pep
KAYMKLTTALPKIEVDPETYTVTADGEVLTCQPAPTLPLSRNYFLF

SEQ ID NO: 357389 - protein, 66 aa, Zea mays
  Clone ID: MRT4577_89109C.1.pep
SLLPQLYLLLSSGCNADNIHQPTAAQGLLLRVPRVLRSDRSLCDCKHTYIHPFKLGNKKYTIQENK

SEQ ID NO: 357390 - protein, 83 aa, Zea mays
  unsure (1)..(83): unsure at all Xaa locations
  Clone ID: MRT4577_8910C.1.pep
GSXTHRQPFYTSSTTRGQRHLDRSHRRAVHPSIVNRYRTAVGAAARPVAAVTDHPAPLPRPNELRNRDEGSDGGPDTATSDTL

SEQ ID NO: 357391 - protein, 344 aa, Zea mays
  unsure (1)..(344): unsure at all Xaa locations
  Clone ID: MRT4577_89110C.1.pep
EENCLSVAEDFDIQVNIHTDTLNESGCVEHTIAAFKGRAIHTYHSEGAGGGHAPDIIKVCGVKXVLPSSTNPTRPFTSNTVDEHLDMLMVCHHLDKNIPEDVAFAESRIRAETIAAEDILHDMGAISIISSDSQAMGRVGEVITRTWQTANKMKVQRGSLPGSGDANAAPDSDNLRIRRYIAKYTINPAIVNGFSDFVGSVEVGKLADLVLWKPSFFGAKPELVVKGGAIAWANMGDPNASIPTPEPVVMRPMFGAFGKAGSSNSIAFVSKAAKEAGVATEYRLEKRVEAVGRVRGLTKLDMKLNDALPKIEVDPETYTVTADGEVLTCQPAPTLPLSRNYFLF

SEQ ID NO: 357392 - protein, 48 aa, Zea mays
  Clone ID: MRT4577_89111C.1.pep
NNSSYPTMSSSAFGDFCPLTELRLSQKARHQLTHIMIADSTISIIIIL

SEQ ID NO: 357393 - protein, 64 aa, Zea mays
  unsure (1)..(64): unsure at all Xaa locations
  Clone ID: MRT4577_89112C.1.pep
FIVVVCLVLSRVVILAFEYLSCYVLGXMGVVLAPYCLWSPPXFHYPLGLGARGVLRACVRVPGV

SEQ ID NO: 357394 - protein, 86 aa, Zea mays
  Clone ID: MRT4577_89113C.1.pep
FYSTARVHSHGMGRSHTQNTIRIRTDDTKKRLQQPFMNGLDGLYRVPLNGSWNPAQTHGRAWSLPHAYEQHHKPWACDTGKAPDMF

SEQ ID NO: 357395 - protein, 74 aa, Zea mays
  unsure (1)..(74): unsure at all Xaa locations
  Clone ID: MRT4577_89114C.1.pep
RTQAADPVRTWWTPKREQILILXAICTSCMGNPPKDKTGRIRNVLERFGATGDANVLYWIQNRSSCSRPRRGQL

SEQ ID NO: 357396 - protein, 133 aa, Zea mays
  unsure (1)..(133): unsure at all Xaa locations
  Clone ID: MRT4577_89115C.1.pep
LXTXHLKXPSXXIXXXFIHQFXXXXXFXNTHXNXNLXNXXHXTHXXHXXXPHXXHHNXXXXFKXXNXXQPKTXXXXXXIXQTXXXLNLXXXPPTPSXXXTXLKXLNXXHIILHXKIPILSIXHKFQPXXTIXL

SEQ ID NO: 357397 - protein, 36 aa, Zea mays
  Clone ID: MRT4577_89116C.1.pep
LVLDLVYMKGDFTTCLCQIVRNFQMPSKCSHVSGRE

SEQ ID NO: 357398 - protein, 247 aa, Zea mays
  unsure (1)..(247): unsure at all Xaa locations
  Clone ID: MRT4577_89117C.1.pep
MSDLLQQSMRELMVPRAWCLLLLPIFVLLLRYSVCSKRARKRQRQLDEDDDDDDHLPLPPSPPPLPLLGHLHLIGSLPHVSLRNLATKHGSDLMLLRLGAMPVLVVSSPRAAEAVLRTHDHVFASRPRSLAAEVVLYGSSDIGFAPYGDHWRKARKLVTTHLLTVRRVRSFRHAREEEVSMVMAQIAEAAAAGAAVDVGELLGSFMNDLACRAVMGKSSXRTTKQLRQLVGDTSPLLGSFNVEEFFP

SEQ ID NO: 357399 - protein, 221 aa, Zea mays
  Clone ID: MRT4577_89118C.1.pep
PRVRSARMAACQVPPILPVAASSSPNPPSFSLCSRPDFAQHLVKLLHAGVPASLLCAHGRAAPPTARRAPARIRAVFTVHATPVSPWLKLFPMAVVLQASLPVPIFLVASKLSRTPGLFVRSLQRIPLRQGPARPCALLPARPPVFLSSLWSSLLTGPSCCARRLLARTSLTWRLPLPLPMAGVRLHGRPMLHVQLRRTVQHQQIQILKRRPNFHAVARGP

SEQ ID NO: 357400 - protein, 178 aa, Zea mays
  unsure (1)..(178): unsure at all Xaa locations
  Clone ID: MRT4577_89119C.1.pep
MTCIQDSNACXELDCHEHVIPGDMQMPADKINAKNEDAFHIFFXDWGCQLRVPRXALSELKPTVIDDVTTGTYLQXIYNPEQIISEKDEADNNIVRAHYTIGKEIDDLCLDHMRKVANNCTXLQGXFLVFHTVDEITGSGHDSLLLESLADDYDKKSKLAFTEYPSPQVTTSVAEPYN

SEQ ID NO: 357401 - protein, 109 aa, Zea mays
  Clone ID: MRT4577_8911C.1.pep
KDTPQEKKRTQSPSLRRETGKESRKSQSPSPKNESARGRKKSRSQSPKKDIARERRQSQSRSPKRDTTRESRRSESLSPRRETSRENKRSQPRVKDSSPGEKSRSQSRE

SEQ ID NO: 357402 - protein, 95 aa, Zea mays
  Clone ID: MRT4577_89120C.1.pep
HDTLLTVKLLDLCDQTINAISYHLLTCVYFGSVFVNLSYSFGPFLRLLLPASRLDDLSFLNPFATSLLPEAVAFGFFRDFRLDFGDFPFFRMVTN

SEQ ID NO: 357403 - protein, 76 aa, Zea mays
  Clone ID: MRT4577_89121C.1.pep
SSFMFHLIRCRLVWRTNRSWEPCRASKDWMAPHTEGADGTNEQPWTACTPSALTNTEHGTTTTTTMKLRDGRGPHF

SEQ ID NO: 357404 - protein, 88 aa, Zea mays
  Clone ID: MRT4577_89122C.1.pep
HACNIRKSHFMQIRIFGDCTSLNTDRYIYDNTEVLNINIHGCSRAYDTSIFIENGRSHNKKGTKALAHCFIKIFLKPFIKIILDAQIR

SEQ ID NO: 357405 - protein, 63 aa, Zea mays
  Clone ID: MRT4577_89123C.1.pep
KQCMFFYLDHIHAYSLYTHCLHCKTRICKPYRLVMRFTRYCLLFRFLHGFSVLDTATPILFLN

SEQ ID NO: 357406 - protein, 94 aa, Zea mays
  Clone ID: MRT4577_89124C.1.pep
AILVLGGKVLVYGGEDSQRRRKDDFWILDTPALLQYESGSKKMTRKMWKKLRIDGQCPNYRSFHGACVDASGCCVYIFGGMVDGLVHLQKLGHE

SEQ ID NO: 357407 - protein, 69 aa, Zea mays
  unsure (1)..(69): unsure at all Xaa locations
  Clone ID: MRT4577_89125C.1.pep
XXXNXAFAXVVXALCXEGLLIRDQEGKQXTXCAXXTTHXEXEXLEXHKLKXLDNFXXKHSXRCXXTNWX

SEQ ID NO: 357408 - protein, 111 aa, Zea mays
  Clone ID: MRT4577_89126C.1.pep
HGEASHLWDRAPHRQGAHRRGAKPYGPRTEAAAHTPGPVARSTAPPGPWATATRKERRTVRVQTLTVCSYGLVEMGLMGYLSGLYKLGLSFYQLALFFYNYTPNIYLYRHY

SEQ ID NO: 357409 - protein, 59 aa, Zea mays
  Clone ID: MRT4577_89127C.1.pep
NSGVDKLICRGPPFFFFLGTIRECVVTWVIVQECAQRYPTGAHKKIIGLFPNHLVHRYI

SEQ ID NO: 357410 - protein, 74 aa, Zea mays
  unsure (1)..(74): unsure at all Xaa locations
  Clone ID: MRT4577_89128C.1.pep
SSTVLSFHLCIIVILIPSRIRCVHPKCXCXRCSNCIPEYCXIIICFSIQTNCKYVYLDCDQTYFLPPDAXTLER

SEQ ID NO: 357411 - protein, 164 aa, Zea mays
  unsure (1)..(164): unsure at all Xaa locations
  Clone ID: MRT4577_89129C.1.pep
WRCLLPLLVGVAFLVEITSLCRLDMAKNAEVVESXTSSFYHCSSHWGEAVGRGVVPRSGSDGEDEEIRWCEQRFEREDVVPYDRDVDRDPVLVGGAAKDWSKCYVGCEFXFSASKTLDATFEIAPDSSVEGILGSMESSQYYSKNSIDVPFGSHICKKKKKKGP

SEQ ID NO: 357412 - protein, 91 aa, Zea mays
  Clone ID: MRT4577_8912C.1.pep
RRTGAARPLPTTQRRCSRIRIPLRPQPRPPQQRSSPHSLPRPRGRNRTDPTESGWKGFLCVSVCFCLSGNPTICPPRLACCARDLNRRTRG

SEQ ID NO: 357413 - protein, 83 aa, Zea mays
  unsure (1)..(83): unsure at all Xaa locations
  Clone ID: MRT4577_89130C.1.pep
HSYLFQMGLIADREDGKSNIVSRFTRNHFSLDSKSTIDAKYXTLSLRSDDMHSIGSDLXDTIVKERYREITSGYYRGAVGALY

SEQ ID NO: 357414 - protein, 139 aa, Zea mays
  unsure (1)..(139): unsure at all Xaa locations
  Clone ID: MRT4577_89131C.1.pep
MVINLVDDNRNNSTELTXTKTDNSYRKLLDKIYRFLATRTTSNSNAVILKSLFIRKTNRPTISSRRLSRTISXRKGDQIALIARTENDDKRSIGXTHMKGRELKFTDTTRSSIINGDLECLNFYHITMLAARRIHTSRL

SEQ ID NO: 357415 - protein, 166 aa, Zea mays
  Clone ID: MRT4577_89132C.1.pep
MSEKPNCYFDVTANGQPLGRIEFKLYDQVTPLTCDNFRQLCLKPQGQGYKGSQFHRVIPKFMIQGGDFTKNNGTGGRSIYGEKFKDENFKLLHNKPGLLSMANAGPNTNGSQFFITTVETSWLDGKHVVFGEVVNGFNEVVKVMESKGSANGTPSATLMIADCGTL

SEQ ID NO: 357416 - protein, 80 aa, Zea mays
  Clone ID: MRT4577_89133C.1.pep
PSNHRGGRGLGARQGTGRTGHTPCQASLSRDLGTGPSGRTPLQNTNRAGRPPDSRDGLIPVRSPDPRGIHSKYLHPRSYL

SEQ ID NO: 357417 - protein, 84 aa, Zea mays
  Clone ID: MRT4577_89134C.1.pep
MTPSVAVPEPKHCSTRSPVEHFKDCFPPVTPMASRSQIDIEHSPKGKGNSWAFPAHQRGLMYYPRPVKKHADAVVQAAHKRAMH

SEQ ID NO: 357418 - protein, 51 aa, Zea mays
  Clone ID: MRT4577_89135C.1.pep
DQVVDPARSPTVSDLGHWLGSRKQLPLALTQTPASVMVMFGPGVTVGGPHV

SEQ ID NO: 357419 - protein, 66 aa, Zea mays
  Clone ID: MRT4577_89136C.1.pep
WLALAELAKYNSTTSVKGGPCGTGSSGTASPVRCSYRRSWRRSTIRRACRRGCPRQRQQPGQWCSV

SEQ ID NO: 357420 - protein, 73 aa, Zea mays
  Clone ID: MRT4577_89137C.1.pep
RTRGPLHLRSARPQGLLWRAGSDSSGLTHHARVLIPRRQPVTRCAPRGGPAAVNPPHPLPLRQLILRHHTGVS

SEQ ID NO: 357421 - protein, 111 aa, Zea mays
  Clone ID: MRT4577_89138C.1.pep
SFSARARNRSRNPDVEKDCPTIIHFVLANINFRKYKAPGVLRETKEEKEIADFDIFDDPESPFSTFNFQYPNQAFKRLHDLMYFNTLNNIDVIKDAIVESIEYRRQNPSRC

SEQ ID NO: 357422 - protein, 96 aa, Zea mays
  Clone ID: MRT4577_89139C.1.pep
GGTRPPTRPAEFECLDKSPFRYFLGELYGGNSLGSTIAVGNEKKRQRVYNTMFHVPWRCERGNSESCSPQFLHPSLQLYIVQQKIWLVPSCFHFSF

SEQ ID NO: 357423 - protein, 147 aa, Zea mays
  Clone ID: MRT4577_8913C.1.pep
TTRRGDPAQKKPNKKKKNPSDPTHARKTKRRGKNKKTPPQAAANRRTARRKHAPDGQRHQGADREPKQSGAATTRTTANRAPAPRTTTRAQKPAPRHHRDQHPDQENPHTQKLKQTQEQKVRPAGPNQLDRPPGGPSVPKPTKNHSH

SEQ ID NO: 357424 - protein, 151 aa, Zea mays
  Clone ID: MRT4577_89140C.1.pep
AGRFGDFDSFFFPLVRRRDLPRSHLPTPPPRLGIPPPLHLPLLPHPQAASDSDGEGWPRPGRWRSRSRRSNQTAAAATRCPPSSPGTSTRRPPWTRFMAISTGIIYWYYTYLLKVDEEEYGGHGALLQEGLFASFTLFLLSWTLVYSLAHF

SEQ ID NO: 357425 - protein, 169 aa, Zea mays
  unsure (1)..(169): unsure at all Xaa locations
  Clone ID: MRT4577_89141C.1.pep
MEIATVDLRGVVPGGAGWEAARAAVTASMVAHGCVVVAHDAVGADLRQALFSRALPELFALPLEAKQRTVSPNGEFRGYIGQRPGMDWESLRVGKPTDAASVSGFAETLWPEGNPEFCDTIVAFAENMMELEGTVETLXLEGLXAPRQSIRAHXGSLDHAVPLSDFGVP

SEQ ID NO: 357426 - protein, 193 aa, Zea mays
  Clone ID: MRT4577_89142C.1.pep
MAKARSLAKQKQAQQSNGGGGHALSSKLARYLDPEASLDKDQLLDAVHWIRQAVGLICGLLWGAVPLVGAWIALLTRRNMEAMGRFFPAGSCADAPVSAWLLQDQLLDAVHWIRQAVGLICGLLWGAVPLVGAVWIALFMAISTGIIYWYYTYLLKVDEEEYGGHGALLQEGLFASFTLFLLSWTLVYSLAHF

SEQ ID NO: 357427 - protein, 333 aa, Zea mays
  Clone ID: MRT4577_89143C.1.pep
MEKYELLKDIGSGNFGVARLMRNKDTKELVAMKYIPRGLKIDENVAREIINHRSLRHHNIIRFKEVVLTPTHLAIVMEYAAGGELFDRICSAGRFSEDEARYFFQQLICGVSYCHFMQICHRDLKLENTLLDGSPAPRLKICDFGYSKMADVWSCGVTLYVMLVGAYPFEDPDDPKNFRKTIGRIVSIQYQIPEYVHISQDCRQLLARIFVANPAKRITIREIRNHPWFLKNLPRELTEAAQAKYYKKDNSAPTFSDQTVEEIMKIVEEARTPPQSSTPVAGFGWAEEEEQEDGKRSDDDEQYGEDEDYDGEDEYDKQVKHVHASGDFQHLLK

SEQ ID NO: 357428 - protein, 44 aa, Zea mays
  unsure (1)..(44): unsure at all Xaa locations
  Clone ID: MRT4577_89144C.1.pep
MIRQGSSINYKASVSKELNAKHKKILEGLLRHPENRXCADCKSK

SEQ ID NO: 357429 - protein, 145 aa, Zea mays
  Clone ID: MRT4577_89145C.1.pep
GPQASTNGRGCRSPDGTFSCWRGSSPCPRGTRRCTCVGPLRLWSQLPRSRVGRGGHGGGGWSALSREIVLTSSDFSLTTFWCTSPRCRQKAAGDSRVHVLRAVVRVVVVNHWCRHLACLCATPVDIEAQVGCLWILFPAGPRGTQ

SEQ ID NO: 357430 - protein, 364 aa, Zea mays
  Clone ID: MRT4577_89146C.1.pep
MERYELLKDIGSGNFGVARLMRNKDTKELVAMKYIPRGLKIDENVAREIINHRSLRHPNIIRFKEVVLTPTHLAIVMEYAAGGELFDRICSAGRFSEDEARYFFQQLICGVSYCHFMQICHRDLKLENTLLDGSPAPRLKICDFGYSKSSLLHSKPKSTVGTPAYIAPEVLSRREYDGKMADVWSCGVTLYVMLVGAYPFEDPDDPKNFRKTIGRIVSIQYQIPEYVHISQDCRQLLARIFVANPAKRITIREIRNHPWFLKNLPRELTEAAQAKYYKKDNGAPTFSDQTVEEIMKIVEEARTPPQSPAPVAGFGWAEEEEQEDGKKPEDDEQDGEDEQYDGEDEYDKQVKQVHASGDFRHLIK

SEQ ID NO: 357431 - protein, 403 aa, Zea mays
  unsure (1)..(403): unsure at all Xaa locations
  Clone ID: MRT4577_89147C.1.pep
MEKYELLKDIGSGNFGVARLMRNKDTKELVAMKYIPRGLKIDENVAREIINHRSLRHHNIIRFKEVVLTPTHLAIVMEYAAGGELFDRICSAGRFSEDEARYFFQQLICGVSYCHFMQICHRDLKLENTLLDGSPAPRLKICDFGYSKSSLLHSKPKSTVGTPAYIAPEVLSRREYDGKMADVWSCGVTLYVMLVGAYPFEDPDDPKNFRKTIXNSSLVQQTLNPGLLHLEIIFLNFYALVSXQRIVSIQYQIPEYVHISQDCRQLLARIFVANPAKVLLGSESCKASIILLWSTTTLIPYHHVSXRITIREIRNHPWFLKNLPRELTEAAQAKYYKKDNSAPTFSDQTVEEIMKIVEEARTPPQSSTPVAGXGWAEEEEQEDGKGADDDEQYGYYDGYDGVD

SEQ ID NO: 357432 - protein, 80 aa, Zea mays
  Clone ID: MRT4577_89148C.1.pep
GRVGENKLSSVNSTKDRSSREYTYSERTYVSDMQVKSVSSSDIRISVSSALSTSSHGSMNKSHQASSSGRSLSYFSAQYA

SEQ ID NO: 357433 - protein, 274 aa, Zea mays
  Clone ID: MRT4577_89149C.1.pep
MQQKGTHKKKSMLMRCANANFVWIHSQQICHRDLKLENTLLDGSPAPRLKICDFGYSKSSLLHSKPKSTVGTPAYIAPEVLSRREYDGKMADVWSCGVTLYVMLVGAYPFEDPDDPKNFRKTIGRIVSIQYQIPEYVHISQDCRQLLARIFVANPAKRITIREIRNHPWFLKNLPRELTEAAQAKYYKKDNGAPTFSDQTVEEIMKIVEEARTPPQSSAPVAGFGWAEEEEQEDGKRSDDDEQYGEDEDSDGEDEYDKQVKHVHASGDFQPLLK

SEQ ID NO: 357434 - protein, 57 aa, Zea mays
  Clone ID: MRT4577_8914C.1.pep
VLGYLQLNLSQKKERQKLRLLQSSIHVSTGTAGKRKEEVPAHAALRSGAYSASHLLE

SEQ ID NO: 357435 - protein, 430 aa, Zea mays
  unsure (1)..(430): unsure at all Xaa locations
  Clone ID: MRT4577_89150C.1.pep
MQHGSGDYASSAPSGHYYQHQYAAPGSNPYPIATDATAPGAVSGGYAPAPSYSLGGGYPDQPPSAPVYSQAPSAPAYXRHPPLRPTRXPPQPQHAPGYSPYNTNLNTYPTEAYYTYTPPSTQTAAPPPAEANSPALPYDAPYYGGGYQPSAVLFFNDDYLNEGAYAYXXXGGSEPYGARGMRHCAMMFIYVIAVYVSSDPGTYIVRIRFTFQNQMARLRHIARKSVIPFLPSRLAERPLRRSVSGQSSHLERLHHRLREEQERRCQHREQQGSSSPPQQEVESVRRRSSAPQLEAPPAPPRDAPAVGGGPGGDPDDDDSDHNTKSSEPQEAEGWVARPITRDTARGCHFHDALDTLLRQAFDRHTWSIEYRCVVYQHSRGRYPDRWEATYLVRRPEDDLRGAEAISKHYSISERDTAEAAMQDAARRALS

SEQ ID NO: 357436 - protein, 43 aa, Zea mays
  Clone ID: MRT4577_89151C.1.pep
YFWKLEQEMQLCVQTINCTMQWQRSHTACSAHPPMGVQKECAQ

SEQ ID NO: 357437 - protein, 357 aa, Zea mays
  Clone ID: MRT4577_89152C.1.pep
ASSSSPTRLKTLSIYLVKMARLRHTARKSVIPFLPSRLAERPLRRTVSGQSSHLERLHHRLREEQECQRQHREQQGSSSPPEQEVESVRRRSPVPQLEAPPAPPQDVPAIGGATGGGLGGDPDDDGSDHSTESSEPQEAEGWVARPITRDVAHGCHFHDTLDTLLRQAFDRHTWSIEYCCVVYQHSRGRYPDRWEATCLVRRPEDDLRGAEAFSEHYSISERDTAEAAMQDTARRALSQYCSLFGGVADGLNLRYYPRRPTGSTESVVVSPIGEDNPRLSSTVNLVDVLNIELDHSLDELSRARTEIAELRAELAERRHQEGGSPAPVGTQHPYRSPPRGHHTYGSPACKTRIDLDP

SEQ ID NO: 357438 - protein, 546 aa, Zea mays
  Clone ID: MRT4577_89153C.1.pep
MAVVSPPAGGGIDDVFPTFSSDPPSDPASVDAFIKACPNPPGYHMRSPWDRLTAVSTYGPLGSEEDDEPDSGWDFSGLDNPSAMRDFMTACDYCLSDCSDSSHNLGDEDCGPSRECFHVDLGGLDEGNHLGMPEDGDPPRPMPCVDILRELAVVPVPAGGQDAQLEQIREPRRSATVTPSHRRATAATEESPEPALRGLRLFPEYLSMARLRHTARKSVIPFLPSRLAERPLHRTVSGQSSHLERLHHRLREEQERRRQHREQQGSSSPPQREVESVRPRSSVAQLEAPPAPPRDAPAVGGATGGDPGGDPDDDDSDHSTESSEPQEAEGWVARPITRDAARGCHFHDALDTLLRQAFDRHTWSIEYRCVVYQHSRGRYPDRWEATCLVRRPEDDLRGAEAVSEHYSISERDTAEAAMQDAARRALSQYCSLFGGVADGLNLRYYPRRPTGSTESVVVSPVGEANPRLSSTVNLVAVLNTELDYSLDELSRARTEIAELRAELAERHHQEGGSPAPVGTQHPYRSPPRGHHTYGSPVCKTRIDLDP

SEQ ID NO: 357439 - protein, 450 aa, Zea mays
  Clone ID: MRT4577_89154C.1.pep
MQESLAGPPSQQNPPEGLPTLTTPLLPLPLSGKENYPSDSGVNKGFLPYLGCAHYLQRTQGSRGKIPKTQKFLDWTAAATVDPSLRRVPVAAEESPEPALRGLRLFPEYLSMARLRHTARKSVIPFLPSRLAERPLHRTVSGQSSHLERLHHRLREEQERRRQHGEQQGSSSSPQQEVETVRPRSSVAQLEAPLVPPRDVPAVGGAVGGATGGDPDDDDSAHSTESSEPQEAEGWVARPITRDAARGCHFHDALDTLLRQAFDRHTWSIEYRCVVYQHSRGRYPDRWEATCLVRRPEDDLRGAEAVSEHYSISERDTAEAAMQDAARRALSQYCSLFGGVADGLNLRYYPRRPTGSTESVVVSPVGEANPRLSSTVNLVAVLNTELDHSLDELSRARTEIAELRAELAERHHQEGGSPAPVGTQHPYRSPPRGHHTYGSPVCKTRIDLDP

SEQ ID NO: 357440 - protein, 204 aa, Zea mays
  unsure (1)..(204): unsure at all Xaa locations
  Clone ID: MRT4577_89155C.1.pep
GSTSRPRRMYMYDNRSSRIRRSQSREIVDSRGSLLLLTSTPWWESIDPRRWSPDFIVCEPVLLRYQGIARPADLSHFPLLGAFLLDGVGTCAGDAMSNFRVLSVLYERSRWRYQFCTPRACVFTPSSDGGWRICWHAMNDDDVEVPDIERSHFAGRAARKVYWGMETSSLLVLDESTLKFSLLAFPAPMQLPNRRISFRVIXGV

SEQ ID NO: 357441 - protein, 103 aa, Zea mays
  unsure (1)..(103): unsure at all Xaa locations
  Clone ID: MRT4577_89156C.1.pep
VKLFSECILGEKMNGVCQFMVVFMSPIVSIFFFVLINSXFCWHLYEVVLLWYQRLQYVRDVVYKAFCAGFLFLFMIKNVXTLFIFIMXCVRKTYNIPNNQFSF

SEQ ID NO: 357442 - protein, 303 aa, Zea mays
  Clone ID: MRT4577_89157C.1.pep
MEAASNGGLLYHEVQEGKLCAVHCVNTALQGPFFSEFDLAALAADLDQRERLVMLEGSRSPGAGNAAAGDFFAEGEGSHNVSLGGDFSIQVLQKALEVWDLQVIPLDSPAAGSSLFDPEQEVAFICHLQDHWFCMRKGSGWSIFAVRGNFPKECPMATEGSNGFGQWFTPDDARRITASCNQVQTPPNQQVQSPLLAEQPEGMSEMDMIAAQQEEADLNAAIAASLMDTGVPFASYAAAREHSDSQDSPAREAAPSKDNNQEEAGKAEPSAPPCEEDIQELASGSDTRREVPSVEEKGSAKEE

SEQ ID NO: 357443 - protein, 66 aa, Zea mays
  Clone ID: MRT4577_89158C.1.pep
SGILEVCDVPLVSVDFRCSDVSSTIDASLTMVMGDDMVKVISWYDNEWGYSQRVVDLADICAIKWK

SEQ ID NO: 357444 - protein, 329 aa, Zea mays
  Clone ID: MRT4577_89159C.1.pep
MEAASNGGLLYHEVQEGKLCAVHCVNTTLQGPFFSEFDLAALAADLDQRERLVMLEGSRSPGAGNAAAGDFFAEGEGSHNVSLGGDFSIQVLQKALEVWDLQVIPLDSPAAGSSQFDPEQEVAFICHLQDHWFCIRKVNGEWYNFNSLYPAPEHLSKFYLSAFIDTLKGSGWSIFAVRGNFPKECPMATEGSNGFGQWLTPDDARRITASCNQVQAPTQQVQPPLLGDRSGGMSEMDMIVAQQEEADLNAAIAASLMDTGGPFASYDADQEYSNSQDAPAAGPARSKEEADKSEPSAPPCEEETQELASGSDTKREVSSVEEKGTAREE

SEQ ID NO: 357445 - protein, 78 aa, Zea mays
  unsure (1)..(78): unsure at all Xaa locations
  Clone ID: MRT4577_8915C.1.pep
MGGGSGQKCKMDCKRXLAEEHGAXRGSQLETNNMAMTIQHVEGMQTFMCTTTGEKCPEHAEAKHPKTDVNQCFPHVKN

SEQ ID NO: 357446 - protein, 59 aa, Zea mays
  Clone ID: MRT4577_89160C.1.pep
RGGPPFGKATPPDKLAFLGALRVDIYSVRRLCFPTIGVQSGPFCFGLYFSLIGTSYRPL

SEQ ID NO: 357447 - protein, 330 aa, Zea mays
  Clone ID: MRT4577_89161C.1.pep
MEAASNGGLLYHEVQEGKLCAVHCVNTALQGPFFSEFDLAALAADLDQRERLVMLEGSRSPGAGNAAAGDFFAEGEGSHNVSLGGDFSIQVLQKALEVWDLQVIPLDSPAAGSSLFDPEQEVAFICHLQDHWFCMRKVSGEWYNFNSLYPAPEHLSKFYLSAFIDTLKGSGWSIFAVRGNFPKECPMATEGSNGFGQWFTPDDAREITASCNQVQTPPNQQVQSPLLAEQPEGMSEMDMIAAQQEEADLNAAIAASLMDTGGPFASYDADREYSDSQDAPAAEPARSKEEADKSEPSAPPCEEETQELASGIDTKREVSSVEEKGTAREE

SEQ ID NO: 357448 - protein, 263 aa, Zea mays
  Clone ID: MRT4577_89162C.1.pep
MGAIRVASLLLLAGVIWLSRAMFGAEAAGTTVFTLHNNCTHTVWPATLSGNSAAAVGGGGFELSPGATVSFPAPAGWSGRLWARTGCVASSSSPAGRLSCATGDCSGAASCSLGGAPPVTLAEFTLGGADGKDFYDVSLVDGYNVGIGVAAAGARVNRATCGYAGCVGDVNALCPPELRTAAAAGGEGAPAVACRSACEAFGSPEYCCTGAHGGPNTCGPTKYSRLFKAACPAAYSYAYDDPTSTFTCGTGAQYLVTFCPGRQ

SEQ ID NO: 357449 - protein, 193 aa, Zea mays
  unsure (1)..(193): unsure at all Xaa locations
  Clone ID: MRT4577_89163C.1.pep
CGGGAGXPARTVEVEERGLPARGGGGEVGAGRRVQWRWRSGGWPARVVEVEERGLAGARWRWRCAVWRARTAMKSSPLAYARRDTNTPSTDPPRLLLPSAVPPIDSTDPLFTTSPYSDPKRPRPSPNPTHPSQPAMMAEERGRGGGAGWQRARWRSELAVGAVEEQAGGAARGGAGTGGSRVGGIPAGLEVPN

SEQ ID NO: 357450 - protein, 131 aa, Zea mays
  Clone ID: MRT4577_89164C.1.pep
MGLLDQLWDETVAGPRPDHGLGRLRKYSSFSPSTAAAADVAPAVTRSITIARPPSLSVPSGESSSVPPSPASAPDSPFAAVLIDRDRFCWIGDASLVPRARCSHIIRSVTTVPVAEMSGNLLMNLKFPSVN

SEQ ID NO: 357451 - protein, 166 aa, Zea mays
  unsure (1)..(166): unsure at all Xaa locations
  Clone ID: MRT4577_89165C.1.pep
NKGQSEHEEIHESSGGGLGYTDDDDCKSRRPLLLKTTASVESYSDSAADIPLIXFAALEGLMXGYDNGATCGATILFKPXTFRGTTWNKWSTVRTGLEVRASLYXGAKNGSELAYTIXADCLGXRKEPILAAYLIMVXASMTAIAPKCTMMVKGRFLYGIRKGVGM

SEQ ID NO: 357452 - protein, 44 aa, Zea mays
  Clone ID: MRT4577_89166C.1.pep
NCSLESPALPLFCNHVVLRDLQKRKHFSLCFFLASKLVLCVFAN

SEQ ID NO: 357453 - protein, 290 aa, Zea mays
  Clone ID: MRT4577_89167C.1.pep
MRLSAAALLLALAAAGSVCSAQQLRRNYYASVCPNVESIVRDAVAKKYRETFITVGATVHLFFHDCFVEGCDASVVVASTPNATAEKDHPINLSLAGDGFDTVIRAKAAVDAVPRCRNRVSCADILAMATRDAIALAGGPAYAVELGRLDGLSSTATSVNGKLAPPSFGLDQLTALFARNGLSQADMVALSAGHTVGFAHCGTFSGRVRAADPTLNRSLAEKLAAWCPDGVDPRVAVTMDVVTPRVFDNQYFRNLQSGMGLLASDQVLLGVVMDRDPNSSSQNVKALNKL

SEQ ID NO: 357454 - protein, 95 aa, Zea mays
  Clone ID: MRT4577_89168C.1.pep
SWSVASVWPWCRFLVPCGWSLLSLHLSARLPPAGVCLLGWGWSSVVALGWVLAFFCLGLGSLVTLLGAGRLFLLGLLFVFGLPFWLGFLALLPRG

SEQ ID NO: 357455 - protein, 62 aa, Zea mays
  Clone ID: MRT4577_89169C.1.pep
SYFIDMLQEVRTHDLQYLRSTCAHNQTQVPPPMGKYEMTLNKGWRRRSGCRRRALDPTGAAG

SEQ ID NO: 357456 - protein, 94 aa, Zea mays
  unsure (1)..(94): unsure at all Xaa locations
  Clone ID: MRT4577_8916C.1.pep
FKAGEXTKXRRCHLRGGTVLPQIPEREGTTRGNHGQRDTKEGGPGREGRRRRESGKGRGRPRTRNAGQPGTRTRDSRTETGRPRHHTRGYTKTR

SEQ ID NO: 357457 - protein, 161 aa, Zea mays
  unsure (1)..(161): unsure at all Xaa locations
  Clone ID: MRT4577_89170C.1.pep
HPGTNVVTGKWNFKPKFHXDGTLAHHKTRWMVRGFSQQHNIDYNEAFNMVVEPPTIRVILNIATSRAWPIXXLNVKNVFLHGHLEEMVYCQQLFGFIDSFGPNHVCQLQNSLYEPKQAXWAWFQCFDTYLHRLEFIASVSDTSLFVYKDPRVRGRVGGRER

SEQ ID NO: 357458 - protein, 87 aa, Zea mays
  Clone ID: MRT4577_89171C.1.pep
LKAGGPEKPRRSVVPLLSRRRCSPRLPLLLLPVLYSLPSQIVTEVHSACLNVTSIRNPPPPHSTMKVVVAYLLVVLDGNSQPHPLTI

SEQ ID NO: 357459 - protein, 51 aa, Zea mays
  unsure (1)..(51): unsure at all Xaa locations
  Clone ID: MRT4577_89172C.1.pep
PPNTTKRNLFCFLEQSRIPFIYLPPPRIKNPXHALIFPPPPPISHELATSS

SEQ ID NO: 357460 - protein, 68 aa, Zea mays
  Clone ID: MRT4577_89173C.1.pep
PTTSPGPSAIQQSTDRTSNDVCIQTSHGHFRYNPPSASPKLRNVTYRTRVSTERPDHQQVTTPPRTRG

SEQ ID NO: 357461 - protein, 170 aa, Zea mays
  unsure (1)..(170): unsure at all Xaa locations
  Clone ID: MRT4577_89174C.1.pep
LLSIWDPYQRAFLMMNIPVLHCDAAXEHHCIRIXRSYIGRSSSYHLWIADXSPPAATSLDALKVLPLYHNEGWEGVISSLQEWMSDXEMXSKPGLHWSGGIGFMHDRXYTEXLKHALSEGTLGLRALNEQIFFSMHRSHYADKPLHILERSDEDLTLTSSCNRWLGIDGG

SEQ ID NO: 357462 - protein, 63 aa, Zea mays
  Clone ID: MRT4577_89175C.1.pep
TGNGPQSGRGGDLLFGPNLVLPKYIYTPCNTYFAKKQPRLEFPPTIPFFNFCPQFLNHKFCAP

SEQ ID NO: 357463 - protein, 46 aa, Zea mays
  Clone ID: MRT4577_89176C.1.pep
AVSHRLDPCMSGQLISIYPGNVEDTVQLALNTHYSIISRYHHFRHG

SEQ ID NO: 357464 - protein, 54 aa, Zea mays
  Clone ID: MRT4577_89177C.1.pep
KPDGPPLPTTYSFQFHTLLHSTSTPIRCLTSCFELLALTARPSMLTMQYLRSVA

SEQ ID NO: 357465 - protein, 63 aa, Zea mays
  unsure (1)..(63): unsure at all Xaa locations
  Clone ID: MRT4577_89178C.1.pep
FWYEVPPEDGMDGQVKEELMQLVGAKHAGVAYIMGXLYLXARTSSSTLQKVDMAGGYSLRRKN

SEQ ID NO: 357466 - protein, 191 aa, Zea mays
  Clone ID: MRT4577_89179C.1.pep
MEVEVARVLEAMVHMELRLTAALAGSGGEQDPESFSYATASSAIAPRYDDSVFGSSAVPAYDDVPVDDELYRDEIAKVLALLEYNGMTSSATILADYTTATTSAVLVGCDGEQAARGCTTFFDDDYIDELDVWDKDAMCTDADGSSEQPAPQCARKEIRLPQRVCFAPDNSFSGTGSCLCWVDLVQASSSA

SEQ ID NO: 357467 - protein, 237 aa, Zea mays
  Clone ID: MRT4577_8917C.1.pep
MDGEMDEDVLTEILARLPCRSLARFQCVSTSWRRIISSDYLRRRLPLITSGVLYHDGGRRQQSYTYACASGGGGGGGAMAEAADMRFFPRHETSTIIDGCNGLLLYYASRPAAFHVVSPTTRRWAELPAPRAMTLLSVLAFDPRASPRYRVVCFTGWLPRGATVEVFDSERGAWRGHELDFGLGTDAMSASMHYAAGALHVLAYSGHVVRVDLDTMACAVTPLPAPVSCRARPAPLP

SEQ ID NO: 357468 - protein, 102 aa, Zea mays
  Clone ID: MRT4577_89180C.1.pep
SFELQEKDILDYARQTLERKPSVLWLLPPVLTAAAIPPQSSLFQIYLAQIDKQIHEAAPADRKCSCRGDEIDRHGNCEITERIQCLYAFHIQQLSYNGSIMA

SEQ ID NO: 357469 - protein, 66 aa, Zea mays
  unsure (1)..(66): unsure at all Xaa locations
  Clone ID: MRT4577_89181C.1.pep
XGKQMNPQLVVGNLHDKVFCPKDLFLTCTIRDWAKTLGFQYSFFLFRRVVKQKPWVRITVIWIHDW

SEQ ID NO: 357470 - protein, 119 aa, Zea mays
  unsure (1)..(119): unsure at all Xaa locations
  Clone ID: MRT4577_89182C.1.pep
EQAYDQFLVLKGSWEQIVLNDAHDRWRYIWGSDKFSPQKAYRFSMGRMQIHPIYRLVWKSKCQPKHRVFYWLGLKIRLNTRNILRRRNMELDSYSCENCLWQREXTLYHLFLRCNFAKA

SEQ ID NO: 357471 - protein, 209 aa, Zea mays
  Clone ID: MRT4577_89183C.1.pep
MAAEMVGSVVAQETVSQILSGLVQRYAESSDANRNLERLEMAHIRLEAALDASDRWQIADASLLRWRKKLRRVAQECDDVLHRCRQQGVAQAQEPATPSSSLSPLAALPTRIARATKSLIFSAFVGDAGAPSRSTVQRFEWFADGAGEFLRYVEVGGGAAPRCHVPLRRSLTRHLFAGMELLLQHKIVWGRGRDQCPSYLLWVVPSVTP

SEQ ID NO: 357472 - protein, 114 aa, Zea mays
  Clone ID: MRT4577_89184C.1.pep
EKKEQKGPQQCNIPLIIIYPRPGTLQIQHMRWSGARNLPISQFLQIPKRPEKPSMPRFPKRKPPFLTRLGCLGLKRGEPYFNTTPSGAYNPISPLGGYHPQDASIFPKELTGDR

SEQ ID NO: 357473 - protein, 124 aa, Zea mays
  unsure (1)..(124): unsure at all Xaa locations
  Clone ID: MRT4577_89185C.1.pep
MAAEMVGSVVAQETVSQVLPGLVQRYAESSDATRNLERLEMAHIRLEAALDASDRWQIADASLLRWRKKLRRVAQECHDVLHRCRQQQGVAQAQAQEPATPSSXSPPWRALPTRIARATKSLIF

SEQ ID NO: 357474 - protein, 77 aa, Zea mays
  unsure (1)..(77): unsure at all Xaa locations
  Clone ID: MRT4577_89186C.1.pep
MAEEGIAAGGVMDVNTALQEVLKTALIHDGLARGIREXAKALDKRQAHLCVLASNCDEPMYVKLVEALCAEHQINLI

SEQ ID NO: 357475 - protein, 33 aa, Zea mays
  Clone ID: MRT4577_89187C.1.pep
TSIDILIYINKTYIITNKKSPIFYHIIQPYKDT

SEQ ID NO: 357476 - protein, 55 aa, Zea mays
  Clone ID: MRT4577_89188C.1.pep
SGVAVLTVADDGLTDIDVYPLETFTVAITTAGGLMHSPLCANSLVGSQHIVLDYI

SEQ ID NO: 357477 - protein, 53 aa, Zea mays
  Clone ID: MRT4577_89189C.1.pep
TAILIPSISLKNEGFRRDEETLQPSIYLNNLPDKIPEGTRVLSCDPMLATGGT

SEQ ID NO: 357478 - protein, 90 aa, Zea mays
  Clone ID: MRT4577_8918C.1.pep
LNHGVAQDPRTKLLYRLLSHVSKEHALLHLLNSDTVRLHVECSFTERTPPLAFILRRTLDNQLSVANLRRDHALRIDMNMHLKGGACTWT

SEQ ID NO: 357479 - protein, 255 aa, Zea mays
  unsure (1)..(255): unsure at all Xaa locations
  Clone ID: MRT4577_89190C.1.pep
MPSPAAAAAAPFHRIACARQHLPQTRLFFLPSRALLKSGCLTVPAPLRVHALRLPPTVPRAASHDAATGVRSPTSGGQMLVFVPPHPLIKHWVSVLRNEQTPCVIFKSAMAELGRLLIYEASRDWLPTITGEIETPVAVASVEFIDPREPVIXSSYFQFLVIPILRAGLALAELASSVLPATKTYHLGFSXRDEETLQPSIYLNNLPDKISEGTRVLVVDPMLATGGTMAAVIDLIIECGVTSMQIKVIFDIALP

SEQ ID NO: 357480 - protein, 401 aa, Zea mays
  Clone ID: MRT4577_89191C.1.pep
MEQATGVSGPEHIIDIPREIGPPASVSRSAGRENHEESNPVDRPSTRALVPALQAPSAIGAVPITGHTSGTRRNDNYVRRHRSPLNSGLWISIEVIVNFSQIVAAIVVLCVSRKEHPQAPLLEWVIGYTVGCFATLPHLYWRYIHRNIVNGEHESSHTPQGSAHNNSNEATHAASASERRRNAARNAVLANPRINALFDHFKMALDCFFAVWFVVGNVWIFGGRSSAADAPNLYRLCIVFLTFSCIGYAMPFILCAMICCCLPCIISVMGFREDTNNTRGASSESINALPTYKFKIKKRRHGSGSETEGQEGGILAAGTDKERSLSAEDAVCCICLAKYAHNDELRELPCAHCFHKDCVDKWLKINALCPLCKSEIVSSSGTSDARQSDQNTVPVQEIEMH

SEQ ID NO: 357481 - protein, 107 aa, Zea mays
  Clone ID: MRT4577_89192C.1.pep
RTRPGRPGPTHPTKAAEPAPRGVGGVRARRPEGRLQHLQHSMTALNEQENNMSLTAFSGGSNLLTEPVYDRLVEPAARRDSGNPHGQTPLQRNARRPRAQRRRHGGR

SEQ ID NO: 357482 - protein, 137 aa, Zea mays
  Clone ID: MRT4577_89193C.1.pep
RPGGPPTHTSSSSALSLPHHRRGRRLLPRGYPLRPRSHLLCTPRPARSVHRHGRPPCVGAHLVLACRARVWLGLVYRPVSSDRHRFRARDRRLSIRCDCLPSPACFVLLREGHCCHRVHRRISPQIYVARSCGCLRR

SEQ ID NO: 357483 - protein, 107 aa, Zea mays
  Clone ID: MRT4577_89194C.1.pep
KLIFVFLLYFLVIFYVHAFYIKFIKKPNYLLLKTFFFFEGATLKRKLRPGGYTGREEETFHVGQRVLIKGRSVNLERLVDYPRRVELGENFFTKVECLECLGFLRKI

SEQ ID NO: 357484 - protein, 185 aa, Zea mays
  unsure (1)..(185): unsure at all Xaa locations
  Clone ID: MRT4577_89195C.1.pep
MAFPKPTNLAELAAFAAEMMAATGSEQNTPQDFVNLHNRARTEDGVGPVPCDARVVRYXQDYAPNRAGDCRVVHSYVPFGENIFCGSALRSXAPLDALRTRVDXKQXNYHLMSNTCDPDKVSVHYMQXCARRSTXRIQLASVLCXNNSGXNVACVYDPRGNVHEQRPFFTLNAYAEYMQRSHVHA

SEQ ID NO: 357485 - protein, 58 aa, Zea mays
  Clone ID: MRT4577_89196C.1.pep
FTLKNRVKFFDQGLAFSHLPGEILPAAWTACWSPLFWPIFWNPFWSARKMSWISPLDR

SEQ ID NO: 357486 - protein, 51 aa, Zea mays
  Clone ID: MRT4577_89197C.1.pep
LFFVCVLLLWYDLPQCVHMEVGGLVMVTRSFSCKRTMVYTLLTPCRGHAMT

SEQ ID NO: 357487 - protein, 71 aa, Zea mays
  Clone ID: MRT4577_89198C.1.pep
MVVVDPKAVASAHQFTVVIDGVETTVHEGVLRRNGGTVAVVGPGVLEVSRLQHVVVRGGGGGDVRFSRCLY

SEQ ID NO: 357488 - protein, 104 aa, Zea mays
  Clone ID: MRT4577_89199C.1.pep
MDGPDTQTGRYCLRIQRNRGYYTSKELVRRVTVESQPCLADGKAAIGKMNHHKSDRSDCTKDQTSSLLTARRRVCLKDDNERACLIDDSMCKPVSHSYHLENPR

SEQ ID NO: 357489 - protein, 51 aa, Zea mays
  Clone ID: MRT4577_8919C.1.pep
MQLTGDIDRMVRLQKMLEQYGICEVARTGRIALLRESGVDSKYLRGFSLPL

SEQ ID NO: 357490 - protein, 39 aa, Zea mays
  unsure (1)..(39): unsure at all Xaa locations
  Clone ID: MRT4577_891C.1.pep
LTECYKIYNIYKCRKFILVKIYSNTTIKYMKYVXKKKNK

SEQ ID NO: 357491 - protein, 62 aa, Zea mays
  Clone ID: MRT4577_89200C.1.pep
KRPPQVYLNLLLFCGTVKTVCQFFFWQFNSKKKKKKKKKKKKKKKKKKKKKKKKKKKKKKKR

SEQ ID NO: 357492 - protein, 112 aa, Zea mays
  Clone ID: MRT4577_89201C.1.pep
FGGIYPTTGCIITAINILFKSTETKSQGLFTGSAVYRDRHFLFHLQHPLTIFPGEMAKIFPTKKRLVRTNRLNDLATDLMDMEHGCVVYGTFQAFNVVCLHMGYTLFTTNHC

SEQ ID NO: 357493 - protein, 254 aa, Zea mays
  unsure (1)..(254): unsure at all Xaa locations
  Clone ID: MRT4577_89202C.1.pep
SGLDLHLPSFTDLNAQQAENHYFDNEPPPKDLKANITLAREFITRHNDDHRRVVLVTSGGTTVPLEQQTVRYIDNFSAGTRGATSAEYFLQNGYAVIFLHRQFSLLPYSRHYSHNTRSFLDYMKEENGQVVVDEQHQDQMLRVLRQYTEVKRGNKLLILSYVTITEYLWNLREVAQLMRPLGPKAMFYLAAAVSDFFVPQDRMVEHKIQSNEEFHQGADGVTESKAKPPAXRTQGQSLIIDLEPVPKFLNNSWT

SEQ ID NO: 357494 - protein, 54 aa, Zea mays
  Clone ID: MRT4577_89203C.1.pep
FIFIIIVFLFTQIMGRSDRLYPNREAIYKTFRIQPKVSCVDRPSPTLTPEKTKR

SEQ ID NO: 357495 - protein, 57 aa, Zea mays
  Clone ID: MRT4577_89204C.1.pep
TLTPCPTTSRICYTSTLLQTMSDETSAWWCPGGRYTWPYWPILPVTGSWRSVDGAPL

SEQ ID NO: 357496 - protein, 45 aa, Zea mays
  unsure (1)..(45): unsure at all Xaa locations
  Clone ID: MRT4577_89205C.1.pep
ARDSIILYWSISPSERTPRPTQTGAAIXLVSSSSLYAPAGFSGRR

SEQ ID NO: 357497 - protein, 147 aa, Zea mays
  unsure (1)..(147): unsure at all Xaa locations
  Clone ID: MRT4577_89206C.1.pep
RVPSMSSPHLDEDIATSQGXIMSHAGTLCDWPCQLQCAADNRVHRLGRASWELAVRDSFLCPFFSSWCSPTSVVPSGAQQWHVHRISSRNREERDSRLMECERCGRRRCEDCRRRCRRNGIRLSAQDGGIVAHGDRRHRRRRHCSTG

SEQ ID NO: 357498 - protein, 263 aa, Zea mays
  unsure (1)..(263): unsure at all Xaa locations
  Clone ID: MRT4577_89207C.1.pep
CCVVIARSKDGSVERPLNTSAHPQPQLLLLLPHXLSSVTSDGFLQCLSDNIPVGLIYTQGSTNFTDELVSSVRNPRLFTSATVRPLCIVTPVDASHVQAAVRCGRASGVRLRVRSGGHDYEGLSYRSERPEVFSVVDLSNLRAITVSADDDERPVPPTASAWVDSGATLGELYYTVAKNNPELAFPAGICPTIGVGGHLSGGGIGMMMRRFGLSVDNVLDAKLVNASGDLVDRAAMGEDHFWAIPGGGGESFRVXVSWESEPR

SEQ ID NO: 357499 - protein, 47 aa, Zea mays
  Clone ID: MRT4577_89208C.1.pep
HRRLKQTKENLIILYFEYKGRHEYGKEYITKSFEITNRIDNATAQMV

SEQ ID NO: 357500 - protein, 198 aa, Zea mays
  Clone ID: MRT4577_89209C.1.pep
GVDGAALAANIMQNLLAGASQFQHQFQNLNFSGAGANQFPQQFQNQNFSGGAGANQFPQQFQNQNLSGPGTNQFQQQFPNQNFSGFPNQMPMPFLQTMHQTGMPANPMPFGGRPPANPPSGPASIAPMGQGNFGQPPNPQGFTIPAPPGEDGKQGSPPQFSSRQFHQGSSSSFGRGRTQHRGGRHSYGRGGRGGRHPR

SEQ ID NO: 357501 - protein, 146 aa, Zea mays
  unsure (1)..(146): unsure at all Xaa locations
  Clone ID: MRT4577_8920C.1.pep
IYIXLRFLQLGYYQCTYTTCVVKKILDPSSIVSDCRHIVVYDTSSLPMCCVILAEARNLTAIISTVLTLGFLNDSSSSILRSQNDRGDLKSRSVMSGNGELQREGKPAEVLGVNSRLSEQSNPACPCNLQKNYCNITLATDPLLQT

SEQ ID NO: 357502 - protein, 78 aa, Zea mays
  Clone ID: MRT4577_89210C.1.pep
MAVATTARWLLLLDVVSAAAASGKHERWRVGGQVVEKERPKPSELWSASSVSVAKSNRSTRGKVRFWERERRDWRRIR

SEQ ID NO: 357503 - protein, 106 aa, Zea mays
  unsure (1)..(106): unsure at all Xaa locations
  Clone ID: MRT4577_89211C.1.pep
GRADCLRYRSEMDTILHDCRLAEINHYTPYSRVVQVTSDRPHSHAHRYIDLCRYARCTDLTQESCYCLEKSQRDLFIQTTEHPPAYYTEPPNIAIIRQIIDSDSXF

SEQ ID NO: 357504 - protein, 73 aa, Zea mays
  unsure (1)..(73): unsure at all Xaa locations
  Clone ID: MRT4577_89212C.1.pep
FADWQALHVKNSSRFLLIPLTVYSCCHRSVICLXICIYRFNFLLLIYALHMIHNIXDSCYHTHFIPAPFFVSS

SEQ ID NO: 357505 - protein, 603 aa, Zea mays
  Clone ID: MRT4577_89213C.1.pep
RRAQRLQFFQLLRKGRYKSRQSSCPSRGEDEGFNQANEYNENISRNAAELSGTEDSIAKINHATSADVKDRLDNQESRTGVRRVVSDGQFPVATDIPDTLDAKWRGQNEPAPDSNLAKPPLSVEDTTVDVKNQAKAVHTFTFTVRSGDAAEELLRWIKMPYMTSNSSLNTTSSSPLRFTSLAEYIPKYVELFCDLSQKGGARLFLPTGANDIVIPVFDDEPTSVISYALVSPMYCFQLSDDSSKNRDKESSLPLPVYDSGNFNPFHLFEEFGSHYDVTSSVSGVRGSFAPDQVHLSVSFEDGGPLGKVKYNVTCYYAKKFEALRRSCCPSELDFFRSISRCKKWGAQGGKSNVFFAKSLDDRFIIKQVTKTELESFLKFGTEYFKYLSESISTGSPTCLAKILGIYQVTSKHVKGGKESKMDLLVMENLLFGRNITRLYDLKGSSRSRYNADSNGSNKVLLDQNLIEAMPTSPIFVGNKAKRLLERAVWNDTSFLAGIDVMDYSLLVGVDEEKHELVLGIIDFMRQYTWDKHLETWVKSSGILGGPKNASPTVISPMQYKKRFRKAMSAYFIVIPEQWMPAIINPSKSSSNICQEDSQNGSQE

SEQ ID NO: 357506 - protein, 57 aa, Zea mays
  Clone ID: MRT4577_89214C.1.pep
KKDGIQKFPNALAQKMNAFGFRKKAPQRAQEEALRKPPPLLEQLKVISKAEKKLTPN

SEQ ID NO: 357507 - protein, 117 aa, Zea mays
  Clone ID: MRT4577_89215C.1.pep
MAPKESQQQQSPAEVAAPAARSIPDEARRLLHELAAAWEDVAGCGPREPEVVPLKGAMTNEVYRARWATGSGDSSAPGQSDARTVLVRVYGEGVDLFFDREDEVRTFEFMSRDGHGP

SEQ ID NO: 357508 - protein, 91 aa, Zea mays
  Clone ID: MRT4577_89216C.1.pep
WPEPPKTPRHIFTGPKKKPFWGRTLETFGGETLQGGFSGGPQPNFGTGIKKPFWWGRNMDIRVGVYPTRQNFFGRVEGFLGNFGGVLLLRG

SEQ ID NO: 357509 - protein, 257 aa, Zea mays
  Clone ID: MRT4577_89217C.1.pep
MAATVLFTPAQCHRATATTSGRGAPSHCALAPGHRRPGRGSVRAVPPEQSSLPQAAAAAVYGTAGDVKAALYRALDGANRGIFGMTSAKRSEIHGLVELLESRNPTPEPTAKLQDKVDGCWKLIYSTISILGKKRTKLGLRDFISLGDFLQIIDVKQEKAVNVVEFSARALKILTGKLTIEASYRVTSQTRVDIKLESSTITPEQLMNIFQKNYDMLLDIFNPEGWLEITYVDESLRIGRDDKENIFVLERADLPDV

SEQ ID NO: 357510 - protein, 51 aa, Zea mays
  Clone ID: MRT4577_89218C.1.pep
TLAEIHSYPATLRMVTGRTLYAIDGVWIKPALVACAMYPLLDKTRDHARAP

SEQ ID NO: 357511 - protein, 79 aa, Zea mays
  Clone ID: MRT4577_89219C.1.pep
TLPHSPPFPSGVDKSDDAKSPFISGIYIAQIKTYFVYAARIYIQICMYSPLLTQRDQFLCLEHEICVELTGSDEAVTRS

SEQ ID NO: 357512 - protein, 51 aa, Zea mays
  unsure (1)..(51): unsure at all Xaa locations
  Clone ID: MRT4577_8921C.1.pep
XPXXXPXPPPPPPXXPXPPPXFLPPPPPPXPPFSSPFPSPXXXPPFFLSPP

SEQ ID NO: 357513 - protein, 125 aa, Zea mays
  Clone ID: MRT4577_89220C.1.pep
TKLGLRDFISLGDFLQIIDVKQEKAVNVVEFSARALKILTGKLTIEASYRVTSQTRVDIKLESSTITPEQLMNIFQKNYDMLLDIFNPEGWLEITYPLISFLSLWSTSWMFGFYGLIFCLSILVP

SEQ ID NO: 357514 - protein, 78 aa, Zea mays
  Clone ID: MRT4577_89221C.1.pep
TSSAMSGPPNTTTVKPAPRKFSPHGRSHFLSSLPYPSIYSSRQNVHLNNLTYSENPIIYMTIHGYILYCALTSVPKRH

SEQ ID NO: 357515 - protein, 58 aa, Zea mays
  Clone ID: MRT4577_89222C.1.pep
HPTFNTVSSISISTDPPTTTTSTTSFIPTSRSSILRSSYIRRLLCPTSSASSPSPLIT

SEQ ID NO: 357516 - protein, 98 aa, Zea mays
  Clone ID: MRT4577_89223C.1.pep
QGESLGAVFTNMTDSHRGTYVSVSIGRLRIARMRFTRVFFHRRLRDEYDGEALRYRRQSIIISIPLSIPTLLIRNLRIHLSINRILIPTSNISSSHRV

SEQ ID NO: 357517 - protein, 89 aa, Zea mays
  Clone ID: MRT4577_89224C.1.pep
ARISSLQRILLGHFFFRPFCSTRGPRLGACPPYRAFWGPSFSLGTLELFQRERRVLWPLLFFLDPPREVACPPPPPCFSYQDCTLKIIK

SEQ ID NO: 357518 - protein, 129 aa, Zea mays
  unsure (1)..(129): unsure at all Xaa locations
  Clone ID: MRT4577_89225C.1.pep
ETHEAKRTSGGQATAATKTRALRAXGAXGASAARAAIXPQGXLAPSAIIAQFLPPVTGMGLGGAAVQANRLQQALGASVLXRPIAQWQQRALAHLAVEXVTGEQRRRVLPALRHRAVVNPAGYWLGSWL

SEQ ID NO: 357519 - protein, 75 aa, Zea mays
  Clone ID: MRT4577_89226C.1.pep
ILFIYTIIEVLEAPSTRTNTTPNDAPAKTTTLETDQPLGEAKTRETLITQSEEENIHAKPAYGKANTVPKTPKQP

SEQ ID NO: 357520 - protein, 128 aa, Zea mays
  Clone ID: MRT4577_89227C.1.pep
PNAGTASLGAGTVGPGVGSAGPGETAAAGTFHWRRRRPNGPPGGGWATALTAAAKQHGAARVSASPFGRAGSGRLVGRLAWPVGRLFWPAAWAAPAWWHLARPGLEAGRVGRLGLVAPGPPPCGQIGP

SEQ ID NO: 357521 - protein, 153 aa, Zea mays
  Clone ID: MRT4577_89228C.1.pep
TLEAGRVYACLAGLIWALISFRWRIQLPSIVNNSIRILSDGGLGMAMFSLGVFTALQTKIVACGTKRMLLSLGIRFFLGPGLMVISSYLIGMRGTLLKVAIIQAALPQGIVPFVFAKEYNVHADILSTAIILGMMVAVPVALGYYFVMDHPRL

SEQ ID NO: 357522 - protein, 153 aa, Zea mays
  Clone ID: MRT4577_89229C.1.pep
KKPPRAPKRGGGGEKGPFCFNNVSTSKNSLGGGGSPSQLFLVAPKGGSPPHKFFGRNKSKRGGVGFKKQNGCRFNPIFGVGGLNPPQRGLVPLVFCFPPRERGFFGWVFGKTLRVGGSRVFGGPPGPLKLFGSFPPIFFGNPQNFFPNKFFFL

SEQ ID NO: 357523 - protein, 61 aa, Zea mays
  Clone ID: MRT4577_8922C.1.pep
FLDELEYGKREVMDLAEARQHQRLIVGAALLLATAAFLRLLLGSRSRGGMRLPSTIPVAPV

SEQ ID NO: 357524 - protein, 90 aa, Zea mays
  Clone ID: MRT4577_89230C.1.pep
ACHLILSCPPGRMAFQAQSSFFCQAQHGCIHRARKVSFTTSPPTGAAMRHYDARSRVPHCFASSYRPPARLLCAGHGVWVVVQQTPPISP

SEQ ID NO: 357525 - protein, 46 aa, Zea mays
  unsure (1)..(46): unsure at all Xaa locations
  Clone ID: MRT4577_89231C.1.pep
LGPQAPTGKYFQFPPKLPHPPPLLHPPIPPPPPPXPPPPPPNPPPP

SEQ ID NO: 357526 - protein, 77 aa, Zea mays
  Clone ID: MRT4577_89232C.1.pep
IFWGFLMPKQSFSLNRVTKQCLKEPANLWRGVPSISTLKRGNTSKEKKMIQTMRTQEFTLEQLKTPKGQLSGQVQNL

SEQ ID NO: 357527 - protein, 77 aa, Zea mays
  Clone ID: MRT4577_89233C.1.pep
FTIFPSDTQIKGTGYIFHTIHPTPKIQTKKLYILNTLNTISKINIIQTPTIYIIQPFNLIRSQTDTPTFLLYPHIYI

SEQ ID NO: 357528 - protein, 340 aa, Zea mays
  unsure (1)..(340): unsure at all Xaa locations
  Clone ID: MRT4577_89234C.1.pep
EKMTKFGFEDKGDAYEDFQEGDMDQVAGSAEEEGYVTSGSGIANESEYEEAEDDIFVGDMESNVRTCGSFDKDPYQRQESQGSWGPQDLDNRMDKISDTISHGKERETKESLLENVEKTAAEEVLNHDCREGQKSMETXTTYGPNXCAEFNVSSDKDGNVFDSADELISDNGSDYAMNMSTMSNNLQASFSEACSSIQHLSQKPQSISAEKADESTPVLGNLEVDCGEAGRKIPSENCEVSEEGQNIGIEMEERKREDNISNIRFMDQQPFYLDSDIRPNAAGGAASETILKCREEDLNVERTKVRNDIKEGEGELXKEVKDGEEKEKECRMVKENEQHE

SEQ ID NO: 357529 - protein, 105 aa, Zea mays
  unsure (1)..(105): unsure at all Xaa locations
  Clone ID: MRT4577_89235C.1.pep
MVSTEKGAKMVVLFSLLALXASATSATHIPGFLPSVMPLGTMNPCMQYCMMQQGLASLMACPALRLQQLLALPLXTMPVMMPLMMTPXMMSPLMMPDMMSPMVLP

SEQ ID NO: 357530 - protein, 61 aa, Zea mays
  Clone ID: MRT4577_89236C.1.pep
PINDSPNVLHAPCKIPAIKKAPRGIKISCGNEPLQNCQLLPKPPPPKKKKQRGARSLYIST

SEQ ID NO: 357531 - protein, 92 aa, Zea mays
  unsure (1)..(92): unsure at all Xaa locations
  Clone ID: MRT4577_89237C.1.pep
XVNXSIQLEFHLXHIAILPAAGESLRPQXSAHPPFRWGPGDGQXPFHLSLLXFTXHPPALCFKVTCETPHPFGAPWLAPVLTXDQLAFTFIP

SEQ ID NO: 357532 - protein, 38 aa, Zea mays
  Clone ID: MRT4577_89238C.1.pep
PRVLVASIAVASPIKDLSPLIGERIFVSVRLFICPRVR

SEQ ID NO: 357533 - protein, 130 aa, Zea mays
  Clone ID: MRT4577_89239C.1.pep
MSSSVLRAAADRAIRRQALTLTNSAASRIRQLLSLRQRPYLRLGVKARGCNGLSYTLNYADEKGKFDELVEEKGVKVLIDPKALMHVIGTKMDYVDDPLKSEFVFINPNSKGQCGCGESFMTTGSKGSTS

SEQ ID NO: 357534 - protein, 133 aa, Zea mays
  Clone ID: MRT4577_8923C.1.pep
SSAGHSSSSSPASWSSSSSQSSSSSAMGSSSSQSSSSSEPGAEVGWAEPESAAELIATAWRVVAAGFSATAVVEAAGSSSSSQSSSSASAAAEVAAGCSAAGAEVAGFSAPEPEEGAGAEPEPAPTTKSTQDS

SEQ ID NO: 357535 - protein, 51 aa, Zea mays
  Clone ID: MRT4577_89240C.1.pep
YQNNRKFKYNRGNSRRQNIKRRKETRQAKNTTSRRCWPICRAMAAIHERRL

SEQ ID NO: 357536 - protein, 59 aa, Zea mays
  Clone ID: MRT4577_89241C.1.pep
MKINYPKRRLEKLIMLGALIYYHIYYPHLQLEPQQQLDPQLQDILAPVVQKKLDLFKNQ

SEQ ID NO: 357537 - protein, 62 aa, Zea mays
  Clone ID: MRT4577_89242C.1.pep
MIGTHVHVLSYVQPLTKLPPYDPCTAFYSTSYMNLPDVQKAMHANTSGFIEYPWQLCRYGFI

SEQ ID NO: 357538 - protein, 83 aa, Zea mays
  Clone ID: MRT4577_89243C.1.pep
FPRMSHSAYVPGSGLSALQSSGGLAPHACSQVCPKYDRTLGIGFPPVWRSKKGFNRGKDRVVGFQCLILYTQIGSIKRVAPKY

SEQ ID NO: 357539 - protein, 120 aa, Zea mays
  Clone ID: MRT4577_89244C.1.pep
MAWKMGPASGELLRASVRSGTATPSRPQPPAARNSPSPTVHRHAPPAARLGSAETVLVVDVDGALLLSRSLFPYFMLVALEAGSFLRGLVLELLYPAIRCCYCCLGGGDLTVLAVAAVVL

SEQ ID NO: 357540 - protein, 93 aa, Zea mays
  Clone ID: MRT4577_89245C.1.pep
FTQILVLPYVGKELNMIIMLPDETTDLRTVEKELTYEKFVEWTRLDMMDEEEVEVSLPRFKLEESYDMESVLRNLGMTDAFELGKADFSGMSQ

SEQ ID NO: 357541 - protein, 62 aa, Zea mays
  Clone ID: MRT4577_89246C.1.pep
DARGIGPEFPGRPTRPVDETLMCSFQILKPADKNKGKYGQFSGLNPGGRPITPPRNSAKAKK

SEQ ID NO: 357542 - protein, 51 aa, Zea mays
  Clone ID: MRT4577_89247C.1.pep
SDLHLVPDLQRDFYSHSGTQVLISDRPILHITEYLFPSRDAPSIRQYIAKP

SEQ ID NO: 357543 - protein, 49 aa, Zea mays
  Clone ID: MRT4577_89248C.1.pep
TPRRAPSACASGRRTVDVKRQSRRRTPGTPRRREGRTRAGSTGASRTRG

SEQ ID NO: 357544 - protein, 48 aa, Zea mays
  Clone ID: MRT4577_89249C.1.pep
HLVECKIQFHMWVSIVYVAKYILYFIRAQSARVILIKVKGLWQQRLAA

SEQ ID NO: 357545 - protein, 91 aa, Zea mays
  unsure (1)..(91): unsure at all Xaa locations
  Clone ID: MRT4577_8924C.1.pep
LTPWTHRTLHGLLGLTGFYRFFINNYDIITTPXEHXLKRVAFQCADVATTSFEAFKAALTYGLVLQLLSITASSIIDCASSGIGFGVLFPI

SEQ ID NO: 357546 - protein, 164 aa, Zea mays
  unsure (1)..(164): unsure at all Xaa locations
  Clone ID: MRT4577_89250C.1.pep
RPPAASIRLLVSALPTSPWPNPTPTSRTADASSERAKGQNTAERTMMAIVRKEAEDTCITPTESALRPSKTMDITDQAXALRQACVPDIGLAAAEPDFYTPTAIADAGMDAIRNGYTRYTANAGTLXLKKAMGTKLHDENGASYLPDEVLQSNGSKQCITQAVL

SEQ ID NO: 357547 - protein, 210 aa, Zea mays
  unsure (1)..(210): unsure at all Xaa locations
  Clone ID: MRT4577_89251C.1.pep
RPGGPNQLESSSSQLSRRAQPIPLPPAYTAHNSLLHLSLSLSPVSPPVCVQPHGDPRRRERQRARERRRARGKFNCYPAGVGLPEARRALAEHLSSDLPYKLTTDDIFVTAGGTQAIEVVVSVLAQPGTNILLPRPGYPNYEARAGLHNLEVRRFNLIPERGWEIDIDGLESIADKNTTAMVIIXPHNPCGSVYTREHFAKVAXEVAREA

SEQ ID NO: 357548 - protein, 440 aa, Zea mays
  Clone ID: MRT4577_89252C.1.pep
MATHAGENGSGHENGGGHAEWRFARAAKEGALAVAGDKMSIRAVRFKISASLDARDPRPVLPLAHGDPSVFPAFRTAAEAEDAVAAALRTGKFNCYPAGVGLPEARRALAEHLSSDLPYKLSSDDIFVTAGGTQAIEVVVSVLAQPGTNILLPRPGYPNYEARAGLHNLEVRRFNLIPERGWEIDIDGLESIADKNTTAMVIINPNNPCGSVYTREHLAKVAEVARKLGILVIADEVYGNLVFGDTPFVPMGVFGHIAPVLTIGSLSKRWIVPGWRLGWVAVCDPNKVLQETKIIASITNFLNVSTDPATFVQGALPHILKNTKEDFFKRIIGLLAETSEICFSGIKDIKCITCPHKPEGSMFVMVKLNLYLLESIHDDIDFCCKLAKEESVILCPGSVLGMENWIRITFAIDSSSLLDGLERLKSFCQRHKKKNLLNGH

SEQ ID NO: 357549 - protein, 98 aa, Zea mays
  unsure (1)..(98): unsure at all Xaa locations
  Clone ID: MRT4577_89253C.1.pep
MAGVKEPIEVKFRLSDGTDIGPSKXKEIAPKTVNDVKLINVGRILENSKTLAESRVPVGEVPGSVITMHVIVRPPQSKNSEKQQSNSPKPNRCGCTIL

SEQ ID NO: 357550 - protein, 163 aa, Zea mays
  unsure (1)..(163): unsure at all Xaa locations
  Clone ID: MRT4577_89254C.1.pep
VRNLALGFTRGPYFLCCKNSQGRGIFFGGFLMASGAAEDLVGHPEVERGAILWNVCGTTAFIVVTAMADAHDGGEDPFHEEGTGSETVFTLTHVKRGIKPLSKGAYGYYDHHNESIEPRTEAALPAKPLGDRAATIVXIMHLDHVGLASSTARSKGRTGNPSI

SEQ ID NO: 357551 - protein, 49 aa, Zea mays
  Clone ID: MRT4577_89255C.1.pep
RTKVGRKQVTQTTKESRTWPVQGYPLTIRGRGAYSEGPPSRGIGERTFT

SEQ ID NO: 357552 - protein, 118 aa, Zea mays
  Clone ID: MRT4577_89256C.1.pep
MAGVKEPIEVKFRLSDGTDIGPSKYDPNTTVAALKEFVLARWPQDKEIAPKTVNDVKLINVGRILENSKTLAESRVPVGEVPGSVITMHVIVRPPQSKNSEKQQSNSPKPNRCGCTIL

SEQ ID NO: 357553 - protein, 119 aa, Zea mays
  Clone ID: MRT4577_89257C.1.pep
VFLSYSYWGRYITGAVFHIIYMMGLEVLSLASWFLLVKPSGCGGVKAHCDGPSAPGVALIYLSTYMIAFGNGGYQSYIATCASDQFDETDYEEARSKVAYFSYVYLALNVGCLLYNTVL

SEQ ID NO: 357554 - protein, 93 aa, Zea mays
  Clone ID: MRT4577_89258C.1.pep
AGALLLRLHKGRYLPGPYLWWVPNAVLTDAVKTAGLWLRHDHHPVSKWLSCNDLKKLALFGCPNIERVTVVASKRLRALFNMHERTICGSCKL

SEQ ID NO: 357555 - protein, 93 aa, Zea mays
  Clone ID: MRT4577_89259C.1.pep
DRTRSLKLMLGTPNAPKPEEDESARLTQAYHRGLLPRAVISQHQSGDQPQPLLMEGQQQHAAPASDYFNTSAPPAADRTVYPSMDPQTMGAIV

SEQ ID NO: 357556 - protein, 106 aa, Zea mays
  Clone ID: MRT4577_8925C.1.pep
GRDEASLIEAFSEEAIQQSPNFSAFEVDDEVLGSLREYGLANSLYWALAEGHACEQSARRNAMDNASKNAGEMINKYQILFNRTRQAVITGELVEIITGATASADM

SEQ ID NO: 357557 - protein, 55 aa, Zea mays
  Clone ID: MRT4577_89260C.1.pep
ININRVVTALDNLLEWLLQILHSFIYKFLSRYFITLHVEVYDVVLFVMVASPLPV

SEQ ID NO: 357558 - protein, 122 aa, Zea mays
  Clone ID: MRT4577_89261C.1.pep
NTNHIPVGIEQIEIVGEEIEKKENKKRAFPQFFGLKPAGPVHRVFFSAAIPLRVHDGGGPLRSSFFHLSAESVLSTTNRVGSTVNGSFPTDSLRLSVFRAWVAVPDSLAGVRTRRARVHCMD

SEQ ID NO: 357559 - protein, 113 aa, Zea mays
  Clone ID: MRT4577_89262C.1.pep
SELANPSVFKTGDKKAKFFVKKSPPEAHVQRGLKKKVWATPPSGNKKLDFSSHPAKKKKKPRPIFLFFSVKTAHPPGVFAFPPEKKKSSGPKGGFDPLLARVKGFPILGIFFF

SEQ ID NO: 357560 - protein, 55 aa, Zea mays
  Clone ID: MRT4577_89263C.1.pep
TTFCDLFLWPKPLCAATSFHGNLKLTTQHLDTLAVIQKNSPHPYFFHSPYISFST

SEQ ID NO: 357561 - protein, 92 aa, Zea mays
  Clone ID: MRT4577_89264C.1.pep
MSEFTKNLVIVYKIHRTHRAIKLNSMVKGVIGPTYSTTLSQHSQGHHRADHYIYEDRIYAVIKAQFHRMSELENITEFVHTSLKNVIYDLKQ

SEQ ID NO: 357562 - protein, 490 aa, Zea mays
  Clone ID: MRT4577_89265C.1.pep
MSLSTLSHPAAAAAGSGKSLFPAGPAAQSVHFPKARLPVPAAVSAATAAVHAEDRVSSLTQVSGVLGSQWGDEGKGKLVDVLAPRFDIVARCQSLRTRQGGANAGHTIYNSEGKKFALHLVPSGILHEGTLCVVGNGAVIHVPGFFGEIDGLESNGVRCDGRILVSDRAHLLFDLHQAVDGLREAELENSFIGTTKRGIGPCYSSKVTRNGLRVCDLRHMDTFGDKLDILFKDAASRFQGFQYSKSLLKEEVERYKKFADRLEPFIADTVHVLNESIKQKKKILVEGGQATMLDIDFGTYPFVTSSSPSAGGICTGLGIAPRAIGDLIGVVKAYTSRVGSGPFPTELFGEEGDRLRKAGMEFGTTTGRPRRCGWLDIVALKHSCQINGFSSLNLTKLDVLSGLSEIKVGVSYTQTDGQKLQSFPGDLDTLEQVQVNYEVLPGWQSDISSVRRYDELPQAARLYVERIEELVGVPVHYIGVGPGRDALIYK

SEQ ID NO: 357563 - protein, 329 aa, Zea mays
  Clone ID: MRT4577_89266C.1.pep
EKMEHTIVRAKSSEVGCSNVERKLRQLLDITEDEAYFHTRQSAFLYHLGVQTMPKTHHCLNMRLTVEYFKSGSNHVDQLNDQKLESPALHHYVMFSRNVLAASTTINSTVMNSQDSDHIVFHVFTDAQNFYAMKYWFDKNSYLESTVRVTNIEDNQKLSKDVDSLEMQQLWPTEEYRVTIRNHSEPFQRQMKTKYISIFGLSHFLLPDLLPRLNRVVVLDDDLIVQKDLSPLWNLDMGGKVIGAVQFCGVRLGQLKPYIADHNVDDDSCVWLSGLNVIELDKWRDTGITSLHDQSVQKLRKDSLKSQRLQALPAGLLAFQELIYPLEDS

SEQ ID NO: 357564 - protein, 91 aa, Zea mays
  unsure (1)..(91): unsure at all Xaa locations
  Clone ID: MRT4577_89267C.1.pep
KRGEKXQGLLSPSGGGGFLKQKRGLWEGTANGQPKVSEGPQNPLDNSQLFFGKNPRPFLPEKKTRQSNPLGGPSPKKPPRTQKLPETPNPK

SEQ ID NO: 357565 - protein, 128 aa, Zea mays
  unsure (1)..(128): unsure at all Xaa locations
  Clone ID: MRT4577_89268C.1.pep
EQPGHSWALALGIPQDVKNKFHYSLLFNTLSNSFRENDNKSYPQNGGXEEATTGTFSPAEVANTFLGCLNKHNFPFFDHGLQKPQGETISLLPNFNSINLSFGMKRRPLLEENSPLAPPPPGNSCLGH

SEQ ID NO: 357566 - protein, 168 aa, Zea mays
  unsure (1)..(168): unsure at all Xaa locations
  Clone ID: MRT4577_89269C.1.pep
SRAQGEQRLARTMAYLAHTAKPGTPTXVGSYDQGRFTVLMTEGKPNEAAANSPYNDSGGGAYLDHSSGQLSIFLTGKGPXHYGCNTAGLSTDPHTFATNRELKASHSRFAMLGALGVRRPXLLSRCGIXLARAHCFTAGSQIFIEGGLDYLFYPCLIHALSTLGNWTC

SEQ ID NO: 357567 - protein, 65 aa, Zea mays
  Clone ID: MRT4577_8926C.1.pep
KKKKKKKKKKKKKKKKKKKIFKKKKKTLLKKKKKKKKNFFFSRGGLLKGEFLKFSLKLGAVEIFF

SEQ ID NO: 357568 - protein, 61 aa, Zea mays
  Clone ID: MRT4577_89270C.1.pep
STGRLHPLRQWRRPGGRRLRSRVCCRTVLDTLPRRSGGYRTSLVTRLQRNRRVASYLIQDA

SEQ ID NO: 357569 - protein, 113 aa, Zea mays
  Clone ID: MRT4577_89271C.1.pep
LYSLSYAYLPLLLHPCLLLPLKNPRDIYALAFLLIMNLSFEASSIPSLFEDNASSISSLTGPPSLTLCKLFLKYVLCRVFVRYHLNPCHPSIFTLMLILYLHFKAASSIPFQE

SEQ ID NO: 357570 - protein, 32 aa, Zea mays
  Clone ID: MRT4577_89272C.1.pep
AAFFFFFFFFFFFFFFFFFFFFFFFFFFNTMN

SEQ ID NO: 357571 - protein, 124 aa, Zea mays
  unsure (1)..(124): unsure at all Xaa locations
  Clone ID: MRT4577_89273C.1.pep
LGRAGRLDEARKVIEEAGDVGAGAWRTYLAACRMHGDKERAQQAARMLMMAEESGSGGWVLLANTYGSDGNFEELEEVREEMKRQRVQKAVGCSWVEVGXENNGSETIMHTFVNGDXGHPEADM

SEQ ID NO: 357572 - protein, 71 aa, Zea mays
  Clone ID: MRT4577_89274C.1.pep
LASLLSSASWRRRSVLSASSAATFSASLRHLLSAADFSRTASACCARSLSTSADTTAVRAPDATRSAKSAA

SEQ ID NO: 357573 - protein, 96 aa, Zea mays
  Clone ID: MRT4577_89275C.1.pep
IYFLKMHYIKLIINTQNNAFILKRYLFFTTHMGVNSFSNTNLSSSTRSIKFAVVLCFIHKVDGNCSDDSYHSNPCQSELCPIITLGFIINRVLINS

SEQ ID NO: 357574 - protein, 106 aa, Zea mays
  Clone ID: MRT4577_89276C.1.pep
TCEDPAVAGASAVASAVASAVASTATVAGSSALDAAAAGASGAPSAVSGGRSPTAAAAAGASGAPSTVSGGGSRAAPDMASAGIGSGSGSALFNALKSSTLSPRAA

SEQ ID NO: 357575 - protein, 90 aa, Zea mays
  unsure (1)..(90): unsure at all Xaa locations
  Clone ID: MRT4577_89277C.1.pep
LRSVVAGXRLRRLRLASAAPGAAXXPSCCAGSXRRSAXCRGAGGGVXXGSGAVXXRFGLSPXXPVVGPAGPRGRLGSCRRGLGPXRRRGS

SEQ ID NO: 357576 - protein, 779 aa, Zea mays
  Clone ID: MRT4577_89278C.1.pep
MPTSSSSAAATPPADASSEETLSTVATEELRAGDTVDFGVSRMSSVRVQDMQQLGYFGSGIARVPGTEEVPEPEGELVVFEAFFAAGLRLPAHRFVGEVLRRFNVQIHQLTPNAMVALSKYVWATTSYGGQPSVEVFAKYYCLHWQKRMIRDKVAQFGSCTFTPKTGKTTMEFEVAEEDASEGALRCAAGLSSGRDLVEEFVAYGVWPLAHGWALGEVCPRQMPSHGGKLVRSPAFALDLHSRDPAAFVREVEDGAVRIVGRVFELNHLPYGGYPGQDDVDRRGKKPAAETEDDPAPAAAPSSKKRKLGGRMSSPELRESSARMLRVTGGWWPKNVPIPRTAGEDFFTSRMVRDWRVFPCGRNIAAVVSAVMDKDRQGAAQKRQAVVRLHEARPKRLRGTAKAAAPSGSQPMLAAKSAAPGSSRVPEAVKAAAADGTKSAPAGAAKARELPPLSKRVADFATNISVDDYLVGSGEGQLIVVPPVVATAAAAVVPRAKGSALGAGGEIPALTAVRDEAGAVSRWLKEALSQAADFADRAASGALTTVVSAEVERLRAQHADAVREKSAADSKCRKLADKVAALEGERTDLRRQLAEERKEANEALAKAQSAQAEANLARAEGSLARQRAEQLEERLNALQTRVERAEASTRSEAERTRKQLMDSYHELGARTADFEVPDREPGLCCLEWLQEELLALPAIVEGFMSYASLVTCEGAMNALSREGCRHYEVFDQADEDFEREIYKVEDPVVKKSARALFDRMWGPHGREVVRERSETARGQ

SEQ ID NO: 357577 - protein, 78 aa, Zea mays
  Clone ID: MRT4577_89279C.1.pep
RRHSGSLRWVCCSNSGLRGTNKPQVHHKCECHYARENEAPAVQLLVQPSGLVAETQCPLCALIRVAPCSVFNPARSGH

SEQ ID NO: 357578 - protein, 68 aa, Zea mays
  Clone ID: MRT4577_8927C.1.pep
RGKVGPNPFSPLKKKVGLSGFTRRCGNFFWALPPYSHKHDCKFFFRAFSRGPLSKVNPVVKATKPPKI

SEQ ID NO: 357579 - protein, 106 aa, Zea mays
  Clone ID: MRT4577_89280C.1.pep
TCEDPAVAVASAVASAVASAVASAATVAGSSALGAAAAGASGAPSAVSGGRSPPAAADAGASGAPSAVFGGGSRAAPDTASAGVGFGSGSALFSAPKSSTLSPRAA

SEQ ID NO: 357580 - protein, 125 aa, Zea mays
  unsure (1)..(125): unsure at all Xaa locations
  Clone ID: MRT4577_89281C.1.pep
MASMAFALSGAFKGLWVAPTTTTGCFPLCDRASLSVGGAAGVPAVPVPARRLTIQMAHKKGAGSTKNGRXDSNGQRLGAKIYCDQLAKPGAIIIRQRSSSVFPGNNFVMCKVLTFFSLIYGLLKV

SEQ ID NO: 357581 - protein, 88 aa, Zea mays
  unsure (1)..(88): unsure at all Xaa locations
  Clone ID: MRT4577_89282C.1.pep
TRSSALGAAVGGGPPQAAAAAGASGTPSAVSGAGXSAAAAAGASGAPSAVSGGSSRAASDTAAAGFDSGSGSALFKAPKSSTLSPRAA

SEQ ID NO: 357582 - protein, 1069 aa, Zea mays
  Clone ID: MRT4577_89283C.1.pep
MSTSSSSAAATPPADASSEETLSTLAMEELRAGDTMDFGVSWMSSVCVQDMQRLGYFGSGVTRVPGTEEVPAPEGELVVFEAFFAAGLRLPAHRFVGEVLRRFSVQIHQLTPNVVVALSKYVWATTSYGGQPSVEVFAKYYCLHWQKRMIGDEVAQFGSCTFTPKTGKTTMEVVELVPCARNKWGNWQDFWFYVAEGTVEDHPGLPVSEMCSHFYSAYPPFEVAEEDADEGALRCAAGLSSGRDLVEEFIAYGVWPLAHGWALGEVCPRRMPSHGGKLVRSPAFALDLHSRDPTAFVREAEDGAVQIIGRYVPRTEGQRSWDIRGSNDRLNRVFELNRLPYGGYPGQDDVDRRGKKPVVESGDDPAPVAAPSSKKRKLGTAMGGLGVSDGFARELMRTCAAPGGRMSSPELRESSARMLRVTGGWWPRNVPIPRAAGEDFFTSRMVREWKVFPYGRNIAVVLSAVMDKDRQGAAQKRQAVVRLHEARPKRQRGAAKATAPGGGQPPLAAKSAVPASSRAPEVAAAAGGSKAAKAAPASGRVPEAVKAARGLPPPGKRVADFATDISVDDYLVGSDEGQLVIVPPAAATTAAAVVPKAKGGALSAGGEMPALAAVRDEAGTVSRWLKEMKEALSQAADFADRAASGALTAVVSAEVERLRTQHADAVREKSAADSKCRKLADKGGLAKERAEQLEERLRALQSRVERAEAATRTEAERTRKQLMDSYHELGARTAEFEVPDREPGLRCLEWVQEELQALPTIVEGFMSYASLVTCEGAMNALSREGCRHYEVFDQADEDFERDIYKVEDSVVKESAGALYDRMWGPHGREVVRERAETTRGQAARGERVDDFGALNSTLPDPESIPAEAALEPLPETAEGAPEAPAAAAAGEGPPPETAEGVPDAPAAAAAGEGPPPTVASRVEDPTTVAAEATAKAPATAGSSQVQDFGPAHTTASTIFLAASTVDDGNKSDGSTSKFSDFGDSGSSVVWTEESSDEDLDYFAALDVAAVEASPRAVDAEDVPGPSTGRRRRRAVAKRRLCALAHSAMLAKALRTWSGVIVIVLARLRP

SEQ ID NO: 357583 - protein, 71 aa, Zea mays
  Clone ID: MRT4577_89284C.1.pep
LASLLSSASWRRRSVLSPSSAATFFASLWHLLSAADFSRTASACCARSLSTSADTTVVRAPDATRSAKSAT

SEQ ID NO: 357584 - protein, 87 aa, Zea mays
  Clone ID: MRT4577_89285C.1.pep
TCEDPATAGSSAAGSAAVFTGSSALGVAVGDERPPAAVAAGASGAPSTVSGGSTGATSGPAATGFDSASGRTPFKAPKSSTFSSRAA

SEQ ID NO: 357585 - protein, 98 aa, Zea mays
  Clone ID: MRT4577_89286C.1.pep
TCEDSATAGASAVASAATVAGSSALGAAAAGASGAPLAISGGRSPPAAADAGASGAPSVVSRGGSRAAPDTASAGIGSGSGSVLFNAPKSSTLSPRAA

SEQ ID NO: 357586 - protein, 202 aa, Zea mays
  Clone ID: MRT4577_89287C.1.pep
MDIGGSGGIILSPGSEDDKFARRRSRRVSFADTTAVHVFDRDEDFETPPEEREPDSTPAPPSPRRSSVGREVEDDTEEDFNRPPVIFLHDVDSSYPDSAAESIASADDENFFGPVSASFIQTGRPSDSGMSEDDNHDITMDSRTFSLHFRNIAPPDDCTAYSAGSLMTPNTASGPLKELTASNPRASINGRDTLTDMSLSGT

SEQ ID NO: 357587 - protein, 41 aa, Zea mays
  Clone ID: MRT4577_89288C.1.pep
FFFFFFFFFFFFFFFFFFFFFFFFFWTKEHMHFYQGDNKNW

SEQ ID NO: 357588 - protein, 54 aa, Zea mays
  Clone ID: MRT4577_89289C.1.pep
AHKVSHAHIVICAQVFVPGGPSSLLSWAPVLILVIWLCQCSCNSIIPGLSLMCV

SEQ ID NO: 357589 - protein, 245 aa, Zea mays
  Clone ID: MRT4577_8928C.1.pep
SYGPRNQSVLSPPGFRCSSFFPGILETAARRGEDWTMAASSALRLILGSSSASRRQILSEMGYKFTLLSADIDEKAIRKENPEELVVALAHAKADAILEKMQNNGMMKEILDSQDTTLMITADQVVLHDGVIREKPSTPEEARKFIKGYSESHAATIGSVLVTNVKTGARREGWDKAEVYFHKIPDEVVESLIEEGDVFYVAGGLLVEHPLTSPLVEAIVGTIDSVMGLPKALTEKLIKESLSET

SEQ ID NO: 357590 - protein, 175 aa, Zea mays
  Clone ID: MRT4577_89290C.1.pep
DINPSTMVGSACNSSCTHSRQRSPGSRSGTSKSAVRVPSSWYESISCLRVRSASVRVAASALSTRLCRALSRSSNCSARSLARLPSTRTKLASICAACALARASLASFLSSASWRRRSVFSPSSTTTLSASLQHLLSAADFSRTASACCVRSLSTSADTTTVRAPDAARSAKSAA

SEQ ID NO: 357591 - protein, 469 aa, Zea mays
  Clone ID: MRT4577_89291C.1.pep
MPSKPNAASRLVFLAFLLVISAAAANDDAAARRTMEQFAGFPASDDGEGPSSDFHVDSEGLQRQIDELASFSDSPAPSVTRVLYTDKDVQARRYIKGIMNQLGLVVREDAVGNIFGRWEGSEPGLGAVATGSHVDAIPFSGKFDGVVGVLGALEAISLLKRSAFLPKRSLEVIMFTSEEPTRFGISCLGSRLMAGIEELAQSLRKVVDNQNVSFLDAAESAGYKLNLEDLHSVFLKTDKYSAFIELHIEQGPILEKEGIPIGIVTAIAAPASLKVDFEGNGGHAGAVLMPARNDAGLAAAELALAVEKHVLESGSIDTVGTVGILQLHPGAINSIPSKSHLEIDVRDIDEKRRNDVIEKIRQSAAHISKNRGVELSEFKIINQDPPALSDKSVVDAMEFAAKQLNLAYKKMISRAYHDSLFMARVSPMGMIFIPCYKGYSHKPEEYASPEDMANGVKVLALTMATLSLE

SEQ ID NO: 357592 - protein, 57 aa, Zea mays
  Clone ID: MRT4577_89292C.1.pep
CLCFLSLPVITTSLVCTCLFILFMFLLFCLFILLLGFHIAICTQFFSLLIIDYDYSD

SEQ ID NO: 357593 - protein, 66 aa, Zea mays
  unsure (1)..(66): unsure at all Xaa locations
  Clone ID: MRT4577_89294C.1.pep
VSAXGAXMIYVVGGVFSFIPPAQTVVLWLVLLHLSVVVCFLLLAQCRLAFPSRLVGWLVFFGGFVF

SEQ ID NO: 357594 - protein, 98 aa, Zea mays
  Clone ID: MRT4577_89295C.1.pep
LLALGLGFGAVLGSAIVGVIDAGTRSGGSHDGWLPSNLNRGHYDYYYLVLAVLCAANVLYFAVCGWAYGDEGQNRVVAADAAVDDVDDKEEEQKAVII

SEQ ID NO: 357595 - protein, 54 aa, Zea mays
  Clone ID: MRT4577_89296C.1.pep
LNLISVDLESRTFTTTTRSRRTMAGLIPEETHGFSFHNYERNEHLNGLGYPVPK

SEQ ID NO: 357596 - protein, 57 aa, Zea mays
  Clone ID: MRT4577_89297C.1.pep
WSSNTKIDYSKYLRSFFVQGTKVLFLKHRLSTFKTFIKLVSSFIFFFKKTRAREAPV

SEQ ID NO: 357597 - protein, 136 aa, Zea mays
  Clone ID: MRT4577_89298C.1.pep
KGLPGLSPGGVPLPPPQGQGAGHLRLRAPRPGGACQLRLGGPPRLQMPFNGPLPFFPLSPWVPSGVPFSPPQCKVLKAPPRIWVPFCPPQSKVFKGSSPDWAFRLPPLPLFHLICHSCCRSGYASRVFPNAPLSFV

SEQ ID NO: 357598 - protein, 340 aa, Zea mays
  Clone ID: MRT4577_89299C.1.pep
MPRGRPENRGYSFWLPVLKTMMSPASERSLIIQSDDDDDARSGHDVEEPEPEQEQDSDSSSSSSSCATPRRGPSSPPYIQQWPQSYRQSIDILSSVQSPNLSFLGTPTLSRLSNSFLAITDSFRSKAPETISSFIKPLLGPTPSDDQQRQHEGTRKSSEYLVPSRRSSLQQIPEDQKPPVGGHGASHDQNCSYTQGVMNGINVLCGVGILSTPYAIKQGGWIGLAILCIFALLAWYTGVLLRHCLDSKEGLKTYPDIGHAAFGSTGRIVISIILYVELYACCIEYLILEGDNLSKLFPNAHLTIGSMTLNSHVFLKNRNQFPSFFLLVLGCLPFCMLVLQ

SEQ ID NO: 357599 - protein, 39 aa, Zea mays
  Clone ID: MRT4577_8929C.1.pep
PSPPQPMKNHHFVVRGNYVGGHYCVKSLISLRSSCDSRP

SEQ ID NO: 357600 - protein, 62 aa, Zea mays
  Clone ID: MRT4577_892C.1.pep
LVHHRQIVLANIFKGSMYIFNCHAYIVILYILIGSQAYFLYYPFFLCLFVKKKIFFFIFFFL

SEQ ID NO: 357601 - protein, 302 aa, Zea mays
  unsure (1)..(302): unsure at all Xaa locations
  Clone ID: MRT4577_89300C.1.pep
GTLEAGRGKAPETISSFIKPLLGPTPSDDQQRQHEGTRKSSEYLVPSRRSSLQQIPEDQKPPVGGHGASHDQNCSYTQGVMNGINVLCGVGILSTPYAIKQGGWIGLAILCIYALLAWYTGVLLRHCLDSKEGLKTYPDIGHAAFGSTGRIVISIILYVELYXMPTTWLRDLSWLSYISAGGVIASILVVICLFLVGVVNDVGFENEGTALNAPGIPIAIGLYGYCYSGHGFFPNIYSSLKNRNQFPSILFTCIGLSTFLYAGAAVMGYKMFGEATESQFTLNLPDNSVISKIAVWTTVIVA

SEQ ID NO: 357602 - protein, 555 aa, Zea mays
  Clone ID: MRT4577_89301C.1.pep
MMSPASERSLIIQSDDDDDARSGHDVEEPEQDSDSSSSSSSCATPRRGPSSPPYIQQWPQSYRQSIDILSSVQSPNLSFLGTPTLSRLSNSFLAITDSFRSKAPETISSFIKPLLGPTPSDDQQRQHEGTRKSSEYLVPSRRSSLQQIPEDQKPPVGGHGASHDQNCSYTQGVMNGINVLCGVGILSTPYAIKQGGWIGLAILCTFALLAWYTGVLLRHCLDSKEGLKTYPDIGHAAFGSTGRIVISIILYVELYACCIEYLILEGDNLSKLFPNAHLTIGSMTLNSHVFFAILTTIIVMPTTWLRDLSWLSYISAGGVIASILVVICLFLVGVVNDVGFENEGTALNAPGIPIAIGLYGYCYSGHGVFPNIYSSLKNRNQFPSILFTCIGLSTFLYAGAAVMGYKMFGEATESQFTLNLPDNSVISKIAVWTTVANPITKYALTIIPLAMSLEELLPPNQQKYSTIIMLRSSLVISTLLIALSVPFFGLVMALVGSLFAMLVTYILPCACFLAILKTKVGWHQIAACSFIIVVRVCCAYVGTYSSLSKIIQNYA

SEQ ID NO: 357603 - protein, 52 aa, Zea mays
  Clone ID: MRT4577_89302C.1.pep
DPHKPYFSSCYDTPATFSLIGVRPPLSSSIQSHSSGSSHNLHLRTLQLYTSP

SEQ ID NO: 357604 - protein, 118 aa, Zea mays
  Clone ID: MRT4577_89303C.1.pep
PFPGGWGVHLSRGPVWFFGWTPGLSRLPFIVSLVPLFAPPAFPFLFSACFFRAFLPGTLFPQGSGLALFSPSFFLGPLRGCWFALWVPSAIPGWSQVFGLFFLRSPVDQKGRFKTTNP

SEQ ID NO: 357605 - protein, 70 aa, Zea mays
  Clone ID: MRT4577_89304C.1.pep
TCEDPAVAGASAAGSAAIFTGSSALGAAVGDGPPLAAVVAGASGTPSTVSRGNSGAVSDAATSGFDSGSG

SEQ ID NO: 357606 - protein, 920 aa, Zea mays
  Clone ID: MRT4577_89305C.1.pep
MPTSSSSAAATPPADASPPADASPPADASSEETLSSLVAEELCAGDSVDFGVSRMSSVRVQDMQRLGYFGGGVARVPGTEEVPEPEGELVVFEAFFAAGLRLPAHRFVGEVLRRFNVQIHQLTPNAVVALSKYVWATTLYGGQPSVEVFAKYYCLHWQKRMIGDEVAKFGSCTFTLKTGKTTMQVVELVPCARNKWGNWNEFWFYVAEGTVEDHEGLPVSEMCSHFYSAYPPFEVAEDDADEGALRCAAGLSSGCDLVEEFVAYGVWPLAHGWALGEVCPRQMPSHGGKMVRSPAFALNLQSRDPAAFVREAEDGAVRLVGRYVPRTEGQRSWDIRGSNDRLNRVFELNQLPYDGYPGQDNVDRRGKKPVVETGDVPAPAAAPSSKKRKLGTAMGGLGVSDGFARELMRTCAAPGGRMSSPELRESSARMLRVIGGWWPRNVPIPHAAGEDFFTSRMAREWRVFPYGRNIAVVVSAVMDKDRQGAAQKRQAVVRLHEARPKRQRGAAKAAALGGGKPPLAAKSGVPASSKAPEAAAGTGGSKSTKAVPPSSRVPEVAKAARVLPSSGKRVADFATDISVDDYLGGSDEGQLAIVAPAAATTAAAVVPKAKGGALSAGGEMSALAAVRDEAGAVSRRLKEVKEALSQAADFADRKASGALTTVVSAEVKRLRTQHADAVREKSAADSKCRKLADKVVALEGEKTDLRCQLAGERRETNEALAKAERAEQLQERLTALESRVERAEAATRAEAERMRKQLMDSYHELGAQTSDFEVPDREPGLRCLEWVQEELQALPTIVEGFMSYASLVTCKGAMNALSREGCRHFEVFDQADEDFERDVYKVEDPIVKESAGAIYDRMWGPHGREVVRERAETARAQARGKRVDDFGALNSALPDPGAEPGGGCVRGRPGAAPGNRQRRS

SEQ ID NO: 357607 - protein, 67 aa, Zea mays
  Clone ID: MRT4577_89306C.1.pep
KQKQGGQIGGGPKNFGGKKNGSCCRQGGQKDNLMKFSLGKNPLPFGRGWEKVKTCYGGFYFWPRGHG

SEQ ID NO: 357608 - protein, 90 aa, Zea mays
  unsure (1)..(90): unsure at all Xaa locations
  Clone ID: MRT4577_89307C.1.pep
TAPPIPRRAGWRSYPPPAPNWPPPAQTAPXEGLXPPSSPPPAGAGGQSSRPPARPPSPPACGTCYRRPTFPGRRQHAAPEVSRLRQTQLT

SEQ ID NO: 357609 - protein, 97 aa, Zea mays
  Clone ID: MRT4577_89308C.1.pep
TCEDPAVAGAPAVASAVASAATVAGSSALGAAAAGASGVPSAVSGGRSPPVAANAGASGAPSAVSGGGSRAAPDTASAGVGSGSGSALFNAPKSSTL

SEQ ID NO: 357610 - protein, 69 aa, Zea mays
  unsure (1)..(69): unsure at all Xaa locations
  Clone ID: MRT4577_89309C.1.pep
GRLRRFLGAALGRPRTQPPPGSTPNQAARCSKPRSPPLSRYAPPPPDRGDPTSGRRXPADSFTTGSSTL

SEQ ID NO: 357611 - protein, 135 aa, Zea mays
  Clone ID: MRT4577_8930C.1.pep
SADIDEKAIRKENPEELVVALAHAKADAILEKMQNNGMMKEILDSQDTTLMITADQVVLHDGVIREKPSTPEEARKFIKGYSESHAATIGSVLVTNVKTGARREGWDKAEGYFDRVIGLVEASLIELIKESLSET

SEQ ID NO: 357612 - protein, 50 aa, Zea mays
  Clone ID: MRT4577_89310C.1.pep
ETPLTLFLIICPSNIIDMCSKKVRGASRSRGFAPGLTGPVLCRRTRYFVA

SEQ ID NO: 357613 - protein, 71 aa, Zea mays
  Clone ID: MRT4577_89311C.1.pep
PIGLVTTVTYTFPSLPSFLPMTSGPHHSNSQALKTSHLTYVRDLLSLFLTSRTRTSFSLPSFLSMASGSAY

SEQ ID NO: 357614 - protein, 829 aa, Zea mays
  Clone ID: MRT4577_89312C.1.pep
MPTSSSSAAATPPADASSEETLSTVAAEELHAGDTVDFGVSRMSSVRVQDMQQLGYFGGGVARVPGTEEVPEPKGELVVFEAFFAAGLRLPAHRFVGEVLRRFNVQIHQLTPNAVVALSKYVWATTSYGEHPSVEVFAKYYCLHWQKRMIGDKVAQFGSCTFTPKTGKTSMEVVELVPCARIKWGNWHEFWFYVAEDTVEDHPGLPVAEMCSHYYSAYPPFEVAEEDADEGALRCAAGLSSGRDLVEEFVAYGVWPLAHGWALGEVCPRQMPSRGGMVVRSPAFALDLRSRDPAAFVREAEDGAVRIVGRYVPKTEGQRSWDIRGSNDRLNRVFELYRLSYGGYPGQDDVDRRGKKPLVETGDDPAPAAAPSSKKRKLGIAMGGLGVSDGFARELMRTCVAPGGRMSSPELRESSARMLRVTGGWWPKNVPISRAAGEDFFTSRMVRDWRVFPYGRNIAVVVSAVMDKDRQGAAQKRQAVVRLHEARPKRPRGTAKAAAPGGSQPPLAAKSAAPRSSRAPKAAKAAAAGGTKSGKAAPVSSRAPEAAKAARELPLPGKRVADFATDISVEDYLVGSDEGQLVVVPPAVATAAATVVPRAKGSALSAGGEIPALTAVRDEAGAVSRRLKEALSQAADFADRAASGALTTVVSAEVERLRAQHADAVREKSAADSKCRKLADKVAALEGEKTDLWRQLAEERKEANEALAKAQSAQAEANLARAEGSLARQRAEELEERLNALQTRVERAEASTRSEAERTRKQLMDSYHELGARTADFEVPDREPGLRCLEWLQEELLALPAIVEGFMSYASVGDLFSNAMNQEQGNIKC

SEQ ID NO: 357615 - protein, 101 aa, Zea mays
  Clone ID: MRT4577_89313C.1.pep
GYFVHHTCFSPPPCVIPVQRVLFMVWVLHPSVWSGVGNPVFVQLPGYHAANSFVACSLPRLGSVGGVIYRVAISFTPPYLLIHPTNTKKNPKRKTKKKKKK

SEQ ID NO: 357616 - protein, 165 aa, Zea mays
  Clone ID: MRT4577_89314C.1.pep
SKSSSDDSSVHSTELPESPKSENLDVDPSDLLTPSTVEAAKKLVVAGCVRRPKILNATCEDPAVAGASAVASNATVAGSSTLGIAVGGGPSPAAAAAGASGTLLAVSRGGPPPAAAAAGASGVPSAVSGGGSRAASDTASAGFDSGSSSALFNAPKSSTLSPRAA

SEQ ID NO: 357617 - protein, 55 aa, Zea mays
  Clone ID: MRT4577_89315C.1.pep
YRAKWLEEAPLVELSIHIRLVVEMILLVYDQILEIFLFFFLFHYFLFFNFYIFFL

SEQ ID NO: 357618 - protein, 123 aa, Zea mays
  unsure (1)..(123): unsure at all Xaa locations
  Clone ID: MRT4577_89316C.1.pep
AGDVWPAPECLHSLGAWRRRGCRSTTCASFCRVLGEYHPASFIFTRFLGFLDDARNDDETEFGVSWRGHESSEGSGDDEVTSKEGRVQQPDDKCEHARSPMDEERAHXIGRAGSRGRRTPWRF

SEQ ID NO: 357619 - protein, 43 aa, Zea mays
  Clone ID: MRT4577_89317C.1.pep
ANRSGILLLVNVISAALCGDLTDALFQGGQVNASLGELPLLHA

SEQ ID NO: 357620 - protein, 171 aa, Zea mays
  unsure (1)..(171): unsure at all Xaa locations
  Clone ID: MRT4577_89318C.1.pep
MATPTPARPYRFPALPEEEDEQAATRCSRRSCGTCGASAVASCVALCCCPCAAVSCLTLALVKAPYVAGRRCVARLARRRLRKGRARRVRDMGXGRRRAAGPAVQQGVVRPASCGXAADERAKVSSRIDASSEKVWVDMYQVGLWGFGRLSFSAAAGAGSDSDKDGDTAPE

SEQ ID NO: 357621 - protein, 51 aa, Zea mays
  Clone ID: MRT4577_89319C.1.pep
FCCQLFIFKGGFYLVISVSSPIQLCSSTGNFLCGGVLNLKPPPLLFIFAAG

SEQ ID NO: 357622 - protein, 203 aa, Zea mays
  unsure (1)..(203): unsure at all Xaa locations
  Clone ID: MRT4577_8931C.1.pep
MDAAALALSIILLAAAATTLARGATHPADQATLEDLRKSLTNPDALGWPDDGDACAWPHVSCDRTGRVDNLDLKNAGLAGTLPPSLPSLAALRDLSLQGNSLSGALPSFRGMASLQRAFLNDNDFDAIPPDFFDGLADLLEISLANNPRLNASQGGWTLPRGLADSSLQLQALSLDNCSLTGGIPDSLARLTGXQNLTLFYNN

SEQ ID NO: 357623 - protein, 92 aa, Zea mays
  unsure (1)..(92): unsure at all Xaa locations
  Clone ID: MRT4577_89320C.1.pep
MLVYQDLICGDGLLADLFTYRGLETGFLGEVGGKGVXQGLVDXDIGAQTIRGGGGXDKAFDTPVEMGVILVTNFGHEEHPFLDRKYLGSTIK

SEQ ID NO: 357624 - protein, 87 aa, Zea mays
  Clone ID: MRT4577_89321C.1.pep
PAPGVLSAACSGVSSPVSSLSSPLRPPLLSRSSVLCVVSRRPACGPPRRGRPCGRLPLRRLWRPASVRLVLGGPAFRLPPSFGEGPG

SEQ ID NO: 357625 - protein, 149 aa, Zea mays
  unsure (1)..(149): unsure at all Xaa locations
  Clone ID: MRT4577_89322C.1.pep
DPSSARAVLVRMTGGXVCARYPVGPKIMPLRLSPKKIGVDIRKETAKDWKGLLXPGKLTVHNRQATVSEHPSGGELDIHALNEPDRDKKRAYIIKHSGHMSLDYVVHIGKTMPYTSMAXELGGTVXEILGTCASXIXSTVHGIDPNDWQ

SEQ ID NO: 357626 - protein, 50 aa, Zea mays
  Clone ID: MRT4577_89323C.1.pep
EGKSQQLVQASCANRGLFRVVWVVISSYMTAEESTDGCPTKQTSSVSPRA

SEQ ID NO: 357627 - protein, 123 aa, Zea mays
  unsure (1)..(123): unsure at all Xaa locations
  Clone ID: MRT4577_89324C.1.pep
FAPRAFFPKFXPPIFLKGFKTPIWEGKIAKKGLGGEGLKKPIGQFEKKFFAXLKIKAFKTQKKQRFLPALAPLPLGTPAPYLKKKLFDSNPFVLGNVFENQKKKRLQKFLPPLIQLAWGTLAA

SEQ ID NO: 357628 - protein, 68 aa, Zea mays
  Clone ID: MRT4577_89325C.1.pep
KTTDTSVELGTETGQITRSLQGSNHTEKAPYQHTHVSKGLKLPRIAEEPATANNTHYLAGETAIFEYN

SEQ ID NO: 357629 - protein, 39 aa, Zea mays
  Clone ID: MRT4577_89326C.1.pep
LKLLKMRMQIRLALSEQLVHLAPAHRELRLGGAAAPNER

SEQ ID NO: 357630 - protein, 219 aa, Zea mays
  unsure (1)..(219): unsure at all Xaa locations
  Clone ID: MRT4577_89327C.1.pep
CPPQRPRAQATPPFHRPPRPSPAPLLLARITPPLQRPAFPSPLTRLAPPLPPLTPLPPRXAXPPPPLPPPRLPARRERAAPLRAPPSPYPGHGTSGASRGGARRGACLAAASPRPSCSPPPPARETPPPPMPPTQCSPLRSPGPGPSRHHRKPSNSRRAQTLQDPIGRLGRRPDRGGGGSAMALDLSGRGGAVGVNWRGRVVIGEGRRQCAWLKRDERS

SEQ ID NO: 357631 - protein, 71 aa, Zea mays
  Clone ID: MRT4577_89328C.1.pep
MARAAPPHGSLFFNEGHTPKLRVNTKNSGAGTLGLFQKRSHEEVPGVPDEPRQGPGFNGVGGPQEKLPFLG

SEQ ID NO: 357632 - protein, 86 aa, Zea mays
  Clone ID: MRT4577_89329C.1.pep
LQYYLVCSLSATVTCYKCPMSLFLQSLATDFTKLDTTSSCTRFQNLHQMSSSLLEMLDDPDVATRELALSLLAEILEKHVSFFFPL

SEQ ID NO: 357633 - protein, 66 aa, Zea mays
  Clone ID: MRT4577_8932C.1.pep
PQYRSLFSCGGTRSVLLIEYVGALAICKIVVCARGGDNDCVAVVPQLADIQEVRGLLRQSERSHGA

SEQ ID NO: 357634 - protein, 95 aa, Zea mays
  unsure (1)..(95): unsure at all Xaa locations
  Clone ID: MRT4577_89330C.1.pep
RPRRPEQVRRPXSVIHFDEVEKAHVAMFNTLLXVLNDGRLMDGQDRTVDFRNTMVIMTSNLGAXHLLAGMVGKNSMKVARDLVMQEERGLHVRGL

SEQ ID NO: 357635 - protein, 164 aa, Zea mays
  Clone ID: MRT4577_89331C.1.pep
TACHYSPSLVAEEQLHGSKDTLTLKGEKALLELLLGMALDQHVDGRKLITQQEAEDSDFESYLREATSRVLYQPTFMYGASEFISSEEDDDDSISESSSASLAKPAGTLDLGKLTEEPQLDVPQPHRRFGPSTSNTLFMSFIILTLDHHCVATTAVWIQTIRMI

SEQ ID NO: 357636 - protein, 56 aa, Zea mays
  unsure (1)..(56): unsure at all Xaa locations
  Clone ID: MRT4577_89332C.1.pep
LTRXYIGRXXXLEQXIXXIXPKXAAXXWXQXLXPSLXSRXIRDXXHLXGISTYRFL

SEQ ID NO: 357637 - protein, 64 aa, Zea mays
  unsure (1)..(64): unsure at all Xaa locations
  Clone ID: MRT4577_89334C.1.pep
KFSFTQKVFVNFKCSHITNLERGVFKGSHPDVTQNIFPIPFSEGGPQLGLKSPTGRRKKKKKKX

SEQ ID NO: 357638 - protein, 48 aa, Zea mays
  unsure (1)..(48): unsure at all Xaa locations
  Clone ID: MRT4577_89335C.1.pep
RPVPRKXMPQKKWGWXNLMGHXXHNXXVCSGERDTQASRNLFIKVXWG

SEQ ID NO: 357639 - protein, 136 aa, Zea mays
  unsure (1)..(136): unsure at all Xaa locations
  Clone ID: MRT4577_89336C.1.pep
NNKPRKKKGEENIFPVLGPGTNKSPRKHPRNHTKDNGAPLIPYSHKPKHPTPRPTRRAVDATLKPTPNTRGGARNREDQGPKKGGIVFSAGPRGPRGARGPLGXPGEGETPKPQGRRPPNPLPNFGGGGGARAPVP

SEQ ID NO: 357640 - protein, 68 aa, Zea mays
  Clone ID: MRT4577_89337C.1.pep
TMLWHERHWTLVAYTAMSWTGHSGHLDNLFADLSPNYIPTTGCGCLMCPRTHPARHTDKRDHWQLRPI

SEQ ID NO: 357641 - protein, 125 aa, Zea mays
  Clone ID: MRT4577_89338C.1.pep
RPFLLSSVPWTAFLFLPLTRASPSAPSQSRLLPLLHLPCGAFFSSRRSVPDPAPRLQQLRSKPNGAPPWASSSSDLGGPWMLLPSTPAIVPQLRQSLWSQKLAPFQYLSLSLLGPPRSQLCALSG

SEQ ID NO: 357642 - protein, 250 aa, Zea mays
  Clone ID: MRT4577_89339C.1.pep
ARFHGRRSSTFDARISLGAVPAAPGPSASSTSRCLLQLAALGPCSSSPARAHLPCSLFLFPLPWIVSSSFPIRALFMTEFFSPVQQLRPKPNGAPPWASSSSDLGGPWMILPSTPATVPQLRQSLWSRKLAPFQYLLLSLLGPLRFPTMLAVGWPSAMPSLLTSTCSVVSARSASIFSVLPCSLVPAELAPSSISSSPAAPHDHRAELLPAVRDVCAMDAMKTLCVLVSSSTAPAMPLVFGRRAVRQNCS

SEQ ID NO: 357643 - protein, 79 aa, Zea mays
  unsure (1)..(79): unsure at all Xaa locations
  Clone ID: MRT4577_8933C.1.pep
GSPVPQWGCAPRSRPAQGPRKRTPGRRELHRQRVAHGRRQEVTTQATGPVRAYQGRPRPALRVSAAARPGRGKRPPXRP

SEQ ID NO: 357644 - protein, 234 aa, Zea mays
  Clone ID: MRT4577_89340C.1.pep
AEEKKLTRIPLVTASEPGAAQLAALGPCSSSPARAHVPCSLFLFPLPWIASSSFPIRALFMTEFFSPVQQLRPKPNGAPPWASSSSDLGGPWMILPSTPATVPQLRQSLWSRKLAPFQYLLLSLLGPLRFPTMLAVEWPSAMPSLLTSTCSVVSARSASIFSILPCSLVPAELAPSSISSSPAAPHDHRAELLPAVRDVCAMDAMKTLCVLVSSSTAPAMPLVFGRRAVRQNCL

SEQ ID NO: 357645 - protein, 133 aa, Zea mays
  Clone ID: MRT4577_89341C.1.pep
MVLLAVPFIIPACSSCSYVDTDGPDPASPLNHDDPHKPLLISNNHQMESNAMMQNPKENQMQGNCCGTVMGKGRLATLGEEHSAKKLIRCVDFWLYYTAYFCGATVGLVYSNNLGQIAQSLNQQSQLTMLLAV

SEQ ID NO: 357646 - protein, 68 aa, Zea mays
  Clone ID: MRT4577_89342C.1.pep
TGCRRPAARHVAVGETNRNGLGVDALQWKRNGLGHWDLDAYRLRYYLNRLIDLLTIPQYSATTAQLKV

SEQ ID NO: 357647 - protein, 95 aa, Zea mays
  Clone ID: MRT4577_89343C.1.pep
GPDSCLIILLHQIPVFFIRMVCPSIPFLSTLLSMHCGPFLMGDLLKWILVSIVQFVVGKRFYVAAYRAVRHGSTNMDVLVVLGTTASYAYSVCAL

SEQ ID NO: 357648 - protein, 66 aa, Zea mays
  Clone ID: MRT4577_89344C.1.pep
SVPRSIRHFACVGQVALSPSQPCVTSTAHGSTTMMLHTLHSACCKIRRPVADRPLTKKLKVAPRAE

SEQ ID NO: 357649 - protein, 53 aa, Zea mays
  Clone ID: MRT4577_89345C.1.pep
NMHNGVAPPNGQSSRSLSPTDRQMSAYLDMLDTGQSPLHCLIFIVLFQSDDLV

SEQ ID NO: 357650 - protein, 31 aa, Zea mays
  Clone ID: MRT4577_89346C.1.pep
GWGIKLNCYIPFTLINIFKEEIVDFKSFIRH

SEQ ID NO: 357651 - protein, 203 aa, Zea mays
  unsure (1)..(203): unsure at all Xaa locations
  Clone ID: MRT4577_89347C.1.pep
QTMEAVDAVFVNSGDNPFKLLKESIKXAILLDVVQDQRXTFSHIEDKEIPSNLNWFVWCTWDAFYKAVNPSGIEEGLQSLREGGVPPRFLIIDDGWQETVDEIKEVDEALREQTVFAQRLADLKENHKFXXXTCKNLEDLXXXXXXXXGVKCVYMWHALLGYWGGTLAASKVMKKYNPKLVYPVQSRGNAANLRDIAMDSLEK

SEQ ID NO: 357652 - protein, 69 aa, Zea mays
  Clone ID: MRT4577_89348C.1.pep
KSQALYGACSGPFDYQQREASRSSMRSKILVSMNDWLPQDSYPLCVSFTVTSSFGLLRYKGSVGLALHG

SEQ ID NO: 357653 - protein, 65 aa, Zea mays
  unsure (1)..(65): unsure at all Xaa locations
  Clone ID: MRT4577_89349C.1.pep
HTXXTYDSSSVLIEHLPSYXGRGTQECVACENRLPIEPSWRRLFMAYTIRAAAWALGSFTPRSAV

SEQ ID NO: 357654 - protein, 122 aa, Zea mays
  Clone ID: MRT4577_8934C.1.pep
GFSKNLAFSLTKCANEPKIFGKILREGLPFYLPLPIKGGLPLGHLIGGAPGFFPPNGDKGGPTGAFYKGDQIGFTPVPAPPRRSMIPQNLTRNSPNRGAPHLLKPPGPMSPFFNFFRALGSP

SEQ ID NO: 357655 - protein, 437 aa, Zea mays
  Clone ID: MRT4577_89350C.1.pep
MGSMSQKIKIFTEDEIASITSNYSTLIGKGGFGEVYRGVLDADDDLVAVKRYIRQDLRDEFMDEVNIHSVMNHNNVVKLIGYCIGESTLMLVTEYISNGNLDDILHRSDASIPLDVRLGIAIGCAEALSYMHSMDSQSDNHIYHGDIKPANILLDNNLTTKVSDFGLSRFLFSGTTQFTTTLKGSMGYMDPVYFHEGCLSPRSDVYSFGIVLLELLTRKRAKYGDVNLIPTFNKACAKGKGLRELFDAAIAEKDNVKILKESWKLASQCLSLNIHTRPQMNEVAKRLRMLKKELKTSPQSILATHSMWAKQYRQAGSSSPSFKKKLSFFKGNASSYSKVISELGGNVRVFTKEEINEVTHNYSNLLSGGTSATEVYKGTLEDNTMVAVHRLLYEGSEEAFINGGMVVSKIAHKNIVRVLGCCLEPHVKLCIDSYSVS

SEQ ID NO: 357656 - protein, 38 aa, Zea mays
  Clone ID: MRT4577_89351C.1.pep
TATPPASATGDTAETSSSAATAAAFTATLMMNAILPNT

SEQ ID NO: 357657 - protein, 126 aa, Zea mays
  Clone ID: MRT4577_89352C.1.pep
MAGRTAPAPLPSLSLTPDDESLLGCSPPLSILPAAWRWQLLTHVARRRCGACAGARTAAANATTPTPTTGCAASSVSVTVSQSNTGDRAGYDPVFEVMVRNACRCAVRVVRLRFEGFASSVPVDPR

SEQ ID NO: 357658 - protein, 137 aa, Zea mays
  Clone ID: MRT4577_89353C.1.pep
SNSGWDMYLLVPLMMQTGLQQFVAAAKQNPEEKHTAPNNAIAQKLFSGGVRSIDGALGRPRTQDLTGRDGTGRNGSLETTVHTGVGTWEGARVLGGLSFGWTAREREREPDALAIVQGNEQHSEAIPAYKRLYCDQA

SEQ ID NO: 357659 - protein, 97 aa, Zea mays
  Clone ID: MRT4577_89354C.1.pep
DAVAQPEESVVVRPPPTTTDMRERVRLLEREAAAAKQREMKVLESLVQQTKEMERAKVAFEESRLEVAALRRQQHDEGAAAHAQAQQWSVMDLMFGG

SEQ ID NO: 357660 - protein, 141 aa, Zea mays
  Clone ID: MRT4577_89356C.1.pep
GTLEAGRAGIAPPILPEVALSSCCESTSSNASSHHHLRSSPPRSLSLSSTSPSPPSRNDQTPPPPVHASTLGIRSPASRGSARVLLVPSPMPRRGQDPRDLHDGAQLRHDRGQDCLLDRRRGRPPARKTTPSATSSAMRLT

SEQ ID NO: 357661 - protein, 45 aa, Zea mays
  Clone ID: MRT4577_89357C.1.pep
TSSLDLASVGCRFELERWISYYLVGFVIALAGCPPALKPILRLSD

SEQ ID NO: 357662 - protein, 121 aa, Zea mays
  Clone ID: MRT4577_89358C.1.pep
FVKAADSGNDVSELLEASRAQLDRNFRQLKKTVYHSNSMLSALSSTWTSKPPLAVRYKLDTNALEMESTEGKSHGSTLERLLAWEKKLYEEVKARESVKIEHEKKLSTLQSLEYRGRDSAK

SEQ ID NO: 357663 - protein, 111 aa, Zea mays
  Clone ID: MRT4577_89359C.1.pep
DPRVRALMDISLPCFPPWCLLSSSQTWLARLSPWSSLDCAISSFSPGTRANPSSFLPWRSQFQALGAPAQPTARHQCAPQAPRGLAGRDLPPAPIPSTAPLCLPRTRAAAL

SEQ ID NO: 357664 - protein, 54 aa, Zea mays
  Clone ID: MRT4577_8935C.1.pep
SGCHKVIGGPESLQHLWQLDPQLGFRSPRIIIRIFSIAMMRRRWTLRSASAMVA

SEQ ID NO: 357665 - protein, 198 aa, Zea mays
  unsure (1)..(198): unsure at all Xaa locations
  Clone ID: MRT4577_89360C.1.pep
MACNGDDPXAIGIDLGTTXSCVSVXXHDRVEIIGNDQRNRTTPSDVAFTDSERLIGDAANNQVAMNPINTDFDAKRLIARRFSDASVQSDIKLWPFKVISGTGENPMIAVQHKGEXEKQIAXEEISXSMGLIKKREIAEAYLGSTTKNAVGTVPAHFNDSQRQATRHXGPLLALNALRIINEPTAGSIGXYGVDHKGY

SEQ ID NO: 357666 - protein, 173 aa, Zea mays
  unsure (1)..(173): unsure at all Xaa locations
  Clone ID: MRT4577_89361C.1.pep
LTHTTFIKIMNQPEWLARTHAGHAPCAVKGAHARXVWLELCDKATACRRGQGRLMHMWXAAHNLWVGSAFMARGISCDTVQLFAAKYRDEGLKESGPYGLDVTLAFLGDRSCYNGQFFEWRNMAQIWKHPIVLAGENNQREIRMIHIMATSDPKXCNKGPAFAMPGAHVDGMD

SEQ ID NO: 357667 - protein, 51 aa, Zea mays
  Clone ID: MRT4577_89362C.1.pep
APWRSGAGSSTHAYAWKLLYYLLIYCFCLCAARPYMLLMRADTSSELTCAH

SEQ ID NO: 357668 - protein, 716 aa, Zea mays
  Clone ID: MRT4577_89363C.1.pep
MAGGVAVGVVALFLAAASFGANANTDSNDVNALNVFYTTMNSPPQLTNWVSQNGDPCGQSWLGVTCSGSRVTAIKLSGMRLNGTLGYNMNQLTALVQLDMSNNNLGGSDIPYNLPPNLQTLNLAVNNFTGTVPYSISQMVALRDLNLDHNQLSNINDMFSQLTNLTTLDLSYNTFSGDIPHSFNSLTSLKTLYLQNNKFNGTIDVLTDLPLTDLNVENNQFTGWIPDKLKGINNLQTSGNSFNNGPAPPPPPSSSSPPSTNTPPPSRQHAVPSSAGKNAPSENGGKHSKLGGGAVAGIIICLLVVGAIVAFLVIKRKSWRLSQGQDPEQNEPLSPFASGLKQMKSIKSIKIVSTMGKEELQKTVSMSLKPPTKIDLHKSFDENDTTNKAISRNVSLSSITIPAYTVADLQVATGSFSPESFIGEGSVGRVYKAKFGDQKVMAVKKINFSVFPSHPSDLFIELVANISMLNHPNLAELAGYCSEHGQCLLAYEFYRNGSLHDFLHLKDEHSKPLSWNNRVKIALGSARALEYLHETCSPSVVHKNFKSSNILLDGELTPHLSDSGFAGLLANQEFQESDENSGYRAPEVILAGQYSLKSDVYSFGVVMLELLTGRKPFDRTRPRPEQSLVRWATPQLHDIDALDQMVDPALQGLYPSKSLSRFADAIALCVQPEPEFRPPMSEVVQSLVRLVQRANMTRMHESQSRRHGESGGDYEF

SEQ ID NO: 357669 - protein, 56 aa, Zea mays
  unsure (1)..(56): unsure at all Xaa locations
  Clone ID: MRT4577_89364C.1.pep
DEGDSTVLAVKTGASAGRRGLHARRYRPXRNCVRSCRHASIGSARLTSRFTQTSVR

SEQ ID NO: 357670 - protein, 115 aa, Zea mays
  Clone ID: MRT4577_89365C.1.pep
GGPPSPGGPPPPPGCRPPGASKHCLSCTNVTPPTIRRNVRRPRVYLYGIRQACLCPKGPQVCPVVPKPGFYQCFQVRGPSPGPYPPAGWATRRFTGPNRRGLGLPRHGAPTKWVN

SEQ ID NO: 357671 - protein, 62 aa, Zea mays
  Clone ID: MRT4577_89366C.1.pep
FYICSFLFFLGGGTLHISANINKPYSTVKDFLYKYLFLPRTDIKSNNKIFHQDLKIDGLNKP

SEQ ID NO: 357672 - protein, 56 aa, Zea mays
  Clone ID: MRT4577_89367C.1.pep
FALQRFRTLRRLAIAAGVRCWLLNSEEALVQSVRSETCQDSRLAAEHRHAAARRLG

SEQ ID NO: 357673 - protein, 56 aa, Zea mays
  Clone ID: MRT4577_89368C.1.pep
VKNVGGNPNKIKSRAEKKKEITQGRDHHYDDTDLFNLKPGGCIDTQGEGPQQRKWS

SEQ ID NO: 357674 - protein, 134 aa, Zea mays
  unsure (1)..(134): unsure at all Xaa locations
  Clone ID: MRT4577_89369C.1.pep
AVPVPIRRHASGVQRQCVKRIVDQNKLKMVIGLGVCLALSAAIASAMQMPCPCAGLEGLYGAGAGLTTMMGAGGLYPYAEYLMQXQCTPVAAAPYYTGCAQTSAMYHAVRQQCXDSXMRMMDVSSVAQQMQMMM

SEQ ID NO: 357675 - protein, 58 aa, Zea mays
  Clone ID: MRT4577_8936C.1.pep
GSFSVGVFSTPFTFIVFHLPPGVFFFRAKWFNFFYGDFDPPGFTPLGLGWLFLRPPKF

SEQ ID NO: 357676 - protein, 292 aa, Zea mays
  Clone ID: MRT4577_89370C.1.pep
MDYSGTKESPPAGAWWSRETVAVVTGANRGIGHALAARLAEHGLTVVLTARDGERGEAAAAPLLARGLAVVFRRLDVSDPASVAEFAAWIRDALGGLDILVNNAAVSFNEIDTNSVEHAEAVLRTNFYGAKMLTEALLPLFRQSSATSRILNISSQLGLLNKVGDPSLKALLLDEERLTEAGIEAMVSRFLAQVKDGTWGEQGWPKVWTDYSVSKLALNAYSRLLARRLEARGVSVNCFCPGFTRTDMTRGWGKRTAGEAADVGARLALLPPTELPTGTFFKWRTPQLYSKL

SEQ ID NO: 357677 - protein, 115 aa, Zea mays
  unsure (1)..(115): unsure at all Xaa locations
  Clone ID: MRT4577_89371C.1.pep
RETASLCPKVFLRHKRVHLCIIQACQRVPSFFFDXYTLTQFFSKVIASWPAVTPSVRVVYDRHILSVVCASRVSKAGRKQSFSLYVGGCSKDVFIKDYPSKFCWGLPWFLEWVGK

SEQ ID NO: 357678 - protein, 32 aa, Zea mays
  Clone ID: MRT4577_89372C.1.pep
ANTCVWTSLVAGRPWLGCTLTRCGICPRVRNY

SEQ ID NO: 357679 - protein, 49 aa, Zea mays
  Clone ID: MRT4577_89373C.1.pep
RLFSAAVFQDRRPKELSSNGGDNQEEAYGQVDRIVSSRTVSSPVFAEDG

SEQ ID NO: 357680 - protein, 54 aa, Zea mays
  unsure (1)..(54): unsure at all Xaa locations
  Clone ID: MRT4577_89374C.1.pep
TLNADEFEDMVAEKRLIPDGXGVKYIPRRGPLDKWRALHSXGLPKCCPHDNTHQ

SEQ ID NO: 357681 - protein, 154 aa, Zea mays
  Clone ID: MRT4577_89375C.1.pep
VPAPFLEFFFFFFFFFFFFFFFFFFFFFFFFFFWGFPPGGFKPFLNLKPLPIFSKGGLPPQRKIAQTTFFPIGPGPQVFPPRKPFSFPFFRPGPKGFSPFYFPPKRKGCPLLYPPSGPLKKEIFGGKPPPLVSRGPFLLDPPANGVLILAGFAP

SEQ ID NO: 357682 - protein, 80 aa, Zea mays
  Clone ID: MRT4577_89376C.1.pep
SPAYYISALLPFIHLARVSPSTLLTQPQLLPFYHHAAPNAGTLLQLQHSLSLNQLAFTNTTSFYQQPIIGRPLFYISYDS

SEQ ID NO: 357683 - protein, 51 aa, Zea mays
  Clone ID: MRT4577_89377C.1.pep
LKAVIITASYPPLGVMPWNNPPSLDWCWIVPLKKRVFYKKWAIIASELFFL

SEQ ID NO: 357684 - protein, 184 aa, Zea mays
  Clone ID: MRT4577_89378C.1.pep
MGQAFRKLFDAFLGTSEMRVVMLGLDAAGKTTILYKLQIGEVLSTVPTIGFNVEKVQYKNVMFTVWDVGGQEKLRPLWRHYFNNTDGLIYVVDSLDRERIGKAKAEFQKGAMTPMEVCEGLGLYDLKNRTWHIQGSCALKGDGLYEGLDWMASTLKELQASGRLPSEGDIVVLRSKSACKKSLG

SEQ ID NO: 357685 - protein, 194 aa, Zea mays
  Clone ID: MRT4577_89379C.1.pep
MGQAFRKLFDAFLGTSEMRVVMLGLDAAGKTTILYKLQIGEVLSTVPTIGFNVEKVQYKNVMFTVWDVGGQEKLRPLWRHYFNNTDGLIYVVDSLDRERIGKAKAEFQAIIKDPLMLNSVILVLANKQDMKGAMTPMEVCEGLGLYDLKNRIWHIQGSCALKGDGLYEGLDWLASTLKELQASGRLPSGGTSLF

SEQ ID NO: 357686 - protein, 169 aa, Zea mays
  Clone ID: MRT4577_8937C.1.pep
IAVLLPTTAAAPAPKGGLDPAAIAALPTTLYRNDAAEAGAGSDECTICLGAVQDGEVVRALPACGHVFHVPCVDTWLASSSSCPVCRAEVEPPPPTAVGSARFVQEKVQDAVKQEAGSSTPDRGIGACASLIKMLSRERPAPRRPQGAYADAGDLDDLERQQYAVAVNN

SEQ ID NO: 357687 - protein, 41 aa, Zea mays
  Clone ID: MRT4577_89380C.1.pep
HIQGSCALKGDGLYEGLDWMASTLKELQASGRLPSGGTSLF

SEQ ID NO: 357688 - protein, 194 aa, Zea mays
  Clone ID: MRT4577_89381C.1.pep
MGQAFRKLFDAFFGTSEMRVVMLGLDAAGKTTILYKLHIGEVLSTVPTIGFNVEKVQYKNVMFTVWDVGGQEKLRPLWRHYFNNTDGLIYVVDSLDRERIGKAKAEFQAIIKDPLMLNSVILVLANKQDMKGAMTPMEVCEGLGLYDLKNRIWHIQGSCALKGDGLYEGLDWLASTLKELQASGRLPSGGTSLF

SEQ ID NO: 357689 - protein, 100 aa, Zea mays
  unsure (1)..(100): unsure at all Xaa locations
  Clone ID: MRT4577_89382C.1.pep
MPNIFFFAQATPXTREEPFLRWEDDTTPPKAAGGDGQTLDTAARYAHSFPWLPTAGIEYLTLSYATALHRCWPDPRDVAYAESAYVDLNLLFCCLRKYER

SEQ ID NO: 357690 - protein, 80 aa, Zea mays
  Clone ID: MRT4577_89383C.1.pep
PFPLSPTAESGTRSHHRFGAPEYVRTTPPRSIAAQRRTPDNAPIATTNSTDFCTNAGGDITSGRAIHASLWRHVYTPVAG

SEQ ID NO: 357691 - protein, 90 aa, Zea mays
  Clone ID: MRT4577_89384C.1.pep
FFLQSVDSDGRNFTSSPPGQTQFKVVVKSLSPKELVRIYVPKPSDRYDGTFLVRYRMHETVHEGLKIEILYGGEHVAQSPYILKGSCHWS

SEQ ID NO: 357692 - protein, 178 aa, Zea mays
  unsure (1)..(178): unsure at all Xaa locations
  Clone ID: MRT4577_89385C.1.pep
MAPIYCRGRGNDVNPHEFGKDYYAHLKRSGKMQLPVRPDVXKLHRLKDLPPYDPDCDYIRAASIAGRIYLTHGIAEPACHKIYDVRQSDGSRPPDFCEISAAEARDTHCRRVPIMRIIHVDAQCARHVTTTXKVDLDQSVCKAPCRSARSAMFAVEAAMIDGGEYRSLFALLGYDVLV

SEQ ID NO: 357693 - protein, 70 aa, Zea mays
  Clone ID: MRT4577_89386C.1.pep
PGSLDPLSRRKFVVAATCTTQVQLIKFLTVHGKGSACACMQHLHSPWLPTSFDSQSLCCGRFTQAKKTQK

SEQ ID NO: 357694 - protein, 90 aa, Zea mays
  Clone ID: MRT4577_89387C.1.pep
PPHIFFPFTQWGALNFAAFLQKKQLPPLSQKVYVTPVPFLTQQQLFPFNRHGGPNAGPLLKRQQLCPFNHLVLKNPKGFSQQPTMGGPPF

SEQ ID NO: 357695 - protein, 86 aa, Zea mays
  Clone ID: MRT4577_89388C.1.pep
CTKMCLMQRSISSESTFGLLKTFPRVMLVIIRIACSNDSVSGCSFASPSSSMHPDSCICSSRCVSSSLFKPQLWCFSTSMLKASIS

SEQ ID NO: 357696 - protein, 65 aa, Zea mays
  Clone ID: MRT4577_89389C.1.pep
SGHKLIDQESIVDTHNSLVMFNITWTTISCILPIPGNAVQQFVRDKIQMSDRSCSVLNDAHSMTI

SEQ ID NO: 357697 - protein, 72 aa, Zea mays
  Clone ID: MRT4577_8938C.1.pep
TKKKPPHFLLWGKRAKKKGGDLTKAKEICHFFLQKHKSFKPPLTINPPLTPIFRQGTHQHIFLTRSFHTHLN

SEQ ID NO: 357698 - protein, 77 aa, Zea mays
  unsure (1)..(77): unsure at all Xaa locations
  Clone ID: MRT4577_89390C.1.pep
MKLVLVGLALIALDSRVPCTQTSGCSXCQQHIREQDHDAHELDAQLQQLLPPAQHDQLHQHQQQQVHMQPQKHQLQP

SEQ ID NO: 357699 - protein, 108 aa, Zea mays
  Clone ID: MRT4577_89391C.1.pep
LGGLDACGQEETRIEDRERSAEEVGALPTVVVVDHIRFQEDTKYHHPQRLTVIYGVQILSLFLISLPDATVRTMRSTARSQTLLCMILPLSIGIKKSSSATKPYVIHF

SEQ ID NO: 357700 - protein, 95 aa, Zea mays
  Clone ID: MRT4577_89392C.1.pep
MGAYKYIQELWRKKQSDVMRFLLRVRCWQYRQLSALHRAPRPTRPDKARRLGYKAKQGYVIYRIRVRRGGRKRPVPKGATYGKPVHHGVNRLKFA

SEQ ID NO: 357701 - protein, 115 aa, Zea mays
  unsure (1)..(115): unsure at all Xaa locations
  Clone ID: MRT4577_89393C.1.pep
MEDWMYHVWFLMLQAREHKLTVERIDNXGKTTTLYKLHLNEAHTAPPTIGCNGDEVGXNNLCLEVWDPRGQESLRTWWATNYRGTHALIEGIYXTDRAQVNIINDELNQLLQHPD

SEQ ID NO: 357702 - protein, 38 aa, Zea mays
  unsure (1)..(38): unsure at all Xaa locations
  Clone ID: MRT4577_89394C.1.pep
KKHHPMTSHXSSVPTFYVSRNXSINSTMSRIRSQDINS

SEQ ID NO: 357703 - protein, 117 aa, Zea mays
  unsure (1)..(117): unsure at all Xaa locations
  Clone ID: MRT4577_89395C.1.pep
PRPPFXAVLALPFWRRPSCSWXPWPXXCXRLCVXLSFLLSSRFVPPXLLLPRSFPLXFLXCLAPCGLPLXLVCCLFCGPLGXPVCPCFGXGRCRGLXPWPCFWLLXRVXLARLVRAP

SEQ ID NO: 357704 - protein, 146 aa, Zea mays
  unsure (1)..(146): unsure at all Xaa locations
  Clone ID: MRT4577_89396C.1.pep
IFLPHIQLNMEMVIIMARDAGLDWTIHLDTDEKIDPVVARQYSLRRLPLYVPVNXDIFIFPNYESIIERDDIKDPFTDVSMFNQNDYHIPKDTYLGLYKEATRGNSNYFLTYENAXTAERVQDHLGPNGANRWHNXLKIPIEYQLQ

SEQ ID NO: 357705 - protein, 154 aa, Zea mays
  Clone ID: MRT4577_89397C.1.pep
ARVSWYLITIKLREAVDAKLQRSPPPPRDLPLRLTKGDASPPLQRQSATARSRAQSPAHSPKPQDSEWVVAIRGKLAQARSEAAALPWARLSVYRVPKCLRDGDERAYTPQAVSIGPLHRGRRRLREMDRHKWRALHQVLKRTGHDVTAYLGAA

SEQ ID NO: 357706 - protein, 126 aa, Zea mays
  unsure (1)..(126): unsure at all Xaa locations
  Clone ID: MRT4577_89398C.1.pep
DQSAYSQSLHCPYISLLIHAHQSEIHTPPLTLHKTYLYPPNQALSPICASQPHPTISTPTFRAFISRISSSLHHTFSHLQPCTELINRNFMYRPDTLAEAYSRIRXNFVYFHVNYLTLIQYSLADS

SEQ ID NO: 357707 - protein, 141 aa, Zea mays
  unsure (1)..(141): unsure at all Xaa locations
  Clone ID: MRT4577_89399C.1.pep
SVKWILCRNSRPLKRXXAGPRVFSFFYFYFILFLFFFFFVFFFFFYLTPGRAEGGKGKTQATGGRGQRTRPRDQARRKQGHTRAKGETGNRSPVHTKEEPKAQNLKPGEPKETTNKNCGASAHCPFAKPETQGAKRNKETP

SEQ ID NO: 357708 - protein, 59 aa, Zea mays
  Clone ID: MRT4577_8939C.1.pep
ISRFLKKKKKKKKKKKKKKKKKKKKKKKKKKKKKKKKKKTKKKKKKKKKKGFTFPGGAL

SEQ ID NO: 357709 - protein, 65 aa, Zea mays
  Clone ID: MRT4577_893C.1.pep
SSGNNAEYAGLFLINTDCKKADCNKDRYLSLNYNILTGLIKTSLSKKIIKTLETFITCAVKYLNL

SEQ ID NO: 357710 - protein, 69 aa, Zea mays
  Clone ID: MRT4577_89400C.1.pep
PGLAARMSKEIPALGPSSMKIKGVAPPKRKSSVWIGGSFLGSVSPFQQMWIPKAGSPEFGPSFGPRKCF

SEQ ID NO: 357711 - protein, 93 aa, Zea mays
  unsure (1)..(93): unsure at all Xaa locations
  Clone ID: MRT4577_89401C.1.pep
VRSGFGSGFGDLERGVRRCSLPALKQFSTSSHRFPQDSSMRVPAEQFLTLRPLGAPPIIVPLAAXGAFRGFRDTMTPLYAVCMSLPLHFDKIL

SEQ ID NO: 357712 - protein, 65 aa, Zea mays
  Clone ID: MRT4577_89402C.1.pep
VRGLYFPLCFAPKLFMKSPRPPMAGAQVPRNDTSSSKAYVICVAAGDVAAASPHKSRRARLQKNW

SEQ ID NO: 357713 - protein, 57 aa, Zea mays
  Clone ID: MRT4577_89403C.1.pep
LVRDFLRLACFLYILVSLISVLRLRSGMFLCLGYGTLLLIIGLLGGIILRTHVLSVK

SEQ ID NO: 357714 - protein, 221 aa, Zea mays
  Clone ID: MRT4577_89404C.1.pep
MYHPTRGGVRGGRDQFKWDDVKVDKHRENYLGHSVKAPVGRWQKGKDLYWYTRDKKSDTEDALKEEIRRVKEEEEQAMREALGLAPKRSNRTQGNRLDKHEYAELIKRGSTAEDLGAGHAEAAQVQGLGLYKAPRDEGGSSSLSLDPPQMEPEQAEPLPAPKGKRPRERDERGGEKERKRDRHGDGKERRRDKHERRHDLEDRSKRHRKDKQKRRHDSDSG

SEQ ID NO: 357715 - protein, 230 aa, Zea mays
  Clone ID: MRT4577_89405C.1.pep
MYHPTRGGVRGGRDQFKWDDVKVDKHRENYLGHSVKAPVGRWQKGKDLYWYTRDKKSDTEDALKEEIRRVKEEEEQAMREALGLAPKRSNRTQGNRLDKHEYAELIKRGSTAEDLGAGHAEAAQVQGLGLYKAPRDEGGSSSLSLDPQMEPEQAEPLLAPKQEDDLEDNRKGKRPRERDEKRGEKERKRDRHGDGKERRRDKHERRHDLEDRSKRHRKDKQKRRHDSDSD

SEQ ID NO: 357716 - protein, 214 aa, Zea mays
  Clone ID: MRT4577_89406C.1.pep
MAAPPARARADYDFLIKLLLIGDSGVGKSCLLLRFSDGSFTTSFITTIGIDFKIRTVELDGKRIKLQIWDTAGQERFRTITTAYYRGAMGILLVYDVTDESSFNNIRNWIRNIEQHASDNVNKILVGNKADMDESKRAVPTSKGQALADEYGIKFFETSAKTNLNVEQVFFSIARDIKQRLSESDSKPEDRTISINRPDGGEASASQKSACCGS

SEQ ID NO: 357717 - protein, 220 aa, Zea mays
  unsure (1)..(220): unsure at all Xaa locations
  Clone ID: MRT4577_89407C.1.pep
MAAPPARARADYDYLIKLLLIGDSGVGKSCLLLRFSDGSFTTSFITTIGIDFKIRTVELDGKRIKLQIWDTAGPSIFYGLILLNLLIILTXAYYRGAMGILLVYDVTDESSFNNIRNWIRNIEQHASDNVNKILVGNKADMDESKRAVPTSRGQALADEYGIKFFETSAKTNLNVEQVFFSIARDIKQRLAESDSKPEDRTISINRPEGGEASASQKSAC

SEQ ID NO: 357718 - protein, 41 aa, Zea mays
  Clone ID: MRT4577_89408C.1.pep
LHLVFLHSPTIPATPSFQASNPLISHTLLLHRPHVRDITNR

SEQ ID NO: 357719 - protein, 49 aa, Zea mays
  unsure (1)..(49): unsure at all Xaa locations
  Clone ID: MRT4577_89409C.1.pep
SLFMEMKWTKVHRFVVWRIDQRXRAVLVDRVGGPGEGYKELLADLTGDN

SEQ ID NO: 357720 - protein, 86 aa, Zea mays
  unsure (1)..(86): unsure at all Xaa locations
  Clone ID: MRT4577_8940C.1.pep
AKICFSLXKSQKSIHSARKMLRQTRFFSMLTSYILGITISMKFLKRIETEAIFSKAXPLYSPXGLIRLHGDRRGLREIKHFLFYFD

SEQ ID NO: 357721 - protein, 95 aa, Zea mays
  Clone ID: MRT4577_89410C.1.pep
MTPPPPKRKKRPWPPCRFLFFPPVFVPPARWELDPPLRGSRFFIGEFFAPAGPRGPSQKKKKKKKKKKKKKKKKKKKKKKKKKKKKKNRGGGPVP

SEQ ID NO: 357722 - protein, 62 aa, Zea mays
  Clone ID: MRT4577_89411C.1.pep
MQTILDRIMHNLRFSPVVHPRSYNVHSKLAIFRLTRFSKQRWTQRLIPYSNSLKRQYLARML

SEQ ID NO: 357723 - protein, 334 aa, Zea mays
  unsure (1)..(334): unsure at all Xaa locations
  Clone ID: MRT4577_89412C.1.pep
MGWALALHGGAGDVPRTLPPESREPRLATLRRCLDIGTAALREGRTALDVVELVVRELEDCPHFNAGRGSVLTSAGTVEMEACVMEGATLHCGAVSGLSTVANAVSLARLVMEKTPHIYLAFDGAEAFAREQGVETKDPSHFITDNNIERLRQAKEANRVQIDYTQPAXPKPKGPGRGGXNCQTGTVGCVAVDAAGNLATATSTGGLVNKMPGRIGDTPLVGAGTYANALCAVSATGKGEEIIRRTVARDVAALMERGDALPLRDAAARVVAGAARGAVGLVAVSRQGEVCMAHNTTAMFRACATEAGHTEVGIWTDAADAGTGADGETVSVAL

SEQ ID NO: 357724 - protein, 126 aa, Zea mays
  Clone ID: MRT4577_89413C.1.pep
VRYPSSSIAPPRLSVSQMQVMVWMWPPIVCPYQRSGSALPPVVLRATVVRASGNITPCACWKRTPGTSRAMSFAWRVWPGAIHMMLGHRVEYLLHGMHLGPPGQVGLRQVSSPTQQLIPARLRRRA

SEQ ID NO: 357725 - protein, 192 aa, Zea mays
  unsure (1)..(192): unsure at all Xaa locations
  Clone ID: MRT4577_89414C.1.pep
MAIHHPHLLDFSPPPNTVVMEEAPPPPHFDHGLLGLHVDGMPHRVLADDAPVAAWAPQAVVSHSLYGYDNTAAGASSLFGHHEASEAQFSVLPPAASSFALLPNHHQQQQLPTTTAASSMQQPFQLRSSKYLGPAQELLAEFCSLEGNLLHATNKQGAPGAAAGNSRWDDVXTSSSSSAGLWGHLSLSSMDL

SEQ ID NO: 357726 - protein, 65 aa, Zea mays
  Clone ID: MRT4577_89415C.1.pep
TQNGACLSPKQASIDNISISKHTMCSHRVTVQQYLAFFGPRSQLANCSNTRPPMPTNLRSARLAA

SEQ ID NO: 357727 - protein, 327 aa, Zea mays
  unsure (1)..(327): unsure at all Xaa locations
  Clone ID: MRT4577_89416C.1.pep
IFINKKSGAQRGDLLKHKLHFLLNPVQVFELSSSQGPETGLFLFRKXGTGNDLSRVLSWGGGLGAVEKQGGLCTILHDIEHAAVTILDRWKVTVEDKKSKNVLLVKYMNNYLGIGCDAKVALDIHNLREGNPEKFYSQFLNKVLYAREGAKSIIDRAFVDLPWQVRLEVDGTEIEIPEDSEGVLVANIPSYMGGGDLWENEGENPEDFDPQSIHDKMLEVGNITRAWDLGTLQFGLSRARRIAQGQSIKIQMFAPFPVQVDGEPWVQQPCTLKISHHXAFMLRRAVEEPLGHAAAMITDVLEHAESSHVITASQKKALLREMALRLS

SEQ ID NO: 357728 - protein, 144 aa, Zea mays
  unsure (1)..(144): unsure at all Xaa locations
  Clone ID: MRT4577_89417C.1.pep
GPLPLVFPPRGGIPIFVKPLAGKPLPXGLRARPPSPMXEGEDPGPGGPPPGPPGFVFRRPTAGGGPPPSGLPPPKGGPPPPCAPSPWGPVSPGSXPPHGPASSGAPPPXGVPKDPPFGPXPGPGWFKNGPVVLGGRPPPTFAQP

SEQ ID NO: 357729 - protein, 146 aa, Zea mays
  Clone ID: MRT4577_89418C.1.pep
GRVGSELPADSRPLLIFMEKKSGGGGGDLLKHKLHFLLNPVQVFELSSSQGPETGLFLFRKVPHFRILVCGGDGTVGWVLDAIDKQNYESPPPIAILPAGTGNDLSRVLSWGGGLSAVEKQGGLCTILHDIEHAAVTILDRWKVTV

SEQ ID NO: 357730 - protein, 69 aa, Zea mays
  Clone ID: MRT4577_89419C.1.pep
VPFSGPNHLQKGGCFRLTPPYEKGPKESLHFATRIFCYQFRLLRAEHVVILTSHRDRRQHPNRRKQYSI

SEQ ID NO: 357731 - protein, 76 aa, Zea mays
  unsure (1)..(76): unsure at all Xaa locations
  Clone ID: MRT4577_8941C.1.pep
MTECVAIHVRHAGIQVYYTCCELYCIEHGIEAVGLMPGHKTLVXRDDAMNTCFSETGAGKHVPCAAXIDIDPSVID

SEQ ID NO: 357732 - protein, 160 aa, Zea mays
  unsure (1)..(160): unsure at all Xaa locations
  Clone ID: MRT4577_89420C.1.pep
MSRYSLKLELPVXKGPAEAMRMMEKYPDSISASVEKGERRDIPNIDQKKYLDXCDHTVXARVLDLPYGIKLTGENEIFIFLKNTLPXTGALMSVIYDENIGXDGDLYMTYIEENTFVLLWVVPRRLVSTSSNAPPPENTLKKIRVSRIRVHNSLACLVSQ

SEQ ID NO: 357733 - protein, 50 aa, Zea mays
  Clone ID: MRT4577_89421C.1.pep
RPTTVVLFFFFFKLIPYLFNTPPFPKKGCKIPPCKKFFSRFYHYHRPGFN

SEQ ID NO: 357734 - protein, 89 aa, Zea mays
  unsure (1)..(89): unsure at all Xaa locations
  Clone ID: MRT4577_89422C.1.pep
MGALHDEANCYLKSCLLRECYIQHSEIGVSSQVTIWMKTXDSEMMAADIYDTDEEAAKLTENWEGPTXIGRNTKITNWLIDMNARMGKN

SEQ ID NO: 357735 - protein, 89 aa, Zea mays
  Clone ID: MRT4577_89423C.1.pep
VKRIGERNGPYGHGKCSPNRACHLTKPSQVWFPTWCAPITSQNGSWLASATAAGHLDLQLPHQSAMLPKACKLGRLRVFRVLTAYSTSQ

SEQ ID NO: 357736 - protein, 67 aa, Zea mays
  Clone ID: MRT4577_89424C.1.pep
PYRIPRKLKQQLIYRMNYTRCIKTLPPHTPSLNGGFRRGRRPRAPPRGALRHLVVALALWPFQTTGP

SEQ ID NO: 357737 - protein, 60 aa, Zea mays
  Clone ID: MRT4577_89425C.1.pep
FIIIYVLFFSIFHIIYFLFIIVQKKVLASLLSSRGIGSLLRVASGSKSKANSTYAHQVFI

SEQ ID NO: 357738 - protein, 162 aa, Zea mays
  Clone ID: MRT4577_89426C.1.pep
LVGTRLWGTLRKHRRDNRETATRMQAREWLSEATGAGIHRLVTLVGAARGITNMTGTLTAVIRGGVARTTPGGPTIVMTMAVVVRHDPRQEGSPRGGYVNTTRVATAGRVRNASTCTGDRRGRVEAGPLFAWPSSHFCIAGCGFVVVSIVERLLTVSAPLSW

SEQ ID NO: 357739 - protein, 203 aa, Zea mays
  unsure (1)..(203): unsure at all Xaa locations
  Clone ID: MRT4577_89427C.1.pep
LQRTPGSNVEESSILETVTAVAAGKPLSCPNHDGNVMDFYCQSCETAMCRECTEGEHAEHPTVPLKDVVEQHKASLQVQLDAVNKRLPEIDSALQFISEIIHQLTNQKASIVDDIHSTFDELQKTLNVRKSVLLMELEVNYGLKHKVLQSQLDTLLEGQESIKSCSNFTAQALNHGTETEVXXLVKKQMSEKLNELADQDFPL

SEQ ID NO: 357740 - protein, 111 aa, Zea mays
  Clone ID: MRT4577_89428C.1.pep
PIHQRQASGQSESRKDGPRMATHMLEGPRQPLQALATRRTTSVATAGTSGARSMLQSYTDYAADHNKDPNTLRSMSLVLIAEALRLHVLRDTVPHLLLGCYYHDQENSGHH

SEQ ID NO: 357741 - protein, 68 aa, Zea mays
  Clone ID: MRT4577_89429C.1.pep
VMLFLVNEDGSMILDVDQQSPSCLPDIFSEACDCSCYHSQQQVPVRFQPWALDASRLEALSLLGALLE

SEQ ID NO: 357742 - protein, 49 aa, Zea mays
  unsure (1)..(49): unsure at all Xaa locations
  Clone ID: MRT4577_8942C.1.pep
KIQXKEALPQDXQGLIFAGKQXEDGRTLAXFNIQKESTLXLVLRLRVVQ

SEQ ID NO: 357743 - protein, 170 aa, Zea mays
  unsure (1)..(170): unsure at all Xaa locations
  Clone ID: MRT4577_89430C.1.pep
MFLGDIPSGHDSILREVNENLFCNYPVLDVGTGNGLXCKHWIVFSNSPVLLLMLDGXLLQALAKQGFTDLTGTDYSKGAVELARNLAARDGFSSINFLVDDVLETKLDRKFKIITDKGTLDAIGLHPDGRAKRMVYWESVSNLVEPGGIVVITSCNHTKDELLPLSLLCW

SEQ ID NO: 357744 - protein, 92 aa, Zea mays
  Clone ID: MRT4577_89431C.1.pep
NHFHDTRRNNTPTPSNKIKAPPATTTNNSNNTNTNTPSATNPNPTPKPTQTPTNTNTKHRQPSPPPQPQELPSAAPQDNNNNNKPYQATQPP

SEQ ID NO: 357745 - protein, 59 aa, Zea mays
  unsure (1)..(59): unsure at all Xaa locations
  Clone ID: MRT4577_89432C.1.pep
TSXHSSAYSYPLTQHPNPLTLYKPIGSATHTTXSXXNTPXQLPLHTISNQSPTTLHPHD

SEQ ID NO: 357746 - protein, 110 aa, Zea mays
  Clone ID: MRT4577_89433C.1.pep
VIFIQVSPVFIERSVSSLLFIIESILIIICITFFWVSRYMIIVVYLLDSAISVALCLFFPPLVHAYIIMGELILSIHTKYSVLLNHKQGFTSYSEPKNNTYKQGSLEVVF

SEQ ID NO: 357747 - protein, 50 aa, Zea mays
  Clone ID: MRT4577_89434C.1.pep
CFFVKKERGINQLENQRDRSLSDRPHGTNGLIPHTQYKENYGSTGPGKNI

SEQ ID NO: 357748 - protein, 79 aa, Zea mays
  Clone ID: MRT4577_89435C.1.pep
LMLLCLHSYLHSRWQILMGNFNCPSKSAPGSMRVCILRNPSGKTCTKPMDCCCLAHVGDNDIQGKLLRELNMNASGANS

SEQ ID NO: 357749 - protein, 55 aa, Zea mays
  Clone ID: MRT4577_89436C.1.pep
PTSPSSSYGTSRYDMSKRIVGAQLGVCLALPSNELPVVPVSGCFVWFYGAPSVRP

SEQ ID NO: 357750 - protein, 86 aa, Zea mays
  unsure (1)..(86): unsure at all Xaa locations
  Clone ID: MRT4577_89437C.1.pep
TYGGRYRLYIVHGNVFDASLKDAPXIRPHGXRVADRIVCAHDKLQAGEEMVIXKVGNVVDNHIXAKGTLREIKLMRHMDHVVTSIA

SEQ ID NO: 357751 - protein, 316 aa, Zea mays
  Clone ID: MRT4577_89438C.1.pep
MSQVTAVDGTKIMGYAMKGTSTSNHTATIVFNSTVVGVNPSPIVAAFSSRGPSVASPGVLKPDIMAPGLNILAAWPSEVPVGGPQSSSFNGVSGTSMATPHITGVAALVKKVHPDWSTAAIKSAIMTTSSAVDNAGNQIMDEEHRKASFYSVGAGHVVPAKAVDPGLVYDLGVHDYAGYICRLLGEAALKIIAINSNLTCAELEPVTGAQLNYPAILVPLRAEAFAVNRTVTNVGPERSNYTAKIEAPKGLTVKVEPAELEFTKVNERKTFTVTVSAAAGASSEQELAEGTLSWLSHDHDYVVRSPIVADSRLTLS

SEQ ID NO: 357752 - protein, 51 aa, Zea mays
  Clone ID: MRT4577_89439C.1.pep
ASTSVVVISTVQKITPAAGSSLGSSLGINGATLSKIYLVSGSRGKVPDMNT

SEQ ID NO: 357753 - protein, 78 aa, Zea mays
  unsure (1)..(78): unsure at all Xaa locations
  Clone ID: MRT4577_8943C.1.pep
IWYFLERLHGKRLLLMGDSMNQNQFESMLCAXGLAEQGQMFEMHEHRISKGQGFFIFEFTVIINQSSVALCKVAWELE

SEQ ID NO: 357754 - protein, 147 aa, Zea mays
  Clone ID: MRT4577_89440C.1.pep
RKKKKKKKKKNSPPPRAPARFTSLGAHRSEGACLLHLDRYKCLKPSWRRPKGIDSRVRRKFKGCTLMPNIGYGSDKSTRHYLPNKFKKFVVHNVSELELLMMHNRTYCAEIAHNVSTKKRKEIVERAAQLDIVVTNKLARLRSQEDE

SEQ ID NO: 357755 - protein, 174 aa, Zea mays
  unsure (1)..(174): unsure at all Xaa locations
  Clone ID: MRT4577_89441C.1.pep
MAKQGAKKMKDENKKRLDLLLRIILISNAIYIVVRMAIMHSSFTWKHWIGLMVTSAAYFLPYKQLASMAKPVYSDNGELLDGGFDLSTGGVCEYLYDVIYITVFVQLMSIISEKFWWTYLVIPAFAGYKISGLLRGXFFSGGSEGEVEDEKTRKKREKMEKKASRGKMIKTRTR

SEQ ID NO: 357756 - protein, 171 aa, Zea mays
  Clone ID: MRT4577_89442C.1.pep
KNLQSDIDMSTFIGQKVEKQEDEFPCFSSSSADTFRAEKAANSVRQTVDRHSTCSQPSGRDSFRHGFSPGFNFQESEPNTFWADSYVCNGTFQAGLEFSGVVARKDNDKNEVKIEASEKPDTKILTGTCWLSADNRNVINGTETCSDGSEAFNCAEVSFCASDAMTQITAN

SEQ ID NO: 357757 - protein, 133 aa, Zea mays
  Clone ID: MRT4577_89443C.1.pep
MAVPLLTKKIVKKRVKQFKRPHLDRYKCLKPSWRRPKGIDSRVRRKFKGCTLMPNIGYGSDKSTRHYLPSKFKKFVVHNVSELELLMMHNRTYCAEIAHNVSTKKRKEIVERAAQLDIVVTNKLARLRSQEDE

SEQ ID NO: 357758 - protein, 49 aa, Zea mays
  Clone ID: MRT4577_89444C.1.pep
SPPRAPLWRWGRVVERRPHPLHCQCASVQSPSGCQRPPNQYIPNKSLLG

SEQ ID NO: 357759 - protein, 438 aa, Zea mays
  Clone ID: MRT4577_89445C.1.pep
MLGDQCIIQALDSVSSSSSAPDSTLSGELPSVSRNCVIGSLQVARAQKGGHVEGLVNCCHSKKKKKNRTGSGLWDSATKSWASGMGGDDENSEANMSELIGGIGRELAISCLLRLPRSYYYDVACVNRSFYSLVRSGKLYRLRRAAGIAEQMIYCSCNVLEWEGFDPRRQRWFSIPSMPPIECFTLADKESLAVGTNILVFGKRVEAHVVLRYSLLTNSWTTGEMMNTPRCLFGSASFGEKAIVAGGIGQNGTLTSAELYDSEMQTWTTLPSMNRARQMCSGFFMDGKFYVIGGKSERHNEILSCAEEFDLESSTWRLIPDMAQGLNGGSGAPPLVAVVNNELYAADYATKEVRKYDKENNAWITLGLLPGRYTSVHGWGIAFRSCGDMLIVIGAMSSGGSGVIEICSWVPNNELPDWKIIGTRRSGSFVYNCAVMSC

SEQ ID NO: 357760 - protein, 174 aa, Zea mays
  Clone ID: MRT4577_89446C.1.pep
MAKQGAKKMKDENKKRLDLLLRIILISNVIYIVVRMAIMHSSFTWKHWIGLMVTSAAYFLPYKQLASMAKPVYSDNGELLDGGFDLSTGGVCEYLYDVIYITVFVQLMSIISEKFWWTYLVIPAFAGYKISGLLRGAFFSGGSEGEVEDEKTRKKREKMEKKASRGKMIKTRTR

SEQ ID NO: 357761 - protein, 133 aa, Zea mays; identical to SEQ ID NO: 357757
  Clone ID: MRT4577_89447C.1.pep

SEQ ID NO: 357762 - protein, 103 aa, Zea mays
  Clone ID: MRT4577_89448C.1.pep
PLRGSCFVASAWLLRSVCPVGPFLPLARVAPRSAPVPASFRVWSLRSSASCLRAGLSSPAPGAASGALPPSPVLARPVVCARWVGRGPSSHPPHFCGRFSGVQ

SEQ ID NO: 357763 - protein, 133 aa, Zea mays; identical to SEQ ID NO: 356872
  Clone ID: MRT4577_89449C.1.pep

SEQ ID NO: 357764 - protein, 92 aa, Zea mays
  Clone ID: MRT4577_8944C.1.pep
APPQQFSYCWHGRTGGGRPNVVAEPLLGHTLLGNGNAENGGHGLDPIPPTILARGPAAVMLERQGGSCFATAFDSGPSHLPRELLWAPFTRF

SEQ ID NO: 357765 - protein, 133 aa, Zea mays; identical to SEQ ID NO: 356872
  Clone ID: MRT4577_89450C.1.pep

SEQ ID NO: 357766 - protein, 555 aa, Zea mays
  Clone ID: MRT4577_89451C.1.pep
MAELRHATAAAAATRATGSPSKRDAEAASSPLVASPRVGGGKDGLRPHQRWPLPPPVRALLACEDPRSPTASASYRILVAAIACFALAALFSAPSLWARLNAPYLCRKEGIRLHCPRVSQPDSLWENPHAAATSWKPCAERQRHEVSDLVSENETSGFIFIHAEGGLNQQRIAICNAVAIAKIMNATLILPVLKQDQIWKDQTKFEDIFDVDHFINYLKEDVHIVRDIPDWFTEKDDLFTSIKRTVKNVPKYASAQFYIDNVLPRIKEKKIMSIKPFVDRLGYDNVPMEINRLRCRVNYHALKFLPDIEEMADKLATRMRNRTGSLNPYMALHLRFEKGMVGLSFCDFAGTREEKAMMATYRQQQWPRRYKNGSHLWPLALQKRKEGRCPLEPGEIGIILRAMGYTKETQIYVASGQVYGGNNRMAPLRNMFPNMVSKEDLASKEEMEPFKKHVTSLAALDFLVCLKSDVFVMTHGGNFAKLIIGYRRYMGRHRLKSIKPDKGLMSKFFGDPYMPWATFVEDVVITHQTRTGLPEPTFPHYDLWENPLTPCMCRA

SEQ ID NO: 357767 - protein, 240 aa, Zea mays
  unsure (1)..(240): unsure at all Xaa locations
  Clone ID: MRT4577_89452C.1.pep
MEKTVVLYPGLSVSHFVPMMQLADMFLEEGYAVAVALIDLTLDQDAALADAVDRVASAKPSVAFHRLLRIQNPPTVTDDGEPFLWYFQILKRYNDRLREFLCSLPPRSVHAVIVDALSVDALDVTKELGLPAYTFCAANASALAVFLQLPWIRAEGQPSFKELGDAPVNFSGVPPIPASHLVRQMLDPESEIYTAMMNAMRRGAEDPDGILVNTFASLEARAVGALRDPQLXPPSSGRAR

SEQ ID NO: 357768 - protein, 118 aa, Zea mays
  Clone ID: MRT4577_89453C.1.pep
VLSKLIHSPDISGYFDVLVHMEMSLHSMEVVNRLTTAVDLPTEFVHEYITNCIQSCQNIKDKYMQNRLVRLVCVFLQSLIRNKIINVQDLFIEVQAFCIEFSRIREAAGLFRLLKSLE

SEQ ID NO: 357769 - protein, 178 aa, Zea mays
  Clone ID: MRT4577_89454C.1.pep
MSASSVVPMLLPDERPDILSLLDAAARPLADVVADFLARFPRERRLRVCGALCFLLEAACDETSEKSERAFVQLLLTSSSGNSNNEVLNQSALDYINGSVSASQVFLPREQLEKQYCSTGVHSSPQTSSFTAPAVRSAIPDPDVRQSCANSSESSISPPGSKQKSASDDRDTIISVLL

SEQ ID NO: 357770 - protein, 207 aa, Zea mays
  Clone ID: MRT4577_89455C.1.pep
MAGSDADREKSCCCSCCTPLISLGVVVLMYWAIFQPHQIRARVDYAELSSLSVSNASSGSSPSPVTVSYHVAVNLSLYNPSKRVGIYYDTLDAALRYRGAVLSPAASAASPAEFHQRRKAGRAVRLVFDGERVAVPGDAGTQLDGEVRAKAELGLELSVEARVRYVFGIVKVRQRPAVWCALSIPVPPVPGGLGVLGSGDRCRVKYR

SEQ ID NO: 357771 - protein, 64 aa, Zea mays
  Clone ID: MRT4577_89456C.1.pep
MTRHGKNCTAGSVYTYHEKKKDTAASGYGTQNIRLSRDAVKDFDCCCLSLQPCHDPVVTPDGYL

SEQ ID NO: 357772 - protein, 70 aa, Zea mays
  Clone ID: MRT4577_89457C.1.pep
LAGESEWAVWQIDVLIKRNEVENVYHWACGRPTSLHDRGRDSDDDDFRDRDYDVAALTNNMSQAFRLSVR

SEQ ID NO: 357773 - protein, 440 aa, Zea mays
  unsure (1)..(440): unsure at all Xaa locations
  Clone ID: MRT4577_89458C.1.pep
MSASSVVPTLLPDERPDILSLLDAAARPLADVVADFLARFPRERRLRVCGALCFLLEDKMMLHPTGRLIAFAILHQSYSPQTANPYIPILLNAACDETSEKSERAFVQLLLTSSTRASGIGLPLLSALDXYRSGIPGSTHAXPXVNXLEKQYCSTGVHSSPQTSSFTAPAVRSAIPDPDVRQSCANSSESSISPPGSKQKSASDDRDTNISVLLEDIPGGRLGPQWIRPTPPRLPLFDGELQWLNPDNNHELLWDYSMCADTNRGAAIRDLIARALKGPLAPIQQEQVVVELAKDPKLVYYCGMTPQKLPDLVEHNPLIAVEVLSKLIHSPDISGYFDVLVHMEMSLHSMEVVNRLTTAVDLPTEFVHEYITNCIQSCQNIKDKYMQNRLVRLVCVFLQSLIRNKIINVQDLFIEVQAFCIEFSRIREAAGLFRLLKSLE

SEQ ID NO: 357774 - protein, 406 aa, Zea mays
  Clone ID: MRT4577_89459C.1.pep
SVECISVRNSRVDPRARKKLICLLVIKHCIDLFFQYPYNNFLHHHVENIIVSCLEVKRNQLIDHILNDCGLVGKVLAAEKSSSLAVESNGPTLPSEGKEPPRIGNIGHITRIANKLIQFGNSNSMIQSHLQENSEWAVWQIDVLIKRNEVENVYHWACGRPTSLHDRGRDSDDDDFRDRDYDVAALTNNMSQAFRFGIYRNDDIEEAQGSHERDDEDVYFDDESAEVVISSLCLGDDQDSSSLFTNSNWFTFDGDRGINDRLAASVPPSSPDSEAISLNTENTDEALTGETTGGTESLRESASLENGPVEDANELAEVADDNDADATDGEKILCTEEDSQASEGPVDAEEDKTGGASKAANESVPDNALPESHHTDCRCADSSESGTEEDVEIDDEKKSETAMTNE

SEQ ID NO: 357775 - protein, 328 aa, Zea mays
  unsure (1)..(328): unsure at all Xaa locations
  Clone ID: MRT4577_8945C.1.pep
MLLRLKIVVGVHSVVLPVPVPGGYGHGACYAAVEPCWRRSRRPALAAAGGLVARRPRQSATVVMALKEEPEGSSRRGFAGGGPSWDPGLEIQVPFEQRPVNEYSALKDSALYSWAELSPGSFFLRLGGLCLVTFTVLAAPIAAASFNPGKDPLKFVLAAGIGTLLLVSLAVLRIYLGWSYVGDRLLSAVVPYEETGWYDGQMWVKPPEVLARDRLLGSYKVKPVVNLLKQTLVGTGALLVGAVSLFAFAAPVEDFLHALSQPPSSATASSKPSLRKEELLRLPVEVMQDDDLAAAADXAAAGRPVYCRDRYYRALAGGQYCRWDDLLN

SEQ ID NO: 357776 - protein, 85 aa, Zea mays
  Clone ID: MRT4577_89460C.1.pep
MVYQQHLDTLRRHGAVVTEDLSIANLDVIQNATVSGELAALAAEFKIALNAYLSSDLSRSPVASLAELIVFNNAHPDEEMLKQVG

SEQ ID NO: 357777 - protein, 106 aa, Zea mays
  Clone ID: MRT4577_89461C.1.pep
VKLLLHLKNVALSPKLGLGTLAKAPSGRSSRMPRPSMEPMVGNVSGAPRRPVLCFSPRSIYNKEGEALKNHPTNAVPIALARPPPSPDRLVPGQFPERTFEKKVGR

SEQ ID NO: 357778 - protein, 128 aa, Zea mays
  unsure (1)..(128): unsure at all Xaa locations
  Clone ID: MRT4577_89462C.1.pep
GVLLFFVGFFFWFLFFCFFFCFPNPPLKTKPXFKTGGGGPVTPAQLPAGEKRPTPNPGETRGGRPPGSPLPKKKGHPAPPPGGGPAPKVGGAVGXLQTPRGAGRRPPENKGXRGQKLPQSPGPPPGGG

SEQ ID NO: 357779 - protein, 112 aa, Zea mays
  Clone ID: MRT4577_89463C.1.pep
NSSCSSSEVGGYLASASPLARTSQGGGLEVRRNQLITGVRTMPLKAAKVTQSRSRNLVGQERKGCSSPSCEEVVARRPDTNGDERWALAATLRPAAFFFSRPASRNPIALRS

SEQ ID NO: 357780 - protein, 247 aa, Zea mays
  Clone ID: MRT4577_89464C.1.pep
MTSAVLASRDEVHHGHPHHRRWGGARAPLMPKPSSNHNPRRYRPGPNPIVSGSPPAPRAGSAVAAEPLPSPLRHVKFRPSELTPAEARHLRERLTGELGRVRAFVSRIDSWQDGRRSSPPPALVEAMWRRCADILTRLRRSKKSVWFNSPVDVEGLKLHDYRAIIRSPMDLGTVKQNLTAGRYPSHEAFAGDVRLTFNNALRYNPPDHHVHRYAGDLLATFEGMYKEEVSWFEQQRQQLELPMQLDL

SEQ ID NO: 357781 - protein, 71 aa, Zea mays
  unsure (1)..(71): unsure at all Xaa locations
  Clone ID: MRT4577_89465C.1.pep
HDLLSQSTELKPFIPIIEGSWNQAAPIQGDMGTNTGGFFRGLGQPYTASKLFFFLXLAKQLSRGTAARPTY

SEQ ID NO: 357782 - protein, 90 aa, Zea mays
  unsure (1)..(90): unsure at all Xaa locations
  Clone ID: MRT4577_89466C.1.pep
PTRPNDRQEIDQLLALPEKPQVGRLVIKRRRHTNRPYQENLLNMAEARREIVTALKIHRASSRRXATQVPAXQEPPLRQPPFAQLQQQQE

SEQ ID NO: 357783 - protein, 77 aa, Zea mays
  Clone ID: MRT4577_89467C.1.pep
SIHPIPRAKPYPAMSIPTTTPPRLIRRHNTSSCSHPFSLRLPYQALNLVATSPHSLGAAMTLSSCLHNVCTTTICYV

SEQ ID NO: 357784 - protein, 127 aa, Zea mays
  unsure (1)..(127): unsure at all Xaa locations
  Clone ID: MRT4577_89468C.1.pep
PHPTLHSQPGGALAHEARTKQTARKXTGGKAPRKQXAXKAARKXAPATGGXKKPHRXRPGTGGRREXRKDQKSXEXXNRKXPXQRXXRENAQDXKXXXRXQTPAXAAXQEAAEAXXXGXXEDTNXSA

SEQ ID NO: 357785 - protein, 63 aa, Zea mays
  Clone ID: MRT4577_89469C.1.pep
MLGLQVRSSGAPGPLTLKEVEELEQLTQQLMQDMEHPQRQNVAVNELCGRCHQPLATGAAARP

SEQ ID NO: 357786 - protein, 132 aa, Zea mays
  Clone ID: MRT4577_8946C.1.pep
IGDTSAVIGSRNCSDVEDVDGVDLIKGIIVVRQPHVIVRVRSSPVEARAFFGSKADMLSAAAWIVVVHAERSAGGVRLSIFSSWSSLSRWNGGPVSVVLGSSLLPGASTRGWLGGRCSLCSGSGCAEMSPPF

SEQ ID NO: 357787 - protein, 70 aa, Zea mays
  unsure (1)..(70): unsure at all Xaa locations
  Clone ID: MRT4577_89470C.1.pep
HAALSCXTVLLLLVRSQPCPRKDGCLFLQLLLPLWLLVELLLSHANTGLDITVHQMVSLRLWFXPTNRVS

SEQ ID NO: 357788 - protein, 139 aa, Zea mays
  Clone ID: MRT4577_89471C.1.pep
RSHPHSYALAQSLLGFVFERDSVVNSLPAKTITLLVQHLLTPVLTGWGSSGHFVHAGLQDLKPSKLRQLSMDRLDLYKYNLSIEMSLAPVIGLLDACQIIGITLTKEGLTIGETTVTRNYLPSRTCSAHTGYFNHANCI

SEQ ID NO: 357789 - protein, 120 aa, Zea mays
  unsure (1)..(120): unsure at all Xaa locations
  Clone ID: MRT4577_89472C.1.pep
MGLWKDCVHMDEAALQIEKEYSTGPAVDGPLGSLDSHKDPQRXDMGDIRLVDGTTLRGQXVLDAEGXKNLVCMFXGSSEIHSKXATAHSTGNVLTTPGSLDMVGLIFNGSAKPIDNGPTE

SEQ ID NO: 357790 - protein, 111 aa, Zea mays
  Clone ID: MRT4577_89473C.1.pep
KLKTFGERERGRSRGNRANQQTTWKRADAGAADADARGEGGKKQQHLAARVWEESRKLWDIVAPAIFSRVVTYSMNVITQAFAGHLGDLELAAISIANTVVVGINFGLMVR

SEQ ID NO: 357791 - protein, 49 aa, Zea mays
  Clone ID: MRT4577_89474C.1.pep
RASAAFTRPGLCQGAVESCCTPLTLSASIAPAVHHSCLITFCVFFIKRD

SEQ ID NO: 357792 - protein, 31 aa, Zea mays
  Clone ID: MRT4577_89475C.1.pep
MAVPLLTKKIVKKRVKQFKRPHLDRYKCLKV

SEQ ID NO: 357793 - protein, 86 aa, Zea mays
  Clone ID: MRT4577_89476C.1.pep
NKDCLVYLHDQMNISITLAISPVPPSLLPPVFPLQDPSAFVCSEGQAHRMWVSLLVGRDHQLFENGQSPKEPLFSWAPLSNPSTPP

SEQ ID NO: 357794 - protein, 213 aa, Zea mays
  Clone ID: MRT4577_89478C.1.pep
MELSTPVGSSLARTATMALVSPSFKITNQMRGRGMPLECQFPHRLPSVACSMLLNTQPSQRTNHKDCGLLQVQCTENLMQSPVSFSDFSVSVCTQEDGLIKLQVNVSGTMTDSIFEKVFTKNVAAAQPLPGFRRMKGGKTPDIPKEVALHLIGPSKVKKETIKKIINSTVAEYVQKEGLTVSKNMKVQQSYEELEAAFEPGKEFCFDATVHLQ

SEQ ID NO: 357795 - protein, 81 aa, Zea mays
  Clone ID: MRT4577_89479C.1.pep
ARNSARGFPKRSLYTRVDQQENRVVLDPLTPQVNSCYGDSTGERDGLRSTVVHTVQPKKDSINDKSGHHVDGSNTELNDST

SEQ ID NO: 357796 - protein, 47 aa, Zea mays
  Clone ID: MRT4577_8947C.1.pep
TVYALRYGTRSEDVILNAMKASTGVSTTHMLDNVRQVALPNYTRCEK

SEQ ID NO: 357797 - protein, 82 aa, Zea mays
  unsure (1)..(82): unsure at all Xaa locations
  Clone ID: MRT4577_89480C.1.pep
GIHTXAXSYVYFFKFLDSIFGDGDMXCTLNHGASSTKYKVTFTAYKESRFVIRSGAIKIWEARDDGIYLTDEHHHAVKMYGW

SEQ ID NO: 357798 - protein, 48 aa, Zea mays
  Clone ID: MRT4577_89481C.1.pep
KKNPVCPDRDTLHGLLYSVHPTGGLFERQRLNPRMLEIVDRDQDTASA

SEQ ID NO: 357799 - protein, 128 aa, Zea mays
  Clone ID: MRT4577_89482C.1.pep
KSTGFFPDGGTEATTPPGPPNQPASQTNWAKPLSFPVVTPTDLPVLLNRMPNGIWVKGKNHQKKELTAHPGLRLITPGDGANLPLSQKKGGAGAATVSGAANHFAEGEAPPTGALGAWGTPLGAFHPG

SEQ ID NO: 357800 - protein, 137 aa, Zea mays
  Clone ID: MRT4577_89483C.1.pep
MINPKKLAQLARKWQRVKIATKDDDRCCTISPIAGRGHCTVYTVDGSRFEVPLAYLRSVVFSELLRMAAEEFGFTGNGRITLPCDAAVVEYMICLLQRNASEEVEKAFLSSVVMPCQQSSYPTPPVVLHQQFAVCSS

SEQ ID NO: 357801 - protein, 66 aa, Zea mays
  Clone ID: MRT4577_89484C.1.pep
SAIVTTTRANGLHRTCTYVPRAARVIVTPGREIRRGAVLPGAACRFDLCVYWTGVLVYYACEGCKC

SEQ ID NO: 357802 - protein, 69 aa, Zea mays
  Clone ID: MRT4577_89485C.1.pep
IKKKKKKKKKKKKKKKKKKKKIKKKKKKKKKKTKKKKKKKKKFFPWAGNPLRGKFLKISIKLGAVEPCF

SEQ ID NO: 357803 - protein, 48 aa, Zea mays
  Clone ID: MRT4577_89486C.1.pep
KKKKKKKKKKKKKKKKKKNKKKKKKKKKKFKKKKKKKKKVCPLARKPP

SEQ ID NO: 357804 - protein, 262 aa, Zea mays
  unsure (1)..(262): unsure at all Xaa locations
  Clone ID: MRT4577_89487C.1.pep
TCSPEERSFSRVLQQSRVPPGEILKILRRMSAFFRELPSKEKQALILQSAEQWRKANLDVEKTLNHFEELRLQDPCFFYTVQKDEDSMLRSIFWTDARSRMDYEIFGDFVSFDTTFSTNRHNMPFVPITGMNNRGRTIVLGCALLQDRKAETYKWMLQTFLQEMGGGQMPKSVITSQDEAMSKAIAEVMPQARHRFCRWNGKAQEKMAAFVAARGNMKAELDILVDNSLTETEFEQGWSALIQRHDASENEYLQXLWEMRKT

SEQ ID NO: 357805 - protein, 109 aa, Zea mays
  unsure (1)..(109): unsure at all Xaa locations
  Clone ID: MRT4577_89489C.1.pep
YTHTTIFAAYLFRYNSCILTLQNKIITRANINSKKLFFPAKCCLQDGTLNRWLVNKICHGFERLIWNWQQLNLHSAAVYSKAKISSITSCWFFVISFVFDGEFAVSNXT

SEQ ID NO: 357806 - protein, 157 aa, Zea mays
  Clone ID: MRT4577_8948C.1.pep
RARVRGVPQAYVGNAVTLAVAKSTAGEVLGGGLGWAALLLNRAVASFDEAGVRAELAAWARDPRFAYVEPRGYGGAATVATGSSPRFDVYGNDFGWGRPLAVRSGAGNKMDGKVTVYEGRGGAGSMALEVCLEPQALARLVADDEFMEAVTVSAAAP

SEQ ID NO: 357807 - protein, 54 aa, Zea mays
  Clone ID: MRT4577_89490C.1.pep
KKKKKKKKKKKKKKKKKKKKKKKKKKFKIKTTKSLNGKNWGEYCKNWGDIIKMI

SEQ ID NO: 357808 - protein, 78 aa, Zea mays
  Clone ID: MRT4577_89491C.1.pep
VLRNFLQYTIYCLLCVQVKLLARHIGKPMEEIARDIRRPKYFSPSEAVDYGIIDKVIYNEKIQEDGGVVSELKRSNLI

SEQ ID NO: 357809 - protein, 61 aa, Zea mays
  Clone ID: MRT4577_89492C.1.pep
FVTTFLKGTLKRRKISLNLYTWPRQSLGCFPYMLPTEYNTRTIRLSTTYIGINKIPYAINT

SEQ ID NO: 357810 - protein, 125 aa, Zea mays
  Clone ID: MRT4577_89493C.1.pep
MKHRRRSKQQKLNSVPPPASPAARAPRSMPSPSASPKSPAPTTPPPEQAPEVVVPEDWALATKVISSDLSSPVVLVCGPSNSGKSTFTRLLLNKLLPSYGRIGYLDTDVGQPEFSPPGCLSLHIV

SEQ ID NO: 357811 - protein, 58 aa, Zea mays
  unsure (1)..(58): unsure at all Xaa locations
  Clone ID: MRT4577_89494C.1.pep
PSSTNADEDEXEAGVINGHXIRQHHIGHTGGGPRLMQRPSELGVGDQQNPRIRRKIFP

SEQ ID NO: 357812 - protein, 205 aa, Zea mays
  Clone ID: MRT4577_89495C.1.pep
MDSDDKKFGNGPRELTGAVDLISHYKLLPHHDFFCKKPLPLAISDTHYLHNVVGDTEIRKGEGMELDQLVHNAYLRDKPAYIQPFDMETLGQAFQLRETGLVEVPSTEKGIPTISGKPKIESKDKEKKHKRHKDKDKEHKKHKHRHKDRSKDKDKDKDKDKKKDKSGHHEKKRKHEGTEDSVDVHKHKKSKHKSSKTDEMGNGVS

SEQ ID NO: 357813 - protein, 66 aa, Zea mays
  Clone ID: MRT4577_89496C.1.pep
FVSSLFNHLTFRPPPFFFIFGFIKTKWGLKNTLILHLSAIRPQFYSYIYAQLLYTYSKRIIIISNP

SEQ ID NO: 357814 - protein, 1175 aa, Zea mays
  unsure (1)..(1175): unsure at all Xaa locations
  Clone ID: MRT4577_89497C.1.pep
MHIKEVTLEGFKSYAGRTVVPGFDPLFNAITGLNGSGKSNILDSICFVLGITDLRQVRAASLQELVYKQGQAGVTKATVSIVFDNSDRSRSPLGYEDSPEITVTRQIVVGGRNKYLINGHLAQPSRVQTLFHSVQLNVNNPHFLIMQGRITKVLNMKPPEILSMLEEAAGTRMYEMKKESALKTLEKKQNKVDEINKLLDVEILPALEKLRKERCQYMKWANGNAELDRLKRFCIAYDFVQAERVRDGALNDXXXXXXXXVELDETTENIKAAIQEMDNNISTLAAXXEAKVGGEMKVLSDKVDKLSHVLIKETSVMNNQEETLKSEEKGAEKILTNIEDXXXSILERDAAXXXVENEASDMKRRAEDLTKELDEKEKEYQGVLAXXXSANEKKCLEDQLRDAKAAVGDAESGLKQLAXXXKHXXXXXXXXXXLLVSKRDEAIAAENELKTRTKDLEGIKASMGSINYDEGQMEALQKDRSAELEIIQKLKDRVRNLSGELANVHFSYRDPERNFDRSKVKGVVARLIRIKDSSTATALEVAAGGRLFNVVVDTEETGKQLLKNGDLRSRVTIIPLNKIQTYMIPDRVQQTARRLVGPDNVTLALELVGYGEEVKNAVAFVFGSTFVCRNMDAAKEVAFNRQISSTSVTLEGDTYQPSGLLTGGSKGGRGNLLRKLDELAKAEADLSDHEKKLFVIEQQIGALLPLQKRHTELKSQFELKSYDLSLFQNRVEQNEHHKLGELVKKIEQELQESKQELTEKQVQHEKCVSTVSELEKTIKTYGTEREGKLKALEKRIKSIKSEMQSMSKQLKAYESDRERLIMEKDAVVGELATLEEQLTTSKAQITSLSETLEKQKDKVTSIKQDYDQAESELNVGRSKLKECDSQINRMAKEQQKLQQKLSDSNXXXXXXXXXXKRMEIEQKDCSSIVDKLVEKYNWIATEKQLFGKSGTDYDFESCEPHKARVSPLQFARHQSSLEKRVNKKVMAMFEKSEDXYNDLMSKAFIIENDKAPIKKVIDEKYALSCYSLKVTWLKVNKDFGSIFSTLLPGTMAKLDPPEGGTFLDGLEVRVAFGTVWKQSLSELSGGQRSLLALSLILALLLFKPAPLYILDEVDAALDLSHTQNIGRMIKAHFPHSQFIVVSLKEGMFNNANVIFRTKFVDGVSTVTRTVPSKQR

SEQ ID NO: 357815 - protein, 280 aa, Zea mays
  unsure (1)..(280): unsure at all Xaa locations
  Clone ID: MRT4577_89498C.1.pep
LQQKLSDFKXERKKMENEVKRMEIEQKDCSSIVDKLVEKYNWIATEXQLFGKSGTDYDFESCEPHKAREELENLQAQQSSLEKRVNKKVMAMFEKAEDEYNDLMSKKNIIENDKAKIKKVIEELDEKKKETLKVTWLKVNKDFGSIFSTLLPGTMAKLDPPEGGTFLDGLEVRVAFGTVWKQSLSELSGGQRSLLALSLILALLLFKPAPLYILDEVDAALXDLSHTQNIGRMIKAHFPHSQFIVVSLKEGMFNNANVIFRTKFVDGVSTVTRTVPSKQR

SEQ ID NO: 357816 - protein, 61 aa, Zea mays
  Clone ID: MRT4577_89499C.1.pep
VNYLAPYMYIFQSGQPRTASQIILIIGKIRLHVCMQLSKLCIRWLDQSGYGLHCVCIPCIS

SEQ ID NO: 357817 - protein, 103 aa, Zea mays
  unsure (1)..(103): unsure at all Xaa locations
  Clone ID: MRT4577_8949C.1.pep
AREVNRHIHGRGIFSLMAEEVGSSPNWLLGSTATQSRDAHCKWMLCDVHARRMLVCMNRTNVQHGCTMVRTHASVXHIPVVTLAVCRCVSHTSSWGCLGMVTQ

SEQ ID NO: 357818 - protein, 78 aa, Zea mays
  Clone ID: MRT4577_894C.1.pep
ARGRLGVKMGAAEIQQHPFSEGVNWALIRCSTPPGVPRAVEPVALAPPAPAKPAPVERAEISSSSNSKMMEINSSSNS

SEQ ID NO: 357819 - protein, 420 aa, Zea mays
  unsure (1)..(420): unsure at all Xaa locations
  Clone ID: MRT4577_89500C.1.pep
MPDAIPACFRRVAAAPGGRASPGSGPGSGVGTSLATSVYTTRLGLAALTWSRAALGLSLRAVLRVSAGPAPSPSASDYGDGEVEYGGAEKGDGEGEQDATVAVRVRPWLLWRRRGSKRFRARGRRVDLAWDLSRARFAASGSPEPVSGYFVAVVVDGEMAVAAGDMAEEAYRKTRARRPPGPGSGPGPALVSRREHVSXATGPAADTGPASSXGREREIAVDLVSRAQGQGQGRERDRAEVGMSVSVDGDRVLHVRRLRWKFRGTEKLDLGAGDRVLVSWDLHDWLFPARDASPPAATAPPARAVFVFRFELAGRDGEERDPADAREKEVVQVGGGLAGYVDGRRWGRGDWSESSSSGEKRRTRGQASRLAKASSSSSASVASSSASWASGSTVMDWGSPEEAELQSGDGFSLLVYAWKN

SEQ ID NO: 357820 - protein, 89 aa, Zea mays
  Clone ID: MRT4577_89501C.1.pep
REASGFKKRRTGLLSHGPKNRRFRAGKNQQIARGLGRSSVSRPNNRIAHYDLEDRFANSEGRKEGFEQTAEESDNGPREFLALGFGRSV

SEQ ID NO: 357821 - protein, 59 aa, Zea mays
  Clone ID: MRT4577_89502C.1.pep
RPPLALVRQMRRILARHHNLGKYTQRIETKLHCNFMRMVSLAVGTKPVTVAGRMKTLSG

SEQ ID NO: 357822 - protein, 120 aa, Zea mays
  Clone ID: MRT4577_89503C.1.pep
MDGDGDGRSVMAVVGLGVLGCNSAVAVYRSWGDPASVGFVVAADAALLLLLHFLRRFERARPRDDGGRGRAKAAVWALTTLLTAMFASRVAPMMPPHVGLAVWVAAVATAGGGFWALFIH

SEQ ID NO: 357823 - protein, 91 aa, Zea mays
  Clone ID: MRT4577_89504C.1.pep
HCWVSGVIKGPVFHLLPFQFHCYGPKGPRQFGGLWPVSPEGSTLVKTIGQKKRKGKPKSTPKGFGGKKNAPLSPAFCFRANMLNPPLRLFI

SEQ ID NO: 357824 - protein, 65 aa, Zea mays
  Clone ID: MRT4577_89505C.1.pep
FQHGARLFVAPGVLARTLHTHTHSFSDFSKKSVHYGSSTPCMYISPISNKTKKKPGVYHPYFLRV

SEQ ID NO: 357825 - protein, 42 aa, Zea mays
  Clone ID: MRT4577_89506C.1.pep
FSLNSVTLCSRQPTATVYVAVPYASGALESLRLFYPALRIRS

SEQ ID NO: 357826 - protein, 105 aa, Zea mays
  unsure (1)..(105): unsure at all Xaa locations
  Clone ID: MRT4577_89507C.1.pep
IRLEERYIASELCEALCPGQAPAIEAEERGDGTLRTTSIEFAMTRCMNCGFXREASPGYALDEGPNSECRPETHEELLXDKENCREGXRWETEIAHNLRPESLYR

SEQ ID NO: 357827 - protein, 120 aa, Zea mays
  unsure (1)..(120): unsure at all Xaa locations
  Clone ID: MRT4577_89508C.1.pep
QQPAPRTEARPNTKTGERERKARRGLIQQRETYTERHVETHVTWSTAQTEEADRDWXQRDGSARGTGARQTGXVRAGLTLDAGMQTAPXRRRPAPTXPLGGDAAARGERKYAREYKRDDG

SEQ ID NO: 357828 - protein, 113 aa, Zea mays
  Clone ID: MRT4577_89509C.1.pep
RNRKGIAIFMKKEGILEDPLNSGIFQDTLISIYGRSFSSVGAAGTLPWSAGNTHQLVLQGTNPTPSSRPGTTRTPQGVVCVHENHQSFFFSCKASNFFFYFFFFFFFFFPDPA

SEQ ID NO: 357829 - protein, 93 aa, Zea mays
  Clone ID: MRT4577_8950C.1.pep
GYSDLSGTFNNTFCQSKRTGSDTLWKSRNKSMPRSNTPFNQLKREGALPGQDAPYHTPLLARFACCRAHYQRDACATDADIHSVEHDTYSRPL

SEQ ID NO: 357830 - protein, 36 aa, Zea mays
  Clone ID: MRT4577_89510C.1.pep
MVRLQSSHMYTIITYVKKVRQRLAVCYRLVPVSTAL

SEQ ID NO: 357831 - protein, 169 aa, Zea mays
  unsure (1)..(169): unsure at all Xaa locations
  Clone ID: MRT4577_89511C.1.pep
LCGLEPTVSEEGHCTCRXLFHPEQVIXGKEDATLNLLRESLHMGXDIDDLCLDRIRKLVYNXSGLQRLLHCNAVGGGTEYGPGSLLLERLFGEHDHKCKLCFSVYTSKEALTLRCXPYNNGVSXYSLLQHTDVSIXLLDNEXLYDICRHFLDIERSKYINLKRLVSYEN

SEQ ID NO: 357832 - protein, 44 aa, Zea mays
  Clone ID: MRT4577_89512C.1.pep
KKGGNGQALESPSKAPRIERVDFFVAKPSPKKWFCCVTASLTHS

SEQ ID NO: 357833 - protein, 112 aa, Zea mays
  Clone ID: MRT4577_89513C.1.pep
TAKCCYWTCDNVWVIFCSNYGTSMCFICKNTYGSVLDSMRPVYQSYRPVYRPYRPVYRLETSSNSKTVQTRFRPVSTGFCRFIAINRLSVVAGFSPRTGFLNPAPHTPSAGD

SEQ ID NO: 357834 - protein, 283 aa, Zea mays
  Clone ID: MRT4577_89514C.1.pep
MDPSVHAAPLFGAASSSSYVPPAAFGVGNVTIRHEADPNTPFSVADKSKKRPVPNWLREELLKKKSEPLSASAQNSENLNPMEANEAVQTIGRPDQSDSRSNDSAKSTEDDDDDEDEIEAARMAAINKEIKRVLTEVLLKVTDELFDEIATKVLNEDDSAESNEATGVFGSKETGLGRSRAKASAKVVLPAKSTNSSDHKDSTGLSSPKGALLGLASYDSDDDDDADTDSKDKMPISNLSSKDNAGAVNTEGDKSTLGKRNGNHNEQNSLIGSSPSGEDLKSN

SEQ ID NO: 357835 - protein, 57 aa, Zea mays
  Clone ID: MRT4577_89515C.1.pep
MPERLAYFLTQQQLLPFYQQFAGRPVYMLQPHTLVMRVHIAFTDPPNSYQQHIIGSA

SEQ ID NO: 357836 - protein, 93 aa, Zea mays
  Clone ID: MRT4577_89516C.1.pep
SRVDGPVRHASAINKHHSTNDEIKCSFASISDNICADLVPFTRAEYLFQNTECGLNLQYTGCGLNLKRYFMYPLKHTVYYPLVNLQLANCGTR

SEQ ID NO: 357837 - protein, 58 aa, Zea mays
  Clone ID: MRT4577_89517C.1.pep
RTDDKKNIDDALHSAICWVDNDQLARDDQLDDKMKDLERICKLIIEKMDLAASGPDIT

SEQ ID NO: 357838 - protein, 96 aa, Zea mays
  Clone ID: MRT4577_89518C.1.pep
GLRATNLTRRADGNRLDACSEDGNSGHNPAHSYNPDAYDEALETPAEGANLHDARWAHCTNFHCAMTCLTTMRLMKSASCLERRAAYYALFRYLGH

SEQ ID NO: 357839 - protein, 73 aa, Zea mays
  Clone ID: MRT4577_89519C.1.pep
TPVLTPFPQTSGTVPSGASHPLSSSNLLNVCVAISLNASTAISTMASCSLMPSPDPSRILGIPIPDTGQIQPP

SEQ ID NO: 357840 - protein, 65 aa, Zea mays
  Clone ID: MRT4577_8951C.1.pep
IVKGDKEVGETYLGRNLIIGRDSHLYSQPNLPSRACRQVGSREQSPSHLHVESCICLACRCHTWI

SEQ ID NO: 357841 - protein, 464 aa, Zea mays
  Clone ID: MRT4577_89520C.1.pep
MASPRCWSVVCPKPRQVASESVHGAQLALQRLSRRCETCDGEASTPCSCRKEAVARDTEEDSSGPNSSFAHSVINMVGMLIGLGQLSTPYALENGGWASVFLLIGLGVMCAYTAHIIGRCLDEDSAGSKTYQDIGKRAFGVKGRVIASTFTYLEIFLALVSYTISLSDNLPLVFAGVHLHLPWLHLSATQLLTIIAVLLALPSLWLRDLSSISFLSFAGIIMSLLIFGSVVCAAAFGRVSLGKHIPVLQLEKIPAVSGLYMFSYAGHIVFPNIYAAMKDTSSFTKVSVTSFAVVTALYVALAFVGSSLFGAAVNSQITLSMPPHLVVTKVALWATVLTPVTKYALEFAPFAIQLQHHLPEGMGPRARMFVRGGVGSAALLVILALALCVPYFQYVLSLTGSLVSVAISVIFPCAFYLKIYWGRVPMSTVTINVVLILTGVVLAVVGTISSAMSLVQSIQRGHAA

SEQ ID NO: 357842 - protein, 54 aa, Zea mays
  Clone ID: MRT4577_89521C.1.pep
THVLSQLFFINMSDYFLSGRSTICATLDTLLMSNFTNHTPEPYPFSIHCSTHFH

SEQ ID NO: 357843 - protein, 52 aa, Zea mays
  Clone ID: MRT4577_89522C.1.pep
QLGKKLKLLYLLKEFERFVKAFLSNIANLGIRVVQFSHNCTAWYLHSAVYTC

SEQ ID NO: 357844 - protein, 155 aa, Zea mays
  unsure (1)..(155): unsure at all Xaa locations
  Clone ID: MRT4577_89523C.1.pep
YPPGSPFLWVLRATXWRAGLPDGYAEKVSGRGKIVSWAPQEDVLKHEALGCYVTHCGWNSVLEAVRQGVRMICYPVSADHFVNCAYVVNVWKVGVELATSGQGDVKDCIERVMEGDDGRRLQRKVNALRETVTAGEAMRAAKRNLTLFMDRINGS

SEQ ID NO: 357845 - protein, 104 aa, Zea mays
  unsure (1)..(104): unsure at all Xaa locations
  Clone ID: MRT4577_89524C.1.pep
MVHRLTYRKRCKYNAYYYRRLVVKTPGGKLVYHYTKIYASGPKCPITVKKILGITHLRPAEYKMYKLARNQRTENCPYGGVLYGTAVSERIIHAFXIEEKKIVK

SEQ ID NO: 357846 - protein, 103 aa, Zea mays
  Clone ID: MRT4577_89525C.1.pep
PHAIRSIAETTMGHPTQHGSDKTSELLASYRQLWCHALSYVKRISLNSALSLRLPNTIDRWAGSATLCKTLRRSQISPSNHKYLRRVMPTTTGMRTLWGTHNY

SEQ ID NO: 357847 - protein, 102 aa, Zea mays
  Clone ID: MRT4577_89526C.1.pep
KVKKGSFLVLPKGFLRSPVSFKGILNFFSPPNYNPGFFFFPCLFFPQKTFFKVINSYRVGLKKTPGVFSQKTRVVPPQKKKKKKKKKKNPPKKKKKKKKKKK

SEQ ID NO: 357848 - protein, 49 aa, Zea mays
  Clone ID: MRT4577_89527C.1.pep
PRKVLGGGNHWVFILARPPPWDPRGGGPPCLKHQRPLRLRKSNAGASWD

SEQ ID NO: 357849 - protein, 115 aa, Zea mays
  Clone ID: MRT4577_89528C.1.pep
DCFPLGGLTWWDLYFLTPPPPNFPSLFFYKLGFSLFPCLPPVLMDPPPLFHLFGPRFLSLCPLCVFCSFPCQRCPPLFFNGVIPFFALILFPPPPFFFSITRTTWLPAPLFCDFS

SEQ ID NO: 357850 - protein, 92 aa, Zea mays
  Clone ID: MRT4577_89529C.1.pep
NSYLFQDVKYTPLHVEKFFFPGWTTYIPKLAINGMATGTFGFLAKTPSACLGSPVWTKTKLVGLDSIPSGWVPVPKRFFHACPGFRGAVLAC

SEQ ID NO: 357851 - protein, 496 aa, Zea mays
  unsure (1)..(496): unsure at all Xaa locations
  Clone ID: MRT4577_8952C.1.pep
MEEGFTGGVRIVSRRLVRPEPTASSPDNNSAPPEEEEDEIMHMTPWDLRMITVDYIQKGLLLPKPPAAGGAHAHRLVDGLASSFARALARFHPLAGRLAVDATTGGPGVVVSLRCSGEGAEFVHAEAPDVTVSDIITPPAGRYYVPSALVWSLFPLNGLLGTDAALDDDSRAPLLSAQVTELADGVFVAMSLNHAVGDGTTFWHLFNTWSEISRAGGEGREAELSTPRPVLDRWFLDTCPVPIALPLRKLEDIVRQPEYPPVRECFFDFPAESVRKLKAKANAEIAAGGGTAPAAVVLSSLQSLFAHLWRAVCRARDLAPGAETAYLLPVGCRARVRGVPQAYVGNAVTLAVAKSTAGEVLGGGLGWAALLLNRAVASFDEAGVRAELAAWARDPRFAYVEPRGYGGAATVMTGSSPRFDVYGNDFGWGRPMSVRSGAGNKMDGKVTVYEGRGGAGSMALEVCLAPQALARLVADDEFMEAXALPRRECLRRLWLC

SEQ ID NO: 357852 - protein, 113 aa, Zea mays
  unsure (1)..(113): unsure at all Xaa locations
  Clone ID: MRT4577_89530C.1.pep
ELSGLINGTIALLGDVAXSSRELIIAGFRCAKFHAIVATNVASSRRYINGLQLIIXXEPARNVQPYIHQSRLTGRAGNTAAAVLLYXPDISSVXRLERXSEVKIEHIDHPQPT

SEQ ID NO: 357853 - protein, 55 aa, Zea mays
  Clone ID: MRT4577_89531C.1.pep
PGIMNIIVYIIPVSGEIKGFWDHVCQRPIQCRRVDAALPIAVDVGAGVTFIKYRS

SEQ ID NO: 357854 - protein, 106 aa, Zea mays
  unsure (1)..(106): unsure at all Xaa locations
  Clone ID: MRT4577_89532C.1.pep
PCPPPPPRSRPRPRPPAPPRPRTARAKTSFFCMASRLWPSTPEEVVRSIKDSFLTLHMRTHAKALEXVEKNMSSLRLLIFGDGEVEPNEEQVLQITLEICKEDVIS

SEQ ID NO: 357855 - protein, 60 aa, Zea mays
  Clone ID: MRT4577_89533C.1.pep
MALMARALLPTVRGPTARRLRRGCLLRTAPSPGSSCTAACDARTPGSSGSGEGPLHALVR

SEQ ID NO: 357856 - protein, 72 aa, Zea mays
  Clone ID: MRT4577_89534C.1.pep
LRRLTVGDALGVEVLPVVVQGILNRLVAGGTGNASLQIHRYSTSATAIAPRHNRKYPQPEQSSVRGGRQHST

SEQ ID NO: 357857 - protein, 72 aa, Zea mays
  unsure (1)..(72): unsure at all Xaa locations
  Clone ID: MRT4577_89535C.1.pep
LTQKLEVQTQRLELLTSQRMANENALXKPIDTRPINEATMYADEGDEVVERVLGWIMKLFPGGPKRRTSKLL

SEQ ID NO: 357858 - protein, 79 aa, Zea mays
  unsure (1)..(79): unsure at all Xaa locations
  Clone ID: MRT4577_89536C.1.pep
MARTQSGVAVAVVAAVLLLAAGATTVDACITCGQASCDIAPCLCYTRXTESGRFGYCCSGVRNLXSAASSDTDRRAACN

SEQ ID NO: 357859 - protein, 34 aa, Zea mays
  Clone ID: MRT4577_89537C.1.pep
SGAGPCGCNRLLFWFENWVLTGLIRTNLHKALWT

SEQ ID NO: 357860 - protein, 61 aa, Zea mays
  unsure (1)..(61): unsure at all Xaa locations
  Clone ID: MRT4577_89538C.1.pep
XGRAPSIDLRXHHXIVSLGVCLSWXLVATVMSTSSXRXPXLRLCLFXLVSCXFAAXAXXSS

SEQ ID NO: 357861 - protein, 53 aa, Zea mays
  Clone ID: MRT4577_89539C.1.pep
PKNFPPSARIPNWPPLILPPFFSPFNHKTPSNPSCGCYPPRPQAAQFKNPPLF

SEQ ID NO: 357862 - protein, 87 aa, Zea mays
  Clone ID: MRT4577_8953C.1.pep
QTWSWRVSSTQAGGTYSRRKQLGQMEAAVTTAAGRTMQLEVTGLLVMRISCTTASTTDSAEYERVHLLVCVKRTRSEPGQTNHGERL

SEQ ID NO: 357863 - protein, 78 aa, Zea mays
  Clone ID: MRT4577_89540C.1.pep
RTRGLLQLLYRSERPILLCFCAGECRQPPIPPFLMLRCTHPPSPSCCSCNATMDGGGARSGTNLLLILNGQETCYGDR

SEQ ID NO: 357864 - protein, 99 aa, Zea mays
  Clone ID: MRT4577_89541C.1.pep
RKTPSPSLQLSSRLLLLHCCKDGWARGRCARQKHLMPPAPGPPDHLLTHLPLGLAHPRVHLRRRAYHDCAALRTPTMTQDARAHHAGHFDYEAEHTSTM

SEQ ID NO: 357865 - protein, 64 aa, Zea mays
  Clone ID: MRT4577_89542C.1.pep
AIKAAMGIKLEPSLFSPGNLFSYVLIIVVLSLDGHAIPCVITRAAPLIISGQVDLVLGDGGVTS

SEQ ID NO: 357866 - protein, 109 aa, Zea mays
  Clone ID: MRT4577_89543C.1.pep
CRVAWAHFSLPPVLDRSLFCWAFPTCSPPLGVPFCPWPLRCGGGVPLVLGWVFPPLFIRCLNGDYSLVFSRPAFFFFWPGFFFSVVWVPWVFFLMLIFWPFIFSWFWVP

SEQ ID NO: 357867 - protein, 146 aa, Zea mays
  Clone ID: MRT4577_89544C.1.pep
LFSSASSAVGGSIFLNIVMESGTIREASVFSLIRCLQIKADVLDWVDKCSAFRRAFSVSNVSITFYSEVISGQLSLQTFFLCHAYTYQRVYLRRRLLHQLFRWRGRALATGSRVLRSAGSSFLVAVAMTGKACERRDGGNRARPAS

SEQ ID NO: 357868 - protein, 45 aa, Zea mays
  unsure (1)..(45): unsure at all Xaa locations
  Clone ID: MRT4577_89545C.1.pep
XXGIRREGRAXSYXNXSLGESXKLSLLLGRLLCLCVLVLLLVXVK

SEQ ID NO: 357869 - protein, 80 aa, Zea mays
  unsure (1)..(80): unsure at all Xaa locations
  Clone ID: MRT4577_89546C.1.pep
SSFVRATAGAVAKYTSKSSASTSREACWPWGRWRCWLLAHQDCLLPRVSLQVNIADVRCESHHVTRRCIPFQSAVLXFRF

SEQ ID NO: 357870 - protein, 149 aa, Zea mays
  unsure (1)..(149): unsure at all Xaa locations
  Clone ID: MRT4577_89547C.1.pep
TNAAAAATENRTIRKNCYRGVEINALLEMSAXDLPTRCFPQGVARXQVDRGAXSRKPMEIIRKLRHAEEDAPADEKTELDKTHLRIMIIVPEMNGSMVADDHVKNINQVDIXADMIGHXLADLSISYEELKHEMTEIEATHSSRCIPLT

SEQ ID NO: 357871 - protein, 46 aa, Zea mays
  Clone ID: MRT4577_89548C.1.pep
PFTHEMSRLLVPPWSKEIWILEVSRTGFVWQNEITLVYGTWRMWET

SEQ ID NO: 357872 - protein, 70 aa, Zea mays
  Clone ID: MRT4577_89549C.1.pep
TLWTSETYEFSRFSAISRCQLCICFFLLNTNLSHAGDGFFPNSTKYRSDILLRIHATMKTGFKDDIKVKN

SEQ ID NO: 357873 - protein, 87 aa, Zea mays
  Clone ID: MRT4577_8954C.1.pep
VAVCVIRVGEQAVAEQVAHEVVEGQAERETVEQGVHDQDLVADVVDGVVVGRLDVVVDVAHGLRPPVLLLLVGVTKGRHGHGVDCGA

SEQ ID NO: 357874 - protein, 58 aa, Zea mays
  Clone ID: MRT4577_89550C.1.pep
VVQLEEKYPEMLLLSSTKQDVYTCNILSFKIVPMKTNYARTELVKFLTLLSQFQDSLA

SEQ ID NO: 357875 - protein, 45 aa, Zea mays
  Clone ID: MRT4577_89551C.1.pep
TAWFGCFDPIHSKVLRIFPVITGNIRSSLGMYWINTPQTSAADAW

SEQ ID NO: 357876 - protein, 59 aa, Zea mays
  unsure (1)..(59): unsure at all Xaa locations
  Clone ID: MRT4577_89552C.1.pep
EFIYDSVWLVKRLHNTXRKEFSKITSRTAIDLLVMGFICFFLKLIFIPINNIIFSSAYD

SEQ ID NO: 357877 - protein, 69 aa, Zea mays
  Clone ID: MRT4577_89554C.1.pep
KAFQHLLLAQIPFNTQTGVTNEFFVFTRGSTINTRMGTFKLFRVHKKQFWKLNSFLKGDGPPKQKAFGN

SEQ ID NO: 357878 - protein, 51 aa, Zea mays
  unsure (1)..(51): unsure at all Xaa locations
  Clone ID: MRT4577_89555C.1.pep
MFGCTDAXHXGGXRQEAIAADPDPNHRXXGWYTPRHTQXXSYIANKPPGSE

SEQ ID NO: 357879 - protein, 58 aa, Zea mays
  Clone ID: MRT4577_89556C.1.pep
SYPNNSRGRAAGRPPPVSRLYLVCEEGTLPLQGQLQPSTQTRCRQAAVVCVQAKTLLP

SEQ ID NO: 357880 - protein, 93 aa, Zea mays
  Clone ID: MRT4577_89557C.1.pep
QFPNRPHACTHSSAHAYYLSDHALSHYIHDQRLYQGSQLLLVPIYPHSAFYMIQSLSTIIMTQPNYPKLIFTPTTLLITIQITSSITSPIYAL

SEQ ID NO: 357881 - protein, 224 aa, Zea mays
  Clone ID: MRT4577_89558C.1.pep
MASGGRTDLDGAAVAPLTICVIGAGGFIGSHLCEKLMAETQHTVLAVDVYCDKVRHLVDPPPPHLAGRISFHRLNIKNDSRLEGLIKMADLTINLAAICTPADYNTRPLDTIYSNFIDALPVVKYCSENSKRLIHFSTCEVYGKTIGSFLPKDHPLRKEPEFYVLTEDESPCIFGPIVKQRWSYACAKQLIERLVFAEGAENGLEFTIVRLFNWIGPRMDFIPG

SEQ ID NO: 357882 - protein, 106 aa, Zea mays
  Clone ID: MRT4577_89559C.1.pep
CPQHSEATPRGVFLRRFGGWNTRYHGDSDSGMLARKNNFFLAKQSVIGTAKALVLQGAPEPLLSTLLQVLWLSKQENCNYPLSLLKGRICLCTSSHSNKQEHRPQV

SEQ ID NO: 357883 - protein, 124 aa, Zea mays
  Clone ID: MRT4577_8955C.1.pep
IRARASFLLARGAYPRYLDRCHLNASVTEDGQVMPACVPGLAPAVVLANYTKSQYNRFLNDSQFSGAGIASEGDWVVVVLSTSTGSGDYSPAPPGSNWAVSAARPFGFGQLVLLLVGFVVLLVK

SEQ ID NO: 357884 - protein, 101 aa, Zea mays
  Clone ID: MRT4577_89560C.1.pep
HVSCRGKKRLHIPTELTSSMRPAAPGTLMRNDHRHMQETQIFVFPSHVTHRARQLPAFPRRPAGRDRLQQTHVDKQAHDLDLLSASQVEQDTSSVWHQDAS

SEQ ID NO: 357885 - protein, 103 aa, Zea mays
  Clone ID: MRT4577_89561C.1.pep
YLVKHKIICLVFFVKHEIICNFLEKTRTSFCSDRGSSNHVGVCIICARSTSSSSRREKKSRCTCGHQVHHHHSCLPYQQQYPCCSQLSYHHQVITSQLNSGTS

SEQ ID NO: 357886 - protein, 47 aa, Zea mays
  Clone ID: MRT4577_89562C.1.pep
SFESRLYFPWGGKPESMRWKTSDDYEKVIEGAVFNLAAGLVLHLDNA

SEQ ID NO: 357887 - protein, 106 aa, Zea mays
  Clone ID: MRT4577_89563C.1.pep
LYHNYKGRGPLDTYGGSNSKCYESCETVHSTRECPLCIHSRGLASEIPTILITSPSPIKSRSSNPSPNPRYPNSPIYSTRSYSPCYVSSTRHIPTTTFARSYNKSP

SEQ ID NO: 357888 - protein, 76 aa, Zea mays
  Clone ID: MRT4577_89564C.1.pep
PRGWGKCPPPKVVWGQNFDPYFRKSFCFGGFYGGENFLNPGRPISGQLKGFKNPPLSHPPLDSKGSFPGDQCEGPC

SEQ ID NO: 357889 - protein, 69 aa, Zea mays
  Clone ID: MRT4577_89565C.1.pep
VPPIPVDHASWLRDSRSVKGCGSDALGWAAPGARGHPQQPPPEIWHELRLPFYAHQQLGRPQLKRQKYP

SEQ ID NO: 357890 - protein, 45 aa, Zea mays
  Clone ID: MRT4577_89566C.1.pep
CYLTTTASCISSPLDHIFSTHLPRSSKNTSKLSHASNFFHLLLLY

SEQ ID NO: 357891 - protein, 42 aa, Zea mays
  Clone ID: MRT4577_89567C.1.pep
HLRSPHRHSSVSPDTPVLPSPGSVECHRHPRTRTETPPPEST

SEQ ID NO: 357892 - protein, 241 aa, Zea mays
  unsure (1)..(241): unsure at all Xaa locations
  Clone ID: MRT4577_89568C.1.pep
MLRPFLSPPLTALPPPPASTAAAAGAAAMRPASSSSSRSSAGGGGAHHHQHNHGGHSISVSPPTCRHAPSSATLDLLILLLVLFSLAFLLASSLSHVARSLSPLLATPPAAAALAYATAALPYLAAAAVLVATAFLSCRRLPRRRCRNPRXAGSTAGGAEASMWREIEALPWKGGQGGNNPDYECLRAELRRMAPPNGRAVLLFRNRCGCPVAKLEGWGAPKSKRRNKKGTQGSFHDRGLR

SEQ ID NO: 357893 - protein, 200 aa, Zea mays
  unsure (1)..(200): unsure at all Xaa locations
  Clone ID: MRT4577_89569C.1.pep
MLRPFLSPPLTALPPPPASTAAAAGAAAMRPASSSSSRSSAGGGGAHHHQHNHGGHSISVSPPTCRHAPSSATLDLLILLLVLFSLAFLLASSLSHVARSLSPLLATPPAAAALAYATAALPYLAAAAVLVATAFLSCRRKXAGGAEASMWREIEALPWKGGQGGNNPDYECLRAELRRMAPPNGRAVLLFRXRGGCPVA

SEQ ID NO: 357894 - protein, 95 aa, Zea mays
  unsure (1)..(95): unsure at all Xaa locations
  Clone ID: MRT4577_8956C.1.pep
YHTVWVPMPSVGFVAYGRSXETNDDGTAPERLKEHGILAKXMNTVNXSMKELIPGAPLTLKIVLAQEEGKGLHADSDFHIRFQAFLMLRGKEAPL

SEQ ID NO: 357895 - protein, 264 aa, Zea mays
  Clone ID: MRT4577_89570C.1.pep
MLRPFLSRHRSAAAARAATAAAAGAAVMRPASSSRSSAGGGGGHHHYHNHSGGHNVSVSPPTCTTCRHAPSSATLDLLILLLVLFSLAFLLASSLSHVARSLSPLLATPPAVAALAHATAALPYLAAAAVLAATAFLSCSRLPRRRCRNPRCRGLRKALEFDVQLQTEDAVRACAGSTVGGADASMWREIEALPWKGGQGGNNPDYECLRAELRRMAPPNGRAVLLFRSRCGCPVAKLEGWGAPKTKRRNKKGTQGSFNDRGVR

SEQ ID NO: 357896 - protein, 125 aa, Zea mays
  Clone ID: MRT4577_89571C.1.pep
MKKRKYDANLPDALWFGWSIHIHSSVHLQMRVIWISSAVCALNRCSYGRSSSGCVYRCVQGPASATVFGSELPGFYSLGNSLTGSPYLLPPSLRSVTILFVKHNILLSGDCFRSCVYVCRWTQYW

SEQ ID NO: 357897 - protein, 264 aa, Zea mays
  Clone ID: MRT4577_89572C.1.pep
MLRPFLSPPLTALPPPPASTAAAAGAAAMRPASSSSSSRSSAGGGGAHHHQHNHGGHSISVSPPTCRHAPSSATLDLLILLLVLFSLAFLLASSLSHVARSLSPLLATPPAAAALAYATAALPYLAAAAVLAATAFLSCRRLPRRRCRNPRCRGLRKALEFDVQLQTEGALRAGAGSTAGGAEASMWREIEALPWKGGQGGNNPDYECLRAELRRMAPPNGRAVLLFRNRCGCPVAKLEGWGAPKSKRRNKKGTQGSFHDRGLR

SEQ ID NO: 357898 - protein, 643 aa, Zea mays
  unsure (1)..(643): unsure at all Xaa locations
  Clone ID: MRT4577_89573C.1.pep
MGLHASHTERNSIVLRTNILLHLEAIDKEGTKGVEFLYFLKLTSENSNFNDSQLNIETTWSVPTSNADDLELHFGKFELGEPVSFDSLVDSGSSDGFKLTRSSLGWMENAMSDVTKRLSVLLSATSLRLFNRIKFPFPGHVIVYGPRGSGKTALTRASAKYFEDHKDILAHIIYIDCSKLALGKAKETRQEIEDSMSEALLHSPSIIIFDDLDSVVSVSSDPQVSQSSSSSDSLVQYLADIMDEYKDKIQNTCGYGPIAFMASVQSLQSLPQDLTSSGRFDFHIELSALAVPERKALLQHQVEEHDLLCSEEVLSEIASKCEGYDAYDLEILVDRAVHTAAYRFLLPSNACHNSLKRTLLMEDFFKAMHGFLPVAMRDLRKYAPDDKDGGWEDVGGLDEAVTIIKETLELPSKYPNIFTRAPVRLRSNILLYGPPGCGKTHIVRAAAAACSLRFISVKGPELLNKYIGSSEQSVRDFFAKAVAAAPCLLFFDEFDSIAPQRGTHSAGVSDRVVNQFLTELDGVETLTGVFVFAATRFXLASDASLEDVASLTEGFTGADLAAILTDAGLAAIHELLDNQENGVPETEPCISKELLMSVTRKARPSTPADEKMRYDREFGEFVSSRKSISTKARESKGKKVTLA

SEQ ID NO: 357899 - protein, 72 aa, Zea mays
  Clone ID: MRT4577_89574C.1.pep
SQQTINTRHRVKSRHLPHSGFNSNHQSPHKWEGIFFQEINCHPIAEEYHFRSQLMYHCSQYFKSSNICIWQG

SEQ ID NO: 357900 - protein, 68 aa, Zea mays
  Clone ID: MRT4577_89575C.1.pep
YRFPTVHHRTKFVTSVITLITAGLPYKISYYDTFDHLQVPPMAFLLHPSTLSKFCSALILAKERLKLV

SEQ ID NO: 357901 - protein, 449 aa, Zea mays
  Clone ID: MRT4577_89576C.1.pep
LVQYLADIMDEYKDKIQNTCGYGPIAFMASVQSLQSLPQDLTSSGRFDFHIELSALAVPERKALLQHQVEEHELLCSEEVLSEIASKCEGYDAYDLEILVDRAVHTAAYRFLLPSNASHNSLKRTLLMEDFSKAMHGFLPVAMRDLRKYAPDDKDGGWEDVGGLDEAVTIIKETLELPSKYPNIFTRAPVRLRSNILLYGPPGCGKTHIVRAAAAACSLRFISVKGPELLNKYIGSSEQSVRDFFAKAVAAAPCLLFFDEFDSIAPQRGTHSAGVSDRVVNQFLTELDGVETLTGVFVFAATSKPQLIDAALLRPGRFDRLVFCDFPRWDERLEILKVHSRTVSLASDASLEDVASLTEGFTGADLAAILTDAGLAAIHELLDNQENGVPETEPCISKELLMSVTRKARPSTPADEKMRYDREFGEFVSSRKSISTKARESKGKKVTLA

SEQ ID NO: 357902 - protein, 141 aa, Zea mays
  Clone ID: MRT4577_89577C.1.pep
LAGYFLWGRARSVHPARLRPRRPPGLVRVRVRNPTASPLYHIYVASLAAAVPAAVVSVDYRLAPEHCIPAAYDGGGAALIFVIAACRADGAEAEAEPSLAAHGDVFRIVLAGDSAGGNMAHNVAIGRAKEGGIVFYYDMVS

SEQ ID NO: 357903 - protein, 92 aa, Zea mays
  Clone ID: MRT4577_89578C.1.pep
LIKNILHTQCLVFHPINSSPSISTSKQSLIIVDASLVCFAFQAYTAHFLISIFSYCTLSNSSKISCTPRVFGIPAHQFLPLNNYIQTEPYNC

SEQ ID NO: 357904 - protein, 70 aa, Zea mays
  Clone ID: MRT4577_89579C.1.pep
KKKKIFFFFSPPPPKKKLFFFFFFPPPFFSPNNFFSKKKKKKKKKKKKKKKKKKKKKKKKKKKKKKKKKK

SEQ ID NO: 357905 - protein, 141 aa, Zea mays
  unsure (1)..(141): unsure at all Xaa locations
  Clone ID: MRT4577_8957C.1.pep
RAGRAGASSLACGRKSLTRHRPVPSPAXRTLLSVQXYGIMSALSLNNACMDGGGKGLMSEDDWIVTDKNYNGGLHDPEDNCHLMLKIDYDNQRHRAFSAVLLDSEYELLLRXVLQTKGTFPLDRRNTCCRHPLNRDAELIQ

SEQ ID NO: 357906 - protein, 85 aa, Zea mays
  Clone ID: MRT4577_89580C.1.pep
GKRYDGVVVQGLLEQDVVDAYDAPFYAPSAREIEEEVSKEGSFSLDYVRTFEGSLSSGASAETDGRKVSMAIRAIQESMLTHHFW

SEQ ID NO: 357907 - protein, 252 aa, Zea mays
  Clone ID: MRT4577_89581C.1.pep
HWDRVGCPAPAAAVGLGEAPRRTELGGPDLSGSTEAFRQGYFGPTSAAFNPRREYLTVVAPWCPRWDPRPLGFVAPKKSYPVMTRCSVSCQPCVDLRPLVASGLTEDGNGRKDTPLAQFNQERFYSVAARRFGRKWRPDSSDQDDKGTSAPKKNLRFGKKFGASSEEDSEIDESGDTGAIRRRWSSAALRNCDVKKERRVLKSYEEESNDLAGRIQELREEIRNREVLGTERRRYESRGESLLTSKRFDQCG

SEQ ID NO: 357908 - protein, 70 aa, Zea mays
  Clone ID: MRT4577_89582C.1.pep
LTLPHCCISQLELASFFMLELCLVEYQMLNYRPSHLAAAAVYTAQCAINRCQHWTKVCESHSRYTSDQLL

SEQ ID NO: 357909 - protein, 134 aa, Zea mays
  unsure (1)..(134): unsure at all Xaa locations
  Clone ID: MRT4577_89583C.1.pep
MLGGSTGQGGKGPANLGGGGTRTPPPKKKGFFLGGPSRAAPNPAGPGQFGNQGPLPYSHTNKGPPPPRSFPAKDKGFSLFKGGLNNLGRLTQKPGLSRKGPNKGPPPIEAXKTLGNRGPYPESFMFPQFTGSNP

SEQ ID NO: 357910 - protein, 58 aa, Zea mays
  Clone ID: MRT4577_89584C.1.pep
KTYRCESTVKNNMSSKGMYRFCFSFHGFLRTLELQFVLKHWHGMPIFQCVRLKVNVSV

SEQ ID NO: 357911 - protein, 138 aa, Zea mays
  unsure (1)..(138): unsure at all Xaa locations
  Clone ID: MRT4577_89585C.1.pep
GSWLCXCXXXWFWCASVLGLGGAGGPVLFPGFWVSLPVGGPGWSFALLPVWXRXAXVSXVLAVFRRSCXXCSAVXFLAVXFVRXXFXGARGXVLPWGSXSXCFLXLVLRRFAPWVPXVFSFGGGLRGAAALGAPRFVA

SEQ ID NO: 357912 - protein, 119 aa, Zea mays
  Clone ID: MRT4577_89586C.1.pep
MAKSSFKLEHPLERRQAEANRIREKYSDRIPVIVEKAGKSDIPDIDKKKYLVPADLTVGQFVYVVRKRIKLSAEKAIFIFVKNTLPPTAALMSAIYEENKDEDGFLYMTYSGENTFGLL

SEQ ID NO: 357913 - protein, 189 aa, Zea mays
  Clone ID: MRT4577_89587C.1.pep
MYPAAEIASVPYLSPAASFKPHYHVATDDGGGFLYQQYSNLLLPHPPSYYQEVAYDQLVLEASFPVGGNNRSNSESDEYQRSVAEERRKRRMVSNRESARRSRMRKQKQLSELWAQVVHLRSTNRQLLDQLNHAIRDCDRVLRENSQLRDEQTKLQQQLEMLPVETTREWCHESWLLKYLLFQVVDEII

SEQ ID NO: 357914 - protein, 132 aa, Zea mays
  Clone ID: MRT4577_89588C.1.pep
AASTSAQSYQDHRAMESLRRSRCRHATIRAEDGSPAGKAVRVVEKGLVTGVGLLYWTACTGESLGLDACVRSRRDGRAEALLSGDPGKMRRPDSPSAPRRGATRNRQAVTDVQGRARGSRQRLPDQDSPADP

SEQ ID NO: 357915 - protein, 152 aa, Zea mays
  Clone ID: MRT4577_89589C.1.pep
STLFLLCARQQLDASHRLPGQRACGGVTPAPSACGPPTFGRLPAAPPGHRRDVARLEQRAGLEQRAGRSASSVSASNGSALSSLVPPCMLVKGDSVNSDPVNSDSVFIPALVIFNPQFQRLHYDLIYYIFCSGRLSCYLYIERDIFFKKKKK

SEQ ID NO: 357916 - protein, 113 aa, Zea mays
  Clone ID: MRT4577_8958C.1.pep
KTGGGGALSHQKPPVRGGRGAKGFPPFGGGRGLKGPPPKKGERGGKNPQKAGNPPIPPEGVGAKPKLNPRTPGAQWKREGGKKTPRETKKRGSTRKNAVLGTDNPPPQKWGAK

SEQ ID NO: 357917 - protein, 48 aa, Zea mays
  Clone ID: MRT4577_89590C.1.pep
SYNISDRTQTMQGNVIVNSHNQSQKNSKNSSIHNTLIVTPLIANISSI

SEQ ID NO: 357918 - protein, 83 aa, Zea mays
  Clone ID: MRT4577_89591C.1.pep
IKRVYGQQGHRARGVCYSTIGSWHWIKQLCWCSPTCQLISFKGPSARQQWHWQCCYSYFPTCWYHPCLHPYYLWWAIYILVWQ

SEQ ID NO: 357919 - protein, 56 aa, Zea mays
  Clone ID: MRT4577_89592C.1.pep
GKGMGPKKQGLGIPLFPPRSLKVVWRGGFPVLNFPCGTLRAEINPSPLFREFGLKN

SEQ ID NO: 357920 - protein, 148 aa, Zea mays
  unsure (1)..(148): unsure at all Xaa locations
  Clone ID: MRT4577_89593C.1.pep
SLVVALXXFSENMLKQCNQYIKQENISDERLVLVRADISRLPFVSGSIDALHAGAAIHCWPSPACAVADISRVLRPGGIFVASTFVADVIPPAIPVLKIVRPYISQITGNNTFLSEVELEDLCKACGLVDFKFVRSGFYIMFSATKAC

SEQ ID NO: 357921 - protein, 133 aa, Zea mays
  unsure (1)..(133): unsure at all Xaa locations
  Clone ID: MRT4577_89594C.1.pep
RPCATLSSDAITAPSCTAAPARAVVSRRTFTASASLRKATATAAEADEASVLLAGDGAMDHEVLLGAVDSGLDLQTTQLTVKADDTITFKNNDGFQHNDAYQEDEVPRGAHPPKISQEEHLNAPXETYSVHPH

SEQ ID NO: 357922 - protein, 130 aa, Zea mays
  Clone ID: MRT4577_89595C.1.pep
PPFFFFFLAILVRKKKLSPGLASTPIVTCNPRKPKPFGRNRNGGDKKHAVRSFLPPHRLGSISRAPKHACCWLIRPLSSSYQSISTSMSRSELETQDPLFMHPWLPSNSSSAGNNGSPQPGGRSHGRLFL

SEQ ID NO: 357923 - protein, 70 aa, Zea mays
  Clone ID: MRT4577_89596C.1.pep
SIGLECILAFPLLIKLPTANLDPWLLMHFSARCMQRDYFIYSTNKLEAAAGCFFNMRILIAMCQYVYMPA

SEQ ID NO: 357924 - protein, 48 aa, Zea mays
  Clone ID: MRT4577_89597C.1.pep
FFFFFFFFFFWGFFFFFFFFFFFESTTAANITPIIFLILSGVINRPHN

SEQ ID NO: 357925 - protein, 64 aa, Zea mays
  Clone ID: MRT4577_89598C.1.pep
SGAPPFFFFYFFIFFFFVTRRKPVAYFSEKLSGASDEDITMSMTTPAAPPHQGPITRAHARDLE

SEQ ID NO: 357926 - protein, 77 aa, Zea mays
  unsure (1)..(77): unsure at all Xaa locations
  Clone ID: MRT4577_89599C.1.pep
IILTTYPFFNKCLSPHFTHKPFPVIIXNIHPHPYYSSLIISPYIIYKTLFLNFLLQKKKKKTQKSRPFKGXKKNTRA

SEQ ID NO: 357927 - protein, 136 aa, Zea mays
  unsure (1)..(136): unsure at all Xaa locations
  Clone ID: MRT4577_8959C.1.pep
MDASASGAGGKAKKGAAGRKGGVPRKKSVTRSVKAGLQFPVGRIGRYLKKGRYAQRVGTGAPVYLDAGLEYLVADVLELGVNAAMDNKKTRIIPRHVLLVIRNCEELVKLLFGVAIAHGXGVLPNINPVLLCKKTA

SEQ ID NO: 357928 - protein, 74 aa, Zea mays
  Clone ID: MRT4577_895C.1.pep
LKCSSRSWCPDSSTKSTRRWARLGLIFTFGLSCIGSRVGSLMSDVLSLDLGKGLGKEKNRILLSSLGIKEELLR

SEQ ID NO: 357929 - protein, 79 aa, Zea mays
  unsure (1)..(79): unsure at all Xaa locations
  Clone ID: MRT4577_89600C.1.pep
GNVAKKNTVNGTGTPVHISTLQVGETRSNRACTSKSDLRSNDFSIVGRLPRDFELSNYDCYGXPIEVNHGLRTSQAKNS

SEQ ID NO: 357930 - protein, 104 aa, Zea mays
  Clone ID: MRT4577_89601C.1.pep
SGGCQWAFFLFKGHGPEEISPGHAGLLQGNPAISQVEGTTTTRALYRALQHTLNNGRPHLARNCGHQTKTTSHAPPPILKKNRKRAPQRKRRIGFRGPRNVNRG

SEQ ID NO: 357931 - protein, 89 aa, Zea mays
  unsure (1)..(89): unsure at all Xaa locations
  Clone ID: MRT4577_89602C.1.pep
WRPSFRPXRRXGGAGACPVGXSRRRPCARRGRRRXRPRAGPLRPAPAPXPAARGGPRRGRXCRXWRXVFWGAAGXXXARPGSAGXXCSA

SEQ ID NO: 357932 - protein, 336 aa, Zea mays
  Clone ID: MRT4577_89603C.1.pep
SSSFKQFLSEGEEWLKPYAAFCFLRDFFETSDHSQWGRFSQFSKDKLDKLICEGTLHHDIIRFHYYVQYHLYIQLSEAATYARKKNVILKGDLPIGVDRNSVDTWVYPTLFRMNTATGAPPDYFDKNGQNWGFPTYNWEEMSKDNYGWWRARLTQMAKYFTAYRIDHILGFFRIWELPDHAATGLVGKFRPSIPLSQEELLSEGLWDFNRMSQPYIRQEILEEKFGSFWTVIAANFLNEYQKQCYEFKEDCNTEKKIIVKIKTSAEKSLWVEKEDNIRRGLFDLLQNIGLIKNSKDFTKLFSRFNLEDTLKFKDLCEHHKNVLKRYGYDYYFGRQE

SEQ ID NO: 357933 - protein, 279 aa, Zea mays
  unsure (1)..(279): unsure at all Xaa locations
  Clone ID: MRT4577_89604C.1.pep
FQKGAHIEEFQPLFASLSPLKQTSRIRGLNATLVPSWTRSFHASANLRAVDLSYRLHDDSGKAKGDPIVIIHGLFGSKRNNQSVGNAIARILKRPVYAIDTRNHGESPHDNVHNYTVLAEDVEAFLKKHELKNSTLIGHSMGAKIIMTMALRNPDCCANIIPVDNAPVDAALSSDFPKYAEGMQAVEKAQPKSQKEADKVMEPYAKDLAVRQFLLSNLVRGAPGEPLKFRIPVRILTKALNNMADFPFTNPDEASFHXPTLFIRGTXSHYVSDETLPII

SEQ ID NO: 357934 - protein, 123 aa, Zea mays
  Clone ID: MRT4577_89605C.1.pep
PTRPPTRPPTRPPTRPRTRGERWGFPTYNWEEMSKDNYGWWRARLTQMAKYFTAYRIDHILGFFRIWELPDHAATGLVGKFRPSIPLSQEELLSEGLWDFNLMSQPYILQEILEERLDPLDSH

SEQ ID NO: 357935 - protein, 49 aa, Zea mays
  Clone ID: MRT4577_89606C.1.pep
LFFLGELWRTTHHIKARGFPNIFLPKLHWGIKNSHIRIVQKKQRSQYST

SEQ ID NO: 357936 - protein, 206 aa, Zea mays
  unsure (1)..(206): unsure at all Xaa locations
  Clone ID: MRT4577_89607C.1.pep
NLLQEEIQQAKKQLDKKDVDYEAALSTKLSIARKIFNLEKEKVLNSSSFKQFLSENEEWLKPYAAFCFLRDFFETSDHSQWGRFSQFSKDKVFRILFCIWYLYLFSHYSLLRTCCSIFLXAHVYEHXMVSLCNVFQLDKLISEGTLHHDVIRFHYYVQYHLYIQLSEAATYARKKNVIXEGDLPIXGVDRNSVDTWVYPTLFRMNT

SEQ ID NO: 357937 - protein, 122 aa, Zea mays
  Clone ID: MRT4577_89608C.1.pep
RRTARVTKNKTPRSKPAGERSARTHGSRPRCTLQLARALFGSIETAVQIGLPDATAPHPCMQGSQSRSSPERLCLPCRARALARRARDDGATRGEDDDEEPTGAGWGRAAAEAERRNVPWMA

SEQ ID NO: 357938 - protein, 79 aa, Zea mays
  unsure (1)..(79): unsure at all Xaa locations
  Clone ID: MRT4577_89609C.1.pep
XRXCTKGSSYIREXDYARFXLPPWTPLDINFQXPRSPGLLXATTPLNEFCCSCRESXXLQXXPPXFSPNEXGSRRLIFL

SEQ ID NO: 357939 - protein, 245 aa, Zea mays
  Clone ID: MRT4577_8960C.1.pep
DIVNSSDRFDRRKQKKITDFRQHHLEFIEEWDLAEENVHENDELHNNSDYRRYQAWYQGATHCKLRQQWTSDDYADIDSSDDEDTEYDQTTRLGTQVEAAPILDRVGNTLRRSVQDIDRQLLIVGDHNMRSFLERLSRRLRGAAARYGCRTNVAHYVHVPLYSHTTMPSIRLDVGLDYDQNEIRPSQVQGPCQKAIRWYLNGPRRLSKKNLCVISGYRAAPREIYSLATACQVAGNVHGLIKKYE

SEQ ID NO: 357940 - protein, 36 aa, Zea mays
  Clone ID: MRT4577_89610C.1.pep
SGGEFVWAGSFGKVCCGCLKMSSTITENLVCDQRVN

SEQ ID NO: 357941 - protein, 55 aa, Zea mays
  Clone ID: MRT4577_89611C.1.pep
IFFHRNWFNYVGRILGGGRSSMVQVVARLCVCRHNLYQIMSLFWRDYRPKKCFTK

SEQ ID NO: 357942 - protein, 119 aa, Zea mays
  unsure (1)..(119): unsure at all Xaa locations
  Clone ID: MRT4577_89612C.1.pep
LAFSSGFQVLAPHPSVSALSGPARGGRGFGXGGPKPHRXVLPATFQGLTNPPFRRLSRRGGLKPFSGLFYKKTRGGLKTFLKNVIRDAVTYTKHPRRRTXTAMVFFYPLKQQGRTLYGF

SEQ ID NO: 357943 - protein, 111 aa, Zea mays
  unsure (1)..(111): unsure at all Xaa locations
  Clone ID: MRT4577_89613C.1.pep
MASGELACTYAALILTXVAKAITAEKTATIEKAANTKGEAYRPALSAKPPEKRSAEDRTHAAGPGGGAAPEAAPAPAGGAAADAAPAAEEKKEEPKEEADDDTGRSRADRD

SEQ ID NO: 357944 - protein, 52 aa, Zea mays
  Clone ID: MRT4577_89614C.1.pep
RCHPPPKRNVGLGMLPESWGWDQPFIFILAQKTGLRVRVLCASPTFTPRDGG

SEQ ID NO: 357945 - protein, 159 aa, Zea mays
  Clone ID: MRT4577_89615C.1.pep
MVGKNCFAIASDRRLGVQLQTIATDFQRVFKVHDKLYIGLSGLATDAQTLYQRLVFRHKLYQLREERDMKPETFASLVSALLYEKRFGPYFCQPVIAGLGDDNVPFICTMDCLGAKELAKDFVVSGTASESLYGACESMYKPNMEPDELFETVSQALNS

SEQ ID NO: 357946 - protein, 189 aa, Zea mays
  Clone ID: MRT4577_89616C.1.pep
MSIFEYNGSAVVAMVGKNCFAIASDRRLGVQLQTIATDFQRVFKVHDKLYIGLSGLATDAQTLYQRLVFRHKLYQLREERDMKPETFASLVSALLYEKRFGPYFCQPVIAGLGDDNVPFICTMDCLGAKELAKDFVVSGTASESLYGACESMYKPNMEPDELFETVSQALNSSIDRDCLSGWGGYVLIV

SEQ ID NO: 357947 - protein, 204 aa, Zea mays
  Clone ID: MRT4577_89617C.1.pep
MSIFEYNGSAVVAMVGKNCFAIASDRRLGVQLQTIATDFQRVFKIHDKLYIGLSGLATDAQTLYQRLVFRHKLYQLREERDMKPETFASLVSALLYEKRFGPYFCQPVIAGLGDDNVPFICTMDCLGAKELAKDFVVSGTASESLYGACESMYKPDMQPDELFETISQALNSSVDRDCLSGWGGYVLIVTPTEVREHVIKSRMD

SEQ ID NO: 357948 - protein, 198 aa, Zea mays
  Clone ID: MRT4577_89618C.1.pep
MYRGGLEIRAAAENLLPGWGRGGERMSLLLRLRRCLLLSVTSNCGGRPAATTQPGPPPRGSRFARFLRSRWARLPRANSLWRRKKQPPSSAAAAAVPPDCRDQRSRTLARSVFWATASTPAATTRFVVVVVAALAVTVSIVTAFRITGGISNRRGGCDSKPIARWARLLELMEHPPLNCNYRCLLGAPKRGLEWIFSK

SEQ ID NO: 357949 - protein, 167 aa, Zea mays
  unsure (1)..(167): unsure at all Xaa locations
  Clone ID: MRT4577_89619C.1.pep
MPKGALRVAAXLVXXGLPLXXAXXGXXXXQNCGCXLXXXCXKXGYCGXXXDYCGXGXXXXPXXLXGGGGGSXGGGANVAXXXTXSXXXXXKXXXGXXXEXXHFYTWSAXLSXVKGDPGFXXXGXQXQGXRXLXAFXXHXXXETGXXCXISEXKKSKXYCDXTKREWL

SEQ ID NO: 357950 - protein, 98 aa, Zea mays
  Clone ID: MRT4577_8961C.1.pep
MSDNLRKGLGEQASEKITPDSQKSTTSKIGENVSGAADKAASAVQPEGQKSTTQKVGDATRGGSDNAQNQGEGVLKQAQDGLSNAAAGVQNALGGGKQ

SEQ ID NO: 357951 - protein, 96 aa, Zea mays
  Clone ID: MRT4577_89620C.1.pep
PQPGLPRSHSPPSEYATLVSFLAWASASSPYFISSFTMATFPGFTPLFSARLKPMAPRREIPLSAFECQLVWSLFHPASSEFLLSLLGHIYVYTNN

SEQ ID NO: 357952 - protein, 52 aa, Zea mays
  unsure (1)..(52): unsure at all Xaa locations
  Clone ID: MRT4577_89621C.1.pep
LSTSLSISSASLDRLYSLNMNLSIYLLCKQDRVGPPLQYFQPIYFKLFKKXY

SEQ ID NO: 357953 - protein, 143 aa, Zea mays
  unsure (1)..(143): unsure at all Xaa locations
  Clone ID: MRT4577_89622C.1.pep
MALKNVIRVILVLAHVSSCLARLGNMFSPGFVSASKPLPSWPILSAGTSVTVALVLSLFLTFEHLCAYHQPEEQKFMIGLILMVPVYAGQSFFSLLNSNGAFICELMRDCYXAFAMYCFERYLIACFSGEESTIRFMEGRLQS

SEQ ID NO: 357954 - protein, 86 aa, Zea mays
  Clone ID: MRT4577_89623C.1.pep
RYMSSSHCVLDRIRSSTWVPSYTRRRWSYVRVHRTDAIIACVHYGKLVPVPARAVRPTRIRQARYSVTPLLVAALCSLCCYLRTRG

SEQ ID NO: 357955 - protein, 574 aa, Zea mays
  unsure (1)..(574): unsure at all Xaa locations
  Clone ID: MRT4577_89624C.1.pep
APRVRALSPHQHARRSSLAKLSERSIADRTALXLFMSILVMCMLIGDGILTPAISDLSAIQGLMGPSTSVRNSVVEALSAVILIGLFLLQKYGTSKVSFLFSPIMAAWTFTTPIIGLYSIVHYYPGIFKAISPHYIVRFFLRNKKEGWRMLGGTVLCITGAEAMFADLGHFSKKGIQIAFLSSIYPSLPRVRAGQTAYLINNVNDFSDGFYKFVPRPVYWPMFIIATLAAIVASQSLISATFSVIKQSVVLDYFPRVKVVHTSQHKEGEVYSPETNYILMVLCVSVVLGFGAGNAIGNAFGVVVIMVMLITTVMLTLVMIIIWRTPPVLVALYFVPFVIMEGSYVSAVFTKIPEGGWLPFAVSIILALVMFGWYYGRQRKTEYEIANKVTVERLGELLAKPEVQRVPGLCFFYSNIQDGLTPIVGHYIKNMSSLHAVTVFVTLRYLLVAKVDERERVLVERLGPDGVYGCTVQYGYADSLSGGDLTAQVTGSLRRHFGTSEAGAEEAARLEAARTNGVVHVRGKMRFYVGEDAGWFDKVMLGFYEFLHGICRSALPALGTPLQQRVEIGMLYKV

SEQ ID NO: 357956 - protein, 57 aa, Zea mays
  Clone ID: MRT4577_89625C.1.pep
IFSNVDEALSPVNLWPQDGMFACIARWQGQLTAMPVSLGRSEGDKYQSSSYVRLPSR

SEQ ID NO: 357957 - protein, 61 aa, Zea mays
  Clone ID: MRT4577_89626C.1.pep
LLEGTVHFKELDEIIEDAKAGLESEVEPLDGMSAKNAHGIVSRFSAGIAVQKLMLYSNSMS

SEQ ID NO: 357958 - protein, 63 aa, Zea mays
  Clone ID: MRT4577_89627C.1.pep
PGSRGVFGPLAFFLPVEMFAVRRGVLPWPGTWVALQAFGVVCLVAGPFALVGSVGGVFRKGLG

SEQ ID NO: 357959 - protein, 132 aa, Zea mays
  Clone ID: MRT4577_89628C.1.pep
MGFGSYVPNMSVVAGNPNGGVQFGLGFQVPPRAGVNPRRTLRLPGGGGKAHPRGDKETHRCRLPPPKCNPKEGGGFVPPQCLPSQAPKEIKPPVEKGSHFCIKIKKFLKVAKLNKGVFNPTRLKNHKLAAFL

SEQ ID NO: 357960 - protein, 134 aa, Zea mays
  Clone ID: MRT4577_89629C.1.pep
PCPSRQRSPPRLQPALSHRRYVPHFLAHQESYSQPLETSSAPPLEKRARSSPLFLMGISTSNWWSAGVAGLGFLETGYLTYLKLTGSEIFCPRQLLRRLCSTQQISFNCSSAQQISSVNRCCRMEHRNVHFSIS

SEQ ID NO: 357961 - protein, 123 aa, Zea mays
  unsure (1)..(123): unsure at all Xaa locations
  Clone ID: MRT4577_8962C.1.pep
PPPAPRGVPHITTSFFIFANRNLNLGVGYIISSHKTTIYITIYFGXFSNYYIYNIVHDSVNYNFDDDXHKKNVDANNLLENYYYNMRITIKDXKISSNLTVYDXKNIYYSIYAAINCLYSNHF

SEQ ID NO: 357962 - protein, 108 aa, Zea mays
  Clone ID: MRT4577_89630C.1.pep
PDLPVLNSWIHPFVLLCCRGPCGGVSSGTRAGHPLFLPGRRCRLRLPRWPKASRQSDPQSHLPNSRPLRNYSSTPSQVRVLTRIKSHRTLSPGSFGASLHSKRTPCQP

SEQ ID NO: 357963 - protein, 64 aa, Zea mays
  Clone ID: MRT4577_89631C.1.pep
LRYSPIQSAAASRRPMPLAAGRWATPSLLSPPVRIDMTPRAREPSSPQRQRLDAGSVARLPGTL

SEQ ID NO: 357964 - protein, 88 aa, Zea mays
  Clone ID: MRT4577_89632C.1.pep
FDCPRAWSVRTIRTPSGNRMFAFLFYSCLDTCGLSPCTRNKMGSGLFSVFTGEYMALVFKIDRMQKKCGPRLKNSPSRQYIPAQLSQA

SEQ ID NO: 357965 - protein, 67 aa, Zea mays
  Clone ID: MRT4577_89633C.1.pep
PTRNKKLHFTDSNVRKKKKKKKKKKKKKKKKKKKKKKKKKKKKKKPKKKKKKKGFSFPRGTVKKGKF

SEQ ID NO: 357966 - protein, 78 aa, Zea mays
  Clone ID: MRT4577_89634C.1.pep
NFFNWKKTVSFFSLPTIQNYVTEKVNDTLTAQNEKKKDGGTILLCELMIRFSFLQHTLPLLVARKARHIQASSPKFQV

SEQ ID NO: 357967 - protein, 96 aa, Zea mays
  unsure (1)..(96): unsure at all Xaa locations
  Clone ID: MRT4577_89635C.1.pep
MASLSSAAVTAPSFAXQAPGPRREQRXSFTVRASLRKATGTADVAMTANDLLAGGAMAQEVLLGAXDSGLVFKPSQVTVKAGDTIRFNNNDGFPHN

SEQ ID NO: 357968 - protein, 121 aa, Zea mays
  Clone ID: MRT4577_89636C.1.pep
FFYVIYLIPPCINYIIFGVWDEASISDFILGPPKFRNLAVPMQCGKRCALPVILCADGVRAYISTAERQRFQILKWSNLTPDVVRKNLSVLPIDKYGHIVTVLHQMDLSVTTPLPEVRANP

SEQ ID NO: 357969 - protein, 59 aa, Zea mays
  Clone ID: MRT4577_89637C.1.pep
KAKKNNLNINIKKKSNPIYISKNLYTNILKFQIMISKNVILHTFHSFILTILNIQILSP

SEQ ID NO: 357970 - protein, 75 aa, Zea mays
  Clone ID: MRT4577_89638C.1.pep
TNMEKAQVYNWFALPRPKKVFPKKQNPFKCTPFKKYPLLKPRGPPKRRWNHPPKDLKPQFFFIEPPPYFSLGVKN

SEQ ID NO: 357971 - protein, 149 aa, Zea mays
  unsure (1)..(149): unsure at all Xaa locations
  Clone ID: MRT4577_89639C.1.pep
MFSAMSALLSSLARRLVVPLRRRKSITSSAFAARRSFFPCGAGHRDVVRDSSFVVVIKRKTLRKVMPSRRVGERKRGRGGDDLVDDGDEPCVWRRTILLGRRCQPLEFTGAIHYDCEGQRXRQPRTPPLPSSPLLSPVHPSKLRYMDRA

SEQ ID NO: 357972 - protein, 36 aa, Zea mays
  Clone ID: MRT4577_8963C.1.pep
GTQTSSIRTLSTTGSVPASAVSERTLRDDQVVWAVV

SEQ ID NO: 357973 - protein, 78 aa, Zea mays
  unsure (1)..(78): unsure at all Xaa locations
  Clone ID: MRT4577_89640C.1.pep
VCATPTLLLIYIGGWIERLGLICLIAMSCEVKPAVREIIIEVXLVTRLLGRXFIWPDQYFRELIIGDLFVHDMDICYY

SEQ ID NO: 357974 - protein, 532 aa, Zea mays
  Clone ID: MRT4577_89641C.1.pep
MQAAIDQSPHLRFRAGMDDKSCYVATGLSLAAILLVLHRLVVRAGGKGNAAARRLPPSPPAVPFLGHLHLLASECPLHSSLARLAARHGPVLSLRLGSRAAMVVSSPECAEACFTEHDVAFANRPRLTSQALASFGGAALAVSSYGPYWRNLRRVAAVRLLSTHRVACMCPVISAEVRAMLRRVGRAAEATGRVQLKASLFELSLSVLMETIAQTKTSRADDADDAVSPEAHEFRRIVDEILPYLGATNLWDYLPLLRRFDVLGVRNKIRDVVGRRDAFLQRLIDAERRRLDGDGDGDEKKSMIAVMLSLQKSEPDVYTDTMIMALCGNLFTAGTETTSSTIEWAMSLLLNHPEALKKAEAEIEAAVGASRLITMDDVPGLGYLQCVINETLRLYPVAPLLLPHESAADCTVGGYDVPRGTLLFVNAYAIHRDPAAWEEPDEFRPERFRDGKAEGRLMLPFGMGRRRCPGETLALRTAGLVLATLIQCFHWDRIDGAEIDMTESGGLTMPRAVPLEATCKPREAMRHVLQQL

SEQ ID NO: 357975 - protein, 179 aa, Zea mays
  Clone ID: MRT4577_89642C.1.pep
EALKKAQAEIDAVVGTSRLLAAEDVPRLGYLHRVISETLRMYPAAPLLLPHESSADCKVGGYDVARGTLLIVNAYAIHRDPLVWEDPDEFRPERFEDGKAEGRLLMPFGMGRRKCPGETLALRTISLVLGTLIQCFDWDRVDGHEIDMAAGGGLTLPKAVPLEATCKPRAAMRHLLLEL

SEQ ID NO: 357976 - protein, 222 aa, Zea mays
  unsure (1)..(222): unsure at all Xaa locations
  Clone ID: MRT4577_89643C.1.pep
TISPKLHVLGGQWTFYSMGSWVNSLPSFRPYGKKCGARYFYNPEEGNYYYGEGHTMKTERIRMIHSLLRRYRRLKQMKVNRPNPDSYRELCRNHVDYYLDLLLSSRPXETQHDHTRLLKRFNCLEDCPVFHSPYSFCHSYGXTTQHGVGELNSXQDLSMXGSSGLHDDKKREGTGFCYPTDVVLAILELREHHHRARHAHSYILHGDEEDDACYTTETAMTA

SEQ ID NO: 357977 - protein, 99 aa, Zea mays
  Clone ID: MRT4577_89644C.1.pep
MAPSASMLFLSYHQLHRPTEVGTPPPPPRREAAAPGGFWRRMSVSSVLSPALLQWRPEGEATLHERDAGEEIKSSAPADADKELESKFEEALRLSCWSS

SEQ ID NO: 357978 - protein, 39 aa, Zea mays
  Clone ID: MRT4577_89645C.1.pep
LAFAAPNCVSQYGKFWGLLLVIRNEVLDPGSILNNRQRA

SEQ ID NO: 357979 - protein, 123 aa, Zea mays
  unsure (1)..(123): unsure at all Xaa locations
  Clone ID: MRT4577_89646C.1.pep
MGLSGATISAPLGCCVLRCGAVGGGXGPEGGRGEVLAGGMXSRFVGGPKLSCFGTEKHDETVAVLAALGVDFADEEDYRKGGXGELLYVQMQSTKPMESQSKIASKLSPIXDENTVLDLVIIG

SEQ ID NO: 357980 - protein, 87 aa, Zea mays
  unsure (1)..(87): unsure at all Xaa locations
  Clone ID: MRT4577_89647C.1.pep
XCSCTGASRSRRLRPSCPEGEGRWXFFFMLCLMFGALNVYFSYISYFFFFLISNFFFCFLLLHPYILRQFIYFLFHFLPLFSLIFFL

SEQ ID NO: 357981 - protein, 82 aa, Zea mays
  unsure (1)..(82): unsure at all Xaa locations
  Clone ID: MRT4577_89648C.1.pep
RVRHRAQSINNTCPTSPPPRHSPQVVSTKRAASHSXAILSLHFLSLRSFSCSCSRALFSFFFITVTSYSLMIMIIFILIRHR

SEQ ID NO: 357982 - protein, 123 aa, Zea mays
  Clone ID: MRT4577_89649C.1.pep
SCPDDRSRPAPLRTPARNNGEASLPDSESSTETRSRIDCGGVQPNPSLTSGDGIECDKRRHGELGFDAAFYSHQEGWLSCQLRSIERRTWRKFVTGEEEDLHRSPNMWVSCDSVRRHEHAHRS

SEQ ID NO: 357983 - protein, 62 aa, Zea mays
  unsure (1)..(62): unsure at all Xaa locations
  Clone ID: MRT4577_8964C.1.pep
MAGLDTHLFTSQSVNXGHPDKLCYPIXMLLWTARLAEDPDSNVDCETCTKTNMVMVFGEITT

SEQ ID NO: 357984 - protein, 102 aa, Zea mays
  Clone ID: MRT4577_89650C.1.pep
SIAAATNPAGKEEFIGSMTAEASDKVGPDGALKIEAPTPIETTAEVEEGMEIDRGYITPQYVTNLEKTTVEQENGKDINTDQKITSIKEILTRLQTTTQVKA

SEQ ID NO: 357985 - protein, 139 aa, Zea mays
  Clone ID: MRT4577_89651C.1.pep
MDLDMMNDYEVKECNDFGSAIHGVDTDFLNYGDDDNDDDFVDADEPNPSEFQSLDNSGWSSRTRGVARYLKTLFDEESGLGRKSVAIDHLVRGKTRKEASRMFFETLVLTTKDYISVDQPNPFDFVSVKPGPKLLMSEF

SEQ ID NO: 357986 - protein, 464 aa, Zea mays
  Clone ID: MRT4577_89652C.1.pep
MELRGQLDMPETIPEYRNIAGFGSATIDGPLHIPDGIQSDAMLSGANVAYGATAAFGLQIPPDYQVNRASNDFVVGTQFQEVAKPFIGNEHEVALPDREHAQVDTLYSDHFQGVPSDLQRSNDANISSQDVVLDNSGQACAHAVDGMTRELTHFVHRDANLFGSTEVPASEITGVEYNQDASGFPRQTEDDNTVEYNQDASGFPRQTEDENTVEYNQDASGFPRPTEGENAVEYNQDASGFPRPTEDENTVEYNQDVSGFPRPTEDENTVEYNQDASGFPRPTEDENTVEYNQDASGFPRPTEDENAASATGDNSGFQENNTGSHMDLDMMNDYEVKECNDFGSAIHGVDTDFLNYGDDDNDDDFDDDFEPNPSEFQSLDNSGWSSRTRGVARYLKTLFDEDSGLGRKSVAIDHLVRGKTRKEASRMFFETLVLTTKDYISVDQPNPFDFVSVKPGPKLLMSEF

SEQ ID NO: 357987 - protein, 87 aa, Zea mays
  Clone ID: MRT4577_89653C.1.pep
MAWWSGKVSLGGLQDIAGAVNKISESVKNIEKNFDSALGLEEKRDDEDASGSQTSNSDRIGFFNPVMAFMGHNGEEDGTKYQKSPNL

SEQ ID NO: 357988 - protein, 336 aa, Zea mays
  unsure (1)..(336): unsure at all Xaa locations
  Clone ID: MRT4577_89654C.1.pep
MAGQGITSMLAAAALLVGIFASIPTAVQSIGVCYGTNGDGLPSAADVVQLYRSNGIAGMRIYSPDATILQALRGSGIDLIVDETNLDSLISDAPGWVQANVQPYKDDVSFKYIAVGNEVEGGDTQKILPAMQSLSDALSAAGLGNIKVSTAVKMSVLATPSSPPSTGAFADPSVMGPIVRFLAGVGSPLLANIYPYFAYRXGGTIDLNYALFQPSTTVVSDGGGLVYTNLFDAMADAMYSAMEKEGGSGVPIVVSESGWPSGGGGTGAETVDNARTYNQNLINHVGNGTPKRSGPLETYIFAMFNEDKKQGDETEKHFGLFNGPDQSPVYQISFST

SEQ ID NO: 357989 - protein, 109 aa, Zea mays
  unsure (1)..(109): unsure at all Xaa locations
  Clone ID: MRT4577_89655C.1.pep
PPPPRPTPPPPPPPPHAPPAPPPPPPPPHAPAPPPPPPPRPPPPPPPGPPPPXPTPPSPPPPPPHPTPPQPLPPATPPTRERPTQPPPSXXPXGRAARQIGGANGEQSH

SEQ ID NO: 357990 - protein, 59 aa, Zea mays
  Clone ID: MRT4577_89656C.1.pep
GIPCRAGVRLHIYYYHLHRRNLRSLTYHGGFHISVTTHRLLTFKDSNRLAQRSLMTMIV

SEQ ID NO: 357991 - protein, 97 aa, Zea mays
  Clone ID: MRT4577_89657C.1.pep
MVNFTATLVAALAVFAPAAEAKTCKKSLTYCGYILLQRGNYYDQIRGALSDAGKPNNDPNWINQSRFYCVGGSDGSIRYVDHCSNCKNGGNGHSDFC

SEQ ID NO: 357992 - protein, 44 aa, Zea mays
  unsure (1)..(44): unsure at all Xaa locations
  Clone ID: MRT4577_89658C.1.pep
ILXYHLENKXRFLASXWGHKXSYYXLKDLQVILXSXTVVXSTVL

SEQ ID NO: 357993 - protein, 89 aa, Zea mays
  Clone ID: MRT4577_89659C.1.pep
VMSFFFFFSGGGEKPPRKKGPRLRFPPLNNPDLIGPGIYFGPPPNWQVKQQGFFFLETKIGGGLSGCRPNKNLSLGSRAMVFSSRLGFF

SEQ ID NO: 357994 - protein, 69 aa, Zea mays
  Clone ID: MRT4577_8965C.1.pep
LEPAGPGLLTRIFASGRAELRKPPLYLQARGIKKVEGNEEDVRHGRQPLVGAPADRYGGVGYGGEGLQR

SEQ ID NO: 357995 - protein, 63 aa, Zea mays
  unsure (1)..(63): unsure at all Xaa locations
  Clone ID: MRT4577_89660C.1.pep
HIXPFTWTLYRLVASQCGDITHPLEDSPTGQTVAHFITDYFGFHHXYLWFVTWELVDPSLLFA

SEQ ID NO: 357996 - protein, 72 aa, Zea mays
  Clone ID: MRT4577_89661C.1.pep
NSPSVVEVFSRIAPKLALMYPKGPFVHWYVGKGMKKANFFKALKDLPALKKDSKEVGVKFYKGKEGYNVYKS

SEQ ID NO: 357997 - protein, 189 aa, Zea mays
  unsure (1)..(189): unsure at all Xaa locations
  Clone ID: MRT4577_89662C.1.pep
MAAAGARLPLALLLPLFVTFFASPASATDTITANSSLSDGQTLVSAGGVFQLGFFTPASSTARFLGIWYMGLAPQTVVWVANREAPITGTTASLAINATGSLVLADPSGRVFWSSPQSNMSSTGSPVGAQLLDSGNFVLQGGGGAVLWQSFDYPSDTLLPGMKLGWDLTTXLDRHLTTWRSTGDPSPGD

SEQ ID NO: 357998 - protein, 32 aa, Zea mays
  Clone ID: MRT4577_89663C.1.pep
VFDIVSLLWIAGFRQFLILRGMNNSVDFRAHY

SEQ ID NO: 357999 - protein, 54 aa, Zea mays
  Clone ID: MRT4577_89664C.1.pep
HCMFVAALSLPAKEYVVFTRYNCVNIKPYCNFAKSCVWLDEVGVCFLGYSMLNH

SEQ ID NO: 358000 - protein, 87 aa, Zea mays
  Clone ID: MRT4577_89665C.1.pep
MLYAMRDTTSDKNIAMDKPLVDEHIPKSIPWGTAFYTVNKGTNRGTGACRGASTDVVDHTLNHTECDHKSGHSGVPSSTSATTLHRT

SEQ ID NO: 358001 - protein, 80 aa, Zea mays
  Clone ID: MRT4577_89666C.1.pep
NFAVLSRHASVRQDCLGRFKQAPHPGGINQKRLQGERRSKHLDCGEHKQVFYLQFGVTKGSTPVGQSVPLIYKELEAITK

SEQ ID NO: 358002 - protein, 75 aa, Zea mays
  Clone ID: MRT4577_89667C.1.pep
SIITTCMLLLVFSCRLNLTRMIGGGCGLCMGWRPLDSSRIRLSGPVNSMIREQLVYKLQADDENSTVNQCDCDCN

SEQ ID NO: 358003 - protein, 54 aa, Zea mays
  Clone ID: MRT4577_89668C.1.pep
PLGLKSLFKFYLGVGPRTDFTFGKPSFFCEGREVWNITCVEKHLSFVTKTPEKR

SEQ ID NO: 358004 - protein, 92 aa, Zea mays
  unsure (1)..(92): unsure at all Xaa locations
  Clone ID: MRT4577_89669C.1.pep
LTLAQAKNDVTQVTHNAYFDMEIDGKPVCQIVMGLFGKTVHNTAXNFLALCTGEKGVGXVAKVLHYKGSKFHRIIPSFMXQGRDFTLGDGRG

SEQ ID NO: 358005 - protein, 93 aa, Zea mays
  unsure (1)..(93): unsure at all Xaa locations
  Clone ID: MRT4577_8966C.1.pep
FKFFVCGQGXGQIDPVNFPPKFNLVGPLEGNPGGVPARGRGANPFLCQKPGVWFIQCPLEGPKKRGPKKGRLVLSGNLPLQKVFPPPFPFPKC

SEQ ID NO: 358006 - protein, 105 aa, Zea mays
  Clone ID: MRT4577_89670C.1.pep
VVEHALVLRHVLGQLVVARQRVRLPPAAFLLSLPRLPPPPPLAPSSFLLHGRRRRCFLVGVGTHCGGDLLTRHVCPQPTPCRAFSLSLSLWNYQGAREGLIKAWS

SEQ ID NO: 358007 - protein, 36 aa, Zea mays
  Clone ID: MRT4577_89671C.1.pep
HVVTEHSFTNANSQQGEHHCLCLNRMPVTDVLPVEN

SEQ ID NO: 358008 - protein, 152 aa, Zea mays
  unsure (1)..(152): unsure at all Xaa locations
  Clone ID: MRT4577_89672C.1.pep
RWYEXLDLSVKSTEWACEDAVKLLHFDKVMLTHCRTIPRILGRTPSECLARYEXLLDSACAKVEDSEANVNPLKMLPIEIDPSPELMPAPPLPIPVDVDGIALLYNARARLPNTRTTXSRRMDRECQSLEXRRLAILPLGSVLLLAGSDTRL

SEQ ID NO: 358009 - protein, 103 aa, Zea mays
  Clone ID: MRT4577_89673C.1.pep
KTNTKNWGWPFTRGGPTGLILKPSNHLREETEITKKRPNTHFKRGGTTILVRSPPTRGRGNHTKGPSPAKVSRGSGGSLRGGGLHWVGGGGLWSSLGGGGFAI

SEQ ID NO: 358010 - protein, 101 aa, Zea mays
  Clone ID: MRT4577_89674C.1.pep
RGRPGRDDTNLLWFGDLSPLTEPIVYTPLSHRFISPGSRFTLALSPAKVAMVTRPMSSRSSTPLMNTNLNFKIAIMLNLKLIEMLITVVQFYQLVIEEDPD

SEQ ID NO: 358011 - protein, 100 aa, Zea mays
  unsure (1)..(100): unsure at all Xaa locations
  Clone ID: MRT4577_89675C.1.pep
KKRPARAHQMLPIRAASRXRREMLHALATPREXEVXXXANXXXXXCXXXXXXXXQHFAFQFYRKLNRFDNAIGQXXSTXLRSRLMYGSWNXIVVLXIFKM

SEQ ID NO: 358012 - protein, 131 aa, Zea mays
  unsure (1)..(131): unsure at all Xaa locations
  Clone ID: MRT4577_89676C.1.pep
PRVRDKMPQGFDTSVGEHGTQLSGGQKQRIAIARAILKDPRILLLDEATSALDAESERIVQEALDRVMTNRTTVIVAHRLSTVRNADTIAVIHQGTLVEKGPHSELLRDPEGAYSQLIRLQEAXQQNNGKG

SEQ ID NO: 358013 - protein, 387 aa, Zea mays
  Clone ID: MRT4577_89677C.1.pep
MRAPRGGGGCRGGQEHVELIPGIPDDVAVDCLARVPHASHRAMRRVCRGWRSAAAAPAFASARAAAGANEDLVYLMQFGNPSGDDGPKDGDDGPGSTPAYGVAVYNVTTGEWRRERGAPPVVPVFAQCAAVGTRVAVLGGWDPRTFEPVADVHVLDAATGRWRRAAPMRSARSFFACAEAGGRIYVAGGHDKHKNALKTAEAYDAEADAWDPLPDMSEERDECDGMATVAGDRFLAVSGYRTARQGGFERDAEWFDPAARAWRRLERVRAPPSAAHVVVRGRVWCIEGNAVMEWMGTRRGWREVGPYPPGLKAGTARAVCVGGGEKVVVTGALDGVGGCGGRHALWVFDVTNKRLPWCPRRRVRRLRVLRCVRPDLRKPRSSSKATN

SEQ ID NO: 358014 - protein, 112 aa, Zea mays
  Clone ID: MRT4577_89678C.1.pep
VEFLVSRPRVRVSHAWCPSMQNVIGIYSVVVVANNRGSGTAGAEERGADEVRELQRRCAAHGERPRHELRAEAEPLIVRARREVRVQGLRRRGCGRGLELLHAAPLWESCPG

SEQ ID NO: 358015 - protein, 53 aa, Zea mays
  unsure (1)..(53): unsure at all Xaa locations
  Clone ID: MRT4577_89679C.1.pep
GRFFFFFFLGGVGAXXGKRNSNRGALCHKDQKGKCNLKQSQGHRGEQNGTSRG

SEQ ID NO: 358016 - protein, 82 aa, Zea mays
  Clone ID: MRT4577_8967C.1.pep
RGHWAAAGPFFFFFFFFFFFFFFFFFFFFWDVTFQYSSSDSTYKRVNLSIQISVCSKNHRCLCGTAKETMKLAGYEGLFLGK

SEQ ID NO: 358017 - protein, 73 aa, Zea mays
  Clone ID: MRT4577_89680C.1.pep
VYCNIHVCHEITYTTWEHVGFSHGVTSAFPTEIGTPASALRFGVPCYTSKLDGPLSKTGSVAKGYIQVVGPAL

SEQ ID NO: 358018 - protein, 118 aa, Zea mays
  unsure (1)..(118): unsure at all Xaa locations
  Clone ID: MRT4577_89681C.1.pep
PITSSGHSSLADALLLESGHGVGQTVFIYEGYALXPHTIFRRYLAGRXLRNDLMKILTECGXSFSSTCLSSXVTDMKDNLAXIALELDXKIETAKTSSSXVYKSYDTXTRQVITICAE

SEQ ID NO: 358019 - protein, 74 aa, Zea mays
  unsure (1)..(74): unsure at all Xaa locations
  Clone ID: MRT4577_89682C.1.pep
HMEQLYQRIVRLGEAHSAQLXQWGYARAVVRFIRSHFHLIMSWMDGRCVLVIPREGNTPGLRQARSLQHSYVQT

SEQ ID NO: 358020 - protein, 39 aa, Zea mays
  Clone ID: MRT4577_89683C.1.pep
DHPVSIFCQQVYFSSWPPPQRNNGPEGAGMRHLNGHKLN

SEQ ID NO: 358021 - protein, 370 aa, Zea mays
  Clone ID: MRT4577_89684C.1.pep
SLRHTCTGVAIDRRNAPPPPDAAAEKDESTQGLQLPEDIRWERLDKARFFVVGAGLFSAVSAALYPAVVLKTRLQVAPAAAAAESAALPLSAVAAATAILRQEGALAFYRGFATSLAGTIPARALYMGALEATRSAVGPAALSFGAAEPAASAAAGAVAGLAAAVAAQVVWTPVDVISQRLMVQGNPCPASRYHGGLDAFRKTVASDGLRGLYRGFGMSILTYAPSNAVWWATYSLSQKIIWSGIGCYLCDYGVGVQEIDLGDGDSLLQPGCKTVMVVQGVSAAMAGGASAFVTMPLDTIKTRMQVMDGDGEPITVGRTVRRLIKEGGLAACYRGLGPRWASMSLSATTMITTYEFLKRLSDKGQGSDLA

SEQ ID NO: 358022 - protein, 60 aa, Zea mays
  Clone ID: MRT4577_89685C.1.pep
PNPSFEPISECIYLQLRFLQFQSSRGTIIGSVNFILLFGLRNCCTDSSISSVAGQIVTAG

SEQ ID NO: 358023 - protein, 271 aa, Zea mays
  Clone ID: MRT4577_89686C.1.pep
MRPPPIPILFLPYQDQLSWWTRLERDERERASGIIMSCSSPPPLEHHHDAARPTIAPALDLLDEHWFFGNTLVTNSSAKKKKKPPPHLPRSPSTATATATGEKASGSAGPPARLGGRQLLRTPSLPSSRVGMTTELPLPTNNNKDDDDDLNWSSIYEGVLRTRLAEGGRSALRRAPSMPVPTSATAMGLLRHSHKAEAEQRTPGGGSSGNEPRRSKKQTTSPRRPYLSEAWQRPALVRVQSAAEMKDLLRMWAQAVACNVRHDTVSNHKPF

SEQ ID NO: 358024 - protein, 72 aa, Zea mays
  unsure (1)..(72): unsure at all Xaa locations
  Clone ID: MRT4577_89687C.1.pep
NWSSIYEGVLRTRLAEAGRSALRRXPSMPVPTSATAMGLLRHSHKVPSLPFPCLLPDPAPVTDEIPLRAGRG

SEQ ID NO: 358025 - protein, 56 aa, Zea mays
  Clone ID: MRT4577_89688C.1.pep
PFSPWSTPSPLSTPSFNLSPLKAIWVPPTSQTENSRGIPPVCPTRPFSTSLFFFRT

SEQ ID NO: 358026 - protein, 180 aa, Zea mays
  Clone ID: MRT4577_89689C.1.pep
MARWAIAIHGGAGVDPNLPEHRQEEGKRVLARCLQVGVDLLRAGATALDVVEAVVRELETDPCFNSGRGSALTRAGTVEMEASIMDGNGRRCGAVSGVSTVRNPVSLARRVMDKSPHSYLAFDGAEDFAREQGLEVMDNSYFITEEHIRMLKLAKEVNRVLFDYRIPLRGADTCMALAAA

SEQ ID NO: 358027 - protein, 57 aa, Zea mays
  Clone ID: MRT4577_8968C.1.pep
ACHISLTVTIGSVSADVDILLLLVCVSELDPMLDDASRIRVSYTHACGKGDRWSVVN

SEQ ID NO: 358028 - protein, 110 aa, Zea mays
  unsure (1)..(110): unsure at all Xaa locations
  Clone ID: MRT4577_89690C.1.pep
KHKQYLNCIYXLRLDKRQKPECDVQVNTSQREQYGVTVHLFIGKGRNPVEITFMPSTSDYNHDTNYPGLISLFLFRSVQPFVSRPVTMSKLPGSQLRPVPSCYVCLCQLA

SEQ ID NO: 358029 - protein, 63 aa, Zea mays
  unsure (1)..(63): unsure at all Xaa locations
  Clone ID: MRT4577_89691C.1.pep
IRIAKVNRHKAILFXDSVRNCQSGKQFGYHKVLVGKSHRVKGAGHALXEHPHRQVXALPGLWE

SEQ ID NO: 358030 - protein, 134 aa, Zea mays
  unsure (1)..(134): unsure at all Xaa locations
  Clone ID: MRT4577_89692C.1.pep
LLALAASATSTHTSGSCGCQPPPPGHLPPPVHLPPPVHLPPPVHLPPPEHLSSPIHLPPAIHVPSTAHLPAXPCHYXTQPARPQXHPQSHPCPGQQXFTIPCQLHGTCEVGGTPILGQCVXSVRHHGSPTATPY

SEQ ID NO: 358031 - protein, 149 aa, Zea mays
  unsure (1)..(149): unsure at all Xaa locations
  Clone ID: MRT4577_89693C.1.pep
MRASRSPPSPRRCHHHHEATGAASGAAAGGPGAGCVGLCRLALTPSAQDGRXNSTFQTYKKEVCLPRHSMHPGPWAICCECQTRFGGRLPVSRVEAALPYWVPLSLRPRKQHPCWMHAAGTTAGGSAVMSACCPSSSSSRPPTRTSYRL

SEQ ID NO: 358032 - protein, 148 aa, Zea mays
  Clone ID: MRT4577_89694C.1.pep
CLTVVNRVPFFVAREFAAAISSPVALALAEAHTTPLPHRCCWCWSSSSCTPTTHRRRRRCCFCCADSLCSPAAAAADRQQPAADAALQLLVLLHNHRRRWCSCQALMTPTGAHHLLRRSFSFSPAAASAWDQLLRRPPSQPTRPRTRG

SEQ ID NO: 358033 - protein, 56 aa, Zea mays
  unsure (1)..(56): unsure at all Xaa locations
  Clone ID: MRT4577_89695C.1.pep
IINTLLAXLLIIITFXXPQLNXYIEKSXPXECXFDXXSPARXPXSIKXCLVXXNRR

SEQ ID NO: 358034 - protein, 90 aa, Zea mays
  Clone ID: MRT4577_89696C.1.pep
TRKERRGFFPLPWTKKGFNKGGDHKISRQAFFLEERGLGAALGPGKKECFSLGTPNYVFGGPWYKFNPKNIKGKGRPPPWGFIFQRRGPP

SEQ ID NO: 358035 - protein, 106 aa, Zea mays
  Clone ID: MRT4577_89697C.1.pep
RHNYHAVTHAQRQSYAALPTDTAPHFHGANDDLDPVCGLYYRGSSHRALRPGGLLHHQFQPWHTWSQPMNPLDLLYLYQDRCYAALRSYASVLFLILSYEIELPCA

SEQ ID NO: 358036 - protein, 184 aa, Zea mays
  unsure (1)..(184): unsure at all Xaa locations
  Clone ID: MRT4577_89698C.1.pep
MDLCLLEKALLALXPRPVVAIAVCKLTGKRYRLPPGPPGAPVVGNXLHVGDDLNHRNLMAMAKRLGDIFLLLMGXRNLVEVSNQQLAKEVLHTHGVELGYHTLNAELDILTGKGQDMVLTEYGDHWRKMRRIMTSXFFTNKVAAHNRXGGXDEASIKQDDLRKDPYASRKGRGAPCWVLEQGAV

SEQ ID NO: 358037 - protein, 114 aa, Zea mays
  unsure (1)..(114): unsure at all Xaa locations
  Clone ID: MRT4577_89699C.1.pep
VQITDLSMVQXLMNYGVTRWASSPTRMLCTFFYFVPYYSILSKASLKSDDINFSVDLLELMTDLKPIHKSSLTRADKSLALWATSTLLYIPLYVTRLSDTTLQCKIPTIETHIM

SEQ ID NO: 358038 - protein, 115 aa, Zea mays
  Clone ID: MRT4577_8969C.1.pep
REAIEGTSIDKKCPFPGTVFIRGRIIVGTCPSVKMNRPIIVCRNYFPFVKKSQGYEKGRSNIPGHISPCFRVKEGAHVIFGQCRPLSKTVGFNVVKVIPAGFAAAGKKAFPPAWV

SEQ ID NO: 358039 - protein, 44 aa, Zea mays
  Clone ID: MRT4577_896C.1.pep
NFGPEEAPTPSIILKGLPSPLKASANRRMLCSKSQVHLDTMLVV

SEQ ID NO: 358040 - protein, 45 aa, Zea mays
  Clone ID: MRT4577_89700C.1.pep
RIGKTSLAFGNLGLEVHRNVVLFFHRVEGIKGWANAVMLSKPPPR

SEQ ID NO: 358041 - protein, 50 aa, Zea mays
  Clone ID: MRT4577_89701C.1.pep
NSARGYAIMMTRNEDLTWQMRAIRVLPMFVLPVVSSVIYSTVVNFTRMRK

SEQ ID NO: 358042 - protein, 65 aa, Zea mays
  Clone ID: MRT4577_89702C.1.pep
HVLSFSVIFRQLFICLTVIRCYATSTPFEVIVLCRAKKKKKNIKKKKKLKIKKKKNFNKKKKKKN

SEQ ID NO: 358043 - protein, 86 aa, Zea mays
  Clone ID: MRT4577_89703C.1.pep
GAARPNNPWAIFFLKFFFIFGFFLRNFFFNNPPPPPFKSFFFLKKKNLFFFFKKKKKKKKKKKKKKKKKKKKKKKKKKKKKKPNKH

SEQ ID NO: 358044 - protein, 103 aa, Zea mays
  Clone ID: MRT4577_89704C.1.pep
NVGPARVAGNFHDQFDHLFEYVFKFSNYNDWIRVCKTSIVESLHRIQSMRRSSKMSKLIVYLFIDVSTIGGSAQLIASVCTLLVVQTLYASLCFIMFHLDLMH

SEQ ID NO: 358045 - protein, 103 aa, Zea mays
  unsure (1)..(103): unsure at all Xaa locations
  Clone ID: MRT4577_89705C.1.pep
AXAAQKGXEXXXXXKAKAGEKXEXDFAXXXAXQAPRKAXPXXTXEEXQKXXXXXKGXDHRXATNXXXRXXAQQKKXNXPXXPTTTXXXXPQTXEXRRXRXEXK

SEQ ID NO: 358046 - protein, 75 aa, Zea mays
  Clone ID: MRT4577_89706C.1.pep
MWQPAAGPFYRAAGMTYLRYANICADLMRSVMKEPFKAKAMQRSAINFRSNTYGADGKQSPSVFVELNEVPQTKP

SEQ ID NO: 358047 - protein, 59 aa, Zea mays
  Clone ID: MRT4577_89707C.1.pep
FLCSSDNLLYMLCSLIHLSIARALSILLIARDGEANEEVQTIPHRMWRRSAFKVKQSSP

SEQ ID NO: 358048 - protein, 136 aa, Zea mays
  Clone ID: MRT4577_89708C.1.pep
GPPLEFFFFFFFFFFFFFFFFFFFGKQIKSPRDIQRSSFKENMEALTVFWRLFSLPPRFATAIRNRGHRLSVVRRPKAKAIRGLPSCKSHPSLHGTIFTISSKQIQPDGFEGIHNHPTRKGSILNTPNPTRGLSRQ

SEQ ID NO: 358049 - protein, 90 aa, Zea mays
  unsure (1)..(90): unsure at all Xaa locations
  Clone ID: MRT4577_89709C.1.pep
LSQIATGYSHQHQPLALNQLGALNPTAYLQQEILLTFSQLXGGHRAFFVTHXQQVALYQQFGGYPATLLQIQQWVPFDQQGFGDRGGIYP

SEQ ID NO: 358050 - protein, 49 aa, Zea mays
  Clone ID: MRT4577_8970C.1.pep
PVRGASQMPGFSAWAWGRKASYMEEGTLESGMEYRTVSGVAGPLVVGGK

SEQ ID NO: 358051 - protein, 106 aa, Zea mays
  Clone ID: MRT4577_89710C.1.pep
PAGEITLARLKSDHRSQNYLIIPIPASTASFSQPHNQFLVRAIAVEHAPRHRGAGGGAPPAARLLLASRAPISIEEEHGHHRHHLKRGPQEERETGNNSAHPPPCL

SEQ ID NO: 358052 - protein, 128 aa, Zea mays
  Clone ID: MRT4577_89711C.1.pep
RSNSVRHFYAASTCSAADMIFNRQGPCLCHLSTLCSSDGNGLLDGTFASLGLSGDDRTLGDAYSHIGQACDRGTMLTYMPYITTIRSAHKEHCLKSAKDHCLCMPRCQHCWHPERHAHREGKCTQISI

SEQ ID NO: 358053 - protein, 170 aa, Zea mays
  unsure (1)..(170): unsure at all Xaa locations
  Clone ID: MRT4577_89712C.1.pep
SPSRSRLRSTPAPPPPVLPHRPKMQIFVKTLTGKTITLEVESSDTIDNVKAKIQDKEGIPPDQQRLIFAGKQLEDGRTLADYNIQEESTLHLVLRLRGGMQIFVKTLTGKTITLXWSSSDTIDNVKVKIQEKEGIPPXQKRLIFVGKQLEDGRTLADYNIXKESTLHIVL

SEQ ID NO: 358054 - protein, 77 aa, Zea mays
  Clone ID: MRT4577_89713C.1.pep
WPLDLGRREVIHVFAILTMESGEGVQVRGAMITEDDDMIMPRGFHIPDTLHTGGGTAKRASGGYHSAFSRERWKAPR

SEQ ID NO: 358055 - protein, 60 aa, Zea mays
  Clone ID: MRT4577_89714C.1.pep
LCRRPYDWAGAWLQEMFHIGLRPLSFLHSCQCFYSPRTCDGPLLCCVSLPAPICVSGLLG

SEQ ID NO: 358056 - protein, 79 aa, Zea mays
  Clone ID: MRT4577_89715C.1.pep
AGDLMGSRYLIRSQVCHALRPDRVSSCLSSTKYVFFQCRCMARPVALTADAKAFSTRPLVLCAVLSPVVCAVLNHHLSS

SEQ ID NO: 358057 - protein, 89 aa, Zea mays
  Clone ID: MRT4577_89716C.1.pep
QYFISPRSNATALALLQADGITTVLLGGFPLALVLMTPSSLTDFVPANVPYIVRADSPVPRMRDAALNNATNPYHKQLVASHDLHRDEH

SEQ ID NO: 358058 - protein, 77 aa, Zea mays
  Clone ID: MRT4577_89717C.1.pep
PVIIHYETILLVYLSTIYFGSGGFVIGAGSVVVSWLMTYGAASKLKASYECAHRIVLLLDAGIKVSSHDPLWNCIDV

SEQ ID NO: 358059 - protein, 68 aa, Zea mays
  unsure (1)..(68): unsure at all Xaa locations
  Clone ID: MRT4577_89718C.1.pep
KPMMLCFLRVLMHCPLSTICQELVPXRGSXAKPFFQGIXIXPREISSFSQLTSAHARKLNYEDQVFMY

SEQ ID NO: 358060 - protein, 71 aa, Zea mays
  Clone ID: MRT4577_89719C.1.pep
SGGCTGGTRRGSCPCFGGMRQAATRGIGNLLRHLSHGLHALRDQIHQVNRAGMRLSLLLSKPRQLLRVLHL

SEQ ID NO: 358061 - protein, 211 aa, Zea mays
  unsure (1)..(211): unsure at all Xaa locations
  Clone ID: MRT4577_8971C.1.pep
RLGSAVQGTRCRFPGSTHAGGEIIXIHIGQAGIQGGNACWELYCLEHGIEHDGTMPSDSSGGVAHDAFNTCFXETGSGEHVPRAIFVDLEPTVIDEGRTGSCRQRFHPEQLIAGKEDAXNNFARGHYTGGKEIVDLCLGRVRKLANNCAGLXGFLGCNAWWWGTGSGLGSLRWGRLSXDYGEKAKLGFTIYPSPQVXTAVWEPYNSVLSTH

SEQ ID NO: 358062 - protein, 105 aa, Zea mays
  unsure (1)..(105): unsure at all Xaa locations
  Clone ID: MRT4577_89720C.1.pep
SPSSPHPHPTRAPGCCQERRAGSGPPPLSSPPPTLLLPVLSLSTSTRSRVASPPANHARTRPVRPYPLLVGHCTQILLSLLACCRLRGLVALPCXXWAMASGLLG

SEQ ID NO: 358063 - protein, 100 aa, Zea mays
  Clone ID: MRT4577_89721C.1.pep
CKVALWCVQFQPSARPTMSSVVRMLEGEMAIVPPVNPFHYVMESSSASTSSGLWSGTYQSSRDTTARESELSASPAAKSTDAMIEDVERAYASVLAKQSL

SEQ ID NO: 358064 - protein, 459 aa, Zea mays
  Clone ID: MRT4577_89722C.1.pep
IGFHVIVPAVGADEGYGPTWDSDDEYDNFIRKMNPPRIVIDNESSAEATIVRVDSANEYGILLEVIQVMIDLNLVIGKAYITSDGGWFMDVFNVTDKEGKKIKDEATLTQIEDYIRKSLGADSRYIPSRRRSVDVAAAADHNIIELTGTDRPGLLSEVSAVLTSLKCNVVSAEIWTHNTRAAAVMRVTDEDTGLAVTDAERLERIREKLSYLFRGGNLSRGATVSSRTATTHTERRLHQMMLDDGDYEQLQRQAPGQSQRPNVTVRNWNDKDYSVVTIRCKDRSKLLFDTVCTLTDLQYVVFHANIDAKDNQAYQEFYVRHVNGSPMNTETERLRVIQCLEAAIERRVSEGVKLELCTNDKVGLLSEVTRIFRENSLTVTRAEVTTRGRMAVNTFYVRGSAGEAVDQKAIDSIREAIGHSLQVKGQAEPPEPQKKESPTWFLFANLFRPRSLYSFGFMR

SEQ ID NO: 358065 - protein, 116 aa, Zea mays
  Clone ID: MRT4577_89723C.1.pep
VRVRSGPCPWIPLFVGVCCVAWFGSLCCLLCGYVRLRPVRESAFLCLLGLFFHSAVLAALVPAFVAHLPLPLYIVSRMPGAFRLPVLWWDPCVGFLSWASVCVFFIGHLRALCDGR

SEQ ID NO: 358066 - protein, 199 aa, Zea mays
  Clone ID: MRT4577_89724C.1.pep
MSTMDEGYGPTWDSDDEYDNFIRKMNPPRIVIDNESSAEATIVRVDSANEYGILLEVIQVMIDLNLVIGKAYITSDGGWFMDVFNVTDKEGKKIKDEATLTQIEDYIRKSLGADSRYIPSRRRSVDVAAAADHNIIELTGTDRPGLLSEVSAVLTSLKCNVVSAEIWTHNTRAAAVMRVTDEDTGLAVTDAERLERIRE

SEQ ID NO: 358067 - protein, 65 aa, Zea mays
  Clone ID: MRT4577_89725C.1.pep
SNPPIYLPSGTNRTRTSVWPYCTKAVSFSLTRNDCFYINHANARPFLYYIFVHLLSLFFFFFLYF

SEQ ID NO: 358068 - protein, 65 aa, Zea mays
  Clone ID: MRT4577_89726C.1.pep
DLSFGYNKRTRRGHFEPRSSYHHGNYGRFSLPRATHPATPQERESRLPSLSDSAHSLIWGGTHEL

SEQ ID NO: 358069 - protein, 102 aa, Zea mays
  unsure (1)..(102): unsure at all Xaa locations
  Clone ID: MRT4577_89727C.1.pep
ALTKTDFGDYDKKPPEGDADIFLKAKGHDSNEENYRIKRFTQLKKLMNAYCDRQSVDMNAIAFLFDGRMLRGEQTPDXLYMEDGYEIDAILHQTIGSFPSTT

SEQ ID NO: 358070 - protein, 73 aa, Zea mays
  Clone ID: MRT4577_89728C.1.pep
TAFVLFFFFLGTQNRGPSNTWVWTNPIIIIAPTNTTGYDKRPLHHIMCYALIAGGYMKTLTRAVTYIGHSKAL

SEQ ID NO: 358071 - protein, 82 aa, Zea mays
  Clone ID: MRT4577_89729C.1.pep
IRHCTLLKCMSHMERIPLVRSTSCRNINSFACMLVPYCANICLAITWQPFSRTRHGTCPQNACVQSAGCRQPPRWQGPHASR

SEQ ID NO: 358072 - protein, 50 aa, Zea mays
  Clone ID: MRT4577_8972C.1.pep
QQQIFKIELWLISNLREGTSNDGFLSDGRSVSRCVRRGVRERVGRPGNSG

SEQ ID NO: 358073 - protein, 59 aa, Zea mays
  Clone ID: MRT4577_89730C.1.pep
MAATSSKSSSSSSSAQRAAAALLVAAAVAVSVLVVGAAAVCDMSNEQFMSCQSRGGQDD

SEQ ID NO: 358074 - protein, 62 aa, Zea mays
  Clone ID: MRT4577_89731C.1.pep
SILDKQKLTTMIFIDWHHNLRIVLKQEKKEYVHKNPNHDELVKNANNLDQSAYEKHMNNSLE

SEQ ID NO: 358075 - protein, 248 aa, Zea mays
  unsure (1)..(248): unsure at all Xaa locations
  Clone ID: MRT4577_89732C.1.pep
RQEDPFXPMLFILVXDGLILLFKSPRIESLPPSVRRGNGQRISLHADDVVMFLQPSREELGVVKEILRIFGDASGLVTNVSKCSMTPIHCEEQDMVAAQELFPYTEVAFPFKYLGLPLSVKKLPKNTFLELIDKIADKLPGWKSALIHTAGRLTLVKSVLTTIPIHHLIVLQCPKWVIKAIDKIRRGFLWKGRKDIKRGHCSVGWERVCRPLSMGGLGIHNLEVLGWALNLRWLWLKKTQPERPWGPG

SEQ ID NO: 358076 - protein, 88 aa, Zea mays
  Clone ID: MRT4577_89733C.1.pep
IFFFLPKKTNFIHTLLFILDPMFFTFSLPTIMCGALLVLFFFLNSCLLFIYKIMSIHFFSPSQFLFFFILFVFLDFLTSCFFTPPVPT

SEQ ID NO: 358077 - protein, 74 aa, Zea mays
  Clone ID: MRT4577_89734C.1.pep
NRAGCERRWLGGWGPPIAISASLSSHLLSFVSLQPIPVRTVNNSHMVVTSQGPELVRQLFSQGHSEESVSAKTQ

SEQ ID NO: 358078 - protein, 63 aa, Zea mays
  Clone ID: MRT4577_89735C.1.pep
PTKQPNPHQTLNNTPKYTLDCPFTNQHRADQTTAATTTAYTVLASTNSHALPPHNHQLGLTNY

SEQ ID NO: 358079 - protein, 102 aa, Zea mays
  unsure (1)..(102): unsure at all Xaa locations
  Clone ID: MRT4577_89736C.1.pep
PVRDARCSRIKEPILETANTRRCMLPVYYPVDKVYXYVLDDIESILTIXSLTETYHVAHKSGPIMKTPGIXPRTTELYFSFIVSHLHDKVQATSMDQLQAIN

SEQ ID NO: 358080 - protein, 108 aa, Zea mays
  Clone ID: MRT4577_89737C.1.pep
PPQAPRKGFGFPARPWPKSKTSAQFAGSFCVLWATPPLIALWFFVSGLLLLFPFNFWPPRTPRGGVFFLPFQLFPPGAPGKKTRCPGPALFFGPLRRAIILTPFLPLV

SEQ ID NO: 358081 - protein, 103 aa, Zea mays
  Clone ID: MRT4577_89738C.1.pep
KKKKKKKKKKKKKKKKRKKKKTQKKKKKKKKRFCSGATPLWGKFVEIPITGGGFGVFFWGPHCPLGGGISKYWGRFFTAGGGENPGCPPFKSFGNKPLFPQGG

SEQ ID NO: 358082 - protein, 34 aa, Zea mays
  Clone ID: MRT4577_89739C.1.pep
LTRCPACNTLYTLGAYVRDGVNSIVHTHHTALKC

SEQ ID NO: 358083 - protein, 160 aa, Zea mays
  Clone ID: MRT4577_8973C.1.pep
MTTVGASATTNSSTSGRGTQQAYVLFWESLNADLLKLIADRVLSSDLLHYVWFRAVCKKWRAATHCPLGRGVVDPRFHPRQWTMFPEGNGLHPGHPALGGYIRFLNIHTGVFIRVHPPCFEDHSVLDCPDGLLLLQRKKDAAICLLHPLHGDVAEFPPLA

SEQ ID NO: 358084 - protein, 336 aa, Zea mays
  unsure (1)..(336): unsure at all Xaa locations
  Clone ID: MRT4577_89740C.1.pep
MEFEDRCHKVQEPKFDCLLFDLDDTLYPLSSGIADHVKKNIEDYMVEKLGIDESKIENLGNLLYKNYGTTMAGLRAIGYSFDYDEYHAFVHGRLPYDNIKPDPVLKHILKSQRVKGADHALESIHNVREALPGLWEEAEKAEDVLYAERVAMETSVTXNPSPQSSEEPSAFDIAGHFARPGTATQPPKTPVLCKPNEYSIGRXALRIANVNPHKAVSFRAVGPNTISIPAPDVASTXKKHFLLFFILLDHLLXRKLYLRELLQIFFDDSVRNIQAGKQIGLHTVLVGKSQRVKGADHALESIHNIREALPELWEEAEKAEDVLYPERVAMETSVTA

SEQ ID NO: 358085 - protein, 63 aa, Zea mays
  Clone ID: MRT4577_89741C.1.pep
PAASTASPPCSSSRTATRTIASSGPSLSPRSPPFSSSTLCSSRTFSSHPMPPCIVFLTHICSF

SEQ ID NO: 358086 - protein, 77 aa, Zea mays
  Clone ID: MRT4577_89742C.1.pep
DPRAGRMARLLTLLTRARGARVRRQRGRYHISVGQYKIKQKEIKTASAFIPLGLASDAPELARDGSARVSAAAASAA

SEQ ID NO: 358087 - protein, 60 aa, Zea mays
  Clone ID: MRT4577_89743C.1.pep
MGSIIVVSKEVAPYKHTRVGHRQCMWIPQSMAAYTPRHRCNHMMNSMKLDLRSLTAHHLQ

SEQ ID NO: 358088 - protein, 49 aa, Zea mays
  Clone ID: MRT4577_89744C.1.pep
LHVPIPNSQVAPRATLPYYTTECIFHPHTSSNLYGGPFLLRRRDLPKHL

SEQ ID NO: 358089 - protein, 58 aa, Zea mays
  Clone ID: MRT4577_89745C.1.pep
LNLGGTREEVRSRMQGIESLDHINRQAFFFFFFFLPFSFFFFFFFFPKRPPTRPPTRP

SEQ ID NO: 358090 - protein, 41 aa, Zea mays
  unsure (1)..(41): unsure at all Xaa locations
  Clone ID: MRT4577_89746C.1.pep
INSXAYRSLVCGRPSFSFLGGIISGTLSLASQSHSTKKWRV

SEQ ID NO: 358091 - protein, 70 aa, Zea mays
  Clone ID: MRT4577_89747C.1.pep
MTAGPRLFLGPRAVQHQAVLMDEVGKHSIGDGLSQAHDPLHYHDLPFNHAQGTAAFAQMALAPALVSGNV

SEQ ID NO: 358092 - protein, 102 aa, Zea mays
  Clone ID: MRT4577_89748C.1.pep
ALLCNPLAPKPLPNEPPCALPNPPTPAPPSGTPPSPPKPAPCTPKPPPCPPKPTPCPPKPTPCPPKPPPNGPANPKRSFISSEFAACTATMHKRPTTKKASF

SEQ ID NO: 358093 - protein, 399 aa, Zea mays
  Clone ID: MRT4577_89749C.1.pep
MNGSSGSQGHHVSGEKKQVCHVSRPILNNGPKHRPLTPMRRCRGVACVVIILSTAFLLVVYLAPITTFAVRLFSVHYSRKATSFLFGMWLSLWPFLFEKINKTKVVFSGENVPPKRRVLLFANHRTEVDWMYLWDLALRKGHLGYIKYILKSSLMKLPIFSWAFHIFEFIPVERKWEIDEAIIQNKLSKFKNPRDPIWLAVFPEGTDYTEKKCIMSQEYASEHGLPMLEHVLLPKTKGFICCLQELRSSLDAVYDVTIAYKHRLPDFLDNVYGVDPSEVHIHVRMVQLHHIPTTEDKITEWMVERFRQKDQLLADFFMKGHFPDEGTEGDLSTPKCLANFLTVVCLTAICLYLTLFSFVWFKVYVVASCAYLSFVTYYSILPPQLIGSPEGDVKAKKVV

SEQ ID NO: 358094 - protein, 57 aa, Zea mays
  Clone ID: MRT4577_8974C.1.pep
ITRWLNPNLHPTFHCALYCHLTLHCSCQWHILLLLCVVVEFVLGHTTADSSPACNEW

SEQ ID NO: 358095 - protein, 84 aa, Zea mays
  Clone ID: MRT4577_89750C.1.pep
APRSFCVDAPLDLQSILTDDKRWWKAFFASGTVALYVFLYSINYLVYDLRSLSGPVSAILYIACSFVVSLAIMLPTGTVGFLAI

SEQ ID NO: 358096 - protein, 121 aa, Zea mays
  unsure (1)..(121): unsure at all Xaa locations
  Clone ID: MRT4577_89751C.1.pep
MGFCSPSMGARGGSLLIIWAVLILDALLPASPAGLGRVALKKLPVXPDQAVTTRLSAEERKTTSXLRGFNAIGSCGDHDSRRIALKNYVNAHYFGEIGVRLPQQKVTVIFDTGRSNLWLPA

SEQ ID NO: 358097 - protein, 45 aa, Zea mays
  unsure (1)..(45): unsure at all Xaa locations
  Clone ID: MRT4577_89752C.1.pep
TXXSSSVRNSLMLRSPSPSLSSSSNHHSTYSFSFPNPPLFPYLHS

SEQ ID NO: 358098 - protein, 62 aa, Zea mays
  Clone ID: MRT4577_89753C.1.pep
LSISAFVILRGDQSNMRLNYVVINRHGSVSLLSQSSRPPRRLTTKEGGRPIAEDGKPFLGRE

SEQ ID NO: 358099 - protein, 109 aa, Zea mays
  unsure (1)..(109): unsure at all Xaa locations
  Clone ID: MRT4577_89754C.1.pep
MISSKDLEEETQRLPPLDRRASSFPAACSKKKIKTDQPYTIAARPDVDVYPNARKGNGKVRATTPAELRTAANXERYSPIYNEDDWSPTENVYLDGTTDILICHDTLTA

SEQ ID NO: 358100 - protein, 102 aa, Zea mays
  Clone ID: MRT4577_89755C.1.pep
KKKFFPQIRQVGPFPRVPGKKGLVLKFFLEKKPQGGLSGFNGAPVTPQLWGILGLKFKKPGSSPLKKNAGGFFFLGKFFLWKKWKGAPYKLPSPLVFPFNGH

SEQ ID NO: 358101 - protein, 67 aa, Zea mays
  Clone ID: MRT4577_89756C.1.pep
PRFLAQEKAKLPALNQDLQFHHHAWKRRREGKKNTRLAEEGEDSNCTSGQSEPHATSERRGGGTRPA

SEQ ID NO: 358102 - protein, 97 aa, Zea mays
  Clone ID: MRT4577_89757C.1.pep
WWNCRSWFRAGSLAFSCAKNLGQLGGLFFIRCVLSSVTNLSFLFFSSPVDVVIRPLLLECRPLVEKLYNRPMVQLGYVPQLLFIGPAGCAPNNPVTP

SEQ ID NO: 358103 - protein, 91 aa, Zea mays
  unsure (1)..(91): unsure at all Xaa locations
  Clone ID: MRT4577_89758C.1.pep
CNLLEHPNWPMGQFCPDSNPKTFKKFHGWLARFSFPVAIKLAPNKKKFLGVLSGTGAINADFXKFLAPFFPFLKKNPNFLARVGFFYFKAS

SEQ ID NO: 358104 - protein, 60 aa, Zea mays
  Clone ID: MRT4577_89759C.1.pep
ARHVVSDPRVPHTRFCTWLRADPRVVHAHRLRCFAQSRALLNPLRSFSCYVNFITISSTY

SEQ ID NO: 358105 - protein, 54 aa, Zea mays
  Clone ID: MRT4577_8975C.1.pep
FKNPLVEFFPVHPQGLKVFLFFFRGLGNEGAPIKNWFGLNNWPPPPNLTKIVFG

SEQ ID NO: 358106 - protein, 50 aa, Zea mays
  Clone ID: MRT4577_89760C.1.pep
HRILNLIEIFQQICVTYMIVLYWTARLIKGTFINLYKATELIIYRNELIY

SEQ ID NO: 358107 - protein, 72 aa, Zea mays
  Clone ID: MRT4577_89761C.1.pep
FLSANSVSNTALIPSEANRLLGDIPRDDIDGVEGLILFSVIFVLFDINARPSEVSRLLGEAPRVAPHTVKGL

SEQ ID NO: 358108 - protein, 175 aa, Zea mays
  Clone ID: MRT4577_89762C.1.pep
MGGVLGLIQIDQSTVAIKETFGKFDAILQPGCHCLPWCLGQQIAGYLSLRVQQLDVRCETKTKDNVFVNVVASVQYRALADKASDAFYRLSNTREQIQSYVFDVIRASVPKMNLDDVFEQKNEIARAVEDELEKAMSAYGYEIVQTLIVDIEPDEHVKRAMNEINAAARMRLAAT

SEQ ID NO: 358109 - protein, 120 aa, Zea mays
  Clone ID: MRT4577_89763C.1.pep
PIGAFAARYHRRWDHLWFYLHAGIQFVGFILGLAGVVAGVSLYSKIQADVPAHRGLGIFVLVLAILQILATMAPMGSSTPQANRLSAPGSFQTSGKDDEPDELPVVKSNTMEVLSSSRSR

SEQ ID NO: 358110 - protein, 135 aa, Zea mays
  Clone ID: MRT4577_89764C.1.pep
CVSTRVPCASATHDRRPSSSSAGSRAAEWHHTYCGYVKNCANGGGGSALVPRGVFGRQAHAAVARRRRRRRRIRAAGPGAAAAGAHWRRVCRLLPPPRSGEPAASASAPRGTGLIAPAPSRTPLPLRRWKLGHPA

SEQ ID NO: 358111 - protein, 46 aa, Zea mays
  Clone ID: MRT4577_89765C.1.pep
GCGVDVSVACVVEQAAAVVGGAHDEVVQEERVDRVRHRRRLGALHG

SEQ ID NO: 358112 - protein, 58 aa, Zea mays
  unsure (1)..(58): unsure at all Xaa locations
  Clone ID: MRT4577_89766C.1.pep
IMTPALTSNTGFLLIFTXXHXNQTTLRFTSNMPESYPVITHLDPCFSTTNTNEPDNIT

SEQ ID NO: 358113 - protein, 274 aa, Zea mays
  Clone ID: MRT4577_89767C.1.pep
MANGGAAAGKLTVAETFSNLREQGKSAFIPFITAGDPDLVTTSKALKILNSCGSDVIEVGVPYSDPLADGPVIQASATRALKKGTTLDSVIEMLKGVTPELSCPIVLFTYYNPILKRGVGNFMSTIKQAGIHGLVVPDLPLEETALLRSEAIMHNIELVLLTTPTTPTDRMKGIAQASEGFLYLVSAVGVTGARSNVNLRVEHLLREIKKVTDKPVAVGFGVSTPEHVKQIVGWGADGVIVGSAIVKQLCEAATPEEGLERLEEYARSMKAAMP

SEQ ID NO: 358114 - protein, 79 aa, Zea mays
  Clone ID: MRT4577_89768C.1.pep
VSSSQTYYFSSSFLSVWTHSSALHSAEQNGSAVLHCIILTSEPECLGNGKTVFNGIFYIPLYLSFTDFLKESLIYIPFL

SEQ ID NO: 358115 - protein, 152 aa, Zea mays
  Clone ID: MRT4577_89769C.1.pep
KLPLSKKILSVSHIPFFILHDCLQVLLTTPTTPTDRMKGIAQASEGFLYLVSAVGVTGARSNVNLRVEHLLREIKKVYFLVSMTCGASGIQMVIFLALQVTDKPVAVGFGVSTPEHVKQIVGWGADGVIVGSAIVRQLCEAATPEEGLERLE

SEQ ID NO: 358116 - protein, 57 aa, Zea mays
  Clone ID: MRT4577_8976C.1.pep
VNRWVTCPYEDNYAPGYLLQTRNIPHEVITGHYDDVKYNSIRYTVNATQRGLTSGPE

SEQ ID NO: 358117 - protein, 58 aa, Zea mays
  Clone ID: MRT4577_89770C.1.pep
PSLCLTGFNQLNQNTEKLKKLSCKTMCKGKMIEFCHQDLFNLRLYPIAKLSPIPCEDI

SEQ ID NO: 358118 - protein, 69 aa, Zea mays
  Clone ID: MRT4577_89771C.1.pep
KFQRASRIKSPKLVVRDFILNKTPVKSHLPLKKGLGPGLQLKKKKLYGQIWCDSHFYLLKNFDFFFGFP

SEQ ID NO: 358119 - protein, 99 aa, Zea mays
  Clone ID: MRT4577_89772C.1.pep
SSVRFLFETSNFFNHNIFTLVLRSERMLSTTLFFGEDKKKNRAYRPYGKGTQAQVIGQNYSRGATTYTPNTFLKKRVTGGPRAARGGQTFQGFLKKISL

SEQ ID NO: 358120 - protein, 81 aa, Zea mays
  Clone ID: MRT4577_89773C.1.pep
VWPLKIFQNLCEGQSCSPPSKGDPQRGPGTPSPIYGHYPIWKPPQVEPPNPLPGIGFFLFPRGGKPFQKGHFITSFDQNPR

SEQ ID NO: 358121 - protein, 55 aa, Zea mays
  Clone ID: MRT4577_89774C.1.pep
GIAMSQSALVKKLTFLEVVCVQSSVVSLLFPGQCVSLWRIMVEALEPVSFRSMGE

SEQ ID NO: 358122 - protein, 178 aa, Zea mays
  unsure (1)..(178): unsure at all Xaa locations
  Clone ID: MRT4577_89775C.1.pep
GPVPPAPALAELTALVTLRLQDNLLTGLVPDVAAALPRLADFNTSNNQLSGRLPDAMRARFGLASFAGNAGLCGPAPPLPHCEFLPREPAPTPPSSSTSSSSVLPSNPAASSSVASSSPALATQESLSRRPGLSPGAVAGIAVGNALFFALASLLVACCCCGRGGGXASQRRPRRGRG

SEQ ID NO: 358123 - protein, 119 aa, Zea mays
  unsure (1)..(119): unsure at all Xaa locations
  Clone ID: MRT4577_89776C.1.pep
MLSPFLSRTVHLLTMTVSRSPAVRIMMDLHANXVPYTAENFRALCTXHKALYKWGKALHYKGSTFQRVISYFMCQGGYFTXADNSSGYEYIYSKKFSXRSSGALHTSSFVLFMANICHQ

SEQ ID NO: 358124 - protein, 75 aa, Zea mays
  unsure (1)..(75): unsure at all Xaa locations
  Clone ID: MRT4577_89777C.1.pep
LYSLFYSLSYQKPMPLRNFKFLFNTKQXYTHFIGLPPFVVSFLFSLLNKHQLFQLYINNPSFNYVCFKTPLFFPT

SEQ ID NO: 358125 - protein, 239 aa, Zea mays
  Clone ID: MRT4577_89778C.1.pep
LRNICVSSALSVLRVQFDYVSSCLYLKRVDTILTFNFQIYSGARPLLEKTMKILVEGLVDIFLSVFHENKTKGIRLLDANGFCQLMLELEYFETVLHTYFSPEAQQAMKSLQENLLEKACESIAEAMENPGHQRRPTRGSEDASSDDRQPSVSPDDLLLLAQQYSSDLLQGELERTRLNIACFMESALQSTSAPAGSKPAAYSSYHAQVPQHAPIQTSSPSFRRQQTGTSSPVVSRRRR

SEQ ID NO: 358126 - protein, 924 aa, Zea mays
  unsure (1)..(924): unsure at all Xaa locations
  Clone ID: MRT4577_89779C.1.pep
MASDSDVDEDELLQIALQEQAARDLSHQRPPAANKPVVNLVRPPAPNXPAAATPGPXRRSEGAPAQPRXDEDDDSDVELLSISSGDEDDNPRARGPPPPRGGGGGRAGARRAAARDDGDFDDEEPRSWKRVDEAELARRVREMREAKVAPNIQELDQKAAAAAAAARKAFTSVQTLPKGVEVLDPLGLGVIDNKSLRLITDASVSSPISREKSQGLDPNMRQEFRGMLYKSMEDPHLDLAEIENIVRLLLELEPETDPVWHYLNIQNSRIHGLFEKCTQDHDSRMEVLQNKIREKVLSDSKWRQLQQDSNKSLEVDSTIGDSPRIDQLSTNFMAEEADSLRATYIRRLTSVLIQHVPAFWRLALSVFSGKFAKAASGNVVSDFDVNAKPTANKNDEKGGEVKYTNHTLDEVGSMVQATISAFDTKVQSTFRDFEECNILCPYMSDTIKEIAKACQTLEGKDSSPTAVKMLRTLHFEMTKLYILRLCSWMRATTKEISKDETWVTLSTLERNKSQYAISCLPLEFRDITVSAMDRIDTMILNLMSETAKSYDISQPLQEINESVRLAFLNSFLDFAGYLERFGGELTENRPNKENNYVSNGYINGTRETFANTDGDLHKKLLVVLSNIGYCKAELSEELYSKYRHIWSPVRNNEERSSDMRDLRTSFSALEEKVLDQYTFAKSNLIRSAAQSYLLDSGIYWGAAPMVKGIRDATLDLLHILVAVHAEVYSGARPLLEKTMKILVEGLVDIFLSVFHENKTKDIRLLDANGFCQLMLELEYFETVLHTYFSPEAQQAMKSLQENLLEKACESVAEAMENPGHQRRPTRGSEDTASDDRQPSVSPDDLLVLAQQCSSDLLQGELERTRLNIACFMESTLQPTAAPAGPKPAAHSSYQAQHAPVQTSSPSFRRQQTGTSSPVVSRRRR

SEQ ID NO: 358127 - protein, 117 aa, Zea mays
  unsure (1)..(117): unsure at all Xaa locations
  Clone ID: MRT4577_8977C.1.pep
MEEKRKLQWRRGRDGIVQYPHLFFAALALALLVADPFGXLVPLAEVDYRPVKHELAPYGEVMGSWPRDNASRLRRGRLEFVGEVFGPESIEFDLQGRGPYAGLADGRVVRWMGQEAG

SEQ ID NO: 358128 - protein, 57 aa, Zea mays
  unsure (1)..(57): unsure at all Xaa locations
  Clone ID: MRT4577_89780C.1.pep
RLFSVRDEITYIFHTSVDLISHRAXPASQSVSTSASTRDDPIHVCMYAFIEHDLLVR

SEQ ID NO: 358129 - protein, 107 aa, Zea mays
  Clone ID: MRT4577_89781C.1.pep
KRPVAILTNHLYQGGASPRLGSECGQIPRDRSVRGISLTPGLESRCLLPPYPAMVFPCGSRFLYAEEERDMRRGWPMPRRRGASLELFRSAWNRTTAHSSPCDAYSA

SEQ ID NO: 358130 - protein, 62 aa, Zea mays
  Clone ID: MRT4577_89782C.1.pep
KNPTLFRSENSYIVNGTMCYSWTVPKKYSILYDHNFDCTERGWKTSWNTPAKHRGRTLTYYS

SEQ ID NO: 358131 - protein, 38 aa, Zea mays
  Clone ID: MRT4577_89783C.1.pep
RERLREPARNTGADHTLRVVAAPLFLGLRANENYLAGS

SEQ ID NO: 358132 - protein, 97 aa, Zea mays
  unsure (1)..(97): unsure at all Xaa locations
  Clone ID: MRT4577_89784C.1.pep
VYHXGAVKAALAAFISTLILXVTAQGVEMAFSKLTGGRPTTPEDLIAVAVAHAFALFVAASVGTNICRGHVNSAVTFSALLGRNITLLRGLLYWEAH

SEQ ID NO: 358133 - protein, 130 aa, Zea mays
  Clone ID: MRT4577_89785C.1.pep
MAALAPSPSPTGGRGPGSGCDPCAGAPALHGPGEGGPYADTALDLSPCSALRAIERYRIALLPTTPPVLVAMLKSEEAHRCDLSSLLFICIGGAPLSHEVAERFAAIFPNIEPFQVLFILSATMEFNHNF

SEQ ID NO: 358134 - protein, 123 aa, Zea mays
  Clone ID: MRT4577_89786C.1.pep
GPKDPGCIGRVSPHIDGPPPGGGPPPWGYGAPPQNLFKGSPPGFFQKVETPRRSLLNGGGKKKKKGAPPPVRFHLVLKRAPLLKRLALAPGGPPPTRGVGGCGTPKVPFVRFFLTAQPLLVAF

SEQ ID NO: 358135 - protein, 187 aa, Zea mays
  unsure (1)..(187): unsure at all Xaa locations
  Clone ID: MRT4577_89787C.1.pep
SILLWGKYQDAEGVPXFWLTXVKQRTVVSEEIQGAQXARPRYLGDINWSTIEDPTGFNLGWWFDTNPFLKNFVLSKTFHMVXDEDDPILEKAIGTVIEWYSGLXLSHMILTKKATMGXMNTKAITKTEDWDSFFNFLNPPHVPEDDDDLDEDTAVELLCLMXHDCDIGTLLRDKIIPQSLGWFTGDA

SEQ ID NO: 358136 - protein, 75 aa, Zea mays
  Clone ID: MRT4577_89788C.1.pep
VTNLYQQHYDPGKRAALFFCPSSFKFKKRGGGNSFWGGIFKSFYRLGFFSHGFLMASPQGSFFLFLGDRPDGGAP

SEQ ID NO: 358137 - protein, 43 aa, Zea mays
  Clone ID: MRT4577_89789C.1.pep
HSRRRVMFGMGSYTASDKKFVTDAIRFRLDPDSTRGWPPTSAE

SEQ ID NO: 358138 - protein, 53 aa, Zea mays
  Clone ID: MRT4577_8978C.1.pep
GDGFSSSLLCVGVPTLQLHYSILEELLVSNSCRCRARCRGCLILDRSARKGPR

SEQ ID NO: 358139 - protein, 65 aa, Zea mays
  Clone ID: MRT4577_89790C.1.pep
LFYCQKRPHLIRVKNALYIRTKNSWANRVESKELLKSTKRMYLHIALDAVKRCDLGHCTRYYGSS

SEQ ID NO: 358140 - protein, 445 aa, Zea mays
  Clone ID: MRT4577_89791C.1.pep
MDVEGEVPAAAAAAVANGLGGAGAEEASPAPVSAEQLDVEAYAAQYSGRTRLVRLLFVADRCGVEAMQLEALRMAYDEIKRGEDVQLHRDVVTKIGGRLGPRYGLDQAWVFSVSRRADQRKEKLESELNGYRTNLIKESIRMGYNDIGDFFYAHGQLSDAFKSYIRTRDYCTTSKHIVQMCMNVILVSIELGQYAHVSNYVSKAEQTPDSLDPTIVAKLKAAAGLANLETKKYKFAARKFVETGIELGNNFSEVIAPQDVAVYGALCALASFDRSDLKSKVIDNINFRNFLELVPEVRELVNDFYASRYGSCLGHLEKLKPNLLLDIHLHQHVETLYMEIRHKAIIQYTLPFISVDLNTMAAAFKTSVSMLQKELAALITEDKIQARIDSHNKILYARHADQRNATFQRVLQTGNDFERDVKSMLLRANLLKHDYIQKTSGPRKM

SEQ ID NO: 358141 - protein, 149 aa, Zea mays
  Clone ID: MRT4577_89792C.1.pep
AYQIICRVVVATRWWRVSYTWTGYGDDFILIARRSSSIMAWTDRMICCTSLEIMGSDPWQRKTSRAIIISSGWSFKKLGHIVHLTSDVESAVILGVVLVRLLKGVRIGGRHPDLHVAMVCVRGVGTTGAGPGCCCLFWIGLDASAFGAS

SEQ ID NO: 358142 - protein, 325 aa, Zea mays
  Clone ID: MRT4577_89793C.1.pep
NLLGGAPTEAPARRSSPRKCAATELVAKGRESAAVLKAMLGQLPAAATPHDGLRDLAEQVLRCCDRALAALLRGAATEEAACSSSARKRRKQPAERQGGLAPPPPSPAATGSKRMRMSRGERGTRAEKKETMEDGFIWRKYGQKDIHGSNYPRLYFRCTYKDDRGCEARRQVQRSDTDPCAAYLITYFGEHTCCCRDDAVEAPAPFVIDFGLSAAACDDGLQLPQYGSPWPSCDDDGPGPVELQTPPPRTSADLCSSPPEEELRAGACDVAEFVAEQSTTVTAELMGRMTSPEWDGCLDWELGEGDSSLDVDGFDRYYFDYSDLL

SEQ ID NO: 358143 - protein, 51 aa, Zea mays
  Clone ID: MRT4577_89794C.1.pep
MSRGERGTRAEKKETMEDGFIWRKYGQKDIHGSNYPRSVCLNSEPTSESTK

SEQ ID NO: 358144 - protein, 95 aa, Zea mays
  Clone ID: MRT4577_89795C.1.pep
LAGSRTAPLRRLRPRRLGGCRCGGRARWRAAPSEAGKRRGASAVAHAAPPPARHVRRVPGLAHLAARARPAAPRHRLPPPAAPRVAGPGVALRAL

SEQ ID NO: 358145 - protein, 83 aa, Zea mays
  Clone ID: MRT4577_89797C.1.pep
IPKPLCMGTKTEWFPGPPPQSPRRFLEKGIPKMAGPGPQVERGANPPPDLGAKKSQWAKGPNLVANAGFTVGKAPKIPPPGKY

SEQ ID NO: 358146 - protein, 359 aa, Zea mays
  Clone ID: MRT4577_89798C.1.pep
MPSISCHNLLDLAAADEVPLPSPTPLRLPRVMSVASPASPTSPPAPAPPRRVIVSHRLPLRASPDPAAPFGFAFSVDAGTVAYQLRSGLPANAPVLHIGTLPAAAAEAASEELSDYLLANFSCLPVYLPTDLHHRFYHGFCKHYLWPLLHYLLPLTPSSLGGLPFQRTLYHSFLSANRAFADRLTEVLCPDEDLVWIHDYHLLALPTFLRKRFPRAKVGFFLHSPFPSSEIFRTIPVRDDLVRALLNADLVGFHTFDYARHFLTACSRLLGLDYQSKRGYIGIEYYGRTVTVKILPVGIDMGQLRSVVSAPETEDAVRRVTEAYKGRRLMVGVDDVDLFKGIGLKFLAMEQLLVEHREL

SEQ ID NO: 358147 - protein, 180 aa, Zea mays
  unsure (1)..(180): unsure at all Xaa locations
  Clone ID: MRT4577_89799C.1.pep
MPSLSCHNLLDLAAADEVPLPSPTPLRLPRVMSVASPASPTSPSPPAPPRRVIVSHRLPLRASPDPSAPFGFRFSVDAGTVAYQLRSGLPTNAPVLHIGTLPAAAAEAASDELSNYLLANFSCXPVYLPTDLHHRFYHGFCKHYLWPLLHYLLPLXAVLAFVGLPFQRTLYHSFLSARAF

SEQ ID NO: 358148 - protein, 311 aa, Zea mays
  Clone ID: MRT4577_8979C.1.pep
PYLKFAHFTANQAILEAVQGCKHVHIIDFSIMQGLQWPALIQALALRPGGPPSLRLTGIGPPSPPGRDDLRDVGVRLADLARSVRVHFSFRGVAANRLDEVRPWMLQVSQGEAVAVNSVLQLHRLLADAPSSGDARAPIDAVLECVASVRPRVFTVVEQEADHNKPGFLDRFTEALFYYSAVFDSLDAASGGAGDAAAEAYLEREICDIVCGEGAGRRERHEPLWRWRDRLGRTGLAAVPLGANALRQARMLVGLFSGEGHCVEEAEGCLTLGWHGRPLFSASAWRAEENNQSDSRSRSSGSEESNISCSS

SEQ ID NO: 358149 - protein, 211 aa, Zea mays
  Clone ID: MRT4577_897C.1.pep
MSRDLEDGHGAVGNVIAAAAAAGGEAVGAGEAGDAHDNDVVMPGFRFHPTEEELIEFYLRRKVEGKRFNVELIAFLDLYRFDPWELPAMAVMGGKEWFFYVPRDRKYRNGDRPNRVTASGYWKATGADRMIRGENNRPIGLKKTLVFYSGKAPKGVRSSWIMNEYRLPPPPTDADPLIPKSEISLCRVYKRSGIDDGHGQSSSSTQASSAR

SEQ ID NO: 358150 - protein, 493 aa, Zea mays
  Clone ID: MRT4577_89800C.1.pep
AVLVQIANPARSEGRDVQGVQDEARAISARVNARFGTPGYTPIVLIDGPVTPQEKAAYYAAAECCVLSAVRDGLNRIPYIYTVCRQESTALGDDAPKRSAIVLSEFVGCSPSLSGAIRVNPWSVESVAEAMNAALRMPEAEQRLRHEKHYKYVSTHDVAYWARSFDSDLQRACKDHFSRRHWGIGFGMSFKVVALGPNFRRLSVEHIVPSYRRTENRLILLDYDGTVMPENSIDRTPSSEVISVLNRLCEDPKNRVFIVSGRGKDELSRWFAPCEKLGIAAEHGYFTRWSRDAPWEASALAADLDWKNTAEPVMRLYTEATDGSYIEHKESGMVWHHDEADPDFGSCQAKELLDHLENVLANEPVVVKRGQHIVEVNPQGISKGVVVDSLLSSMVRTGKPPDFVLCIGDDRSDEDMFESIVCPASSSGGVRLPASSEVFACTVGKKPSMAKYYLDDTVDVVKMLDGLASAPSPPRRPGPAAAVQLRVSFEGSL

SEQ ID NO: 358151 - protein, 689 aa, Zea mays
  Clone ID: MRT4577_89801C.1.pep
GPWPPALCSRFLSANRAFADRTTEVLCPDEDLVWIHDYHLLALPTFLRKRFPRAKVGFFLHSPFPSSEIFRTIPVRDDLVRALLNADLVGFHTFDYARHFLTACSRLLGLDYQSKRGYIGIEYYGRTVTVKILPVGIDMGQLRSVVSAPETEDAVRRVTEAYKGRRLMVGVDDVDLFKGIGLKFLAMEQLLVEHRELRGHAVLVQIANPARSEGRDVQGVQDEARAISARVNARFGTPGYTPIVLIDAPVTPQEKAAYYAAAECCVVSAVRDGLNRIPYIYTVCRQESTALGDDSPKRSVIVLSEFVGCSPSLSGAIRVNPWSVESVAEAMNAALRMPEAEQRLRHEKHYKYVSTHDVAYWARSFDSDLQRACKDHFSRRHWGIGFGMSFKVVALGPNFRRLSVEHIVPSYRRTENRLILLDYDGTVMPENSIDRTPSSEVISVLNRLCEDPKNRVFIVSGRGKDELSRWFAPCEKLGIAAEHGYLTRWSRDAPWDTSGLAADLDWKNTAEPVMRLYTEATDGSYIEHKESGMVWHHDEADPDFGSCQAKELLDHLENVLANEPVVVKRGQHIVEVNPQGISKGVVVDSLLSSMVRTGKPPDFVLCIGDDRSDEDMFESIVCPASNSGVKLPASSEVFACTVGKKPSMARYYLDDTVDVVKMLDGLASAPSQQRPRPAVQLRVSFEGSL

SEQ ID NO: 358152 - protein, 196 aa, Zea mays
  unsure (1)..(196): unsure at all Xaa locations
  Clone ID: MRT4577_89802C.1.pep
MGGRQIRPARVFQTVTEELNHNILGKKSVPTPPWYNIMQKVPPAETLVRNVTPLIKPSRESTTKIKNIFRPLPIRYLEDELRGIFYRDHPWELARPRVILELDGKDYQHCDWSKGLKQPNTPLTGESVVQYWMWLLENGKETVXNXEKEKGKWXRVRAYDHVXHQFYRLRXEEQIEKRVAQEEARYVXAYFQPRID

SEQ ID NO: 358153 - protein, 77 aa, Zea mays
  unsure (1)..(77): unsure at all Xaa locations
  Clone ID: MRT4577_89803C.1.pep
PDDILLVFDTAPMIVCSIGHTSYLGWQEGQRARALIVDPELDRCKQHDMIRVXRNFSCRRLIKLFTGYNWVALTRHL

SEQ ID NO: 358154 - protein, 40 aa, Zea mays
  Clone ID: MRT4577_89804C.1.pep
CPDRSNESSWHPLRLHSCYPERSSNDWIKKAKAFCGCAPG

SEQ ID NO: 358155 - protein, 84 aa, Zea mays
  unsure (1)..(84): unsure at all Xaa locations
  Clone ID: MRT4577_89805C.1.pep
LSDYQCSKRSCLLLGACEASCYANPVGRPRRRTSKGLGDGSGXDGSVRAIGSASGGGGGFLFLAGVRRKARRVDGRVGRAPAGS

SEQ ID NO: 358156 - protein, 705 aa, Zea mays
  Clone ID: MRT4577_89806C.1.pep
MGGPLGAIIGRYPSAAGGDEQLGGGAGGGIIRHDRRCRDIAVLVLFAAFWVAMIVNSSFGFNQGNPLRLTYELDYKGNVCGDKHGNPNLQELDVRYWMNPNQVYQSGLKNSKVNLADAKAICLMECPNPAVDGLNYICDYPEGNIDLSVDDWINRDYDYYEFLTPDMKNSSLQLQGPCYPIIFPTVNVYWSCQFIARASNVSLKHWHETGGVSIDENILIDKTVHKAIDSRSAVLKRYIADIGKSWPVFIVCGGILPVFLSVIWLLMIRYFVAAMTWITVVLFNALVISVTMFFYIKAGWIGNDPLTVVIGESDPYVHISGREISHLHTITILMTAVMIIAFLSSIAIVRRILIATPVLKVAAKVIGEVQALIAFPLLPCLILSILYMFWFSATLHLFSSGQVVRNDCNTDCCSYDLKLGKVNCDNCCGYSIHYTPHISIAILFHLFGCYWATQFILACSSTVVAGSVASYYWARGEISHDIPFLTVVSSLKRLMRYSLGSVALGSLVVSVVEWVRFILECLRRKLKLVDSARESCFGKATSSSSECCLGCIDWTLKSVNRNAYIMIAITGKGFFKASVLATGLIMKNILRIGKVNVIGDVILFLGKLCVSLFCALFAFLMLDTHKYKSAHNKISSPVIPVLVTWALGYVVAKLFFAVVEMSIDTIILSFCQDAEEHQGNAQYAPPALMETLDEQGELQRLTQGP

SEQ ID NO: 358157 - protein, 60 aa, Zea mays
  Clone ID: MRT4577_89807C.1.pep
ELPANSSKYSISSACSFILHQVMDGIRTILCNDGIRAHLLILLNIPWVQLVTLVRSMDII

SEQ ID NO: 358158 - protein, 69 aa, Zea mays
  Clone ID: MRT4577_89808C.1.pep
TVIPVLVTWALGYVVAKLFFAVVEMSIDPIILSFCQDPQEHQGNAQYAPPALMETLDEQGELQRLTQGP

SEQ ID NO: 358159 - protein, 311 aa, Zea mays
  unsure (1)..(311): unsure at all Xaa locations
  Clone ID: MRT4577_89809C.1.pep
MGGPLGAIIGRYPSAAGGDEQLGGGAGGGIIRHDRRCRDIAVLVLFAAFWVAMIVNSSFGFNQGNPLRLTYELDYKGNVCGDKHGNPNLQELDVRYWMNPNQVYQSGLKNSKVNLADAKAICLMECPNPAVDGLNYICDYPEGNIDLSVDDWINRDYDYYEFLTPDMKNSSLQLQGPCYPIIFPTVNGNINPAVILKVIRXXSVAXLFILKFILXGDKHFNFLPXVYWSCQXIARASNVSLXXWHETGGVSIDENILIDKTVHKAIDSRSAVLKRYIADIGKSWPVFIVCGGILPVFLSVIWLLMIRYFVA

SEQ ID NO: 358160 - protein, 88 aa, Zea mays
  Clone ID: MRT4577_8980C.1.pep
GIGDVCIYPPVSSTLTSYVFSDDVTLKIIMTNMTRAKCNAQHFVRSLHAVSDIKSAWMAWEKYHLLAIPSINQAIHVFLCQSSVNSWR

SEQ ID NO: 358161 - protein, 79 aa, Zea mays
  Clone ID: MRT4577_89810C.1.pep
LKFLTINPCFSLLHHQIKHPPPYPFLHILYLTLHFHTPLIFTLTPTLKSLSLPTLIYTLKIPLSPSFPLIKKIFLQPPF

SEQ ID NO: 358162 - protein, 60 aa, Zea mays
  Clone ID: MRT4577_89811C.1.pep
QNSTQRTHSYKQIFNNSLIITPHKTSSLLTHSNLYQISNYTLHIKSYIKNPILNNHNIKT

SEQ ID NO: 358163 - protein, 88 aa, Zea mays
  Clone ID: MRT4577_89812C.1.pep
LGISSRPGFLCEVPSRGSGRISQPLGRLQGNLLRPLPKGSYSRGVFHPRVEPQSPLAKGHQDMKSAQKMSMSAFVYTCALVKENLCLY

SEQ ID NO: 358164 - protein, 50 aa, Zea mays
  Clone ID: MRT4577_89813C.1.pep
GPAHKKRVGGSKVHFFCFFPPREVLEAHAIVPGLITICSNWHHPCQASNK

SEQ ID NO: 358165 - protein, 42 aa, Zea mays
  unsure (1)..(42): unsure at all Xaa locations
  Clone ID: MRT4577_89814C.1.pep
MPKQIHEIKDFLLTARTNDARSVKIKRSNDVFKFKXVRCPKY

SEQ ID NO: 358166 - protein, 701 aa, Zea mays
  Clone ID: MRT4577_89815C.1.pep
DLKKLVPCTIEEFAKRIAGAEESTSSESSETPESPEEEKRPFQRGDRVKYVGTSAVVEADQRIILGKIPTQDGSRNAYTFISGRGLSNGQRGEVYEVNGDQVAVIFDPSIEKSHNAHEDVTNKEENGSATVYWVDSQDIAHDHDTESDDWHIALEALCEVLPSLLPIIVYFPDSSQWLSRAVSKSDRREFVQRVEKMFDRLTGPVVLICGQNLLAAAPKDKEQPALMFHNLSRLSSLPSPLKRLVGGLKGERYSRSSDISKLFTNSLTVPLPEEDEQLQLFNNQIEEDRKIMISRHNLVKLHKVLEEHDLSCVELLDVKLDGIVLTKQKAEKAVGWARNHYLSSTTLPSIKGDRLIIPRESLDISIERLKEQGITAKKSSQNLKVLAKDEYERNFISAVVPPNEIGVKFDDIGALEDVKRTLDELVTLPMRRPELFSRGNLLRPCKGVLLFGPPGTGKTLLAKALATEAGANFISITGSTLTSKWFGDAEKLTKALFSFATRLAPVIIFVDEVDSLLGARGGAFEHEATRRMRNEFMAAWDGLRSKENQRILILGATNRPFDLDDAVIRRLPRRIYVDLPDAQNRMKILKILLAKEKLESDFKFDELANATEGYSGSDLKNLCVAAAYRPVHELLEEEKKGRVSNENSYLRPLCLDDFIQAKAKVSSSVSYDATSMNELRKWNEQYGEGGSRTKSPFGFGN

SEQ ID NO: 358167 - protein, 67 aa, Zea mays
  Clone ID: MRT4577_89816C.1.pep
ITKASLAINKLHFVTLGDYRTCNISQTTTHLRRRHRWSSGFTHPKEILVTNRPTWGSKICSLLDNIR

SEQ ID NO: 358168 - protein, 139 aa, Zea mays
  unsure (1)..(139): unsure at all Xaa locations
  Clone ID: MRT4577_89817C.1.pep
GPVLEGVQSWAIGSGRRGGGSHGKGGGGGGXGAGGNSGQRGGXGGEGKKARGAKRGSKKXKSGKPKGRNKGEKPGEPGGXRGGKKTGKGGGRXGTKKGGKEGGEGRGKRGGXERPGRREKEKGGQAGLPQGAKKGGEGG

SEQ ID NO: 358169 - protein, 164 aa, Zea mays
  Clone ID: MRT4577_89818C.1.pep
MKVDREMEILLNEIPLLHHVGLLGGSEAGADDDADLSFLIHELAAMGLVDGDDELPAPGAATGYGFPTKGENLVAMHSFSMASHYAHMRSLFVPVTFDDAAAADGWDIRCSPPPYVPPPSPATPRARCKSVRRKNGSGDDDEPQEVRSRPGGQVGTAKTLARPA

SEQ ID NO: 358170 - protein, 70 aa, Zea mays
  Clone ID: MRT4577_89819C.1.pep
VSTFASGERSSLVWNRRLSCRIGWSSGGPEAGSAAGGLMARGGWVKTGLDLGPGHGSSCGWREGKRNSSE

SEQ ID NO: 358171 - protein, 97 aa, Zea mays
  unsure (1)..(97): unsure at all Xaa locations
  Clone ID: MRT4577_8981C.1.pep
MISSSDVRAKCIPLDPQQHMLGRLSSILAKELLNGYNEAGEHXEEICMARELHRXNMKYLRFLRERMISHMAQGLIYFLGPTKMLMRIMRGMIPHHT

SEQ ID NO: 358172 - protein, 92 aa, Zea mays
  unsure (1)..(92): unsure at all Xaa locations
  Clone ID: MRT4577_89820C.1.pep
SVVVVTCVASRARNHXSTVSHRRAPPRRPLPPHRRALRCPRRLSRARHRVGMNRRRERDQRNIASQAPSRNSADRDPDMKKRNQMNHLLLGA

SEQ ID NO: 358173 - protein, 63 aa, Zea mays
  Clone ID: MRT4577_89821C.1.pep
QNGVEICSFTGGRLRKLILNIPATRHGTMWFSITPTRKINCPPVLVVGDLIRNCPPLSLFLAS

SEQ ID NO: 358174 - protein, 108 aa, Zea mays
  Clone ID: MRT4577_89822C.1.pep
KKTPPRFFPQPLKFFSKLPKENFFPPFKPFFFHPPLLLYSFSNQNNGVSTKWKIWSNFKNPSFYTPQLKKKIAPKNYPNPPVIFPLPFKSCSVIQCFYFREPPKKWLR

SEQ ID NO: 358175 - protein, 145 aa, Zea mays
  Clone ID: MRT4577_89823C.1.pep
MSRNWGQNWQFSAILVGQALSFRVASTAPRTCPSWNAAPRAWRFGQTLEGKTFRVFMLIQAASGPARRNQSFQGLVSPCYYHEKPATSRRYKAPVTAWWEVSLNAPFRVTPSRPGSSRFKSSSQKKRNLFLFLKKKKKKKKKPLE

SEQ ID NO: 358176 - protein, 161 aa, Zea mays
  unsure (1)..(161): unsure at all Xaa locations
  Clone ID: MRT4577_89824C.1.pep
ENGFHQVVFSVLLPVVVSMLVATTTMADHRGQVVYTPGQLCAAGRGYPMYPLPRCRALAKRQCAGGAVDEQVRQDCCRQLAAIDDSFCRCPALSHMLVGMYKELGAPAKGQPMDEVFPGCRRGDMKRVAASLPAFCNVDIPIGXGGVCYWLSYPMNPATGH

SEQ ID NO: 358177 - protein, 38 aa, Zea mays
  Clone ID: MRT4577_89825C.1.pep
RNRPCRLTTSGRPTCGGKSGPPAPHNRNTSPTRGRTGG

SEQ ID NO: 358178 - protein, 78 aa, Zea mays
  Clone ID: MRT4577_89826C.1.pep
TLVYLFSDGYVFLWQRVPSMSYGTRSRYRYCFCARYGGGAAALQRRAWHLLNYDRALHSHNRWVRLLCGLGTRAGGVA

SEQ ID NO: 358179 - protein, 154 aa, Zea mays
  Clone ID: MRT4577_89827C.1.pep
MARRLFCATRTLLLPAPAPVPAPTSASSAAVAEASASLLPLLPCKRRKKLLRKLNSPRVAPIEPEAARRVPALDAVLDRDTAFRFLHRARSFLASLPPPHRIPLAEAGKLYRELGFPRGRKVSRSATRHPLLFHLPVVDSVPHLALTPFMCSLL

SEQ ID NO: 358180 - protein, 156 aa, Zea mays
  unsure (1)..(156): unsure at all Xaa locations
  Clone ID: MRT4577_89828C.1.pep
MASLSSAAVTAPSFAAPAAARAEVRRRSFTVRASLRKDTGTAAGAMAASALLAGGAMAQEVLLGARDGALDFEPSQITVKAVDTITFQNNADFPHNDDFHEDEVPRGDDATKXSQEXYLNAPGETYSDTLTERXTYGXYYWEPHQRTGMAVKITVD

SEQ ID NO: 358181 - protein, 122 aa, Zea mays
  Clone ID: MRT4577_89829C.1.pep
MKPLDEEVHARDMQAPWFSIPLTKLGLKKKETKLMGTTNNQILNLKHDEILYNYFQGAQGPIEGAEKTFLGPVIYSTTYCMNCSGGPSRRAGGASAPLRAASPTYRITKYLEALMTNCEIEF

SEQ ID NO: 358182 - protein, 112 aa, Zea mays
  unsure (1)..(112): unsure at all Xaa locations
  Clone ID: MRT4577_8982C.1.pep
TPQPYFMHVLEGRDLIWTAAXPTDCGHAPPPAPYLDAGPWLTDLLPKNGXRCLARLLVGTADAVTKYDSSAVQLTVFCPGDEASEDLNIYFNNLTVVLQVALLLYHGVEQHY

SEQ ID NO: 358183 - protein, 46 aa, Zea mays
  Clone ID: MRT4577_89830C.1.pep
QVSRLKSGHSAQRHQCQLAHSSGAAGLALDARSSYGASDWTAQGGN

SEQ ID NO: 358184 - protein, 405 aa, Zea mays
  Clone ID: MRT4577_89831C.1.pep
MERVFSVEEIPNPYWVPPHPQSAAAGAVAAPAGEAAGLMNRCPSEWYFQKFLEEAVLDSPVPVAGASRGSVGAGVEAAESKTPGAAAPAAASSSVVDPVEYNAILKQKLEKDLAAVALWRASGAAPPDHSPAGSSLPSVDVPHAGPLKPIGGTGSLVQNKLPGAPGGGSSPHVLQNADIPVKQTTSSSSREQSDDDDMEGDAETTGNGNPVQHRLQRRKQSNRESARRSRSRKAAHLNELEAQVAQLRVENSSLLRRLADVNQKFNEAAVDNRVLKADVETLRAKVKMAEDSVKRVTGMNTLFPAVSDMSSLSMPFNGSPSDSASDAAVPIQDDLNSYFANPSEIGGSNGYMPDIASSVQEDDDFVNGAQVAGKMGSTDSLQRVASLEHLQKRMCGGPASSGSTS

SEQ ID NO: 358185 - protein, 73 aa, Zea mays
  Clone ID: MRT4577_89832C.1.pep
KKVSCRLYSSSAAFAASAEGVLSPSSASDGAGAELVHAPVTSFWVYMDMRKHLVSEGGHTIDGALAEGGAALP

SEQ ID NO: 358186 - protein, 145 aa, Zea mays
  Clone ID: MRT4577_89833C.1.pep
LERFSAFLDEDYCSWSPCIQGYHWRCVCSADPAAGTASFTVSLPYSSTREPLNASFKLSLLDRGGLPVPSRTRATLFQNCLIQQMWQWECPGFLTRDDLERHEYYLDSDGGRCFRVRCDIAIKPFAAATAGDGDPFVAGPPFDDL

SEQ ID NO: 358187 - protein, 69 aa, Zea mays
  unsure (1)..(69): unsure at all Xaa locations
  Clone ID: MRT4577_89834C.1.pep
MDILTGYARLIIASXLEHTLVDHHDXDNLFLLTYVSLSLSLYCQDYLLLFLTVTSPTLXKQLSKENPIL

SEQ ID NO: 358188 - protein, 48 aa, Zea mays
  Clone ID: MRT4577_89835C.1.pep
KQQNSISFYSSYLDGGPAYKLMGPVLHKAGRPHAPSSLFMGHIIRVID

SEQ ID NO: 358189 - protein, 776 aa, Zea mays
  unsure (1)..(776): unsure at all Xaa locations
  Clone ID: MRT4577_89836C.1.pep
MLRAAAAAAAIFPARVAAAPAAAAAEELRYPLLRVIGTLRGSRGSVLLGRRVRFCSNSSASDSEVAAADAEANAEDATAAEEEAGSKASSAIVPTSTNIDDCLSVIALPLPHRPLFPGFYMPINVKDQKLLQALIENRKRSAPYAGAFLVKDEEGTDPNIVTGSDSAKSIDDLKGKDLLKRLHEVGTLAQITSIQGDHVVLLGHRRLRITEMVEEDPLTVKVDHLKEKPYNKDDDVMKATSFEVISTLREVLRTSSLWKDHVQTYTQHIGDFNYQRLADFGAAISGANKLLCQEVLEELDVYKRLKLTLELVKKEMEISKLQQSIAKAIEEKISGDQRRYLLNEQLKAIKKVEVTDTALLALIENYCREAGVRNLQKQIEKIYRKVCKIXCILXPPLSGKGKMLADXLIMVKQPQGIGMXKRLLLVLESMPPLISYARQYNDVIQSLLVDIIILTFKXALQTLYXQIALQLVRQGVSNEPDHESVSASVTEESGNGDNTTTKDEILKDPAVEDASVTNNVTNPASEEANEENLTSEAAKEDSTSKGNKGTDGAADKAIEKVVVDSSNLGDFVGKPVFQAERIYEHTPVGVVMGLAWTAMGGSTLYIETKKVEEREGKGALVLTGQLGDVMKESAQIAHTVGRAVLLEKEPDNHFFANSKVHLHVPAGSTPKDGPSAGCTMITSMLSLAMGKPVKKDLAMTGEVTLTGRILPIGGVKEKTIAARRSAIKTLIFPAANKRDFDELASNVKEGLEVHFVDTYSEIYDLAFQSDAGTETS

SEQ ID NO: 358190 - protein, 1041 aa, Zea mays
  Clone ID: MRT4577_89837C.1.pep
MIDSTSKGIKGTDGAADKAIEKVVVDSSNLGDFVGKPVFQAERIYEHTPVGVVMGLARTVRRLGETLESSAEPPSSTMLRAAVAAAEELRSPLLRVIGTLRDGRGSVLLGRRVRFCSNSSASDTEAAVAEAEAKAEDASAAEGEADSKASSAIVPTSTNIDDCLSVIALPLPHRPLFPGFYMPINVKDQKLLQALIENRKRSAPYAGAFLVKDEEGTDPNIVTGSDSAKSIDDLKGKDLLKRLHEVGTLAQITSIQGDHVVLLGHRRLRITEMVEEDPLTVKVDHLKEKPYNKDDDVMKATSFEVISTLREVLRTSSLWKDHVQTYTQHIGDFNYQRLADFGAAISGANKLLCQEVLEELDVYKRLKLTLELVKKEMEISKLQQSIAKAIEEKISGDQRRYLLNEQLKAIKKELGLETDDKTALSAKFRERIESKKDKCPPHVLQVIEEELTKLQLLEASSSEFSVTRNYLDWLTVLPWGNYSDENFDVHHAQKILDEDHYGLSDVKERILEFIAVGKLRGTSQGKIICLSGPPGVGKTSIGRSIARALNRQFYRFSVGGLADVAEIKGHRRTYVGAMPGKMVQCLKSVGTANPLVLIDEIDKLGKGHSGDPASALLELLDPEQNVNFLDHYLDVPIDLSKVLFVCTANVIEMIPNPLLDRMEIIAIAGYITDEKMHIARDYLEKNTRQACGIKPEQVEVTDTALLALIENYCREAGVRNLQKQIEKIYRKIALQLVRQGVSNEPDHESVSASVTEESGNGDNTTTKDEILKDPVVEDASVPNNVTNPASEEANEENLTNEAAKEDSTSKGNKGTDGAADKAIEKVVVDSSNLGDFVGKPVFQAERIYEHTPVGVVMGLAWTAMGGSTLYIETKKVEEREGKGALVLTGQLGDVMKESAQIAHTVGRAVLLEKEPDNHFFANSKVHLHVPAGSTPKDGPSAGCTMITSMLSLAMGKPVKKDLAMTGEVTLTGRILPIGGVKEKTIAARRSAIKTLIFPAANKRDFDELASNVKEGLEVHFVDTYSEIYDLAFQSDAGTETS

SEQ ID NO: 358191 - protein, 612 aa, Zea mays
  Clone ID: MRT4577_89838C.1.pep
SKKDRCPSHVLQVIEEELTKLQLLEASSSEFSVTRNYLDWLTVLPWGNYSDENFDVHRAQKILDEDHYGLSDVKERILEFIAVGKLRGTSQGKIICLSGPPGVGKTSIGRSIARALNRQFYRFSVGGLADVAEIKGHRRTYVGAMPGKMVQCLKSVGTANPLVLIDEIDKLGKGHSGDPASALLELLDPEQNVNFLDHYLDVPIDLSKVLFVCTANVIETIPNPLLDRMEIIAIAGYITDEKMHIARDYLEKNTRQACGIKPEQVEVTDAALLALIENYCREAGVRNLQKHIEKIYRKIALQLVRQGVSNEPDQESLGVTVNEESNSGDSITAKDEIVKDPAVEDASVANNVTNPASEEANEVNLTTEAPKEDSTSKGNKKTDGVAEDAADKATEKVVVDSSNLGDFVGKPVFQAERIYEQTPVGVVMGLAWTAMGGSTLYIEKTKVEEREGKGDLVLTGQLGDVMKESAQIAHTVGRAVLLEKEPDNHFFANSKVHLHVPAGSTPKDGPSAGCTMITSMLSLAMGKPVKKDLAMTGEVTLTGRILPIGGVKEKTIAARRSAIKTLIFPAANKRDFDELASNVKEGLEVHFVDTYSEIYDLAFQSDAGTEMI

SEQ ID NO: 358192 - protein, 116 aa, Zea mays
  Clone ID: MRT4577_89839C.1.pep
PRVRGPSAGCTMITSMLSLAMGMPVKKDLAMTGEVTLTGRILPIGGVKEKTIAARRSAIKTLIFPAANKRDFDELASNVKEGLEVHFVDTYGEIYDLAFQSDAGTETSLDDLALQD

SEQ ID NO: 358193 - protein, 494 aa, Zea mays
  Clone ID: MRT4577_8983C.1.pep
MDTSHHYHPWLNFSLAHHCDLEEEERGAAAELAAIAGAAPPPKLEDFLGGGVATGGPEAVAPAEMYDSDLKFIAAAGFLGGSAAAAATSPLSSLDQAGSKLALPAAAAAPAPEQRKAVDSFGQRTSIYRGVTRHRWTGRYEAHLWDNSCRREGQSRKGRQVYLGGYDKEEKAARAYDLAALKYWGSSTTTNFPVAEYEKEVEEMKNMTRQEFVASLRRKSSGFSRGASIYRGVTRHHQHGRWQARIGRVAGNKDLYLGTFSTEEEAAEAYDIAAIKFRGLNAVTNFEISRYNVETIMSSNLPVASMSSSAAAAAGGRSSKALESPPSGSLDGGGGMPVVEASTAPPLFIPVKYDQQQQEYLSMLALQQHHQQQQAGNLLQGPLVGFGGLYSSGVNLDFANSHGTAAPSSMAHHCYANGTASASHEHQHQHQMQQGGENETQPQPQQSSSSCSSLPFATPVAFNGSYESSITAAGPFGYSYPNVAAFQTPIYGME

SEQ ID NO: 358194 - protein, 126 aa, Zea mays
  Clone ID: MRT4577_89840C.1.pep
IEPSQGAPSAAPRTPACSSDGHCASRSALAAAACDCLDTRPYVTYVAAPAGLREGTTANTVNDALVIGHAAVMNVYATSYLLQMVDATHKCFYSHAHPPDDDVTDSHEMLFERRMTSDVHGCVDAI

SEQ ID NO: 358195 - protein, 99 aa, Zea mays
  unsure (1)..(99): unsure at all Xaa locations
  Clone ID: MRT4577_89841C.1.pep
GSIXVRVRLQWTRHGAERRRPKRSPHEDCKLCVNALPPLRRSSISRHASTNIARDPQTSANTLKTSLLLIGNLHTTDANTSTAGQDAPVHHILLCPCTR

SEQ ID NO: 358196 - protein, 57 aa, Zea mays
  Clone ID: MRT4577_89842C.1.pep
MEAGSKKLQACILTLLLVLSTAVTPILSLSVPDDEVPCDCNKPKAPKPSYPPMTKPS

SEQ ID NO: 358197 - protein, 127 aa, Zea mays
  unsure (1)..(127): unsure at all Xaa locations
  Clone ID: MRT4577_89843C.1.pep
TLEACRDELWHPNCNTNNIYITAGHDSIISYCKVSKQRADCVDSEAGEVLSMXNNMSDIFTGKCVAKISPADPTLTIAPRRRGDDSRSTIRSTVPEALEDITALFYDEDRNEIYTGNSKGLVHVWSN

SEQ ID NO: 358198 - protein, 114 aa, Zea mays
  unsure (1)..(114): unsure at all Xaa locations
  Clone ID: MRT4577_89844C.1.pep
CRVFKKKKKKKKKKKKKKKKKKKKKKKKKKKKXKKXXXXKKKKKKKKKKGGALLGFVLVPGVCGFLFFFWGPLILFRGPGFTPGGWEKPWGSPLLFGWGHSPFSRLGVFGEGPP

SEQ ID NO: 358199 - protein, 109 aa, Zea mays
  unsure (1)..(109): unsure at all Xaa locations
  Clone ID: MRT4577_89845C.1.pep
MASAGLKPGVPVILRELEPSSEMFKQGASLRVTGSLQSFDVESATATIQDGSPXMLARSNNAPPIVDGLQAILLARIGRNVDGLDMNLYQQALLIRRQHEAKLLSSRRA

SEQ ID NO: 358200 - protein, 125 aa, Zea mays
  Clone ID: MRT4577_89846C.1.pep
MASAGLKPGVPVILRELEPSSEMFKQGASLRVTGSLQSFDVESATATIQDGSVSLKVDTQHLRDVSFRTNSVYQFIGELQIREVDDAILLARIGRNVDGLDMNLYQQALLIRRQHEAKLLSSRRA

SEQ ID NO: 358201 - protein, 57 aa, Zea mays
  Clone ID: MRT4577_89847C.1.pep
GLSLTILVECYRGHFRKSVTKMNLFALYFKNVMDRVKLGGFQINWVVGKILFSSWAY

SEQ ID NO: 358202 - protein, 75 aa, Zea mays
  Clone ID: MRT4577_89848C.1.pep
SLIKFVKNRSLPLMQHHHSCLCYVGDYVVVLHCICGSKEVIKSFGLVGREDYSDRCGCTDREANKVSEIGWNSLQ

SEQ ID NO: 358203 - protein, 82 aa, Zea mays
  unsure (1)..(82): unsure at all Xaa locations
  Clone ID: MRT4577_89849C.1.pep
RAPPLTIIGRGTSXRPPPWFQERCLXXALAAXRRRRXPRRRLAXXRAXFEHLLLFAFFIXPTRSRVFFGGGARXEYYGRXLI

SEQ ID NO: 358204 - protein, 43 aa, Zea mays
  Clone ID: MRT4577_8984C.1.pep
KIKNLPPYTCLMGSINTPQKKTTSYLGTNKTALPLSMPSFPTA

SEQ ID NO: 358205 - protein, 72 aa, Zea mays
  unsure (1)..(72): unsure at all Xaa locations
  Clone ID: MRT4577_89850C.1.pep
PPPPCWGVFSRIAPKFDLMYPKRAFVPWYVGKGMEKGEFFXARGDLPAPQKASQEVGPEFYEGQEGFYGFGS

SEQ ID NO: 358206 - protein, 52 aa, Zea mays
  Clone ID: MRT4577_89851C.1.pep
IKQCIYPKKKKKKKKKKKKKKKKKKKKKKKKKKKKKKKKKKKKKKKKRGGPF

SEQ ID NO: 358207 - protein, 66 aa, Zea mays
  unsure (1)..(66): unsure at all Xaa locations
  Clone ID: MRT4577_89852C.1.pep
RTVLVLIHMLHLNFPNSFFHPRIISKLFFDPSYIITLXSLSILPDNTLLHLPVHLTIFFPVNVHIY

SEQ ID NO: 358208 - protein, 58 aa, Zea mays
  Clone ID: MRT4577_89853C.1.pep
LNKQKEYQNLKEKTKKLPNSTKNHPSYKRIVPKEGIPITKNPSKKENQRIKFKIMFPS

SEQ ID NO: 358209 - protein, 89 aa, Zea mays
  unsure (1)..(89): unsure at all Xaa locations
  Clone ID: MRT4577_89854C.1.pep
RTISLLSQGYNRWDAHFKDCIVTVXGIHAIATARRDMEHPFLGTKLYATXNVRVGVDAHLHYTYVMGGCYGTTHDANVSLEALQPVCGL

SEQ ID NO: 358210 - protein, 92 aa, Zea mays
  unsure (1)..(92): unsure at all Xaa locations
  Clone ID: MRT4577_89855C.1.pep
EIMLKLVXGRYIDQVLLELKEYATEVDVDYVRKAFPASGICAIKLDRAAERCLIVLLELIKIKVNYCCHEAIIVIKDIIRRYPNTYDVYYRL

SEQ ID NO: 358211 - protein, 92 aa, Zea mays
  Clone ID: MRT4577_89856C.1.pep
NGCQFIACTTWYVAFQVCMAFTVSEWTSIVSAAAPDRLRGHRVRESVAIDLHGFPCECKLWQSHGRLPQQHAPVSYPPAPADLSADMRTYNR

SEQ ID NO: 358212 - protein, 56 aa, Zea mays
  Clone ID: MRT4577_89857C.1.pep
EMVLVLQLDNLILTVEWKNLYQGCTRHSLKSVSKTLLKQMIHTLLPAIPSIIQHQR

SEQ ID NO: 358213 - protein, 48 aa, Zea mays
  Clone ID: MRT4577_89858C.1.pep
SKKSAALFKSCYPVGFNLVEVLAWSSFVHIIANYILASTSNVYIPSFF

SEQ ID NO: 358214 - protein, 117 aa, Zea mays
  unsure (1)..(117): unsure at all Xaa locations
  Clone ID: MRT4577_89859C.1.pep
MASAPNPSFRPEEVRSPPDLELPTTALYKFKVILCHLSPKMDKNQKIKHLLVGIDKVPSEGIKVAHLPXICNGPYSNDSFPDYAEDIVGDDDAAPSCLMMYEADHSLLRTLVEGDIT

SEQ ID NO: 358215 - protein, 134 aa, Zea mays
  Clone ID: MRT4577_8985C.1.pep
MAYSSCLNRSLKPNKLLLRRIDGAIQVRSHVDRTFYSLVGSGRSGGGPPRLLSSRESIHPLSVYGELSLEHRLRFVLNGKMEHLTTHLHRPRTKKKNLTFWGDGGIVPFEPFFHAFPGGLEKAVINRTSLILPS

SEQ ID NO: 358216 - protein, 51 aa, Zea mays
  Clone ID: MRT4577_89860C.1.pep
IWSSYKYVVVANSSTFHRTIRPYTDSLTTIYIHLGPGLVNLGDQGDRLGRH

SEQ ID NO: 358217 - protein, 58 aa, Zea mays
  Clone ID: MRT4577_89861C.1.pep
RVEQAGALCSFFFFLYSRDSRGACLGLSLGSHRVDRVYTALRAPPVSLGQKVQNFFYF

SEQ ID NO: 358218 - protein, 46 aa, Zea mays
  Clone ID: MRT4577_89862C.1.pep
IPFTQGHTSDINPHASNLNQINNLWLTPPKPTWVEVSPSLNYKMVD

SEQ ID NO: 358219 - protein, 79 aa, Zea mays
  Clone ID: MRT4577_89863C.1.pep
FSRRAGRTSFPPLRESRPYVSPYSQSSGVPHTSQHSDPHRERRRYLETTNARVSGDEHRRTKERHPDHIGDDGTEGGNA

SEQ ID NO: 358220 - protein, 28 aa, Zea mays
  Clone ID: MRT4577_89864C.1.pep
KPSKFISVDMFIHRQANQLNDSPLLERR

SEQ ID NO: 358221 - protein, 74 aa, Zea mays
  Clone ID: MRT4577_89865C.1.pep
VWLPLSLGGVFTGRQELLPPRRLCLCDLVPDHVVFLRGQQPSHTDGYSGEQKLGLLLENKNKQVKINNKKKTPQ

SEQ ID NO: 358222 - protein, 136 aa, Zea mays
  unsure (1)..(136): unsure at all Xaa locations
  Clone ID: MRT4577_89866C.1.pep
LEENARKRGHISYIQLVQGKIAKRVSRAHVSVAPPSPIYTPGKHASRFKPPHQIPFGXEKKQRGMTPTLSCRQWVQQVQQLAFPSRTKRFLFNRPGMLSLVAIAPVWVWVGLIIKSLPQVGGMRPFLWDKKRWGPN

SEQ ID NO: 358223 - protein, 77 aa, Zea mays
  Clone ID: MRT4577_89867C.1.pep
RNVALFCTYTLGFRNEYQNLLLAIMLSATFNILIWQWCLIRFGKKTAVYVGISSAVPRLIFVALMKSNLIVTYVVAI

SEQ ID NO: 358224 - protein, 146 aa, Zea mays
  Clone ID: MRT4577_89868C.1.pep
VAVCRSLSRSYNCKRGGPNKQTNQKERDIAEHDLNSKRWAVRRWPWPAAAAGSSPRQRRPARAGGAACRAASTGTTALRPPRQRPSISPVFRAQRDGPCSSLCFALDHCARAGPALIWEVEEEVLLRFCRRRKCRCVGALELEFPR

SEQ ID NO: 358225 - protein, 106 aa, Zea mays
  Clone ID: MRT4577_89869C.1.pep
MDAAAEASTPSSPSKLRDKLRTTVCCCFGVERARWRRRRGAATAAGEFRYDPLSYALNFDEGEDDDAYADPAAAFRYRNFNARLPPSPAAAAAVRTQRQQRATGTA

SEQ ID NO: 358226 - protein, 104 aa, Zea mays
  Clone ID: MRT4577_8986C.1.pep
VVDRGATSCAAAGAIYTLLACFTGFQCHWIYSCTYRSKMRAQLGLPDVGCCDCCVHFCCEPCALCQQYRELRARGLDPALGWDVNAQKAGAGMMYPPAAQGMGR

SEQ ID NO: 358227 - protein, 58 aa, Zea mays
  Clone ID: MRT4577_89870C.1.pep
LVLALKQHLNNYAQILTRAQELYPAPKTSKTFVAILELIAIGLHKRFSKLTTNTYTYW

SEQ ID NO: 358228 - protein, 101 aa, Zea mays
  unsure (1)..(101): unsure at all Xaa locations
  Clone ID: MRT4577_89871C.1.pep
RSAVLRRSLTYRESHMSTDRSLAATLLLFLRAARTYYPHDMSLSARRLDGVRALRREGALCTRFPPLRLPXVEGGAXLMLNXQLRPFAPNSTCWSKMYLLI

SEQ ID NO: 358229 - protein, 67 aa, Zea mays
  unsure (1)..(67): unsure at all Xaa locations
  Clone ID: MRT4577_89872C.1.pep
RVLAPLPIGLXVVMVHLATIRATGTGMNPARNLSTAVVYNKDKTWYDHVRAAINVSVVAMPARDMRM

SEQ ID NO: 358230 - protein, 60 aa, Zea mays
  Clone ID: MRT4577_89873C.1.pep
TPSKREWDRGLFSQIKKNQKRGRNGSGNSLWVGAADGAPELVKKHTMAGKIKPHYHGHGV

SEQ ID NO: 358231 - protein, 318 aa, Zea mays
  Clone ID: MRT4577_89875C.1.pep
MADADLTPNHSLLLKMPAASAHAHSPSLSSLLLYGQESHGEAAPANANANAAAATVEDAASLETSSAVVDSASPMERKRKATAEDSAAISSPQPKDCKQESKSRRGKRPRKETEEKSSTDEDEASKGYIHVRARRGQATDSHSLAERVRRERISERMRMLQALVPGCDKVTGKAMVLDEIINYVQSLQNQVEFLSMRIASMSPVLYGFGTNSEGLHDHHAPMGGVSFQEAAIAVPAGPAAAVSQASSRPAPSEATMNTACTTTPYSVSLQAQASISFSPSQENGGTYYLVQQAVGEQATRQEELLLSQLVFSNMCSFQ

SEQ ID NO: 358232 - protein, 58 aa, Zea mays
  Clone ID: MRT4577_89876C.1.pep
SFFSVVLVLMFLASEADTPRAKDIISCRHHHLGRPRRSVPAIGPSALFLHACLRARLS

SEQ ID NO: 358233 - protein, 114 aa, Zea mays
  Clone ID: MRT4577_89877C.1.pep
KGAPFLGRVQSPPPLVGLSPFKVFGHVWVGSGIPLQGRVSIFPQPGVFLEIPVGGGLFPQDVFGPQGFLPMFVFPRFFPGPVPGPARPFPSSWAQSFCYFPGPPPSPAGVLLAP

SEQ ID NO: 358234 - protein, 100 aa, Zea mays
  Clone ID: MRT4577_89878C.1.pep
LQNPGPAAGNTDLVTVVGSTPEGEWLNTVVDRDLRGEEEEDKEEMVKLIRVGMACCESNVDNRWELKTAIERIEELKAKERPDEEQATVIDEDYSDVALN

SEQ ID NO: 358235 - protein, 75 aa, Zea mays
  Clone ID: MRT4577_89879C.1.pep
CGAEAPGNLFAGWSRVPRKHHWPSKLLQATLGVNTSDRGGSSRACAEPARFERWPRSCPGHLRFWSMCTSYCPNE

SEQ ID NO: 358236 - protein, 112 aa, Zea mays
  unsure (1)..(112): unsure at all Xaa locations
  Clone ID: MRT4577_8987C.1.pep
MGASSCLNRSLKPNKLLLRRINGAIQVRSHVDRTFYSLVGSGRSGGGPPRLLSFXEPIHPLSVYGKLSLEPRLRFVPNGKMEPPPPENLWETETPFGKNVNTNPLAQPNILI

SEQ ID NO: 358237 - protein, 87 aa, Zea mays
  unsure (1)..(87): unsure at all Xaa locations
  Clone ID: MRT4577_89880C.1.pep
RPWVRVLAALKKKTPGGGPKVYPLVEVQPKKKWFPGKKKNRWQTCVEPQPLSLKKAGFACQVNRVSPGEDRAAGAGAKKKVSXRIKS

SEQ ID NO: 358238 - protein, 58 aa, Zea mays
  Clone ID: MRT4577_89881C.1.pep
YIIFFFFFFFLGCFFFKGGEVNPHPPRKKISFCLGAKGFHLIFFGAQTPRVLLWPFFE

SEQ ID NO: 358239 - protein, 65 aa, Zea mays
  Clone ID: MRT4577_89882C.1.pep
EDVLLPYWFTHKSILTPDIQWLLKPNAKTLLGAFAEIFHTNGGPCGRLLGAHTPLIRSFIKNWPP

SEQ ID NO: 358240 - protein, 76 aa, Zea mays
  Clone ID: MRT4577_89883C.1.pep
HPIGLQHSDTTLIRFYLGNIQNRHSFEKPGTINDSSYEYSLPATTCAHDMKQLCSTSSLSVMYMELLHRVVYVAII

SEQ ID NO: 358241 - protein, 145 aa, Zea mays
  unsure (1)..(145): unsure at all Xaa locations
  Clone ID: MRT4577_89884C.1.pep
HTQPASARDREAGDKGTGSPGGGTTKRDRATKRTAQSARARPXEEGEEREGAEQQPQGGEERGPRGDQGRRRAAERRRGRGDRADGARAGARGRAXEHEGHRXEPRAQQQPEGAEPTGGPQHQGAQRHXGHHXPGPGRGNQGPAA

SEQ ID NO: 358242 - protein, 69 aa, Zea mays
  Clone ID: MRT4577_89885C.1.pep
KIAASERACCSLFVLPRSTRQEQCRASSCLSWSISLMIGEATCQQISWEQQALQLAVVAVFSLLSFRDK

SEQ ID NO: 358243 - protein, 271 aa, Zea mays
  unsure (1)..(271): unsure at all Xaa locations
  Clone ID: MRT4577_89886C.1.pep
MFVLTATTSTTTATSLLLRCRPLPSPKTVTLATPPAILPFCIRSRFSASASASASASSVSPQSRATAAAAAGKSREKKPPTARAKRADAVPAAAAPGMSASGGGSAGKRTVADVLMGNARAAASKAKKAAPSPKKPQAKTDGAEVEPEAAAVAEKPPSPARSKRASSPAKSPKLLPDGSTSSAKSKGPAALAQLDAAKENPPSPKRXKTLAAKSDTQPSGEGVVGLGHTDGKKGSPSPTKAKGQASQSEEKKRAASPKKAKTTDSPKKKKK

SEQ ID NO: 358244 - protein, 164 aa, Zea mays
  unsure (1)..(164): unsure at all Xaa locations
  Clone ID: MRT4577_89887C.1.pep
MELDXLLRSSAYVLGKGGKGIVYKVVVGNGTTPVAVRRLGGGTAAPERYREFAAEAGAIGRVRPPNIVRLRAYYWSPDEKLVIPDFVNNGNLATALRGESQMPLRLLLLCAFHIRGLPCTAGRTIPDVDFSRMSVACAHTTKVKRGSWIVAKQPWGWNGSDHVL

SEQ ID NO: 358245 - protein, 95 aa, Zea mays
  Clone ID: MRT4577_89888C.1.pep
HALAVVDRSYDMSSEAHVDDAPSADVGAASFPETLAVIASLAVDGCMLLYVFGISYRLWAVWRGPPLAWLRRTPAELLSRPVFLAVGRRQGRSQL

SEQ ID NO: 358246 - protein, 85 aa, Zea mays
  Clone ID: MRT4577_89889C.1.pep
AVESDYFTVYGVVFLNDTRMGEPGSKGGQTVAVRLFWTNTQIYYCTIDSGQYTLYNHNVLHYFKGCLIWFRIDFIFGFSLNFYED

SEQ ID NO: 358247 - protein, 134 aa, Zea mays
  Clone ID: MRT4577_8988C.1.pep
MAYSSCLNRSLKPNKLLLRRIDGAIQVRSHVDRTFYSLVGSGRSGGGPPRLLSSRESIHPLSVYGELSLEHRLRFVLNGKMEHLTTHLHRPRTTRSPLSFWGDGGIVPFRPFFHAFPGGLEKAVINRTSLILPS

SEQ ID NO: 358248 - protein, 68 aa, Zea mays
  Clone ID: MRT4577_89890C.1.pep
KLETFKRGEIYVCPNLVTEKLRQKTGLGPGAPKKPKPGKGEMGSPEANPQRRRVAPGGTTPSAGGDTF

SEQ ID NO: 358249 - protein, 78 aa, Zea mays
  Clone ID: MRT4577_89891C.1.pep
CYVANLLAVRICLVIVSLYRKCYLISWWHHCSSCNGLPCTLHRFMYIYARSLVHAYKVQFHSVREMYLCTRVSVTSMQ

SEQ ID NO: 358250 - protein, 81 aa, Zea mays
  Clone ID: MRT4577_89892C.1.pep
HPQLQRRKEKFAKCVMSQHTHRPSAGPYRQIYECLMAPLTFLPTHTKKQPWTLLTKQGSSRCITSCTISFGRCAKSQHSTH

SEQ ID NO: 358251 - protein, 121 aa, Zea mays
  Clone ID: MRT4577_89893C.1.pep
QQQLFPFYQLGALDPPGFLPQPILLPFSQLGSASRGSFFAQQQLVPFFQQFWGNPATLFQIQQLLAFVPLGFANPAASFQQHIIGGGLFLVGFLMGFHNKVFLDGGCGPPEIKRFLSRFLC

SEQ ID NO: 358252 - protein, 127 aa, Zea mays
  Clone ID: MRT4577_89894C.1.pep
MTSSGSPGYVAPEVLTCESYDKSVDMWSVGVIIYILLCGYPPFYADNAPALFKKIMDVKSGFDDPSWGDVSDGAKDLIRNLLVKDPKKRYTASQCLQDPWVQGKSVGNKVLQMKDLKELQSKKKLKQ

SEQ ID NO: 358253 - protein, 237 aa, Zea mays
  unsure (1)..(237): unsure at all Xaa locations
  Clone ID: MRT4577_89895C.1.pep
KKISIIKKTKKKKKIKIPKKLKKKKIKKYKNXQLKIKKKIYKKNMIKXKKRKFKKKKKKKXKIKKKKKKKKIKKKKKKYXKKKKTKKKKKNKHINMKNIIKKNNKKKKIKKQNQKKKKYIKRKKQKRIKKHKRKXKKSKKRKKKXKISKKKKNKRTKKKKKKDIKXKQKNKKKKMKKXKKKKQKKTTKYSXKKQINHKKERKKKTKTKKKKIKKKNFIFVIIIFYFLSILIVNIIII

SEQ ID NO: 358254 - protein, 215 aa, Zea mays
  Clone ID: MRT4577_89896C.1.pep
MPQLRTASRPALASNSAAGFFIRRRVASPGTSQAKGAAKPLARRVRTPAARAKPKRRSPLPDWYPRVPLRDITSIVKALEKRNRLEEDAARQHIQSNEDSSQPVDPTTAEHSDPDSQSTQTQETPGAVASGPSSTSAVANRVTSVAEGKQEATDCSLQVAPSKPNDPSPADLEKKLSGSIEQIEKMVRRHMKETHPKAAQPSKVVVQRRILMSMR

SEQ ID NO: 358255 - protein, 168 aa, Zea mays
  Clone ID: MRT4577_89897C.1.pep
ATSNRFFQLLIPPPNPYLSADDFRSAPFRAAAIRPPRRLLDTIGPCLGCDFWVDSLGFEPGWRWLLGTTGYWVPPCRAWERSAPASGPRRRRKREGELNGDSQRMTGSRRRALMEADDGIWEWQLRLAGWMAGCGLDGGRECRSRRSRRPRRAGVQVVAFAAAALVPN

SEQ ID NO: 358256 - protein, 93 aa, Zea mays
  Clone ID: MRT4577_89898C.1.pep
VGALLLHSAGGRQRGGLALAVLEVLHGVVAGQGVVSRMAVLALPVSLLPWGMMSPASASLAVSFGVSGVLGTANGAPCLGAAASWSSQLRTSS

SEQ ID NO: 358257 - protein, 134 aa, Zea mays
  Clone ID: MRT4577_89899C.1.pep
MSCFHALEQAVTTVATRTTVDDAEPCEGGACPSGADKPQIDLSEFLQQIGVLNNTDDDGIRTTAKASFRGDAAEAGCFGGNGEFDWDALAADLNDIAGAGVHGGVNGGFQMDDLHEHEVEQFGTCLPIPVWDVQ

SEQ ID NO: 358258 - protein, 179 aa, Zea mays
  Clone ID: MRT4577_8989C.1.pep
PRTLQNRLFFFQRVPQSVGGPRFPLGIQVLFLLSRAGKGAKSGTGPPGGPPLSRPWCCLLFSGFVRSTPLGFLPLLDGLFSLPGPSSDGAPPGWAFEAGEISPRELYPRSLFFSERCPFFFGLIRLPLSPPLFLSFVFTILPPPIFFLYPPGKKKKPKKKKKKKKKKKKKKKKKKKKKT

SEQ ID NO: 358259 - protein, 71 aa, Zea mays
  Clone ID: MRT4577_898C.1.pep
LSCSRGGSFGLGILSFVIRGISLCGWVSLPSGPFYCMLGCSILVVGHCECSVDTCVARFENLCLCFLSVLE

SEQ ID NO: 358260 - protein, 110 aa, Zea mays
  unsure (1)..(110): unsure at all Xaa locations
  Clone ID: MRT4577_89900C.1.pep
ARNSALCSLSHLTLSTSXSLGKRDLISMQPFIPGAARMRPCSCSDVCIKMPGIAYTRLCCILHLNHACVLLTCPYFVASCPADSENQASANCSTQEGMQNPGLQRMRCFT

SEQ ID NO: 358261 - protein, 56 aa, Zea mays
  Clone ID: MRT4577_89901C.1.pep
TLYWPGVVGLVCPCYPVICPKWVLSCYVSVGFYLSVVVWFTTYVVKLYSPPLLLGY

SEQ ID NO: 358262 - protein, 64 aa, Zea mays
  Clone ID: MRT4577_89902C.1.pep
LCRWRPGLLNRLRPRAQERGVQAHLMLVLEHELGLDCVESGPGRGGSGRLAQPRRMPSIPLDAW

SEQ ID NO: 358263 - protein, 51 aa, Zea mays
  Clone ID: MRT4577_89903C.1.pep
DEGFQGCSVMLLLSSIYCCLQHMLLHPILSLIYKFTSEISYIPSFVPNVVI

SEQ ID NO: 358264 - protein, 66 aa, Zea mays
  unsure (1)..(66): unsure at all Xaa locations
  Clone ID: MRT4577_89904C.1.pep
FFFFFXXXLGVFFFFFFFRMERFKNLGLPTFFWRQNSVQWSTKTKRIWLLGKTPPFANKINLKGKI

SEQ ID NO: 358265 - protein, 90 aa, Zea mays
  unsure (1)..(90): unsure at all Xaa locations
  Clone ID: MRT4577_89905C.1.pep
VHKSTDDFLLAQNSGYIYDNPIXHLLKCRHPSRSIAHKASGADGMGRDILYKEVTLIRRTSNSSMSVCRHNTISHHNTWIFAYIFRRFLR

SEQ ID NO: 358266 - protein, 127 aa, Zea mays
  Clone ID: MRT4577_89906C.1.pep
IMFFGGSNTPIFLRGVGVPFFFPIDPWFSLSRVLFQVFYILPPLGGGFFRPLLWVGGRFINFGPFKAFLVGLFFLVPRECFSFRFFRGGSPWVGIFGHFPPLFFFSGGVFFFFKKKKKLSIYTPPLK

SEQ ID NO: 358267 - protein, 56 aa, Zea mays
  Clone ID: MRT4577_89907C.1.pep
QVKNENADFVYLFRFCTFHREISSYDFDGKVAILWQSDIQWAMNQNMMLSIFFLAM

SEQ ID NO: 358268 - protein, 45 aa, Zea mays
  Clone ID: MRT4577_89908C.1.pep
HEDKGKREKDFLVERGWNDFENYPAPWDLGGGEKIKKVGFMCVLF

SEQ ID NO: 358269 - protein, 99 aa, Zea mays
  Clone ID: MRT4577_89909C.1.pep
RSNLYLKLPYKYSSIDILFQTILIMEQQYQVLDCGAEGSEAACRRRRRAGRAGEGAAARPQLQLNGAELVVEHSAQSVAAGGGESGSSHGCAAVCCACA

SEQ ID NO: 358270 - protein, 157 aa, Zea mays
  unsure (1)..(157): unsure at all Xaa locations
  Clone ID: MRT4577_8990C.1.pep
MECTHSHTQGGGRVEIPTVSYIVCVCRVISYLDHGAGARGGEVHDGGGSVFCGVGHAAEEEEGLLILDTIAEDDDREQQLACGPPSDHXFAAAWSLPTPTPTPPQPRERAGGFVARGLVGKYLSDAHDGCQASGWEGGHMLGHRRAVHAQELHEVGA

SEQ ID NO: 358271 - protein, 213 aa, Zea mays
  Clone ID: MRT4577_89910C.1.pep
MAAPRLAAASCHALRGVLHDKLRAVELQLRACRRSLAGASGSSSTTAAAVAALVFAAAAFPRAAAFFLPLVASTSLCCTAACLFAAVERSAAKEAVEAVVVDGEGKAEAGLLQVIGEANTSAYGDRLGSVQVGCFIRRSARRGVDEDGEEVVFAGTLAPCAAGFVGAGHAQRRGAALEEELTAMRVDRLAEGVWNSYFGGWSRWHHIDTACSL

SEQ ID NO: 358272 - protein, 174 aa, Zea mays
  Clone ID: MRT4577_89911C.1.pep
HKSPCVARASSHRSMERRSSLRACTSECVGLVPAAVASSQESMDPVAASQASAHVGRRCHHSVGERACSTSRCHTAESARTCATATTSRTGKHHRSPACEGGRRRRTSACEHSHLQATSRRNRRHAGTGTTARRACERTPPRQHQNLVSERAPPRPWPGRRATAAGAASVCTIE

SEQ ID NO: 358273 - protein, 59 aa, Zea mays
  Clone ID: MRT4577_89912C.1.pep
YANFSLFISFLFYTRWFIHIVYVITLAVFCEFGAQLVQCGVLAQSLSGWVPKGWVQSRK

SEQ ID NO: 358274 - protein, 80 aa, Zea mays
  Clone ID: MRT4577_89913C.1.pep
PRLVKIGIRNYHLLSMLTLGQTLSIPVVSKVPTIILRMGALFGFHEQYDVQTTPAMVSSRRWPIISSYGASGRTQSLQLV

SEQ ID NO: 358275 - protein, 212 aa, Zea mays
  Clone ID: MRT4577_89914C.1.pep
SGSFSSLFQFLDRTDFISIVHTLAAPAAVARLPGHGRGGARSLTRFWCWRGGVRSHARLAVVPVPAWRRLRLLVYSGCAASLPWCLHATSSSLSSITDRSSVRAGLEGGCARTRLFDGDAHPHMLGCGGACPCAMWSRWRTSARSQPCGSGWCCTLARPRSGGSGVRHARLPARRRQGPCSPVMRQQRRGQGPHIRSYMLAATTYVPSSGGY

SEQ ID NO: 358276 - protein, 40 aa, Zea mays
  unsure (1)..(40): unsure at all Xaa locations
  Clone ID: MRT4577_89915C.1.pep
KNQTXRPRYMDPSTNMRXXSVLRYCRQYALFFIDQDDIRK

SEQ ID NO: 358277 - protein, 64 aa, Zea mays
  Clone ID: MRT4577_89916C.1.pep
ALQWFIRFLWDIFVIRNMLSSGWFILYMNLCSHVCNGWTNKVWVNPLKVRLTFRVGCFIENIDH

SEQ ID NO: 358278 - protein, 66 aa, Zea mays
  Clone ID: MRT4577_89917C.1.pep
PYVISTVGLWDFAACLQNSIQRALYLNVCQEWARRFGVSGSYKIVIPNEFGNAVSLHSCTVNLETL

SEQ ID NO: 358279 - protein, 254 aa, Zea mays
  Clone ID: MRT4577_89918C.1.pep
LTEKLIASESSLKSLETSLNSVSREKEDLGMQLTDALLDMESERSIWTAKEKEYVEANHRLNICLDENHKLSEDLMKVMQELGCCREQCKTMEDKLVLSMKSDMNEKVTECSEACKASDQIVENGGTIPGAACENMRSMVAEAEVLKENCNRKLIHAKDTIDELSSRISVMEANLKNDTASNNKEKTKLRMEIRWLRPQLDAHRGRLKEAMNEMKTMDAKYQEACTTLKKDLSQHGREILRLREMLKESQSASN

SEQ ID NO: 358280 - protein, 177 aa, Zea mays
  Clone ID: MRT4577_89919C.1.pep
MKSDMNEKVMECSEACKASNQIVEKGGTIPGAACENELDKQLLLITEERNCLLSETQQMRSMVAEAEVLKENCNRKLIHAKDTIDELSSRISVMEANLKNDTASNNKEKPKLRMEIRWLRPQLDAHRGRLKEAMNEMKTMDAKYQEACTTLKKDLSQHGREILRLREMLKESQSASN

SEQ ID NO: 358281 - protein, 163 aa, Zea mays
  Clone ID: MRT4577_89920C.1.pep
IRLEQLDVSRNQLAGAVAENVCKLPALANFSFAHNFFSVEAEACVPSEDSPVALDDSGNCLDGGRPGQKPLPECALVLAHPVDCRTNVCSKMPAPPAKKVPRPPDVSPHPLPPAPSPENQPPKKSPAPQPVSPQPSPPPSVKSPPAPAPAPAPAPISSPPPLI

SEQ ID NO: 358282 - protein, 109 aa, Zea mays
  unsure (1)..(109): unsure at all Xaa locations
  Clone ID: MRT4577_89921C.1.pep
LQNYTSLXXILSSQQKKKLPXTPKKNFLXYFHXHKSXIYSPXSPXPLXXISXSXIXSHNTKLXXSLSFSTIKXFTSXLTPXLXXSHSFPXIKKXTPPPPTKLNYSISLS

SEQ ID NO: 358283 - protein, 142 aa, Zea mays
  Clone ID: MRT4577_89922C.1.pep
MAETEYRCFVGGLAWATDDNNLQQAFSQYGEILDAKIINDRETGRSRGFGFVTFGSEESMRQAIEEMNGKELDGRNITVNEAQSRRSGGGGGGGGGYGGQRGGGGGYGGGGGYGGGGGYGGGGGYGGQRDGEGGNSGGQEEN

SEQ ID NO: 358284 - protein, 84 aa, Zea mays
  Clone ID: MRT4577_89923C.1.pep
MAAADVEYRCFVGGLAWATSNESLENAFASYGEILDSKVITDRETGRSRGFGFVTFSSENSMLDAIELSYLSIVSCYRSLLSPC

SEQ ID NO: 358285 - protein, 77 aa, Zea mays
  Clone ID: MRT4577_89924C.1.pep
MAAADVEYRCFVGGLAWATSNESLENAFASYGEILDSKVITDRETGRSRGFGFVTFSSENSMLDAIENMNGGGGWRD

SEQ ID NO: 358286 - protein, 207 aa, Zea mays
  unsure (1)..(207): unsure at all Xaa locations
  Clone ID: MRT4577_89925C.1.pep
MAAADVEYRCFVGGLAWATSNESLENAFASYGEILDSKVXSSSLGFISRSVCAVGARSGSWFNRSASFWYRSAFARIEHDVFMXMQVITDRETGRSRGFGFVTFSSENSMLDAIENMNGKELDGRNITVNQAQSRGGGGGGGGYGGGRGGGGGYGGGRRDGGYGGGGGYGGRREGGGGGYGGGGGYGGRREGGGGGYGGGGGGGWRD

SEQ ID NO: 358287 - protein, 76 aa, Zea mays
  unsure (1)..(76): unsure at all Xaa locations
  Clone ID: MRT4577_89926C.1.pep
FSSEXSMLDAVEDMNGKELDGRNITVNQAQSRGGGGGGGGGGYGGGRGGGGYGGGYGGRREGGGGGYGGGGGGWRD

SEQ ID NO: 358288 - protein, 126 aa, Zea mays
  unsure (1)..(126): unsure at all Xaa locations
  Clone ID: MRT4577_89927C.1.pep
MAAADVEYRCFVGGLAWATSNESLENAFSSYXEILGGGGVXTFLETGRSLCFSFITFSSENSMLYAIENMNGKELDGRNITVNQAQSRGGGGGGGRRGYFCRRGXGSYGGPPRDRCYGGPGGYCAP

SEQ ID NO: 358289 - protein, 142 aa, Zea mays
  unsure (1)..(142): unsure at all Xaa locations
  Clone ID: MRT4577_89928C.1.pep
MAAADVEYRCFVGGLAWATSNESLENAFASYGEILDSKVITXRETGRSRGFGFVTFSSENSMLDAIENMNGKELDGRNITVNQAQSRGGGGGGGGGGYGGGRGGGGYGGGRRDGGYGGGGGYGGRREGGGGGYRGGGGGWRD

SEQ ID NO: 358290 - protein, 121 aa, Zea mays
  Clone ID: MRT4577_89929C.1.pep
MAAADVEYRCFVGGLAWATSNGSLENAFASYGEILDSKVITDRETGRSRGFGFVTFSSENSMLDAIENMNGKELDGRNITVNQAQSRGGGGGGGGYGGGRGGGGGYGGGRRDGGYGGGWRD

SEQ ID NO: 358291 - protein, 79 aa, Zea mays
  Clone ID: MRT4577_8992C.1.pep
SLVGFNNPDRENPGSGFVNISCFYMTLGLQLKSTPLTKKKVWQMFSSIWPRKNMKIGPRRDRSFLQMLAKPVLMFCLLD

SEQ ID NO: 358292 - protein, 276 aa, Zea mays
  unsure (1)..(276): unsure at all Xaa locations
  Clone ID: MRT4577_89930C.1.pep
LGRSQDGPTHQSLQPPPPPPXPPPPPSRRPPXPPPPPXPPPPPSRRPPXPPPPPXPPSRRPPPXPPPPRPPPXPPPPSRRPPXPPPPPXPNAYTPPRXVPPRPPISPISCSWTPTIPPPPPLPPPTKPSSMPXSLPSPSPSPSPSPSPSPSPSPSPSPSPSPXPISPPXAPSPPAPRKKXSSPTLFSHHPPRPPRPPPPSPPSRTSISSPIPPRPPAPLPVLTPHPRRRRSRRRRRRTLRLRTWMRLLRWRRLLLRRRRRRPRAYSSTSPCSSLRQ

SEQ ID NO: 358293 - protein, 200 aa, Zea mays
  unsure (1)..(200): unsure at all Xaa locations
  Clone ID: MRT4577_89931C.1.pep
ACTRPKSLIVVEDIDCSLGLLDRTKTADDAERDIAPPRHVSLSRFPPMGGPGMYGDKISLSGVLNFVDGLWSSCVGERLIVFTTNHVDRLDPALLRPGRMDRKIELGYCKGPALRVLAKNYLGDCGTPGGGDHEPANGDQRYEELVGEAEVLLEEVHLTPADVAEVFXVRRRRCPRXALQKLVDDLRSKKVVQECAASDV

SEQ ID NO: 358294 - protein, 52 aa, Zea mays
  Clone ID: MRT4577_89932C.1.pep
YSIWPKLILALEAWILLQRGTSTHLQTTKFDRFLEERVKNPPFILVHRCMNL

SEQ ID NO: 358295 - protein, 57 aa, Zea mays
  Clone ID: MRT4577_89933C.1.pep
EVLLLIEEKHLAAEIINLNIYHRCMTVAHSMLSSLNALYYRYASCTISKPLYKTCLT

SEQ ID NO: 358296 - protein, 56 aa, Zea mays
  Clone ID: MRT4577_89935C.1.pep
GNSLMPKTYEMQTKMKKKIFFSQQQDAFKKPTVGISVDRIIRQISVVPHLIIKSNS

SEQ ID NO: 358297 - protein, 105 aa, Zea mays
  Clone ID: MRT4577_89936C.1.pep
HLVRLSHGKPGEGRHRGTKPAPDNTAESTENRSCGKKVQSISLRGTGRGKGTPCANKVQHCAHTQASDGDQGGAETKPGSENEPMNESMIQGERDAPSDETTKQA

SEQ ID NO: 358298 - protein, 46 aa, Zea mays
  Clone ID: MRT4577_89937C.1.pep
RFTCYKEVVPEHPCLTPRRSCCRYHATDEYACSPGKCVDEWAVSLR

SEQ ID NO: 358299 - protein, 68 aa, Zea mays
  unsure (1)..(68): unsure at all Xaa locations
  Clone ID: MRT4577_89938C.1.pep
ENKFAFXMEVGEEPNAYLXKNRHEYGLKKPILHVXSDRMNEFGFSRPEGYFYPYPIKPGPYFIKKEGD

SEQ ID NO: 358300 - protein, 198 aa, Zea mays
  unsure (1)..(198): unsure at all Xaa locations
  Clone ID: MRT4577_89939C.1.pep
PPPQPPPPPPPXPPPAPPPHPPPPGPPPXXPPQRQQQHAPPTPARPPPSPPPXPPPPPHPPAPXPPPPXPPPPPPTPTPPPNPAPPTPPPPPAPPPPPPSPHPPRAPPTSPTQPXPQPGPPHPPSSPPTTHPPHAXPPPPPTSLPXPSSPPPPPAPPPPRPPISALWLKLQPSEWLAEPIPPNEVPAYPQERPVHQIK

SEQ ID NO: 358301 - protein, 138 aa, Zea mays
  Clone ID: MRT4577_8993C.1.pep
KKGPAPLAKSTQTLQKRAICSESAKKLGDPQGFSPQPRVKKKTPPKNIKIGPPQRGKWGPPQKKNPTPGPMGGKIRKKAHMGPPPPQGQKKIPRVMDNPSKIALKCGLVFMFNFFFFFFFFFFFFFFFFFFFFFFFFY

SEQ ID NO: 358302 - protein, 221 aa, Zea mays
  Clone ID: MRT4577_89940C.1.pep
MAAAASMGHPYAPAELDLPGFVPLKLSQVEILVSYLGASVFVFLAVWLVSGRCVRLSKTDRLLMCWWAFTGLTHIMIEGPFVFTPDFFKKENPNFFDEVWKEYSKGDSRYVARDTATVTVEGITAVLEGPASLLAVYAIASRKSFSHILQFAVCLGQLYGCLVYFITAYLDGFNFWVAPFYFWAYFIGANSFWIWIPMLIAIRSWKKTCAAFQAEKVKKTK

SEQ ID NO: 358303 - protein, 221 aa, Zea mays
  Clone ID: MRT4577_89941C.1.pep
MAAAASMGHPYAPAELDLPGFVPLKLSQVEILVSYLGASVFVFLAVWLVSGRCVRLSKTDRLLMCWWAFTGLTHIMIEGPFVFTPDFFKKENPNFFDEVWKEYSKGDSRYVARDTATVTVEGITAVLEGPASLLAVYAIASRKSFSHILQFAVCLGQLYGCLVYFITAYLDGFNFWVGPFYFWAYFIGANSFWIWIPMLIAIRSWKKTCAAFQAEKVKKTK

SEQ ID NO: 358304 - protein, 81 aa, Zea mays
  Clone ID: MRT4577_89942C.1.pep
IILTAFSKGQINAISSKMRDFGEKQFNKVAFGDTKPNFWAILDFGDVVGQKFLPQQGAFYNLEKFLGNVTPLEIPFFTQRQ

SEQ ID NO: 358305 - protein, 56 aa, Zea mays
  Clone ID: MRT4577_89943C.1.pep
ELSILCDAEVGLIIFSSTGRLYDFSNTNMKAVIDRYGKAKDEQLGKNDATSELMVR

SEQ ID NO: 358306 - protein, 91 aa, Zea mays
  Clone ID: MRT4577_89944C.1.pep
LSRALLPLVIWGRTGSHPGFPLVRPPDRFLAVPSCSSYCTPQSIGGQAAVLDACCCLHLRCLPYLTRRRVRRCTSMRCPGFQHALHGASRL

SEQ ID NO: 358307 - protein, 111 aa, Zea mays
  Clone ID: MRT4577_89945C.1.pep
FWFPSLVRLISNGKFSCRFYVLPMVLQACECYSPSICLWFRCIRLPNAGNGHGELWGGCRMDISEMNLGVGKPGYVHSLPNNRSSSGHGPDSKQISSIASNSAFRNNMINE

SEQ ID NO: 358308 - protein, 76 aa, Zea mays
  Clone ID: MRT4577_89946C.1.pep
THISADPALSHVCVIELVVVPYVIKKSREWVKKRFSRGARQIFNKLLEHIIVVISAKSKSDLGTLIDHMMRGTKAE

SEQ ID NO: 358309 - protein, 101 aa, Zea mays
  Clone ID: MRT4577_89947C.1.pep
HESVPDRTHRRSFEQPSSSRSGRTTSAGSKRTGLAGGVSPRRMHDVNIRYCCFLASALKKRFDGFLWITNLIRGWAGMIGRMSSFHDSQCGGLDDVSTDYC

SEQ ID NO: 358310 - protein, 57 aa, Zea mays
  Clone ID: MRT4577_89948C.1.pep
VPTTQSESPSCPSAYSSPVVSMGRGLRCRSVRIDRDGSQVQQLCSSGHVLCMWVCSF

SEQ ID NO: 358311 - protein, 218 aa, Zea mays
  Clone ID: MRT4577_89949C.1.pep
PGTADSGYFVASIQPGALSGGQAFIISLLQFASGSASCSIPPLPRPMLVLLCWTASPMAARRALVSSVLPPALAQDPWPSALCPNASRVSPLAPASLCVAFPSGWSRPCPAPAFIGKLALNSAAPSPPRTRPAFRRSSSTNVALSSLQRPDVAPVPCLVSLAADASRSSFHLLRCPVCGEERMEDDGLVDGERKRSPRVSLIMCSTKGLNQRPLSFWR

SEQ ID NO: 358312 - protein, 86 aa, Zea mays
  unsure (1)..(86): unsure at all Xaa locations
  Clone ID: MRT4577_8994C.1.pep
MGISRDSMHKRRATGGKQKAWRKKRKYELGRQASHNKLSSHXTGRKVRVRXSYVKLKALRPDSWYYSLGSEACSRKTRILDVVYNA

SEQ ID NO: 358313 - protein, 136 aa, Zea mays
  Clone ID: MRT4577_89950C.1.pep
FGSSPACGCWDGGILLGRHSSTRRPPSTFVVYIKPVWALMDSDTDGASDERLQVARAFTEVPTLPLQVLIAKLSYAQGSLMPCHAEATGMHSDVIYLIGVSHEDMGLHNEQVKELCHAQLALLGGHYDAQQDIVCS

SEQ ID NO: 358314 - protein, 98 aa, Zea mays
  Clone ID: MRT4577_89951C.1.pep
AGAKGGAGGLQELEEWLRHASRSVCAKPVVDKIMESATLEKSLPERIKVAGGKGAQLGEGVTVSRDMFKVTVTFDGPFSKRGLKYLTKKYLKKHNVRD

SEQ ID NO: 358315 - protein, 615 aa, Zea mays
  unsure (1)..(615): unsure at all Xaa locations
  Clone ID: MRT4577_89952C.1.pep
MGPAPREPMKQRVNRCLLRLSDRDTEAMAAAELDAIARELDADELPVFVAAVSDARPTDRTPLRRHSLRLLALVAGEHPRDAVAPLVPRLLAAALRRVRDPDSSVRAALVDAARAAAGAAASPPAALAPLADAVLHEQDQCAQLAAALAAAAAVEASEPTDDLAAYLRGLLPRLYKLLRSAAFKAKPALISLIGAASAASGGGAASAAVPCLRDALTADDWAARKAAAEALALLALEHGDDLVSHKSSCITVFEAKRFDKVKIVRESMNRLIEAWKEIPDLDEEVCSLPSSQSRSSLTDTASDGRYPADSSGSTSSPSITRRNSWPTNRQPQPDGSNNAINRKGSPPSIVAKKNLPPSRRSTDQFKKSEDRVVVTTAPDATPIKMVAEEKLLKEGNVRERLEARRVLFQKTGDKGYKKVAGPKSGSRVVPYSGEXMVTRKRRLRLRTRPKNFSQLXDEDLSKIRMQLVQIENQQASLLNLLQKFMGSSQNGIRSLETRVNGLEMVLDEISRDLAASSGRIPNSEPDTNACCILSPKFWRRHDGGRYTSRYPISDAANYSEESRSPYKWDRQQKFGVHGGFVTNPLAEPNDSSVRSIAGSQQGRRRDSAQYRSRLS

SEQ ID NO: 358316 - protein, 89 aa, Zea mays
  Clone ID: MRT4577_89953C.1.pep
TLVHAACSSAGCPTALPPWFPVVVILFFVRVPFLPESSILSSWIRVWSCCGLLWCSTVMVPVAFPLLLSCVIPMRSSMSCSQLTSLVGR

SEQ ID NO: 358317 - protein, 143 aa, Zea mays
  unsure (1)..(143): unsure at all Xaa locations
  Clone ID: MRT4577_89954C.1.pep
ESTLIVQSWMYLVLLVNSFYTVIHVLAKKKKKKKKKKKKKLRQLPPPSSFPSPLRHDPKRPLGPAGPSTSKNPKSPNRMVMAPEPFFTPPPAPRXLAELRIDPAHHAVAFSAPCAADARRKRRWLLPGSSVRKRILLELSPFD

SEQ ID NO: 358318 - protein, 317 aa, Zea mays
  unsure (1)..(317): unsure at all Xaa locations
  Clone ID: MRT4577_89955C.1.pep
HGPKPEKPPRSTXPTPPTYTPSPKPTPPTYTPTPTPPKPTPPTPKPTPPTYTPAPTPHKPTPKPTPTPPTYTPSPKPPTPKPTPPTYTPSPKPPASKPPTPKPTPPTYTPSPKPPTPKPTPPTYTPSPKPPATKPPTPKPTPPTYTPSPKPPTPKPTPPTYTPSPKPPTPKPTPPTYTPSPKPPATKPPTPKPTPPTYTPSPKPPTPKPTPPTYTPSPKPPTPKPTPPTYTPRPKPPTXRRPSRPHRRTPLPQSLRHPSRPHRRTLQAPNHRLPSLPRPSPTPPTYTPTPKPPATKPPTYTPTPPVSHTPSPPPPYY

SEQ ID NO: 358319 - protein, 53 aa, Zea mays
  Clone ID: MRT4577_89956C.1.pep
LTTICYQKWEEIQATSMRLFPAVALSDPVVYQHQARLMESIPIGQDSVESASA

SEQ ID NO: 358320 - protein, 62 aa, Zea mays
  Clone ID: MRT4577_89957C.1.pep
KKKKKKKKKKKKKKKKKKKKKKKKKKKKKNKKKKKGGGPLFGGTHLSSPFPCRLFIFFFGPP

SEQ ID NO: 358321 - protein, 339 aa, Zea mays
  Clone ID: MRT4577_89958C.1.pep
PNSTNEHPCAPKPTTNKPTPTTNTPTQRPPATKPPTPKPTPPTYTPSPKPPTPKPTPPTYTPSPKPPTPKPTPPTYTPSPKPPTHPTPKPTPPTYTPSPKPPTPKPTPPTYTPSPKPPTPKPTPPTYTPSPKPPTHPTPKPTPPTYTPSPKPSTPKPTPPTYTPSPKPATPKPPTPKPTPPTYTPSPKPPATKPPTPKPTPPTYTPSPKPPTPKPTPPTYTPSPKPPTPKPTPPTYTPSPKPPTHPTPKPTPPTYTPSPKPPTPKPTPPTYTPSPKPPTPKPTPPTYTPSPKPPATKPPTPKPTPPTYTPTPKPPATKPPTYTPTPPVSHTPSPPPPYY

SEQ ID NO: 358322 - protein, 237 aa, Zea mays
  Clone ID: MRT4577_89959C.1.pep
MGGSGRAALLLALVVVAVSLAVEIQADAGYGYGGGYTPTPTPPKPTPPTYTPAPTPHKPTPKPTPTPPTYTPTPKPPTPKPTPPTYTPSPKPPTPKPTPPTYTPSPKPPTPKPTPPTYTPSPKPPATKPPTPKPTPPTYTPSPKPPTPKPTPPTYTPSPKPPTPKPTPPTYTPSPKPPTHPTPKPTPPTYTPSPKPPTPKPTPPTYTPTPKPPATKPPTYTPTPPVSHTPSPPPPYY

SEQ ID NO: 358323 - protein, 60 aa, Zea mays
  Clone ID: MRT4577_8995C.1.pep
RYLDVRTEGEFSAGHPEGAVNIPYMNKTGSGMTKNAHFLEQVSRAFGKDDEIIVVRSYVC

SEQ ID NO: 358324 - protein, 58 aa, Zea mays
  Clone ID: MRT4577_89960C.1.pep
CGPLLGIIDILQEYNMTKKIEHAVKSMQYRAVSPAEIETEFYSERFLNFIQTVFPENS

SEQ ID NO: 358325 - protein, 281 aa, Zea mays
  unsure (1)..(281): unsure at all Xaa locations
  Clone ID: MRT4577_89961C.1.pep
ADAGYGYGGGYTPTPTPATPTPKPEKPPTKGPKPDKPPKEHKPPKEHGPKPEKPPKEHXPTPSTYTPSPKPTPPTYTPTPPPTPKPTPPTYTPAPTPHKPTPKPTPTPPTYTPSPKPPTPKPTPPTXYTPSPKPPATKPPTPKPTPPTYTPSPKLPTPKPTPPTYTPSPKPPTPKPTPPTYTPSPKPPTPKPTPPTYTPSPKPPATKPPTPKPTPPTYTPSPKPPTPKPSPPTYTPSPKPPTPKPTPPTYTPTPKPPATKPPTYTPTPPVSHTPSPPPPYY

SEQ ID NO: 358326 - protein, 101 aa, Zea mays
  Clone ID: MRT4577_89962C.1.pep
KPPATKPPTPKPTPPTYTPSPKPPTPKPTPPTYTPSPKPPTPKPTPPTYTPSPKPPATKPPTPKPTPPTYTPTPKPPATKPPTYTPTPPVSHTPSPPPPYY

SEQ ID NO: 358327 - protein, 118 aa, Zea mays
  Clone ID: MRT4577_89963C.1.pep
MEGLIPLLYKAIKDRRSNAGGGGRSYRSGGALLSSAPVDLDDPEQRRRWLQQELRSPVHVGHTHTARAAAAAEGSPLHRRNLSLEELAGEVGLSPDRRLRVPLPKARSVRAFACIGAA

SEQ ID NO: 358328 - protein, 112 aa, Zea mays
  Clone ID: MRT4577_89964C.1.pep
NFLFVGVFFGYILRQPRRLSATEEASSHVKYVRAEFPDRALKTRLVCWFCVLVLVFIFSLSMKNRRQQGQATRVQLLTRGGLPIYCAFLSVCSRSSMTESLTPFALGSEMAG

SEQ ID NO: 358329 - protein, 146 aa, Zea mays
  Clone ID: MRT4577_89965C.1.pep
MGDAEITTSAWRLVEVGRVVLFNEGQYEGRLAAIVEIIDHKRVLVDGPSEKAPVPRQEIALAKLSLTPIVIPKLPRASGVGHVAKKWEEHKVQQKFDESAWAKKRAAMQKRRGLNDFERFKVMKMRKQARFEVQKTFAKIRASAKA

SEQ ID NO: 358330 - protein, 214 aa, Zea mays
  Clone ID: MRT4577_89966C.1.pep
MGGSGRAALLLALVVVAVSLAVEIQADAGYGYGGGYTPTPTPARATPKPEKPPTKGPKPDKPPKEHKPPKEHGPKPEKPPKEHKPPTPKPTPPTYTPSPKPPATKPPTPKPTPPTYTPSPKPPTPKPTPPTYTPSPKPPTPKPTPPTYTPSPKPPTHPTPKPTPPTYTPSPKPPTPKPTPPTYTPTPKPPATKPPTYTPTPPVSHTPSPPPPYY

SEQ ID NO: 358331 - protein, 267 aa, Zea mays
  Clone ID: MRT4577_89967C.1.pep
MCPAFSIFFNSRRYSLTPPTYTPSPKPPTPKPTPPTYTPSPKPPASKPPTPKPTPPTYTPSPKPPTPKPTPPTYTPSPKPPATKPPTPKPTPPTYTPSPKPPTPKPTPPTYTPSPKPPATKPPTPKPTPPTYTPSPKPPTPKPTPPTYTPSPKPPTPKPTPPTYTPSPKPPTHPTPKPTPPTYTPSPKPPTPKPTPPTYTPSPKPPTPKPTPPTYTPSPKPPATKPPTPKPTPPTYTPTPKPPATKPPTYTPTPPVSHTPSPPPPYY

SEQ ID NO: 358332 - protein, 78 aa, Zea mays
  Clone ID: MRT4577_89968C.1.pep
VCERVSNVACNYLADETHGPSASLCNTSSVHWTYYILYVYFLHILHSSSSNNVAFLVAFLITAVFFALVKALLAEHAL

SEQ ID NO: 358333 - protein, 90 aa, Zea mays
  unsure (1)..(90): unsure at all Xaa locations
  Clone ID: MRT4577_89969C.1.pep
MPSVVVLADAVCVASLAQPVAADLKLDXYASTCPYAEAIVRGVVQQRLHATMPAVGSTVRLFFHDCFVEGCVRSVLIESTPGNQAEKDAS

SEQ ID NO: 358334 - protein, 98 aa, Zea mays
  unsure (1)..(98): unsure at all Xaa locations
  Clone ID: MRT4577_8996C.1.pep
AGHQSAKGSTVCLIQQLVSASAPSGSADLGADSWFACMSDDVVTAHTHLGRVCAVHACFQLPTERVWFPGQFFLPGLLGGKFRGPVSNLPPVXVLFFW

SEQ ID NO: 358335 - protein, 151 aa, Zea mays
  Clone ID: MRT4577_89970C.1.pep
TPPTYTPSPKPTPPTYTPTPPPTPKPTPPTYTPAPTPHKPTPKPTPTPPTYTPSPKPPTPKPTPPTYTPSPKPPATKPPTPKPTPPTYTPSPKPPTPKPSPPTYTPSPKPPTPKPTPPTYTPTPKPPATKPPTYTPTPPVSHTPSPPPPYY

SEQ ID NO: 358336 - protein, 159 aa, Zea mays
  Clone ID: MRT4577_89971C.1.pep
RRLRPRVKSYRAHPSPLPPPRERPTPLIHHHVAPPPHPSTSPLLSEDKPARVEDVMPIATGLEREELEAELQGKKRFDMDSPVGPFGTKEEPAVIESYYNKRIVGCPGGEGEDEHDVVWFWLKKDEPHECPVCSQYFVLKVIGDGGDPDGHDDEDDGHH

SEQ ID NO: 358337 - protein, 88 aa, Zea mays
  Clone ID: MRT4577_89972C.1.pep
TAGTAEDRPGAESSALFSPRSSNGDGWQHTKRRVRSRVAVASYHHHYHQQLIFAGWLGHNPSIDPDHLSNTKEKESLWLVPDYARRSV

SEQ ID NO: 358338 - protein, 165 aa, Zea mays
  Clone ID: MRT4577_89973C.1.pep
MWRRLHTLAPALRRATAAAAGGPAVPASSAARAAPLSSAAAGFRRTSPLLSEDKPARVEDVMPIATGLEREELEAELQGKKRFDMDSPVGPFGTKEEPAVIESYYNKRIVGCPGGEGEDEHDVVWFWLKKDEPHECPVCSQYFVLKVIGDGGDPDGHDDEDDGHH

SEQ ID NO: 358339 - protein, 71 aa, Zea mays
  Clone ID: MRT4577_89974C.1.pep
HAGRRIIFLPQHFSGGVRVRLIHYPPGDQSVTRGRNSSTTNRRPATLPAKKPPTSLTPPAPTTTSSAGGGP

SEQ ID NO: 358340 - protein, 147 aa, Zea mays
  Clone ID: MRT4577_89975C.1.pep
GYLEAGRAAVSVPGSNRIEPIHLHFRRTSPLLSGDKPASVEDVMPIATGLEREELEAELKGKKRFDMDPLVGPFGTKEEPSVVESYYNKRIVGCPGGEGEDEHDVVWFWLKKDEPHECPVCSQYFVLKVIGDGGDPDGHDDEDDGHH

SEQ ID NO: 358341 - protein, 72 aa, Zea mays
  Clone ID: MRT4577_89976C.1.pep
RKGPAPFNRKVPTSLFVKENQPAHRLRAQKQPVEICPSCSGTPAVLLKCFFFLPFGLFFCSKKIIVKPKGVF

SEQ ID NO: 358342 - protein, 102 aa, Zea mays
  Clone ID: MRT4577_89977C.1.pep
LGMKRGREWLRNPNSEALPIFFSRLKARMWNVRQRRRYCKQHDSSALPLPTWRKPRNKDQSRTDLVDGAASLWPPDLSAGGRRPLTVTAPRFSVNKSGENPS

SEQ ID NO: 358343 - protein, 118 aa, Zea mays
  unsure (1)..(118): unsure at all Xaa locations
  Clone ID: MRT4577_89978C.1.pep
MVSYVTLQIILYLKFLLSATIQKPDMCRNYNATSFDVALKPQIIFDGSNYKRWRAKTSLXLTTMNIYHVAGDRHEGMTSNSFEEKXEVVDNLFRGAMISALAENIVGSYMHLFITQEM

SEQ ID NO: 358344 - protein, 53 aa, Zea mays
  Clone ID: MRT4577_89979C.1.pep
GASDLRFDLPLRRGDVPVCYRRIITFSASPLGPGLEEGSQSAVSSFRRVAVVR

SEQ ID NO: 358345 - protein, 66 aa, Zea mays
  unsure (1)..(66): unsure at all Xaa locations
  Clone ID: MRT4577_89980C.1.pep
YNPKNPDSEIKDEVYFKSRDCLDTYCXDDFYRVNGQITPSQXQTPDYQPRAQTVMTSIFQTDTRKS

SEQ ID NO: 358346 - protein, 121 aa, Zea mays
  unsure (1)..(121): unsure at all Xaa locations
  Clone ID: MRT4577_89981C.1.pep
RPGREHNKRKVFFXKKKKKKKKKKKKKKKKKKKKKKKKKKKKKKKKKKKKKKKKKNKSPFFWNPSPPIECGGPLGPLCLPGGGEKISPPLGRCFFGRGAPPPPFPPKGQKGKSLPFAPQTF

SEQ ID NO: 358347 - protein, 44 aa, Zea mays
  Clone ID: MRT4577_89982C.1.pep
QELKFDKNAHANWPRTFYFTKILTGSLKRLPWDSMGLGFQKATG

SEQ ID NO: 358348 - protein, 579 aa, Zea mays
  Clone ID: MRT4577_89983C.1.pep
MRLPLPLLALVCCALMARQHCAAAGKARHLRWEISNMFWSPDCEEKVVIGINGQFPGPTIRARAGDTVHVQLRNALHTEGVVIHWHGIRQIGTPWADGTAAISQCAINPEETFTYRFVVDKPGTYFYHGHYGMQRAAGLYGSLVVDVAEGEEEPFQYDGELNLLLSDWYHESIHTQMVALSSRPFRWIGEPQSLLINGRGQFNCSLAAAHTQGATNQCAATAANTQCAPVVLPVQPNKTYRLRVASTTSLASLNLAIGNHKLTVVEADGNYVDPFVVDDIDLYSGDSYSVLLTTDQDTSSNYWVSVGVRGRLPKTAPALAVLNYRPNRASDLPALAPPVTPAWDDYGHSKAFTYRIRARAGTPPPPPTAARRIELLNTQNRMDGRIRWSINNVSMVLPATPYLGSLKMGLKSTLAAARPAETFSREYDVTLPPPNPNTTVGDNVYVLAHNTTVDVLLQNANALSRNVSEVHPWHLHGHDFWVLGYGDGAYRGDAADEARLNLRDPPLRNTAVIFPYGWTMLRFVADNPGVWAFHCHIEPHLHMGMGVIFAEAVDLVAKVPNEAVSCGATATALMAGGHL

SEQ ID NO: 358349 - protein, 218 aa, Zea mays
  Clone ID: MRT4577_89984C.1.pep
MESSGLRKRVADMMDGGKYKPKGYGMAGPGQRLPCALLLMLVLAAAALSVVVTHKVREQRAFAVVLKERDVQAVSLRIQLQKEKAYGKETKRKAEEMKATMSSLRTQKTDLKTKLKALEATATILKNVQKELEASLKERESRISQMEGKAANLHSTRKALEATVKERDNRIKQMQDKVTSLEKTLKEQELSLKARDSRISQLEEKTAAASNPDQMAAL

SEQ ID NO: 358350 - protein, 82 aa, Zea mays
  Clone ID: MRT4577_89985C.1.pep
HASEKKKKKKKKKKKKKKKKKKKKRRGGRTDGCKLRLAGMGSHFLLYRVIFISFPWVFVLSPLEWNIPFRNLSELHYIKFSF

SEQ ID NO: 358351 - protein, 178 aa, Zea mays
  unsure (1)..(178): unsure at all Xaa locations
  Clone ID: MRT4577_89986C.1.pep
MQTLMMHGDGHVFAYGTADSRGATGYPHSSFXPPPLATDCPNANNMERFSMSGVRIPTERAYXYKSFPHAESYIPXFQIDASGCRRCGKYVIERGXNLTEGDDTDPAITARYMCPKGRDGKTSYNLAVTXTYVREYNTNHHSTLLEGRDTQQXGLHVAILGXNFVIIVDXLRIAAGAT

SEQ ID NO: 358352 - protein, 69 aa, Zea mays
  Clone ID: MRT4577_89987C.1.pep
IHNSICLATGDTTYWLDLCSLVLSLLFCMLLWSNYLQFQVEERFRDVMKRIFRFRNKICFAVVILKFSF

SEQ ID NO: 358353 - protein, 123 aa, Zea mays
  Clone ID: MRT4577_89988C.1.pep
GTLRGKRGLCCCVEEPCEIPWCSVGSKYNVEDTVGLSDPEKAPSHLDGGANKEGFYAANKDARIFVFEVKDNDVHRRDRAKEDIYFTDERPSLTQPSGYNGKRHEFDPQSGNDAEQALAGMEF

SEQ ID NO: 358354 - protein, 75 aa, Zea mays
  Clone ID: MRT4577_89989C.1.pep
VLPAYPLVPGNIYLRTGPPLLRCLPKFPFLAVSQANFYSIYYSPVFLFLFKAFIRYSLSKFLPPTPLFWLPEPPI

SEQ ID NO: 358355 - protein, 118 aa, Zea mays
  Clone ID: MRT4577_8998C.1.pep
AAFFFFFCLCFFFFFFFFFLLFSFIFFFSTVGTGTPPLQNIVAGASTTYTSNQKLMGEKTPLLGGVLIVKHRKQKLFPTPDRMRPLTTTAVVLIYFQHCSPAGTPIFFKKNNPGPGNV

SEQ ID NO: 358356 - protein, 134 aa, Zea mays
  unsure (1)..(134): unsure at all Xaa locations
  Clone ID: MRT4577_89990C.1.pep
LGDAQHVEEAEKMGLDYMGVEALKKXNKNKKLVFILAKXXHAWGRREILLXXXPRLLXPGLNRGGKFPTLVTHQESLGSXVTETRATVKFQLKKVLCMGVAVGXLSLVEXRIPRDLLMSINFLVSLLXEHWPNV

SEQ ID NO: 358357 - protein, 226 aa, Zea mays
  Clone ID: MRT4577_89991C.1.pep
MMKPGERSRERDADFHYSGHDDEKDRYFFKVLVGDFRERLAVPDKFMQHFTRGLVTSSVTLESRCGRSFHVQVAENLGKVVLQAGWKEFVAAHGLSMGDVLVFKHDGTPRLKVFMFDHSCCEKVPPPCPVKIKREHHVCGGERRETHPEVPSSSCGDASMTFVTASSSSASPSDDASGEWILSPEDQKPRYVPGYILPNGTYLTCVQMQKLKERGRARTSTIPIYG

SEQ ID NO: 358358 - protein, 68 aa, Zea mays
  unsure (1)..(68): unsure at all Xaa locations
  Clone ID: MRT4577_89992C.1.pep
PISHPPSGDAHPIMNHVPLHREFNIYNNASPGNKILLCSVPTGRCSCXPTTXTAXQHCXPKKKKKKRP

SEQ ID NO: 358359 - protein, 91 aa, Zea mays
  Clone ID: MRT4577_89993C.1.pep
CEAARSEIQVLEHLNTTDPNSTFRCVQMLEWFEHHGHICIVFELLGLSTYDFIKENGFLPFRLDHIRKMAYQICKSVNFLHSNKLTHTDLK

SEQ ID NO: 358360 - protein, 37 aa, Zea mays
  Clone ID: MRT4577_89994C.1.pep
LNLGREVRQFQHEIIKRSRSSYTDESLGVILRKGWKL

SEQ ID NO: 358361 - protein, 111 aa, Zea mays
  Clone ID: MRT4577_89995C.1.pep
MAPRGRVELRRIEDKASRQVRFSKRRAGLFKKAFELALLCDAEVALLVFSPGGKLYEYSSSRCWQKKTMVVPVQVQAARCCFTRQSVQPTNETGRASVANGAVPVPHTIVV

SEQ ID NO: 358362 - protein, 261 aa, Zea mays
  Clone ID: MRT4577_89996C.1.pep
HSRRFSMFSPGRLSHRALKLVLAGVLLYHGSPLRAGLSSAPPSMALGCSKSLPYSLIEAARHLSARPHLPVLELVGFSSTRSSPCSSFLPAARVNFLRAELSCTPLHSPKSPPFSLLARAAAPQLLAVACALFLPNSSPFFFRTAAPDLRSSDLVVHLTRYRCRGCTSCSTKAQRDGHAYAIRVDSNSPYTRERHVCVHDLECHKSPHSSSSIQAVSPTCPSTPTIYLSTARYLRRDPKLSVVLDLTSLKLVDIPCVVEKS

SEQ ID NO: 358363 - protein, 87 aa, Zea mays
  unsure (1)..(87): unsure at all Xaa locations
  Clone ID: MRT4577_89997C.1.pep
SEGSSPGFEFPGRRTRPIGDPSFNVYGWEFSNDVNAVDXVLVGMHGRGLTNSLFLPTGGEFIQINPEGHMEHIGEVDFGIPGVDHGL

SEQ ID NO: 358364 - protein, 166 aa, Zea mays
  Clone ID: MRT4577_89998C.1.pep
MAPRGRVELRRIEDKASRQVRFSKRRAGLFKKAFELALLCDAEVALLVFSPGGKLYEYSSSSIEDTYDRYHQFAGAGRKVNGHNNDNRDVAASDLQSRLKEIATWSKQNNAEESDANELEKLEELLTNALRNTKAKKMLAKENNGGAGASTSSQMLLYSAERATDK

SEQ ID NO: 358365 - protein, 229 aa, Zea mays
  unsure (1)..(229): unsure at all Xaa locations
  Clone ID: MRT4577_89999C.1.pep
MQRPSARLFDRVRLPPCPXEAVLLGFQHYLVMLGTTVIIPTALVPQMGGNNEDKAVVIQTLLFVAGINTLLQSFFGTMLPAVTGGSYTFVLPTISIILAGRYANEPNPHIKFLRIMRGTQGALIVASALQIIVGFSGLWRNVARYLSPLSAAPLVALVGFGLYELGFPSVAKCVEIGLPQLILLVIFTMYLPHAVHMLKSIFDRFAVLVTIPIVWLYAYLLTGGGAYRN

SEQ ID NO: 358366 - protein, 51 aa, Zea mays
  Clone ID: MRT4577_8999C.1.pep
KKRFLNKENFLFFLKKREQEFLGNNLKDACFHSIFYCLRSSICLEGFFLMA

SEQ ID NO: 358367 - protein, 53 aa, Zea mays
  Clone ID: MRT4577_899C.1.pep
PPSLGGTGSPPPPFWKTIFSFQFRVPVFIPEQNSPWALFPVGEFSACNFPNRV

SEQ ID NO: 358368 - protein, 231 aa, Zea mays
  unsure (1)..(231): unsure at all Xaa locations
  Clone ID: MRT4577_89C.1.pep
MRERKGGMAAPPARARADYDYLIKLLLIGDSGXAARSLCLSKRLYKGVTPFARSXVLGIGVGFVHMRSVDLAXFARGRXPRLILDDFFEKKKKKKXKKKNYRGAMGILLVYDVTDESSFNNIRNWIRNIEQHASDNVNKILVGNKADMDESKRAVPTAKGQALADEYGIKFFETSAKTNLNVEQVFFSIARDIKQRLAETDSKPEDKAIKINKPDQGSEAPAAQRSACCGS

SEQ ID NO: 358369 - protein, 188 aa, Zea mays
  unsure (1)..(188): unsure at all Xaa locations
  Clone ID: MRT4577_8C.1.pep
MKLERAEGSRGERGGREQRSVERVAASLVSGDRAASEXRELVTERQAGSERAASSGKXQRAGSEQRQAARXEKRARWRAEGEASEQRQAARGEASSGERDGEQREKRVSSRGEAGERRAXERARRAAREPRRRXARETASGQRARRRAGEVASSAEQRGRRPPQSRSRDRESRRRSKSGGVDGKSRPG

SEQ ID NO: 358370 - protein, 62 aa, Zea mays
  Clone ID: MRT4577_90000C.1.pep
HASGSRTRRNTVMGSRSAWGCFSDHKHVSEGVLVNVGEEGIGRTWIVLMGEKTLHLLVKGKV

SEQ ID NO: 358371 - protein, 497 aa, Zea mays
  Clone ID: MRT4577_90001C.1.pep
RSHSHHTTPPLLPAPHSPPRARIAIRVPQMGGNNEDKAVVIQTLLFVAGINTLLQSFFGTMLPAVIGGSYTFVLPTISIILAGRYANEPNPHIKFLRIMRGTQGALIVASALQIIVGFSGLWRNVARYLSPLSAAPLVALVGFGLYELGFPSVAKCVEIGLPQLILLVIFTMYLPHAVHMLKSIFDRFAVLFTIPIVWLYAYLLTVGGAYRNAPPKTQFHCRTDRSGLIGGAPWIRVPYPFQWGAPTFDAGEAFAMMAASFVALVESTGAFIAVSRYASATPIPPSVLSRGIGWQGIGILLDGLFGTGNGSSVSVENAGLLALTRVGSRRVVQISAGFMIFFSILGKFGAVFASIPAPIFAAMYCIFFAYAGSAGIGFLQFCNLNTFRTKFILGFSVFMGLSVPQYFNEYTSIAGYGPVHTHSRWFNDIVNVIFSSKAFVAGFVAYLLDNTIDRHEASVRRDRGYHWWDKFRSYRTDTRSEEFYSLPFNLNKFFPSV

SEQ ID NO: 358372 - protein, 534 aa, Zea mays
  Clone ID: MRT4577_90002C.1.pep
MAGGGGGGAAPKHDDFTPHPVKDQLPGVSYCITSPPPWPEAVLLGFQHYLVMLGTTVIIPTALVPQMGGNNEDKAVVIQTLLFVAGINTLLQSFFGTMLPAVIGGSYTFVLPTISIILAGRYANEPNPHIKFLRIMRGTQGALIVASALQIIVGFSGLWRNVARYLSPLSAAPLVALVGFGLYELGFPSVAKCVEIGLPQLILLVIFTMYLPHAVHMLKSIFDRFAVLFTIPIVWLYAYLLTVGGAYRNAPPKTQFHCRTDRSGLIGGAPWIRVPYPFQWGAPTFDAGEAFAMMAASFVALVESTGAFIAVSRYASATPIPPSVLSRGIGWQGIGILLDGLFGTGNGSSVSVENAGLLALTRVGSRRVVQISAGFMIFFSILGKFGAVFASIPAPIFAAMYCIFFAYAGSAGIGFLQFCNLNTFRTKFILGFSVFMGLSVPQYFNEYTSIAGYGPVHTHSRWFNDIVNVIFSSKAFVAGFVAYLLDNTIDRHEASVRRDRGYHWWDKFRSYRTDTRSEEFYSLPFNLNKFFPSV

SEQ ID NO: 358373 - protein, 127 aa, Zea mays
  unsure (1)..(127): unsure at all Xaa locations
  Clone ID: MRT4577_90003C.1.pep
MGRGRGRGKKLTTVRSHEDKGSSGEEVVPAKKRRGRPQKRFASKIDQADVENFVEQVDADQEEADDAKLKNSAAAGGTKERQAAERGLXILPSXTNSTQRGPMGXSQNGSRRKNKPRRASEAGLECK

SEQ ID NO: 358374 - protein, 159 aa, Zea mays
  Clone ID: MRT4577_90004C.1.pep
NDNLSGLRVLTVGLLLTSPLRVLKGISSLKHPSRSVLMPDLSLVTACSVKLCLTSPFGVVTGISSFINLSGDSFKTDSSFIASTIGGLPPTWSLCDLENEPSWESRKLFILRRPLRVLELETSLESTELFTLRSPLRVLEHEDLLRANVSFFLTSPFVF

SEQ ID NO: 358375 - protein, 76 aa, Zea mays
  Clone ID: MRT4577_90006C.1.pep
IVIACRYLVPADLTVGQFVYVVRKRIKLSAEKAIFIFVKNTLPPTAALMSAIYEENKDEDGFLYMTYSGENTFGLF

SEQ ID NO: 358376 - protein, 117 aa, Zea mays
  unsure (1)..(117): unsure at all Xaa locations
  Clone ID: MRT4577_90007C.1.pep
MFYIAERRQAEANRIREKYPDRIPVIVEKAERSDIPDIDKKKXPFHEYLVPADLTVGQFVYVVRKRIKLSAEKAIFIFVKNTLPPTAALMSAIYEENKDEDGFLYMTYSGENTFGLF

SEQ ID NO: 358377 - protein, 173 aa, Zea mays
  Clone ID: MRT4577_90008C.1.pep
SERRLCDRVFEGLAPYGDLAFVAAVRTQALQLISFGDAVAAASRAPERLFRVIDMYEAVRDLLSDLDPVFSDPYSAALRAEVSAVCNTLGSSIKGIFMELENLIRRDPARVAVPGGGIHPITRYVMNYLRAACGSRQTLEEVMEGDLGAVRPPGQVQAFFFFFFFFLKHPKAE

SEQ ID NO: 358378 - protein, 360 aa, Zea mays
  Clone ID: MRT4577_90009C.1.pep
MDVTSTAAASASGGGRWYTGMSADNIKGLVLALSSSLFIGASFIIKKKGLKKAASSGVRAGVGGYSYLYEPLWWVGMITMIVGEVANFAAYAFAPAILVTPLGALSIIISAVLAHVMLREKLHIFGILGCALCVVGSTTIVLHAPPEREIESVTEVWDLATEPAFMCYAAVVIAIAAILVYRFVPLYGQTHVMVYIGVCSLVGSISVMSVKALGIALKLTFSGTNQLIYPQTWAFSLVVISCIITQMNYLNKALDTFNTAVVSPIYYTMFTSLTILASVIMFKDWDRQNPTQIVTEMCGFVTILSGTFLLHKTKDMADGGLSMSSSFRLPTSSSVRFSKQTDEDGEGIPLRSSESFRSPH

SEQ ID NO: 358379 - protein, 59 aa, Zea mays
  Clone ID: MRT4577_9000C.1.pep
LLNGFLFFCPPTHCNLRWLDQRVFPSFFPQKKKKKKKKKKKKKKKKKKKKKKKKKKKKK

SEQ ID NO: 358380 - protein, 36 aa, Zea mays
  Clone ID: MRT4577_90010C.1.pep
HPEADMIYEMMHTLIGWMKGCSHLSNLNPMYLAEFS

SEQ ID NO: 358381 - protein, 187 aa, Zea mays
  Clone ID: MRT4577_90011C.1.pep
MRSYAAVVRAALLVLGALLLPAHHVMADYSAMAPAPPPPPKPASAISMPPLPANDTNMSPPVQLAPPFVVVQGVIYCKSCKSRGYNRGMDASPIQGATVNLVCYGRKVVNVTATVSDEHGYFLVMFYDLANFNARNCKIYLGTSPTPLCDKPVYPPNKWIGLSLVKETVTSPPVGLQGVYCPSSVLF

SEQ ID NO: 358382 - protein, 424 aa, Zea mays
  unsure (1)..(424): unsure at all Xaa locations
  Clone ID: MRT4577_90012C.1.pep
MDVTSTAAASASGGGRWYTGMSADNIKGLVLALSSSLFIGASFIIKKKGLKKAASSGVRADTHAHDISDLCPKSRRLMSCYISDAPPLLQDFISQFQASFVLLPXRLSIYTSKLQYXFHVIVMTGVGGYSYLYEPLWWVGMITMIVGEVANFAAYAFAPAILVTPLGALSIIISAVLAHVMLREKLHIFGILGCALCVVGSTTIVLHAPPEREIESVTEVWDLATEPAFMCYAAVVIAIAAILVYRFVPLYGQTHVMVYIGVCSLVGSISVMSVKALGIALKLTFSGTNQLIYPQTWAFSLVVISCIITQMNYLNKALDTFNTAVVSPIYYTMFTSLTILASVIMFKDWDRQNPTQIVTEMCGFVTILSGTFLLHKTKDMADGGLSMSSSFRLPTSSSVRFSKQTDEDGEGIPLRSSESFRSPH

SEQ ID NO: 358383 - protein, 53 aa, Zea mays
  Clone ID: MRT4577_90013C.1.pep
VTHSVQRYLNVVVAHVVMHGVDFSDNPKTIISLWFTEITVLLITISDMSTYHA

SEQ ID NO: 358384 - protein, 88 aa, Zea mays
  Clone ID: MRT4577_90014C.1.pep
NGGNGDWTVKQHRAFLAAELPHSNLVGSCIKTIPFSSFQGQCKYKPPGSNGGVCQLSFNKKKTGLYVTLFKKKKKKNPQKKKKKKKKK

SEQ ID NO: 358385 - protein, 77 aa, Zea mays
  Clone ID: MRT4577_90015C.1.pep
RMVLPELHLLDLVSADDAAQLQWRSPEAANQGLQEADRAGGDDQGEQDGKYRRSECQAPHHKKNPRDTIKKKHQVQD

SEQ ID NO: 358386 - protein, 401 aa, Zea mays
  Clone ID: MRT4577_90016C.1.pep
MASLAQHVAGLPCPPLSGASRRRPAAQRRPPSALVCGTYALTKDERERERMRQVFDDASERCRTAPMEGVAFSPDDLDTAVESTDIDTEIGSLIKGTVFMTTSNGAYIDIQSKSTAFLPLDEACLLDIDNVEEAGIRPGLVEEFMIIDENPGDETLILSLQAIQQELAWERCRQLQAEDVVVTGKVIGGNKGGVVALVDGLKGFVPFSQVSSKTTAEELLEKELPLKFVEVDEEQGRLVLSNRKAMADSQAQLGIGSVVLGTVESLKPYGAFIDIGGINGLLHVSQISHDRVADISTVLQPGDTLKVMILSHDRERGRVSLSTKKLEPTPGDMIRNPKLVFEKADEMAQIFRQRIAQAEAMARADMLRFQPESGLTLSSEGILGPLSSDAPSEDSEEPTDE

SEQ ID NO: 358387 - protein, 73 aa, Zea mays
  Clone ID: MRT4577_90017C.1.pep
RGRVGFPATTARDSKARKNQRGLKKISGLFTKSNLKGLFRGSWRKLTPFPTGDVTRSYSNTKGPFVQLALYKL

SEQ ID NO: 358388 - protein, 117 aa, Zea mays
  Clone ID: MRT4577_90018C.1.pep
AWLAACPRSRTTAALCASAPTKPKRASSGAPAPSFHMASEASMCRDCEMTGGGRWRWGGYAPSRPVSMKPPVRTWWRASRWLDRIPSAASSWKASSSGSSSSFKIWLLGSIYGSTDC

SEQ ID NO: 358389 - protein, 126 aa, Zea mays
  unsure (1)..(126): unsure at all Xaa locations
  Clone ID: MRT4577_90019C.1.pep
SAXGRPPGRXXXGCXVXAFPFFXWGXXWCXSVLXCLASACSLXFXXVVXXGGWXCXSPLAAXGLXVGERRKPPPPPFFFLCCARGPLWXSGRCRRXWWLVPAXXXGXXAXLARRPARSVFXPPPPP

SEQ ID NO: 358390 - protein, 50 aa, Zea mays
  Clone ID: MRT4577_9001C.1.pep
NRSARWPGDDDGRAGTPLLLRGGAASGVLVLVCTVASRARLCSICTSCRI

SEQ ID NO: 358391 - protein, 79 aa, Zea mays
  unsure (1)..(79): unsure at all Xaa locations
  Clone ID: MRT4577_90020C.1.pep
SLIFPSPIGRPRLTAWEVPPPTILPIFVNCKDLTYYNGQMLSFDVVKIVQAFKNEILPRHGLIKVCEFTLSEXEHFVVP

SEQ ID NO: 358392 - protein, 84 aa, Zea mays
  Clone ID: MRT4577_90021C.1.pep
YANGSRNLAPVLCRFTYSYSHSNFSLNLAPSISYRSCAQMTRRQYLSSHTPLDALADGHHLHLFLIGSWYGLVVVGCLWHPYAA

SEQ ID NO: 358393 - protein, 39 aa, Zea mays
  Clone ID: MRT4577_90022C.1.pep
LIASCTELSIYPSPRRKLDPLHDGVKLKGGRGPSQRTAW

SEQ ID NO: 358394 - protein, 92 aa, Zea mays
  Clone ID: MRT4577_90023C.1.pep
MEPGEDSHFAHKIKTPLEVQRGLLWSQGKRAHVVSVGWHDTQIPWRGQLCLKIWREIQQAAPFFSQFYTSLGPTRRDLLFRKPPALLTPSGR

SEQ ID NO: 358395 - protein, 74 aa, Zea mays
  Clone ID: MRT4577_90024C.1.pep
GFFFCQTLKIFFFRQKFFLVLVFPKLVPNKIFSPPPPKPNHWLAPYHFVVFKIKWAPLPSLNLVPFSSKKPFFF

SEQ ID NO: 358396 - protein, 63 aa, Zea mays
  unsure (1)..(63): unsure at all Xaa locations
  Clone ID: MRT4577_90025C.1.pep
SNMTATSIDFGVKFMVFCRQMVLGIGVGSRESGHWKERRRESRPXRPRGTHKKXKKIXXXKKX

SEQ ID NO: 358397 - protein, 102 aa, Zea mays
  Clone ID: MRT4577_90026C.1.pep
PIVRENTGIKKRRGSGQREGAGQGPPVVPFLRSLYQHQLFPITEEREACRRATAPHGHRSRWGAQPHRLLHLGSTLHSPPSTRIISSLFLHRDAFLSQVILF

SEQ ID NO: 358398 - protein, 89 aa, Zea mays
  unsure (1)..(89): unsure at all Xaa locations
  Clone ID: MRT4577_90027C.1.pep
QGKLLPFTQLAALNPGAYLXXQMLLPFSFLVGASSVSFLTQQRLIPLYKQFSSTSATFLVVHQLLPFVQLALTKPAASYQQRIIGGALF

SEQ ID NO: 358399 - protein, 250 aa, Zea mays
  unsure (1)..(250): unsure at all Xaa locations
  Clone ID: MRT4577_90028C.1.pep
MGFLEDFQASVEALPSMLHRNYSLMRELDKSLHGVQLENEQRCQQEIEDIKHGLESGSITYDPAKLKFSEEAMEEQKHCVRIADEKVALATQTYDLVDAHIQQLDQFMRKLEEIRQEKEAAAAVTAGTAVATTATPTVNAGATTADANPKSGRSGERGRGGRKKAKVPTXAVSASASATATXIDLELPVDPNEPTYCLCNQVSYGEMVACDNPNCKIEWYHYGCVGVKEQPKGKWYCPNCIGFQKKRKGK

SEQ ID NO: 358400 - protein, 76 aa, Zea mays
  Clone ID: MRT4577_90029C.1.pep
KKKKKKKKKKKKKKKKKRGGCFKRGGLLTRFFQTKISLIVCPKLNPLSVALQLLVWQLFVLPQLNLFAAHPLSNRW

SEQ ID NO: 358401 - protein, 333 aa, Zea mays
  unsure (1)..(333): unsure at all Xaa locations
  Clone ID: MRT4577_9002C.1.pep
IRLEPKGAVVFNGTNEDDFLYCLPDNKELSVCREMARSMGFPKLEAGLCAMTKEDLADSLAYNSLKGLILSNALRAQKSAEDESYEIAFNNLRSEVIKLRNEALEKDKILLTLVDKVKKDEVASKIQAEAQKREIKDLQKQLARAKEERVFEETKRELSDQLVNHLELSVQELRASQRKCYVKSIECVKKIKSSFASVGAFSSEESXSPEAIPKXLEWISHEAEAFEEILSSRGDICAFSGARGVATVLEKKGCDHIKLLAQSEATLSAEDIKDPSTEASQVGGKFFTDVWDNGGREMAGEIIQRSEKGIHDAREVAKAAEKSAEPEGQLGIN

SEQ ID NO: 358402 - protein, 60 aa, Zea mays
  Clone ID: MRT4577_90030C.1.pep
PEFPFFKKKGLPRFSPLGLWEPGALNQSPLKPKSRWGDSSFLKKKVGPFPQENILFGWRG

SEQ ID NO: 358403 - protein, 59 aa, Zea mays
  Clone ID: MRT4577_90031C.1.pep
FGNSLLGNQIDLPVCDLEMKDRTIRDHVGLDIAFHPRMAFETTMRVFHSLKLITVSNLE

SEQ ID NO: 358404 - protein, 38 aa, Zea mays
  Clone ID: MRT4577_90032C.1.pep
MGSTAGDVAAVVDEEACIYPMQVSARAILPITLKNAMY

SEQ ID NO: 358405 - protein, 97 aa, Zea mays
  unsure (1)..(97): unsure at all Xaa locations
  Clone ID: MRT4577_90033C.1.pep
MAPLLPFYSAMSLAFAALAACWFPQCARFWREVVPFQSCVTLVITXGMMEGTTWYVDLAEFNESRVCPRGATFWAATSGALHGVAARVLVQAVAMGH

SEQ ID NO: 358406 - protein, 59 aa, Zea mays
  Clone ID: MRT4577_90034C.1.pep
ILLNQIRPAVWLGKDGTRDPVSSGCSFGLWIIFYASKKLRLVWVIDGRLCTYVHRGREL

SEQ ID NO: 358407 - protein, 258 aa, Zea mays
  unsure (1)..(258): unsure at all Xaa locations
  Clone ID: MRT4577_90035C.1.pep
AGRFGNLNLLHQFAASPRPHRRVDPEGACRRRRERRPEQERDWGRRIWSPADLHCRGTAARRQISPRPLPRHRHGTAWWLPRRRPPRQIRPAPRARRSRRRSTSPTPPPXRRNSRSNKPXLEVPARRRXSPASSTSSXPRPRPAAPSPRSAPGHLPRRRSTPRRPPPPRRQRQPPPPPRPRCGASPCRSRGSPSSTRRRARXRASSPSSPAARRGPTPERRKSVSSVPEAENAAGDQAGAPXLRPRRRGPAARRRSGR

SEQ ID NO: 358408 - protein, 101 aa, Zea mays
  unsure (1)..(101): unsure at all Xaa locations
  Clone ID: MRT4577_90036C.1.pep
PGLAQQPPTAPRCPARGKQAAKAXXAAFSAKPGGXKXXAGSTXTGRKXADARPTARTNRRPRAAAEGAKNGDKSGNEDHDDNGNTTGQRDPHGADAPTPNN

SEQ ID NO: 358409 - protein, 53 aa, Zea mays
  Clone ID: MRT4577_90037C.1.pep
NKLAAFLKPRERKNPGVTQLKSLAEKKILNSWGNSEKAKTNRPSKQLRTLNGK

SEQ ID NO: 358410 - protein, 120 aa, Zea mays
  unsure (1)..(120): unsure at all Xaa locations
  Clone ID: MRT4577_90038C.1.pep
LGTSRPAGKTPLHQYNPESQIPPRHLPFYGARYKPANCTVRKWHPRPSAPSPPPRSPRPPSRGSRWPPTRPRPAPRLGPPPSRPPSSPPSSAPPXAPLRQPAPLSAPGHGEFVPFLLCMY

SEQ ID NO: 358411 - protein, 26 aa, Zea mays
  Clone ID: MRT4577_90039C.1.pep
IIQYFVHSTESNTWAVSLFIYKCVVT

SEQ ID NO: 358412 - protein, 96 aa, Zea mays
  Clone ID: MRT4577_9003C.1.pep
VLCVRGVCFDNKIAIQFIFRTQGANVLFGLILQVRWTSNHAYTLIGTYLQIDTCLFIGYLIPTAISLKLMLPHTLRTGLCLRTLADEAQTLLCVTA

SEQ ID NO: 358413 - protein, 129 aa, Zea mays
  unsure (1)..(129): unsure at all Xaa locations
  Clone ID: MRT4577_90040C.1.pep
DCSRRARPGKPTAPVQLRIPDPSSPPRHLCTVRKWHPRPSAPSPSPPSPRPPSRGSRWPPTRPRPAPRPVPPPSRPPSSPPSSAPPXAPLRQPAPLSAPGHGELSRSCFVCTSTSASRCLPTLAASHVR

SEQ ID NO: 358414 - protein, 109 aa, Zea mays
  Clone ID: MRT4577_90041C.1.pep
SCPTVRTSPLGSALRVSAQHAAMSSGGTPPVGLTPADGGMFSTDRIGGFGYGVGVSVGILLLVTTITLASYFCTRAPRRRGGRPPPSSGRHRRRGRTTMSSSASTRPRS

SEQ ID NO: 358415 - protein, 99 aa, Zea mays
  Clone ID: MRT4577_90042C.1.pep
PPSLSPSPSSPVIAAPPLNPSRPPPPGGGVHGAGSPLGTPSCGCESYIGVWREEEGRKEGGKEEPKEGEGGIVLRDWAERPAKGLDPCLGMRGVSALAL

SEQ ID NO: 358416 - protein, 318 aa, Zea mays
  unsure (1)..(318): unsure at all Xaa locations
  Clone ID: MRT4577_90043C.1.pep
GPRADAAVLXEQLVEFCDQRFRIKLDNESLPIEHITKGVMFLDHVLCRRVVYPTLRYTATGGKIISEKGVGTLLSVTASLKQCIKQFRKLEFLKGDREPDPQPCFRMFHATQSHTNSQMNKLLLTMAEWYRYADNRKKVVNFCSYIIRGSLAKLYAAKYKLRSRAKVYKIASRNLSRPLKDKKGQSPEYHNLLRMGLVDSIDGLQYTRMSMVPDPDYTPLPFGWRPDHEKILLEYIKLTDQQTLKEQRNCTREDGLITPQDNISMLVWGYKKNAVLLPSKVSDAQGSTEDLGSDTDELNEKELGNEGNQSFQKLAEMS

SEQ ID NO: 358417 - protein, 50 aa, Zea mays
  unsure (1)..(50): unsure at all Xaa locations
  Clone ID: MRT4577_90044C.1.pep
YSQGPGNPTKXSKGMGRDPRGHFKNTKETAFALLKVALTQRVSIPLGRYW

SEQ ID NO: 358418 - protein, 75 aa, Zea mays
  Clone ID: MRT4577_90045C.1.pep
THSNHIYGLRTNRTRPYLAQRIAYCMMQLRNTCYLAHATYEHWSLGTSVMGFSHRPLRHIIPSSSNPDIFRPYAS

SEQ ID NO: 358419 - protein, 113 aa, Zea mays
  unsure (1)..(113): unsure at all Xaa locations
  Clone ID: MRT4577_90046C.1.pep
PPPLDIILFFFYDPGCGARPIKRWVKKRGGPPLSKMLXPEGIAENCPVFIYPAPGKDKLVSRVARNGGLVNPXTGIKSDILIQVPPRPPRKDPGQAVKKIRFLEEAQAGMAQE

SEQ ID NO: 358420 - protein, 93 aa, Zea mays
  unsure (1)..(93): unsure at all Xaa locations
  Clone ID: MRT4577_90047C.1.pep
AAGSAFGCRVGGALVVVPPSVTVPNEEGETVDLYVPRKCSGTVRIISGEGHASVXYNIGHLGGGGLXDGPFXSLALSGFGRAQGDAGCSLDRL

SEQ ID NO: 358421 - protein, 70 aa, Zea mays
  unsure (1)..(70): unsure at all Xaa locations
  Clone ID: MRT4577_90048C.1.pep
ATDQEELEKKMAEYAEKMKNKKAIIHKKAKEKRAMVMAQHGEEILKTEEMAAKSRCLXVAPKKFLRCFRA

SEQ ID NO: 358422 - protein, 105 aa, Zea mays
  Clone ID: MRT4577_90049C.1.pep
NWPCSSKHKITIIAFINHSSLWAPSHGHPLIPEEHPPFLFMTFLLQASRCTHPLTTIFVLKIILIRKGPIHGYTFKGTHAPKHLGILYNINLYLEKSSLHSFSSR

SEQ ID NO: 358423 - protein, 33 aa, Zea mays
  Clone ID: MRT4577_9004C.1.pep
LYEEKSSDCSVNSSDYSIEKYSVDDENCSPQAE

SEQ ID NO: 358424 - protein, 89 aa, Zea mays
  Clone ID: MRT4577_90050C.1.pep
GLLWANCLGGENLFPPLSRCCLPPGGWGRPLFFCQPHGHGGGARVWGFKCLSAPWSLPGAEFLFLGIIINWVMFGFGNLVGGGFGVPHF

SEQ ID NO: 358425 - protein, 91 aa, Zea mays
  unsure (1)..(91): unsure at all Xaa locations
  Clone ID: MRT4577_90051C.1.pep
PSTDYIXKAQDARRAMIYVHATLMIVHYAYIIIMSTNINHRSMDGACDSQITMCSYQPYHLSTRQPARGLIQGFQMSYWFEHQQMLHYLFH

SEQ ID NO: 358426 - protein, 67 aa, Zea mays
  unsure (1)..(67): unsure at all Xaa locations
  Clone ID: MRT4577_90052C.1.pep
SSLLVVVPIVLIRGVDGXIVNLLKKKKKKKKKKKKKKKKKKKKKKNKKKKLGIPTTRDPTAPEINTK

SEQ ID NO: 358427 - protein, 83 aa, Zea mays
  unsure (1)..(83): unsure at all Xaa locations
  Clone ID: MRT4577_90053C.1.pep
QMRSYTLILSCXXHSKSSNLTLITHIIYLNVLDFNLLIHLTTYFECIHTLTFIFNPDFYKEIQFSISINLFKTTTKHQFQTHH

SEQ ID NO: 358428 - protein, 72 aa, Zea mays
  Clone ID: MRT4577_90054C.1.pep
TSALALERLSKLLSSIIHAMLFSNGYLINKTPMKLLPYTHLETKLSEIHYLLISYADGTYSGLFTIHTYTIL

SEQ ID NO: 358429 - protein, 81 aa, Zea mays
  Clone ID: MRT4577_90055C.1.pep
GFEHFGDVVKIWFTFNERETWSYFCYGTGIFAPGRCSPGQKCANPTGNSLTEPYIVAHNLLRAHAETVHDCNKHHTRSMDP

SEQ ID NO: 358430 - protein, 334 aa, Zea mays
  unsure (1)..(334): unsure at all Xaa locations
  Clone ID: MRT4577_90056C.1.pep
RECNGPGRARERERESGLLFLCSPSNNPSPSSPCWPIVSGEQSKQLTDAGGGFAEXMMREQSLLEATCGDLFDHIDDLLDFPKEDSAADVLLLDAPAPGSPLSSARIIDVGRAGSAPAPPALAPSLPAQQDTTAFFATAGPDVFDPRDVGAHLGSCDDIDMDMDMAQLEWLSGLFDDASIPHEPAFPGAAPIIKSSALAAGALLPPDKMEDALLFRSSSPISVLEHGSFNNANGGGGGCSASSESSSASSSSESFSGSGSGSGEGHAWSAPVSPPPVLVIPARARSKRSRPSAFTRAGAEAPTILVPTPMYSSGPSHSDPESIAESSPHPAPPM

SEQ ID NO: 358431 - protein, 65 aa, Zea mays
  Clone ID: MRT4577_90057C.1.pep
MEVDAPGVDGRDGLRERRGFSEGGRQNFDVRPQSGANGLPKHSYWLDLWLFILFDVVVFLFVYFL

SEQ ID NO: 358432 - protein, 94 aa, Zea mays
  Clone ID: MRT4577_90058C.1.pep
FTKGGSNNPPPPDGVCVIRLVCFACTAKLFEFEGAGLPPIELLPEQFCPQQCFFDHKGINQSLILSPPWSFMFKQTLALRRTFVKNVTAKKVSK

SEQ ID NO: 358433 - protein, 232 aa, Zea mays
  unsure (1)..(232): unsure at all Xaa locations
  Clone ID: MRT4577_90059C.1.pep
MAGGGFVEDMMREQSLLEATCGDLFDHIDDLLDFPNEDSAAAVLLLDAPAPGSPLSARIIDVGRAGNALAPPAAPAQHDASASAFFAAAGNDVFDTKDVVGAHIGSCDDIDMDMAQLEWLSGLFDDASIPHEPVFPGATAGGAAPIMKSSALAAGALLPPDKMEDALLFRSSSPISVLEHGXGGSGSASATGSASSSSSSAXSSSESFSGSGSGXGGGHGWSAPVSPRPAPP

SEQ ID NO: 358434 - protein, 129 aa, Zea mays
  unsure (1)..(129): unsure at all Xaa locations
  Clone ID: MRT4577_9005C.1.pep
GTVTVISPFRSFLLKMFFXEHEGKEFTGLAWXFLGFPTSDTLLYKXEEVGKINDIAPDNFQLYFSVSPXQTNPAPEKKNIXTPIVDFKKKXCSRFKKEKTYLYIFVLYGMXKGICHILLFSLVQDWKNC

SEQ ID NO: 358435 - protein, 43 aa, Zea mays
  unsure (1)..(43): unsure at all Xaa locations
  Clone ID: MRT4577_90060C.1.pep
NTGFMRRSXMAERNMLPSYVXVGFAFRKKRLTSXXGRVGRPRT

SEQ ID NO: 358436 - protein, 253 aa, Zea mays
  Clone ID: MRT4577_90061C.1.pep
MAGGGFVEDMMREQSLLEATCGDLFDHIDDLLDFPNEDSAAAVLLLDAPAPGSPLSARIIDVGRAGNALAPPAAPAQHDASASAFFAAAGNDVFDTKDVVGAHIGSCDDIDMDMAQLEWLSGLFDDASIPHEPVFPGATAGGAAPIMKSSALAAGALLPQDKMEDALLFRSSSPISVLEHGSGGSDNANGGGGGCSASSESSSASSSSESFSGSGSGEGHAWSAPVSPPPVLVIPARARSKRSRPSAFTRAGA

SEQ ID NO: 358437 - protein, 121 aa, Zea mays
  Clone ID: MRT4577_90062C.1.pep
SLAGFSVPCQGAFLFPFGFVTVWDCLWGGASGLFLHWGVGGLVPRPLSWCLGGFGYVPPPPAGAVIWFFGSPMLEFFAACCRLSALLFFVPVRPLLFFFFLGGFFFCVPSRSPFFFCPRVR

SEQ ID NO: 358438 - protein, 56 aa, Zea mays
  Clone ID: MRT4577_90063C.1.pep
AQHDHQKPAVPSSDHPAYTISADHNSTYAMAHHLDNIHTPSFIPAEPRQSIISALT

SEQ ID NO: 358439 - protein, 151 aa, Zea mays
  unsure (1)..(151): unsure at all Xaa locations
  Clone ID: MRT4577_90064C.1.pep
FCPPDVAANDSDSLWLQCDDIDMDMAQLEWLSGLFDDASIPHEPAFPGAAPIIKSSALAAGALLPPDKMGDALLFRSSSPISVLEHGSFNNANGGGGGCSASSESSSASSSSESFSGSGSGEGHAWSXPVSPXPVLVIPXRARSKRSPPVP

SEQ ID NO: 358440 - protein, 362 aa, Zea mays
  unsure (1)..(362): unsure at all Xaa locations
  Clone ID: MRT4577_90065C.1.pep
FHPPLSLAYLQAFVITNSYSSARESATGRAELEREREKAAFFFCVHQATTPVQALRVGRSFPANRASNSQPRRRLTDWRNCVARSIEADAGGGFAEXMMREQSLLEATCGDLFDHIDDLLDFPKEDSAADVLLLDAPAPGSPLSSARIHXDVGRAGSAPAPPALAPSLPAQQDTTAFFATAGPDVFDPRDVGAHLGSCDDIDMDMAQLEWLSGLFDDASIPHEPAFPGAAPIIKSSALAAGALLPPDKMGDALLFRSSSPISVLEHGSFNNANGGGGGCSASSESSSASSSSESFSGSXSXKAMAWSAPVSPPPVLVIPARARSKRSRPSAFTRARGXAPTILVPTPMYSSGPSHSDPRASL

SEQ ID NO: 358441 - protein, 68 aa, Zea mays
  unsure (1)..(68): unsure at all Xaa locations
  Clone ID: MRT4577_90067C.1.pep
SLLTTPISTTTYTLISPLQYFXQTNTLCFNPTTVFSLTHYFYITFYTILNATTNYTLTHMQQSNTLQS

SEQ ID NO: 358442 - protein, 118 aa, Zea mays
  Clone ID: MRT4577_90068C.1.pep
GHAPAAAVALRTDVVGVVGRGLLAQVVAAGSTHATCSTIYLAADRNFADISVGALSEETMEQGATTLQPIFPEKKSVLLSSSTDSKLGGLKAYHLARGLCDRCDEKWHRGHKCNDIVQ

SEQ ID NO: 358443 - protein, 58 aa, Zea mays
  Clone ID: MRT4577_90069C.1.pep
PHVNFRLVPSGRNVIGSRRNNEPLCKKKKKKKKKKKKNKKKKKKKKINNKKKKKKKKK

SEQ ID NO: 358444 - protein, 70 aa, Zea mays
  Clone ID: MRT4577_9006C.1.pep
YFIGADPIWAQSMFSGSDLGAIHVLYYIPEHLFPPLESHSPSQTKPLLVPHKLQGIEASNLVLQIITILN

SEQ ID NO: 358445 - protein, 69 aa, Zea mays
  Clone ID: MRT4577_90070C.1.pep
MYFEKYCHHSSINLDQYVYNKLSFKQHLCNLLECINLYSISNFTSFTLVFAQTYTQYSISFLNPQFHFS

SEQ ID NO: 358446 - protein, 337 aa, Zea mays
  Clone ID: MRT4577_90071C.1.pep
RAAPCPVCFDQPFPLFDPSVSSTFRAVACPDPICRPSSGLSVSACALKTFRCFYLCSYRDKSITAGYSFKDTFTFMSPNGEGAPPVAVSGLAFGCGDYNTGVFASNESGIAGFGRGPLSLPSQLRVGRFSYCLTSHDETESNKTSAVFLGTPPNGLRAHSSGPFRSTPIIHSPSFPTFYYLSLEGITVGKTRLPVDSSVFALKKDGSGGTVIDSGTSLTTLPEAVFELLKEEFVAQLPLPRYDNTSEVGNLLCFQRPKGGKQVPVPKLIFHLASADMDLPRENYIPEDTDSGVMCLMINGAEVDMVLIGNFQQQNMHIVYDVENSKLLFASAQCDKM

SEQ ID NO: 358447 - protein, 98 aa, Zea mays
  unsure (1)..(98): unsure at all Xaa locations
  Clone ID: MRT4577_90072C.1.pep
NLHFYQSVYPTNMXNFLKXTISYGWTSNRRIMLYMTGPQPLLSQIEHFLYTAIHLAVTFVVHPALIFAYLCXAGYLSTHHDFHSILHDRYYIEVPYNI

SEQ ID NO: 358448 - protein, 135 aa, Zea mays
  Clone ID: MRT4577_90073C.1.pep
ILIFLLLLFKKNSALAEHLSSDLPYKLSTDDIFLTVGGTQVIEVVVSVLAQPGANILFPRPGYPNYEARAGLHNLQVRHFDLIPERGWEIDIDFLESIADKNTTAMVIINPNNPCGSVYTREHLAKAWLLISLTI

SEQ ID NO: 358449 - protein, 237 aa, Zea mays
  unsure (1)..(237): unsure at all Xaa locations
  Clone ID: MRT4577_90074C.1.pep
MATHASDNGSGHAEWRFARAAKEGALAVAGDKMSIRAARFKISASVDGRDPRPVLPLAHGDPSVFPAFRTAAEAEDAVAAALRTGKFNCYPAGVGLPEARRALAEHLSSDLPYKLSTDDIFLTAGGTQAIEVVVSVLAQPGANILLPRPGYPNYEARAGLHNLQVRHFDLIPERGWEIDIDSLESIADKNTTAMVIINPNNPCGSVYTREHLAKVAEVARKLXILVIADVYGNLLTS

SEQ ID NO: 358450 - protein, 411 aa, Zea mays
  Clone ID: MRT4577_90075C.1.pep
MNALAATSRNFKQAAKLLGLDSKLEKSLLIPFREIKVECTIPKDDGTLASYVGFRVQHDNARGPMKGGIRYHHEVDPDEVNALAQLMTWKTAVANIPYGGAKGGIGCSPGDLSISELERLTRVFTQKIHDLIGIHTDVPAPDMGTNSQTMAWILDEYSKFHGYSPAVVTGKPVDLGGSLGRDAATGRGVLFATEALLAEHGKGIAGQRFVIQGFGNVGSWAAQLISEAGGKVIAISDVTGAVKNVDGLDIAQLVKHSAENKGIKGFKGGDAIAPDSLLTEECDVLIPAALGGVINKDNANDIKAKYIIEAANHPTDPEADEILSKKGVLILPDILANSGGVTVSYFEWVQNIQGFMWDEEKVNAELRTYMTRAFGDVKQMCRSHSCDLRMGAFTLGVNRVARATVLRGWEA

SEQ ID NO: 358451 - protein, 251 aa, Zea mays
  Clone ID: MRT4577_90076C.1.pep
MRSAGASILLLHRPLLRAKLPSFCAPSVQQLTDPSSFARAMHGRVTVLLVVAAAVLLLASSAVAQPWPSCDGASGNYLAGSAYANNTLQLILGLQTNASDSPAYFASGSVGAGAGAVHGLMICRGDVSSNDCFDCGTRAWQDVQAVQPLCNRTRDAALADNQCYVRVAATDFLASPNNTGLVSVVGGASIPRGVDVAAYDAALKRLLTATGRYAVDRSVPSSPAKLYFATGQFGGLDPGVPNIWSLAQCAG

SEQ ID NO: 358452 - protein, 57 aa, Zea mays
  Clone ID: MRT4577_90077C.1.pep
LISHDVTTSHAQRYSGRRCELYLGASGMSRNVMSWDLTLGTTSRWWNPALERLLGTQ

SEQ ID NO: 358453 - protein, 147 aa, Zea mays
  Clone ID: MRT4577_90078C.1.pep
MGDAVIEGSNWRLVEVGRVVVINGDHPFAGHLATIVEIIDHKRILVDGPSANASLATPRQAVPLNKVLLSSLVVEGLNRGSRTGVVRKLWEKSEIDSKWEQTNWAKKRDQMERRKALTDFERFQVLRLKKQRRFEERKALAKVKASA

SEQ ID NO: 358454 - protein, 94 aa, Zea mays
  Clone ID: MRT4577_90079C.1.pep
WMSRGGPSPQPRFVASLVSIQDFQEKHSDSDPVTNALGHRPGRVPLASKPYVGAGGGTLPSWVTIDLSTPWAVNRCQHPRKKEEQMLCSCHALQ

SEQ ID NO: 358455 - protein, 57 aa, Zea mays
  unsure (1)..(57): unsure at all Xaa locations
  Clone ID: MRT4577_9007C.1.pep
YVGLHYQITHRSSNFIFLSHFXKSTHPXFPSGLSSPLTPSWPKIKNRGSIGFGQGSG

SEQ ID NO: 358456 - protein, 34 aa, Zea mays
  Clone ID: MRT4577_90080C.1.pep
WVPNTRPNRVLCRLKASNERASSTVIRDPRIQRG

SEQ ID NO: 358457 - protein, 101 aa, Zea mays
  Clone ID: MRT4577_90081C.1.pep
KKRARYKKKKKFFEGNGGPTKNVSIVPGKKQKGNAAGGGGFLIYSKIIHFPGKTTNAVWDFPKVKIKGGLASPGAFSFPSVVCFFPSLVLYIRSVNILSGA

SEQ ID NO: 358458 - protein, 197 aa, Zea mays
  Clone ID: MRT4577_90082C.1.pep
MTMKLRLRSMDARGGVAETHRVQLTDTAVLSDVKSFLAAKLSAAQPVPAESIRLSLNRSQELRSPDPSATLAALGLASGDLLYFTLSAELLSQPSPPEILPRNPSPVTASIGQIASGSKSPGEAGGSSSLPQNLHIQPVCSSVPQNLHIEPISSSRPRTLHVEPSLPVASDPPDVVMAEAVHAPKSLSSLVIGILKR

SEQ ID NO: 358459 - protein, 136 aa, Zea mays
  Clone ID: MRT4577_90083C.1.pep
MSKITVAGVRENVAALLEYSNETKKRNFLETVELQIGLKNYDPQRDKRFSGTVKLPTVPRPNMSICILGDQHDIDRAKHGGVDAMSADDLKKLNKNKKLIKKLARKYDAFVASDTLIKQIPRLLGPGLSKAGKFPN

SEQ ID NO: 358460 - protein, 57 aa, Zea mays
  Clone ID: MRT4577_90084C.1.pep
GPSPNLNSALHLVLEHVDSLGQKTKGNTREPTTRQTRPLKDTFFIHWSTPKIGGMDE

SEQ ID NO: 358461 - protein, 74 aa, Zea mays
  Clone ID: MRT4577_90085C.1.pep
KHSFFMCIACHRFSVIASQVVRSLTTLSLAVFMSFAPRLFTNHCSDQVCLVFKFGHVLECIKLVMYMSSALLIV

SEQ ID NO: 358462 - protein, 94 aa, Zea mays
  Clone ID: MRT4577_90086C.1.pep
LPFGGVHKMGLKKPMGREWGGLLKTCIQYDTGHGKKELTGNKKLGSLATHTQNSYSFNWLEDFNFTLRPIELPDHQDHKRKLKRGWSTDSSTSK

SEQ ID NO: 358463 - protein, 67 aa, Zea mays
  unsure (1)..(67): unsure at all Xaa locations
  Clone ID: MRT4577_90087C.1.pep
IYSSIEVVHDHLIRIXGVLDGGEILSPSDYILNTLIHHSILLGPLLPRHGSFLDFDSIDRPPCRGGA

SEQ ID NO: 358464 - protein, 123 aa, Zea mays
  unsure (1)..(123): unsure at all Xaa locations
  Clone ID: MRT4577_90088C.1.pep
NQEGQKPPLPQVAPYKKGQDSLFAPGKPPFGPPPSGYGGPAQPVFPQKAQAPQKIVFKLPGPSCQPFSPPALQRSQPFXIGGGQKGQGPFFFLAFRPPVWVFSLNRGSSSPVIKTCPPISMFM

SEQ ID NO: 358465 - protein, 108 aa, Zea mays
  unsure (1)..(108): unsure at all Xaa locations
  Clone ID: MRT4577_90089C.1.pep
RRHQARDSPPTKRERELGTDRRETGQIDPTDDRAAIAPPPRRRGTGDSHNGPPPKKKSQGKKEKKKPDKHRTPXRQNPSQQPAPPHAARPDPRRASRHKGPPPGSRRP

SEQ ID NO: 358466 - protein, 82 aa, Zea mays
  Clone ID: MRT4577_9008C.1.pep
MLCPPAMFRFSKLIKKGWKLVFVLPTCCFFQGKKNPPLLQRCCLKRPIFDWYFVPGALQNCLFGLMSRKKMNWPPWTGVFLF

SEQ ID NO: 358467 - protein, 200 aa, Zea mays
  unsure (1)..(200): unsure at all Xaa locations
  Clone ID: MRT4577_90090C.1.pep
VSEDTSALVFSSVCLDLAFSPSFSKQRQSSTSLAPRKALKMGLASAAGAAXPGRLAGLRIKRPRXGAQAARVAMGQVPRADPSVGTTIVSEETADAVVAPSPPDLLLAPASTPAGAVADSPAEPPVAPDVGMVEEPPLVVVPDLPSLGHKERADAVAEVGDRGPASLAEGRPSTSTTRVPDASTAGGPNALEEGRAEPRP

SEQ ID NO: 358468 - protein, 64 aa, Zea mays
  Clone ID: MRT4577_90091C.1.pep
IMLTVQTRTLSLTLVIRYTYSMGRKIRYNTCVCTTIYRVEHSALYLYTCKLTASRHILAPSLEL

SEQ ID NO: 358469 - protein, 65 aa, Zea mays
  Clone ID: MRT4577_90092C.1.pep
LKHLRRVVGLHSMIRLHRLRDSTRATRRSKSIKTNTQRNPDIRKRHKVLLNSNNRLLRQHHSASR

SEQ ID NO: 358470 - protein, 121 aa, Zea mays
  unsure (1)..(121): unsure at all Xaa locations
  Clone ID: MRT4577_90093C.1.pep
MARTLSAVAVAVEAAVLLLAAPVTTSEDDITCGQESSDIATCLSYARGTGTGPSVPCCTDVRNLXSAASTAADRSAACNCLKNAARGVIDLNAGNVASIPSKCGSFIPYTISTSTDXCSRV

SEQ ID NO: 358471 - protein, 54 aa, Zea mays
  Clone ID: MRT4577_90094C.1.pep
VSLIKKTASYNETFTSIPGASYYTCALIIIILNNVLFTLTLTCKLTLSELYIHL

SEQ ID NO: 358472 - protein, 132 aa, Zea mays
  unsure (1)..(132): unsure at all Xaa locations
  Clone ID: MRT4577_90095C.1.pep
MARTQSAVAVAVVAAVLLLAAVATTSEAAITCGQVSSGIARCVSYARGTGSVPSESCCSALRNLRSAVRTAXESAAACDWLRNVARADYGLTAGALVGFHFKSGVRFEYILRWFTECLNQTFFIVHDANRGD

SEQ ID NO: 358473 - protein, 78 aa, Zea mays
  Clone ID: MRT4577_90096C.1.pep
SSSRLAVDQLLNQRKAFTPPAHHHAEHNVGIAECDPHPLVFGLSDGDPAPFRLQPEPNAPPCRAFLPVRAAAEAEAQP

SEQ ID NO: 358474 - protein, 187 aa, Zea mays
  unsure (1)..(187): unsure at all Xaa locations
  Clone ID: MRT4577_90097C.1.pep
MKGNLDGPIIGIDLCTTYSXCHSIXERTVTQIIDDNHGTRITTSDVAFSDSYGLISHANKNDVAMNPINTDFDAKRHIDRRVSDASAQRDIILGTFKVIPASEENAVINDHHKREEKLLAAEEISSMYLIKMREIAEAYLGXSIKNAVVTIPVYFNDSQRQATKDAAXLLSLNVLHIINEPTAAAIA

SEQ ID NO: 358475 - protein, 121 aa, Zea mays
  unsure (1)..(121): unsure at all Xaa locations
  Clone ID: MRT4577_90098C.1.pep
MPHTHSDAEDDEQAAVLLLAAAATTSEAAITCRKVSSDIAPCLSYARDTGSAPSASXCSDVRNLKSDDSTAADRRDACNCLKNAARPASGLNAGNAASIPSECGVSIPYTISTSTDCSRAN

SEQ ID NO: 358476 - protein, 39 aa, Zea mays
  Clone ID: MRT4577_90099C.1.pep
LPNVCRFCLLAYSPVAILDSYLYSFIHNSSHFIFSPLSF

SEQ ID NO: 358477 - protein, 122 aa, Zea mays
  Clone ID: MRT4577_9009C.1.pep
SSGCTRTQLGLGDTYVLRPVAMMSGTYLCEAEAPSTLSGGSSTTVSLSRSLSLVGWREHHPKSTGLLQTRDQRETPCYTRRRRGLEKVDSRGDESVPPRANQTGNRLLRRAVQGYQGRSKAG

SEQ ID NO: 358478 - protein, 86 aa, Zea mays
  unsure (1)..(86): unsure at all Xaa locations
  Clone ID: MRT4577_900C.1.pep
HLNEWECPGVTNLKTVKTHAFPNLLGLNEKPLSQRAFKQKRPLHGDFHTPCTASLTTXGLSLLRPIXTRTLGRLLAPGPLHLLPSF

SEQ ID NO: 358479 - protein, 121 aa, Zea mays
  Clone ID: MRT4577_90100C.1.pep
MARTQSAVAVAVVAAVLLLAAAATTSEAAITCGQVSSAIAPCLSYARGTGSGPSASCCSGVRNLKSAASTAADRRAACNCLKNAARGVSGLNAGNAASIPSKCGVSIPYTISTSTDCSRVN

SEQ ID NO: 358480 - protein, 99 aa, Zea mays
  Clone ID: MRT4577_90101C.1.pep
MARTQSAITWGEVSSAIAPCLSYARGTGSAPSASCCSGVRNLKSAASTAADRGAACNCLKNAARGVSGLNAGNAASIPSKWGGSIPYTISTSTDCSRVN

SEQ ID NO: 358481 - protein, 44 aa, Zea mays
  unsure (1)..(44): unsure at all Xaa locations
  Clone ID: MRT4577_90102C.1.pep
FVLPNISIDVVNDTTLGLSLQVYQLXSPFLHKCLSWQNPMCIQL

SEQ ID NO: 358482 - protein, 121 aa, Zea mays; identical to SEQ ID NO: 358479
  Clone ID: MRT4577_90103C.1.pep

SEQ ID NO: 358483 - protein, 163 aa, Zea mays
  Clone ID: MRT4577_90104C.1.pep
SSRAQRRQSFLPLPSSLSPPPGAISTLGPPRAGSVATDPLPPPRGLPDRPSCSGSAFQFHPFPVGHSTGRRSGRAAPAVTAARLATLPVPEAACGDRDRLLLVNSRRRTEFRRRIPSSGPVSSPRRPRLLRLAAVLDARRSNTGSAQQPKCFTSDGRSPGWSL

SEQ ID NO: 358484 - protein, 121 aa, Zea mays; identical to SEQ ID NO: 356071
  Clone ID: MRT4577_90105C.1.pep

SEQ ID NO: 358485 - protein, 121 aa, Zea mays; identical to SEQ ID NO: 358479
  Clone ID: MRT4577_90106C.1.pep

SEQ ID NO: 358486 - protein, 165 aa, Zea mays
  Clone ID: MRT4577_90107C.1.pep
MMEAAWTSAVNRATGMADSAKRFLLPFRRPPPPPPPCTDPDPNPVQILKRLQRQAFYDIMQLRERQEKVERVISLFKATKVGPFAEESTRVKGVVNVAGSLPRDISEAESCISSRFVFEAPVRKKDSLFAELSTEHSYVSQENDHIETPFALSKLMYLSNISDSF

SEQ ID NO: 358487 - protein, 58 aa, Zea mays
  Clone ID: MRT4577_90108C.1.pep
LQLRPSLRIKATWPQKEDVAAPSFGGMTPGLVSRTRALPSNAAEKRGYASSAVQPPLP

SEQ ID NO: 358488 - protein, 60 aa, Zea mays
  Clone ID: MRT4577_90109C.1.pep
PIFPVEGACLEWSLPPVVDLVLLDEKDRGEVKLLLTLTERADAQHRPDDSNEGAPYSTWS

SEQ ID NO: 358489 - protein, 60 aa, Zea mays
  Clone ID: MRT4577_9010C.1.pep
NKGNALAVLKYHSAACAGVTFSHDCKLLASCSADTTVALWELYPPKTPSQVLIATEGVER

SEQ ID NO: 358490 - protein, 83 aa, Zea mays
  Clone ID: MRT4577_90110C.1.pep
LNLPLPHRLSVLRRETRFPIPTPLSCRGDHWGAVAAALRKVAKVVLGHFVRHQFHKARDTFFGITRSMSNYYDDLHYTYPMER

SEQ ID NO: 358491 - protein, 240 aa, Zea mays
  Clone ID: MRT4577_90111C.1.pep
GLSTYEKEYMAILLAVTQWRSYLQLAEFIIYTDHSSLTQLNEQRLHTPWQQKVYTKLIGLQYKIVYRKGSDNTAADALSRLPQQTADCRAISQCSPTWLQDVIDGYANDPATQKLLTSLCVQSDASRPFQLQQGVIRYKGKVWLAGNSELQQKVIHAMHDSAIGGHSGIPATYSRLKQLFYWPGMKTAVQEYVRSCTICQQAKPERVRYPGLLQPLPVPPQAWHTISLDFIEGLPRSANA

SEQ ID NO: 358492 - protein, 58 aa, Zea mays
  Clone ID: MRT4577_90112C.1.pep
LVLLQTKNSLHRNLGSHSNPFLTQHITHPWACALTCIHYPRFRETNTRHCYGHCSVQC

SEQ ID NO: 358493 - protein, 65 aa, Zea mays
  Clone ID: MRT4577_90113C.1.pep
KTGLVEFGAASLKLFQEGYGLVPTQTFLLFERILTHGSWPYLDTPCKTAFITTLGCPLHRTGCGM

SEQ ID NO: 358494 - protein, 164 aa, Zea mays
  Clone ID: MRT4577_90114C.1.pep
LGTSRPAGSGDAWKALFDLAGGLLREYDQEATVSLSKFIDQLPSVMNQVTEGVSEFKPTPPENREFCKNSYSVPNTLLVKFTVDAIDDTDIVEDVLRPRVDSIGGQIKKVILSGTHLTPCIQDVKWQVGSEYTPADAIAQGLKSLALSETRVLSRTIADWFTSL

SEQ ID NO: 358495 - protein, 247 aa, Zea mays
  Clone ID: MRT4577_90115C.1.pep
MPLPPHACSAGAGFLATATFSHLYQLCTSAGRSALTTGQAAHARMLVSGFVPTTFVSNCLLQMYARCGGTAHAHGVFDTMPHRDTVSWNTMLTAYVHAGDTDTAASLFGTMPDPDVVSWNTLISGYCQCGMFRNSVGLSMEMSRRGVALDRTTLAVLLKSCGGLDDLALGVQIHALAVKTGLKTDVRAGSALVDMYGKCRSLDDALRFFHGMGERNSGSWGAAIAVCVQNEQNARGMELFVQKQRLG

SEQ ID NO: 358496 - protein, 77 aa, Zea mays
  Clone ID: MRT4577_90116C.1.pep
VHMVSPFTGIGGLLFPIELKGVRTYDELKFFLTFVGDYMHMNGSLTKPKYVTQMDMTPSSVWARFVMDVERKEGTRL

SEQ ID NO: 358497 - protein, 209 aa, Zea mays
  Clone ID: MRT4577_90117C.1.pep
ALAIAELPLYSVGHSNGALLQLLVGSYFSERIPEANAIVSFNNRPASEAVPYFEQIGPLFRQLMPMMEASPVYSMARNASGYAWKALFDLAGGLLREYDQEATVSLSKFIDQLPSVMNQVSEGVSESTPPENREFCKNSYSVPNTLLVKFTVDATPCIQDVKWQVGSEYTPADAIAQGLKSLALSETRVLSRTIADWFTSLLILSYSIH

SEQ ID NO: 358498 - protein, 158 aa, Zea mays
  unsure (1)..(158): unsure at all Xaa locations
  Clone ID: MRT4577_90118C.1.pep
YICFMQIGPLFRQLMPMMEASPVYSVARNASGDAWKALFDLAGGLLREYDQEATVSLSKFIDQLPSVMNQVTEGVSEFKPTPPENREFCKNSYAXPHSNGALLQLLVGSYFSERIPEANAIVSSINRPASEAVPYFEQVFSLGFITLCLMGVHFSVSH

SEQ ID NO: 358499 - protein, 66 aa, Zea mays
  Clone ID: MRT4577_90119C.1.pep
WLQYCSVCYAVLVTLHLNSVHFSEIALVVTSTMFSFRVKAIYDVSNDPIVYFRLARMACANTYILC

SEQ ID NO: 358500 - protein, 101 aa, Zea mays
  Clone ID: MRT4577_9011C.1.pep
LRPPCRKRLPRRRAQEEARARPHSAPVSAASTCTTPGSSPQKMCVIRRQCAILVWCVRPWYTRPVPPLCLWTQCRLVGCFLVATNTEGNGLGWSHVRRTGV

SEQ ID NO: 358501 - protein, 343 aa, Zea mays
  Clone ID: MRT4577_90120C.1.pep
MLGAPSPRTAPPMRKPYMREHSCLIFPPPRGRRPLAVIKFLGGAFIGAVPEVTYGYLLELLALEGFVVVCVPYNVTFDHEAAAREVFQRFHACYDALLASGLPEAGLSALDIAELPLYSVGHSNGALLQLLVGSYFSERIPEANAIVSFNNRPASEAVPYFEQIGPLFRQLMPMMEASPVYSVARNASGDAWKALFDLAGGLLREYDQEATVSLSKFIDQLPSVMNQVTEGVSEFKPTPPENREFCKNSYSVPNTLLVKFTVDAIDDTDIVEDVLRPRVDSIGGQIKKVILSGTHLTPCIQDVKWQVGSEYTPADAIAQGLKSLALSETRVLSRTIADWFTSL

SEQ ID NO: 358502 - protein, 65 aa, Zea mays
  Clone ID: MRT4577_90121C.1.pep
RVQWRRCPMPVERCVLNGHQPQVFIHSVHSSVLSAVRNFGNFMKVLIIQDKISRALSPSVDDITK

SEQ ID NO: 358503 - protein, 52 aa, Zea mays
  Clone ID: MRT4577_90122C.1.pep
SIAFPVTPPLPSPPWLARIVNMSSALRVGITFLSFVCVSFGLAKVYYCEKNL

SEQ ID NO: 358504 - protein, 207 aa, Zea mays
  Clone ID: MRT4577_90123C.1.pep
QQAPHTLPAPALLASCAEAPAATQKSSSAACASDGSDQQGPSSHWLTPRAQQAYSSKLLQALRLVRGGTGTPTCSASAPAVRDAAYRALAVAARGRSRWSRAILARSRRRRALLRARRPPPPTPRHRQRRHQQQQDERPAGGLAGRAKVLARLVPGCRSLSLPALLAEVSDYVAALEMQVRAMGQLTHDLASSSSAPTTASTMIAPP

SEQ ID NO: 358505 - protein, 60 aa, Zea mays
  Clone ID: MRT4577_90124C.1.pep
MAPSAAAAVTTPFQRLVSAAGLPVACWSWCCCSTGGGFRDVRSGERIIRRMQMMKQIEID

SEQ ID NO: 358506 - protein, 219 aa, Zea mays
  Clone ID: MRT4577_90125C.1.pep
MAPSVMATWRRRPPPPSLLHSKGSCPPPDSPSPAGPGAAAPPAAASATSAAAKGSSGACRYPRWARGTMMCLQTFTTQIRMRRGLSRKIRAINMRLDGIIENKDKYKIEDSNTKTGVTWKPSTSTSIRYTHRKLIWFLLCCFWTNCHVRQDRSEAKRSKAESDDPSPVHRAGGLAHSACTAQHSLPSPGGGGGFLAVSRSSPGAFRETPTNSSVDQKLP

SEQ ID NO: 358507 - protein, 194 aa, Zea mays
  Clone ID: MRT4577_90126C.1.pep
CHKLAIEKCKRRQTAVSYNISCLCYERYTVSKNRISFVAPAVVVPGGPRVLAVHHRAGRLADEHDELEAGQPPVGAQQQVLVDLDLLHHLQIVHDAQQQRLQVQQRRRRRRPGLVGALDRPHVSCMRLMILSPLRTTSRKPPAVEQQHQDQATGSPVADTSLWNGVVTAAVADGAMSPSRREPCVRTCTTAASF

SEQ ID NO: 358508 - protein, 58 aa, Zea mays
  Clone ID: MRT4577_90127C.1.pep
MHFLSFIVTNSHSLSQPSNRHFNHLSNWDYLLLDTCHIVQTWHHLDHLCQSTTLVVGS

SEQ ID NO: 358509 - protein, 45 aa, Zea mays
  Clone ID: MRT4577_90128C.1.pep
MQGHVWPVEGTNQSGTTTTTTLLYLQPLLMSIMDDLQMMKQIEID

SEQ ID NO: 358510 - protein, 126 aa, Zea mays
  unsure (1)..(126): unsure at all Xaa locations
  Clone ID: MRT4577_90129C.1.pep
EIVLFAAGMVFXWGDDVRRAPVHQEQRAAADKGADGGAPGLHQLQESKRPSKRLRGGPPRIQEVVRILQEIEGGQQAGACYVLDDISLRTSGNWIVYKKPVKLRLSGCNCKSVNGCVIMRLVEHVS

SEQ ID NO: 358511 - protein, 201 aa, Zea mays
  Clone ID: MRT4577_9012C.1.pep
MDLKDLAPVAGAAIAGVTAAAAYIDAKYHISKDIAGIRGQKAAARGIEKNSRGKGQSLWYQFESQVRRLPSNEECIWSRNGCYTWAETYANACRYGQYLHQHGVVPGQLFAMYMMNRPEFLFAHLGSWSIGSAPAWINYNLAGDSLFHCLKVSGAKVILVDEDQECRQRIEDIRQKLEEELGMTILILDNNLKGEISRSEP

SEQ ID NO: 358512 - protein, 97 aa, Zea mays
  Clone ID: MRT4577_90130C.1.pep
DIMDTDWPERYRAMTSAYYLGAVEALVAYYFTNMVTSQNVAMVVNELLDHALLDIVGMLIANMTDLQHLRSVAAEMLHALHRARVCSSSDTSALDAT

SEQ ID NO: 358513 - protein, 57 aa, Zea mays
  Clone ID: MRT4577_90131C.1.pep
MAPSAAAAVTTPFQGLVSAAGLPVAWSWCCCSTAGGFRDVRSGERIIRRMQVTSTSA

SEQ ID NO: 358514 - protein, 471 aa, Zea mays
  Clone ID: MRT4577_90132C.1.pep
MWATGQVLFTVRTEENFRTENVKFNVVEVNLPFNAIIGRPALYRFMAIAHYGYLVLKMLSPAGVLTMRGDRATALAVVEKLHALAAETARPDNGGRDPSTSGTKAPTEVPKMPRIPREVIEHHLKIHPNAKLVSQKPHRQSIERQDFIREEVRKLLDAGFIEEAHHPVWLANPVIVPKANGKLRMCIDYTSLNKACLKDPYPLPRIDQIVDSAYGCDLLSFLDAYSGFHQIQMAREDRKHTAFVTVDGLYCYVVMPYGLRNALPTFVRAMSKTFGDLIRDRIEIYVDDIVVKTKKGSTLVEDLTLVFDKLRATRTKLNPDKCVFGVSAGKLLGFLIKDVQKLTGSLATLSRFISRLAERALPFFKLLRKSGPFSWTEETERAFQELKQHLVSLPILVAPEPGEPLYLYIAAAAEAVSMVLVVERTEQHSQGSQEVPLGEGGGPTATDPESSGTTVGVRTIQRPVYYVSVTL

SEQ ID NO: 358515 - protein, 80 aa, Zea mays
  Clone ID: MRT4577_90133C.1.pep
YHLWPKKSIVCLPALHELVLSWAEGISQIVSMGKQSSLGDLNRIIPQKKKKKKKKKKKKKEGRPQDTSLAYVRGHATELL

SEQ ID NO: 358516 - protein, 107 aa, Zea mays
  Clone ID: MRT4577_90134C.1.pep
HRHRYAATQRDSCSLFPSFFLGFVGGRSVPPSSDGEFKDGHDQDRLRLTHRRPGGHGGACRGSLRFRRQHKHLRLCTRGLHPPVLHRLILLTMLHILSHPTTVGRKT

SEQ ID NO: 358517 - protein, 43 aa, Zea mays
  Clone ID: MRT4577_90135C.1.pep
TVSPVFPMYNGGQYTYFTWPDSSSMGADSSVVNSGSSSTAVTE

SEQ ID NO: 358518 - protein, 41 aa, Zea mays
  Clone ID: MRT4577_90136C.1.pep
CNPIIAKMYQGAGENMAGPAGMNKNAPAGNGGPGPKMEEVD

SEQ ID NO: 358519 - protein, 153 aa, Zea mays
  unsure (1)..(153): unsure at all Xaa locations
  Clone ID: MRT4577_90137C.1.pep
RLCRDRLXLRRLSRTARRKPLAPRRRQDRSNFPLFRPNRIRAFTPSLRSSFTKGVAARVVWKGRRQEEGSGIFRSQSGQARAIPSPATAVAGGXFYWPSEPRGSPALEGPKCPGKIKNRGGQSTNEGPFKQPLLSSPDLGGWGKAPFPPGAKS

SEQ ID NO: 358520 - protein, 37 aa, Zea mays
  Clone ID: MRT4577_90138C.1.pep
CVVIIYKRFANCRSRRTLLFHPSYVLNILSVSVQKRK

SEQ ID NO: 358521 - protein, 72 aa, Zea mays
  unsure (1)..(72): unsure at all Xaa locations
  Clone ID: MRT4577_90139C.1.pep
PPSFAPRLVSRIGAGQLFHTGPRCGPARASGVPRSDPSRXGRQCAGVRPFFGPGLGPRVNLVIKIRKLKNPN

SEQ ID NO: 358522 - protein, 360 aa, Zea mays
  Clone ID: MRT4577_9013C.1.pep
MPTELEELVGFIAHPNPQIRAVATENLVPYSLSDPAIFKTEELKPVKHLKFLVRDHEKIAENALNILINLTEDPVVLESVATDEKFLEMVFSHIVYPEEPNADLLAMLLANLSKYDGSKAFLQRKQEAPSQLGSDDNVLNQLMDLFVKGQDGAYNKKADYDYLAYVFADLAKHTEIRQYFLTSQPYDGVIPLTKLKVFTEHKSDIRRKGVANTIKNAAFEIPAHPSFLSESDINILPYILLPITGNEEYDVDETMEMLPDLQLLPPDKKRDSDTANIQAHVETLTLLTATLEGRELMRKINVYPIIRETHMRVNDEGVQEACDRLVQVLMRDEATEDAPEEVEERVKEIEEDEDEELVEV

SEQ ID NO: 358523 - protein, 62 aa, Zea mays
  Clone ID: MRT4577_90140C.1.pep
RTGGSPVTASIDFQCESSLANFVFLLPAGLSFRFVFTAKVSWQEHLATTYAWSCCIYVILHP

SEQ ID NO: 358524 - protein, 102 aa, Zea mays
  Clone ID: MRT4577_90141C.1.pep
HYRVRLGTTHAADALRIGSRIRYFLYFFEMFLQYMKEKSVQQLYLLTNHPQSVPIFQFFDFFTIEKDEVPEGIQQLEHFCQNLKEHIAIILNCELFTKLCTD

SEQ ID NO: 358525 - protein, 41 aa, Zea mays
  Clone ID: MRT4577_90142C.1.pep
KCPCVGNLDCSWPDPVEVPPKFVAERLNSCPKVMPKTELIS

SEQ ID NO: 358526 - protein, 64 aa, Zea mays
  Clone ID: MRT4577_90143C.1.pep
LSLNPRFTDNKVHDPSNLNMGLILTYQDLKKIHSLRRCNKTSAVGGYTYFKLNCSSFITTLLYQ

SEQ ID NO: 358527 - protein, 90 aa, Zea mays
  Clone ID: MRT4577_90144C.1.pep
LTRAHSPEDILFFFTLLKRGNGELWVFLHTKTQKINSKNHRNNNVQKKTVKYKPLHYIQEIVPPIIKSRYHNGNLLTCLSDPIKQHRQTK

SEQ ID NO: 358528 - protein, 59 aa, Zea mays
  Clone ID: MRT4577_90145C.1.pep
NASLAPLLTYSRLVAELDGHTSILHLLVAELHDDTDTRKQTIEAFCGSPNNGEHIASVY

SEQ ID NO: 358529 - protein, 427 aa, Zea mays
  Clone ID: MRT4577_90146C.1.pep
RAWAGLNARIRGDYSRKPVVEMNSCYRMHWGQSQRCEGFASRPVEDTVDGQLKCEKWIRDDDSKSEESKMKWWVKRLIGRPKDVRIIWPYPFTEGKLFVMTLTAGLEGYHVNVDGRHVASFPYRTGYSLEDATALSLNGDIDIESIFASSLPNSHPSFAPERYLEMSEQWRAPPLPTEPVELFIGILSAASHFAERMAVRKSWMMYTRKSSNVVARFFVALNGKKEVNAELKKEAEFFQDIVIVPFIDSYDLVVLKTVAIAEYGVRVVPAKYVMKCDDDTFVRIDSVLDQVKNVGNDKSVYVGSINYFHRPLRSGKWAVTYEEWPEALYPNYANGPGYVISSDIARYIVSEFDNQTLRLFKMEDVSMGMWVEKFNRTRRAVEIRHDVRFYQSGCYNGYFTAHYQSPQHMICLWRKLQSGSARCCNVR

SEQ ID NO: 358530 - protein, 72 aa, Zea mays
  Clone ID: MRT4577_90147C.1.pep
VWPFAPWGQPWPFFFLAKVYGVGFFLKQVVLNWFPETFFCFIAKNMFVNYFRCCQLAVDKNFPMSIPYSPFF

SEQ ID NO: 358531 - protein, 53 aa, Zea mays
  Clone ID: MRT4577_90148C.1.pep
MAEQLCARRQLLSGGAGAPKCLFTVSSRVPYFIDIQGVPVFVQYDLRILLIQI

SEQ ID NO: 358532 - protein, 52 aa, Zea mays
  Clone ID: MRT4577_90149C.1.pep
AWVGRRHRRDVSGSLFCWLHFPLMVYCLGCQFSMCSSFIGVVVLGLSGGSVE

SEQ ID NO: 358533 - protein, 106 aa, Zea mays
  Clone ID: MRT4577_9014C.1.pep
VQGQLPVSLNSPRSASEGRRICCIIECCNGQGARSLLLHFVCGTGGFMHDQRMWWCICRWVVLRGCAPGSSAVLGEQSAFVVNIPPLIRPGPQGKERPILPLEPNY

SEQ ID NO: 358534 - protein, 56 aa, Zea mays
  Clone ID: MRT4577_90150C.1.pep
LLNFNHGAFHLESKIFIKAKKNHTSFQVKGWHNFGELKPSLPGISGLFSASGEACN

SEQ ID NO: 358535 - protein, 109 aa, Zea mays
  unsure (1)..(109): unsure at all Xaa locations
  Clone ID: MRT4577_90151C.1.pep
XFFFFFFAGFLALKICRVLAAWACHCVCVRLEYEVSSQNDGCSHIIQSKTSEIEREGKEGGTWLMSLLSNGNPQMLALAVSIICAHGGGSCFSHRFSPLPPLSLLFYNH

SEQ ID NO: 358536 - protein, 116 aa, Zea mays
  unsure (1)..(116): unsure at all Xaa locations
  Clone ID: MRT4577_90152C.1.pep
HLLVMSLSLWLLXVPHTCSLARAFYVSCQSLPDNGITCYLLTTERADTXSYGIDFPTHQHKFCLLHGLNIPDILREHLGAEPALPYLEPELRGQNLLAEAHLALPEETILNDTGIQ

SEQ ID NO: 358537 - protein, 43 aa, Zea mays
  Clone ID: MRT4577_90153C.1.pep
VQVPLVCIIPKINFCICTIMNVLGVTCEPSVHSDLCIESYAWF

SEQ ID NO: 358538 - protein, 92 aa, Zea mays
  Clone ID: MRT4577_90154C.1.pep
NKILLKLNSAHKNRRNMTGYHTPSTIPSFYRDITSPETYAGNTHQSRSTGNITQWVKIREKRESLGRNLGGELSRQKARKIFFGPSRHPPSG

SEQ ID NO: 358539 - protein, 86 aa, Zea mays
  Clone ID: MRT4577_90155C.1.pep
EILKTWGPRGLIYPECGGNLFFLLVPHHFGPYGGLGAHPFTPYMSQGGSWLWAYGKKGKGVLPRQILSPNFFFHGGGGGLFFKGKG

SEQ ID NO: 358540 - protein, 125 aa, Zea mays
  Clone ID: MRT4577_90156C.1.pep
HKIEGKFRCGPKLEDETYMMRLVLFSMQVLNFSLVWQSNTFTDVSRFKIAVYILERVKFVSIDWINIERVTLDSGSISVLSRPAFFQPTIRQPLYSRLILSINQCNVLQEQPFFELYDQSPQKNP

SEQ ID NO: 358541 - protein, 461 aa, Zea mays
  Clone ID: MRT4577_90157C.1.pep
MADIVIRDLERVVKVALAIKKAVETAKQNKEDCVKIGERAAEVSTHMKRLKENTKAMEDPLMSDTLKSMEETLQRALKLVNECQRKHVVLHYLNAGGMSKKLRQVQEDISYKLWNGVLATVVDTRIALEKQIQSAIDAPLHQHQQRAGQVETSQSSHSRTDQASEKGKAMLARVKREQSELLSGVPQFSLSQLNAATNEFSEGCVVERGYYKGVLHDGLDVAIKKLAVSDDTQERRLQLELNIRAKLEHGNILKLLGYCLDAQEKEKLYFLVEEYIPNVESLEKFINVSRLDWSSCFKIIQGIAKGLHCLHKHHILYMDLNPANILVRSDMNPVVINFGSSIVLDRDDDKVTGDAVAGTLGYVAPEKLMEAYASMMSDVFSFGIIIIEIITGRRASPFVDLPEWGSVDEMITSAKGLFDPALANESQLMKINRCREVGLKCIERDPKRRPTMGNVLEMLSS

SEQ ID NO: 358542 - protein, 146 aa, Zea mays
  Clone ID: MRT4577_90158C.1.pep
LEAGRAGSISTSPHPVQASTAAAVSPPAPGWLSSDSVGGLPSRAAPGPDRSPFPTVLLNAATSTSFPAPEVPLACHSGAAQAPPSVSQVTRRRKRGRRRLASVGPADQSARELSDVSQAMRSFFHPFLSPALDWKPAEDAVAIREC

SEQ ID NO: 358543 - protein, 37 aa, Zea mays
  Clone ID: MRT4577_90159C.1.pep
MADIVIRDLERVVKVALAIKKAVETAKQNKEDCVKGR

SEQ ID NO: 358544 - protein, 115 aa, Zea mays
  Clone ID: MRT4577_9015C.1.pep
MDIAIHHPWIRRPFFPFHSPSRLFDQFFGEHLLESDLFPTSTSLSPFYLRPPSFLRAPSWFDTGLSEMRLEKDRFSVNLDVKHFSPEELRVKVLGDVIEVHGKHEERQDEHGFIS

SEQ ID NO: 358545 - protein, 229 aa, Zea mays
  Clone ID: MRT4577_90160C.1.pep
EKEKLYFQHSVCILRPESIAFLFLGHRGNIPEKEKLYFLVEEYIPNVESLEKFINVSRLDWSSCFKIIQGIAKGLHCLHKHHILYMDLNPANILVRSDMNPVVINFGSSIVLDRDDDKVTGDAVAGTLGYVAPEKLMEAYASMMSDVFSFGIIIIEIITGRRASPFVDLPEWGSVDEMITSAKGLFDPALANESQLMKINRCREVGLKCIERDPKRRPTMGNVLEMLSS

SEQ ID NO: 358546 - protein, 1012 aa, Zea mays
  Clone ID: MRT4577_90161C.1.pep
MATYKLGVEVASAHDLMPKDGQGSASACVELNFDGQRFRTAVKEKDLNPVWNERFYFNVSDPSNLPELALEAYVYNVNKTLESSRSFLGKVRIAGTSFVPFPDAVVMHYPLEKRGMFSRVKGELGMKVYITNDPAIKASNPLPAMDPVSNNPLPAPSPAEQIAADITGTNLHTSQEHRSEAKTLHTIAKEVHHHHNHGHLPATFGEQPSKYSIDQMKPQSQPPRIVRMYSAASQQPMDYALKETSPFLGGGQVVGGRVIRGEKNASTYDLVERMQYLFVRVVKARDLPDMDVTGGLDPYVEVRVGNYRGITKHFEKQKNPEWNAVFAFSRDRMQASVLEVVVKDKDLIKDDFVGFVRFDLNDVPIRVPPDSPLAPEWYRLVSKSGDKSMGELMLAVWVGTQADEAFPDAWHSDAATLEDPSAVTHMKSKVYHAPRLWYLRVNIIEAQDVAILDKTRYPDVFVRAQVGHQLGRTKPVQARNFNPFWNEDIMFVAAEPFEDHLVLTLEDRVGPNKDEMLGRVIIPLAMIDRRADDRIVHGKWFNLEKPVLVDVDQLKKEKFSTRLHLRLCLDGGYHVLDESTNYSSDLRPTAKQLWKPSIGLLELGVLGAQGIVPMKTRDGKGSSDTYCVAKYGSKWVRTRTIMNNPNPRFNEQYTWEVYDPATVLTVGVFDNGQLGEKTGEKTSSGKDGKIGKVRIRLSTLETGRVYTHSYPLLVLHSSGVKKMGELHLAIRFSSTSLVNMLYLYSRPLLPKMHYVRPIPVLQVDMLRHQAVQIVAARLSRMEPPLRKEVVEYMTDFDSHLWSMRKSKANFFRLMTVFSGLFAVSKWFSGVCSWRNPITTVLVHILFIMLVCFPELILPTVFLYMFLIGIWNFRYRPRYPPHMNTKISHAEAVHPDELDEEFDTFPTSRNPEVVRMRYDRLRSVAGRIQTVVGDIATQGERVQALLSWRDPRATAVFVLFCLVAAIVFYVTPLQVIAALGGFYVMRHPRFRHRLPSVPVNFFRRLPARTDSML

SEQ ID NO: 358547 - protein, 114 aa, Zea mays
  unsure (1)..(114): unsure at all Xaa locations
  Clone ID: MRT4577_90162C.1.pep
LYLGFYPNKPIAILHIYRTLLHCRSFXPERTIVLXHTIQQLNXNIQSLDYTDKEPSWLSYPSTLILFFQQTLKXAGPSGFTPYTRKSSAPSYGRVSFNLRSQPQRPMLASLGMN

SEQ ID NO: 358548 - protein, 93 aa, Zea mays
  Clone ID: MRT4577_90163C.1.pep
QTPVSSGCSRFSGTHTSRFLSYISWNFCSRPFASADPLGVHVRSRMPCQQRPRRWDRRCPSWSSVAWAVTVLHTRPTVLETISLELCGGTTLV

SEQ ID NO: 358549 - protein, 61 aa, Zea mays
  unsure (1)..(61): unsure at all Xaa locations
  Clone ID: MRT4577_90164C.1.pep
XSRNXSGTVNCLGXATTVIRRXSASXXXXAXXFMSXSXXXXDDXXXTRXPTPVYLGHGXHD

SEQ ID NO: 358550 - protein, 132 aa, Zea mays
  Clone ID: MRT4577_90165C.1.pep
QGPHGLWQFFLNVHGAPRVLEVPGGVIVCPEDFTGSPRVLSFSAPVSLRLHVFLDPSTLACVFQAVICSLLSLGPPFRFHGFLFSLFGCVWFFSPPYRLRGIENVSIHSKSKYLPKKKKKKKKRKKKKKKRP

SEQ ID NO: 358551 - protein, 60 aa, Zea mays
  Clone ID: MRT4577_90166C.1.pep
QIIEKHGAFRKEYQQNTHLSHKYYISDPKEVHLHLIDFIGRETTKARQLSMGALLWRLGC

SEQ ID NO: 358552 - protein, 103 aa, Zea mays
  Clone ID: MRT4577_90167C.1.pep
RPGPAEMMMIPDGGVVSCSPPLPPRALLAASSVLCCVVWVQPGSRLTMCPAVLCPHPSIIILYLYPPFCVPRVPLFPDVCSRVKKKKKKKKKKKTKKKKKKGP

SEQ ID NO: 358553 - protein, 87 aa, Zea mays
  Clone ID: MRT4577_90168C.1.pep
TNYISPPIQTTLANSGENSSTSQPPSPKQPAGSIWSLLLLLCLYMYIRGCQLTCSVSCMGRPWRSLIEAYDHSVHGLLVDQRHGHGH

SEQ ID NO: 358554 - protein, 154 aa, Zea mays
  unsure (1)..(154): unsure at all Xaa locations
  Clone ID: MRT4577_90169C.1.pep
VGRGPWVSFNDRVPPNAEDGPMDPAFRQRLTAKCANDPNGNVVTQVLDVGTPNAFDNKXYFDLIAKQGLFKLGQGLINPPDTKGGAPRFGVNQAAFFDQFARSMVKINPMDILPGSAGEIPPKCSVGNPALGDVLLSAPQVETPPGDEGVPAHA

SEQ ID NO: 358555 - protein, 47 aa, Zea mays
  Clone ID: MRT4577_9016C.1.pep
MARACVFLVVLLLAAIAVAPFAGAARVDVVGGRSMASADAPEAADAP

SEQ ID NO: 358556 - protein, 65 aa, Zea mays
  Clone ID: MRT4577_90170C.1.pep
IQLERAGMGSHVKMDFLRKILELIYKEMSIPRFQLNFGGRDKLCFCFLYKKPDFWGPCIKSPSMA

SEQ ID NO: 358557 - protein, 180 aa, Zea mays
  unsure (1)..(180): unsure at all Xaa locations
  Clone ID: MRT4577_90171C.1.pep
MAATTPLLAVAGHGVSYKPANAKDSYYCFKFASSARTRVTLPQIIHWRCRSSHSSTGTTTMAVPVLKRREKQDEEQEWMGYLAPEKLEVLAHLEPWAEAHVLPLLKXAEEAWQPSDMLPDPAALGDEGFHDACRELRARXASVPDATWGCLVGNMITEEALPTYQSXLPAFEAVRDLTGA

SEQ ID NO: 358558 - protein, 76 aa, Zea mays
  unsure (1)..(76): unsure at all Xaa locations
  Clone ID: MRT4577_90172C.1.pep
CTGLAGSTRRTIMVWCAVTGGAPFTMLMSPLYXGDGRCRLLRQINMLCLYASFLVDRVCISRGLRVCADVNHGPVT

SEQ ID NO: 358559 - protein, 199 aa, Zea mays
  unsure (1)..(199): unsure at all Xaa locations
  Clone ID: MRT4577_90174C.1.pep
NFLTGGARSPIPSPPAPSPCSASGAASSRTCSPLPSPLTATLSADSSPPPPPFPHPPDSPSRSTWSAPAASPEHKRSRPLQSSPTSSPPPSPTPSSPSSPASASPAPTSPPSSRGIPSSSAPAWRRPCPPSSSSSRASGCRPEIARLVPLSXSSSAASPSYPRCTTTCSTSAPTRNSSEYSRVTTISSRTASRRWSSGT

SEQ ID NO: 358560 - protein, 78 aa, Zea mays
  unsure (1)..(78): unsure at all Xaa locations
  Clone ID: MRT4577_90175C.1.pep
APPTAPIRLVDDAKXVXTAKHFXXYMFYIDFQASMADVRAQNALAEIQEFTSFLRVLGSYPMDMTPWDAALSSRASQY

SEQ ID NO: 358561 - protein, 131 aa, Zea mays
  unsure (1)..(131): unsure at all Xaa locations
  Clone ID: MRT4577_90176C.1.pep
PPKASPSVPRQRGPAATAGGGPLPCPPPRPRASWGSPTRGKPYPSRPSGMNPPXRPPXEAPPPPPYVPPPRPARSPAATRSLLSPESSSPRYFPSSPRPLRPALPSSLPRRXRPSSSARLGGSGAVLGVSS

SEQ ID NO: 358562 - protein, 44 aa, Zea mays
  Clone ID: MRT4577_90177C.1.pep
RSCWVGLPSSSTPVFLRTFLSSRCAQFGYLVLKWFREIGECINS

SEQ ID NO: 358563 - protein, 88 aa, Zea mays
  Clone ID: MRT4577_90178C.1.pep
PGSGPCVGAYGRSACPAGHSSRRGAVLQHPLVEPAREVPRHLPGAPGACLRPAARGGCGGAASSLPHSLLFSPRPPHLGSSCDRGVQA

SEQ ID NO: 358564 - protein, 175 aa, Zea mays
  Clone ID: MRT4577_90179C.1.pep
EDAMKAQPLLPAALKRRRGPRVAVLALVLCSLLVPLAFLFDRAPSGYVTTEERHRQEVVLPSLDHVEKRRRSGADSGQRQDAPEKIPRSSAGTIHQRTPEKNISKGSAAVIHQQTPEKNISKGSAGVIHQQTPEKNISKGSAGVVHQHKQIGSNTTRDGAKPKFLQHQKLNHQRM

SEQ ID NO: 358565 - protein, 249 aa, Zea mays
  Clone ID: MRT4577_9017C.1.pep
EATALCAADLDAILAACDASGVQFMDSTMWMHHPRTAKMRDLLPADVGDVRFINSLFSFRANEDFLENDIRVKPDLDALGVLGDAGWYCIRAILWAVDYELPKNVIALPDPVKNQAGVLIACGATLYWADGKTATFHCSFLANLTMDLTVIGTDGTLHVTDFIIPYEEKSGPFSVASRSNFAELHTGWVPQPSRHVVTTDLLQEALMVKEFCRLVQGIRDAGARPEGKWPAITRKTQVVMDAVKASLTT

SEQ ID NO: 358566 - protein, 115 aa, Zea mays
  Clone ID: MRT4577_90180C.1.pep
KGLAQGKIFGQSVFEFIGVNGFRQWGWGRFPVLWGGSGPLGQIIPFNKRGQFFRLAFPVFLKRLSNGQKSLPLFFPREGLFLSAGRTKQTKFPPCPKKKNPKLKKKTPKKKKKKK

SEQ ID NO: 358567 - protein, 73 aa, Zea mays
  Clone ID: MRT4577_90181C.1.pep
SNSFANAWVSIVYMNSPPPYIALCLCQHKAVHVYYYYSYCVITYMCPCYLKMHVYRVIKLRTPAAETYLCRPQ

SEQ ID NO: 358568 - protein, 69 aa, Zea mays
  Clone ID: MRT4577_90182C.1.pep
FTYVKNVALLSVFLELAFLSHLISYPIESPLGGVRQGFFVFNSCGLPYSCCGICSFDLAQIYITTSDLP

SEQ ID NO: 358569 - protein, 68 aa, Zea mays
  Clone ID: MRT4577_90183C.1.pep
SGPSRARTTDASPGVFRRASGPQRSSPVHSAEQKRSSSGRHPSNAKNYDSALKGIEGLTLDGDERVQY

SEQ ID NO: 358570 - protein, 71 aa, Zea mays
  Clone ID: MRT4577_90184C.1.pep
YWLPRFKVSSSAPPLHLCLSSFSLGLFCLCVHRSLVVYVSPCAEAVLGGPSCNQPPTGRELAHARPRFLSL

SEQ ID NO: 358571 - protein, 161 aa, Zea mays
  unsure (1)..(161): unsure at all Xaa locations
  Clone ID: MRT4577_90185C.1.pep
MKVELYTELFGCKAGNFPINYLGIPIHFKKLRNRDWARVGERFEKRLSSWKGKHLSIGGRPTLINSVLSSLPMYMMSFFSIPKGVIKTLDYFRSRFFWXGDENKKKGLLNDXYLCQPKDQGGIGILDLNTMNRALLSKWLYKLLTSDGMWQQLLRNKYIGS

SEQ ID NO: 358572 - protein, 95 aa, Zea mays
  Clone ID: MRT4577_90186C.1.pep
RRSWSQEGSTRATPSRTLSVRSRLPPQRSGPDLGTSSVDSVSGQEHLWRQTHIEARKGDLGRLRPFLLIRLTDACYRITWVKDNRHVESVSRPAS

SEQ ID NO: 358573 - protein, 510 aa, Zea mays
  unsure (1)..(510): unsure at all Xaa locations
  Clone ID: MRT4577_90187C.1.pep
MAYPAAPHTSAAFLASFATPLPARCASPPTRRRAVSAAAIATTTTCVFADAPRGIKEEQADSGAQAAAAAAARRDVSPDTVASIILGGGAGTRLFPLTRTRAKPAVPVGGCYRLIDIPMSNCINSMINKIYVLTQFEFXNLYEAISRXFHKPRVVPARAGYLLFVLAATQTAGESGKKWFQGTADAVRQFLWLFEDARLKCIENILILSGDHLYRMDYMDFVQKHVDSGADISVACVPMDESRASDFGLMKADRNGHITDFLEKPKGADLESMQVDMGLFGLSPEFASTYKYMASMGIYVFKADVLRKLLRGHYPTANDFGLEVIPMAAKDYDVQAYLFDGYWEDIGTIKSFFEANLALTDQSPNFYFYDPVKPIFTSPRFLPPTKVLNSIVSHGCFLTECSVEHSVIGIRSRLEPGVQLKDTMMMGADYYQTEAERLSELSVGKVPVGVGENTKIRNCIIDKNARIGKNVVIMNSENVQEADRPAEGYYIRSGITVVLKNAVILNGTKI

SEQ ID NO: 358574 - protein, 41 aa, Zea mays
  Clone ID: MRT4577_90188C.1.pep
YTEPGNNPNIGGPICRLTYEMYPQMVPSYRLVFPRNDQYID

SEQ ID NO: 358575 - protein, 52 aa, Zea mays
  Clone ID: MRT4577_90189C.1.pep
CRVTSIQCTGRYITTSGLTLPWRNSTASSCSSFSSPEVSSKRTGPFALPIST

SEQ ID NO: 358576 - protein, 72 aa, Zea mays
  Clone ID: MRT4577_9018C.1.pep
MARACVFLVVLLLAAIAVAPFAGAARVDVVEGRSMASADAPEAAADAPAPSPDSASSPDSSSEAPSSSSSSD

SEQ ID NO: 358577 - protein, 116 aa, Zea mays
  unsure (1)..(116): unsure at all Xaa locations
  Clone ID: MRT4577_90190C.1.pep
MPPLATTYTKYETRRRDPDPRAXVLLVIDVQGHFASLAAPIMPAIASTVALCRAAGVPVVYTRQHGVRVRLPRRLQAARGGAGEGGPVMRCVRRCELVIQMLCTLYLYLYGWAYAC

SEQ ID NO: 358578 - protein, 199 aa, Zea mays
  Clone ID: MRT4577_90191C.1.pep
MPPLATTYTKYETRRRDPDPRAAVLLVIDVQGHFASLAAPIMPAIASTVALCRAAGVPVVYTRHVDPVPRLPPLGEWWPGDRIDAGTPAAELLPGAGRAQGDLVVEKGTYSAFVGTGLEATLRRMGAGEVIVAGVMTNLCCETTARDAFVRGFRVFFSADATATASQDLQDATLANMAYGFAYLVDCKRLEAALGKAAQ

SEQ ID NO: 358579 - protein, 115 aa, Zea mays
  Clone ID: MRT4577_90192C.1.pep
EVTNLVKVIPDFGSLPRRCIACVHDFVDDEHATDALMQRAVVCSDDDEVNLIADAYSMSFVHNLDKTYWDAYEDTYRVSDLMDKLRRARRLQLLDPSAELGASTMLDVTPEEIRR

SEQ ID NO: 358580 - protein, 137 aa, Zea mays
  unsure (1)..(137): unsure at all Xaa locations
  Clone ID: MRT4577_90193C.1.pep
KAGESAKLKEEKESKEKIHVKVKNKGERSCEESXRKKVQVXIEAKFVQKEKVKNSGDGAGAKGSKKKDTKKKAKQKKEGGDDSGKAEQDKKDKAKDSEGKDPVKKEKKHGGGRAEGEEKGKENPDKKDKGQKNVKEK

SEQ ID NO: 358581 - protein, 40 aa, Zea mays
  Clone ID: MRT4577_90194C.1.pep
PRVRSPAARSPMRRSVSPTRGRSYIKSPQHTSSHLKKFLY

SEQ ID NO: 358582 - protein, 116 aa, Zea mays
  unsure (1)..(116): unsure at all Xaa locations
  Clone ID: MRT4577_90195C.1.pep
VSTEDYNYFFKKTFRHYFNPLASSHFTTIGXYKLRQILYVXATKKEKLTSYNKKTHNIILYVKPVFISXPFIDKXFPKYFNFFKFIFYSKYPSFNVSXDFSIKSXIVLIIKKKLIL

SEQ ID NO: 358583 - protein, 71 aa, Zea mays
  Clone ID: MRT4577_90196C.1.pep
DFIIAQDHRHDESCPCLGHQHQTELQLTACHSKGAQRESNALHEHADINLGARAPPQSTGRQSYYASLNPD

SEQ ID NO: 358584 - protein, 97 aa, Zea mays
  Clone ID: MRT4577_90197C.1.pep
MMPSRTNLATGIPSSKVKYSRLSSTDDGYIDLQFKKTPPKIPYKAIALATVLFLIGAFLIIIGSLLLSGYISKGGADRAVPVLIIGILVFLPGFYHL

SEQ ID NO: 358585 - protein, 69 aa, Zea mays
  Clone ID: MRT4577_90198C.1.pep
SFATLRSVGRRTGQSQFIISETAETRPTGFLHFKVGMTITPMKRLATTLRGKQSISELTLGLELTRDNL

SEQ ID NO: 358586 - protein, 83 aa, Zea mays
  Clone ID: MRT4577_90199C.1.pep
YLPGAGNLGPKDLISFAAKGSPGWGFFFFRARQMRPPAMGDIPFGPAPLRFLDEDEAGFQMWGLFSPNPFLWFLIEQSLLFLI

SEQ ID NO: 358587 - protein, 106 aa, Zea mays
  Clone ID: MRT4577_9019C.1.pep
MGDWVPRGRPGKKKSQSKQSHNTYRKEQARIIGIMARACVFLVVLLLAAIAVAPFAGAARVDVVEGRSMASADAPEAAADAPAPSPDSASSPDSSSEAPSSSSSSD

SEQ ID NO: 358588 - protein, 66 aa, Zea mays
  Clone ID: MRT4577_901C.1.pep
RPLVMAGAALLALAAGAGAHHGVWCIITRPMFQSMLSHRGDSGCQGAFYTYHAFIEAGNKFPGFRT

SEQ ID NO: 358589 - protein, 109 aa, Zea mays
  unsure (1)..(109): unsure at all Xaa locations
  Clone ID: MRT4577_90200C.1.pep
MMNSCEQRERHLXMNHNVITTEVLAERLTGAKDVGHHETVSLCLPSYSLVRTVLYMITYVFGGLPLLRFDVNQYNRLQDRLFVWFLHPAVILMDQIQPLMMSDEEVKFL

SEQ ID NO: 358590 - protein, 584 aa, Zea mays
  Clone ID: MRT4577_90201C.1.pep
MAGQAGNPVNHPISPHVISGAFVQQYYHILHEQPDQVHKFYQDSSILGRPDSNGIMAYVTTMRDINEKIMSMDFRNCLTEIETADAQLSHKDGVLIVVTGSLTSDEGVFRRFTQSFFLAPQESGGYFVLTDVFRFISERKPAEINQVATQENEISQNVRPASETCSALPEPIPADGSVISDHVTADSNVTEKQISDLSANGTAIESNDNTQPPVQVPKEDPKKALLVAPPPPTQMDVTKKSYASIVKVMKEGPPTPVVKTTSSVSKQKPAPKPVSTAVEGLEKPSEKPTQAIGTGDGIVAQNNSSRNEQGYSIFIKNLPFHANIEMVEEEFKKFGTIKPGGVQVRHNKVDRFGFGFVEYESQQSMQAAIEASPIRMADKEVGIEAKRANSRGGRFQSGRGVYHGDNFRGRGSGYVDNTNYRSSGSFNRQNEGEMYNRRNEGEMYNRRNEGDFYNHRNEGEFYNRRNDGGENYNRRNDGGENYNRRNDGGKNFSRRNDSGTENFNRRNDGGGENFSRRNDGVGENFNVRNDGVGENFNRRNNFRNQNDFPGRGRGSPTPGNSYYQNGNGRFSRVNNGAKQAPVAA

SEQ ID NO: 358591 - protein, 204 aa, Zea mays
  Clone ID: MRT4577_90202C.1.pep
MAGQAGNPVNHPISPHVISGAFVQQYYHILHEQPDQVHKFYQDSSILGRPDSNGIMAYVTTMRDINEKIMSMDFRNCLTEIETADAQLSHKDGVLIVVTGSLTSDEGVFRRFTQSFFLAPQESGGYFVLTDVFRFISERKPAEINQVATQENEISQNVRPASETCSALPEPIPADGSVISDHVTADSNVTEEQISDLSAQAAAI

SEQ ID NO: 358592 - protein, 108 aa, Zea mays
  Clone ID: MRT4577_90203C.1.pep
SSWANTPFATRSGHSSPPPLPPVGTTQSFITQSGHSHPSWDTPTPTPLLPVYYPARHPFNAYLAWGLEWVVFLVIVLITCRCLEENYFPTWTTKAISTRMIHTLYKIR

SEQ ID NO: 358593 - protein, 93 aa, Zea mays
  Clone ID: MRT4577_90204C.1.pep
ITVFPTLLFKAKSLDIFHPFKSPFTISSHYNLDLCIPLFSLLSRLKLLLCADAYSQLNMSKPSSQVLENVYSISAIPSLSCISPFQTLSLFVP

SEQ ID NO: 358594 - protein, 57 aa, Zea mays
  unsure (1)..(57): unsure at all Xaa locations
  Clone ID: MRT4577_90205C.1.pep
KYHNERLLYQLNNEYIFFKSFEFFSIEIIAFFLRKFISFSILVGNKKKRNSSFFXXN

SEQ ID NO: 358595 - protein, 110 aa, Zea mays
  Clone ID: MRT4577_90206C.1.pep
MRWRSPAVLRLQLWLLAVSASSAALGVLAADLSKGSRICAGTAPSGSGLVEARPWIPPSQRAAPSRARARAVGARGREQFTRQDEALRNSSSCTTPHRRPLRRLEVKIQK

SEQ ID NO: 358596 - protein, 82 aa, Zea mays
  unsure (1)..(82): unsure at all Xaa locations
  Clone ID: MRT4577_90207C.1.pep
RNRPCKQEPAATRRPPVMVSNKRPPPPRNYCLPVLRGAPFVICSICVRLGGLPXXFXFLIKXXXXLXXXSXSXXLSYSYXXP

SEQ ID NO: 358597 - protein, 94 aa, Zea mays
  Clone ID: MRT4577_90208C.1.pep
GFGAFGPKGVPQGLQKGPHPAPGVQSTKGPFAKTMWFHLYFGRAGNGPFMDCPGPNRYPGPKRSPFPPSKRGRPNHRPTRGAAPFQWPGAPWAT

SEQ ID NO: 358598 - protein, 44 aa, Zea mays
  Clone ID: MRT4577_90209C.1.pep
ECLGHSKLRERKIEYDLKTAISLVKETAKTKFVETVEAHFHTTY

SEQ ID NO: 358599 - protein, 90 aa, Zea mays
  unsure (1)..(90): unsure at all Xaa locations
  Clone ID: MRT4577_9020C.1.pep
CSFRYILESSSFELFFQYVELSNFDIASDALNTFKDLLTKHEDAVSEFLSSHYEQFFGLYTXLLSXTNYVTRRQSVKFLQSFCGGPNAQI

SEQ ID NO: 358600 - protein, 77 aa, Zea mays
  Clone ID: MRT4577_90210C.1.pep
GRFLGPPQFSSLFKGPPPLSGVRFWCRPLLGWGSGPSGAGVSNFPSCGGWGVHGAPLFSLGRVPQFLGLKSCFFKLG

SEQ ID NO: 358601 - protein, 84 aa, Zea mays
  Clone ID: MRT4577_90211C.1.pep
ISICLSASLPNIITSIAMRHLLTDDKIPKSAPAFNLYAQDPGLVDPTLNLLTVIRSIRQNPTHVEHFTVPQACRAVWTETTLLS

SEQ ID NO: 358602 - protein, 47 aa, Zea mays
  Clone ID: MRT4577_90212C.1.pep
PQTLNHGAAGPIRRSPAPNPPAPLYGYRNSGWDTCVHRPQVRRRREP

SEQ ID NO: 358603 - protein, 98 aa, Zea mays
  Clone ID: MRT4577_90213C.1.pep
RPRKPLHQEAGLGANERRSLFPVDRNPPRLIALNTMARRFHIPDPVPRGRVLPPSYCMLLRYAAFTLPRVVPMKLLFDDDLLRNRLAPRVYIHIRCQL

SEQ ID NO: 358604 - protein, 57 aa, Zea mays
  Clone ID: MRT4577_90214C.1.pep
NISISSTHKNKNPGMTPSPLPTEITIYNLQSKELHPPKPRQPIYTHLYQTIINKFTP

SEQ ID NO: 358605 - protein, 86 aa, Zea mays
  unsure (1)..(86): unsure at all Xaa locations
  Clone ID: MRT4577_90215C.1.pep
SGAATRARPVLLSDLPGEDEVHTPAGREMSFMHCFLLPPIPKPVKGVLRLVPRGIKDLERALPVTFMSPXXKIKNQELSDDECVIE

SEQ ID NO: 358606 - protein, 48 aa, Zea mays
  Clone ID: MRT4577_90216C.1.pep
APLVRPLIRPKDIQLDLYIGGERSVTFPSPFPNPIRVKGTSTILSFTE

SEQ ID NO: 358607 - protein, 74 aa, Zea mays
  Clone ID: MRT4577_90217C.1.pep
ILNGTGDMNIITLIEETQPRLLFFKLKATFYLDELKSFKRVWYTIASSDQRVKSSSPTEHQLSIPNISSKRCGK

SEQ ID NO: 358608 - protein, 41 aa, Zea mays
  Clone ID: MRT4577_90218C.1.pep
LKPIKVVIPQNALEAKGVVLAKIPDPNPTVFFEPQTLDLLG

SEQ ID NO: 358609 - protein, 89 aa, Zea mays
  Clone ID: MRT4577_90219C.1.pep
CSPPSSAGIPCLEVTTVTAALYSYIPGQNQHRTEHIPGCNVHFHLPLIPIHIKAHQTSQRPTLFSSVHMGTSVQAQPTLACITLWRIKH

SEQ ID NO: 358610 - protein, 41 aa, Zea mays
  Clone ID: MRT4577_9021C.1.pep
WHGTIFRFLTLSLVEEKMSHFLNTNIGGVLNAIFEAVRTLG

SEQ ID NO: 358611 - protein, 158 aa, Zea mays
  Clone ID: MRT4577_90220C.1.pep
HASGNRLHPALLLIIGAGACLLGYGTAWLLVSGVAPALPYWLIWFGLCLATNGGAWLATAVLVTNMRNFPVSRGAVAGILKGYSGLSAAVYTEIYTGVLRDSPIHLFLILTFGISAECLLAMYFDQPCEPSLVVTNAEQVHFMFCAVASVFLGVHLGW

SEQ ID NO: 358612 - protein, 141 aa, Zea mays
  unsure (1)..(141): unsure at all Xaa locations
  Clone ID: MRT4577_90221C.1.pep
RRWRACSARRLLLPPVRCPVVASPRVASAASVSVAAPALARGASPGWACRSPCASSPSPALCRRPSLPPPPCCPRFLLGALPVSAALPLLGLPPPLVAFLVPALARCRCRLRGCCRPPCVVRSLAEAKREKGRQPRAXFRA

SEQ ID NO: 358613 - protein, 63 aa, Zea mays
  Clone ID: MRT4577_90222C.1.pep
RESRPTPKLNFISLLAGIQLPHMTILIFQQSLPLQRHQAPVFSPCTSHHQTKHINKHINQPKG

SEQ ID NO: 358614 - protein, 211 aa, Zea mays
  unsure (1)..(211): unsure at all Xaa locations
  Clone ID: MRT4577_90223C.1.pep
MSSSLSSGISASPSAAPSTARRRHDXAAAADEGEGGGAATAAARRPPAFECREEAGRXAVVVRAGPGPLSEIEPDLEEDAIDVYRTNGISPXTSSTGSMTDTTPISKVKTRRASGRMSPSGTKKLSLLRAXSRGEYLYIGAAVFIVVFCIFEMGKPDKPHNFEPEIYILERAARDKLIADYNSMDIWDFNEKYGELWDFTVNPRDDIVKST

SEQ ID NO: 358615 - protein, 189 aa, Zea mays
  unsure (1)..(189): unsure at all Xaa locations
  Clone ID: MRT4577_90224C.1.pep
MSSSLSSGISASPSAAASTARRRHDAAPQQLTRVKAAARPQLLHAGRRRSSVGRRPGGGAVVVRAGPGPLSEIEPDLEEDAIDVYRTNGISPEDFEYGKYDGHHTYFEGQDKKGFXEDVSEWYQEAEPPQGFQALISXAFPPAIILGMAFNVPGEYLYIGXAAVFIVVVCVIEMGEPRQPHNFEAEIYM

SEQ ID NO: 358616 - protein, 136 aa, Zea mays
  unsure (1)..(136): unsure at all Xaa locations
  Clone ID: MRT4577_90225C.1.pep
MPAEERTRTSCRIRHEQHRGEIMSSLSSGISASPSAAPSTARRRHDXAAAAEGEGGGAATAAARRPPAFECREEAGRXAVVVRAGPGPLSEIEPDLEEDAIDVYRTNGISPVRRRRPSFPSFSSLLFSVVVPRLVS

SEQ ID NO: 358617 - protein, 229 aa, Zea mays
  Clone ID: MRT4577_90226C.1.pep
MSSLSSGISASPSAAPSTARRRHDAAPQQLRVKAAARPQLLHAGRRRSSVGRRPGGGAVVVRAGPGPLSEIEPDLEEDAIDVYRTNGISPEDFEYGKYDGHHTYFEGQDKKGFWEDVSEWYQEAEPPQGFQALISWAFPPAIILGMAFNVPGEYLYIGAAVFIVVFCVIEMGKPDKPHNFEPEIYMMERSARDKLIADYNSMDIWDFNEKYGELWDFTVNTRDDIVKST

SEQ ID NO: 358618 - protein, 216 aa, Zea mays
  unsure (1)..(216): unsure at all Xaa locations
  Clone ID: MRT4577_90227C.1.pep
MLSSSTAQLPPRCLAGYLYKNHAPPSRSRWEASRWAPVEAALNRMSKWLVAGCFAFAAIWKRDAEIMWVLLGAVGNSLLSLVLKKMLNHERPAPALRSDPGMPSSHAQSIFYAATVLALSLYYWLGTNYLTMILGPATLSLAAYLSWLRVSRGLHTLNQVMVXAVVGSAVGALWFVLWHWLVQEAFASSVLVRVAVILGSSAFCVSFVVYMIRHWL

SEQ ID NO: 358619 - protein, 230 aa, Zea mays
  Clone ID: MRT4577_90228C.1.pep
MPRLLLPAPSPRPCLNDSVRRPPLSKYRFFLPRTRRRPSPRLGVRMAEMTKVGSAGEPAEVGVSMESDPIVGGEAPSRPGWEASRWAPVEAALNRMMLNHERPAPALRSGPGMPSSHAQSIFYAATILALSLYYWLGTNYLTMILGPATMSVAAYLSWLRVSRRLHTLNQVMAGAVVGSVVGALWFVLWHSLVQEAFASSLLVRIAVVLGSSAFCGGFVIYMIRHWLRDE

SEQ ID NO: 358620 - protein, 87 aa, Zea mays
  Clone ID: MRT4577_90229C.1.pep
VLAQSNSGLIHVQSWLRVSRGLHTLNQVMVGAVVGSAVGALWFVLWHWLVQEAFASSVLVRVAVILGSSAFCVSFVVYMIRHWLKDE

SEQ ID NO: 358621 - protein, 55 aa, Zea mays
  unsure (1)..(55): unsure at all Xaa locations
  Clone ID: MRT4577_9022C.1.pep
NSGNNPKXXFFFFFFFFFXFFFFFFFFFFFLLFFFFFEQITSITFFSELLIIIHR

SEQ ID NO: 358622 - protein, 78 aa, Zea mays
  Clone ID: MRT4577_90230C.1.pep
FKDSQEEDICQVVLVASPRKDCDKVQALRESAGVLLTRNVGISDSLGPAKAVGYFKEVPLPVWAALLKQLDSDEDDDQ

SEQ ID NO: 358623 - protein, 94 aa, Zea mays
  Clone ID: MRT4577_90231C.1.pep
LIHRSQPYFCLVSSGGGGGARTKQTARRSTGGKAPRKQLATKAARKSDPATGGVKKPHRFRPGTVVLGEGRKYHKSTELIIRKIMLQRLVREIA

SEQ ID NO: 358624 - protein, 123 aa, Zea mays
  unsure (1)..(123): unsure at all Xaa locations
  Clone ID: MRT4577_90232C.1.pep
GNGGTRSSDRLAYCIYTETFARFCLCLHTPIVFILLTVGMEVTCNFSTKASTVTFGPQHALDSTTTVKARYNSNGIVDALIQHEWRPKSIFTLSTGVEVKMFNVFAILKPPKIGLSLXLVLKP

SEQ ID NO: 358625 - protein, 100 aa, Zea mays
  unsure (1)..(100): unsure at all Xaa locations
  Clone ID: MRT4577_90233C.1.pep
ERRVFGSFFYVVNRVVFSRGPVLDLGSVGLAIVYXLGCDQPRAXQGLAVRDSQGIAMGQSVIMVHQSSDPVFVGEHMDCQAQKGRVIMPRQGRAFVGLSR

SEQ ID NO: 358626 - protein, 55 aa, Zea mays
  Clone ID: MRT4577_90234C.1.pep
PTTSSRTSSCSRSRDCRSTDDLSKSTLQQIHHQKVARTIELLTQLSWCVKSWTHC

SEQ ID NO: 358627 - protein, 147 aa, Zea mays
  unsure (1)..(147): unsure at all Xaa locations
  Clone ID: MRT4577_90235C.1.pep
SDSEEHHFXLSADAGASXTYPQQDETAHKNGFFIIKNRPCXMSRIXTSITAKHVHGQCHFSXIHIFNGKKLEHSAPSSHNWDVXHVNRXTEYHLIDISDDASVSLLXTSNANTIDDLKLPTDETLEAHIKEGFXSRNDLDVTVHTAM

SEQ ID NO: 358628 - protein, 59 aa, Zea mays
  Clone ID: MRT4577_90236C.1.pep
VNSCRDCENCNSSLENHCPERVFTFNGIDTDGTVTKGGYSTHIVVHERYNWLLKHDFLY

SEQ ID NO: 358629 - protein, 70 aa, Zea mays
  Clone ID: MRT4577_90237C.1.pep
KMVCRAALDFTIFPIYYFECAFLGTSMNSVSALGTYTSFWTNKQYPSVLGAFLKRFSRNKNSDNRFASQL

SEQ ID NO: 358630 - protein, 36 aa, Zea mays
  Clone ID: MRT4577_90238C.1.pep
RTRAPTLWRTLKFIYSPTGEGYTINHTISPRSRFLI

SEQ ID NO: 358631 - protein, 138 aa, Zea mays
  unsure (1)..(138): unsure at all Xaa locations
  Clone ID: MRT4577_90239C.1.pep
IQTAKLIRSSSLTRHEQEKQPDCMLVSILKLSKEFAFIEEKLLVERTENRSDDLSDHCSQIILQVVALXKIGIWYEQIIEVRCSELQKGEAKVVILGDKTIAHXSLLQKIYLALDAYSPTXQXHPGXQLLDAFLKTLF

SEQ ID NO: 358632 - protein, 55 aa, Zea mays
  unsure (1)..(55): unsure at all Xaa locations
  Clone ID: MRT4577_9023C.1.pep
VEESEAKMKHLEGICNPIIAKMYQPKGPRMAAPPGMDEHAPSXGIGPGPKMEEVD

SEQ ID NO: 358633 - protein, 83 aa, Zea mays
  Clone ID: MRT4577_90240C.1.pep
AYVTARPLASQPGLVRVLVPASSPFVVGTRYRWLCFPCRLSASPVLEIGGPDDRTYIAFECRSCPLIESVCVPSVGWCTRSGF

SEQ ID NO: 358634 - protein, 153 aa, Zea mays
  unsure (1)..(153): unsure at all Xaa locations
  Clone ID: MRT4577_90241C.1.pep
IQTAKLIRSSSLTRHEQEKQPDCMLVSILKLSKEFVFIEEKLLVERTENRFVSIHPHYACFLDIFISLSKHDSGVEHGRFRSDDLSDHCSQIILQVVALXKIGIWYEQIIEVRCSELQKGEAKVVILGDKTIAHXSLLQKIYLALDAYSPTLQ

SEQ ID NO: 358635 - protein, 56 aa, Zea mays
  Clone ID: MRT4577_90242C.1.pep
HGSNAFTILCWGNIIYTYNVWIFHCQNSTQYFSKISVTRLLLNFRVNKRICQHYSS

SEQ ID NO: 358636 - protein, 82 aa, Zea mays
  Clone ID: MRT4577_90243C.1.pep
CTIPILGEFFKHMPVLGHHHRSHKMCELNRWHPSPWVGGPPGQVLLERTRGGETPVHTVGTPCPMAKKRGAPQKTGGEPPGT

SEQ ID NO: 358637 - protein, 59 aa, Zea mays
  Clone ID: MRT4577_90244C.1.pep
PFVFRGGFRAPVLRGAVRVRCCRCRGVFPPFRLKKTTISAGPAAVYKLVGTWLFDSGPV

SEQ ID NO: 358638 - protein, 44 aa, Zea mays
  Clone ID: MRT4577_90245C.1.pep
LLRLANSFDLLSITTSSVKGLFFKAFCFANALIFPIPKFSHYGP

SEQ ID NO: 358639 - protein, 144 aa, Zea mays
  Clone ID: MRT4577_90246C.1.pep
MPRQRSVGRAPSRPTAAASAPKPQQTRPAATHAAPAAHPPAQAMPPQAAGSQGPGLFGQMASTAAGVAIGSSVGHAIGGMFGGSSEPAAPVQAQAAPQEQSWNQNNCAGVAQNFTKCMDDNNGNMQICNWYLEQLKACQAASGQ

SEQ ID NO: 358640 - protein, 46 aa, Zea mays
  Clone ID: MRT4577_90247C.1.pep
MFEISTYLQQQKVLIHTIPNPKHSTTQNNSTINQTHYNPHFVHNQN

SEQ ID NO: 358641 - protein, 27 aa, Zea mays
  Clone ID: MRT4577_90248C.1.pep
SFGHAPDRSRLQLDHDLAGLALALASS

SEQ ID NO: 358642 - protein, 90 aa, Zea mays
  Clone ID: MRT4577_90249C.1.pep
QTISFIFFCAQKNPIDTRRVLLVALALLALAASATSSHTSGGCGCQPPSPDHLPSSVLLPPPVHLPPSVHLPPPDHLPTSVHLSPSGHVP

SEQ ID NO: 358643 - protein, 87 aa, Zea mays
  Clone ID: MRT4577_9024C.1.pep
LGEEGIGVVGWWDRSAASVAASRDALPAERRSPSLTSPPDCTGRWGAFGASAFIEGRSEGGCGELPSRPAAPALLPDRIRATTGKTK

SEQ ID NO: 358644 - protein, 156 aa, Zea mays
  Clone ID: MRT4577_90250C.1.pep
MSDKSDLKAELERKKQRLAQIREEKKRKEEERKKKEADMQQKKEPVQDDSDLDRKRRETEALLQSIGISPEPPLVPTPMSPSSKSVSTPSEAGSQDSGDLGPLTRTLQWDTDPSVLQLQSDSELGRRLHRLGVSKVTQVDFLPREVVSYSKETQTP

SEQ ID NO: 358645 - protein, 47 aa, Zea mays
  unsure (1)..(47): unsure at all Xaa locations
  Clone ID: MRT4577_90251C.1.pep
CWENGKGDGKEDQRSEEKAVAAASKSSLGLEKKXKDEYESDDSNEGE

SEQ ID NO: 358646 - protein, 73 aa, Zea mays
  unsure (1)..(73): unsure at all Xaa locations
  Clone ID: MRT4577_90252C.1.pep
TSTAPFTYMQGAVRKNMVXAIAAPTFRVXGYTMTSDALGQLYEKISAXGVTMTTLFAKATSMGLGDHSAVNCC

SEQ ID NO: 358647 - protein, 68 aa, Zea mays
  Clone ID: MRT4577_90253C.1.pep
SKKNKKGTKRDESTNPHRYSHTSPTAHVRSRCAATPLRLQLRRSIHRNRQDERDSMASPEPRAGISFD

SEQ ID NO: 358648 - protein, 75 aa, Zea mays
  Clone ID: MRT4577_90254C.1.pep
VACGSRTDELGARGDGVLPVLHRCVCCGAYLRVSRPLSLAIAVSRSLGARDGRPPFLRSFVFALLKGLGSGWDAD

SEQ ID NO: 358649 - protein, 170 aa, Zea mays
  unsure (1)..(170): unsure at all Xaa locations
  Clone ID: MRT4577_90255C.1.pep
MSALGTLSGGAGGDTGLIRLRRCVAPALAEPRHHAARTFDCAALPDAAPLVSVRXVRPSLLLPXATLVPSSLAMRXXHTPRRTAATITECKCVXFLLEDPTLVTGFLFFMVYFHDVILNILNKXNYNYLPYPYXXSLIHXLXGVVYLTXIAWNXVAVPQRAPXINGTPES

SEQ ID NO: 358650 - protein, 81 aa, Zea mays
  Clone ID: MRT4577_90256C.1.pep
FGVLQLKFHFIFYGEGRGCIFGAGKTPPPGSLNPRGTPLGGPKGRRGAPGFPPLAPFPPPHFSLAKNFPAGGRTALGTRGP

SEQ ID NO: 358651 - protein, 320 aa, Zea mays
  unsure (1)..(320): unsure at all Xaa locations
  Clone ID: MRT4577_90257C.1.pep
MNAFFTSLARGLDELGRAGGLSSLPALLRAASLLRGLHSQLTLMVGQLHLPPGGRWLDEYMDETARLWDACLAVKLGLASVERYCAAASCAAAALDDWLQDPSPLSSSQVMRAISVSRREAMAAEEENRALADARIAPLSLQLDERLLLRATDARLTGFNGFRGLLHALHNASSLLLLILASGAVSCAAAAGGPCGADDAGAGFVASIVMLQQRMAEEAADAESDGPGAPGIGMCEFRCARAAVEAAREEVERAAAAAXPPPPRQRXKCEGGGVVKDKVEELKAWLDVLRTGTHSLVCQLDDFLDDIVEGRKELSDLCSH

SEQ ID NO: 358652 - protein, 37 aa, Zea mays
  Clone ID: MRT4577_90258C.1.pep
HASALFEREGESRRTVGRSTIYSRTLLPPALIAQIMV

SEQ ID NO: 358653 - protein, 36 aa, Zea mays
  Clone ID: MRT4577_90259C.1.pep
PATTPSSCCERSQPGLPPVTTHCPGVRGQVAQGGGA

SEQ ID NO: 358654 - protein, 54 aa, Zea mays
  Clone ID: MRT4577_9025C.1.pep
RNLQVVDADNSLVPAAALRLVADRPGCYDIQGGYNTACGNYFYYGGPGRNVHCP

SEQ ID NO: 358655 - protein, 40 aa, Zea mays
  Clone ID: MRT4577_90260C.1.pep
GTCLMGKDGALLSVKATKGSLAKPHWAFFGNSAGGMETSA

SEQ ID NO: 358656 - protein, 64 aa, Zea mays
  Clone ID: MRT4577_90261C.1.pep
VTYSCNYIPPPKNPTHSACRYREINLETLPARNKMDLGGHTTCCLGRRGRLLARDDNFRSFQQA

SEQ ID NO: 358657 - protein, 171 aa, Zea mays
  unsure (1)..(171): unsure at all Xaa locations
  Clone ID: MRT4577_90262C.1.pep
LAANGDKTHEVFTXQGTPESRAPERDTETHTEAXDIXTNGMSAQEKDTREEPNAESGSVEQSDHNDTRGEPPAAHKRRKDAERRGSNERSNGQPRNRPTASEHLQDPRHNGGRGGDDDDDATAHGDAHSGDAGTPGPSPRSYGDDRDGHRLDRPDRPAQREAGEKNRETGA

SEQ ID NO: 358658 - protein, 517 aa, Zea mays
  Clone ID: MRT4577_90263C.1.pep
MDPSSAGSGGNSLPSVGPDGQKRRVCYFYDPDVGNYYYGQGHPMKPHRIRMTHSLLARYGLLNQMQVYRPNPARDRDLCRFHADDYINFLRSVTPETQQDQIRLLKRFNVGEDCPVFDGLYSFCQTYAGASVGGAVKLNHGHDIAINWSGGLHHAKKCEASGFCYVNDIVLAILELLKHHERVLYVDIDIHHGDGVEEAFYTTDRVMTVSFHKFGDYFPGTGDIRDIGHSKGKYYSLNVPLDDGIDDESYQSLFKPIMGKVMEVFRPGAVVLQCGADSLSGDRLGCFNLSIKGHAECVRYMRSFNVPLLLLGGGGYTIRNVARCWCYETGVALGQEPEDKMPVNEYYEYFGPDYTLHVAPSNMENKNTRQQLDDIRSKLLDNLSKLRHAPSVHFQERVPDTEIPEQDEDQDDPDERHDPDSDMEVDDHKAVEESSRRSILGIKIKREFGENATRVQDGGRVASEHRGLEPMAEDIGSSKQAPQADASAMAIDEPSNVKNEPESSTKLQGQAAAYHKP

SEQ ID NO: 358659 - protein, 103 aa, Zea mays
  Clone ID: MRT4577_90264C.1.pep
LSPPYVWKGHPIFCFFPVFQPVHPCFFGEGCFHPGWVFKGKKSCPPKMFFRDYCPYLCPSFWEDIPIFPPFFVFVSASFVLNPKLLCFGEGLRTLPGALCGEI

SEQ ID NO: 358660 - protein, 81 aa, Zea mays
  Clone ID: MRT4577_90265C.1.pep
QQGTQIWVPNTRLTQVCSVQRKAKTAGRQLGYTQHVWIHSAQITLFGRNSTLQEMFKSHIDFFNTDVYVDIIPCCDARRTK

SEQ ID NO: 358661 - protein, 142 aa, Zea mays
  unsure (1)..(142): unsure at all Xaa locations
  Clone ID: MRT4577_90266C.1.pep
MAAGYGEELLGRVSGLVAACTVRVSRATRRLLRRHQRRRXEAPPDDGRRGGSGAVRAWGGHRQGQGVVGVGGRGXLWSRRILMGERCQPLDFAGAIHYDSFGRRLARPXCRRAPRPPCRAAATLTRATTRRPRTVTPSRSAG

SEQ ID NO: 358662 - protein, 76 aa, Zea mays
  Clone ID: MRT4577_90267C.1.pep
SPLACLFLAHVVFVLLYVKLLSIFHSLLGPMGFVAAVPFCSLVVYPCDFWPWWQAGSYWVTPKKTPHKKGRAAAVR

SEQ ID NO: 358663 - protein, 107 aa, Zea mays
  Clone ID: MRT4577_90268C.1.pep
RTWPRPTPTPTPAASPTYGPRKPTPRVVPEPTPPAPDERVAVLQEEADAQVHAREETVPVALRRRHDPAAYGSSAAEARERADETELGHRSWLDRGHQHSSQMVQCQ

SEQ ID NO: 358664 - protein, 102 aa, Zea mays
  unsure (1)..(102): unsure at all Xaa locations
  Clone ID: MRT4577_90269C.1.pep
SSALVCVHVGNNNYTRCFMYAIGACKAPTIIRQGNRFITPPNLARXIVTTQHDTPVSGLKNWVWHLQNDLFMEGAYFTSTSGEINIQVIKEDLMQPRTGSYI

SEQ ID NO: 358665 - protein, 228 aa, Zea mays
  Clone ID: MRT4577_9026C.1.pep
MAGASLLSPSCTLLRLIPSASHICCSSHFKRFDRVRRFAPAAMATSSGPKEAPANNPGLQTEVDPATKGYFLQQTMLRVKDPKVSLDFYSRVMGMSLLKRLDFEEMKFSLYFLGYEDVTLAPDDHIKRTEWTFRQKATLELTHNWGTENDPEFKGYHNGNSDPRGFGHIGVTVDDVHKACERFERLGVEFVKKPDDGKIKGIAFIKDPDGYWIEIFDQTIGTVTSSAS

SEQ ID NO: 358666 - protein, 103 aa, Zea mays
  unsure (1)..(103): unsure at all Xaa locations
  Clone ID: MRT4577_90270C.1.pep
ESRWGGFPPMAAPTTSRRGPGGARNMDDENLTFQTSPLLKIFRGXGQMGITDDLLLGIYCYXFQKPSAIQHHADLPIINDHNLITHAHSDTTNTSIISLTQYQ

SEQ ID NO: 358667 - protein, 620 aa, Zea mays
  Clone ID: MRT4577_90271C.1.pep
DIPEAIAQYPKLTVLDLSSNQLRGPMPANLLTSSMLQELYIRDNMLSGGLSLPGSSPQKKSAQVLDISGNRFNGSLPDDIASLSGLRVLDISTNNFSGPLPAAVSKLGALTDIDISTNQFTGPLPEDLPDNLQSFNASYNDLSGVVPENLRKFPESSFHPGNSKLEYPASSSGSGSSPSGSAGGKSLSTGAKAAIVAASIVLLVILILIAIVCHYKRISRQFSSSEKVSDKSLHRTTKDSAVMQGKDNKGGLVSADELATPRKGSTSEALSQEEKSAAGGFSPSKGSRFSWSPDSGEAYGQEGLARLDVRSPDRLAGELHFLDETITLTPEELSRAPAEVLGRSSHGTSYRATLENGVFLTVKWLREGVARPKKEFAKEAKKFANIRHPNVVGLRGYYWGPTPHEKLILSDYVAPGSLASFLYDRPGRRGPPLTWAQRLKIAVDVARGLNYLHFDRAMPHGNLKATNVLLDGLDLNARVADYCLHRLMTQSGVAEQILDLGVLGYRAPELAASKKPAPSFKADVYAFGVALLELLTGRCAGDVVSGPEGAAGVDLTDWVRLRVAEGRGSDCFDAAMASDSESNPQAVKGMKEALGIALRCIRPVSERPGIKSVYEDLSSI

SEQ ID NO: 358668 - protein, 165 aa, Zea mays
  Clone ID: MRT4577_90272C.1.pep
MATVTSAAVAIPSFTGLKASAGKVSAAVKVSAPQATRLGIKASLKDVGVAVVATAASAVLASNAMAIEVLLGGDDGSLAFVPNNFSVASGEKIVFKNNAGFPHNVVFDEDEIPSGVDAGKISMSDEDLLNAPGETYSVTLDAKGTYSFFCSPHQGAGMVGKVTVN

SEQ ID NO: 358669 - protein, 85 aa, Zea mays
  Clone ID: MRT4577_90273C.1.pep
THATHASHTMNTSAPLPFYKLLGTGGLLVLSTSAATTTILLACIQATIHSVICCQLSATASIQSKDPIVLSCLIQDATTTSIQPF

SEQ ID NO: 358670 - protein, 55 aa, Zea mays
  Clone ID: MRT4577_90274C.1.pep
MLDKLWDDVVAGPRPETGLEKLRKATTARPLVINKGSTATRPGATTARSGEMDGQ

SEQ ID NO: 358671 - protein, 63 aa, Zea mays
  Clone ID: MRT4577_90275C.1.pep
TTPVTPSSSSTPRGAGNVWRSVFHPGSNLATKGMGANLFDRPQPNSPTVYDWLYSDETRSNHR

SEQ ID NO: 358672 - protein, 104 aa, Zea mays
  Clone ID: MRT4577_90276C.1.pep
MLDKLWDDVVAGPRPETGLEKLRKATTARPLVINKDADGGSYKRAQSTPSTPTTPVTPSSSTTPRGAGNVWRSVFHPGSNLATKGMGANLFDRPQPNSPTVYDW

SEQ ID NO: 358673 - protein, 158 aa, Zea mays
  Clone ID: MRT4577_90277C.1.pep
MEDLLGSEIGKNDYDWLLTPPGTPRVPALEFAEETPSSNILLKRTATRSSSTTRASRLPVSQTENGHSMVPTRPTRSNSRPSIQSALMNGNNRTSVPNTSISSVTSRPTTPSRRSSTVVAPKQSVPAARTVPARSSTPGKTRLSTPAKTRPSTPTSTR

SEQ ID NO: 358674 - protein, 120 aa, Zea mays
  Clone ID: MRT4577_90278C.1.pep
MSCLRRAARLTRGLSSSSAAEAETLPPPRPSAGRRVVVTGLGAVTPLARGVGATWDRLVAGRCAVRSLAAKDLRFPEEATGRTLEQLPSKVVAALPRRKGEDKFPEDTWTKDKSVSRFIS

SEQ ID NO: 358675 - protein, 118 aa, Zea mays
  Clone ID: MRT4577_90279C.1.pep
MLDKLWDDVVAGPRPETGLEKLRKATTARPLVINKEMKDADGGSYKRAQSTPSTPTTPVTPSSSTTPRGAGNVWRSVFHPGSNLATKGMGANLFDRPQPNSPTVYDWLYSDETRSNHR

SEQ ID NO: 358676 - protein, 222 aa, Zea mays
  Clone ID: MRT4577_9027C.1.pep
MAGASLLSPSCTLLRLIPSASHFKRFDRVRRFAPAAMATSSGPKEAPANNPGLQTEVDPATKGYFLQQTMLRVKDPKVSLDFYSRVMGMSLLKRLDFEEMKFSLYFLGYEDVTLAPDDHIKRTEWTFRQKATLELTHNWGTENDPEFKGYHNGNSDPRGFGHIGVTVDDVHKACERFERLGVEFVKKPDDGKIKGIAFIKDPDGYWIEIFDQTIGTVTSSAS

SEQ ID NO: 358677 - protein, 110 aa, Zea mays
  unsure (1)..(110): unsure at all Xaa locations
  Clone ID: MRT4577_90280C.1.pep
MLEKLWDDVVAGPRPETGLEKLRKATTXPARRRRQRCVLLQSMPSTPTTPVTPSTTTTPRGASNVWRSVFHPGSNLATKGMGANLFDRPQSNSSTVYDWLYSDETRSNHR

SEQ ID NO: 358678 - protein, 71 aa, Zea mays
  Clone ID: MRT4577_90281C.1.pep
MKDADGGSYKRAQSTPSTPTTPVTPSSSTTPRGAGNVWRSVFHPGSNLATKGMGANLFDRPQPNSPTVYDW

SEQ ID NO: 358679 - protein, 82 aa, Zea mays
  Clone ID: MRT4577_90282C.1.pep
IKDADGGSYKRAQSMPSTPTTPVTPSSLTTPRGAGNVWRSVFHPGSNLAPKGMGANLFDRPQPNSPTVYDWLYSDETRSNHR

SEQ ID NO: 358680 - protein, 115 aa, Zea mays; identical to SEQ ID NO: 259437
  Clone ID: MRT4577_90283C.1.pep

SEQ ID NO: 358681 - protein, 264 aa, Zea mays
  Clone ID: MRT4577_90284C.1.pep
MEINVCREMMDNIGYPKLELGLSAMTKDQLEDNLTYNNLKGLILSNTLKAQKDAEVKSTRIAFGNLHSEVITLQNEALEKDKILLSLVERSEVQGLEKKLGEITENFNVEQAKHEISNTLRLRVQKNVEELRQVKEECYNDAIECYKKFKNSNGIKEASAEATVLGEKLYSEVWMNGGREILNEAIIQNEEETHRALEEARQAGEAAERERRIAELSPPELYDPEADPALKGALNVIRIANEAIDKAVNMLLNEAADKVLKEDD

SEQ ID NO: 358682 - protein, 118 aa, Zea mays
  Clone ID: MRT4577_90285C.1.pep
MLDKLWDDVVAGPRPETGLEKLRKATTARPLVINKDADGGSYKRAQSMPSTPTTPVTPSSSSSSTTPRGAGNVWRSVFHPGSNLATKGMGANLFDRPQPNSPTVYDWLYSDETRSNHR

SEQ ID NO: 358683 - protein, 113 aa, Zea mays
  Clone ID: MRT4577_90286C.1.pep
FFNTLKASSSSGSNEMMVRNSTKFDVERRGNGSTRIEICCATNPEVLLSPVSALEVLGLEIDQCVVSCFSDFGMQASCSQEEEEDGNNKRQVLSPDEIKQALFRSAGYGGRCL

SEQ ID NO: 358684 - protein, 139 aa, Zea mays
  Clone ID: MRT4577_90287C.1.pep
PTRPEAFSLFDKDGDCCITARELGTVMRSLGQNPTEAELQDMINEVDADRNGTIDLPELLKLMARTMKDTDSEEELNEAFTVFHKDQNCFISAADLRHVMTNLCEKLTVDEVYEMIREANVHGYSHINYEEFVKVMMAN

SEQ ID NO: 358685 - protein, 66 aa, Zea mays
  Clone ID: MRT4577_90288C.1.pep
NIPLNILLQAYNTWTNNLWVPKCSGRYNLTCSAERSFDVRGVFPAPAYFCGWVHPGLLGVNKCAGT

SEQ ID NO: 358686 - protein, 68 aa, Zea mays
  unsure (1)..(68): unsure at all Xaa locations
  Clone ID: MRT4577_90289C.1.pep
APLHTPMFVMRLKQSTXRVPPPPPXXRGSXXXHHPTRNTTMISPIHNLTXPPTHSXRXPHSHRLNIPL

SEQ ID NO: 358687 - protein, 115 aa, Zea mays
  Clone ID: MRT4577_9028C.1.pep
KKRGPSGSIWSLNGAGFKNRGGKPGSTPKKAQGVQKIPVKEPFGGPPGGEIHKVILGVQKLAPINGKKKKQGGGRGKAPLGGQEKGNFGGNQKKPPRDFMAGLLIGRKKKTCNHV

SEQ ID NO: 358688 - protein, 74 aa, Zea mays
  unsure (1)..(74): unsure at all Xaa locations
  Clone ID: MRT4577_90290C.1.pep
NKPRESTLKGIVIGRRNAGRNTTFRLRGLLAGVALXSVFPLYXPNIKQIMVLDRKKDRKANLYYLRDKMNTLKR

SEQ ID NO: 358689 - protein, 64 aa, Zea mays
  Clone ID: MRT4577_90291C.1.pep
ATTYTYMVTRLLLEVKLNNEPARPRRRLHVRYTDTRKTLAPQQGPGSGGDSYGGFTEGGTVLIS

SEQ ID NO: 358690 - protein, 52 aa, Zea mays
  Clone ID: MRT4577_90292C.1.pep
DCVFVRSGLVFEMQKVERFGIVGEINSGELVVDLGNRSVLVMNPFYVRRYRK

SEQ ID NO: 358691 - protein, 68 aa, Zea mays
  Clone ID: MRT4577_90293C.1.pep
AIVSGLWCGISSCLLYFETEPKSQGGLYVPLNYIYDHICIQAVTGSLGPLKKKKKGRARYRVPAHARA

SEQ ID NO: 358692 - protein, 218 aa, Zea mays
  Clone ID: MRT4577_90294C.1.pep
GVRTPMLRKLSLVWGLGALMAIAGGGGEALAEPGGKIEPLQFGQSVEEMDSNPMGQITSVSELRDVQPTAWAYEALKSLVERYGCIVGYPDRTFRGDGALSRWEFAAGLNACMNVMERLIQENVAVLREDVDKLKRLAQEFQGELAALGARVDNLEVRTAYLEDHQFSTTTKLSGQVVTALSGIVSGDKNNGTESITRNTTLGYRTRLELNTSFRGDD

SEQ ID NO: 358693 - protein, 71 aa, Zea mays
  Clone ID: MRT4577_90295C.1.pep
PARPAGWPRCRVSKVAAPPSGRLRSVTWLLYGLQLSVPRPCLLCNVLADRARGSGVWPFTLRDAHIVPVAP

SEQ ID NO: 358694 - protein, 148 aa, Zea mays
  unsure (1)..(148): unsure at all Xaa locations
  Clone ID: MRT4577_90296C.1.pep
ARADTPWDYIEKCVFLDVNEPNGSGGRHSRYNTSDSPYFIVHNRGIHRXCFTNNFTYHXTKDFYVHDGHSSYFEQSAKHEHFSPLLXQIATLNDALYKIHIQQNWFXAQIDRXAISNHNIIMMAVHKALYHSASLILACVIQVYLLCR

SEQ ID NO: 358695 - protein, 73 aa, Zea mays
  Clone ID: MRT4577_90297C.1.pep
MNVLIVALALLALSWSAASSTSGCCSCQTPPFHLPTALYMPATVYLSSQQHPQPWQYPTQPPHLSPCQHVLIL

SEQ ID NO: 358696 - protein, 196 aa, Zea mays
  unsure (1)..(196): unsure at all Xaa locations
  Clone ID: MRT4577_90298C.1.pep
LKLQNGLPASVHKRGKRKGWLDRXESSQISMPNSHQNIRNLVRDDLIITKPQKVHSTTRATKAHEANHHERDSGYGKRTSTMEARLPTKILXCRRMRVLRRLLCKYREAKKIDKHMYHDMYMNGKGNMVKNNRXIMDSIHKSKGENARXKTLSDQFDDKSAKSNVNHERKIATTDERLLHRPXNXTGPVAAPAPST

SEQ ID NO: 358697 - protein, 60 aa, Zea mays
  Clone ID: MRT4577_90299C.1.pep
STPVLNHFWLSFIIKMVFSKYNPFHIGNDYQEQYQRYRANRNPSATDASFLAVVRLMEHP

SEQ ID NO: 358698 - protein, 196 aa, Zea mays
  Clone ID: MRT4577_9029C.1.pep
MSSANATSCVYGEIWIDGFARLHKGDDFTSSPSSNTLQEFSDVWLAAAERQLSLRPKSPSPEELTKRRQERKRKGLVIALNTYAKRNNMQLTDLEFVEEKERNQVYGCGALYVHSNFLVKGSDGKPTMFFAEMHPDCTQEEDVVCCTPLEENDYGHCVECDDRAKELRHPSGGGYLGGHEMIFHFEELDSDDDCFM

SEQ ID NO: 358699 - protein, 42 aa, Zea mays
  Clone ID: MRT4577_902C.1.pep
NQATLSISTTARKCRAVITITFDPSRADRSTSEPHSHSDLVR

SEQ ID NO: 358700 - protein, 88 aa, Zea mays
  Clone ID: MRT4577_90300C.1.pep
MVVAGAVQRRTDDNWPTRDQQDQGQPRRRNSSAAYKGSVKKWHPDKPPSASRPDASARLKAIIEAYQALLDQDDNTAELRPNNRRRSA

SEQ ID NO: 358701 - protein, 63 aa, Zea mays
  unsure (1)..(63): unsure at all Xaa locations
  Clone ID: MRT4577_90301C.1.pep
RRRAGHVLXAXWFILPPTRSLFIPRDAAPSYTPFKFXPGRHVPNVTVCPIWTRVSHMSTRFFS

SEQ ID NO: 358702 - protein, 69 aa, Zea mays
  Clone ID: MRT4577_90302C.1.pep
SHLIWGPDCSEVDCLLVRIMHGPVGAGLCDYICLCGPTGCNWIGGTCLLQPSLIWGAACGYQPLAGSCF

SEQ ID NO: 358703 - protein, 161 aa, Zea mays
  Clone ID: MRT4577_90303C.1.pep
LACEARPREQREPCRSHCRAGAGWAAAPLGSATSPAAATRPRRRRRRGAGAADRPRWDGTETAPGRRRNGSGTGRRSRADDGEEQSSYKGSDFDTMDALQEALPSRKGVCKFYNGEAGSLAKIQGAGAPSTLKKLSKEERPSPTKRKGLLPFSLKMGQTTE

SEQ ID NO: 358704 - protein, 39 aa, Zea mays
  Clone ID: MRT4577_90304C.1.pep
MEERRPWEEKQQPAPRRDFNEDRAQGNDRAEGELGEHQG

SEQ ID NO: 358705 - protein, 175 aa, Zea mays
  Clone ID: MRT4577_90305C.1.pep
AGSQRGLTPPHAACPKKITEQPTCCSTTTKVLLLASSEKRASILFTASNKREGASMAGGGELQENKKKTAGLGRAHHGEKMERGWRTPGCRRHKQREEACVREMKRWRRGVHGRRNNNLLPGVTSMRTERRGTTGLRASSASTKGEVAAAPAAAEGGGDHGRGLRGEEGSSLPAG

SEQ ID NO: 358706 - protein, 72 aa, Zea mays
  Clone ID: MRT4577_90306C.1.pep
WALALYDAIVRIPFVKWFMSHTTSNSQLYPYYGIKGRVLFIAQPNLHTSPISISRIVHSPSSFILQPPPPPP

SEQ ID NO: 358707 - protein, 50 aa, Zea mays
  unsure (1)..(50): unsure at all Xaa locations
  Clone ID: MRT4577_90307C.1.pep
HHXXLAPNXPNPNLSTGTRHTRPADXAPSSRLKTXXTEPSERQTTXEGED

SEQ ID NO: 358708 - protein, 108 aa, Zea mays
  unsure (1)..(108): unsure at all Xaa locations
  Clone ID: MRT4577_90308C.1.pep
PPPFGIMGVQSVAHQLPIIIQLXGAASANNNLFXPAFIQQQQQLLAAQGLHPMAIIMAQNIPAMGGLFQYQLPSYRPHPFGVSPALPPHYLFIIFWEFPPSLPLHLYM

SEQ ID NO: 358709 - protein, 72 aa, Zea mays
  Clone ID: MRT4577_90309C.1.pep
TSLQPYQNATAVLIGSLQPRQAQHFRTESCYSELMLAYVPSVGTLCLNPCQPVGDASGGGSFISSELNRGTT

SEQ ID NO: 358710 - protein, 76 aa, Zea mays
  Clone ID: MRT4577_9030C.1.pep
TASESSTEAPAGAGTGAAGGHPHLRLLPQTGIHPGGGAYGVIILHSRVLIPVTFYMPAYDFMVHDGYWYSSDYTVL

SEQ ID NO: 358711 - protein, 84 aa, Zea mays
  Clone ID: MRT4577_90310C.1.pep
HASAHAYVDAWGLKLSIGVWGIILLCVGVSLFASSVSLSVACHGLLMCLWIATIQVFVLDVLKRHENGATCQKTDGGFFGSCSD

SEQ ID NO: 358712 - protein, 83 aa, Zea mays
  Clone ID: MRT4577_90311C.1.pep
SSDKAPRPDVTARIYKSCRCIINGNLLRALSVIHQGNAQKTGPLKSSYLILIPTKMDASLAGNFRLISLIHSVAKLVTKLLAN

SEQ ID NO: 358713 - protein, 125 aa, Zea mays
  unsure (1)..(125): unsure at all Xaa locations
  Clone ID: MRT4577_90312C.1.pep
EQDALMVIDNIGRLTQANTEVSDLLARIRYPVAYQPTLNTDLAGLEERITTTKKGNITCVXQAIYXVPADDXTEPAPDXTFAHLXDATPVLSRQICELWXHPAEHTLYSTXRTLSTHLLEEDHYN

SEQ ID NO: 358714 - protein, 174 aa, Zea mays
  unsure (1)..(174): unsure at all Xaa locations
  Clone ID: MRT4577_90313C.1.pep
RPLPRYSEATPMHHCFLFPIETDQFGEWGKTPYKLQPNDTTLNIEPKSSTTIWLLSKSGSLELLHIKTAHERLDRENNSNLIITAPSVLYQMNCAYXNLKXCTNPSFLPXPIKRRSIXXPYVNIEMLTPKYYIXSIMELTQDRTCEFKEMNFITXSRAKLIYELPLTKMVGNFF

SEQ ID NO: 358715 - protein, 188 aa, Zea mays
  Clone ID: MRT4577_90314C.1.pep
ATSTRSGIDCAHHHVFSPSVRPVLKSPGHHHCRHRAARPREPSYAFITVSLLASRRSVAVAGTGVRRAARREGGSHHPPPPPLKALTRRLRLRLRLHERARREGRTRPQLTPVVKAIDLSPHGGSHVQRQAARQRPAPSRRATPRRAPLKRAHDKLKEVTECRAVARAKAEERQWQWPRGSAPSWRGH

SEQ ID NO: 358716 - protein, 146 aa, Zea mays
  Clone ID: MRT4577_90315C.1.pep
SASVSWWRGRWDTLRVVRLDGDDLEVFCQLPDSGEWVIERSISLRDATENLSGWEYWFFRLPASIVAADNTSVVLTPGEKTWLFSVDLETMEVENEHVRNRDVGPSYPCALPWPPVLQACVNHGDATGRRRHRTAPRSAGAAGVML

SEQ ID NO: 358717 - protein, 583 aa, Zea mays
  unsure (1)..(583): unsure at all Xaa locations
  Clone ID: MRT4577_90316C.1.pep
MAGGGGGGPGPGRVKAGSRPPWVGLAAAVWVQVAAGSAYVFPLYSHAVKEALGYNQQALTMLGVGNDVGENVGLVPGLLANRLPPWLILVIGSACAFFGFGTLWLAVTKTVAMPYWVLWIALCIGTNSSAWLGTAALVTNMRNFPLSRGTVAGLIKGYVAVSAAVYTETFNGMLGNSPTNLLMLLALGIPTACIVVMYFVRPCTPSLDEDNSTEHSHFMYTQISSVVLGIYLMVATILGDTLKLSQAVTYLLFGIMILLLLAPLAIPIKMTLYPNKQTKEKGQHPLLHXSTDSLSGADPENSQPLLGSASTTLATGTNESDDSTDLDLLLAEGEGAVNLKKKRGPRRGDDFTFLEALVKADFWLLFVVYFCGVGTGVTVLNNLAQIGMSVGANDTTILLCLFGFCNFAGRILGGSVSEYFVRSRMLPRPFWMMCTQIIMVVTFLLFATGLHSLIYVSTTLLGICYGVQFAVMIPTVSELFGLRDFGLMYNFMLLVNPLGAFFFSALLAGYIYDKEAARQHPGVLEPSDCYGPDCFRLTFYVCAVVCCCGTLLGVFFISRIKPVYQMLYASGSFRHPRSQQQLH

SEQ ID NO: 358718 - protein, 148 aa, Zea mays
  Clone ID: MRT4577_90317C.1.pep
ATSTRSGIDCAHHHVFSPSVRPVLKSPGHHHCRHRAARPREPSYAFITVSLLASRRSVAVAGTGVRRAARREGGSHHPPPPPLKALTRRLRLRLRLHERARREGRTRPQLTPVVKAIDLSPHGGSHVQRQAARQRPEPLGGRVGAVRL

SEQ ID NO: 358719 - protein, 106 aa, Zea mays
  Clone ID: MRT4577_90318C.1.pep
MGGFINPQGWLPWLGNLGLSPCYYAKVENPGPGPNISERVKWRGIKNIPYQPALQKYPVESFIQGQPWLPQLGVPFIPGLLPHHQWGGIPCLLRKIIYFRQAALSI

SEQ ID NO: 358720 - protein, 164 aa, Zea mays
  Clone ID: MRT4577_90319C.1.pep
MMPRRALLFAAVLLAASAAAVSGFHLGGDESGLVRGVLAALRERAEAEDAARFAVAHYNKNQGAALEFTRVLKSKRQVVTGTLHDLILEAADAGKKSVYRAKVWVKPWEDFKSVVEFRLVGDSESEPEPSVASDVSSGQDIVQEEARLHTIENDGLSGDFTSSS

SEQ ID NO: 358721 - protein, 126 aa, Zea mays
  Clone ID: MRT4577_9031C.1.pep
SSASLYFFCHKNIAGGRDLLFFRCATTRIDLTKSYLIYYPYQAMQPTNQPHQKYPHEQRSSLPQQYTTPTHEPSHYDSSDECANTPSRDRERESTPRRLLRRPQPPGRPQIRRRRPCRPTTPPRRP

SEQ ID NO: 358722 - protein, 90 aa, Zea mays
  Clone ID: MRT4577_90320C.1.pep
LSSSAQPLLSLSLVCFQPSSAMALLSPSAHGARFSLAPGQNFLRREACSLRPSHMALGRPAVSCSLRSDFLCYLANSPQPQLKCLLCRAR

SEQ ID NO: 358723 - protein, 146 aa, Zea mays
  unsure (1)..(146): unsure at all Xaa locations
  Clone ID: MRT4577_90321C.1.pep
LSRALTTIMHSVSCPHGQQQQLQCCSIRCRNFCLRCDGAVLRITYSGSGSSDVVFERCLVIVRYIEMPSVSVDPCLMHCLAGLAAWHRRTFPKAVSMATKYRREEGAPAWQTKITNMVSHTCVVRYIEVRSAWVRTRDXXXTGTRQ

SEQ ID NO: 358724 - protein, 173 aa, Zea mays
  Clone ID: MRT4577_90322C.1.pep
MMPRRALLFAAVLLAASAAAVSGFHLGGDESGLVRGVLAALRERAEAEDAARFAVAHYNKNQGAALEFTRVLKSKRQVVTGTLHDLILEAADAGKKSVYRAKVWVKPWEDFKSVVEFRLVGDSESEPEPSVASDVSSGQAIAKLSLEADIVQEEARLHTIENDGLSGDFTSSS

SEQ ID NO: 358725 - protein, 67 aa, Zea mays
  unsure (1)..(67): unsure at all Xaa locations
  Clone ID: MRT4577_90323C.1.pep
MALPHQGTVHYPSFKLVITGDGGTGKTTSMKRHLTADIEKKYEPTIGVEDHPLDNTTNXGQITIYCW

SEQ ID NO: 358726 - protein, 113 aa, Zea mays
  Clone ID: MRT4577_90324C.1.pep
LFSVVSSQAAENMLFLVPELQPPKIKSYFWANFFGRHEPPKISLKPSIIAYFWQQRTYFRRLLDAKNDCSCCSVELLPRARIRPLTPCHASFLPARGHCRYVCLAIRDRRSCP

SEQ ID NO: 358727 - protein, 117 aa, Zea mays
  Clone ID: MRT4577_90325C.1.pep
TLRAWARCRDQQSDTECALPSRSTPRFMGPDNIEATTLIRSLSVDLRRRLIDPSSTVGTGHANRASTGVLPGIIGVVHLLVSLGNICFAMDKFLKQAYRFAFIKYPRCPLWHDSCQS

SEQ ID NO: 358728 - protein, 63 aa, Zea mays
  Clone ID: MRT4577_90326C.1.pep
FLSLAVIYMSGSSDIINIGASVFIWRMAYDPHSVSYVCIYASTSSCSGTRAVRVVDGSPRGAI

SEQ ID NO: 358729 - protein, 48 aa, Zea mays
  Clone ID: MRT4577_90327C.1.pep
PQKHSPGVIWGYKPNFNHLLELLFLPGAFFFNFFFQQIKQGGRAPCVS

SEQ ID NO: 358730 - protein, 63 aa, Zea mays
  Clone ID: MRT4577_90328C.1.pep
VSAKPWTSKRQTDECARHMEPSLSIKPHTVDLLSRQMMSTQNTLTVDWFKRTTSRLGFELKRC

SEQ ID NO: 358731 - protein, 100 aa, Zea mays
  Clone ID: MRT4577_90329C.1.pep
HTPVPTPLVVFIYPGHRSTRAGAKSLNARLDFKHILRLLITNKHGKKKIMFDMTLIMGVVYQIFNTFSNNADIDMNKTALELTHEQLQHLMTVVANPMQF

SEQ ID NO: 358732 - protein, 55 aa, Zea mays
  Clone ID: MRT4577_9032C.1.pep
QVLIVTEMKVKQTIHFCHFYPWRKGCSITFPFIYNIYFCLRRETDFSTSPIIFII

SEQ ID NO: 358733 - protein, 55 aa, Zea mays
  unsure (1)..(55): unsure at all Xaa locations
  Clone ID: MRT4577_90330C.1.pep
LELFPNGPAVLEVSPSLFKAPKTGGVGGFWGPAKIXTSSXPWTPESGLVSAGLFF

SEQ ID NO: 358734 - protein, 148 aa, Zea mays
  unsure (1)..(148): unsure at all Xaa locations
  Clone ID: MRT4577_90331C.1.pep
MTTRLKKNRKKRGHVSAKHGRIGMYRKHXPRGRGNXAALHHHRILFDKYRPDYFGKEGMRYLHRLQNMFHCPTDNEERLWSMVPXARSVHAGGADQSSLVDVTQYMLVQXVLGKGMLYDRPIACKGKLIYKDSEKKILVPEALVMMTG

SEQ ID NO: 358735 - protein, 102 aa, Zea mays
  Clone ID: MRT4577_90332C.1.pep
TLPYLVFCPYNETPRTLDMESCSGKTDGKMNHLQEWRQSCVDDQLTRLNVTPLLGDAPAQHLLYAEALQRRNDGRVSDGLMKRYAHVASGGWWCSGIDLLSG

SEQ ID NO: 358736 - protein, 60 aa, Zea mays
  unsure (1)..(60): unsure at all Xaa locations
  Clone ID: MRT4577_90333C.1.pep
FFFFFFFFFFFFFFFFFFFFFFFFFFWTKEXSIIGFGPLDKKKGRIFKAKILDKGTRESN

SEQ ID NO: 358737 - protein, 78 aa, Zea mays
  Clone ID: MRT4577_90334C.1.pep
MALRRALGWSEGEVMRPESKPCSRLHYGPRITVPRSLRWASCGAVSMSATSALLVRLFSPECEPQNIAAFDKPELKAE

SEQ ID NO: 358738 - protein, 100 aa, Zea mays
  Clone ID: MRT4577_90335C.1.pep
MALRRALGWSEGEVMRPESKPCSRLMRQTAGIFSVGGGLAFWVLCRLHYGPRITVPRSLRWASCGAVSMSATSALLVRLFSPECEPQNIAAFDKPELKAQ

SEQ ID NO: 358739 - protein, 54 aa, Zea mays
  Clone ID: MRT4577_90336C.1.pep
CCSKHPGMCFSRPGRLTLPPPDISSEPCPIIGGAPPSLYYLTITHKKSKRGPHQ

SEQ ID NO: 358740 - protein, 130 aa, Zea mays
  Clone ID: MRT4577_90337C.1.pep
EPRPNPPKKTPCLGFRGARLGLWTPEWPGFQARAILEAVLAMTNQGVQGFPEIMVPFVGTPQELGHKGTFIRQVAEKGFANGGKTFGSKVGTMIEIPRAVLVADEIADQAEFFSFGTNDLTQMTFGSSRD

SEQ ID NO: 358741 - protein, 59 aa, Zea mays
  Clone ID: MRT4577_90338C.1.pep
TEQKRDIPPFISPVYLQVHFPSGCGQLAPWLYISRSRTSENAALLNWTVNACSRTCTSL

SEQ ID NO: 358742 - protein, 50 aa, Zea mays
  Clone ID: MRT4577_90339C.1.pep
GTTKWGLLFGALTCAFDGQMIKRLVTKVAMITYGPVFIGRCNELTIRCIC

SEQ ID NO: 358743 - protein, 76 aa, Zea mays
  Clone ID: MRT4577_9033C.1.pep
LLHATLHHLLYLLVRPRNTVVFFTTTNLTTQEQRQPRRRLHPTIFHHILGGRRAHHHPFREPPHQRWADSLPLVTL

SEQ ID NO: 358744 - protein, 132 aa, Zea mays
  Clone ID: MRT4577_90340C.1.pep
GQAFVHAYAHASGHTSAGELARLLLRLPLSLMPPLCYNEPNHPNPLTYQETKDLTHVEAVVIDFPVHRGKKLLGEVLASPKTTCEYPWGIYGWIGHPTPVNSCGRNGYTPLPVLRHQHNDSGEKKSPIRRPN

SEQ ID NO: 358745 - protein, 72 aa, Zea mays
  unsure (1)..(72): unsure at all Xaa locations
  Clone ID: MRT4577_90341C.1.pep
VSVIVGILNFXPTEPYKQLYLPPHLILIILQIFPTARFLPYPDFYKSRSKKSLTIQVPNRPLIEDFSCTAYQ

SEQ ID NO: 358746 - protein, 143 aa, Zea mays
  Clone ID: MRT4577_90342C.1.pep
PRVRMPGMPGLDNDNWEVPRSKSMPRGDSIRNQGLLLNKPSTVHKTSSINTRLLPQGSGAALIGKSALLGTGVSASRPLSFTPGPTPAQTTPKPIRAAPAVVPAPDKQASAPKGNTAELQKKTITLLEEYFGIRILDEAHQCI

SEQ ID NO: 358747 - protein, 110 aa, Zea mays
  unsure (1)..(110): unsure at all Xaa locations
  Clone ID: MRT4577_90343C.1.pep
RSSLFHPFSMDLFDPFYSMFRGIVXTASSSTSASETAAFASARIDWIATXPPAHVFKADLPGVNNEEVKVEVEDGNVLLISGQRTTENEXRPTSXHRVERTIRHFVRHLR

SEQ ID NO: 358748 - protein, 311 aa, Zea mays
  Clone ID: MRT4577_90344C.1.pep
MMQDLFSVPSCFSAGEKLPDVPASAAATTRSGQSAATLVYRAGIAGHDRLVTVTWCRNLLTHGLTVSIEGSAGGGKDKSGGGREWGDADGGAASSSNKGCSTACKVEMQPWHFWRKYGAKQFHVDGRAVDVVWDLRSARYSDEPEPLSDYYVAVVSDEEVVLLLGNLKKEAFRRTGSRPSLRDAALVCKKEHVFSKKRFLTKARFHDRGKLHDISIECSSSNLGGGGVDVDMVIKIDGYVNVLVRHLQWKFRGNECISINQLKVQVYWDAHDWIFGTGVRNALFIFKPEPLPSATNEYSDFCLFLYAWKLE

SEQ ID NO: 358749 - protein, 70 aa, Zea mays
  Clone ID: MRT4577_90345C.1.pep
EGSDSAVIYCVCVSTYSCHSRFVALRGCSKMHFMADICIGPGKLVKSGSILFGGPSTVSVHDFRFVPSGP

SEQ ID NO: 358750 - protein, 55 aa, Zea mays
  Clone ID: MRT4577_90346C.1.pep
TKSFFIKRSYRTYKSTRYELMLSLLLLHYIPLLYTTNYYYIILLILFLLLIYTNI

SEQ ID NO: 358751 - protein, 184 aa, Zea mays
  Clone ID: MRT4577_90347C.1.pep
PEQWWIRGIELGRRQIRGVVFAASAGKGLDTDAAVEGGEEFSAGTWLPEMGVDGWRWPSVSMPRRSSWLAGFGRPRAGLGRQRSGRGAGGEDASSGLAGCVGRAAQPAKMAAIGPLVWLHMTAPGWRWPAAAGPGADSVAHVARCCSVLCAQPERMVIIAALRLLRHPACRCPSKGLFGYFQSI

SEQ ID NO: 358752 - protein, 70 aa, Zea mays
  Clone ID: MRT4577_90348C.1.pep
NTPLFYVFHLPKVPWNPIWTSCQTLTTEGLVYLIQNIRLHTWLLIIDDPTLFIRFARLKLYVPNWPPHGL

SEQ ID NO: 358753 - protein, 96 aa, Zea mays
  Clone ID: MRT4577_90349C.1.pep
GSSKSLYKERRCINLIKQALSKKILSSCSVVDKISGRPPCVTSTLVAAITSAIISGTKDLRFRHSAIIYGIKDLRFRHTIGRCTLTAGHLEPNSEL

SEQ ID NO: 358754 - protein, 45 aa, Zea mays
  Clone ID: MRT4577_9034C.1.pep
TRRAVLTIRMLNQITKKNQTLIETTCIRQHASAFSSRTELHVYEQ

SEQ ID NO: 358755 - protein, 252 aa, Zea mays
  Clone ID: MRT4577_90350C.1.pep
MCHSFLLSNFQDNVNLLNNKLNQAENACGRRETARVVDKEVVCEQARSSDNNFHCINDPSECLPNGPVSELPQNVAKDSVTEHRKFDGFGHDCVVTAAAVISSHGELQVRKDVLTTKSYPEGSGNNLGKSALPPQGSCGSRLNAGHRNGQGDENSDSGSSYHVNARSSEQYINTSSVGSQLSDTPKSEVSEWSSSCFHNHTDNQLDTQLHQSSNKDVGGVLEALRRAKMSLRAKLSWPSPASKNILALEAPD

SEQ ID NO: 358756 - protein, 139 aa, Zea mays
  unsure (1)..(139): unsure at all Xaa locations
  Clone ID: MRT4577_90351C.1.pep
TFYISQFLYILQLQLFGYYTLANSRSMLLALNIVSSGCVGVPLRTSIGVVPNLTTLEASGDCTPSNRSHRGASGGTLTSMWSMQSRLWCXLXXXLVGLLPSSRXSWCXLGWXRAGXXAXAPLPLCXXLPLLSSXLXSLC

SEQ ID NO: 358757 - protein, 119 aa, Zea mays
  unsure (1)..(119): unsure at all Xaa locations
  Clone ID: MRT4577_90352C.1.pep
LEQGRRIGEDCMKNVKHSVYHIKGLLIKRGLAKNPGLAHGNWDRFLPKVKKKNVXRKRPKLRGRNRSHPFQRLNRLNRMIFDLXNGEYFMSDKKKSAKKWAEKLDKQSGRAEENKRKRE

SEQ ID NO: 358758 - protein, 164 aa, Zea mays
  unsure (1)..(164): unsure at all Xaa locations
  Clone ID: MRT4577_90353C.1.pep
FFEGIVRLHGFPSSIVSDRDPVFTGHVWRDLFGMAGVKLRMSTAFHPQTDGQSEVVNKVLAMYLRCVTGDRPRAWVDWLAWAEYCYNTXFHTALRATPFEVVYGRSPPPILPYTPGSARTEATGTLLRSRDEILAEVRQRLLQAQQMSKKYYDANHRDVEYAVG

SEQ ID NO: 358759 - protein, 180 aa, Zea mays
  Clone ID: MRT4577_90354C.1.pep
ICPPFGRITVFMAGSVVVVAFPTRSVDTLLFGRRRGHPDRHRRVRCRRPLWQGSSTTGRGTKQEAPELLLSFCVASPIIDTRTSTPPEDQASATCLPITTTSTSATSSSRGYRLLGAHTSLYSSRNTRTLTTLRSLGDFNQSAPTFSFYSSPIVCGASIVTAGDVRLCVWAGTTVGLPAH

SEQ ID NO: 358760 - protein, 130 aa, Zea mays
  Clone ID: MRT4577_90355C.1.pep
MLQGTTAAAITTTGRALAAGAEGSNAGSAGRHTTIATLNPVAPPAVTEVCWAPDPYLMVQQLREFETLNDGLVALRVQLQEYAGEISKSKDTNAGMDWLLALPASVRDVVIMARDVIESFFVISTGAAPP

SEQ ID NO: 358761 - protein, 49 aa, Zea mays
  Clone ID: MRT4577_90356C.1.pep
LLPKETSNVSSIFSDYGADANARGTHKTRTVIHRFTDCPELVTFSPPRI

SEQ ID NO: 358762 - protein, 598 aa, Zea mays
  unsure (1)..(598): unsure at all Xaa locations
  Clone ID: MRT4577_90357C.1.pep
MGVGGVLLKCFPWDAVYRGCGSKEEVRYLLWIRLTRVTKGTEFFWGVEKDIRMRGXFTXIVXLIVVELYCAHTGACVFYYLGTTLPESMEGYTWIGSLQLGDYKWAHFRGIDLAKRYITXVYFAIVTMGTGGYGDIHAVNIRGMIFIMIYGSFDMILGAYLIGNMTAGIGKFGSSLDKMKEVIRYMNRNKLGKEIREQIKGHLRLQYESSYTEASVLQDIPISIRAKISQTLYKPYIESIPLFKGCSAEFIQQIVIRLQEEFFLPGEVILEQGSAVDQLYFVCHGALEGVGIGEDGQEETLLMLEPESSFGEISILCNIPQPYTVRVCELCRLLRLDKQSFTNILEIYFVDGRRILSNLSESEYGGRVKQLESDITFHIGKQEAELTLRVNSAAFYGDLHQLKSLIRAGADPKNTDYDDRSPLHLAASRGYEDVVQFLINEGVDIDLTDQFGNTPLLEAVKQGHERVAALLFAKGAKLSLKNAGSHLCTAVAKGDSDFIRRALAYGADPNCRDYDHRTPLHIAAAEGLYLIAKMLVEAGASVFTTDRWGTTPLDEARKCGGRSRGALLEEARASELSMFPERGEEVRDKVHPRRCSVF

SEQ ID NO: 358763 - protein, 88 aa, Zea mays
  Clone ID: MRT4577_90358C.1.pep
LLAVDTRSRNGRRPRADEPGRATAPARRRARGGVVGQLRRGQELEAVHGHVELQRLALRRRLPHRERHAQGAYQRARYLRDDLVTKPT

SEQ ID NO: 358764 - protein, 67 aa, Zea mays
  Clone ID: MRT4577_90359C.1.pep
PAGAGAGVDDPDPDCVVLNLPRQSHAVAVPRRTASCSALRLMMSARKWSASILPLLCASATWSCETG

SEQ ID NO: 358765 - protein, 78 aa, Zea mays
  Clone ID: MRT4577_9035C.1.pep
MEKDGAPKPAAATAPEPEGTHQPTWWAQTQWASIKRKARGASEYAMLRTRQGITLFGEPKLGSLIKAKGASANDESSQ

SEQ ID NO: 358766 - protein, 353 aa, Zea mays
  unsure (1)..(353): unsure at all Xaa locations
  Clone ID: MRT4577_90360C.1.pep
VIRLQEEFFLPGEVILEQGSAVDQLYFVCHGALEGVGIGEDGQEETLLMLEPESSFGEIXRERVWRSILCNIPQPYTVRVCELCRLLRLDKQSFTNILEIYFVDGRRILSNLSESEYGGRVKQLESDITLHIGKQEAELTLRVNSAAFYGDLHQLKSLIRAGADPKNTDYDGRSPLHLAASRGYEDVVQFLVNEGVDMDXPVRRHTRSTAIVMTSLLSSCFLSRTIATTLIMSCWCSRXPDQFGNTPLLEAVKQGQERVAALLFAKGAKLSLKNAGSHLCTAVAKGDSDFIRRTLAYGADPNCRDYDHRTPLHIAAAEGLYLIAKMLVEAGASVFTTDRWGTTPLDEARKCDG

SEQ ID NO: 358767 - protein, 209 aa, Zea mays
  unsure (1)..(209): unsure at all Xaa locations
  Clone ID: MRT4577_90361C.1.pep
NSARGSPSPGSMATKASTAGDQHIDSRRHDHDHHGSKCKKKPPASPQPSSLASAPRTPPSGARSQRVMVMAASSSSPRKKSPKAPAAGXQPRPVPAAPRPGDXKKKATAAASSSWEQVKSLLSCRSVTAAARVHDPAAPSALARLRGSGAGTCGASLCAMRDVVDAASSAASSAAASASASASGDRDTAPLNRRRAHRGASSSSAGAGS

SEQ ID NO: 358768 - protein, 205 aa, Zea mays
  Clone ID: MRT4577_90362C.1.pep
MEMDPPPPPPLHADRRRRFRDYLLALEEERHKIRVFQRELPLCLDLVTQTIEGMRSHMDSVVVGSEETVSDHGGPVLEEFMPLKPTTLSSSSSQPHYQDEHDSAHYLEHRRGSAATANDVVDADKDGEALGDLETAAASSSRRLPHPETKKAMPDWLQSVQLWSNQQQPSASPPQHQDELLLLPCRPVALNACRKPGGASSRSTR

SEQ ID NO: 358769 - protein, 56 aa, Zea mays
  Clone ID: MRT4577_90363C.1.pep
KTVKLTIMIEDPRDIERKRTLGIEDPDEITRDDLADALAEVNERKIPENRVALQLL

SEQ ID NO: 358770 - protein, 71 aa, Zea mays
  Clone ID: MRT4577_90364C.1.pep
RELGKASTEMKNLNSSSFLKWKVLTSSFCFFSISTCTIKHTKLTPLHLYQELRRNKLSWMKWNLNLKYINS

SEQ ID NO: 358771 - protein, 49 aa, Zea mays
  Clone ID: MRT4577_90365C.1.pep
VFIEKYIYLLVIYFYFFYFFFFFLIFFFFLFYILNLTLNLFFIIFFTFI

SEQ ID NO: 358772 - protein, 98 aa, Zea mays
  unsure (1)..(98): unsure at all Xaa locations
  Clone ID: MRT4577_90366C.1.pep
MAPKQXAGQPVARPNNKTDKVTNPLFEKRPKHFRIGGALPTNKDLLRFLKXAGGVLIHRQPXILKQRLKVPPALNQFTRTLDKNLAANLFKMLLMYWA

SEQ ID NO: 358773 - protein, 72 aa, Zea mays
  unsure (1)..(72): unsure at all Xaa locations
  Clone ID: MRT4577_90367C.1.pep
NNEVGMPSHATHCLGIKQANNDFSLIIMYISPCQKKKKKKSLXLXPGRGGGRFPPHSRPPLVGPSLAPSFLL

SEQ ID NO: 358774 - protein, 102 aa, Zea mays
  Clone ID: MRT4577_90368C.1.pep
SNEFAIPARQEKLSSSAIKWPGLRRLAAAAGLLLLLPRPVLLLEKKRGNQGGFPFQPNWEFDWFPGPRFVFFLVWPRSRTQRRAWIGPSIPYPRPGIMFFLS

SEQ ID NO: 358775 - protein, 98 aa, Zea mays
  unsure (1)..(98): unsure at all Xaa locations
  Clone ID: MRT4577_90369C.1.pep
CLRGPVGAXARGLRGXRGAXVGXGAXXCRPPAAXRXSXGVXGXXSSXSPRXXGAPLXXPVXRXXFGPASLCSRGLSAGWAGGRGAVALPCPLGLGSVF

SEQ ID NO: 358776 - protein, 226 aa, Zea mays
  unsure (1)..(226): unsure at all Xaa locations
  Clone ID: MRT4577_9036C.1.pep
MDLLQSSYAPGDASSPEDESLSSPDTSPLRLPSKSAAPAVDETALALSAAAASTSRPLDPSLHLIPFNPTADQLWAPVLGPQHPHAPISSASGHRNHKLGHVEDAALLPFLFDEQYNTFHRFGYASDPSGLHIIGDAQPQAPDLDTVYNLPPSEHKRRRIQSREENHEPLPPEAQNPASDEWVVHNKKSPWAGNREGPPVELTDEQRQYAEAHGAKKAEKXARGEG

SEQ ID NO: 358777 - protein, 111 aa, Zea mays
  Clone ID: MRT4577_90370C.1.pep
CLFLWGGGFGIISPPLAFWLPPGLPPPIFRPVRPCGPFPPVGKPRGAPKHVFLFLPRNPSNKLGPFPFQPSVVVLAPLISILLDGSPFGPSVVDPVGPIFSLHVPARDRVR

SEQ ID NO: 358778 - protein, 131 aa, Zea mays
  Clone ID: MRT4577_90371C.1.pep
LKVWGGGGVLNEIFGNIFFFIREKVSIMYFKKTEKDEPEKFKGKRDQGSRIQVERRGKERDGEKVVDWFAGDGIKWWWRVKKVEMMKRKKFFDGKEGKKGSWGRQLKKKKMGWVQEKKKNGKEQDGKKTLK

SEQ ID NO: 358779 - protein, 88 aa, Zea mays
  Clone ID: MRT4577_90372C.1.pep
PRVLVDALLQLHHMLGTIWATLAARLANRTDNEINTDLNTHLKTHLEPQPASQHAPKQKQTKKQEPEPEPTLVATLEAPPAAVPALAL

SEQ ID NO: 358780 - protein, 128 aa, Zea mays
  Clone ID: MRT4577_90373C.1.pep
ITAASDYNQSLQFRDLDREKKKIDMQVTRDGYRQIVSIYDIVFGDIVHLSIGDQVPADGLYIDGYSVVVDESSLSGESEPVHMYSAKPFLLGGTKVHDGSARMLVTAVGMRTEWGNLMETLSQGCEDE

SEQ ID NO: 358781 - protein, 40 aa, Zea mays
  Clone ID: MRT4577_90374C.1.pep
MSGGVEPETPPGSSSRSGGSRSVGGKPPRHHLTCIRHCAS

SEQ ID NO: 358782 - protein, 215 aa, Zea mays
  unsure (1)..(215): unsure at all Xaa locations
  Clone ID: MRT4577_90375C.1.pep
MAEVNHQLDTPKLFNRWTFNDVQWNDISLNDYLAVNATKYAMYLPNSAWSYSQKRFRKEKCPICERLTNSLMMHGRHNGYKVMTVRIIKHTLQIIHLITDAYPIQTSSKAIIKSGPREDXTRMGSAGAVTRHAEHISPXLREWNQAXIYLLTYVAIDRAFXNIRSIVEXWHDEMINAAKGSCNSDAIXNNDEIERAGKVKLLNGACILVHSALET

SEQ ID NO: 358783 - protein, 105 aa, Zea mays
  Clone ID: MRT4577_90376C.1.pep
ITATQHEPTSDSYLKDKSFMLESVHRLEGASPYIYILAGLRELPHAIPRLIAVYGGTYMLNKPECKVECDDEGKVCGVTSEGETARCKKVVCNPYYLPNKVRKIG

SEQ ID NO: 358784 - protein, 52 aa, Zea mays
  Clone ID: MRT4577_90377C.1.pep
EPKSMTIAEPSSPPYIAGDLLIAGTVSWQDGVLARGYSPVNKQCRYSRVRSN

SEQ ID NO: 358785 - protein, 308 aa, Zea mays
  Clone ID: MRT4577_90378C.1.pep
KQSASTGISVFQRLTEGLASKLSNDEWGTVLLCFKESAAHTFVVFDKIVKMMKVIEIPDRNESYSEAEQYSDHDIYNDEEEEANMETASYAIVRMKNHMALQLLIVEGIIKLYEVHRSFLGAEHIVIMLEILSAIASHASEVNSESNLHRKLHKACSILEVPEPAVIHFESESYQSYLKLLQALLHDNPSLSETMNVESQIMLVCEKILRMYLTCAEHELSNGVSGRGPALHRMPLGTSKKEELGARTPFVLHVMQLLGSLEKNCFRRNLPRFFPLLANLIRCEHNSGEVQVALYDIFQSSIGPIISA

SEQ ID NO: 358786 - protein, 95 aa, Zea mays
  unsure (1)..(95): unsure at all Xaa locations
  Clone ID: MRT4577_90379C.1.pep
VRRRRTRFGAHRSIQVXIRTPRLRAVYDALSSSLGEKRVQNMGFLNMRECILEVRDASLKWYFENDLNGPEFYFTLNFIGKNWERTSQHVIKGLD

SEQ ID NO: 358787 - protein, 62 aa, Zea mays
  unsure (1)..(62): unsure at all Xaa locations
  Clone ID: MRT4577_9037C.1.pep
QFIRDCEIFDRGMYAGPVGWFGGTEXEFAVGIRSALLGKGXSTLVCAGAGFXPVTNQIVGQA

SEQ ID NO: 358788 - protein, 57 aa, Zea mays
  Clone ID: MRT4577_90380C.1.pep
MLNDQEKLKCHLLSRNNSCLFHRARSLVIFHLRRIQYVLYVVLILQIFVSGSPGSAG

SEQ ID NO: 358789 - protein, 121 aa, Zea mays
  Clone ID: MRT4577_90381C.1.pep
TLSIGKIRHYRLILHKQGQEPLSALQFGWSLRSFDQRIPFLHTKQPPFFPKRLGYFRLGIKQAGSHFIYLFWKVNILGERPKSRGKSPGNATTTTGTTHRRAGWDPKESSTKAGFRTPPAL

SEQ ID NO: 358790 - protein, 589 aa, Zea mays
  unsure (1)..(589): unsure at all Xaa locations
  Clone ID: MRT4577_90382C.1.pep
DTWRAGPGHTHTLYAPSWPSLSSRVQAAGSTLRRQHRPRPRPRXLGQLNAAVERSWVGRRFRLAARGTTFTTELRAGTATFLTMAYILAVNASILSDSGATCTVDDCDVPSPGCKFPPVDPGYAACVARVRRDLIVATAASSVIGSFIMGAFANLPIALAPGMGTNAYFAYTVVGFHGSGTLPYRTALAAVFLEGLIFLFISIVGLRSKLAQFIPTPVRISASAGIGLFLAFIGLQSNEGVGLVGFSSSTLVTLGACPASQRASVAPVLTFPNGTVALMPGGTVSGGILCLSGRMTSPTFWLAVVGFLIIAFCLIKRVKGALIYGILFVTFVSWPRHTAVTAFPDTPAGDDSFHYFKKVFDVHRIRSTAGALDFSGIGQGYFWEALFTFLYVDILDTTGSLYTMARFAGFVDDATGEFEGQYFAFMSDATAIVFGSLLGTSPVTAFIESSTGIREGGRTGLTALTAAIYFAAALFITPVLASIPSWAVGPPLVLVGVMMMRAVAEVDWDDMRQAVPAFLTLALMPLTYSIAYGLIGGIASYMLLHSWDWACQATRRLGCLKKGGGGADSTNGGVAEQSVEEQRKDMESA

SEQ ID NO: 358791 - protein, 179 aa, Zea mays
  Clone ID: MRT4577_90383C.1.pep
MQRLTGRDMWDVEECQSPRMGSVILGVGGTSNTVCVCIPAAMPFNDPLPVLSRTVAGYSNHNSVGEDRARETLERVMSQALLKARRRRSNVCAVCLAVAGVNHPVDQPSALESLRAWVPSHVKLFVENDAVAALASGTMGKLHGCVLIAGTGTIAYGFTSDGREAGAAGAGPVLGDWAS

SEQ ID NO: 358792 - protein, 74 aa, Zea mays
  Clone ID: MRT4577_90384C.1.pep
HINNLCSTLHKVWVYENRSQTGSKGTMNRTVRNGSGPLYYRVHVTTTVLNTETQHITWDDEGTYIATSAHSKRA

SEQ ID NO: 358793 - protein, 59 aa, Zea mays
  Clone ID: MRT4577_90385C.1.pep
PHLKKINQGPLAGGGYFLKLFCPAPDPVFQGPNLKIWGLLGWIKKTAPLKSLGDQKPNK

SEQ ID NO: 358794 - protein, 109 aa, Zea mays
  Clone ID: MRT4577_90386C.1.pep
GHQNRQTCNRCLGEPLFYPTVQHSSTYRGLKGKYTTDHILGALIIISRSLRDCYSSLVGTGLLGPPEVQRPFVSIQPWRSINPQGKRSPAFPGLLVSSCPTFLRILGSG

SEQ ID NO: 358795 - protein, 120 aa, Zea mays
  Clone ID: MRT4577_90387C.1.pep
GGDRQGADGRGGSHGRLGGGEAGGRDHGRGRGGGGLGLPGLRRDGLRLLPGVPLLQRRPIHADLRVVAPLHGPRGALRLQRHLPSLLRGGSGRGKKKGMPAKNLMAERRRRKKLNDRLYM

SEQ ID NO: 358796 - protein, 85 aa, Zea mays
  Clone ID: MRT4577_90389C.1.pep
MGKRKSAAKPPPKKRMDKLDTVFSCPFCNHGSSVECRIDMKNLIGEASCRICQENFSTTVNALTEPIDIYSEWIDERARASTVIK

SEQ ID NO: 358797 - protein, 83 aa, Zea mays
  Clone ID: MRT4577_9038C.1.pep
DSGGNRFRDGGSRRACVILGGIASGTVDHAVRAWCRPARAESDRLARAWYLVFRGSVPHGPAAAYCEASRASGATAVCYGSSP

SEQ ID NO: 358798 - protein, 125 aa, Zea mays
  unsure (1)..(125): unsure at all Xaa locations
  Clone ID: MRT4577_90390C.1.pep
FPSRLVLFGAGSSTQPHPNPRRSSSPPQGRKEAEPWGKRKSAAKPXTKKRMDKLGXTAFACPFCSHGSRVEXRSDMRNHIEEASCRIXQEKFSTTDDALTEPIDIYSEWIDECEHDDTEERDDGV

SEQ ID NO: 358799 - protein, 57 aa, Zea mays
  Clone ID: MRT4577_90391C.1.pep
TISKGSRLLFTLFSKFPHLPKFQNTPPPLQLEHIYLIFSPKSKMGMLMCCPWWFLML

SEQ ID NO: 358800 - protein, 48 aa, Zea mays
  unsure (1)..(48): unsure at all Xaa locations
  Clone ID: MRT4577_90392C.1.pep
QVLEWVQYCAFSFLSTFLFDFLYFYSFCVVEXKXXXXFFFVSYSKGLS

SEQ ID NO: 358801 - protein, 297 aa, Zea mays
  Clone ID: MRT4577_90393C.1.pep
LSRGITRLNKRACQDAAVLGLGFLKLDARARKDTQKIDHTVKERAALLNHFARAFKERAQSDLKKAADKHWSDGALEADLRRADLVVKRRAMEDAFMALKFVQDIHDMMVNRLYEQLPKDGSSSRTNSTGFITLEKNGKALELFPGEVSADQIYAIEEAYQSMASAFSEADGIDYTDPEELELLVATLIDLDAMDGKRSVSLIAECSSSPDVNTRKALANALATAPSMWTLGNAGMGALQRLAQDPNYAVARAASRAIDELKKQWELEEGDSLRFVMNQNLASRDTEDDNSPADDAA

SEQ ID NO: 358802 - protein, 81 aa, Zea mays
  Clone ID: MRT4577_90394C.1.pep
FPKRGLDGPSTMEKNRLKSFIGGPKRTGDIKAQKGFRKPKRGVHPTSCWLKGLFFFFFGGGSRALLGGGSKRGVHPTSCWL

SEQ ID NO: 358803 - protein, 47 aa, Zea mays
  Clone ID: MRT4577_90395C.1.pep
RVRVPPVDREGFRAGGGPRRWRWRGPPGPKLDAREKDESAGERSARA

SEQ ID NO: 358804 - protein, 163 aa, Zea mays
  unsure (1)..(163): unsure at all Xaa locations
  Clone ID: MRT4577_90396C.1.pep
LVLDRERPLASGHGTLVPPVVXSGHGDRDDEAIVPCDFNLITDVDFRELVDRLPRGATFTMVSDSCHSGGLIDQEKEQIGPTTAAADSYLHGGARAARFLPYAAVLGHLSGAXGGGAXASHHVXDHLVALFGADASAKFRFHRHHGRSGAAARTDDDDAGILV

SEQ ID NO: 358805 - protein, 53 aa, Zea mays
  Clone ID: MRT4577_90397C.1.pep
PRIRTNSYNGFGPNTNSHQLLTAVPKPSSVPIPSHIEVQHLGLASVVTYHVRG

SEQ ID NO: 358806 - protein, 48 aa, Zea mays
  Clone ID: MRT4577_90398C.1.pep
FLHLPSSKWDRYPLNRLMIATTNARELDSTLRYNHQTYHVQLPFVTVP

SEQ ID NO: 358807 - protein, 89 aa, Zea mays
  unsure (1)..(89): unsure at all Xaa locations
  Clone ID: MRT4577_90399C.1.pep
LRPAFPLGFFWVVPLPVCAALLLXLVSVVAXALFFFPRRRRGLAAXAFAVXGRALGLVXCFCGWGGLLXXFLLVSGCLFXLLMXQKKRK

SEQ ID NO: 358808 - protein, 121 aa, Zea mays
  unsure (1)..(121): unsure at all Xaa locations
  Clone ID: MRT4577_9039C.1.pep
FFRRGGAPFLGPVGALARPAXFRFGSAFXLSXAAAAACXGAAPXGAGARWFXWPLXLXGLLVXXFPPPPGSPRLSALXGLRCXGFAVAAARLAPGPGXCLXVRPAXPLSPXPPXCXPPPSP

SEQ ID NO: 358809 - protein, 254 aa, Zea mays
  Clone ID: MRT4577_903C.1.pep
MAVGKNKRLSKGKKGLKKKVVDPFTRKDWYDIKAPSMFEVRQVGKTLVNRTQGLRNANDSLNGRVVEMSLGDLSKDESRSFRKIKLKVDEIQGKNCLTNFNGMDMTTDKLRSMVKKWQSLIEAFVDIKTTDGYLVRLFAISFTARRRNQIKKTTYAQSSQIRQIRKKMFEIMTEEASACDLKELVAKVTSSASQSAQDAIAVRIEKACQGIYPLQNTYVRKVKIPQAPQFDVSALLAFTVLLLPMTLVLRLLRN

SEQ ID NO: 358810 - protein, 308 aa, Zea mays
  Clone ID: MRT4577_90400C.1.pep
WAYKSQESGKMHACGHDAHTTMLLGAAKLLQARKGDLKGAVKLVFQPSEEGYGGAYYVLQEGALDGVSAIFGLHVDPALPVGVVASRPGPFTATAGRFSATIRGKGGHAAVPHESVDPVVVAATAILSLQQIVAREVDPLHGAVVSITFVKGGEAFNVIPESVTFGGTMRSMTDEGLSYLMKRVKEIVEGHSSVHHCTASLDFMEEEMRPYPAVANDERMYAHARAVGESLLGENHVKVAPQVMGAEDFGFYARRMAGAFFTIGVGNESTMVTVQQPHSPYFVIDEDALPVGAAFHAAVAIDFLKKHS

SEQ ID NO: 358811 - protein, 45 aa, Zea mays
  Clone ID: MRT4577_90401C.1.pep
SNQLKLNHLGGTHRRSSRNTVPVQKFLQVASLSNNVHNKVYALSL

SEQ ID NO: 358812 - protein, 62 aa, Zea mays
  unsure (1)..(62): unsure at all Xaa locations
  Clone ID: MRT4577_90402C.1.pep
LMALNIDIFGTHAGSVQVLGCLLMRXVYRNSCCQFGQVVDTINPSGSLSPMGICDASEALLS

SEQ ID NO: 358813 - protein, 198 aa, Zea mays
  Clone ID: MRT4577_90403C.1.pep
SAPEQTPESKLQEIVHQRSQWIYKHLIRKEILNPSVPEKEYVSGEGFPYLGRNYRLQVIADDASQEKLKYYRGRFQLQQSSQHQGRELFIEWYKSHLKAHLQSKVEQFKHRVEVNPNSIQIRELGNRWGSCSTKGDLYFHWRVAMLPSNIVNYVVVHEMAHLKERRHNQTFWETIECILPDYQDSKQWLATQGIYYDL

SEQ ID NO: 358814 - protein, 117 aa, Zea mays
  Clone ID: MRT4577_90404C.1.pep
TSNPSDTLAPPVPSPPPPSSLCLSLREAIARATLDLPSSAHALDWLADIVAQGKEALSQGGDSNPSTASGADLLYPADGVAVGGPVGVADVFRGCQNICKLWVVVLSLMSPLLDSVH

SEQ ID NO: 358815 - protein, 50 aa, Zea mays
  Clone ID: MRT4577_90406C.1.pep
RLWRTTRHTSTTRSVRASASRACLMNGVMGVVCFSAGRVGLPDGGPISYG

SEQ ID NO: 358816 - protein, 113 aa, Zea mays
  unsure (1)..(113): unsure at all Xaa locations
  Clone ID: MRT4577_90407C.1.pep
PRSQPPPQSPDSPGAXPPRLPAPNLSRKSPTLVPRSQPNPSPPTSNSPPPKPAPTFPVSSWPASTPPFPLVRPPQCLSSPSQCWLPPRFPRQVWAPTDGIVFPPHRISSLTVF

SEQ ID NO: 358817 - protein, 99 aa, Zea mays
  Clone ID: MRT4577_90408C.1.pep
PATARGSRPPLVDRRTTRSLSAIHAPTAQQRSPLPPPPLPEKRQNRPAADHPTSTEPPHPRPKQGAAPPQGREHRQTAQPHPPPRPPHKRTKKRTLGRT

SEQ ID NO: 358818 - protein, 105 aa, Zea mays
  unsure (1)..(105): unsure at all Xaa locations
  Clone ID: MRT4577_90409C.1.pep
MGCSVISYTHVFYLIYFIYMFLFFXFLSLFFFFFSFFFYFFFFFFFFFFFFFFFFLLFFIFLGLFFFFIFFFFFFHFFIFFFFFFIIFFYYLFIFFFYFIFFFFF

SEQ ID NO: 358819 - protein, 121 aa, Zea mays
  Clone ID: MRT4577_9040C.1.pep
TQPSRPQINVVFRRTACRYGGKNIAFHVNEGSTSFWLSLLVEFEDGDGDIGSMQLKQANSAQWRDMQHVWGATWSLTPGPLVGPFSVRLTTLSGKQTLTAQDVIPKNWAPKATYTSRLNFA

SEQ ID NO: 358820 - protein, 224 aa, Zea mays
  unsure (1)..(224): unsure at all Xaa locations
  Clone ID: MRT4577_90410C.1.pep
VPRGRPGNDVHRSPPAVAHRPSKTHVSREPASDERRRRRCQEASQRRRHXAGGGFALGCGCRDAKAVAVASSSSSTSPYSAAGTETTTTTXRPRRGAGPGRRRTAXSSASGSTGTLTVPSASSSSSFPWERADAEGDGDAGDEVDCKGDATTTTSFSGLLRQLNELEQSVVSWGRKSASKDHFSPPPRPLPALPVKQRLAHSGDGDRKEGHGNFSPPPPPPPPS

SEQ ID NO: 358821 - protein, 74 aa, Zea mays
  Clone ID: MRT4577_90411C.1.pep
HEESYDSPCLIANYSAILLQLPSVQFPSTKRVVLQFYCSYHQFSSQAQREYYNSSAVTLLQKGQERYLPAMLPG

SEQ ID NO: 358822 - protein, 68 aa, Zea mays
  Clone ID: MRT4577_90412C.1.pep
VSLTEGVEADHKDPHLLFGKEPYEELTERELYLPPCTPPSHTCAALNARSEVVIGDRRRVGRAGHAVP

SEQ ID NO: 358823 - protein, 43 aa, Zea mays
  Clone ID: MRT4577_90413C.1.pep
GREAETNYNHIHINHRTPASSRKNRFKSSIKTAHLSTGNHCNA

SEQ ID NO: 358824 - protein, 77 aa, Zea mays
  Clone ID: MRT4577_90414C.1.pep
RRSPTRPTTRAILRHHQALECTVLHPLHQVKLPHPPVGCNIHHQHHPHFFLSADQALLHLVMELKTIPLGEQPASCG

SEQ ID NO: 358825 - protein, 115 aa, Zea mays
  unsure (1)..(115): unsure at all Xaa locations
  Clone ID: MRT4577_90415C.1.pep
REFEDNXKVVDITKXDFELEETDEEKKAREEEEKEYENVAKALKNVLGDKVEKVVVSDKLGLSPCAIRTGQFCWSANMERIMKAQALRDTSMSSFMSSKKTFEISPKSPIIQELK

SEQ ID NO: 358826 - protein, 92 aa, Zea mays
  Clone ID: MRT4577_90416C.1.pep
IYVTLALWPQVTQKKANGNGFWYLGLLLKLAFLLLCICFLAYSQGAFEKIFSLWPLSKCFELEGSVYEWWFRWRLDRYVVLHGALFAFIYLA

SEQ ID NO: 358827 - protein, 55 aa, Zea mays
  Clone ID: MRT4577_90417C.1.pep
FVFLILVVQLLKQQKDNNVMVGVLKEFGNMLAYGRLDLSITLYFTINKGDDFMLH

SEQ ID NO: 358828 - protein, 120 aa, Zea mays
  Clone ID: MRT4577_90418C.1.pep
RTREPQPKKIQYFTHQQPPGTGGRPTTEEPPATPPLHPSRRARHRRGDANPRRTSTKKTRTSSTQPLTKSTKRNTHRRRTPTTLRNPTPTERAHYTAYTAADTRRPLPGRGPCRTESRDH

SEQ ID NO: 358829 - protein, 487 aa, Zea mays
  Clone ID: MRT4577_90419C.1.pep
MATAAVESKRGSARGRKALVAVLDNEANISAGKAAQAADLSSCSAQKKAKRAPSRSSKAKAAAASAVVVVDDIAELQGMLERLRLEKEKAEEMVRERDEVIRKKEEEIETRDKEQERLQAELRKAQRAKEFKPTVSFPLVKSLLEKEQEADDKGKKKKGKGGHERKKPCPAYVLWLKDQWTEVKKENPEPDFKEVSNTLGAKWKALGAEEKQPYEERYRQEKEAYLQVVGQEKREAEAMKLLEEQQMQWTAKELLDQYLKFRQEAEEGDCKKGRKKKSKKDKDPSKPKQPMSAYFVYSQERRATLVAEKKNVPEIGKITGEEWKNMTEGQRAPYEEVARKQKEEYHKQMEVYKQKKAEEAASLEKEEQEHKKIMKHEALQLLKKKEKADNIIKKTKEKRQKKKQENADPNRPKRPASSFLLFSKEERKQLIEERPGINNSTLNALITVKWKELSGEERQAWNAKAAPAMAAYKKEMEEYTKAQSSSA

SEQ ID NO: 358830 - protein, 75 aa, Zea mays
  Clone ID: MRT4577_9041C.1.pep
RWVTTRRQLSPLNVFRPCEHFRRSNYRFGGLITVASTTHKTWFLAYTKQNYFLKGPKMGAPNRGFKRFSLRGKSL

SEQ ID NO: 358831 - protein, 88 aa, Zea mays
  unsure (1)..(88): unsure at all Xaa locations
  Clone ID: MRT4577_90420C.1.pep
SXSRSTPRPEXRSSGQRHSKKPEGDASRSGKGVLRSVAGGITLVGAVFFMFHLRCATMLLALLSRFSLRGHTDTSSEIISFSAALLXX

SEQ ID NO: 358832 - protein, 76 aa, Zea mays
  Clone ID: MRT4577_90421C.1.pep
LTTNYAKRERLNTGLMPFQEKMGDYNPFVSPETPPPQKIFCDLEETVAGKCGRPCGGPLDVPLGEFILQLGLPGAR

SEQ ID NO: 358833 - protein, 68 aa, Zea mays
  unsure (1)..(68): unsure at all Xaa locations
  Clone ID: MRT4577_90422C.1.pep
LIGNRASHLITEVLNGLFFHKGCWXXXLXXLHLIFTIPLSXFLXLXPSFXPKSLIIXLYYFIXXXSTT

SEQ ID NO: 358834 - protein, 66 aa, Zea mays
  unsure (1)..(66): unsure at all Xaa locations
  Clone ID: MRT4577_90423C.1.pep
IPFSRSKCPXGRKQNHVCWCNLISSPATHLRPPRHGIEEEGRAHRDGGCGGDAAAAADVARRGRRL

SEQ ID NO: 358835 - protein, 77 aa, Zea mays
  unsure (1)..(77): unsure at all Xaa locations
  Clone ID: MRT4577_90424C.1.pep
GVCGGFPLGFCDSGGGGVCYXALKSNNLREWGGXXKKKKKKKKKKKKKKKKGGGVLGGGNLLTRACEGIXGGVGALN

SEQ ID NO: 358836 - protein, 104 aa, Zea mays
  Clone ID: MRT4577_90425C.1.pep
SAFVSANQSPFFTPRSLSARVPEHTDPENNCSSNGIVLKISDILSGDSFTPQEELPSASVGVLPSDVSPPISLCTSSNFGTPAIVYNNPSFVSTFNGPCQGSSS

SEQ ID NO: 358837 - protein, 65 aa, Zea mays
  Clone ID: MRT4577_90426C.1.pep
GPVLAVAVCGRDVYVLSQGLECYVLQTPSPTILVRTICYPNIRSDARQFAGRICLYPLIPQTGAL

SEQ ID NO: 358838 - protein, 82 aa, Zea mays
  Clone ID: MRT4577_90427C.1.pep
PHKANPGQHPGTPALGFAIAKASSSQREVFGAILETLFFSIKVLRNRIPREGSYLGPKSLRGQICSSPKANGPGNSALLPLL

SEQ ID NO: 358839 - protein, 90 aa, Zea mays
  Clone ID: MRT4577_90428C.1.pep
IPGPVPGSREATVDLFLKSAEYLDCAVHHVLIHIPPQRLNMGVHRRSSVVTLMMTTYSFMKALPKDVLLIIEYKNNYLLYLIVKSEASFL

SEQ ID NO: 358840 - protein, 190 aa, Zea mays
  unsure (1)..(190): unsure at all Xaa locations
  Clone ID: MRT4577_90429C.1.pep
FPQVRGAADVKSPETILEHDRIIWLGDLNYRIALSYCSAKALVEMHSWKQLLEKDQLRIERRCGRVFQGWKEGRIYFPPTYKYSFNSDRYSGVRPKEKRXIPAWCDRILWHGSGLMQLSYVRGESRFSDHRPVYSIFMAEVESIRHRRRNAGYFSSRIEVEELLPNPYSHPAFTASSQMVENNHTAQKLT

SEQ ID NO: 358841 - protein, 124 aa, Zea mays
  Clone ID: MRT4577_9042C.1.pep
CRRRGATTCRVAAELLCAPHAGNRRLLTVAQPGVDDTHVVGIVDTVIALLRSPPPPAGRKRKMPLQPTKTETETSASREHMHMAGAGGSWSRGHFCGESCVWLGLAGEASIEATMLVLSVAGFS

SEQ ID NO: 358842 - protein, 122 aa, Zea mays
  Clone ID: MRT4577_90430C.1.pep
SKAKKLKGADPLGGEGFLCKIGATSFFFLALKKGAELLSFFFNTGVFTRVLGGTPTQGFFIFKNFFFETRGRKKNLRGWKLQVPKRAIFCYWGFLPFGPPYVQKHQWLGLTLSKNQETGACL

SEQ ID NO: 358843 - protein, 68 aa, Zea mays
  Clone ID: MRT4577_90431C.1.pep
MCRHIQTLHLTMSSDPICPAKTVLRPKRTGDAPLSTHGISQITFKVLVFHLHPDATTYPTPVKSFHKV

SEQ ID NO: 358844 - protein, 50 aa, Zea mays
  Clone ID: MRT4577_90432C.1.pep
IRLELLSPPLYSPHPPHNGRGALIKLWGGLLQQLHALHYRQHELQGPPRT

SEQ ID NO: 358845 - protein, 54 aa, Zea mays
  Clone ID: MRT4577_90433C.1.pep
PALRFLRGSAGHDVLHKCFIVDAAIGVFTDQPSVHLPRQLSASLHSVASTMTEL

SEQ ID NO: 358846 - protein, 260 aa, Zea mays
  Clone ID: MRT4577_90434C.1.pep
MAMASALPLLLAPRAVFASAGPSSPHLRSRRLALRLPPPPRPAALSAPPAAVQPREARRVQPPRAASCCQDPAPAAGGGARDWRMFLAWYLMALDKNPIVTKAVTSAALTLAGDLICQLVIDRVPELDLRRTFVFTFLGLALVGPTLHVWYLYLSKLVTISGASGAIARLILDQFIFSPIFIGVFMSLLVTLEGKPSLVVPKLKQEWLSSVLANWQLWIPFQFLNFYFVPQKFQVLGANFVALAWNVILSFKAHKEVIAK

SEQ ID NO: 358847 - protein, 63 aa, Zea mays
  Clone ID: MRT4577_90435C.1.pep
IHNLGICLTAKLFTLDYIIWNIIWRDYNPKQKVLVYRNWILSFLKKIETYKLAFSTKKISQFL

SEQ ID NO: 358848 - protein, 54 aa, Zea mays
  Clone ID: MRT4577_90436C.1.pep
IPLFFFLCVNENLNHSFSQLSNNSTTNTNFPKPKPIYLTFILLGNTCSSQNPNT

SEQ ID NO: 358849 - protein, 87 aa, Zea mays
  unsure (1)..(87): unsure at all Xaa locations
  Clone ID: MRT4577_90437C.1.pep
GADIKPLHITFVKKKKKKKKKKKKKKKKKKKKKKKKKKKKKXXKKKKKXXKXKKKKKKKXKXXKGGXXKKGKKKKRGGGKKKIFLWG

SEQ ID NO: 358850 - protein, 131 aa, Zea mays
  Clone ID: MRT4577_90438C.1.pep
QRSPVNTWVSLSMFVGSVHELSLLMLYNVQRCNQSMHCGTVIFLGSIMDAFSLGLIIGGIILGPLYRGHDVRRLCFRHHTRRLRWCQPCCGITHGCAFINSLSVIWSTLHTCVPSCRRMSLLYFAHTRLHL

SEQ ID NO: 358851 - protein, 95 aa, Zea mays
  Clone ID: MRT4577_90439C.1.pep
GRNEFICRRRRQAGFLNEIDFHIRPRPTAMRSCRPDRARRSCPGVPRIAPPPHASVPRWRAASSAARSWSADGGIRGSPLIARTRWGRTLGITGH

SEQ ID NO: 358852 - protein, 47 aa, Zea mays
  Clone ID: MRT4577_9043C.1.pep
SAPRLLSAPRPSRLTNCSGHAVVPRASYGDTSSSDSFGPNDTVVCNL

SEQ ID NO: 358853 - protein, 188 aa, Zea mays
  unsure (1)..(188): unsure at all Xaa locations
  Clone ID: MRT4577_90440C.1.pep
RATYESTKVYQHRQVKSHSLLMLLDLCASADTKTIXAHRQQAAIARMLAGYXLTKGVEWHXESAIFQTYXIQHAMCCEIGPTXELVLSIMITTLDVLMVHVLAHNIKPQHLLQLVLANLDAYSEQQQILACNQLAALNYASHLQQQQLPCRQLSAAYPEQYLACNQLTAXNSPAYVQQQQLLPCRQLA

SEQ ID NO: 358854 - protein, 57 aa, Zea mays
  Clone ID: MRT4577_90441C.1.pep
CYSAIVIRHSRELCQVSVMDAPHKKIKIKLDPIIKNKIKIKVDIFPTYCILICRYHT

SEQ ID NO: 358855 - protein, 448 aa, Zea mays
  unsure (1)..(448): unsure at all Xaa locations
  Clone ID: MRT4577_90442C.1.pep
MAASCGGRVVVFPFPFQGHFNPVMRLARALHARGVGITVFHTAGARAPDPADYPADYRFVPVPVEVAPELMASEDIAAIVTALNAACEAPFRDRLSALLSAADGEAGEAGGRVRCVLTDVSWDAVLSAARGLGVPALGVMTASAATFRVYMAYRTLVDKGYLPVREERKDDAVAELPPYRVKDLLRHETCDLEEFADLLGRVVXGGEAGRAGSLSVRFSLPISICNPRSPTLGSHGVVAHRXEPEPEPAAVWWSSRSRSRATSTXDAAGPRAARPGPRDYRLPQRRPGPGRLPRRLPLRARDRGGGPEAAGVRGHXAIVTWAPQEEVLAHPAVGGFLTHNGWNSTVEAISEGVPMVCCPRHGDQFGNMRYVCDVWKVGTELVGEQLERGQVKAAIDRLFGTKEGEEIKERMKEFKIAAAKGIGIGVDVDETASPRTDLTDLVDLIKSF

SEQ ID NO: 358856 - protein, 130 aa, Zea mays
  unsure (1)..(130): unsure at all Xaa locations
  Clone ID: MRT4577_90443C.1.pep
EGIAAIVTTLEASCDAPFRXRLSALLAAEGRDSVRCVFTDVSWNAVLTASSDLGVPALGMMTASAASLRDYMAYRTLIDKGYLPVKEEIKERMKEFKIAAAKGIGIGVDVDETTSPRTDLTDLVDLIKSF

SEQ ID NO: 358857 - protein, 61 aa, Zea mays
  unsure (1)..(61): unsure at all Xaa locations
  Clone ID: MRT4577_90444C.1.pep
MTSSTMALFSTELAXGKAVNVPPSVFTKARVTMRKTAAKAKPAASSGSAEYGPDRVLYHIA

SEQ ID NO: 358858 - protein, 464 aa, Zea mays
  Clone ID: MRT4577_90445C.1.pep
MASSRTGAGAGAGGRVVVFPFPFQGHFNPVMRLARALHARGLAITVFHSGALDPADYPADYRFVPVTVEADPKLLASEDIAAIVTTLNASCDAPFRARLSALLAAEGRDSVRCVFTDVSWNAVLTASSDLGVPALGMMTASAASLRDYMAYRTLIDKGYLPVKEERKEDPVPELPPYRVKDLLRVDTSDLEEFAELLARTVTAARRASGLIFNTFPLIETDTLAEIHKALSVPVFAVAPLNKLVPTATASLHGVVQADRGCLQWLDTQQPGSVLYVSFGSMAAMDPHEFVELAWGLADSKRPFVWVVRPNLIRGFESGALPDGVEDEVRGRGIVVTWAPQEEVLAHPAVGGFLTHNGWNSTVEAISEGVPMVCCPRHGDQFGNMRYVCDVWKVGTELVGEQLERGQVKAAIDRLFGTKEGEEIKERMKEFKIAAAKGIGIGVDVDETASPRTDLTDLVDLIKSF

SEQ ID NO: 358859 - protein, 43 aa, Zea mays
  Clone ID: MRT4577_90446C.1.pep
TISSPTLSSFVSFWSFSFHVPVKKNLVFSVRVFLLKALPPSIN

SEQ ID NO: 358860 - protein, 45 aa, Zea mays
  Clone ID: MRT4577_90447C.1.pep
INPTHLNAPTLCNSQVLTGASGINWGWGTGDSNIGTCNIQVPAPL

SEQ ID NO: 358861 - protein, 39 aa, Zea mays
  Clone ID: MRT4577_90448C.1.pep
FDEGRITMRKTLDNPKLALWGSSWDGLDRVTYLNTYFCS

SEQ ID NO: 358862 - protein, 179 aa, Zea mays
  Clone ID: MRT4577_90449C.1.pep
MGHLFRSPRHLFWALRNPLMLAPRVPCALSHDPYGISFDPHGTSYARPRGTSNAGLNALGPRASVLALGAHCVLVPGALAIEASVLALGAPPLLGLNATLLTLRAPRLQGLHNVTWTSNHSTRRKCGVPCRHTLHSIATFHIVLRKSISNGRCCISCAKPRRPSPWGIYFGPFALLVSA

SEQ ID NO: 358863 - protein, 93 aa, Zea mays
  Clone ID: MRT4577_9044C.1.pep
GGDAALPLIPSSPSSSCPMVPEASVTHDDVDDALSTAACCSSSSSSSSSCLSPRRARWAGLALLKMRQTTQSATAAPPPWELTWITDSSPSKQ

SEQ ID NO: 358864 - protein, 194 aa, Zea mays
  unsure (1)..(194): unsure at all Xaa locations
  Clone ID: MRT4577_90450C.1.pep
VAIKALHPPSRAKDNMLKNGDFEEGPYVFPDTPWGVLVPPMDEDDVSPLPGWTVMSDTKAVKYLDAAHFAVPRGSRAVXLVAGTEAALVQEVRTTPGRSYTLSFSAGDAADGCAGALLVDAYAARGRLPVSYESRGTGGFVRNELEFAAVANLTRVVFQSMGHYMKPDGTLCGPVVDDVSLVAVHKHAARRLFM

SEQ ID NO: 358865 - protein, 201 aa, Zea mays
  Clone ID: MRT4577_90451C.1.pep
TGWEILGGTNASGPRRFKNGSHLWPLALQKREEGRCPLEPGEIAVILRALGYTSGTQIYVASGQVYGGKNRMAPLRNMFPNLVTKEELASAEELAPFRRHVTSLAALDFLVCLRSDAFVMTHGGNFAKLIIGARRYAGHRLKSVKPDKGLMSKSLGDPDMGWASFTEDVVVTHRTRTGLPEPTFPGYDLWENPLTPCMCRA

SEQ ID NO: 358866 - protein, 52 aa, Zea mays
  Clone ID: MRT4577_90452C.1.pep
LIMFLQQMVNFQAPTSRAQRGAHLVHALLMPSLNKIAILLNDCIWSQELFFS

SEQ ID NO: 358867 - protein, 267 aa, Zea mays
  Clone ID: MRT4577_90453C.1.pep
MPRLSLTVTDAAAAMPFALRLGGSPALRPGPRSPSWLRFGGMAGARRALFCSAEDARRCGSDDYAEAEEGRRGGGSRVPSERRIRGGNAAAAVGTSVELLGIPGVGPRNLRKLVDNGFEGVAQLKQLYRDKFFGKSSGQMVEFLQCSVGIVHKNHAESITSFIKESIDEELKDTDSSKPTQKKRLTFCVEGNISVGKTTFLQRIANETIELRDLVEIVPEPIDKWQDVGPDHFNILDAFYAEPHRYAYTFQNYVFVTRVMQERESQA

SEQ ID NO: 358868 - protein, 103 aa, Zea mays
  unsure (1)..(103): unsure at all Xaa locations
  Clone ID: MRT4577_90454C.1.pep
FGRAQRPTGPMAQNEELVGSAGEKLKVIXXPLHADATGRSAPSLEAAAWNGASISXTXRXLGEIRVAHNDDATNLEIFYDLCLGARCDSLSLLTRTMGERHQD

SEQ ID NO: 358869 - protein, 39 aa, Zea mays
  Clone ID: MRT4577_90455C.1.pep
KSNGELLRVHSLDLLCGVYSLLPSRKRPLLLNCVQVQLF

SEQ ID NO: 358870 - protein, 414 aa, Zea mays
  unsure (1)..(414): unsure at all Xaa locations
  Clone ID: MRT4577_90456C.1.pep
MDSASSLVDDTSSGCGGGASTDKLRALGVFADDSVTPLERMGSGASAVVNAPEAGAEADSGSGAAVVSVDGKLPSSRDKGVVTQANGRWGAQIYERHQRVRLGTFALEADAVRALDAGRAGYATHTXSLRCATLLPTTAATQXAFLAAQEMATNHLSQGQHPQAWPWGVAMYTNLHYHHQQHHHYEKEHLFEKPLTPSDVGKLNRLVIPKQHAERYFPLSSSGAGDKGLILCFEDDDDEEAAAANKPWRFRYSYWTSSQSYVLTKGWSRYVKEKQLDAGDVVRFQRMRGFGMPDRLFISHSRRGETTATAATTVPPAAAAVRVVVAPAQSAGSDHAAAAAVALEPNVLQHIGLVLVPPPAAQPIPSMPTTATQLTMTTATTCNMQENLSPTETTGAAVQLRHRRHRRGGSGCSA

SEQ ID NO: 358871 - protein, 55 aa, Zea mays
  Clone ID: MRT4577_90457C.1.pep
AESSAEPLLSSIKTISQEVTCRRWLDLIHFVVALLIQTRCCFTLIHSDMWLGCSR

SEQ ID NO: 358872 - protein, 64 aa, Zea mays
  Clone ID: MRT4577_90459C.1.pep
CCSTTLIWGAARLFHVAPCTTQAATVIKFGPIKVTSARRNQGVPFLPLREGPRIYYFFFFIIFF

SEQ ID NO: 358873 - protein, 45 aa, Zea mays
  Clone ID: MRT4577_9045C.1.pep
GKNRAVPRGNIFPHTNGLKGFMFFEPINGGCYIFAGQFYDGFTKL

SEQ ID NO: 358874 - protein, 90 aa, Zea mays
  unsure (1)..(90): unsure at all Xaa locations
  Clone ID: MRT4577_90460C.1.pep
GRPDGHHVLDPNTIFDDRSRTLLNGGKLTGYYLIYNILDCALKIQPRXRLIMNGRATKVDRLSSPMNERKNRGKNIRAVKKTKAGDAQNK

SEQ ID NO: 358875 - protein, 53 aa, Zea mays
  Clone ID: MRT4577_90461C.1.pep
HASAPLVLGKSFFKIFRHSRWPFSSYGTPIMLLLYGSFREVFIAMNRLCRPHV

SEQ ID NO: 358876 - protein, 96 aa, Zea mays
  Clone ID: MRT4577_90462C.1.pep
MMYQLRSRAWGGQPSPCRRYPGVFSLRTGASAMAGVGSMLRGLYLCIYSGVVFLGWAQVLNYRVLTLRLSGHKAGYPGGERDVQYAQTVVIMEIDH

SEQ ID NO: 358877 - protein, 106 aa, Zea mays
  Clone ID: MRT4577_90463C.1.pep
GQRQTKRTGESILSRPTGSLVSRIAYSSEVVLVGIVTGTVSLISSVGSPLVWSGILGFAGSLHLTYFISRKRTILLRSRKNDSSSKHEPTRTCPQSRYESRKLCLF

SEQ ID NO: 358878 - protein, 62 aa, Zea mays
  Clone ID: MRT4577_90464C.1.pep
KEIVFLAAPRYIFGRSVSGLRGLEFQVAKGFPCDKRNCLYIVWDCTRKRFARFSRKNFIERW

SEQ ID NO: 358879 - protein, 145 aa, Zea mays
  unsure (1)..(145): unsure at all Xaa locations
  Clone ID: MRT4577_90465C.1.pep
RRGTARRARHRPRAEKPPDPAXRARAPAQTXPNTWTAEGTAVDKGGPVLGERWGIRTTGSTHIGAAIKAPSSTAKNRSSGTFCEARANHGAMVAIILQTKKDSVPTAQRYEPESLRAGDASLAXGPIVGYANHAXGECVGKIGSS

SEQ ID NO: 358880 - protein, 282 aa, Zea mays
  unsure (1)..(282): unsure at all Xaa locations
  Clone ID: MRT4577_90466C.1.pep
IAAENGPKKVLPMHQVSFIRERYKGIGTDSKTLCWLHSFRKQFYGSVAKSDYAAMRLGFIMTHCRGNLKFDFHRYMVRVLESDFKKIVGTSWHLWIFVVIFLLLNVNGLHAYFWIAFLPLVLLLAVGTKLEHVIAQLAYDVAEKQTAVEGDLVVTPSDQHXFWFGRPRIILHLIHFILFQNAFELAFFFWILMTYGLESCFMDHIGFLVPRLVLGVVIQLLCSYSTLPLYAIVTQMGSYYKKEIFNEHVQQGVLGWAQKAKKRSGVKEVSSPSEPMHGEDAA

SEQ ID NO: 358881 - protein, 248 aa, Zea mays
  unsure (1)..(248): unsure at all Xaa locations
  Clone ID: MRT4577_90467C.1.pep
MLPGCAKIRKWKKWEEEIQKIAAENGPKKVLPMHQVSFIRERYKGIGTDSKTLCWLHSFRKQFYGSVAKSDYAAMRLGFIMTHCRGNLKFDFHRYMVRVLESDFKKIVGTSWHLWIFVVIFLLLNVNXNGLHAYFWIAFLPLVVSADSEVLYRLXSEQIQFSSFLKVRDTIYVTLNTGNQRYVLERCVSIEDYXRLRAFNYLFXLLLAVGTKLEHVIAQLAYDVAEKQTAIEGDLVVTPSDQHFWFGR

SEQ ID NO: 358882 - protein, 49 aa, Zea mays
  Clone ID: MRT4577_90468C.1.pep
LLSLAIIFLCCKNNFFSSSPCIGIIYVFFVHLCGWSFMSTAHPPLNKLN

SEQ ID NO: 358883 - protein, 177 aa, Zea mays
  unsure (1)..(177): unsure at all Xaa locations
  Clone ID: MRT4577_90469C.1.pep
QHRKHSPTAAKXXXXXXPXGXTARAATATXXPQSXQXXXATXXPPNHTPAEXTXGEDPXXQPXRXQQAXAAGXXXKTPXSPQQPTAQRQQXXXXXREAQNSKAQQPQQXXPGNPAAHPQQQQGPASNQPAAKNPXDEEQQQPTSRQQXXAHPQQGAPDNQPAAKNAAAXGQQKQEPP

SEQ ID NO: 358884 - protein, 81 aa, Zea mays
  Clone ID: MRT4577_9046C.1.pep
AGRVGLFPVAPRHRRARVLSVEVAAPLSFWLPLSSCGFWSCPHPRHQHLHPSIVIVSAALLHLAITPKDEREALVPRWSNQ

SEQ ID NO: 358885 - protein, 110 aa, Zea mays
  unsure (1)..(110): unsure at all Xaa locations
  Clone ID: MRT4577_90470C.1.pep
MVDRKNKRISKGKKGGEKKTVFPFSKKDWDDTIAPVVFIGRHMGKTLVFWTQGTRIVFEGLMRRVFVVXLAVLKGHEDHAYRKIRLLAEYVQGRRVLTIFWGMNFTTVKL

SEQ ID NO: 358886 - protein, 86 aa, Zea mays
  Clone ID: MRT4577_90471C.1.pep
SSISAGMDYVAPTRVALEAAPGCLTSGGDHLCISSDNDLRPGQLDSSSDRLMASAATNRASPPSSCGGGAVRPLKPKSQGLSGRWP

SEQ ID NO: 358887 - protein, 67 aa, Zea mays
  Clone ID: MRT4577_90472C.1.pep
VSCRCICCWYMVCCYLRLLVGISFCCSRISRVVMMVLRKDVRLSLVVVVRLIRVLEPAARGPRYGDG

SEQ ID NO: 358888 - protein, 51 aa, Zea mays
  Clone ID: MRT4577_90473C.1.pep
DLSLLPPKNEAGRNSSPVIHCDNQIFRLCGKERLADRRRSLIWVGLRAQTA

SEQ ID NO: 358889 - protein, 326 aa, Zea mays
  Clone ID: MRT4577_90474C.1.pep
MAVALLLLLVTPVGLLAALALLTRPRAARVPLKGRHVFITGGSSGIGLAMATAAAREGARVSILARNLARLEDARAAIQRDSGRDDVGVHAADVRDAGAVARALQEAGPVDVLVCNHGVFVPQELEGQDVDEIKWMVDINLMGSFHLIKAALPAMKARTRETRLPGSIAIMSSQAGQVGIYGYTAYSASKFALRGLGEALQHEVIADNIHVSLIFPPDTETPGLEEEHKRRPELTNIIAGSSGGMKADDVAKKALDGIKSAKFIVPCNFEGAMLAVATAGLSPQSSPLMAFLEVVGAGLMRFAAICFQWNWFSTIESYYAKKKKSE

SEQ ID NO: 358890 - protein, 71 aa, Zea mays
  unsure (1)..(71): unsure at all Xaa locations
  Clone ID: MRT4577_90475C.1.pep
GGGGGPYXRGGHSFAHTFVLFLPRFTVHRIRTEAGVSGGRGPSPCEPATRLLPFFPAGLNGRGRWHEGHPF

SEQ ID NO: 358891 - protein, 176 aa, Zea mays
  Clone ID: MRT4577_90476C.1.pep
MFTITNNCVHTVWPGISTGASPAPPLDTMGFELAPGESRALPVPSGWSGRVWGRTLCSTAAGTGKFTCVTGDCGSGLQECAGGNAAPPVTLAQFSMDGSGGMDLYDVSLVDGYNLPMVVVRQGAAAEGNCVPAGCVVDLSGACPAERRVPGRAARARPSCGCPARMWLIYRHEEGI

SEQ ID NO: 358892 - protein, 53 aa, Zea mays
  Clone ID: MRT4577_90477C.1.pep
PPHEYHAITNTALSGHTEQIDYYHVLHRLGHRYGCSELRSDSTQPSQAPGSGG

SEQ ID NO: 358893 - protein, 127 aa, Zea mays
  unsure (1)..(127): unsure at all Xaa locations
  Clone ID: MRT4577_90478C.1.pep
GAEREQNSAKRGIRPAGGPAXPAASATATQKPGPRAGQQGQHGADAGRTTXKRAGALHPHGEXQRQPQGRPRAAAPHHAGRGQPSDXSQPHRKQRRQQHRRRTDAQHAPDQDQRRKQPESGGGATSS

SEQ ID NO: 358894 - protein, 69 aa, Zea mays
  Clone ID: MRT4577_90479C.1.pep
LFVFLVRSPLLIRVLCFSPSATVPSVVVLSPLSPSFSFCLLVLGVVCGAVSCSPSLMSDFRVLAGNVGV

SEQ ID NO: 358895 - protein, 36 aa, Zea mays
  Clone ID: MRT4577_9047C.1.pep
DPRPTPTNSLPNLLFYLTPIIINGRALTYSRLLHPD

SEQ ID NO: 358896 - protein, 88 aa, Zea mays
  Clone ID: MRT4577_90480C.1.pep
FAFFTGFGIGIEKVCGVCGLERGGASVLRRDLYVAPLARSAADETSKRLTGKGRRRKTKDVGGRAVGADRQARGGAAVRELKGPRPGS

SEQ ID NO: 358897 - protein, 173 aa, Zea mays
  Clone ID: MRT4577_90481C.1.pep
ALVYLSGTRCAAKTVFWKPAEGDPALKESWLSSTLEISINGTKLLAYVSVAINRLEALAGCLNRTQTVFCHIPAIGASVEFKRDTSLSFVESTRAAASGENNQEQRTVTAPMPCKVLSTLKKNGEQVKSGDIVMVIESMKMEVTISASADGQFETNWKEGDAVEEGKTLCTAK

SEQ ID NO: 358898 - protein, 332 aa, Zea mays
  Clone ID: MRT4577_90482C.1.pep
MESREEERKGSGGAAAGGGSTPGANLRDLVSREYYGHKKKVHSVAWNCLGTKLASGSIDHTARVWSIDPHVHSKVKDIELKGHTDSVDQLCWDPNHPDTVATAAADKSIRLWDARSGKCQVVELSGENINITYKHDGTQIAVGNKEDELTILDVRTLKVAKKHKSTYEMNEIAWNKAGDLFFITTGLGHVEVVKDLEFLKPCKLNAHTAGCYCIAMDPLDRYFAVGSADSLVSLWNVKELLCIRTFTKLEWPVRTVSFSHTGEFIAYASEDPFIDIANVETGRSIHQIPCKAAMNSVEWNPKYNLLAYAGDDKNKYMTDEGVFRVFGFETHN

SEQ ID NO: 358899 - protein, 220 aa, Zea mays
  Clone ID: MRT4577_90483C.1.pep
GRAGVQTRPHHGHGYNTIGLPYLCFYGSCFLLAVVARVLLLSGEKAGPQRLPPGPGQLPVIGSLHHLRRGLPHHTIRELSLRHGPLMLLRICERTAIVVSSAEAVGEMLKSHDAAFSERPSSPCIEELSRDGQGVIFAPYGDHWRLLRRILMTELLSKRRVESFRHIREEEAARLVSSLSSLPPGQPVDMDERLEELVVDSSVRAILGDRLANRAAFLRM

SEQ ID NO: 358900 - protein, 58 aa, Zea mays
  Clone ID: MRT4577_90484C.1.pep
LCDDLLHSLIEMKHGKSFFIRRGRGRGRGRGRGRGSSRGRGRRGNSRYDDPKMSFRDF

SEQ ID NO: 358901 - protein, 34 aa, Zea mays
  Clone ID: MRT4577_90485C.1.pep
LLFLEAACVAIGRVDVPASLALSLGDCEAASSTP

SEQ ID NO: 358902 - protein, 109 aa, Zea mays
  unsure (1)..(109): unsure at all Xaa locations
  Clone ID: MRT4577_90486C.1.pep
ARRRRRQELCALPRNVRRAXASMDAVAVSTAASVAELDRLPEVAAPEEEQIGXGGGSAGRAXCPCPSRPKASGSGHRSNLSTDWLLAPSGVPRSFFSRHSRARSSVLPL

SEQ ID NO: 358903 - protein, 232 aa, Zea mays
  unsure (1)..(232): unsure at all Xaa locations
  Clone ID: MRT4577_90487C.1.pep
METANVVILSFFFIFAIHRLFNRLHSRSTKMKPLPPGPLAIPVLGHLYLLLEKNIHHMFTRLAARYGPVLYLRLGSRNAVIVSSVDCARECFTEHDVTFANRPTFPTLHLMTYGGTTVGTCAYGPYWRHIRRVITVHLLSALRVRSMVPAIEAEVRAMARSMYRAAVTAPGGAGAAKVELGGMLFELGLSALMEXTVAKTKTSRTVDAADTGLSPEGREFKESMDVMMPLLG

SEQ ID NO: 358904 - protein, 157 aa, Zea mays
  Clone ID: MRT4577_90488C.1.pep
MDLMGLNRSLLQSFTQVNALERFKDDDDMLWRSPGTPVFTAPECCQGSAYHGRASDTWAVGVTLYCMVSGHYPFLGDTLQETYDKIANDPVEIPGDVNPQLADLLLRLLCKDPGDRITLRAAAEHPWVAGDEGPVPEFICRCGFGRRKRNDVREEVQ

SEQ ID NO: 358905 - protein, 138 aa, Zea mays
  Clone ID: MRT4577_90489C.1.pep
PNPLSRALAAQSPLTSTQKHFCPPPPPPHPPVGTASTFTSLEEVSSRIWLGAASETVPCSTSAHFSRERPLPSRLLLVTRCSRLLDLVSHRSELGSCSWGASSYVRRRSVRGGGSGVLMEVVPLMDRHWFPLAGQISN

SEQ ID NO: 358906 - protein, 125 aa, Zea mays
  Clone ID: MRT4577_9048C.1.pep
GWGVLFFFFFFFFFFFTKKTFVPKTEGVNQCWAHPPATGGGGGGDKPWAFPPTYLCRAPAQALLSPVRITPPQDQGNPAGLGFRSLTSCYFPPRFWAPPRRAFGCAGLLFLVWGGGPLLFLLPAP

SEQ ID NO: 358907 - protein, 134 aa, Zea mays
  unsure (1)..(134): unsure at all Xaa locations
  Clone ID: MRT4577_90490C.1.pep
SLANSVEMDLANNGEVSGVTLLNYKFFHMNMSRCKDMLIKDVTVTGPGDSPNTAGIHMGDXYGITITNTVIGVRDDXMCIRPGTSKVNITVVTCGPGHGITIGRVCRYKDQKDLTDINMKDCTLKKTMLRVRIK

SEQ ID NO: 358908 - protein, 169 aa, Zea mays
  Clone ID: MRT4577_90491C.1.pep
MNNIMGVKIQKTRYYVLVTSTGNVKIGDFSVSQVFEDDDDMLWRSPGTPVFTAPECCQGSAYHGRASDTWAVGVTLYCMVSGHYPFLGDTLQETYDKIANDPVQIPGDMNPQLADLLLRLLCKDPGDRITLQAAAEHPWVAGDEGPVPEFICRCGFGRRKRNDVREEVQ

SEQ ID NO: 358909 - protein, 55 aa, Zea mays
  unsure (1)..(55): unsure at all Xaa locations
  Clone ID: MRT4577_90492C.1.pep
FXFFFFFFYQNNTAVVLVYNSRHFTTFATGPSNKEQEIKSDVRQNYAAMTVLHLT

SEQ ID NO: 358910 - protein, 115 aa, Zea mays
  Clone ID: MRT4577_90493C.1.pep
SSSNHALEISRPFLSTFCARNFAFFWIHLISLFMEFRNNHHRYVLSDSSDELNNIVQCRTFSSTVSSCLKEFLSKPMVGSSRMTNLGFISISMAMLTVLTSLPPDHPQCAHRSVS

SEQ ID NO: 358911 - protein, 117 aa, Zea mays
  Clone ID: MRT4577_90494C.1.pep
SRVTPPSGPKEPPNQKGPRPWEKKEEDHAQTPRRGLGPPKQMDRTRCLGPVCQAAPRSRQSSIHPPPQILLPPLALSLVWAPDSPRSIYPPVVCRILTTAAMHQTPPPHIILFLPFF

SEQ ID NO: 358912 - protein, 98 aa, Zea mays
  Clone ID: MRT4577_90495C.1.pep
KALVAPDYGGVAEYTAPGAYNWGGEWGAGKTAAPIVSIPAVGANWVVAPAPPPDGVWDPIVAPPPTTAPGWEQGGAPVGGSPPPWGYLIKSKWAWWMV

SEQ ID NO: 358913 - protein, 70 aa, Zea mays
  Clone ID: MRT4577_90496C.1.pep
ACDWFIAKIFLLLCRSHLSICKSVAYSFRHTTVVAQNLSEASVAEICGKFWQLKHTTKPSCSMLALYLRK

SEQ ID NO: 358914 - protein, 57 aa, Zea mays
  Clone ID: MRT4577_90497C.1.pep
RIPRHAGIRYKVYPYPPPPEGARDAIPAILMQNNPAQCTAFYNVMSDKILALSNLSP

SEQ ID NO: 358915 - protein, 190 aa, Zea mays
  Clone ID: MRT4577_90498C.1.pep
SSLPTLRFLALSHLLVRVLDKIGPTMAVLRLDVQRNIERLQELYLLDPATYSTLTGIVEKEVKEGTARKVDSCARAILWLARSMDFTAALLQRLEEDSTQQQQQSLAQLVEAAYEATLKPWHGWISSAACKIAWKLIPERKVFTGMLLGTGQDCSALEDEIGRLALLLRPFLDDIHSMMAKFRLDRLKST

SEQ ID NO: 358916 - protein, 486 aa, Zea mays
  Clone ID: MRT4577_90499C.1.pep
MTPCALTVDSLNPKVLALADHLGDNAIARRAQCIQNEIEAEPESHPFREIIDCSLSNPQSMGQRPNKFFREVLALCNHPHLLEQSGTNSLFSSGAIARAREILDLFPGRATGGYSHSQGTEGLRDIIAAGIAARDNFPCNADDIFLTDGAAPPVHMMMHLLIRDQKDGILCPVPSHSLYTSAMLLQGATLVPYFLDESRGWGVSMSDLKKQLDSARSMGVFVRGLVVINPGNPTGHVLVEENQREIVDFCRNEDLVLLADEVYQENIYADEKGFHSFKKIARSMGYGEGDISLVSFHSVSNGYYGECGRRGGYMEVTGFNSDVKKQVYKVVSLSSCSNISGQILMSLVMNPPQVGDESYASYHAERHGVLSSFARCAEAMVRSFNGLEGVTCSEAEGAVFVFPSVRLPKKAVAAAEASNTQPDAFYALRLLETTGIVVVPGSVFGQMHGTWHFRCTVLPHEEKKTMTVIISSFVAFHRAFMEEFRD

SEQ ID NO: 358917 - protein, 87 aa, Zea mays
  Clone ID: MRT4577_9049C.1.pep
KKRGNTGRTTSTPPQEQYSAYYDPPLGKKKKAQTKQPCPASSKKNDKTANSIPTKIRKAASSRLTTPQRGNPQEEGQGSAHRPKRGA

SEQ ID NO: 358918 - protein, 51 aa, Zea mays
  Clone ID: MRT4577_904C.1.pep
MHICQALITIMDLHILRPTCLPSSFRPRCPLHDIEVLSYLVFSMPHCLGIF

SEQ ID NO: 358919 - protein, 103 aa, Zea mays
  Clone ID: MRT4577_90500C.1.pep
SKTSIKQLGRSLARATTSTVAALCFLLSCVSATPSTLAASSAIIHDIIRGLADTTAARVRTDAEATARAFTDFGTNATEDDAARPAAVFYPVVRRRHRRAGGG

SEQ ID NO: 358920 - protein, 104 aa, Zea mays
  Clone ID: MRT4577_90501C.1.pep
WKWWSSMVACVPAPRGLGWTGIRPSAAGAIIITLIIKVDRPAAFRILPERSTALARGGPPMVRSSRCKAMAPRISNKLHCLALHAWRHGCDGHRTFGANWAPSV

SEQ ID NO: 358921 - protein, 132 aa, Zea mays
  Clone ID: MRT4577_90502C.1.pep
GEVCIPSPASNATLLLPLPSPLRPQTPPTPLHGRFFPPCPRDLVVRSLCDTATPQYSPHRPLVDLPPSPPPSPTALCPARVPCRVHDTTRFRNISDTSSCTEAIRFACSNAVSCTRALLFLFCVLQVFDSMM

SEQ ID NO: 358922 - protein, 75 aa, Zea mays
  Clone ID: MRT4577_90503C.1.pep
HYQHIPFSAFSPICLARLNISLELLSYRTKNLVSSLLSRGGNFANILPTLTYMLLVSIIPIGFLSPAINFCVGLP

SEQ ID NO: 358923 - protein, 125 aa, Zea mays
  unsure (1)..(125): unsure at all Xaa locations
  Clone ID: MRT4577_90504C.1.pep
MAPFVPLLQPWVXKYRPGQVKDVAHQEEVYWVLKNTLQTGDLSHMLLYCPPGTAKTTTVLAIACHLYGAWLTKLRVKELTGIENRXIDVASTEIASYGVRVRRAHLKXLPCPPCKMIICYKTYIF

SEQ ID NO: 358924 - protein, 87 aa, Zea mays
  unsure (1)..(87): unsure at all Xaa locations
  Clone ID: MRT4577_90505C.1.pep
ITDPDTTVNAQIGELLATLGXPAAALQRRRQDHNHHHQSHHKSAPCVPHSXDLPCHQPPRGLTHHRAHARDKLQELSTHKAQHRHGQ

SEQ ID NO: 358925 - protein, 129 aa, Zea mays
  Clone ID: MRT4577_90506C.1.pep
MQIFVKTLTGKTITLEVESSDTIDNVKAKIQDKEGIPPDQQRLIFAGKQLEDGRTLADYNIQKESTLHLVLRLRGGIIEPSLQALARKYNQEKMICRKCYARLHPRAVNCRKKKCGHSNQLRPKKKIKN

SEQ ID NO: 358926 - protein, 68 aa, Zea mays
  Clone ID: MRT4577_90507C.1.pep
IGPPLLPYGRKIPSPKLFAKKKAVYANPVKGVANPFIFYQEVAISAMGPIQGLPDYKWFKPRAHKLRY

SEQ ID NO: 358927 - protein, 114 aa, Zea mays
  unsure (1)..(114): unsure at all Xaa locations
  Clone ID: MRT4577_90508C.1.pep
FANRCSTSRKRVGLPGFRCPCGDLFWGAPRFLDPPGFRXNYRGPPRDPFPRENPVVRAAKIVRFCFARRAEEGIPKRENEISKGERGERHAKSKRFSVLLLCCFWTGLIFNPLL

SEQ ID NO: 358928 - protein, 117 aa, Zea mays
  Clone ID: MRT4577_90509C.1.pep
SGLTNPNPSQSTHAKHRGILLSPWREKPLGKATKCPGMALGPPPLEKARWGGFIAPNTKLARGGKVVLSGGHRTSRGPWLGGLTRGSVKTGNRWPPGFMPRIGWTSHRTGQRASLYG

SEQ ID NO: 358929 - protein, 380 aa, Zea mays
  Clone ID: MRT4577_9050C.1.pep
MAAGGAGAAVAAVLTTAVAAVLVAVLTTTVSGQDDPAPAAAACARRPVVFAFGDSNTDTGGVAAGLGHYYPLPEGRVFFRRSTGRLCDGRLVIDYLCESLNMSYLSPYLEAVGSDFTGGANFAISGSSTLPRNVPFALHVQVQQFLHLKQRSLDLAAHGGTAPVDADGFRNALYLIDIGQNDLSAAFGSGAPYDDVVHQRIPAIVSEIKDAIMTLYYNGAKNFWVHGTGPLGCLPQKLAAPRPDDSDLDYNGCLKTLNDGAYEFNGQLCAACDGLRSQLRGATIVYTDVLLVKYDLIANHTAYGFEEPLMACCGYGGPPYNYNANVSCLGPGFRVCEDGTKFVSWDGVHYTDAANALVAAKIFSGQFSTPQMPFDYFCQA

SEQ ID NO: 358930 - protein, 105 aa, Zea mays
  Clone ID: MRT4577_90510C.1.pep
YLPGPSAQRPFSTHVVRATRGTRRATNWGGGWAQGAIREKGESVSPGHRGGPHWSALKTGRGPRACYLAFIATRSQAPVPAANRGCPARSGMGPRPARGGASLGL

SEQ ID NO: 358931 - protein, 67 aa, Zea mays
  Clone ID: MRT4577_90511C.1.pep
FGTRPLFFFFFFFFFFFFFFFFFFFFFFFFFFWTKKTLEIQEKQKTTKWGGGGPPLSKKKGPPLGTP

SEQ ID NO: 358932 - protein, 161 aa, Zea mays
  unsure (1)..(161): unsure at all Xaa locations
  Clone ID: MRT4577_90512C.1.pep
VYLFLFAWLEAASFGAYYDRFIRLGVAVGSHGGPVAYLLTEFARVRVQGIGAVLGVXLSEVAFPNVGKGALLCDCAHNGAYAEGLATFMXVWYSXTLKKWEMXSFFMKTWFTRIWLNTVYILSSDMTGGIMNPASASAWCVRSXDHTPCDHLLVDRLETLQ

SEQ ID NO: 358933 - protein, 132 aa, Zea mays
  unsure (1)..(132): unsure at all Xaa locations
  Clone ID: MRT4577_90513C.1.pep
MAAATSSSADKLQSFTPEEHLPGGSFCISSPPXWNGRASLLGYHAFXAMLFTTVIICSALVPQMAGANEYNGRATQTILVAAGINTLFHTVFSTRLTVGMSGSYDVVASTISIVLPARYAMDQTLTRNYCGR

SEQ ID NO: 358934 - protein, 113 aa, Zea mays
  Clone ID: MRT4577_90514C.1.pep
SMARLVHSGHVILLVRQSPVCRVLLSIACSWVVCALLASLVVPGRRSTLAPLALIVFLPFVPSSSSFRRIVHQLFFLVRVLFWSSGRPVALVCAGRLLFCCTNPPSCILGRPP

SEQ ID NO: 358935 - protein, 121 aa, Zea mays
  Clone ID: MRT4577_90515C.1.pep
MFPSKQVAALLVLVVVSSPSPSLLVSGKPSVSKEQKDKILEECDRFIRLGYPIYVVSRHSPCCDAVRAVENRDMDYVVLLLTNDEKDKYSISKILALHGLCELPPASLHQHQQVMGRRALM

SEQ ID NO: 358936 - protein, 86 aa, Zea mays
  unsure (1)..(86): unsure at all Xaa locations
  Clone ID: MRT4577_90516C.1.pep
ASVSFLFLAVGXVLPXGXVXRPXAVLRAASSSXXVVXFASXRLLRXGSXXFXGGXPXXGCXLXAGXLRLWRWCRRGPEAAARXCXX

SEQ ID NO: 358937 - protein, 241 aa, Zea mays
  unsure (1)..(241): unsure at all Xaa locations
  Clone ID: MRT4577_90517C.1.pep
GRKKFKKKKKKKKKKKKKKKKKKKKKKKKKKKKKKKKKNFRAPFTFKVPFRRGEKKKAPQWGRKPWALSPRAFPEKAGNGPPPPPFGEPRGTMPKTGGKANPGGGPGTPGNAPNRGLTXGPLAGEPPNFLEGEFPGELRWEPRGFVGDPEXTFPKNREWGGTPPRWPLWGAFGWFFPELFPPKGLNFGKAGGLRAGSQIFRGGGWDSLGNPSLFPGKRFLPFWPCQVGFLGPVKGYRFPGG

SEQ ID NO: 358938 - protein, 95 aa, Zea mays
  unsure (1)..(95): unsure at all Xaa locations
  Clone ID: MRT4577_90518C.1.pep
DISVMGFMLYPAVSCYIPGFSPIGQNFRVLGQTSLXRXLVGLCQSHVVNVNRLMTVPLVEKKTTLLSQRVGAFLSAFGDSFFQLGKRVFSLKKLM

SEQ ID NO: 358939 - protein, 106 aa, Zea mays
  unsure (1)..(106): unsure at all Xaa locations
  Clone ID: MRT4577_90519C.1.pep
LHWSAEILSCVALLALFASATNAYIIPHCXFAPSYIITQILPPVTAMGFXHRAVLAYTLQQAIARSVLQQPISEMQQLVLAHLTIHTIATQQQQHFLPELSHLAMA

SEQ ID NO: 358940 - protein, 197 aa, Zea mays
  Clone ID: MRT4577_9051C.1.pep
MYGRRASQLLKEIDSSEAGQLVPFNSDVFDQVIRECNEHNSQFQSLIRKMVEQNLDIETTRNEDHYGAAIHHLSLLRNKRCLMAYMYNRAEVIQSFRWKIGPVLPHDIQEKLHFSEKEYFKNHSAAIKSYISEMDIDLTVDMVPPKDPYIQVRVLEDIGEVSLGDHSVSLTKNSLHFLRRTDAEQFISQGLMEEFLE

SEQ ID NO: 358941 - protein, 72 aa, Zea mays
  unsure (1)..(72): unsure at all Xaa locations
  Clone ID: MRT4577_90520C.1.pep
AWINNRSSRMCQMSVXFLESLLKIELAECKMLVPKEHYGKGVPAVLNFPIRLRISRRHECLDTCHFPTHPFF

SEQ ID NO: 358942 - protein, 72 aa, Zea mays
  Clone ID: MRT4577_90521C.1.pep
MASQLSAVVPRFHGLRGYAAPRSAVAALPSVRFGTRRSSSQCICCDYIGSSTYLIMVTTTTLMLFADLFVLS

SEQ ID NO: 358943 - protein, 56 aa, Zea mays
  Clone ID: MRT4577_90522C.1.pep
MDKSMLADLDSLPEADKQRMTVMIDQLQIRDSLRMYNSLGERCFNDCVDTFKHKSL

SEQ ID NO: 358944 - protein, 53 aa, Zea mays
  Clone ID: MRT4577_90523C.1.pep
NPKRAPQQVFQRPPKGPSPRKKTFQGKTIFLSHGPAPLNYQEKKPFFSRRGPE

SEQ ID NO: 358945 - protein, 93 aa, Zea mays
  Clone ID: MRT4577_90524C.1.pep
AVYWCPCPSGHSVPSVTPCDSLSPRPLVFFLHSPRPLFCHLFFFTRFPSLPFILLLWQQPLPFVPFLLYSFLWWGVRLFFPNSSSPYPSPFCR

SEQ ID NO: 358946 - protein, 167 aa, Zea mays
  Clone ID: MRT4577_90525C.1.pep
MASAATPAPLLPVTSTAAGGGSAPSSATGLSDAALATPAFRLFVSRLAETARRSLADRRPWTELLDRSAFSRPDSLSEATSRLRRNLGYFRVNYAAVVAFSLAASLLAHPFSLLVLLSILGAWCFLYVFRAPDQPVVLFGRTAPAAFQRTSSLMIRALRPVETPPAG

SEQ ID NO: 358947 - protein, 164 aa, Zea mays
  Clone ID: MRT4577_90526C.1.pep
MASAATPAPLLPVTSTAAGGGSAPSSATGLSDAALATPAFRLFVSRLAETARRSLADRRPWTELLDRSAFSRPDSLSEATSRLRRNLGYFRVNYAAVVAFSLAASLLAHPFSLLVLLSILGAIVAAHGACRIPEDLFLDDPSAASSGNTTSRLISFLASPGSGV

SEQ ID NO: 358948 - protein, 67 aa, Zea mays
  Clone ID: MRT4577_90527C.1.pep
MTAQASLLLDMPPEIRREISRVKMADISDHRQLAQEVSRLSGVIINHEAAARLKPVEDAMHVGTLSW

SEQ ID NO: 358949 - protein, 208 aa, Zea mays
  Clone ID: MRT4577_90528C.1.pep
MASAATPAPLLPVTSTAAGGGSAPSSATGLSDAALATPAFRLFVSRLAETARRSLADRRPWTELLDRSAFSRPDSLSEATSRLRRNLGYFRVNYAAVVAFSLAASLLAHPFSLLVLLSILGAWCFLYVFRAPDQLVVLFGRTFTDRETLLGLTVASVLAFFPTSVASLIISGLLVGGAIVAAHGACRIPEDLFLDDPSAAASGNPPAS

SEQ ID NO: 358950 - protein, 68 aa, Zea mays
  Clone ID: MRT4577_90529C.1.pep
NTIAVFVLVVAKMPNMHKVRIFGINSNILGQLQKRHGFDAIMLLTNSLFFKLDTTACNIITGLKKTVN

SEQ ID NO: 358951 - protein, 155 aa, Zea mays
  unsure (1)..(155): unsure at all Xaa locations
  Clone ID: MRT4577_9052C.1.pep
QQVFSFNPLFSLDPGGFLPPPLFPFTPVGXGYFQQQQLFSFYPLGALNPPGFLPPPIFFPFCPLGSANRGSFFAPPPVVPFFPPFWGNPPTLFQIPPLLAFVPPGLAKPAAFFPQPILGGGLFLIGFLRVFHNKGFLDGGCGPPQIKSFLFRFLC

SEQ ID NO: 358952 - protein, 36 aa, Zea mays
  Clone ID: MRT4577_90530C.1.pep
KKLRPKKTIKHLKAQPKPPPAQTNPFFLVTAYPFTH

SEQ ID NO: 358953 - protein, 77 aa, Zea mays
  unsure (1)..(77): unsure at all Xaa locations
  Clone ID: MRT4577_90531C.1.pep
GVPVPSHHRXXQNRTXPXSXPPTXNPTPTPASXRRXXAAMAFRLXNNLIGVLXFVTFLLSVXILGAGIXLGXXCRRH

SEQ ID NO: 358954 - protein, 89 aa, Zea mays
  unsure (1)..(89): unsure at all Xaa locations
  Clone ID: MRT4577_90532C.1.pep
YSKQAPPCADEPPTRSAAMDFDEHDDGDEEMTPMPVSSSYDAPMQPGLGLGGGGGETPKHGDSAGAGSFXTPPAGGFGGGGAGAGAGAG

SEQ ID NO: 358955 - protein, 158 aa, Zea mays
  unsure (1)..(158): unsure at all Xaa locations
  Clone ID: MRT4577_90533C.1.pep
MLDKLWDDVVAGPRPETGLEKLRKATTARPLVINKDADGGSYKRAQSMPSTPTTPGAQIAGFLYGLSPQDTPHVXEIRCIAIPPLHGTHQMVTLPSNLPELEFLNDLEPLGWLHSHPSEAPQLSARDLALHAKILENIILWDGXEKWLILTCCFSPGS

SEQ ID NO: 358956 - protein, 123 aa, Zea mays
  Clone ID: MRT4577_90534C.1.pep
MASKIIGQVVKQTTGLTGLKVSKNPVHELTVLYGKTLRVLQKMPEEAAYRKYTEEIISHKNDIVQKATSIADIESQINCGQVEELIIQAENELNLSRKMLTWRPWEPLSKPPPPHQWTWPPVK

SEQ ID NO: 358957 - protein, 106 aa, Zea mays
  Clone ID: MRT4577_90535C.1.pep
LFWTIKGAVNCKKRRGKTVLLATTERKPPWKSWSPGGPFFPLFFFSPPLLVPFGFVLPAPGGRFCPEWFSKKKKKKKKKKKKKKKKKKKKKKKKKKKKKSRKGRGT

SEQ ID NO: 358958 - protein, 45 aa, Zea mays
  unsure (1)..(45): unsure at all Xaa locations
  Clone ID: MRT4577_90536C.1.pep
KTVHIGNVASHRSTIVSVFPCLYSSARFIVDNPASPLLVEDAVXS

SEQ ID NO: 358959 - protein, 129 aa, Zea mays
  unsure (1)..(129): unsure at all Xaa locations
  Clone ID: MRT4577_90537C.1.pep
HALAKVLIMVCATLLADAACACSQDGVLSIITRPMFHSMLSHHRYCMCQGAFYTYDAFIXAASKFPGFCTTGDEQTRRQELAAFFCQTSHETTSGWATASDGPSACXYCRLKEHKQTDPPYYGRRPIQL

SEQ ID NO: 358960 - protein, 248 aa, Zea mays
  Clone ID: MRT4577_90538C.1.pep
MGRQFFVGGNFKMNGTIKSITEIVDNLNKAKLDENTEVVIAPPSLYLLLTREHLRKGIEVAAQNIFDKPNGAFTGEISVEQLKDSGITWTILGHSERRQILQENDDFVASKTKAAVDGGLGVILCCGESLEQREAGETVNVVTKQLKAVADKVKDWSKIVVAYEPIWAIGTGKVATTEQAQEVYAALREWLKKEVSAEASEKTRILYGGSVSEKNCKELAKRPDIDGFLVGGASLKPAFVDIINSHQA

SEQ ID NO: 358961 - protein, 52 aa, Zea mays
  Clone ID: MRT4577_90539C.1.pep
QTDLHRSEIQSVLAMKKGTSYTREKAGKESAEREGCCTAASDVVFTCKRVVY

SEQ ID NO: 358962 - protein, 149 aa, Zea mays
  unsure (1)..(149): unsure at all Xaa locations
  Clone ID: MRT4577_9053C.1.pep
GDEPCAGGGGAGGHVRAAAVAGGAAAAPPAPAAGRDRGVLLVASHRAVPRRRRQRKRQEAALLLLVVVFFVQVEXRRRKASSAAKEEAGDGVWRKEIMMGERCQPLDFSGVIYYDADGRRLAQAPPPRSPLRSPLPASMKLAANAGAAY

SEQ ID NO: 358963 - protein, 140 aa, Zea mays
  Clone ID: MRT4577_90540C.1.pep
RGRPGRTLQAELLVALVPRRRRRVPSTSFPPAHLTASRSACPSFPPLSLPPSMFLRNFFVLPYCSTRVSFPRPVDLVHLRAPGSRSGSPIRTREGGIGGHGQRDRNRSCLPQPKVSDPPGHHQKRSEDIGGEPLPRTLGS

SEQ ID NO: 358964 - protein, 62 aa, Zea mays
  Clone ID: MRT4577_90541C.1.pep
PRDLKIELLVLPPQRGVVVGLGGKVRVRNAVVGAQELLRKGSVGGAQADALGPAAGEGRVET

SEQ ID NO: 358965 - protein, 532 aa, Zea mays
  Clone ID: MRT4577_90542C.1.pep
MAGRGGAGRRPRAVFMAFGTQGDVFPIAALAAAFACDQQEYAVVFITHSAHRSLSAHLAASSVRYMPVSSPPVLAAEQLENISSDSIQSNHERESFSMRKKAIQAEHRKECLSFVEEVFGNDPSISGDFIVINFFALEGWHLAELFQVKCVIAAPYFVPYSAPTSFKRQFKQTFPLLYKYFQEAPANTVCWTDIIHWMWALFMESWGSWRNDCLNLSPIPFTDPVTNLPLWHVREESPLLLYGFSKEIVECPGYWPFNAHACGFWFLPMDWQFSCDKCMELSGNINSSFGGMLCANHSSLEHFLTRNAYSSRPIFVGLSSIGRMGFLRNPKAFLMVLKAAIESTDYMFILFSSGYKPLDSAIQSIASSVNESRGVDSPSLGGDSALLFNGRLFCFLGSIPYSWLFPRCAAAIHHAGSGSTAAALLAGIPQVTCPFMMDQFYWSERLQWLGVAPEPLQRQNLVPDNDDALSIHNAADVLVGAIRSALSPETKAQAARIADRLSSEDGIGEALRILKARVLTQNKIISSFIASK

SEQ ID NO: 358966 - protein, 81 aa, Zea mays
  Clone ID: MRT4577_90543C.1.pep
ACVLPTRRHGQAGDGIEAAYARWGGSSMLTSMTLPMSAMQEPWCRTMPGADGSRNWRRLIGELLSVRTSLQILSLKGSAKT

SEQ ID NO: 358967 - protein, 110 aa, Zea mays
  Clone ID: MRT4577_90544C.1.pep
RPPFFTHFFFFFKTAIHKLLYYPRMGAKYTPAQRLPRFAEIPKLQKGRGLPPMLNGPPAPGASPKPGDPDPRAPTTPHRGPQNLAEPAQPALGKLDPAHFPRQRSRAKRE

SEQ ID NO: 358968 - protein, 476 aa, Zea mays
  unsure (1)..(476): unsure at all Xaa locations
  Clone ID: MRT4577_90545C.1.pep
MAGRGGAGRRPRAVFMAFGTQGDVFPIAALAAAFACDQQEYAVVFITHSAHRSLSAHLAASSVRYMPVSSPPVLAAEQLENISSDSIQSNHERESFSMRKKAIQAEHRKECLSFVEEVFGNDPSISGDFIVINFFALEGWHLAELFQVKCVIAAPYFVPYSAPTSFKRQFKQTFPLLYKYFQEAPANTVCWTDIIHWMWALFMESWGSWRNDCLNLSPIPFTDPVTNLPLWHVREESPLLLYGFSKEIVECPGELWCPPHLSKIILDXIYIFKFDVPHFSILYITSLXYWPFNAHACGFWFLPMDWQFSCDKCMELSGNINSSFGGMLCANHSSLEHFLTRNAYSSRPIFVGLSSIXMGFLRNPKAFLMVLKAAIESTDYMFILFSSGYKPLDSAIQSIASSVNESRGVDSPSLGGDSALLFNGRLFCFLGXTRLMLYVCVVLSCGIGGENVKIFRSIPYSWLFPRCAAAIHHAGR

SEQ ID NO: 358969 - protein, 289 aa, Zea mays
  Clone ID: MRT4577_90546C.1.pep
MWHIFFCILFSSSSGKESIVSIPGGSSADAADAHVTAIKVMSEYLMFFVAVRRHMLPGLVLHSLLEKIRQTLHEIWDDGKKKTTGGSSSSSSTAAKDTPPPQDKLAEMLLERLKAGRRWFDRNEGRLVVGNAAALANTLIEAGISVQKRQQVPQLLEFIFNVWVDKLLYAAARCSVESHAKQLSRGGDLTTILWLIVQHAALFRIGELKPKEEPQEEEEKKKEEEEEKKKKEEEELKPFWPQYPKKTPPSKPAYAYPVHYIADEEESDDAEESDDAEEDDDMTRHAILY

SEQ ID NO: 358970 - protein, 74 aa, Zea mays
  Clone ID: MRT4577_90547C.1.pep
MTKDVEMAARNGSNGAVAGEAYYPPPPAQGGDVDVDDDGKQRRTGTVWTASAHIITVVIGSGVLSLAWATAQVV

SEQ ID NO: 358971 - protein, 68 aa, Zea mays
  Clone ID: MRT4577_90548C.1.pep
IPEGEGRWFITFINRLAMSFWTQDGEGGGVMDPFKVTRLSLAYSGCFPPLSRGWQEKTWGGLFPKHKR

SEQ ID NO: 358972 - protein, 78 aa, Zea mays
  Clone ID: MRT4577_90549C.1.pep
CGLGKRGDGELWLAMSASIGEPVGWGVGEAQRTACSIAVIAGPVAFSLSGTETTIVSRFQLPYLRVAGLCLVSILCFC

SEQ ID NO: 358973 - protein, 63 aa, Zea mays
  Clone ID: MRT4577_9054C.1.pep
PGLYPLSFRVWNVGWNFHPNSNFPHRSKLFPFLSRALKRLPIGKIGTPLRNGSKFLGRPTRPN

SEQ ID NO: 358974 - protein, 89 aa, Zea mays
  Clone ID: MRT4577_90550C.1.pep
ILWGGGEICKGTLIQADAWGITVTYEDNFKTLQLIESLTIYDGGRRRNKRMSGCQDAADRRTISGRLLCMLCSERLIQAIQKSFVRNRT

SEQ ID NO: 358975 - protein, 53 aa, Zea mays
  Clone ID: MRT4577_90551C.1.pep
LITPITPDSIALHVTLLRTCTSFMNHASYTAYGQRQHTPTYMNQLPPYCPQIH

SEQ ID NO: 358976 - protein, 73 aa, Zea mays
  Clone ID: MRT4577_90552C.1.pep
GSPVLAPPPGVWEPPGPVGGPWGLNKYPPRLELSFFFKKNKPVVPLLGVPGFKKGTFFKVFGAPLGTPNPCFC

SEQ ID NO: 358977 - protein, 110 aa, Zea mays
  Clone ID: MRT4577_90553C.1.pep
CVLLWRQARVLIWDLISCRTRKTRYQALLRQAPPSAAMEPFRRRDQVLPWGQARVLRYDVVPPCYPSPMAPLHVGSWLTSVPCDSLARPRVNTVASLPDPYLGIAAASDT

SEQ ID NO: 358978 - protein, 119 aa, Zea mays
  Clone ID: MRT4577_90554C.1.pep
TLPCQASPSLPCPPSFPIALLPLQSDHLPPISSPSKTSTGTSTGLSPRSTLPAAAGSPGVLCLDRLVPRGARHQAPLRRAPRPTINEPLRQSALPWRQAGVLRWDLVSRRTRRARYQAL

SEQ ID NO: 358979 - protein, 39 aa, Zea mays
  Clone ID: MRT4577_90555C.1.pep
TTQQDIDLYHTMYMEALVKLFDKHKTKFGLPETEVLEVN

SEQ ID NO: 358980 - protein, 63 aa, Zea mays
  Clone ID: MRT4577_90556C.1.pep
IYYIFKGGIDCRLINLDIFEHVKLSKVFLQSVNYASSNQEIQAHCCQSSSARPFCSSQCHSFA

SEQ ID NO: 358981 - protein, 58 aa, Zea mays
  Clone ID: MRT4577_90557C.1.pep
DCDSDGHDRHRSRSSSKSCDRDSRCRSGSRYRSKSKRVSGVDHAAIHDALPIVAAGAI

SEQ ID NO: 358982 - protein, 79 aa, Zea mays
  Clone ID: MRT4577_90558C.1.pep
MISEKERSNEAKHERSIEHLATSYLLQLTYSGRHGTKAPEPNANKEDARCPTRTRRRGWSRAPSIDLRLRSTAVGVRVM

SEQ ID NO: 358983 - protein, 60 aa, Zea mays
  Clone ID: MRT4577_90559C.1.pep
ATSLHSTRACIESSSFPFSPTISKLSPDQIRQGKVRTAQQCRSAASTPPPSVPASSPSSP

SEQ ID NO: 358984 - protein, 71 aa, Zea mays
  Clone ID: MRT4577_9055C.1.pep
GKRPMFIQTTVRCPSTKREILHILHNFCGNRHFPSRKNRVPRICRFYLNSSMPSYLLGEKFAVKTLPPSPG

SEQ ID NO: 358985 - protein, 56 aa, Zea mays
  Clone ID: MRT4577_90560C.1.pep
GRPFVVTWGSGVTACKLALGLYRIGKRYVPVSNGSWPEWEGQSDSDSPKVPAPGTA

SEQ ID NO: 358986 - protein, 152 aa, Zea mays
  unsure (1)..(152): unsure at all Xaa locations
  Clone ID: MRT4577_90561C.1.pep
MAMVLRMVLAKISGETLKHEVLHTGAGYQIRMLRPIMGGQPTYHPNEMRGDADEAVTXLANYIGELEEPEIIKPDMIVMTALGITIGRGRGGDDEKICMTVPVITTGVSDPEPIVMTAPVISDDHQDAGKETMHLLLPDNYTXVQEAPRPTD

SEQ ID NO: 358987 - protein, 89 aa, Zea mays
  Clone ID: MRT4577_90562C.1.pep
PYPPDAEPAAQGITAHSGDSSQFAGDPYLPPNVTTSPADGIIIMLDPRVTNEPNLPTCTLKHRHVKMNQAHILHLNHQEDHQSQHYTPL

SEQ ID NO: 358988 - protein, 53 aa, Zea mays
  Clone ID: MRT4577_90563C.1.pep
GQIKLLKLTNFFFFFFFYSTCIDHELHNTRFRTLVNKKISGHPALQIQKAQTC

SEQ ID NO: 358989 - protein, 80 aa, Zea mays
  Clone ID: MRT4577_90564C.1.pep
SNCISEQRHLYTLCIHFLGDDLDVDEACRFLKIGLLCTQDGTKSRPGMSAVVAMLRGEADVDTETISKHDVIRDFPSHLL

SEQ ID NO: 358990 - protein, 50 aa, Zea mays
  Clone ID: MRT4577_90565C.1.pep
DRIISVLFQLSLKIGGTRDDATERPVSQPNAPLASQSPSKQLNVWFAPFM

SEQ ID NO: 358991 - protein, 102 aa, Zea mays
  Clone ID: MRT4577_90566C.1.pep
LDPIVGWTTPACVYSPLKMGSAEVYAIQMWEALLAMLVDLVRKVFCCPSGHPEVSMVLVITPTYVTQMPVPPFYSLYRDLVEIGLISLVKTRLCNKTIKNIF

SEQ ID NO: 358992 - protein, 153 aa, Zea mays
  unsure (1)..(153): unsure at all Xaa locations
  Clone ID: MRT4577_90567C.1.pep
GGGGFFFFFFFFFYGDTGTTCLLLLRGSILRHQIQGGYYQSKVNLXTGGGGGGIFSKRGNNSSHHPWGKIVDTGWYELKIKKGDAFNNQRGSGKMSAKGEATKNMRSMRGTIRTKNIFIINHLXNKMRGRYLKEVGLRSLHGSHGFLHGVSGF

SEQ ID NO: 358993 - protein, 292 aa, Zea mays
  Clone ID: MRT4577_90568C.1.pep
EYVGDIEQRLHGERLRHLHPPRVGENDGLLWLPRRDVMLNGLSSVAAGLAWYPGVASGADAVCTRADKVNEKTVQCTDPAGQLPCPVVSPPDPVDFKPESKVTRIRQPVHLLSRESQEKYKEAVANMKALPEKNPLSFAAQGAIHQAYCDAYYKYDPTAKDAPFNVHFSWIFAPWHRMYIYFYEGALGQLIGDDTFALPFWNWDTPAGMVVPPLFKDSMGNPLYDPNRNPSNVDALVDLDYPPARNAEPIPFKGPRDEKYKELVNKNLCPVYTQCCIKKKKKKKKKKKKKNP

SEQ ID NO: 358994 - protein, 136 aa, Zea mays
  Clone ID: MRT4577_90569C.1.pep
PTRPPESKVTRIRQPVHLLSREYQEKYKEAVAKMKALPEENPLSFAAQAAIHQAYCDAYYKYDPTAKDAPSSEACSAATGGFPNHTKGGYSCNNDMGFLGSAGHDPLFYSHHSNVDRMWHIWSTRLGGGQGITEAD

SEQ ID NO: 358995 - protein, 100 aa, Zea mays
  unsure (1)..(100): unsure at all Xaa locations
  Clone ID: MRT4577_9056C.1.pep
RHGPSQSTCAATGKGRNEGMDGPPRNIVSKALFFFFYVKXERPRXXPPYNPKNRXVXQNKKKRGLLPAAQNICWMGNDETAQGSYPNNPVHVLWTPPPPH

SEQ ID NO: 358996 - protein, 614 aa, Zea mays
  Clone ID: MRT4577_90570C.1.pep
MASACATSIPLVSAPSACPSKKTTVARFRRRTATCRASSGGGGGRGGENDGLLWLPRRDVMLNGLSSVAAGLAWYPGVASGADAVCTRADKVNEKTVQCTDPAGQLPCPLVSPTDPVDFKPESKVTRIRQPVHLLSREYQEKYKEAVAKMKALPEENPLSFAAQAAIHQAYCDAYYKYDPTAKDAPFDVHFSWIFAPWHRMYIYFYERALGQLIGDDTFALPFWNWDTPAGMVVPPLFKDSMGNPLYDPNRNPSNVDALVDLDYLNDRNAEPIPFKGPRDEKYKELVNKNLCTVYTQQIRSGKGAESFLGEKYCTDIGSSTSSMGSLERMAHTAVHVWVGKAGPTPSSEACSAATGGFPNHTKGGYSCNNDMGFLGSAGHDPLFYSHHSNVDRMWHIWSTRLGGGQGITEADWLDTSFVFYDDVKSPRKVRIRFRDVLDTRDLGYTYDAESDKDLPWLRCKISSLVPHGKDSPPRSSSARKAAAPVFPLALTKGQVVEVPAVPVPAKDPGKEQLLVIEGIEYDPQANNKFDVAINLPADKALQVGPQYKEYAGSFAVVPGSGAGKTRKVKLSLCITEVLFDIDADGDKTVDVVIVPRTNAKITLNARPTIKNRN

SEQ ID NO: 358997 - protein, 105 aa, Zea mays
  unsure (1)..(105): unsure at all Xaa locations
  Clone ID: MRT4577_90571C.1.pep
SPTTPTAAGGSGGXEAPPAPXSDTSPTTPGGGYYXPPSPSSDTSPVTPPGGGGGGYSTAASPSSDTFPSTPGGGGGCGVPPSPASAASPPTPGGGGGFYGPAWAP

SEQ ID NO: 358998 - protein, 209 aa, Zea mays
  unsure (1)..(209): unsure at all Xaa locations
  Clone ID: MRT4577_90572C.1.pep
MAHRVDNEYDYLFKIVLIGDSGVGKSNILSRFTRNEFCLESKSTIGVEFATRTLQVEGKTIKAQIWDTAGQERYRAITSAYYRGAVGALLVYDITKKLSFENINRWLSELRNHADSNIVIMMVGNKSDLNHLRSVQEEEGQALAEKEGLSFLETSALEALNVEKAFQTILSDIHQIISKKALAAQEAAGSGPXSGTTINVADSSGNMKK

SEQ ID NO: 358999 - protein, 59 aa, Zea mays
  Clone ID: MRT4577_90573C.1.pep
ELGQVNFARHQLSYFYTETMFNERIQRSILSAFLSNVSWGMQNANASATLEFLVIYLNM

SEQ ID NO: 359000 - protein, 53 aa, Zea mays
  unsure (1)..(53): unsure at all Xaa locations
  Clone ID: MRT4577_90574C.1.pep
KNKRGKNLNRGGEIFFRMIFLFFMWNMVLFMKGHRHTHHNPMGLLRRKNXYSN

SEQ ID NO: 359001 - protein, 110 aa, Zea mays
  Clone ID: MRT4577_90575C.1.pep
KSRVLDNPPRGLSKGSPFIGKLPSIQEIFPRVNEQFPPIFRRKAFFPWYPGQGIAQIEFPQAQNNINPLVLEDPQFQDPPSPQEEFQAQEEVQAHYILGEGCFFFKPFGP

SEQ ID NO: 359002 - protein, 124 aa, Zea mays
  Clone ID: MRT4577_90576C.1.pep
PTRPKKKTNFKKNQQIKGLCVNNQQLHQHMPKTRTYPAASVKPKAPRASASARRYASNNLGFAGTSRSVAHNAIHASYLNSLRVAVYSTPFSLSIDFVASCCSLLFPRIICYMGSHLCTFCIRW

SEQ ID NO: 359003 - protein, 70 aa, Zea mays
  Clone ID: MRT4577_90577C.1.pep
RLHAGRGRVQQLHRVHHAALVLPERLVAPARCAQDHRQRARRGVALVGGLGLQHPHQPWTASATTAPVAG

SEQ ID NO: 359004 - protein, 40 aa, Zea mays
  Clone ID: MRT4577_90578C.1.pep
PMSKVRAMMASSNSQWQLRHFPIETLAYISRFPFKYRIRV

SEQ ID NO: 359005 - protein, 79 aa, Zea mays
  Clone ID: MRT4577_90579C.1.pep
AYEKNRVSVSAASSHAGVTSEPHVPSQTTTGPRSISTCSGSHSLRLCCSLCSPPRCLGTGTADRSTLEALFHRPETTPL

SEQ ID NO: 359006 - protein, 60 aa, Zea mays
  Clone ID: MRT4577_9057C.1.pep
WAPPSFFFLSKWGPPLVGDQKKKGYFCFLNLFPPSLKKKLKGGVSNVSLNFVHWGGGTIL

SEQ ID NO: 359007 - protein, 412 aa, Zea mays
  unsure (1)..(412): unsure at all Xaa locations
  Clone ID: MRT4577_90580C.1.pep
MAATTHAASMSFLLSHPQSRSATPSRHLPLRPAARRVRCATAAAAXPAVTTKHRRTADENIREEAARHPAPKQGLSAWYEPFPPAPNGDPNERYSLDEIVYRSSSGGLLDVRHDMEALARFSGAYWRDLFDSRIGRTSRPYGLPSXRISLEQLIQPIANGATVLSLDTDFDGCMRLIREVTAELPIYLANSLNSLRLEGQKTAAIEILQQFDWEVPDWVIVPGGNLGNIYAFYKGFEMCRALGLVDRVPRLVCAQAANANPLYGYYKTGWTEFQPQVARPTFASAIQIGDPVSVDRAVVALKATDGIVEEATEEELMNAMSLADRTGMFACPHTGVALAXLFKLRDQRVIGTNDRTVVVSTAHGLKFSQSKIDYHDSKIEDMACKYSNPPVSVKADFGAVMDVLKKRLKGKL

SEQ ID NO: 359008 - protein, 50 aa, Zea mays
  Clone ID: MRT4577_90581C.1.pep
QVHRIEQGYMSLETFRINGRRSSPCRSIKPLGRQHSLTAIDGTLVCFLCC

SEQ ID NO: 359009 - protein, 525 aa, Zea mays
  unsure (1)..(525): unsure at all Xaa locations
  Clone ID: MRT4577_90582C.1.pep
MAATTHAASMSFLLSHPQSRSATPSRHLPLRPAARRVQCATDAAALSPAVTTKHRRAADENIREEAARHPAPKQGLSAWYEPFPPAPNGDPNERYSLDEIVYRSSSGGLLDVRHDMEALSRFSGAYWRDLFDSRIGRTTWPYGSGVWSKKEFVLPEIEPDHIVSLFEGNSNLFWAERLGRDHLGGMNDLWVKHCGISHTGSFKDLGMTVLVSQVNRLRRXALSRPIAGVGCASTGDTSAALSAYCAAAGIPAIVFLPANRISLEQLIQPIANGATVLSLDTDFDGCMRLIREVTAELPIYLANSLNSLRLEGQKTAAIEILQQFDWEVPDWVIVPGGNLGNIYAFYKGFEMCRVLGLVDRVPRLVCAQAANANPLYGYYKTGWTEFQPQVARPTFASAIQIGDPVSVDRAVVALKATDGIVEEATEEELMNAMSLADRTGMFACPHTGVALAALFKLREQRVIGTNDRTVVVSTAHGLKFSQSKIDYHDSKIEDMACKYSNPPVSVKADFGAVMDVLKKRLKGKL

SEQ ID NO: 359010 - protein, 81 aa, Zea mays
  Clone ID: MRT4577_90584C.1.pep
CMIFTCVALESQFRSLVPHWPLDHCYTGWCTAFPVRELDVLVNPPCVLDGWASGLGFGFFVVPTGKHVLGTSVLLALYRQH

SEQ ID NO: 359011 - protein, 52 aa, Zea mays
  Clone ID: MRT4577_90585C.1.pep
ATSVRHTLLIESTKVSSAWQPVDSVTDVALHLEAAERLRGTSRIASVLQRTP

SEQ ID NO: 359012 - protein, 145 aa, Zea mays
  Clone ID: MRT4577_90586C.1.pep
KKRKMGSLNDKRGALGKKKRPRGQKSPPAKKKTLPKKKRLSPPPKKNFDPALPLSWARAGACFPFQIRSNQKRGTSTGGAKESPGPPLRATDPLARMSGGGAPGGVGVGFPGKPPPGGGDPEPEPEPTGKKSFNPGLKGPGKPQI

SEQ ID NO: 359013 - protein, 113 aa, Zea mays
  Clone ID: MRT4577_90587C.1.pep
MVSLNSGMCFLEIINILIEIYLKKKKKKKKKKKKKKKKKKKKKKKKKKKKKKKGRPVLKEPNLTSPAIQRNTFFLGPPKLNSRAVVKQRRDGKKPGRTQIKSPGKKSPFPQRA

SEQ ID NO: 359014 - protein, 60 aa, Zea mays
  unsure (1)..(60): unsure at all Xaa locations
  Clone ID: MRT4577_90588C.1.pep
CSSGTSQNGWHAYLFQHKGEXTSINQALRYLSISIWWSAILLSDFXCIEXCVDIADDFLL

SEQ ID NO: 359015 - protein, 93 aa, Zea mays
  Clone ID: MRT4577_90589C.1.pep
MAAVDVEYRCFVGGLAWATSNESLENAFASYGEILDSKVITDRETGRSRGFGFVTFSSENSMLDAIENMNGKELDRPYITRNQAQSPCRCRCR

SEQ ID NO: 359016 - protein, 154 aa, Zea mays
  Clone ID: MRT4577_9058C.1.pep
LEAGRAGQRTHLLAFLPIRSPLRNQNPNSPAGKKPKAEKRVPAGKSAAKEGGEGKRGKKKGKKSVETYKIYIFKVLKQVHPDIGISSKAMSIMNSFINDIFEKLAAEAKLARYNKKPTITSREIQTSVRLVLPGELAKHAVSEGTKAVTKFTSA

SEQ ID NO: 359017 - protein, 148 aa, Zea mays
  Clone ID: MRT4577_90590C.1.pep
MDVVELDAARHGCKVCGKSFLSGRSLGGHMRSHISLGEAALEVHAADELTPVSSNGGRGCDGLVAYGLRENPRKTRRLSDFADEKDVGHGVECGKSWRSLFGHIRNHASGDRYHDVDDDEDEEEDEFSVEEGEAEEAEMVRPTEAPVA

SEQ ID NO: 359018 - protein, 111 aa, Zea mays
  Clone ID: MRT4577_90591C.1.pep
LLKMMGNSTKLQTAKLGVWSQNASSKQALYNTVSGGKKKGLKKGLNLYWTNIRSPLLKQWHGKTLIKAIFHFWNPGITLKTKKMLWIKPRGKRSLATNFLPTPPPPKKTQP

SEQ ID NO: 359019 - protein, 49 aa, Zea mays
  Clone ID: MRT4577_90592C.1.pep
HAGLFPFYQQFAGSPAPLLQLQQLLPFVQLGLPDPGASYRRPVCGGALF

SEQ ID NO: 359020 - protein, 76 aa, Zea mays
  Clone ID: MRT4577_90593C.1.pep
LTLPERARWVLDAHTGQLRPCHRWKQIQQVQRIVMTTAVACSTTTVADTDVAVTTRSGNYGYNSWYNTLGSSNDDY

SEQ ID NO: 359021 - protein, 195 aa, Zea mays
  unsure (1)..(195): unsure at all Xaa locations
  Clone ID: MRT4577_90594C.1.pep
TCSSIPPLCPPLSPPSPAGSFTAPPRAAPPVTLSPAQPRAALVSPASPGTTPPVPPSPHSHVRPRCPLRRLARPHWRHPPPHSHXAASTSPASSXPTLSSRYTNPIQTYQRRGHRGAPXLALAPTPPPAYHPVIVHRDPCHIHPMVTPRTAGVLQAPDRLILAAASSPILPPVPTTIHGALVDPQWRCAMQEEYD

SEQ ID NO: 359022 - protein, 120 aa, Zea mays
  Clone ID: MRT4577_90595C.1.pep
MENSGKIVMGRYEVGRLLGKGAFGKVHYAKNLESNRGVAIKILDKEKVLKVGLAEQVRREITTMRLVAHKSIVQLHEVMATRSKIYFVMEYMKGGELFDKVSKAGKLTEGAAHKYFQQLI

SEQ ID NO: 359023 - protein, 204 aa, Zea mays
  Clone ID: MRT4577_90596C.1.pep
RSTVPTFKSYGIVQAHISDCVSETFSAIRTVRSFGGEKRQISMFDNLALSFQNSGTKLGVLKAANESLTRVVVYISLMALYILGGSKVSAGKLSIGTMASFIGYTFTLTFAVQGAVNTLGDLRGTFASIERINSVLSAKDIDDSLAYGLAKELDNKEPEDSNARVHENGTVNTHYMSALKSSSSCSDLAWSGDIHLEDVHFSYP

SEQ ID NO: 359024 - protein, 161 aa, Zea mays
  unsure (1)..(161): unsure at all Xaa locations
  Clone ID: MRT4577_90597C.1.pep
HAVRXSTGAGRRSSQYSSRPQHLFLSPXWXXAPVAITFIPXSEPEPVAELVASVAXCFEKTXCCHGFSTGGEGVCYQAGENQGAXXRGEDRAGVXGATKVHXRSTPKETWAADAGGHRRRARGPGTPRRAHQAEGRPDTGSYPWARKNRRGAKHNRPASTT

SEQ ID NO: 359025 - protein, 80 aa, Zea mays
  Clone ID: MRT4577_90598C.1.pep
YVNCRLGIDEELVELLGHYSPIPVTYAGGVSTMDDLERIKKAGKSRVDVTIGSALDIFGGDLPYKDVVLWHRKQSMVGQV

SEQ ID NO: 359026 - protein, 149 aa, Zea mays
  unsure (1)..(149): unsure at all Xaa locations
  Clone ID: MRT4577_90599C.1.pep
RNIRAQQLQHLELACLEEXCDHQQFFAFKEPVPLRXASHGQXQQMPLNQMXGAAPGQFLPVSQSYSRHFLAYVHAXQVLPFSHLGGVNLAPFMPQPQLLRLXQLDAPNEGSLFQVQLLLPFNHLALSQPAAFFQQPFSGGALVSVCHTL

SEQ ID NO: 359027 - protein, 150 aa, Zea mays
  Clone ID: MRT4577_9059C.1.pep
MAPKAEKKPAAKKPAEEEPAAEKAPAGKKPKAEKRVPAGKSAAKEGGEGKRGKKKGKKSVETYKIYIFKVLKQVHPDIGISSKAMSIMNSFINDIFEKLAAEAAKLARYNKKPTITSREIQTSVRLVLPGELAKHAVSEGTKAVTKFTSA

SEQ ID NO: 359028 - protein, 97 aa, Zea mays
  unsure (1)..(97): unsure at all Xaa locations
  Clone ID: MRT4577_905C.1.pep
THSYAQAFVHSFKLLIVDCVTYPKTCCANSHCGGILSICNYSSIHSVLYCKTHFXQLFNETFSFFKNFTPCGKSSDNGELTMAPSKLSSAFPSTHDK

SEQ ID NO: 359029 - protein, 198 aa, Zea mays
  Clone ID: MRT4577_90600C.1.pep
MKQRLLVVANRLPVSANRRGEDHWSLEISAGGLVSALLGVKDVDAKWIGWAGVNVPDEIGQRALTKALAEKRCIPVFLDEEIVHQYYNGYCNNILWPLFHYLGLPQEDRLATTRNFESQFDAYKRANQMFADVVYEHYQDGDVIWCHDYHLMFLPKCLKDPDINMKVGWFLHTPFPSSEIYRTLPSRLELLRSVLCAD

SEQ ID NO: 359030 - protein, 79 aa, Zea mays
  Clone ID: MRT4577_90601C.1.pep
GTPPPFFSQNWEKKINGQKAHLTTLGRGLFSNHPFGDPNRTLFFLQPLFKLLFFPRPKVLKGGLQLVFLGPAQLLPLKP

SEQ ID NO: 359031 - protein, 131 aa, Zea mays
  Clone ID: MRT4577_90602C.1.pep
RAMAKCPRLLPTPRENPNWRLHHHYRCRSRRRTGEEATSGHERTFLSRPKSTLCRRKKHWITSTGSGGSTTSTLKSSRISPSQEPGYHKPATHLKSVLLKILELVDWLDKVSILCSEVVGVNGRRRPGVGV

SEQ ID NO: 359032 - protein, 55 aa, Zea mays
  Clone ID: MRT4577_90603C.1.pep
IILNWGNKIKRESLERIGIKYGSFKRRDFFYSVLLSKVIFGLFYICLVFIFYLRI

SEQ ID NO: 359033 - protein, 343 aa, Zea mays
  unsure (1)..(343): unsure at all Xaa locations
  Clone ID: MRT4577_90604C.1.pep
HWDLEPAGAGAAVRLLDEAKKITFNLTVWQLVSIEPGPWTESLRREYVKLVDGFFSIPFPFAYLLPFTAYGQALKARKKVAGALREVIRKRMGEEAGTGPGAGRNGEKKDMVEELLEAEGGSFSVEEMVDFCLSLLVAGYETTSVLMTLAVKFLTETPTALAQLKEEHDSIRHRKGKDEQPLQWSDYKSMPFTQCVISETLRVANLISGVFRRANTDIHFKDYVIPKGCRIFASFRAVHLSPEHYENARAFDPWRWQQSKKXSTSSRAGRAAGGQAVFTPFGGGPRLCPGHELARVVVSVFLHRLVTRFSWEEAEEDRVVFFPTTRTLKGYPIILRRRPGWDV

SEQ ID NO: 359034 - protein, 524 aa, Zea mays
  unsure (1)..(524): unsure at all Xaa locations
  Clone ID: MRT4577_90605C.1.pep
MDAGGPPPLFLLGAVLAAALGWLLVVWRAAAGRRRSASARLPPGSTGLPLIGETLRLIAAYKSPNPEPFIDERVARHGSGVFTTHVFGERTVFSADPAFNRLLLAAEGRAVSCSYPSSIATLLGPRSLLLTSGPAHKRLHSLTLTRLGRPASPPLLAHIDRLVLATMRGWDRPGAGAMRLLDEAKKITFNLTVWQLVSIEPGPWTESVRREYVKLVDGFFSIPFPFASLLPFTVYGQALKARKKVAGALREVVRKRMDDKAEDDCGASKKNGEKKDMVEELLEAEGGSFSVEEMVDFCLSLLVAGYETTSVLMTLAVKFLTETPTALAQLKEEHDSIRGVKGKGQALEWSDYKSMPFTQCVSSLDGVRSIPGFLQIAFHLASISIXCSSRHLSPPPEKKKNXEQRAGCAPVPSVQVISETLRVANLISGVFRRANTDIHFKGYVIPKGCKIFASFRAVHLSLDHYENARTFDPWRWQQGKSKLQSAEGASLFTPFGGGPRLCPGYELARVVVSVFLHHLVTRFR

SEQ ID NO: 359035 - protein, 145 aa, Zea mays
  Clone ID: MRT4577_90606C.1.pep
MATARWLQVAAMAVALLAEWATAAAPRKPVDVPFQKNYVPTWAQDHIHYIDGGREVQLYLDKSTGTGFQTRGSYLFGHFSMHMKLVGGDSAGTVTAFYLSSQNSEHDEIDFEFLGNRTGQPYILQTNVFTGGKGVPPECARDRDV

SEQ ID NO: 359036 - protein, 63 aa, Zea mays
  unsure (1)..(63): unsure at all Xaa locations
  Clone ID: MRT4577_90607C.1.pep
ARAVATGFRCXXXCRHNHRSRLGXGSRAALAIATSRRXRGGGSRVLTRLALEEKGSSEKRGGE

SEQ ID NO: 359037 - protein, 68 aa, Zea mays
  Clone ID: MRT4577_90608C.1.pep
IQTRIPEMCHISLSIVAFDLGVLMIMGVLCGKWSSVHIYTHHSTRKDRLKDLRSQQSKLTHIIWVALT

SEQ ID NO: 359038 - protein, 297 aa, Zea mays
  Clone ID: MRT4577_90609C.1.pep
MATARWLQVAAMAVALLAEWATAAAPRKPVDVPFQKNYVPTWAQDHIHYIDGGREVQLYLDKSTGTGFQTRGSYLFGHFSMHMKLVGGDSAGTVTAFYLSSQNSEHDEIDFEFLGNRTGQPYILQTNVFTGGKGDREQRIYLWFDPTKEYHSYSVLWNLYMIAFFVDDVPIRVFKNTSADLGVRYPFSQPMKLYSSLWNADDWATRGGREKTDWSNAPFVASYRGFHVDGCEASAEARFCATQGARWWDQPEFRDLDAAQYRRLADVRRRYTIYNYCTDRDRYGAAVPPECARDRDV

SEQ ID NO: 359039 - protein, 150 aa, Zea mays; identical to SEQ ID NO: 359027
  Clone ID: MRT4577_9060C.1.pep

SEQ ID NO: 359040 - protein, 142 aa, Zea mays
  unsure (1)..(142): unsure at all Xaa locations
  Clone ID: MRT4577_90610C.1.pep
PTRRSSXQHNIQSSLCTNNRQQKRILSCALGPLSMCCYPTHAFTMLTSSYSFYSHYITVTTSVFYVGIPTRSSLHDPTTTRSMHLYHYHHSILQQPTTLLHKFPNAHYHSPTITAHPIRHLALNHREAYCLLPRASSFNQPT

SEQ ID NO: 359041 - protein, 102 aa, Zea mays
  Clone ID: MRT4577_90611C.1.pep
QGSLSRRFHNTTVKIWGPYKTNTSNATRILNLHIKTRAKTREETETWPPPRKHILPHTHYCPRPEFTQRNLPRRFQPKHRTHYRTLKALAGTAGEHLGFGMA

SEQ ID NO: 359042 - protein, 101 aa, Zea mays
  unsure (1)..(101): unsure at all Xaa locations
  Clone ID: MRT4577_90612C.1.pep
GRGWGRTGLGXGTSKRHWKAPRNNIQGTSKPSRRMLSTRGGHKHSTGLTYXETPGRLKNCLEKVRQETMTYTXHPRSQTVTGIDMTYCPKXKGRTLYGFRC

SEQ ID NO: 359043 - protein, 143 aa, Zea mays
  unsure (1)..(143): unsure at all Xaa locations
  Clone ID: MRT4577_90613C.1.pep
PSRRIRWPSATAPPHRRWPSSPSPAXGPRGAPAPXARPQPATATASSSAAPRTCPRRRPLSPTTTTTPPPRPLPPPRSPSPSPATAPSPTPHPSPTPSAASNPTPPPPPPPPQPPSASSPPDDAPRSAPPCERPSSPTPSPQT

SEQ ID NO: 359044 - protein, 96 aa, Zea mays
  unsure (1)..(96): unsure at all Xaa locations
  Clone ID: MRT4577_90614C.1.pep
QAANFKQVXEGREXAPKPLNRGISEFVVMAGDPKPFEILLPLPLLVEDKNVPYVFVPLKQAFGRAFGVTKPVFACSVPRNXGSPLKLQIQGFKDSL

SEQ ID NO: 359045 - protein, 91 aa, Zea mays
  Clone ID: MRT4577_90615C.1.pep
SLCTVLKVPIIVDSLKQTILKEHEAASKASYGVLAILSSAGATCRSRSVSNTVIIITMLICLGLVHAIFLIELTMLAPPTILVNFNEFICE

SEQ ID NO: 359046 - protein, 87 aa, Zea mays
  unsure (1)..(87): unsure at all Xaa locations
  Clone ID: MRT4577_90616C.1.pep
VVGEKKSPFLQKPIPLKISPKSGARIWLAEGYGRDPQLKLPALKKKKKKKKKKKKKQKKKXXQKRKKKKKKKKKKKKKKRAAASDLE

SEQ ID NO: 359047 - protein, 239 aa, Zea mays
  Clone ID: MRT4577_90617C.1.pep
NIIIDERGSLAVFSPIRGRVASLLKPSKTPPRVAMTGDVLRLKDSKVPIIADSLKQTILKEHEAASKASYGVSAILSSAGATCRSRSEGLLSLLSEESSYNILKFDIGSCVYIDFNGSSHNIELDSFEAPKADLLMPFSAKLVDGINQNDSRRRALVMFCFAYFNVIARSAVMLSIDHHGFDVLAKVPQGDILTNPQYHWKEFRFTFKEPAKDAEDFCRMLVGLEEEGLQTVKSCSGYG

SEQ ID NO: 359048 - protein, 44 aa, Zea mays
  Clone ID: MRT4577_90618C.1.pep
QISIPCTLDPDNHNNPNLNDLNRIHCTANLLPSFGIIPDPIPYI

SEQ ID NO: 359049 - protein, 96 aa, Zea mays
  unsure (1)..(96): unsure at all Xaa locations
  Clone ID: MRT4577_90619C.1.pep
MAGNIFFFLALLALFASSTNSFIISQCSLASSFIITQFFLPVTLMGFXHPAVQAYMLQQAIAASVLQQPIFHLQQQSFAHLTLHTIVSHLLLQFLP

SEQ ID NO: 359050 - protein, 60 aa, Zea mays
  Clone ID: MRT4577_9061C.1.pep
LKQTGKKKSTTTLTSSCSNSPSMPRNTFYLGLLTFNLISRRSTTSITGKSLLLPTLFAFL

SEQ ID NO: 359051 - protein, 74 aa, Zea mays
  unsure (1)..(74): unsure at all Xaa locations
  Clone ID: MRT4577_90620C.1.pep
MGAKIFALLALLALSASAATFTFIPQCSQQYLSPATAVXFQYPTIQSFMDQDAIHSLILRXSLELTLQHPYALL

SEQ ID NO: 359052 - protein, 76 aa, Zea mays
  Clone ID: MRT4577_90621C.1.pep
SGSEAAYGGVIEVTGGVMPRRAMDRGMVQEVADRKKVSLLTKDGWAGGGQKCNKIAFIMLSFQNSGVDANGLTRAT

SEQ ID NO: 359053 - protein, 36 aa, Zea mays
  Clone ID: MRT4577_90622C.1.pep
PVCYHSEELFHLIDQGEVHGGGRLVLQSRVFTLGFR

SEQ ID NO: 359054 - protein, 120 aa, Zea mays
  Clone ID: MRT4577_90623C.1.pep
ALLLLYGTEATHAAVPNNIAVPGQQRRAGYHNRTPHDRRWHNDAPKHASQIKDTRLYKRGNQTPARSSDPRHSNPPWRVPSNTNWKPRRHSPTTQKCTPGGQGPPRTDTPALHHQPHHGS

SEQ ID NO: 359055 - protein, 96 aa, Zea mays
  unsure (1)..(96): unsure at all Xaa locations
  Clone ID: MRT4577_90624C.1.pep
QHIAECMAKMPQMIVNWQQQQRENWEKAQADKERTARLQADAQELLGYQVDPRSARFQELLQDLEKKERKRLKDEKQKRKKEARXAALAAAVAQDP

SEQ ID NO: 359056 - protein, 77 aa, Zea mays
  Clone ID: MRT4577_90625C.1.pep
SGRPPYFTAKTFGTKEKIKHAPPHFELLFVRSKVLDLNSHDGSRSVTCHFFFRQGDPLSPNGTLFFFPKSHPGRVSL

SEQ ID NO: 359057 - protein, 83 aa, Zea mays
  Clone ID: MRT4577_90626C.1.pep
WGGKQKPPPQEKKKEQGGYYYPFNRAGKGYPTQMYPPCCPGTPGPRIGRVRLSKAREYPPGFPIMCRLSEPPEWSIFSGGDQY

SEQ ID NO: 359058 - protein, 191 aa, Zea mays
  Clone ID: MRT4577_90627C.1.pep
AERWTAAQLLEHPFVAAPCHGHGDHEVPRVSPKSTLDAAFWEAEDDDDDADEAVLASASERIKSLACSACALPDWDGEDGWIDALGDQQRVEVCGAVQVARSAPGKVSSVLAVPAGEMDVGGGGGLPCDELEAEDVSFGGEVPGAADASAERQKKRYLILRSHYCHVLSCQLVPCNLPLVVVNNAIKLWVP

SEQ ID NO: 359059 - protein, 53 aa, Zea mays
  Clone ID: MRT4577_90628C.1.pep
IGYLEAGRDFSFSYLVPTRRDVRSWHEISHRCLLLPICYLPTTSWQTSTMQMS

SEQ ID NO: 359060 - protein, 33 aa, Zea mays
  Clone ID: MRT4577_90629C.1.pep
LAFQAYELSLGRTNLSAWAPHGGDPGTAWAPRD

SEQ ID NO: 359061 - protein, 208 aa, Zea mays
  Clone ID: MRT4577_9062C.1.pep
FHGASAELLSLADPWCSSLAHVLPPAEPLPSALGAGVLCPHLIPRRRPLPSVLCWSASSPCPTFLAPWPPRLGSPAPLRRSAHLPAAALPWRVPASCFSSLCHLPWRPSPNAELPTRSRPRWLNSPSFLFYRSSSPIRRPHLKPVQPLYSPLSSIPLLLEHGELTPCASRVRHSLSSTSLHGCHVADLCSSYLSGKSQDLVEKKHSSI

SEQ ID NO: 359062 - protein, 163 aa, Zea mays
  Clone ID: MRT4577_90630C.1.pep
VKINEGSQTDWTADYYEASSSPVQGQGQEAMPLVSNSTGKGKMHGSSNSTVVQLHPEDAITYTLTDGSILYAHPDSRIEELGILNTRGWPHVVFDVSSQETSFHIPLHRMLSLLLRKAMKKCFGEDGHSDVQSNEFFPQILRSCEPYGFASIVMEHPLRVRVF

SEQ ID NO: 359063 - protein, 44 aa, Zea mays
  Clone ID: MRT4577_90631C.1.pep
FWYFILYIHLLIKLHIKFILIYIFFLSIFYLFIFYFFIYFFFIY

SEQ ID NO: 359064 - protein, 114 aa, Zea mays
  unsure (1)..(114): unsure at all Xaa locations
  Clone ID: MRT4577_90632C.1.pep
LLPPRRTPWPSRQSTVQRRRRXPXRAXMMRNTGAQVAPIVKLEEVAVTTGEDDDDGAPGHEXEXLXVRQGXXXVXRARHRHVKLLXHKDXAKSARHASSEELKIXAXHLVXAXX

SEQ ID NO: 359065 - protein, 43 aa, Zea mays
  Clone ID: MRT4577_90633C.1.pep
PTPSEESNFLFLVGHIHHPKIFIIAFSLNQLSKRGHHLMMCCW

SEQ ID NO: 359066 - protein, 36 aa, Zea mays
  Clone ID: MRT4577_90634C.1.pep
QAAQNAAIIRSFVKIHVLFMYHKSTCAAAFSHYWNS

SEQ ID NO: 359067 - protein, 51 aa, Zea mays
  Clone ID: MRT4577_90635C.1.pep
HTSLLQRDLIIKHCNMRRRISVIKSMPSFAEIWTAGVRCLDYQNALPNTNS

SEQ ID NO: 359068 - protein, 59 aa, Zea mays
  Clone ID: MRT4577_90636C.1.pep
LLCWILLLTSPRVHYTHVYKTQNLLPPYLMTIYNGWNKIQPGLPKPRLFTVCRFVCYHS

SEQ ID NO: 359069 - protein, 292 aa, Zea mays
  unsure (1)..(292): unsure at all Xaa locations
  Clone ID: MRT4577_90637C.1.pep
RSKLPGRPSVFXKIYKAMLRGGKEVAVKXLSKGSTQGVEEFRNEVVLIAKLQHRNLVRLLDCCIHKDEKLLILEYLPNKSLDAFLFDATRKSLLDWPSRFKIIKGVARGLLYLHQDSRLTIIHRDLKASNILLDTEMSPKISDFGMARIFGGNEQHANTTRVVGTYGYMSPEYAMEGSFSVKSDTYSFGVLLLEIVSGLKIGSPHLIMDYPNLIAYAWSLWEGGNARELVDSSVLVSCPLQEAVRCIHLXLLCVQDSPNARPLVSSIVFMLENETAPVPTPKKPVYFTSRNL

SEQ ID NO: 359070 - protein, 87 aa, Zea mays
  unsure (1)..(87): unsure at all Xaa locations
  Clone ID: MRT4577_90638C.1.pep
CPXCCPPPWFGPWGPCSPRLFFGLSXFCCSRLGLGPLFRGLALALGSLPGPFWFXVLFPXXFVSLPLLPPXPPIGPSCXFFFFFKXX

SEQ ID NO: 359071 - protein, 129 aa, Zea mays
  unsure (1)..(129): unsure at all Xaa locations
  Clone ID: MRT4577_90639C.1.pep
SATLTHTSGGCGXHPPPAVHIPPSVXHVPPXVDLPPPVHVPPPVHLHAAVHLPPTVHVPAAGHMPPPPCHYPTQPTRTXAYSQTHPCPCQQTNPSPCQLHGTCGVGSTPILGQCVEFLRHQCNPTATPY

SEQ ID NO: 359072 - protein, 55 aa, Zea mays
  Clone ID: MRT4577_9063C.1.pep
GSLKGASMLRSVDQKYMVALWFGWRASSLAAERIVLHIDVWCVIQSIIINASTGG

SEQ ID NO: 359073 - protein, 209 aa, Zea mays
  unsure (1)..(209): unsure at all Xaa locations
  Clone ID: MRT4577_90640C.1.pep
GTFGEILYLRRPSSPVSKNKKSTTLKIVLPVMAGLILLITCTWLVFKPKDKHKSKKSQYTLQHSDASNRFENENLEFPSIALEDIIVATNDFSDFNMLGKGGFGKVYKVNKSFSLIVSXRNIVALIWINRQTVSSXAMLEGGKEVAVKRLSKGSTQGVEEFRNEVVLIAKLQHRNLVRLLDCCIHKDEKLLIYEYLPNKSLDAFLXGTF

SEQ ID NO: 359074 - protein, 836 aa, Zea mays
  unsure (1)..(836): unsure at all Xaa locations
  Clone ID: MRT4577_90641C.1.pep
MAMAYLPVFVFLFMVVLCQSDDRLTPAKPLLPNEVLISGGGVFALGFFSLKNSSRFYVGIWYNNIPERTYVWIANRDNPITTNVPGKLVFTNSSDLVLLDSTGRTIWTTTNNYTAGGGGETASILLDSGNLVIRLPNGTDIWESFSYPTDTIVPNVNFSLNVASSATLLVAWKGPDDPSSSDFSMGGDPSSGLQIIVWNGTQPYWRRAAWGGELVHGIFQNNTSFMMYQTVVDTGDGYYMQLTVPDGSPSIRLTLDYTGMSTFRRWNNNTSSWKIFSQFPYPSCDRYASCGPFGYCDDTVPVPACKCLDGFEPNGLDSSKGCRRKDELKCGDGDSFFTLPSMKTPDKFLYIKNRSLDQCAAECRDNCSCTAYAYANLQNVDTTIDTTRCLVWMGELIDAEKFGNTFGEILYLRRPSSPVSKNKKSTTLKIVLPVMAGLILLITCTWLVFKPKDKHKSKKSQYTLQHSDASNRFENENLEFPSIALEDIIVATNDFSDFNMLGKGGFGKVYKAMLEGGKEVAVKRLSKGSTQGVEEFRNEVVLIAKLQHRNLVRLLDCCIHKDEKLLIYEYLPNKSLDAFLFXVLTSFHILRNNFRLTEIVTHNTFXDATRKSLLDWPSRFKIIKGVARGLLYLHQDSRLTIIHRDLKASNILLDTEMSPKISDFGMARIFGGNEQHANTTRVVGTYGYMSPEYAMEGSFSVKSDTYSFGVLLLEIVSGLKIGSPHLIMDYPNLIAYAWSLWEGGNARELVDSSVLVSCPLQEAVRCIHLGLLCVQDSPNARPLMSSIVFMLENETAPVPTPKRPVYFTTRNYETNQSDQYMRRSLNNMSITTLEGR

SEQ ID NO: 359075 - protein, 195 aa, Zea mays
  Clone ID: MRT4577_90642C.1.pep
MGDLKEVFRSLQELFPEVDHRILKAIAIEHRKDVDSAVVTVLDEVMPFMTGSAGVDGSVGNLSSMDGSVGNLFGNHSTHEVGSSSSVWRDICINEIDASVYSVQYTSYGDVKTGKQENINNTYVGRLASIEGVNEQLNLHSYPIPNGGQHDLLPNLDVLSSNTDPEKTLANTDNEVGYSGLFSECFSQPPTGRWW

SEQ ID NO: 359076 - protein, 51 aa, Zea mays
  Clone ID: MRT4577_90643C.1.pep
KKKKINKKKKKKKKKKKKKKGKKRTVFHKKSLCLFNFAYLISMVLYWFTLF

SEQ ID NO: 359077 - protein, 206 aa, Zea mays
  Clone ID: MRT4577_90644C.1.pep
DTSSVALAWFFWLLGKNPGVEAKILEEVEGIVAARKGAGEVVEEEEELVFRPEEVKRMEYLHAALSEALRLYPSVPVDHKEVVEDEVFPDGTVLKKGTKVIYAMYSMGRMESIWGDDCREYKPERWLRDGRFVGESAYKFTAFNGGPRLCLGKDFAYYQMKFTAASILRRYRVRVVEGHPVAPKMALTMYMKHGLKVTLTKRGKAN

SEQ ID NO: 359078 - protein, 79 aa, Zea mays
  Clone ID: MRT4577_90645C.1.pep
LGAQENPFKKKKRVGFFFWEKKKTPAAFLFQCWPGPNKLRVVLAQKLPRCFFCGSPKTKKTWFFFFNPHKFTQVVGAPG

SEQ ID NO: 359079 - protein, 80 aa, Zea mays
  Clone ID: MRT4577_90646C.1.pep
CNGLFMPPLVDIRGVRARLGRSFYLVADVVLPLQIIPIAQHKMLSGLSWPTVGPRCSEYGCTQRPWELDLEVTSAPQLRG

SEQ ID NO: 359080 - protein, 125 aa, Zea mays
  Clone ID: MRT4577_90647C.1.pep
GGFGQFPRELKNLTGGARRPKLPCSPPYCFPKPKGLISVGPVGGAPPVFLIPRPFCASCKSCFNPGFQKTKASTRMACGPMNPVTPVRICFKLTLRKKWGFLVLQNVCAPTTHPFKGKKKKKKRT

SEQ ID NO: 359081 - protein, 232 aa, Zea mays
  Clone ID: MRT4577_90648C.1.pep
MITQSDFGKPRAVAVTALFSIQTLTGTCQREYESRAAVNTVVLHPNQKELISGDQNGNIRVWDLAANSCSCELVPEVDTAVRSLTVMWDGSMVVAANNRGTCYVWRLLKGTQTITCFEPLHKLQAHDGYILKCLLSPEFCDPNRYLATASSDRTVKIWNVDGFKLERTLVGHQRWVWDCVFSVDGAYLITASSDTTARLWTMSTGEAIRVYQGHHKATVCCALHDGAESAPS

SEQ ID NO: 359082 - protein, 316 aa, Zea mays
  Clone ID: MRT4577_90649C.1.pep
MAQPSVILATASYDHTIRFWEAKSGRCYRTIQYPDSQVNRLEITPDKRFLAAAGNPHIRLFDVNSNSPQPVISYDSHTSNVMAVGFHCDGNWMYSGSEDGTVRIWDLRTGTCQREYESRAAVNTVVLHPNQKELISGDQNGNIRVWDLAANSCSCELVPEVDTAVRSLTVMWDGSMVVAANNRGTCYVWRLLKGTQTITCFEPLHKLQAHDGYILKCLLSPEFCDPNRYLATASSDRTVKIWNVDGFKLERTLVGHQRWVWDCVFSVDGAYLITASSDTTARLWTMSTGEAIRVYQGHHKATVCCALHDGAESAPS

SEQ ID NO: 359083 - protein, 105 aa, Zea mays
  Clone ID: MRT4577_9064C.1.pep
TKIPEGRRGGWFKTFMGGGKHFLHNKENNKFATTRGVYKQKPEVYKGGTRVKGDFLVKDPTTMGGSISERPYGYRFFSLGGGARHQKMPQRSIKGGTEHLGPGHK

SEQ ID NO: 359084 - protein, 92 aa, Zea mays
  Clone ID: MRT4577_90650C.1.pep
MERHGMSARRLPAMLLAMLLLLATELASFGCCGHRIPRADVAAWRHGREATTTTMAGARATPPSPTKADLDTEAALGESKRMVPQGSNPLHN

SEQ ID NO: 359085 - protein, 66 aa, Zea mays
  Clone ID: MRT4577_90651C.1.pep
PIQQYVPFNFQDSKLFPITDRTWPIYYYTNLIKANDFKNHLDGYHQRFPSPPIVNKRPVKSIYVLL

SEQ ID NO: 359086 - protein, 56 aa, Zea mays
  Clone ID: MRT4577_90652C.1.pep
CMNASLLEHHIFTYMPWKLYKLADCARFRYNTRLGSHSIHHRTPFHPISLSTTAPI

SEQ ID NO: 359087 - protein, 394 aa, Zea mays
  Clone ID: MRT4577_90653C.1.pep
AIAAVADQGGAWLTVPAGRGLTAPFNEHPDEGFDPKAVPAILGIQDERYWPLMSPLPSYGYGREHKGPRYGSLIHGQDLKHVTITGHNGTINGQGQSWWVKFRRKLLNHTRGPLVQLMRSSNIIISNITLRDSPFWTLHTYDCKNVTISETTILAPIAGAPNTDGIDPDSCENVVIKNCYISVGDDGIAIKSGWDQYGIAYGRPSANITIQNVVIRSMVSAGVSIGSEMSGGVSDVLVENVHVWDSRRGVRIKTAPGRGAYVTNVMYQNITFENVRVGIVIKTDYNEHPDEGFDPKAVPTIGNISYTSIHGHRVRVPVRIQGSAQIPVKNVTFHDMSIGIVDKKHHVFQCSFVQGQVIGYVFPVPCKNLDLYDERRGLVKQSTLQNISDIDYSF

SEQ ID NO: 359088 - protein, 137 aa, Zea mays
  unsure (1)..(137): unsure at all Xaa locations
  Clone ID: MRT4577_90654C.1.pep
AESPRXRSACGPPESGTPAGSPNVPSVPQLLETFGXPMMNGIFLFSCGTSPPPPPKKNXXXXVXFXCPPPHTTXXXXXXXKRGIENVPFAVHAXXXPPASLLLAVPSXLLITLPGDHDTRSGXSAPPLPRGPFPLCV

SEQ ID NO: 359089 - protein, 60 aa, Zea mays
  Clone ID: MRT4577_90655C.1.pep
ALSRQHELMVANASVVVTHSFWPCPDERASSASFTAVDQFLMNLFQDSVPLNTALTGLHL

SEQ ID NO: 359090 - protein, 97 aa, Zea mays
  Clone ID: MRT4577_90656C.1.pep
MHEGKEEGEMVKHNNVIPNGHFKKDWQNYGTTWLNQTARKQRRRIARQKKGVKIFPRTTDAPLRPIVQCQTLKDNIKTRTETGSTPEDLKAGGIPKQ

SEQ ID NO: 359091 - protein, 71 aa, Zea mays
  unsure (1)..(71): unsure at all Xaa locations
  Clone ID: MRT4577_90657C.1.pep
RADPRILLHLIPHTSSFLPNKPTICIRSYQIPLSLHKYIYSHTYIAYKTITFSSTHNTYLXXYTQHTTHLS

SEQ ID NO: 359092 - protein, 63 aa, Zea mays
  Clone ID: MRT4577_90658C.1.pep
VSSDIRLYYCVTYPSSVTPLPCTVTANSIPSSATSAESEKRWQAWVDRAGYTACDLRHDVLLR

SEQ ID NO: 359093 - protein, 126 aa, Zea mays
  unsure (1)..(126): unsure at all Xaa locations
  Clone ID: MRT4577_90659C.1.pep
QRMPLERYIGADNMREHPLQQLVLLNLRAYCXSGKKVALIPLAGWNYGCYLRQQQLPLRQLPVAYPHGLLCFSQVAECYSPGYXGGANLLPLQXLVGVCTXTLLTHQQGAARFXHTVPNAGTLLEL

SEQ ID NO: 359094 - protein, 60 aa, Zea mays
  unsure (1)..(60): unsure at all Xaa locations
  Clone ID: MRT4577_9065C.1.pep
KXSPPPPRVRQLTTLNQSQPGTKEKPGPMGTNDPQAGARSTDXDKXPPXLFLKKKKKKQK

SEQ ID NO: 359095 - protein, 115 aa, Zea mays
  unsure (1)..(115): unsure at all Xaa locations
  Clone ID: MRT4577_90660C.1.pep
KWXTXFADTIIETGXGFIKYVGGDVKTPRGLRTLNSVWAQHLSEEARRRLYKNWCESKKKALTKYALKYENDAGKKXEIHLQLEKMNKYADDIRDXAHTQIRKMNGLXXXKAHLM

SEQ ID NO: 359096 - protein, 40 aa, Zea mays
  Clone ID: MRT4577_90661C.1.pep
KKHISISILISLCSSVPLLCLEIYISLFPSSYMYPDSLIF

SEQ ID NO: 359097 - protein, 131 aa, Zea mays
  Clone ID: MRT4577_90662C.1.pep
FMTGNNLGRGLGRDGGVITNTKSPTNTNRARGQATYTGHVPTGWARTRRLQEHRLEKNVLPPHHARTSYWVTNREGLYLSTMGGGLSGCLDPGIDTDGRCAGSGADQMHTHARARHSWTGGEEPGATGWST

SEQ ID NO: 359098 - protein, 105 aa, Zea mays
  unsure (1)..(105): unsure at all Xaa locations
  Clone ID: MRT4577_90663C.1.pep
MNERGGSRAAVDERYAQWKSLIPVLYDWVANHNLVWPSLCCRRGPQFEQATYKNRQRLYLSEQTDGSVADTLFIANCEVVKPRVXAAVEHISQFIEEARSPFVKK

SEQ ID NO: 359099 - protein, 81 aa, Zea mays
  Clone ID: MRT4577_90664C.1.pep
AVVTTQSTRDSRTNQLMCAHILQIKKPIAIKGKEVTSAKFIMPKQWILAGCSSGLVYVSRYDPEKKKKKKKKKVLCVVTTA

SEQ ID NO: 359100 - protein, 52 aa, Zea mays
  unsure (1)..(52): unsure at all Xaa locations
  Clone ID: MRT4577_90665C.1.pep
HLTFASYPNTSVIMCQNLNEXRHMSHLIFILCAKMMQTTRNHAIVXADEHXA

SEQ ID NO: 359101 - protein, 96 aa, Zea mays
  Clone ID: MRT4577_90666C.1.pep
AVLVLPRRRQRPFPSGKNGIGGPFLRTLLVALAVLASAVIAQSFYNKLSALIAGNFSGLACAPVLNNFLLRYAHDKDNVLRVVLSTMYSTGWVGMG

SEQ ID NO: 359102 - protein, 136 aa, Zea mays
  Clone ID: MRT4577_90668C.1.pep
MACRGFFECVLKLFNLVLMAVGLAMAGYGAYLLVLWLQLLPPSPPAPPPSGDLVRLGRPMLLLIDVSISDGTSEKLISAWFIFAFIGVGVILFITSIFGCAGASTRSGCCLSTYSFLIILFILVELAAGCFIFFDH

SEQ ID NO: 359103 - protein, 88 aa, Zea mays
  Clone ID: MRT4577_90669C.1.pep
LSLSVNGLEQEDAILQQGHAFLVWYTFVLAANFAMSACPMTRARRCHPSAGSCIFCLLYFCPRCQFRHVQMSHEPDLQLITSFKCQLK

SEQ ID NO: 359104 - protein, 54 aa, Zea mays
  unsure (1)..(54): unsure at all Xaa locations
  Clone ID: MRT4577_9066C.1.pep
RPKDQHAPVGRELRRPAAARPAGGLSQWHXPLGRERPNVGLGGRLAEAPVACLD

SEQ ID NO: 359105 - protein, 114 aa, Zea mays
  Clone ID: MRT4577_90670C.1.pep
MKICQLQLTATRFSKQNNSGEDDELLSELKDKWDAMENKSSLALYGAGAILAVWISLVVVRSLDSVPLLPGILELVGLSYSGWFVYRYLLFQENRKELAGVIDDIKRRIVGDDE

SEQ ID NO: 359106 - protein, 117 aa, Zea mays
  Clone ID: MRT4577_90671C.1.pep
LLMGVEKSSWNLCGGGKVRRRGRLSGRRAKERGGERRGGGRTPAAPPPQRLPSRRRCGQTPKQAHGIKLANRAARGASSPVTAAAASPPAGEAAPARRRRHQLMTAVRSRMNEPDRG

SEQ ID NO: 359107 - protein, 50 aa, Zea mays
  Clone ID: MRT4577_90672C.1.pep
DVSSSLVSPSPQPLGFVPSGFSAAAERRGMAHRLLRDTQADWWERSHFPI

SEQ ID NO: 359108 - protein, 157 aa, Zea mays
  Clone ID: MRT4577_90673C.1.pep
MVAAAAAVRPVSFRRLGVLLRAPLPCGLTTSRVAAPFPRRTDSMKICQLQLTATRFSKQNNSGEDDELLSELKDKWDAMENKSSLALYGAGAILAVWISLVVVRSLDSVPLLPGILELVGLSYSGWFVYRYLLFQENRKELAGVIDDIKRRIVGDDE

SEQ ID NO: 359109 - protein, 85 aa, Zea mays
  unsure (1)..(85): unsure at all Xaa locations
  Clone ID: MRT4577_90674C.1.pep
MSRHPITNWAQRSHRVVFTIELPYTQHANLNLKPESHFNFSATGSNXTCTKIXDIELNNATNVEESKTTIAPRTHTYPEKKANTQ

SEQ ID NO: 359110 - protein, 159 aa, Zea mays
  unsure (1)..(159): unsure at all Xaa locations
  Clone ID: MRT4577_90675C.1.pep
MVAAAAAVRPVSFRRLGVLLRAPLPCGLTTSRVAAPFPRRTADSMKICQLQLTATRFSKQNNSGEDDELLSELKDKWDAMENKSSLALYGAGAILAVWISLVVVRSLDSVPLLPGILELVGXLSYSGWFVXRYLLFQENRKELAGXTDDIKRRIVGDDE

SEQ ID NO: 359111 - protein, 419 aa, Zea mays
  unsure (1)..(419): unsure at all Xaa locations
  Clone ID: MRT4577_90676C.1.pep
GHDHQDQEEHAPPRYLKLDYPKFDGSEDPLPWLNRXDQFFHGQGRPEEKKVWLASYHMTGTAQLWYYRLKMIAGEPSLQHFVQLVLHRFGPTLTKTPLSELXCCTVLFSKNAGELRLIILRRKGSKKELLHRTGSMDEYQGKFLTLXLPRYRAHVXSQRIQLFITGLGEPLKTDVAVQHPTNLEXTVTLAGVYERRQAVAGGAGRPQIWAPLAATSLAQAPLLSSLTIGGSPMTXMPSKMQHQRPQGLYFNCDEKYAPGHHCKXLFVLEVVPDQDIPPVGEVLALTVDDMPAISLHALIGXAVHGIQTMKVHVHIMGCRLTALLDSGSTHSFINHKVGQELQLPLQQCSRLCVAFQQQCLLQSAXIDIGGEAFTVDCFALDLGGYDMILGVQWLGTLGPILLDFHHQTLYFWREACQVI

SEQ ID NO: 359112 - protein, 249 aa, Zea mays
  Clone ID: MRT4577_90677C.1.pep
MEESPSPFQDGSTSQTPPIETPTVDTAATGRQVATPPRPAQVKVMEEKAVSSLPKPSTEQRRSRRVLVRPSLERIEEPQADAATPVVDGSAVQEKGGTSTERGSTVVQEKGGPSLERETSGSVSVLPSGRKRLMPSSQMRDDASHGEANDANPPSKKPKEDSVQSSSELKTDQSAPEDVTTEAPVVISIDNQDVQQQPGEEMNTDQASMPVEEVEDIKDDEAGKMMTWKDIQVHWTSKGRMLKLIWTVM

SEQ ID NO: 359113 - protein, 98 aa, Zea mays
  unsure (1)..(98): unsure at all Xaa locations
  Clone ID: MRT4577_90678C.1.pep
MGEQGARGRGNGLKGKRQRGKGERGTRERRGEGPGPLTGAKAGGGSGPGKWKNERPKGEPGPRKIEGPGDRQGEGKNAXQGQGGPPDKGPSFFFFFFF

SEQ ID NO: 359114 - protein, 87 aa, Zea mays
  Clone ID: MRT4577_90679C.1.pep
APQNVAQPRTRPVTHRHRQRWRAREQQHGGVPASAGLARRRRGAPERGVAVVGTVASRGGLEAAGARVLRLASANSADRSRSPSAAR

SEQ ID NO: 359115 - protein, 79 aa, Zea mays
  Clone ID: MRT4577_9067C.1.pep
SSTLTTRSTSSARSTRRPRWRYMSSRALMVKMGALEVKTGYEARSGNAAPSTTGTKPPNACARWLHCSEEILVRHTTCS

SEQ ID NO: 359116 - protein, 111 aa, Zea mays
  unsure (1)..(111): unsure at all Xaa locations
  Clone ID: MRT4577_90680C.1.pep
LNMHLHVIFIRTVQVRKDVAKSSRTIPPQQMQSFTFCDTMCMNSXDTIGAVQRHFTITDTVTVNIKLHVAVQDFDSCDRLFTQDGVPNPMHXFVQELTHIFNNCMGLANLL

SEQ ID NO: 359117 - protein, 250 aa, Zea mays
  unsure (1)..(250): unsure at all Xaa locations
  Clone ID: MRT4577_90681C.1.pep
MDPGSAEIVFDCDFFRIYSDGRVERFAGMETVPAGFDADTGVTSKDVVVDAATGIATRLYLPAIPTAPSSPQSDGNGNGSATAKLPILVIFHGGGFVIGSPADPGFHRYMNSLVASARVVAVSVGYRLAPENPLPAAYEDSWTALNWAVSGADPWLSAHGDLGRVFVAGYSAGSNIAHNMAVAAGVRGLRAAEPPRVEGVILLHPSFAGEQRMEEEXQILAVNNKRWEGIFPGARDGLDDRRNHPVVAGA

SEQ ID NO: 359118 - protein, 70 aa, Zea mays
  unsure (1)..(70): unsure at all Xaa locations
  Clone ID: MRT4577_90682C.1.pep
VIVKPDGYVLVLKSGSAFGVSCTCDGWYLMNRGLPALLYLVPSTLRIIVLLGSRSLXLRQVWNANVYADC

SEQ ID NO: 359119 - protein, 67 aa, Zea mays
  Clone ID: MRT4577_90683C.1.pep
RYGAVLFSCGGSTAAYVDYLRSSCWLVHPTSNESLNNACLLYAEILNSKVITAHETRRHLKYQLITF

SEQ ID NO: 359120 - protein, 184 aa, Zea mays
  unsure (1)..(184): unsure at all Xaa locations
  Clone ID: MRT4577_90684C.1.pep
TGPPTTSKPPPTAFGVLGEEAIRAIFRLLSPADLLRAALVCHRWRRVAARCLPSTPPXACPPLLGYFFHPTSAPPRPPIPDPKIIFPVVFAPLDASSPRLSLDFARDVSRLKLVDSHQGLLVFQQIRPVPAGVLPRLLVLDPXLPPPPRDMLPENRRSVHYVRPALLSRAHPSRLCFEVVCLAI

SEQ ID NO: 359121 - protein, 244 aa, Zea mays
  Clone ID: MRT4577_90685C.1.pep
IGYLAGREAGALIYEFMPNGSLDTWLHHKGDNEAVKRLGLTQRISIAVNIADALDYLHHDCGRPTVHCDLKPSNILLDDDMNALLGDFGIARFYHDPESKWAGSISSIGVKGTIGYIPPEYGGGGLVSTSGDVYSFGILLLEILTCKRPTDPLFKDDQDIISFVENNFPDHVFQVIDSHLLEECRSSIQGNNSIHENEINQCLVDLLQLALSCLRSLPSERSNMKQVASRMHAIQTSYLRWKKK

SEQ ID NO: 359122 - protein, 145 aa, Zea mays
  unsure (1)..(145): unsure at all Xaa locations
  Clone ID: MRT4577_90686C.1.pep
FGSWSGCSWGLLGPLGRSPPGFGGGGHASTSGDVYSFGIVLLEILTSRSPIDPTFKDGXGIINFVENNFPNQVFQVIDSHLLEECRNSTQGNNLVPENEIYQCLVDLLQLALSCLRSLPSERSNMKQVASRMHAIQTSYLRWKKK

SEQ ID NO: 359123 - protein, 479 aa, Zea mays
  Clone ID: MRT4577_90687C.1.pep
MLGQLEQIQTIQMDQNILTGNIPPIFSRLYSLNLLNLSHNNLSGPMPTFLSGLNLSKLDLSYNNFQGQIPRTGVFNNPTIVSLDGNPELCGGAMDLHMPPCHDTSKRVGRSNLLIKILIPIFGFMSLVLLAYFLLLEKRTSRRESRLELSYCEHFETVTYNDLAQATRDFSESNLIGRGSYGSVYRGKLKESKIEVAVKVFDLKMRGAERSFLSECEALRSIQHRNLLPIITACSTVDNVGNVFKALIYEFMPNGSLDAWLHHKGDEETAKCLGLTQRISIAINIADALDYLHHDCGRPTVHCDLKPSNILLDDDMNALLGDFGISRFYHDSQSKWAGSISSIGVKGTIGYIPPEYGGGGHASTSGDVYSFGIVLLEILTSKRPTDPLFKDGQDIISCVENNFPDHVFQVIDSHLLEECRSSIQGNNSIHENEINQCLVDLLQVGLSCLRSLPSERSNMKQVASRMHAIQTSHIGWKHK

SEQ ID NO: 359124 - protein, 84 aa, Zea mays
  unsure (1)..(84): unsure at all Xaa locations
  Clone ID: MRT4577_90688C.1.pep
LAXYTXXRXXTLISLRASTRVSSARXXQHSSPSLGSRQRAXTRPLHRXSXSAXXXPVXASXSXXSXASQVSEXXRLAHMXDSXX

SEQ ID NO: 359125 - protein, 102 aa, Zea mays
  Clone ID: MRT4577_90689C.1.pep
MAADGGPATSALEEALKPFQERASEAEIRIAKLEALLYNKDGPSGGSEATSSAVKDLQSKLDVVTAECLTEKEKNKKLTMENEKLQYRMTHLIRAIKEAESR

SEQ ID NO: 359126 - protein, 78 aa, Zea mays
  Clone ID: MRT4577_9068C.1.pep
DCRIRGSEQEAENKAKTRKPPPQENGQQKADKRLAKINTNNEEKTDQEKRKIYDQDNKDGENQVQSSRDTDRDWNIHY

SEQ ID NO: 359127 - protein, 168 aa, Zea mays
  Clone ID: MRT4577_90690C.1.pep
MVTTTIEDLHGDVLGCALRRLDGRSLAAASCATAALRALATDPETWRALCVAEWPSLALALAAQRRLLAAVPPQRLFADAHPFPSADTGGAGGPDPDPVPAGELVSAVDVYYRGAPLLSRVVETPASSPWFLGSPFRVEAVERKRPASAAAVPSPAELELSWVVVDPA

SEQ ID NO: 359128 - protein, 61 aa, Zea mays
  Clone ID: MRT4577_90692C.1.pep
SCQGRRIIACYPHGVPMLQGVYAQRVFVTSGDAVRPHAFMILASEPEYSLHGQPDSEITGR

SEQ ID NO: 359129 - protein, 34 aa, Zea mays
  Clone ID: MRT4577_90693C.1.pep
LNSKLIPRVINYTTSLTKNYVNCILLLTYCRTRG

SEQ ID NO: 359130 - protein, 121 aa, Zea mays
  unsure (1)..(121): unsure at all Xaa locations
  Clone ID: MRT4577_90694C.1.pep
PGGGPPPPPGGAPSGSPPGSPRFWGRPEPPNGXPLDDPPPPRMXGFPGGGSGCPNRPVRPWRWPGLFPXPAFFPGAPGPRCPGRPPPRARGGFLEVRRRGQNPWKTFGCPVGAFYFCSSSP

SEQ ID NO: 359131 - protein, 62 aa, Zea mays
  Clone ID: MRT4577_90695C.1.pep
MLDHLVCGYTHRSGGCQPAGPSPCDLATVDDVAGNGGHKPGKGVTVYVYRAMIAEHSRVVTE

SEQ ID NO: 359132 - protein, 98 aa, Zea mays
  Clone ID: MRT4577_90696C.1.pep
CFALWFSRCRLLTFLCIGVSGIAFAFGYLSLIRMFQFCQVSLPFSWIQQTVQKFALFGSVRIYAYILIPVSVSTAAAALVVSGSVVERDQPQKGSPAG

SEQ ID NO: 359133 - protein, 42 aa, Zea mays
  Clone ID: MRT4577_90697C.1.pep
AGRAGVSILRHCVNIWSSPISFRGDDSVAATMTRLRNARAGV

SEQ ID NO: 359134 - protein, 98 aa, Zea mays
  Clone ID: MRT4577_90698C.1.pep
CLVGLGVDQLRSTCQVPPGGILDGTPGGCLLGLLSKNYEETGPHEDEYLVLADLKNLDRGFLDVLGRYQHPLRGCVLGLLSDLSRLSVLLGSSNLLGG

SEQ ID NO: 359135 - protein, 54 aa, Zea mays
  Clone ID: MRT4577_90699C.1.pep
TEICGGSGRNLDRTTTSDILPDLPPKPVDASFCRSILKSTLTYYKGIGSPQALL

SEQ ID NO: 359136 - protein, 56 aa, Zea mays
  Clone ID: MRT4577_9069C.1.pep
PPASGMERSPLQALPILGPSCPRFSRSSPGASQRCGAPSFLFLGRCLSLVLVPVCL

SEQ ID NO: 359137 - protein, 143 aa, Zea mays
  Clone ID: MRT4577_906C.1.pep
MTIRFVLFVNKQGQTRLAQYYEHLSLDERRALEGEIVRKCLARTDQQCSFVEHRNYKVVYRRYASLFFLVGVDSDENELAILEFIHLLVETMDRHFGNVCELDIMFHLEKVHFMLEEMVMNGCIVETSKQNILAPIQLMEKTS

SEQ ID NO: 359138 - protein, 157 aa, Zea mays
  Clone ID: MRT4577_90700C.1.pep
LEAGRGASRFRSRDSFHPPERSYTRYHRLEHLTLRLRTTALSRITSCMRTNDSPHADGGSLIPLNSVPSRQREIYSETQMLEPKIRLLTVRHRGLRHEHPHIPLRHQPRAPRHWRIAAAKSSSRSGRSRRPQALSHSSSRTLKSCINSGPRNGEHPP

SEQ ID NO: 359139 - protein, 1165 aa, Zea mays
  Clone ID: MRT4577_90701C.1.pep
MAASGSGGNEPGGRPWTATSTWVLGPAGGTAEDAVSFETSDYDAEASPAGVVLCRPPADAEGDVHSCPCELTVHDHSNSIWLLRPILPILHVPIYSTKSLRTKDSFSNPRGKYEIHRVYVRSTARIYELYHSPDAKGTGKDYLCTVRCGLAVKEPQPYGEESMSQRTGSALNSAKREHEAKSVSSGSDEDSWVDVNIPESPAGNKTLTSQERNVIRTCQVNTMAHYEATAEMTDVNPCASLTIRLLSLQSNTSVHIEEIYIFADPVESTNDVSVRGPGNMGGSSLLAMLAPGLMQMSKSRNLKIDGSYFSDKSRDQDSVTCERVTQEAGLCSTNDSKYTSAGIESGMGPTIGVTVSDEKSSQSEFQFKEPNSLPLPVQTLDSTQAPSVKDRRELNTGHPLMNENFTPYNHIERKLDTLLSKVEKVELYCSRFEDSMIKPLGSIEARLQRLEEQFSSFSLDIQSLRGSSAFMSAPDGMPNTKSSQEEAPNDANDRSTSTTDRKPGLVVRAPDFMSDDSCGCNVITNGNQVSCHGPNVVPRLLVKVPDFISQAELTDGNLHDGHALSSEKGCKPSPGLIVKVPEFLDDDDDDDDNDSDDEVEGKKQAEVCGDGDAHAWSDDTLKKNTSSNTKSKKTVSINGALASALEALLTSTIGPPSSKPAVCATSNLSAENINDSFSCSRYPGKSGEMPTKYGSVDQFLGTSGDPNLVGAFISFQDIDTTHNSLSKEMLDSEVEINEHNCDLNTEKVAFVAITEPLDVSSQTDKIDESICDGSWMNRQNNGSNFDTMPYIMNIEPLDPSKPPTVFGPVDSGVQVNEDRPSISLLEFLAARNANSCKNDTSEVCLGNEAAEKLSFERTSAGAGKNSKNTSQLLVKKALEVDADERFFLSSVPIGAKFEGSSSPAPRTSGHDINNTKEAVSDKECGLEDTENGFRLSSRTDSIFSRCHATDSLSSLSSMESFSAAPATDPVVPGNDTSGNYVEDLAGIGDHPVATLIFGEDLQKVRDLLYELKDDMLGMASTAECTNKSSPSLEVLLAESSDSEVQISDLEEGIDSGAGIGSAGLFGTFSSSDDDASAAGEPLGDVAELATPSEPYTSAFNEPLVDVADLTNPSGTDATSVNEQPSADVVDPLHTSNEPLDSLDDLPNPPEMSFGGSSGEHPDSLI

SEQ ID NO: 359140 - protein, 216 aa, Zea mays
  unsure (1)..(216): unsure at all Xaa locations
  Clone ID: MRT4577_90702C.1.pep
QRRHVAVVGPGVLEVXXLQHVVVRGGGGXDVRFSRCLYAAAEDCGAASFHRCXGARGRARAVAVRRCRSADVERADAVAIRRCKXXXXRGAGXXRVGRCREXXLXAXADXAVVXCXAARADWCGXLAXXRCXTADXSRSGAVRXDRSRDATVXGCGTVAXRXXKDSMVERDQKPPDQDQTPMRQQGGPLATDADEAQVKGARSLRHRRNRATQQSI

SEQ ID NO: 359141 - protein, 243 aa, Zea mays
  unsure (1)..(243): unsure at all Xaa locations
  Clone ID: MRT4577_90703C.1.pep
RKRKKKEKKKKKXEKXKRKKKNTKNKXKKNTKRXKKKXKQTRKKKRRKKKKKEKKKKKKKKKKKKKKKKKKKKKKKKEKKKEKKKKKKKKKXKKKKKKKKKKKKTKKKKKKKKKEKERKKKRKKKKKKKKRKKKKKKKRRKRKKKXKQKRKQKRNKKKKRKKEKKPKKEKKRKKTTTKKNKRRRKKKQKKKRRXEEEKKKKRKKKRKQKQKRKEKRKKENNKKTNKEQKKRRERQEKQREKIY

SEQ ID NO: 359142 - protein, 176 aa, Zea mays
  unsure (1)..(176): unsure at all Xaa locations
  Clone ID: MRT4577_90704C.1.pep
MAAGAGAGASAPVAWLLAAAVAAAALAASASAQSGCTTTLISLYPCLNYISGNVSTPPPSCCSQLASVVQTSPQCLCAALSSDSSSLGGVTIDRTRALQXQLPQACSVKTPPASKCNSVGGGSAPGAATPGAPSSGVPATAAAGTGSGSKATPTAPFLTSGGASARGAVSLALAFA

SEQ ID NO: 359143 - protein, 94 aa, Zea mays
  Clone ID: MRT4577_90706C.1.pep
MEVEHGGEMMMLVEAAAADEEGWQTPRREDCRIPVVPPCPAAPSRKKAVAMAEAAGGSRRRDPPKGGYFQPPDLESLFVLAPPRAQAAASSRAW

SEQ ID NO: 359144 - protein, 145 aa, Zea mays
  unsure (1)..(145): unsure at all Xaa locations
  Clone ID: MRT4577_90707C.1.pep
SRIPPPSSRRLLLLPRRRRTLQRPXMGVFTFVCRDSGAEWSAKQHKGELEASAATPYDLQRQLVSAACAEDKSGGVQSSFTMVSPKSAIFQVVIGGASAGPIGGGAAAGGAAASGGAAAEAPKAEEKKEEEKEESEDDLGFSLFD

SEQ ID NO: 359145 - protein, 115 aa, Zea mays
  unsure (1)..(115): unsure at all Xaa locations
  Clone ID: MRT4577_90708C.1.pep
LIYLNGSGYVLCTFAXASFHACCLLLAGELPADVLSDDYRLAPEHRLPAGLDDTVAVMRWVRAQAVSAGGGDPWLDDSDDPGRVFVDGDSAGGNIVHHVAVRRLGSAGSGELYPV

SEQ ID NO: 359146 - protein, 73 aa, Zea mays
  unsure (1)..(73): unsure at all Xaa locations
  Clone ID: MRT4577_90709C.1.pep
ICQKKFQQPLINTPLGPWGKTNHLKRPSKHNLLLPKPVTRWFNPKPRVPCDVPPVKRPIHEKYITLGAXQASI

SEQ ID NO: 359147 - protein, 101 aa, Zea mays
  Clone ID: MRT4577_9070C.1.pep
ESIISDYIIGVSEIIIINFNAAEITNGENRVTWRSLATLLLLVLSCGSNNPPDRLSRWQGWRPSTPSTKSRSTCKNCATSKAEYTNTQLDLPGVRSLLLYL

SEQ ID NO: 359148 - protein, 61 aa, Zea mays
  Clone ID: MRT4577_90710C.1.pep
NQGKPVPLKTILCETSTTKNNQDTLRAMKDNKSCGYGQSNRTSRMDLLGMKLDVPLLCTPI

SEQ ID NO: 359149 - protein, 184 aa, Zea mays
  unsure (1)..(184): unsure at all Xaa locations
  Clone ID: MRT4577_90711C.1.pep
MRPWLCSLSRSTTTTFTTKASQLVGRXFLIASHDDASAWLGEHPHLGYSHTNQGLLRPTSFEGNDHVVCLLQGGVDNLRHLNQQHALSSKGANEVLLVIDAYKRLRDRAXYPGSFMLDQITGSYVFNLFDESTNSLLVASDHEDRAPLFXGITADGCVGFSDDIDMLIGSCVKSLAPLPQGCFY

SEQ ID NO: 359150 - protein, 63 aa, Zea mays
  Clone ID: MRT4577_90712C.1.pep
TRVRFGVWPNVTYYGSRKYYLFFCFEGYERLWSLWQGLVFSEFVSGDIFSLSFLGTRLLPPVC

SEQ ID NO: 359151 - protein, 83 aa, Zea mays
  Clone ID: MRT4577_90713C.1.pep
RGPGPRAKPPGSGAPPPAGPTGPRFAGPGGSPAAGAGASPPPVFAPPPPLVSPPPPRAGWGPRRSGRARSGAPGMKNKGVPGF

SEQ ID NO: 359152 - protein, 43 aa, Zea mays
  Clone ID: MRT4577_90714C.1.pep
GAGNPGSHPASAHLRLAGVPCLSPRLQRGLKQRWRRTSCGNYY

SEQ ID NO: 359153 - protein, 177 aa, Zea mays
  Clone ID: MRT4577_90715C.1.pep
MAARRGPHVIKLHDPNPPLLGRAPGTAPAAIPAPSRDEGILAQHPRAAPSSASASHPAFALIEERLVARDQDIQELLVDNQRFAATHVALQQQLIAAQHELRAVSVAATRARAEREVEVRALADQAAHIEAEARAVAAARAEVDQVHADVQVLVAARTDLVNRLGGLLSLPHSLSQS

SEQ ID NO: 359154 - protein, 100 aa, Zea mays
  Clone ID: MRT4577_90716C.1.pep
MAVAKPPLQTAAVLLLLLLVVAAASWLQTVDAASGFCSGKCSVRCGRAASARARGACMRSCGLCCEECNCVPTRPPRDVNECPCYRDMLTAGPRKRPKCP

SEQ ID NO: 359155 - protein, 152 aa, Zea mays
  Clone ID: MRT4577_90717C.1.pep
FRWREGDLEERLSLPLPIRLAFFLVHRRSIPAHTPPARGAEAPGGRHGKHASSLHALTPPMMAVRRPVLRSQHLLLLCPSFSSSSTSYDGNCASRVRCEWAGNTPGRAACPHTADDGGVTTSKCFAHSTFFFAPSSSSSSTSYDECCASRAR

SEQ ID NO: 359156 - protein, 107 aa, Zea mays
  unsure (1)..(107): unsure at all Xaa locations
  Clone ID: MRT4577_90718C.1.pep
MLFMLPSLFLYYFLFRFNAVFIFCIFLYYLLFILFSFFLVYFFXFFFFFFFVFFFFLFTIFFIFSFIFFFFLLSYFFNFILYFFIYSIFIYFYFYFLYLYLLFFYFF

SEQ ID NO: 359157 - protein, 68 aa, Zea mays
  Clone ID: MRT4577_90719C.1.pep
DVQTNKRVRIKWSVTHKQHHCGIKQNSSLMYLGQSSRHPSVITVLYTEPCAAMDERVTWPCWQTVVTT

SEQ ID NO: 359158 - protein, 125 aa, Zea mays
  unsure (1)..(125): unsure at all Xaa locations
  Clone ID: MRT4577_9071C.1.pep
VIIDLFVAGGETSATAMQWAMTELIRXPRAMLKAQAEVRSALAGHSTVTEAGLTDLHYLRLVIKEALRLHPPVPVLLRECLMALCVLGYHGPRGAMVLVKRWAIGSDPAHWDAPEDFAPERFQEL

SEQ ID NO: 359159 - protein, 43 aa, Zea mays
  Clone ID: MRT4577_90720C.1.pep
QLYQYSIAHHRADRRTRCNGHVTGNSYTDLGHNYVCHAASSVY

SEQ ID NO: 359160 - protein, 108 aa, Zea mays
  Clone ID: MRT4577_90721C.1.pep
DPPKGFGGPPNYTKRGPRGNPLKWPGRPSGPPHEKLVLGGKTPAGDTGHTLFIPNRGFTLLRGPGPLPGRPPRAPPFSKPPGKNPTFIWGPPHPFAPWKAGKEKNAGL

SEQ ID NO: 359161 - protein, 80 aa, Zea mays
  Clone ID: MRT4577_90722C.1.pep
GVRGASETKRWWGAFTVETMPQEQIHNGRVHRPAASVDPGLVGHGYTIYRLLADGRYLGSSYQSNEALHSHHTNGCVLML

SEQ ID NO: 359162 - protein, 800 aa, Zea mays
  unsure (1)..(800): unsure at all Xaa locations
  Clone ID: MRT4577_90723C.1.pep
YIYREVEDPTTHQLLYHSATTSAGPLHGVALNEPYKPLDAIDLKRYAARKNETTYCYDFPLAFETALKRSWKSSSYGVSEANEHNRFYAEVKELIFADSVGAWGTPLVSVERPPGINDIGIVAWNMKLSTPEFPRGREIIVVANDVTFKAGSFGPREDAFFDAVTNLACERKLPLIYLAATAGARLGVAEEIKSCFHVGWSDYESPERGFQYIYLTTQDYSRLSSSVIAHELQLKNGETRWVVDTIVGKEDGLGCENLHGSGAIASAYRPRRQETFTLTFVTGRAVGIGAYLARLGMRCIQRLDQPIILTGFSALNKLLGREVYSSHMQLGGPKIMATNGVVHQTVSDDLEGVSAILKWLSYVPPYVGGPLPIMKPLXDPPERPVTYLPENACDALAAICGIQDGEGRWLGGMFDRESFVETLEGWAKTVITGRAKLGGIPVGVIAVETQTVMQVIPADPGQLDSAERVVPQAGQVWFPDSATKTAHALLDFNREELPLFILSNWRGFSGGQRDLFEGILQAGSTIVENLRTYKQPAFVYIPMGGELRGGAWVVVDSKINPXHLXMYAARAAKGDVLVPEGLVEIKFRPKELEDCMLRLDPELIGLNTRLKEMKKQNASISEMETIRRSMTIRMKQLMPIYTQVATRFAELHDTSARMAAKGVIGKVVDWKESRAFFYRRLRRRVAEDALAKEVKEAAGEQLSHRSALDCIKKWYLASKGTEGDGEMWNDDESFFAWKDDPKNYENYLEELKAERVSNWFSHLAESSDVKALPNGLSLLLNKMNPLKREQVIDGLRQLLG

SEQ ID NO: 359163 - protein, 42 aa, Zea mays
  Clone ID: MRT4577_90724C.1.pep
KFPSKGISLLQILLSYLKLSVSLIKTKFIEQKVPSTLSSHIF

SEQ ID NO: 359164 - protein, 95 aa, Zea mays
  Clone ID: MRT4577_90725C.1.pep
TICLHPLVCKGFNADFDGDQMAVHLPLSLEAQAEARLLMFSHMNLLSPAIGDPICVPTQDMLIGLYVLTIGNRPGICANRYNSCGNSPKKKKKKK

SEQ ID NO: 359165 - protein, 129 aa, Zea mays
  Clone ID: MRT4577_90726C.1.pep
PGAARIGKPRKPPGGPGNAGGMPHPRILFDKYHPGYFGKVGMRYFHKLRNKFFCPAVNIERLWLMVPPPKAAEAGGDKAPQIDVTQFGYFKVLGKGVLPPKPIVVKAQLISKVPEKKIKAAGGAVVLPP

SEQ ID NO: 359166 - protein, 66 aa, Zea mays
  unsure (1)..(66): unsure at all Xaa locations
  Clone ID: MRT4577_90727C.1.pep
GXXLMKGELLLVLRSTLLGVQHPPPPHLGEFEQGXNNRGGGAGPEDRXXNFFHGGGCVSXQIKGPF

SEQ ID NO: 359167 - protein, 138 aa, Zea mays
  Clone ID: MRT4577_90728C.1.pep
MGTKKQGGGGGDQKVLLWRLPEVTSKELGKIGPALGIGIGCGAGAGIGFFGGAGLGYGFPGLTLGFGVGAGCGVGIGFGYGLGKGIAYDEKKKYSNVGKMFQEAPHFPMDTVGALFDELVINTKKLVTSTSKGIEKWR

SEQ ID NO: 359168 - protein, 46 aa, Zea mays
  Clone ID: MRT4577_90729C.1.pep
GLMHLIKHIVRPSSLTMLHVVRHRLVLADSVNPRRERHHTVYHDIT

SEQ ID NO: 359169 - protein, 125 aa, Zea mays
  Clone ID: MRT4577_9072C.1.pep
GPTPGTMGERNGKTTSSCVNSEPQKSERSQTGLHAERTVPRSVQRNQPRTRAEKFRTKNLQIYENPAETSEEAEEIGKTQTARHENNWTADQTGPRRALRREGVIATLLSTSRRKRKTELRRKEQ

SEQ ID NO: 359170 - protein, 72 aa, Zea mays
  unsure (1)..(72): unsure at all Xaa locations
  Clone ID: MRT4577_90730C.1.pep
RHNPLGQILGLGFRALRFGMSFFFITPILSVGPPFCWSQLRGVYNPKGGVPSVFFFCIQTSFWGPXKKKKKK

SEQ ID NO: 359171 - protein, 85 aa, Zea mays
  Clone ID: MRT4577_90731C.1.pep
GKWRRGHNSKHLGALTIKVKNLRGLKGTDLYKGGARHSTFLKKKTIPPQRGKLVFPPRGEAFFDWGTGGGLFSSPGRATKGLALP

SEQ ID NO: 359172 - protein, 48 aa, Zea mays
  Clone ID: MRT4577_90732C.1.pep
LKKGTFLVTPNKNLSICKTLKPGPLHFFPSFFANFSGFPLKTLKRGPP

SEQ ID NO: 359173 - protein, 55 aa, Zea mays
  Clone ID: MRT4577_90733C.1.pep
KSFPYIKTFAHRGGVGIPPKTLSCVRPLIMSTSILSTSESPPPFAHKKFSLCQEF

SEQ ID NO: 359174 - protein, 93 aa, Zea mays
  Clone ID: MRT4577_90734C.1.pep
QIDDIDVRFQKAASGTTGTYQEWKDKAQSLYQELLTQEGQASFQGLKDNVFDGLVRVTQEFHMIVKHLIDSLIDFLNFPRFQFPGKPGIYTRE

SEQ ID NO: 359175 - protein, 35 aa, Zea mays
  Clone ID: MRT4577_90735C.1.pep
NVGWTTFYRYILVTCFFWIFFFLLLELDPELQNHE

SEQ ID NO: 359176 - protein, 73 aa, Zea mays
  Clone ID: MRT4577_90736C.1.pep
QYSHKHSHHTYEYTHAAISPHVAKLLPKNRLLSENHCRAIALQHDRGSAHYAMHRPEPHIMLLRRPINYQQQQ

SEQ ID NO: 359177 - protein, 101 aa, Zea mays
  Clone ID: MRT4577_90737C.1.pep
SNGDAGVDGMVSVIAHELAELATNPLVNAWYAGEDPTAPTEIADLCEGVYGTGGGGGYAGKVSVDAQGRSWNVNGRKGRKFLVQWLWSPEAKACVGPNASD

SEQ ID NO: 359178 - protein, 46 aa, Zea mays
  Clone ID: MRT4577_90738C.1.pep
FLLSIIIGFPFPSQNSRLLILNHKDSLVSEQINYLTSEEIGYVVKA

SEQ ID NO: 359179 - protein, 42 aa, Zea mays
  Clone ID: MRT4577_90739C.1.pep
PCFPFFLQGCFWSCPKVKSWRSPSLQLRIMCTGAHYSCCPPP

SEQ ID NO: 359180 - protein, 36 aa, Zea mays
  Clone ID: MRT4577_9073C.1.pep
SNCICSTKNSILVSLGNLSSAKLYVHFAVVDSQVNQ

SEQ ID NO: 359181 - protein, 92 aa, Zea mays
  Clone ID: MRT4577_90740C.1.pep
LHQFLHLPQSHCRVLAADTSFYFSFCRSRIPSPIGLLYSLFVPPNGKSVGYRCDRHVHLAKNHTKSGYCSSITVRTRQWISMNSYQLALQFI

SEQ ID NO: 359182 - protein, 93 aa, Zea mays
  unsure (1)..(93): unsure at all Xaa locations
  Clone ID: MRT4577_90741C.1.pep
FRPPGAGXVPADPPRGGPPPGXPFEPGKXPQPGXPPPPLFFPPPPAPSEAXPPPNPKPGFPATPKNKPSGLXAPPPAWGPNPLGFNPPPPPHL

SEQ ID NO: 359183 - protein, 68 aa, Zea mays
  Clone ID: MRT4577_90742C.1.pep
MASRAAALLVAVAVAAVLFAAASAQETDLGVPPAPAPVTGAAAGAAASALDVACSVVLSVLVAGGLMQ

SEQ ID NO: 359184 - protein, 74 aa, Zea mays
  Clone ID: MRT4577_90743C.1.pep
KPHHTQTPPSSFKGQRDYKTLLILPTQVHLPNKTDQINILQQTMLIQIISTMMIPDVPPPRSTTKVVASHLLFK

SEQ ID NO: 359185 - protein, 90 aa, Zea mays
  Clone ID: MRT4577_90744C.1.pep
KNYSLDFLPAPGGFGPKFTFKNRKLGPGGLFPQETKSEAKTWFFGPSQKIRGQPKNQNPFWFFLREPCQLNGNIQLCFSFNDKEPGPGGP

SEQ ID NO: 359186 - protein, 72 aa, Zea mays
  Clone ID: MRT4577_90745C.1.pep
KPTKACYWLNIETLWRLISSLPTHPTHRIQSRCGIQLFHYRVETSKDYSGTTKSSPNFQSSYLLIFYSAIEH

SEQ ID NO: 359187 - protein, 132 aa, Zea mays
  Clone ID: MRT4577_90746C.1.pep
DLKAPRQMLRDAENAKLGLNVHGKASSSKENEESSSAGESSSMDIDKAESSLPKKQLTGVYDLVAVLTHKGRSADSGHYVGWVKQDDGKWIEFDDDNPNIRKDEDILKLSGGGDWHMAYICLYKARMAESKS

SEQ ID NO: 359188 - protein, 78 aa, Zea mays
  Clone ID: MRT4577_90747C.1.pep
HVSDDIMLSKEGAQMRMGLPCWGEDLAPVICGKQLDEARILGQQPLKWYRCSHPRCYGCSQGTYGASTDIFDFFLGGV

SEQ ID NO: 359189 - protein, 113 aa, Zea mays
  unsure (1)..(113): unsure at all Xaa locations
  Clone ID: MRT4577_90748C.1.pep
AESSLPKKQLTGVYDLVAVLTHKGRSADSGHYVGWVKQDDXSQLVLQLIYYNNCFILYRLVTEIPYXXGKWIEFDDDNPNIRKDEDILKLSGGGDWHMAYICLYKARMAESKS

SEQ ID NO: 359190 - protein, 58 aa, Zea mays
  Clone ID: MRT4577_90749C.1.pep
CPTWEPFLVDVTSYDYLYGKIAARVLLKDRLILRLFKKKKKKKKKKKKKLVPARAAAR

SEQ ID NO: 359191 - protein, 36 aa, Zea mays
  Clone ID: MRT4577_9074C.1.pep
QVNSMSRYTHLQLSFFRSILRISSTSLSVLRERRSL

SEQ ID NO: 359192 - protein, 160 aa, Zea mays
  Clone ID: MRT4577_90750C.1.pep
IATIYVHISRGDKESVFSAAISKDGRAYNDQIGGDPKIIQEFVQLAGRAKAAASEAMDAEAILGDIPDEFLDPIQYTLMKDPVTLPSSKVTVDRPVIIRHLLSDSTDPFNRSHLTQDMLIPNTELKLQIEEFVRSQQSRKRTAAALLEIGEAEGTDDMAE

SEQ ID NO: 359193 - protein, 57 aa, Zea mays
  unsure (1)..(57): unsure at all Xaa locations
  Clone ID: MRT4577_90751C.1.pep
RREDPRACRSGQXLASAPPXXQGHARAAWSFLHAMSSFLIFVAQENIESHSPLVVPL

SEQ ID NO: 359194 - protein, 51 aa, Zea mays
  Clone ID: MRT4577_90752C.1.pep
LAVTSSQGTFGIPRRAVLARPINHRKCNSGESQEFLTLSTQYVSSFLIKGP

SEQ ID NO: 359195 - protein, 410 aa, Zea mays
  Clone ID: MRT4577_90753C.1.pep
MCLRSSYHEKNHYLRVKMVEVLNCWMPQRSGLNSTASLFEGHQLCLDYLVGNLLKLYVDIEFTGSHTQFFDKFNIRHNIAELLEYLWDVPSHRNAWRQIAKEEEKGVYLNFLNFLINDSIYLLDESLNKILELKEIEAEMANIVEWERRPAQEREERLRVFHQWENIVRFDMRLANEDVGMLAFTSEQIPAPFVLPEMVERVASMLNYFLLQLAGPQRKSLTVKDPEKYEFKPKQLLKQIATIYVHISRGDKESVFSAAISKDGRAYNDQLFSSAANILWKIGGDPKIIQEFMQLAGRAKAAASEAMDAEAILGDIPDEFLDPIQYTLMKDPVTLPSSKVTVDRPVIIRHLLSDSTDPFNRSHLTQDMLIPNTELKLQIEEFVRSQQSRKRTAAALLEIGEADGADDMAE

SEQ ID NO: 359196 - protein, 170 aa, Zea mays
  Clone ID: MRT4577_90754C.1.pep
IATIYVHISRGDKESVFPAAISKDGRAYNDQLFASAANILWKIGGDPKIIQEFMQLAGRAKAAASEAMDAEAILGDIPDEFLDPIQYTLMKDPVTLPSSKVTVDRPVIIRHLLSDSTDPFNRSHLTQDMLIPNTELKLQIEEFVQSQQLRKRTAAVSEIGQADGADDMAE

SEQ ID NO: 359197 - protein, 66 aa, Zea mays
  Clone ID: MRT4577_90755C.1.pep
DRIVISHSKDLCPLSRIVDKPEPSRDANAQRYGINTSVRHPKHSLTTGDEGRQLTIIQSATLHAAD

SEQ ID NO: 359198 - protein, 139 aa, Zea mays
  Clone ID: MRT4577_90756C.1.pep
PSLFPHKKNVSIPCSWHNSFGHIISTLRFANLQQRRSSSLSRLLGPDEFLDPIQYTLMKDPVTLPSSKVTVDRPVIIRHLLSDSTDPFNRSHLTQDMLIPNTELKLQIEEFVRSHQSRKRTASALLEIGETEGTDYMAE

SEQ ID NO: 359199 - protein, 275 aa, Zea mays
  Clone ID: MRT4577_90757C.1.pep
MGDWVHRGRPGFLTPHTVTLSTAPRVAMLQLAPTPRPSPAAGRRPRPSSACICCSSVRALEERSPRPGASLREAKRVVLVRHGQSTWNAEGRIQGSSDASVLTPKGEAQAETCRQMLASDSFDACFTSPLARSRRTAEIIWRGDGLIPDPDLREIDLYSFQGLLKHEGKERYGPLYRQWQKNAAEFSIDGHYPVQELWDRARSCWERILAHRGKSVLVVAHNAVNQALVATCLGLGAEYFRILLQSNCGASVLDFTPRAGGGPPTVCLNRLNQVC

SEQ ID NO: 359200 - protein, 550 aa, Zea mays
  unsure (1)..(550): unsure at all Xaa locations
  Clone ID: MRT4577_90758C.1.pep
MAAAPASVGCGGAYSCETAERTREWMQALATFLGRHRPLLEAHVVNFFKDRLWELVDAEWMECLRREPVESLLKLPSGCVQEHWPATLREFVLTARSLVIPREQKAPQSLVSDIHVAPVGTVLAQGMNSKKKHEIENLAAVVHAIAKRCGAKTVVDVGSGQGYLAQALSFEYQLRVVAIDASSHHASVTIARAERIKKHYAAKCVEKQLLMVPRAVTCHVLSSDTLAAVTLDACKDDNGEHVRDTKTSTKKITQIQESTQGTPPLILAGLHACGDLSVNMLRVFVSCEQVKALVSIGCCYNLLSEDTYEDTDTCPGFPMSKAAKHSELVLGKSIRDLACQSAERWRNLTMDIALQNFDVHAFRAAFQMVLEKYFPEVSRLSPSIGRQGKALRRQRLRKVVESQMTTKKNDDFSCSTLKEQNKNTNDVHPVXMKLTQGQMTSIRTHIKSSXFKDFTLSGLGRLGCGSVEDTSLLEIWKDVQPFSEYIGPFWCLRAALGPLVETYILLDRLLYLQERSNLVEALLFPLFDPTISPRNMAVIAWKLCANSSEA

SEQ ID NO: 359201 - protein, 41 aa, Zea mays
  unsure (1)..(41): unsure at all Xaa locations
  Clone ID: MRT4577_90759C.1.pep
REIDVLLLLASPASSSFQXASLEAVRSIIAATSELSRSNSF

SEQ ID NO: 359202 - protein, 211 aa, Zea mays
  Clone ID: MRT4577_9075C.1.pep
MFADAGFSFSAYSSSPPGPAYSYSYSYSSSPTVLSHPHPDHSSFSSPPSSAAPAQPPPPPLPLPLPLLHQQHQHQHQHQAAAAVATASNDDDDDAMYHHLGDMGQPSLISEYDLGAEGDLFKAPEPIIEEPLLALDPVAAAISMMSGGDNAMDDSIKVSDMRLSEVLYECEKELMEKSAIEETISELLDVKIPMLQVEERPGELRASSSST

SEQ ID NO: 359203 - protein, 223 aa, Zea mays
  Clone ID: MRT4577_90760C.1.pep
MLQLAPTPLPSPAAGRRPRPSSACICCSSVRALEEAKRVVLVRHGQSTWNAEGRIQGSSDASVLTPKGEAQAETCRQMLASDSFDACFTSPLARSRRTAEIIWQGRGRGRGDGLIPDPDLREIDLYSFQGLLKREGRERYGPLYRQWQKNAAEFSIDGHYPVQELWDRARSCWERILAHRGKSVLVVAHNAVNQALVATSLGGVHPASERGIGVHCVSKCDRS

SEQ ID NO: 359204 - protein, 74 aa, Zea mays
  unsure (1)..(74): unsure at all Xaa locations
  Clone ID: MRT4577_90761C.1.pep
QXRRFTPHPPAALGLSSVCGLDLDARQPLVERRGECSAVQERWWPGLLGGASKSHTGDRTRSGKTKQKLKIPAG

SEQ ID NO: 359205 - protein, 71 aa, Zea mays
  unsure (1)..(71): unsure at all Xaa locations
  Clone ID: MRT4577_90762C.1.pep
IFEVGVCDILNEEVICLVVGIKIMCGSIGYYVIVXRRVVGDNSRWGWGSKIFKNARVRWVFFREVRKIEKN

SEQ ID NO: 359206 - protein, 236 aa, Zea mays
  Clone ID: MRT4577_90763C.1.pep
KYPSRPDIQIFSDFTLHIPSGKTVALVGESGSGKSTVISLLERFYNPDSGTISLDGVEIKSLKVNWLRDQMGLVGQEPILFNDTIRANIAYGKHGEVTEEELVKVARAANAHEFISSLPQGYDTTVGERGVQLSGGQKQRVAIARAILKDPRILLLDEATSALDAESERIVQDALDNVMVGRTTVIVAHRLSTIKSADIIAVLKDGVIVEKGRHEALMNIKDGFYASLVELRSASS

SEQ ID NO: 359207 - protein, 73 aa, Zea mays
  unsure (1)..(73): unsure at all Xaa locations
  Clone ID: MRT4577_90764C.1.pep
LRIYKDNRTEXARGGAGRRGEXTAIVPSLHYSPIDLLIASMLASGVTRPIAIAGGGSGPEGRAVWGPLPPPSV

SEQ ID NO: 359208 - protein, 62 aa, Zea mays
  Clone ID: MRT4577_90765C.1.pep
YGILTWVRHGLRLLWPCLPQDGSEYCGVGFRRPCFTQHYHWHCSFFTMRHTVEVERYGSHSF

SEQ ID NO: 359209 - protein, 115 aa, Zea mays
  Clone ID: MRT4577_90766C.1.pep
TAHRTTSPSTKTRSPRHTKMEHPTEICENKEVQQQQNRSAEVEQGRMGFNGTLGFSTRLQLRLLPDHQRGSTLSGGSRHGRGGGPAGVEEARTVIDAGEELGSRGAQGAGRARRV

SEQ ID NO: 359210 - protein, 85 aa, Zea mays
  Clone ID: MRT4577_90767C.1.pep
RYRFRPFQSLYMVTSSMRNQKRCICHPFLVKEPSETNIIIYKEPRNPSRVGQTNSTTRNAKSSPQAFSSGLQDQKRYICHPLALP

SEQ ID NO: 359211 - protein, 96 aa, Zea mays
  Clone ID: MRT4577_90768C.1.pep
KQWFLLFPNYNPTSSNSNCVELKRKSHAFPATILNMFSQPPTKTIRGGLQKRAHGRLEKSMVYKSENTWTREIGISIITAMHSVVEGEARLHREIR

SEQ ID NO: 359212 - protein, 94 aa, Zea mays
  Clone ID: MRT4577_90769C.1.pep
SRGGDTGLSTASPSYKYGSAVLRRYVRDLAVMVMLYALGHISRAYINPVVVTSSMAGVYYLIRFTNPDLPDITNMTFCLKSSRKMHSCDIFCWI

SEQ ID NO: 359213 - protein, 97 aa, Zea mays
  Clone ID: MRT4577_9076C.1.pep
QDFVQHFSQIDRVLTEDEMGHPEIGDAIARHKEVLEYNAIGGKYNRGLTVVVAFRELVEPRKQDADSLQRAWTVGWCVELLQAFFLVADDIMDSSLT

SEQ ID NO: 359214 - protein, 82 aa, Zea mays
  Clone ID: MRT4577_90770C.1.pep
VVNPLYPGGSFDPLGLPEDPKAFAELKVKELKNGPLPMFSMLGFFVQAMVTGKGPLKNLPDHIADPVNNNAWAYATNFVPGK

SEQ ID NO: 359215 - protein, 63 aa, Zea mays
  Clone ID: MRT4577_90771C.1.pep
ITHLAALPRHYILQEHDREGGRGMHAPNHATLHHDRAPTRNRRGCPSRHAHGDVVLQHEQHRS

SEQ ID NO: 359216 - protein, 60 aa, Zea mays
  Clone ID: MRT4577_90772C.1.pep
VPISSSVPLKSSHLHAISYVNISSDDGVALKSPISSIIRDALPCPSSHILYAATALWLRT

SEQ ID NO: 359217 - protein, 320 aa, Zea mays
  Clone ID: MRT4577_90773C.1.pep
MATSPLSCFFARPRPRSTGTAVWLLPAAVLLLLLNRWSHMASYPSVSPRGSGSVQVGRAELYSKMARDLDERGAAFLKGGETSQSLTLSDLFDTADDGGVVPRLKAADPPVRANVLYMDPKFAAVISKAVKDVFLPYFDQAIWFQNTSMYHFSMFHASHHLEPIVATEDEIEAEVEAVKGVTKNLCPLKIVLDRVVLTSTGVLLGLWQVESGTDPAEIRSRLREALPRAPQKQLYDPVLLHTSFARILRHPRLPKEQSASSFDNVKFFHELVAQINEKICGFQATISELWYVEEYDVLALALNGKMKVRRLHLGCNRQGN

SEQ ID NO: 359218 - protein, 112 aa, Zea mays
  Clone ID: MRT4577_90774C.1.pep
AGRRREQGAKGARGGGRREHLDRLPGGSPYPLRRHAPHGRHGRRRSPGRRLHGRPGPEGRRRPRGDPPPSRGRRGLITRPGSRAPPPRASSSSSPAATTHPLSHTRSQQRRA

SEQ ID NO: 359219 - protein, 74 aa, Zea mays
  Clone ID: MRT4577_90775C.1.pep
PLFFFFFWYQYGSSRFHFFFIWFSHLSRNKNTSEAVRNRFCPQLFTSPCEGEFGYNAPGQHDIMISASLSQVKN

SEQ ID NO: 359220 - protein, 45 aa, Zea mays
  Clone ID: MRT4577_90776C.1.pep
GAGNAAMQRCWQLTEPGTLTRAMTIGRLFCSTKLFKHCRFADLDI

SEQ ID NO: 359221 - protein, 95 aa, Zea mays
  Clone ID: MRT4577_90777C.1.pep
SFFGEKKNNPGGPFANLLSGGGGKFINAVGLSGLKNKNRAVSKTQFPLGGWFINYTRLCALCFSLVGRGNCDQINFFYRTPPLAPPRPKFYTPSL

SEQ ID NO: 359222 - protein, 161 aa, Zea mays
  unsure (1)..(161): unsure at all Xaa locations
  Clone ID: MRT4577_90778C.1.pep
PPPLPFGAGAPPAPHRAGAGGAAPPPGPPNRFFLPGGPPQGPLVNGAPRPACGSGRGRGPPXPSRGWGPPRCSGRGCYRPTPLSSRPSSSPRSPEERSRPPAAPLCSPPSFPSFFPPWFLVPPLTYQGFLVSPPCVQTRWFFHPLPPPVWAGLSFPIFPVF

SEQ ID NO: 359223 - protein, 99 aa, Zea mays
  Clone ID: MRT4577_90779C.1.pep
ILPADPPLICSFPFSPPPGHRRLLSTTATTPAASSSNPPTPEVVLYAIHSLSKDPSQALSVFRRSAAAGKTVGSASYNLMIRTLVSHTSSPPPPSCSSP

SEQ ID NO: 359224 - protein, 56 aa, Zea mays
  Clone ID: MRT4577_9077C.1.pep
ARTTTTIHHPHPHGPTLTPTRSRSERLHPVPLPPVSNRTTEYDQSRQPRASSPAGA

SEQ ID NO: 359225 - protein, 873 aa, Zea mays
  Clone ID: MRT4577_90780C.1.pep
MARIRSTAKVVREGDEAEGSDTVPISEAMQRSGLLTTEEMPAAEAGPTTVEGEENIVGTDSEDDYHLATPSKPSHLDFGKSTVSKADLSKMVKAGYFNEDQKKLLRFGEEETTPKPRKDEIVIFKSFLKAGLRFPLHGIVAEILRRFGIYFHQLTPNAIVRLNVYIWALRSQAVEPFADSFCRAHELHYQTKARKDGLHDNFGCYNFAYRKTTKCPVISYRSKWPAGWKSEWFYVKVDEDKEKLVQSPLELTFGETRPQCHIGDLKGPTWAALGEFEIISEHIGTRDLVQEFLAFRVFPTLKEWEMPKLEGEKKKGELVRLPYYFKFKKFFKKPCKEWLDTVEVMCNEILGNYSKKEDQLMTAAFGARPKRRLNRVLDALGFEYPDYEQLNKGAEGLKRKRVAEALIRDEEIPAKEKKVLKKRKISAPKRKSPEEEETPTPPSTSDVEEILKVMTEPMPTKLSPLGLQLTKLFEKVDEPDQPKINKPKRQRIIAVTEVIDKTPPRMSIQKTAAAEGKASEVAATEAATPEDVNLETSLENIDKILTENIEEAATVTEEILATVPGKGKEIVEETPDDEAYSFQNLIGQKLTKDEIEELKDYAKSCGYKPGALLFGGVDDEKLGCIRDQTGAKSMLLSKALKMQQDLEDKKHEAIIENLESKIKEQSAIIERKDFELQSTEGLLAETEAKILELNSKLINQSKQFDQEKLELNSKLKAEVQTSSELKKALTSLQDKCLNFGNNCIGRLKKIFYSVGASSGKFNPSAENLPQALDHIEAEIEELDEVIAGHGDFCAWVASRGTAAAFLKAGCEHGKVVNRPNFTLSSSILDDMPDLARSISNRFIKMVWTKGGREKAGDEARSHLKPDDEGEDDA

SEQ ID NO: 359226 - protein, 916 aa, Zea mays
  Clone ID: MRT4577_90781C.1.pep
MARIRSTAKVVREGDEAEGSDTVPISEAMQRSGLLTTEEMPAAEAGPTTAEGKENIEGTDSEDDYHLATPSKPSHLDFGKSTVSKADLSKMVKAGYFKEDQKKLLRFGEEETTPKPRKDEIVIFKSFLKAGLRFPLHGIVAEILRRFGIYFHQLTPNAIVRLNVYIWALRSQAVEPFADSFCRAHELHYQTKARKDGLHDNFGCYNFAYRKTTKCPVISYRSKWPAGWKSEWFYVKVDEDKEKLVQSPLELTFGETRPQCHIGDLKGPTWAALGEFEIISEHIGTRDLVQEFLAFRVFPTLKEWEMPKLEGEKKKGELVRLPYYFKFKKFFKKPCKEWLDTVEVMCNEILGNYSKKEDQLMTAAFGARPKRRLNRVLDALGLEYPDYEQLNKGAEGLKRKRIAETPITDEERPAKEKKILKKGKISAPKRKSPEQEGTPTPPSTSDVEEILKVMTEPMPTKLSPLGLQLTKLFAKVDEPDQSKINKPKRQRIIAVTEVIDKTPPRASIQKTAAAEGTAIVEGVASEVAAAEAATAEDTNLETTIKNINKILEDMAAEEAGATTEKTMATVPEKGKEIAEDPSDDEAYSFQNLVGQKLTKDEIEELKDYAKSCGYKSGALLFGGVDDEKLGCIRDQTGAKVIGTLSKSIGFPKLETDISRYRRQHIVGSLFYSNFKSMLLSKALKMQQDLEDKKHEAIIENLESKIKEQSAIIEKKDFELQSTEGLLAEAEAKILELNSKLINQSKQFDQEKLELNSKLKAEVQTSSELKKALTSLQDKCLNFGNNCIGRLKKIFYSVGASSGKFNPSAENLPQAFDHIEAEIEELDEVIAGHGDFCAWVASQGTAAAFLKAGCEHGKVVNRPNFTLSSSILDDMPDLARSISNRFIKMVWTKGGREKAGDEARSHLEPDVEGENDA

SEQ ID NO: 359227 - protein, 80 aa, Zea mays
  Clone ID: MRT4577_90782C.1.pep
TPLVHRIQIATAMCETPDSRARTLDPEQIVTRFSHSPPPDAADPGLRQVTALLQIDPGQIVGAGASKGDERRQGLAGRKR

SEQ ID NO: 359228 - protein, 57 aa, Zea mays
  Clone ID: MRT4577_90783C.1.pep
RLVLLPVQQQLYEVLHRSLVYRVRTCLLLEDGRAFRPHWSGFVLGAANLVCLAGVLE

SEQ ID NO: 359229 - protein, 74 aa, Zea mays
  Clone ID: MRT4577_90784C.1.pep
SKGITIGGSSFLYSGIAAVGWVFFFTCLPETRGRTLEEMGKLFGMPEPDTDMAEAYNGRSKEKAVEMPAVLGND

SEQ ID NO: 359230 - protein, 519 aa, Zea mays
  Clone ID: MRT4577_90785C.1.pep
MASADLAEAMEPGKKSNVKYASVCAIMASMACVILGYDIGVMSGAAIYIKKDLKITDVQLEILIGIISLYSLFGSFAGARTSDRIGRRLTVVFAAVIFFMGALLMGFSVNYGMLMVGRFVAGVGVGYGGMIAPVYTAEISPAASRGFLTSFPEVFINLGILLGYLSNYAFAGLPLHLGWRVMLGIGAAPSALLALLVFCMPESPRWLVLKGRLADARVVLERTSATPEEAAARLADIKAAAGIPRDLDGDVVAVPNKGRDGGSSETQVWKQLILSPTPAVRRILLSAVGLHFFQQASGSDSVVQYSARLFKSAGITDDNKLLGVTCAVGVTKTFFILVATFLLDRAGRRPLLLTSTGGMIVSLVGLGTGLTVVGHHPDAKIPSAVALCIASTLAYVAFFSIGLGPVTGVYNSEIFPLQVRALGFAVGVACNRVTSAVISMTFLSLSKGITIGGSFFLYSGIAAVGWVFFFTCLPETRGRTLEEMGKLFGMPEPDTDMAEAYNAAAKEKAVEMPAVLGND

SEQ ID NO: 359231 - protein, 45 aa, Zea mays
  Clone ID: MRT4577_90786C.1.pep
NKSCLQCKKKKKKKKKKKKKKKKKKKKKKKKKKKKKKKKKRGGPF

SEQ ID NO: 359232 - protein, 85 aa, Zea mays
  unsure (1)..(85): unsure at all Xaa locations
  Clone ID: MRT4577_90787C.1.pep
AVISMTXFLSLSKGITIGGSFFLYSGIAAVGWVFFFTCLPETRGRTLEEMGKLFGMPEPDTDMAEAYNAAAKEKAVEMPAVLGND

SEQ ID NO: 359233 - protein, 80 aa, Zea mays
  Clone ID: MRT4577_90788C.1.pep
SFKKVLKIHASFPHELMILIKISQHLRKYSMLTEGFIHCLDLVNCFLPTIIYNKNPLWHKTPRQVLKALHNPNWVSSFVK

SEQ ID NO: 359234 - protein, 87 aa, Zea mays
  unsure (1)..(87): unsure at all Xaa locations
  Clone ID: MRT4577_90789C.1.pep
SRLEQPAARHPRRAGTXICRRSTTXNPXRRAITGRTGGPGETPEASCARRPGGESDGARAGILLPNWCKQSRKASRGSYWVDEEGDK

SEQ ID NO: 359235 - protein, 74 aa, Zea mays
  Clone ID: MRT4577_9078C.1.pep
NTARQLFNLSIVIYMKAQIVTYLKHYSKFQHKNQLNYHESQSISPRKPKFISALWGKSKPGIPAFISGLPKLRS

SEQ ID NO: 359236 - protein, 75 aa, Zea mays
  Clone ID: MRT4577_90790C.1.pep
NNRCASCSVIVLICGILFLFQIPMYSFVLVFCLCLAILKGDLLDDMKLFKWILLFSIFLTSIHPIYLNCLLLNFM

SEQ ID NO: 359237 - protein, 68 aa, Zea mays
  Clone ID: MRT4577_90791C.1.pep
YLHIKKISKLFNMYVGIRFKSYSFHLRVVFPCWVKMVQVSINIREVNISGRLLELGIGYGRHVFFMCL

SEQ ID NO: 359238 - protein, 256 aa, Zea mays
  Clone ID: MRT4577_90792C.1.pep
FLLQVKAADNRVIQDQLNEKITECMELHAEVTHLKEQLSQALEAKDLVSNSMIHNNRVNHEVEHLVDQDVPREISSEPQQKQQSVEINELKQKVSELMEIKAQLEDRNQKLLEESTYAKGLASAAGVELKALSEEVTKLMNQNEKLATELSSLRSPTPAPRRFNNGPRGTRRESMSRREPASRRDTNASHEREKALEALLMEKEQKEAELQRKVEESKQKEAFLESELANMWVLVAKLKKSQGYDHEDLEAKHDGS

SEQ ID NO: 359239 - protein, 74 aa, Zea mays
  Clone ID: MRT4577_90793C.1.pep
YLSEILSIDADVSEDEFGKKVSVGTDPDTKHGNGPPGVALYGGADGPRHRAGWSVTWRRNDSSSAHFRTVRVTP

SEQ ID NO: 359240 - protein, 487 aa, Zea mays
  unsure (1)..(487): unsure at all Xaa locations
  Clone ID: MRT4577_90794C.1.pep
PTRPMIDNESNELLLPVEGFGVSLEDSSKEEKKNRKGLLNWFKLRKRDGASILTSSEGDKSSLTKSTAPSTPIGESVNFPAEPRISNSLAGENVSSDLFSIGHGEFPSGSIHGEETLSASGKTMDHVDLLREQLKILSGEVAFNTSALKRLTEEAGRSPKNEKIQMEMKKKTDEIKGKQQQIASLEREIAHATLGTQGKVDTLEHSPSYHELLEQLNEKSLELEVKAADNRVIQDQLNEKITECMELHAEVTHLKEQLSQALEAKDLVSNSMIQNNRVNREVEHLVDQDVPREISSEPQQKQQLTFPXLAXGLQSVEINELKQKVSELMEIKAQLEDRNQKLLEESTYAKGLASAAGVELKALSEEVTKLMNQNEKLATELSSLRSPTPAPRRFNNGPRGTRRESMSRREPASRRDTNASHEREKALEALLMEKEQKEAELQRKVEESKQKEAFLESELANMWVLVAKLKKSQGYDHEDLEAKHDGS

SEQ ID NO: 359241 - protein, 147 aa, Zea mays
  unsure (1)..(147): unsure at all Xaa locations
  Clone ID: MRT4577_90795C.1.pep
MGVCKCRKGTRGYWVGHQGPGCGVCICVPEHQRWVGNNYAEWGVNSEDDWAQHCVGCDSVLEGGTEXTTRLGCVRGGHTKCVRSHIQSVPTQTAPDGYGCPSCAAPIWAPSXIKDTGARLHTELKEAIGQTGMGKNVCGNHYVTIAK

SEQ ID NO: 359242 - protein, 117 aa, Zea mays
  unsure (1)..(117): unsure at all Xaa locations
  Clone ID: MRT4577_90796C.1.pep
QHPIPTSTAGGYLLLHLLALSLPIXTYTFFPYFSHHFLSPLTASTFYSPTIPSFLLQXTHHTMHLTVLAFTVHQPYALSLQPSLVHLYLQTFVSHQLQHQLLTTINHVLAANLDAYL

SEQ ID NO: 359243 - protein, 44 aa, Zea mays
  Clone ID: MRT4577_90797C.1.pep
KEEDACFCKHALHFWGGHASIFVGAGKQESVFIEGKLFAKYEIH

SEQ ID NO: 359244 - protein, 589 aa, Zea mays
  unsure (1)..(589): unsure at all Xaa locations
  Clone ID: MRT4577_90798C.1.pep
MASTGAGAVLAVVVLACALGARADGSDHKYKEGDHVPLYANKVGPFHNPSETYRYYDLPFCAPEHPKDKKEALGEVLNGDRLVDAPYELNFKEDRNSKVLCKKVLSKEQVAKLRDAVAKDYYFQMYYDDLPLWGFLGKLDKDKEQGDVKYLLFKHIHFDIMYNDNRVIEINVQTDPNVAVDITEDKEVPIEFSYSATWKKTDIPFEKRMDKYSKSSSMPQHLEIHWFSIINSCVTVLLLTGFLATILMRVLKNDFIKYSHEDESLEDQEETGWKYIHGDVFRFPKQKSVFAAIIGSGTQLLALAIFIFLLALVGVFYPYNRGALFTALVVIYALTSGIAGYTATSFYLQLEGTNWVRNLVLTGCLFXGPLFLTFCFLNTVAIAYSATAALPFGTIIVIILIWALVTSPLLVLGGIAGKNSDTEFQAPCRTTKYPREIPQLPWYRSTVPQMAMAGFLPFSAIYIELYYIFASIWGHKIYTIYSILFIVFIILIIVTAFVTVALTYFQLAVEDHQWWWRSVLCGGSTGIFIFFYCIYYYHARSDMSGFMQTSFFFGYMTCVCYGFFLMLGTVGFRASLFFVRHIYRSIKCE

SEQ ID NO: 359245 - protein, 64 aa, Zea mays
  unsure (1)..(64): unsure at all Xaa locations
  Clone ID: MRT4577_90799C.1.pep
LTNGVQPGKSEIFNVASTVEIRLFQRMAFDSQDFMTDFGPSCXXSQSRGLDASDSSPLSSPWSW

SEQ ID NO: 359246 - protein, 56 aa, Zea mays
  Clone ID: MRT4577_9079C.1.pep
HWRPPANAGIDAMIHYRAVLLVAMPDNNITITTGVSHGPLEAILLLKGRSWDGSCD

SEQ ID NO: 359247 - protein, 48 aa, Zea mays
  Clone ID: MRT4577_907C.1.pep
KKKKKKKKKKKKKKKKKKKKKKKKKKKKKKKKKKKKGKNNFKRGAGLF

SEQ ID NO: 359248 - protein, 359 aa, Zea mays
  Clone ID: MRT4577_90800C.1.pep
MATEASTSAAGGIWVEGMSADNIKGLVLALSSSFFIGASFIVKKKGLKKAGASGVRAGVGGYSYLYEPLWWAGMITMIVGEVANFAAYAFAPAILVTPLGALSIIISAALADIMLKEKLHIFGILGCVLCVVGSTTIVLHAPQERTIESVAEVWDLATEPAFLSYAAIVLAATFVLIYYFIPRYGQTHIMVYIGVCSLVGSLSVMSVKALGIALKLTFSGMNQLIYPQTWLFTIVVVACIVTQMNYLNKALDTFNTAVVSPIYYTMFTSLTILASVIMFKDWDRQNPTQIVTEMCGFVTILSGTFLLHKTKDMVDGLPPTLPVRIPKHEDDAAEGIPLRSAEGIPLRSPRATESFRSTL

SEQ ID NO: 359249 - protein, 92 aa, Zea mays
  Clone ID: MRT4577_90801C.1.pep
TQDQNKDNNKTPRRNRKQRRRRGGGPPQQRQKNRAAEKKKKSPPPPQRTGGGGKKKKNDNNPHKLTRETWNTWAAKTGKRNGGDRAGDLRKG

SEQ ID NO: 359250 - protein, 208 aa, Zea mays
  unsure (1)..(208): unsure at all Xaa locations
  Clone ID: MRT4577_90802C.1.pep
GLNHSVFGKVKGVQLSSYLQHSISYLSPSPAPSPSPYPSPSPSPSTSVPPSLSPSGSVPYLAPPTSSPSPRASPPLPXPPLFSXSDCNPFPPAGRPMLKPPCFGSGPKLPPFVHSPQPSAVPXPPPVHKPYLPPAFPPIPGRVDPPHPLPSPNHVPNAVPGPTYQMMPIPSPPVPHFRHSIPPRKKRSGTTTKSPPIAPXVFSPPFLK

SEQ ID NO: 359251 - protein, 80 aa, Zea mays
  Clone ID: MRT4577_90803C.1.pep
FVKAMQRPCVLHLYFEQYYMWFKLERGWLVLQGRQGLWLQMYKDCMRGVRPLLCITMRFCFVLLVLVGLNVPFPVSIDPP

SEQ ID NO: 359252 - protein, 55 aa, Zea mays
  unsure (1)..(55): unsure at all Xaa locations
  Clone ID: MRT4577_90804C.1.pep
VVGTTXLVPGVTTVRNCDRTCRVGRLIAHRSITSAVAPHLAMVGPLGPLCREVTS

SEQ ID NO: 359253 - protein, 43 aa, Zea mays
  Clone ID: MRT4577_90805C.1.pep
CRVKDDASVEGFLCYVIRKSLFFTITYLAVCGTLSLISAKSSS

SEQ ID NO: 359254 - protein, 133 aa, Zea mays
  Clone ID: MRT4577_90806C.1.pep
SARVHAIWSLNLITGATAVSSGGGSIISKKTTHGILNASSWGLTLPMGAIFPRYLKTFRQAGPAVAYLQRARQMLAYGNRVSGCPTEIHLRNLSMGITYSLHRIIGITDSDLGTLQIFTLFLRPKTDHRFRSA

SEQ ID NO: 359255 - protein, 193 aa, Zea mays
  unsure (1)..(193): unsure at all Xaa locations
  Clone ID: MRT4577_90807C.1.pep
RPGWVVXXWXXSFSLXPRXCXXAGXXXRGRXLCXXGAFXGXCLXLXRLVPPLLLFXSXVCSSLPLXAFRVLXPXCLCLPLPXAPVXPCRLXXVXASXXLGSAXLALXFXXKKKKCPVGPSSXGVLAXCPFVPVVXXXFVGXSLXXSXVXVPVPLFXAGSLRAXRFLCFAXPPPPPPGVVAARVQKXRVGXXRG

SEQ ID NO: 359256 - protein, 61 aa, Zea mays
  Clone ID: MRT4577_90808C.1.pep
TQLEVFPERQGKWNVTTKSRECLKSRKRYYSHAYTAREKQEAIDLFLGSFHPQPGKPALRW

SEQ ID NO: 359257 - protein, 87 aa, Zea mays
  Clone ID: MRT4577_90809C.1.pep
CRRRAAAPTTCTTSFMSANFGSRSETRGGATKTSSHTLEKFFVGVSSYALKHLPKHLNTLMILKKDPISSLDKINKCALPLARGGVY

SEQ ID NO: 359258 - protein, 30 aa, Zea mays
  Clone ID: MRT4577_9080C.1.pep
MGCWLGWVCLPALSLRMRSGNPRLRRRRFW

SEQ ID NO: 359259 - protein, 134 aa, Zea mays
  Clone ID: MRT4577_90810C.1.pep
MASSLPAFTVRRGDPVLVAPAGPTPRETKPLSDIDDAEGMRFYSSGIHLYRANPAKAGQDPARVIRDALARALVPYYPLAGRLREVEGRKLVVDCAAQGVMFAEADADGLTGGDFGDVQSPPFPGFESSWRAPT

SEQ ID NO: 359260 - protein, 73 aa, Zea mays
  Clone ID: MRT4577_90811C.1.pep
GPEVHGPGSAPRLGAREAPCRALRCLRGNLTLPRLRPRRRLRLLAARRKTGSTGYLVTISRLHRSPSWCTRGT

SEQ ID NO: 359261 - protein, 107 aa, Zea mays
  Clone ID: MRT4577_90812C.1.pep
LCLTKTQRIRTGQRNAANQSSIKPPLRMQQQQSNQAALPKSETLALLRFDLPYCSTRVKLDPSALPPTTRRTDSERRREKSNSPTSPGSAGEGEGAEEEAVLPCRTY

SEQ ID NO: 359262 - protein, 78 aa, Zea mays
  Clone ID: MRT4577_90813C.1.pep
RCFLCSAHCQELPRMPLSTPAFEPLTAESLPLSELRILRRSDLRSADDGYLIDVLHHWALTRCRAVTPHLAHCSDHAR

SEQ ID NO: 359263 - protein, 58 aa, Zea mays
  Clone ID: MRT4577_90814C.1.pep
LFCFTNKTQVIPFVESYGISTKHNNHMLRMDCSHNYNRKIPMGLPVVAKLFTRLQLYT

SEQ ID NO: 359264 - protein, 136 aa, Zea mays
  unsure (1)..(136): unsure at all Xaa locations
  Clone ID: MRT4577_90815C.1.pep
MDARMFGLENPLVAALHHLLDARAMAATPADVKELAGAYAFVVDMPGLSTGDIRVQVEDERVLVISGERRREERXDAKYLRMERRMGKFMRKFVLPDNADVDKVAAVCRDGVLTVTVEKLPPPEPKKPKTIEIKVA

SEQ ID NO: 359265 - protein, 93 aa, Zea mays
  Clone ID: MRT4577_90816C.1.pep
GKTREELVLDLARWGCKARAATVKCSLDPCMTARPKIIKVDGGTDHGMTLADLSDAVQGLEHIVEPSKPPSSLTWPQVLVVLEGGGPRWRRAL

SEQ ID NO: 359266 - protein, 73 aa, Zea mays
  Clone ID: MRT4577_90819C.1.pep
PRVRKKKKKKKKKKKKKKKRKKKKKKKKKKKKKKKKKKKKKKKKKKKGGAVLRDPSLLPGACDVIVFFWGPQN

SEQ ID NO: 359267 - protein, 69 aa, Zea mays
  unsure (1)..(69): unsure at all Xaa locations
  Clone ID: MRT4577_9081C.1.pep
TRXXRRXEPTTXRXXRHPLMXXXGXXRRXXXARXXSSHPSPRGRRTGRRERRAYVXTXRGRAXPRXPRT

SEQ ID NO: 359268 - protein, 63 aa, Zea mays
  Clone ID: MRT4577_90820C.1.pep
KCHVELLDLGTKNPALVLAPLDQEERGESLNFEVFYNMFKLIKDHLGKYGLTLFRGGQNPKQG

SEQ ID NO: 359269 - protein, 50 aa, Zea mays
  Clone ID: MRT4577_90821C.1.pep
QVYFTFLVICTTQESVSSYQVIVSKKKKKKKKKKKADNKKKKTKGGATTD

SEQ ID NO: 359270 - protein, 81 aa, Zea mays
  Clone ID: MRT4577_90822C.1.pep
PVRFRLTPSSRNRQGVRGCGPARSDRLRVSSAVTPGANREPLHEIRVVDHQVCRKGPRRRLQVISAECATWLTSDRVYQIS

SEQ ID NO: 359271 - protein, 69 aa, Zea mays
  Clone ID: MRT4577_90823C.1.pep
RTGRLRARWHIQLLKTCSTARTSAPWHTQQPHRLSIKPQMAHAHLRTPHNNKVAGEGATSPHRRDNVFY

SEQ ID NO: 359272 - protein, 105 aa, Zea mays
  unsure (1)..(105): unsure at all Xaa locations
  Clone ID: MRT4577_90824C.1.pep
PLVKLLLLSPKVGPVPVPKARTSHSKTPRFRGPSPPRSNWAKVXRTKGFPGGRCRGFPPPCFCPTPCHLFARSPKGRRGSPSIGSRPAQGPRHKKQGGAGFVNPN

SEQ ID NO: 359273 - protein, 85 aa, Zea mays
  Clone ID: MRT4577_90825C.1.pep
FCKEVWPNRSAGRSGVDPPLAAIFNHKGAFLFEFALNVVPYPPLINILLCPGAPCFFVTPRAKGSHNLYPPTPKGLLTFFPSVRI

SEQ ID NO: 359274 - protein, 131 aa, Zea mays
  Clone ID: MRT4577_90826C.1.pep
MVSAKKHVPIVKKRTKRFERHQHDRFMRVSPSWRKPKGIDSRVRRRFRGTIAMPSIGYGSNKKTRYMAPSGFKAFIVSNKSDLELLLMHNKTHAAEIAHNVSSRKRVDIIARAKQLGVKVTNPKAKVTTEV

SEQ ID NO: 359275 - protein, 46 aa, Zea mays
  Clone ID: MRT4577_90827C.1.pep
QVATRCNDPQLIDFIESEFLEEQVEAINKVSKYVAQLRRVGNKGHG

SEQ ID NO: 359276 - protein, 582 aa, Zea mays
  unsure (1)..(582): unsure at all Xaa locations
  Clone ID: MRT4577_90828C.1.pep
MHKPVASVASLCPQLWHRHFRRAPLLPRARGLPSSSPILTRRRSVLPRSTSTHLAAVSTAAAAVEAPSATPYPVYDRLLPCPLQDDPPRIEHLVAREDEVAADFIARSLGLPPLYAADLIEFGAVYYALVAPQPPPYASPEHFRLFREVTEPSVLRRRASIKGKTVREAQKTFRVTDPNQRLEAGTYLRVHVHPKRFPRCYQIDWKSRVIAVADEYVVLDKPAXISYLHRIKFTSTNMSMYNVLPLQHLTQPEARVLGEASFGLLDVVGSXLQMTSQSLGYGXFSEFQMITTXNFEPXVGGATDNIEESCAVFTSRALGLETPLLTTHQIDNCSEGCVVLSKTKEFCSVFHGLIREKQVKKLYLALTTAPVSTGTITHYMRPVNRAPRLVSEGILFIFGCRETVCSLYEXVHTDHLLLMLWPLLKIVKYCIERWHLCQMEVLDCRKVPWPSSSIRKAYNVNGCGWPQQEAAYECKINLLTGKTHQIRAQLAAIGAPIIGDSAYMTAAMAAMVNPSINPFGRERLSYNSEEEKEAAVEAWIASHGKEPKSVIGLQASEISWDHEGKHHSYKAGVPWWWQDPDS

SEQ ID NO: 359277 - protein, 121 aa, Zea mays
  unsure (1)..(121): unsure at all Xaa locations
  Clone ID: MRT4577_90829C.1.pep
LAVLHFLLAPLHFLVIASRARESRAXAGRMGWFRVLTSWGLLFSSPFLFRVGAFFSRFGVGLCLYGXLLRFYRRLLVCFSPFLCRFSPFVFARGPAPFSGGRGPLCPLRPGMTVLRPFKVS

SEQ ID NO: 359278 - protein, 189 aa, Zea mays
  unsure (1)..(189): unsure at all Xaa locations
  Clone ID: MRT4577_9082C.1.pep
MQQARRFCGXSVLQQPNCANCEQPYPCHILTIQXAFTTQHXQNQFLPAAGGGVGHXVNPXAALLCKEQRCLHSKPTLASVRTYVAXNSQQQHXLNSFXPTLSXQLAMXVNPAXYVQQQQLVXCSPLAVGYAPTYLQQQWLQQIVPVLTQLGVANPVGYLQQLFPFNQLTLSNSAAYLQQGQQLLNPLVV

SEQ ID NO: 359279 - protein, 255 aa, Zea mays
  unsure (1)..(255): unsure at all Xaa locations
  Clone ID: MRT4577_90830C.1.pep
PRVRATSVGGATDNIEESCAVFTSRALGLETPLLTTHQIDNCSEGCVVLSKTKEFCSVFHGLIREKQVKKLYLALTTAPVSTGTITHYMRPVNRAPRLVSEDCIERWHLCQMEVLDCRKVPWPSSSIRKAYNVNGCGWPQQEAAYECKINLLTGKTHQIRAQLAAIGAPIIGDSAYMTAAMAAMVNPSINPFGRERLSYNSEEEKEAAVEAWIASHGKEPKSVIGLQASEISWDHEGKHHSYKAGVPXWWQDPDS

SEQ ID NO: 359280 - protein, 150 aa, Zea mays
  unsure (1)..(150): unsure at all Xaa locations
  Clone ID: MRT4577_90831C.1.pep
PGSPPTHCIERWHLCQMEVLDCSKVPWPSSSIRKAYNVNGCGWPQQEAAYECKINLLTGKTHQIRAQLAAIGAPIIGDSAYMTAAMAAMANPSINPFGRERLSYNSEEEKEAAVEAWIAFHGKEPKSVIGLQASEISWDHXGKHHSYKAG

SEQ ID NO: 359281 - protein, 55 aa, Zea mays
  Clone ID: MRT4577_90832C.1.pep
VGGATDNIEESCAVFTSRALGLETPLLTTHQIDNCSEGWFVYHFICIYLFAKMWE

SEQ ID NO: 359282 - protein, 217 aa, Zea mays
  Clone ID: MRT4577_90833C.1.pep
MPPLPAPASSIPSAPPRGAATDAARSSVNLLRSLARARRADLSHRALLLFRTLHASPSPPPPRYSLPAALSAAAFLAALPEGRQLHALAAKLALAPAHTVVANSLVHFYASCGRPGAALAVFRRVPDRSLVSWNTAVDALAGNGDHLAALDLFREMQRDRPDLAPDAYTVQSVLGACAATGALSLGVYAHALLLRELGGASAVSRDVLINNSLVELY

SEQ ID NO: 359283 - protein, 73 aa, Zea mays
  Clone ID: MRT4577_90834C.1.pep
ELSQIEARPCTQPYSYSHRTNDVACPRMNSKAMFVLAWICFSQLKELWCGVRVGLVESSDSGLVSSSKPKFSF

SEQ ID NO: 359284 - protein, 32 aa, Zea mays
  Clone ID: MRT4577_90835C.1.pep
AYISLRIPIHYSDNRQQQLHHEKYLNSMLTLT

SEQ ID NO: 359285 - protein, 69 aa, Zea mays
  unsure (1)..(69): unsure at all Xaa locations
  Clone ID: MRT4577_90836C.1.pep
GGGQIIWGRSDXGANLIXKVDNNYFRWGKVSHVTLGKAVYGSKFTLEPTXSDLVVCFNTKSREDSLNVP

SEQ ID NO: 359286 - protein, 101 aa, Zea mays
  Clone ID: MRT4577_90837C.1.pep
VRGGIRGERRGVGGPGRYPWALQLKTTGGSGPLTLTAYRFSLSSLTSSEEEIELKRAPLGVASFLYFRVVRTPEVVERSGPFLAAVTRALSRRYEGLISPY

SEQ ID NO: 359287 - protein, 77 aa, Zea mays
  Clone ID: MRT4577_90838C.1.pep
QTHRCVGRLLLRWLPRSRREHRCRIRTPITHRAERSKMQWETSMTRNTFMRATECTLVSLLTTLLCYVATTSCMGLI

SEQ ID NO: 359288 - protein, 79 aa, Zea mays
  Clone ID: MRT4577_90839C.1.pep
MRASVLVGFMAVSACIACIAHGGNFYQDTEMTWGQGRGKVVDGGRGLDLSLDRASGSGFQSKDEYLFGKIEMQMKLVPG

SEQ ID NO: 359289 - protein, 170 aa, Zea mays
  Clone ID: MRT4577_9083C.1.pep
MSGGSDVSSPSSGRISTSSLSDLKDLELSSESGCLSIVVLGASGDLAKKKTFPALFNLFQQGFIQSGEVHIFGYARSDISDEGLRERIRGYLKGASDEHLSQFLQLIKYVSGSYDNGAGFELLNKTISENETSENNQPGNSRRLFYLALPPSVYPSVCKMIRSYCMTPSS

SEQ ID NO: 359290 - protein, 77 aa, Zea mays
  Clone ID: MRT4577_90840C.1.pep
MTYKKPRRPYEKERVDAELKLAAAHGLRCKRELRRDQKGVRRNRNAASLSLSLDDNHPPPKLPPPPPLPFFSSPPPP

SEQ ID NO: 359291 - protein, 173 aa, Zea mays
  Clone ID: MRT4577_90841C.1.pep
IQSSVAVRSNQKLAFRFFGPYTVLQRVGTVAYKLQLPETSSIHPIFHVSQLKASIGRQHSVVPQLPDANPSFQVPVQVLAHRIIQRGGALIPQIKVVWSGWDPALAIWEDAEALKAAFPNAPAWGQAASKGEGTVSTSVEEEAVEETEVEQAALGGKRTRRTNVCVMSPEWAV

SEQ ID NO: 359292 - protein, 61 aa, Zea mays
  unsure (1)..(61): unsure at all Xaa locations
  Clone ID: MRT4577_90842C.1.pep
MAASLRSSSSFCSRLLSFSSGXSLCPWRLFFSSSVHLVAPLQSETFSFDXIQLSPENPATA

SEQ ID NO: 359293 - protein, 87 aa, Zea mays
  unsure (1)..(87): unsure at all Xaa locations
  Clone ID: MRT4577_90843C.1.pep
ASPFFFFFFFFFFFFFFFLLGFFDLIQRKQHTACSMFGYTWIPREAKQDDRGPKTETETKAQFERTHGNGASWGLAPPPRRGXPKTK

SEQ ID NO: 359294 - protein, 61 aa, Zea mays
  Clone ID: MRT4577_90844C.1.pep
IKLLNDEKCKKLNSIIGAVLFEGLSFLPFVYSVIAFFIASLNLIHWAVFSIGYLGKPGVSQ

SEQ ID NO: 359295 - protein, 38 aa, Zea mays
  Clone ID: MRT4577_90845C.1.pep
KGVVFFSTNYVRLTRSPDYMVKYVASGTEMPSRFCSPP

SEQ ID NO: 359296 - protein, 130 aa, Zea mays
  unsure (1)..(130): unsure at all Xaa locations
  Clone ID: MRT4577_90846C.1.pep
AAHPQASQGKKSSPGHTRPRGRAGAARTRPRPRXGGEAAXQPEKATDQGGQPSNGDPXNGSXETPGTASPRTGGDRXNRPGNRTAXSPPRGGGEGGRGHGHRPAGPGGRTGPXXNTPARGQAGAPGAAGP

SEQ ID NO: 359297 - protein, 61 aa, Zea mays
  Clone ID: MRT4577_90847C.1.pep
PTQHTHPPLLPHFFQPTNHSSSNDTIITSVNIPTSLSINSTNTSTIPHYSLPTNNTIPHIL

SEQ ID NO: 359298 - protein, 60 aa, Zea mays
  Clone ID: MRT4577_90848C.1.pep
TPFNPLGQWGLKNDLMFARTKNVVPCLGCSLNPEWLARPTRLFFYFTKKHIYLYTIYIQY

SEQ ID NO: 359299 - protein, 187 aa, Zea mays
  unsure (1)..(187): unsure at all Xaa locations
  Clone ID: MRT4577_90849C.1.pep
PRVRQHVRAGGCSTGSYTDDVYHEFNHGFIPVYITDRQLTXEVVFVMLXIPPLWMTKYGRVGEHLSXYPTIDFTNDRRTHCLPGVLVGLQIHDELAMDAARLPIHHTIQDFRVMLDDAHRGRIQTIIKEANNETGAARXTGTSGTPEEPDTLREQXAVKTRFTIISRDGSSAIXENERDLVRRRCGR

SEQ ID NO: 359300 - protein, 179 aa, Zea mays
  unsure (1)..(179): unsure at all Xaa locations
  Clone ID: MRT4577_9084C.1.pep
SEPGRRFECFLLPLGCGAGRRQAGGEMGRCGGGSGAGAGGGALGGCALLTAALVISTLVIQGAGGQDAPSFHTGNELPNPHLRQVPAALPSLPVQPYAPHPKISADNPTAAPSFQKIPWLSLTSPPLPAIGRRMQSPAASPETAVHPAKHXQDHGTXVSAPSNVSHHHAMPANIHMEKL

SEQ ID NO: 359301 - protein, 127 aa, Zea mays
  unsure (1)..(127): unsure at all Xaa locations
  Clone ID: MRT4577_90850C.1.pep
RSLTCDFIRGLGCYIKSTNWTSLYNVLNRNNLEIPNLTQLNHIALYPAFVIWNNTEQIGIDNXLRTLNHDXNTHCDAXLSAINLVVTRSYTHTVSYTLQPATFGSFPYFLYTSGHFPRLSLNSCISL

SEQ ID NO: 359302 - protein, 63 aa, Zea mays
  Clone ID: MRT4577_90851C.1.pep
VIHLCSIQITSRWISTKQGCLISFMRVQTCSVTAQYRDCWIAVRVSTTIAYGVSRLNWICLIR

SEQ ID NO: 359303 - protein, 925 aa, Zea mays
  Clone ID: MRT4577_90852C.1.pep
MAVVEKKLDDDNIVLHIVNGLDEYNPLVEQSRVVTNNATCGHSGGFKHDNHGHYDGCTNNQRGREGFFHDDTIHGGSPNNPYNDHQHPVCVKLGHTSGHCFRTYGKSSPMPLKAYRRWRVRWSRERQHESVGVRQWCVRVELRSPWSEQWRTIELTLRRVTSVPNINEVNNVGDVGECARVEPDRSFEAWQLHDGTRDGGEDVHVLGARMGPLRNRDSKVGRWPSPTMELLRLTATRSDGCAGWLEMTMRMTSGRMLQRSLAIAEDEGDKHSVKRCRPSTSAVWLDFEKLFKIVNGKKVSGGTGHLTRHRDRCPRRREKTCMSQSQISFNPDGSMRIWKYCPMVARNELVRLLARLEIPISLGENAAFEHYIRTVHNPKFVPVSRQTTTRDMVKYFTDKKAKLVETLSSSDVNCVCLTSDIWSGNAKEDYLSVVAHYINPDWQLEKRVLALVLIDVSHNGQNIADHVAGVLADYGLTNKVFAFTLDNASSNAAAMRLLRPIMSPYLGIDNGVESEMFLHQRCACHIINLIVKDALDALKNLIETFRTAISFLNSSNQRIAAYKSYCIATKIRPRKFQLDMEVRWNSTYLMLKHLFPHKIHFTTFMHANYPRAEGDQFILTDEHWVVGEKVLKFLELFYDSTVALSGVYYPTSPLMLHFLVKIAIHLKNYANDTHIRGVIQPMIDKYNKYWRNIPLLYSFAFILDPRAKMKGFSRVLRRLMNLTSTDYAVYQVTTRAKLTDVYNKYEEKYGSVRLNRVVPPNLSGKKRSAWDEIYDDADDVGTSVGMHSFASTLNIARDTSATALLHAASSSASTASELISYLDCDTVNQLTDDFNILHWWHQHKLTYPVLSIMAKDILIVPVSTIYSESTFSLTGRIIDERRRRLKSDVVEMLTCIKDWEDAEARMQHMVDDKELEETFEDLYLD

SEQ ID NO: 359304 - protein, 85 aa, Zea mays
  unsure (1)..(85): unsure at all Xaa locations
  Clone ID: MRT4577_90853C.1.pep
ELDGLNITFNQDQSRGGGGGGCGYXGGRSRGGYGGGRRDGRYGGGGXFGGRGEGCSSSYRSVGRYCTPREGEGGGYRRRGDGWKH

SEQ ID NO: 359305 - protein, 87 aa, Zea mays
  unsure (1)..(87): unsure at all Xaa locations
  Clone ID: MRT4577_90854C.1.pep
VKKKAGEPTSVSPGGKQKDFCKNNCKNAWNCPNNPKHPFKHMDRVCRKISRPGERKFKXHXKKKKKKKKKKKKPPKKKKKKKKKXXK

SEQ ID NO: 359306 - protein, 43 aa, Zea mays
  unsure (1)..(43): unsure at all Xaa locations
  Clone ID: MRT4577_90855C.1.pep
GGXXLGGLVCSPNFKRNGFFNLFGTLTSFTLFFECFHQPYFPF

SEQ ID NO: 359307 - protein, 88 aa, Zea mays
  Clone ID: MRT4577_90856C.1.pep
VRPCQQSIFPSLLQNFPSSLDWVPDSPVHHGQLKVVLAQEQLCRGFLLRVCILKCVVRIGGIFIRPPFPKKKTPKKKKKKGRQTTSEL

SEQ ID NO: 359308 - protein, 313 aa, Zea mays
  Clone ID: MRT4577_90857C.1.pep
WFYRKGPSGFSGASTAEEVTAGVDGHLLVAVITGATSGIGLETARVLALRGVRVVMVVRNVSAGLMAKDAIVAKTPDARIDVLELDLSSIASVPTRPPAVGSLKLPLNILINNAGVMTRHCTRSCDGLELHFATNHIGHFLLTNLVLENMKSTCRDTGTEGRIVNVTSAGHVMTYPEGIRFETIRDPSGLNDFVAYGQSKLANILHTNELSRIFKEEGVNISANSVHPGLIATNLFRAFGRTIIAAFFNTVGRIMRRSVEQGAATTCYVAVHPQVKGLSGKYFANCNIASPSSQASDAELAKKLWEFSLQTVS

SEQ ID NO: 359309 - protein, 56 aa, Zea mays
  Clone ID: MRT4577_90858C.1.pep
LVPILCLLLCLKSHLSCEILKIKENHSAVVGNIRKCDLEFERASCLGTFGFKLRSY

SEQ ID NO: 359310 - protein, 52 aa, Zea mays
  unsure (1)..(52): unsure at all Xaa locations
  Clone ID: MRT4577_90859C.1.pep
LRWSXPWRTMDWXWIRENGXXXTXIXSXXXRXXXYRXERREQRRASXVRKRI

SEQ ID NO: 359311 - protein, 56 aa, Zea mays
  Clone ID: MRT4577_9085C.1.pep
INSVTCRVTAHRPEFWLETWMLLHCGQIAWQQYDTYTMCLKALDLVLLTTPSICNL

SEQ ID NO: 359312 - protein, 45 aa, Zea mays
  Clone ID: MRT4577_90860C.1.pep
DSPCNVTLCAAGVVVTLIVTVTLVSALTPTPFAFLPYFLDTFNGF

SEQ ID NO: 359313 - protein, 53 aa, Zea mays
  Clone ID: MRT4577_90861C.1.pep
PSQAVRIYPLICIGALPTRLPSIYKSSHMLSRPPVLQRGTAPRLLLARCSFYH

SEQ ID NO: 359314 - protein, 162 aa, Zea mays
  unsure (1)..(162): unsure at all Xaa locations
  Clone ID: MRT4577_90862C.1.pep
FLISLHCQDPMDLGXTVHKKLQSGSCTSPSDFAADARLTFNNAMAYNPWGHAVHDMTIQVNKMFESRWRPNEKKLAFAATEXNLKRKTIPPMDCSETWSVYSXEKPNMTVEEXQAFENCLVSISHXSYLLQQCNDSNTVSDYMLFELKKHLLISIIIYIMTY

SEQ ID NO: 359315 - protein, 133 aa, Zea mays
  unsure (1)..(133): unsure at all Xaa locations
  Clone ID: MRT4577_90863C.1.pep
TPXSTPVPPPPYXPFPPPPVPPPTVPPPPPVVVPPPPAVAPVAAAPPTPPGTXNLPVGPPRPSFPVPSPYXPPVPRVYFRSFRVCFSPPVFFIPXPSVSVFSPVFTPGFTSPLPPPAWAAGPWXCFSPPPAFF

SEQ ID NO: 359316 - protein, 92 aa, Zea mays
  Clone ID: MRT4577_90864C.1.pep
RTRHTSYSTTRSCKTIASHQSLQCSQDDISHVDNRKEQSELTHPCLCHIYTLPSSRHCCSSLAAQQLWTALPLYLLLRTTLCLLNHTPTDCL

SEQ ID NO: 359317 - protein, 53 aa, Zea mays
  unsure (1)..(53): unsure at all Xaa locations
  Clone ID: MRT4577_90865C.1.pep
MAPGSKAERKAVLDAGAXMFNVVTSVGTIMVNKALMATHGFXSFGRSVPNLHS

SEQ ID NO: 359318 - protein, 267 aa, Zea mays
  unsure (1)..(267): unsure at all Xaa locations
  Clone ID: MRT4577_90866C.1.pep
SSPVGAGTRSGRNQTGKRNGTSPRLLPPLASCCRPSPATAPPPLPDLPAVPKXCPPKPYPPRPFPPLPRGLXPALPPPXLINPXHPPPPLPWRARPAHPPPRAASAAAALTASTXPAPRXAASSRRSSCSGSRAWPRGSARRPRRRGRSRPGPPGRRRHRLRRPPRSTSPRGRSTRPPSRPCPRRPPPPRRLRRLMRSRPRRRRLRCWMRSGISIGSLSPPRHLCPCTTCPRPALGDGGLVMLRILDHISALEISGKLSMSGAFTGL

SEQ ID NO: 359319 - protein, 52 aa, Zea mays
  Clone ID: MRT4577_90867C.1.pep
MAPRSKAERKAVLGAGAWMFNVVTSVGIIMVNKALMATHGFSFGRSMPNLHS

SEQ ID NO: 359320 - protein, 211 aa, Zea mays
  unsure (1)..(211): unsure at all Xaa locations
  Clone ID: MRT4577_90868C.1.pep
MPTNLEFFWGNIFLGHPCPLLGSPLQKTGVDSTCQGSMAPGSKAERKAALDAXAWMFNVVTSVGIIMVNKALMATHGFSFATTLTGLHFAMTTLMTLVMKWLXYIQPSYLPLPELVKFAFFANLSIVGMNVSLMWNSVGFYQIAKLCIIPVLCILEIIFDKVRYSRDTKLSIVLVFIGVAVCTVTDVSVNSQGLLAAVIAVWSTALQQHAF

SEQ ID NO: 359321 - protein, 69 aa, Zea mays
  Clone ID: MRT4577_90869C.1.pep
WFFFFLKTETNSTAYLQLYSKLTRSIPWKPNTESGTYESQVEKLLLTQTRLPRVFSYTSFFDFSEFREG

SEQ ID NO: 359322 - protein, 89 aa, Zea mays
  unsure (1)..(89): unsure at all Xaa locations
  Clone ID: MRT4577_9086C.1.pep
KTYPEFTETARARIVNAGGECLTFDQLALRAPLFYNXVLLXXPGGGRDSFWHFXXXPGVPHSHTKPFVPSNGRKFEKAFFWRNSXGFKV

SEQ ID NO: 359323 - protein, 211 aa, Zea mays
  unsure (1)..(211): unsure at all Xaa locations
  Clone ID: MRT4577_90870C.1.pep
MAPGSKAERKAALDAGAWMFNVVTSVGIIMVNKGLMATHGFSFATTLTGLHFAMTTLMTLVMKWLGYIQPSYLPLPELVKFAFFANLSIVGMNVSLMWNSVGFYQIAKLCIIPVLCILEIIFDKVRYSRDTKLSIVLVLIGVAVCTVTDVSVNSQGLLAAVIAVWGTALQQHYVHHLQWKYSLGSFILLXHTGSAQAASLVIVGXFVDFWL

SEQ ID NO: 359324 - protein, 325 aa, Zea mays
  Clone ID: MRT4577_90871C.1.pep
MEDSTRKCIEMLCAPDGELPEKLRNLEPRLIEHVSNEIMDRDPNVRWNDIAGLEHAKKCVTEMVIWPLLRPDIFRGCRSPGRGLLLFGPPGTGKTMIGKAIAGEAKATFFYISASSLTSKWIGEGEKLVRALFGVASCRQPAVIFVDEIDSLLSQRKSDGEHESSRRLKTQFLIEMEGFDTGNEQILLIGATNRPQELDEAARRRLTKRLYIPLPSLEARAWIIRNLLEKDGLFMLSEEETSAICKLTEGYSGSDMKNLVKDASMGPLREALQTGVEIAKLSKEDMRPVMLKDFENAMREVRPSVSSSELGTYEEWNRQFGSLSI

SEQ ID NO: 359325 - protein, 112 aa, Zea mays
  Clone ID: MRT4577_90872C.1.pep
MRSQVILVVVTLALLGVLAALPLGEGSSWPCCDNCGVCNKKFPPECQCNDISARGCHPECKKCVKNKFTVPPGGGPGPVVTYTCADVLTNFCQRRCTPAPAPPPKAFVGGVF

SEQ ID NO: 359326 - protein, 161 aa, Zea mays
  Clone ID: MRT4577_90873C.1.pep
RCPSDATRGEAGVRRRNRRTEARAPARGAGQLIAGRTVEPWENRWVPPLPHPPVAAAAFMLGSGSEVARTSGRVICLSVSQPACHEERPGKVGWVEGCQTVTVAGGGSGSGASSRGYGYGYEPASRIAPRVGKHSAVRHRTAPPQPPHGHMPPSPFLRHSI

SEQ ID NO: 359327 - protein, 52 aa, Zea mays
  Clone ID: MRT4577_90874C.1.pep
MAPRSKAERKAVLGAGAWMFNVVTSVGIIMVNKALMATHGFSFGRSMLNLHS

SEQ ID NO: 359328 - protein, 613 aa, Zea mays
  unsure (1)..(613): unsure at all Xaa locations
  Clone ID: MRT4577_90875C.1.pep
MGAGCVFPNKGDNNVERIQRSKYFQALLQKSKANVSEQRNATCQEFSVQWAPCVDESQAEMENEKLSIRASKLMMQTKLTSLYSSKSLKTNGVPNKNMFKSENSSKVCAGVENRTSQNSNRRHAYLDVEEDEKSHGQLQNAKWKHTGFRSPIFEVANSPSSNDEADAPANEFTTAKRMMGLDVVQKPAQNGPQGASVSPQCDNNYSTRNYGVRPSWNSRRGPRGSFIPPIRNNGGSGTTISRVTGKNDESMEDSTRKCIEMLCAPDGELPEKLRNLEPRLIEHVSNEIMDRDPNVRWNDIAGLEHAKKCVTEMVIWPLLRPDIFRGCRSPGRGLLLFGPPGTGKTMIGKAIAGEAKATFFYISASSLTSKWXELLLWSLAGARGISHLTLVPSANXAPQSRSSCLFYCXIGEGEKLVRALFGVASCRQPAVIFVDEIDSLLSQRKSDGEHESSRRLKTQFLIEMEGFDTGNEQILLIGATNRPQELDEAARRRLTKRLYIPLPSLEARAWIIRNLLEKDGLFMLSEEETSAICKLTEGYSGSDMKNLVKDASMGPLREALQTGVEIAKLSKEDMRPVMLKDFENAMREVRPSVSSSELGTYEEWNRQFGSLSI

SEQ ID NO: 359329 - protein, 356 aa, Zea mays
  Clone ID: MRT4577_90876C.1.pep
MAPGSKAERKAALDAGAWMFNVVTSVGIIMVNKALMATHGFSFATTLTGLHFAMTTLMTLVMKWLGYIQPSYLPLPELVKFAFFANLSIVGMNVSLMWNSVGFYQIAKLCIIPVLCILEIIFDKVRYSRDTKLSIVLVFIGVAVCTVTDVSVNSQGLLAAVIAVWSTALQQHYVHHLQWKYSLGSFNLLGHTAPAQAASLLIVGPFVDFWLTNKRVDAFNYTSIVTFFIVLSCIIAVGTNLSQFICIGRFTAVSFQVLGHMKTVLVLTLGFLFFGKEGLNFHVALGMLLAVIGMIWYGNASSKSGGKERQVYPTPSEKTQKHGALSSQSELDQKGLTETHKGIRCLLSTGRPGFIF

SEQ ID NO: 359330 - protein, 90 aa, Zea mays
  Clone ID: MRT4577_90877C.1.pep
LTSRVYRLTGRRLCDGMAPLGAIAAAASTGRLPPVTRVLHSSYACWTSAPLRGGLGSALPTADSVSGPQTKPFLEAVDLVEQLARHSLGL

SEQ ID NO: 359331 - protein, 242 aa, Zea mays
  Clone ID: MRT4577_90878C.1.pep
MERMEFGRKPLSLVELCVRKAIDNLRYMGSVDGVEMDLLKRILPHCTMEQLTRVENSTEMDLSLVTDPLWRRFYQREFGQEHTSKVIARLKELGQKTPYTWRELFAAKKEKQKEVEDKMLDKFTKKFQAERAEKQSKQIKLCTKVPPSSKRSFFGGSGPSSVSSSSYKSPILKKARIEVNSRARLQSAMQKNTFARSSQPIRTTSVSGQPVRTTTIHRPNSTVTITKPMGKSRQIQNSRPKF

SEQ ID NO: 359332 - protein, 335 aa, Zea mays
  Clone ID: MRT4577_90879C.1.pep
MAPGSKAERKAALDAGAWMFNVVTSVGIIMVNKALMATHGFSFATTLTGLHFAMTTLMTLVMKWLGYIQPSYLPLPELVKFAFFANLSIVGMNVSLMWNSVGFYQIAKLCIIPVLCILEIMFDKVRYSRDTKLSIVLVLVGVAVCTVTDVSVNSQGLLAAAIAVWSTALQQHYVHHLQWKYSLGSFNLLGHTAPAQAASLLVLGPFVDFWLTNKRVDAFNYTSIVTFFIVLSCIIAVGTNLSQFICIGRFTAVSFQVLGHMKTVLVLTLGFFFFGKEGLNFHVALGMFLAVIGMIWYGNASSKPGGKERQVYSTPSEKTQKHGVLSSQSELDQKV

SEQ ID NO: 359333 - protein, 272 aa, Zea mays
  unsure (1)..(272): unsure at all Xaa locations
  Clone ID: MRT4577_9087C.1.pep
MGRCGGGSGAGAGGGALGGLCSPHRRLGYLNARDPGLEDLSNLMHAVARKVLLSITNWHPHNYLDDVLHPSQVQDQRLERLGQDAPSFHTGNELPNPHLRQVPAALPSLPVQPYAPHPKISADNPTAAPSFQKIPWLSLTSPPLPAIGRRMQSPAASPETAVHPAKHGKDHGTPVSAPSNVSHHHAMPANNTHGKTHGTPVLAPEKRRHHHLPANNSYVKGPAVSPSKSPIIHRKGHGVPVAAPPKXHWSYLPPANRRPTKLVLLHVKVTYF

SEQ ID NO: 359334 - protein, 150 aa, Zea mays
  unsure (1)..(150): unsure at all Xaa locations
  Clone ID: MRT4577_90880C.1.pep
AWAAERAHWSIGCQAISSIFGDRGPDVEKRKLMNLLLLGAISXTTAGMDDPYRAFFLPXPNTGTPAADTYSKDKLCNIHHGGCXLNTHGPNDRTLASGLKGDPTYLVVEHDKTLVTYWINALSTNLGCLLTWNRAXNKCICPCHGSQFNN

SEQ ID NO: 359335 - protein, 84 aa, Zea mays
  Clone ID: MRT4577_90881C.1.pep
YRGSPRPRGRPRSPYLAALAGARWPWIRSSTPAARLRGLEFGPGRTGGSQGDAAAGVSPPPRAPRCALAFRSSRAAERFGFAVL

SEQ ID NO: 359336 - protein, 56 aa, Zea mays
  Clone ID: MRT4577_90882C.1.pep
FLVVFFFGCWFFFFFFFFWTNFFFSPKKFPNKVFVPPIFCYFSNTHSSLKTCWCSN

SEQ ID NO: 359337 - protein, 105 aa, Zea mays
  Clone ID: MRT4577_90883C.1.pep
ETAYMCQSGTGSKMPRGDGVVHAARRELPTQDLPKIGNVPEEARHDVHDLQERDTIPDGVMVDLLIHLGDIKGIHKLRLLRADPEIAVLDHNRGLTYLKLDFQPD

SEQ ID NO: 359338 - protein, 100 aa, Zea mays
  Clone ID: MRT4577_90884C.1.pep
QTRGPREFCRLRTVEGFSRVLSPLASLAAVQNFTWVGVAATVDMLAVAGVTDRWARVGACGAPQQQVSEGEGISSPAYLAQLWSSTVVGVWKSAGSVSRS

SEQ ID NO: 359339 - protein, 106 aa, Zea mays
  unsure (1)..(106): unsure at all Xaa locations
  Clone ID: MRT4577_90885C.1.pep
PRVRECNNKGSNGPKGAPSTGVLVFLFCLAELDETENLFDPLHRFVGRYMMTDLSFPLRATHPFWLSLLRPASLVIVAAIYLKKEKXVFDSHHXILGFLDSVLLTA

SEQ ID NO: 359340 - protein, 34 aa, Zea mays
  Clone ID: MRT4577_90886C.1.pep
QKLPLSGTVFHERMTSRHLAETVLFPLEQSQPSA

SEQ ID NO: 359341 - protein, 66 aa, Zea mays
  Clone ID: MRT4577_90887C.1.pep
GINIVMITFKKVFKCEVLLFKVGTFKESGLVILCCLLLYLYVVVDFVGYFYCICFLFYFVICHFLL

SEQ ID NO: 359342 - protein, 59 aa, Zea mays
  Clone ID: MRT4577_90888C.1.pep
NNKKGWWRERKSRGSGQVGSVQFIVIKKNRVGYRCSSLFEASRHYKAPLTGVLSRSEKE

SEQ ID NO: 359343 - protein, 105 aa, Zea mays
  unsure (1)..(105): unsure at all Xaa locations
  Clone ID: MRT4577_90889C.1.pep
AQSAGEEPPNPGQEGGXXGRDPARGAADTPAGQXTRXHKTDEDKXTGPDXQKGGGAPXEXXDRAQXTEPTQKNXHXDQGRNTXPXATAAAANXTRGERATAXRKK

SEQ ID NO: 359344 - protein, 315 aa, Zea mays
  Clone ID: MRT4577_9088C.1.pep
MSLSSICCAKFHLLRNSIGDTCSVRWLKYHSRLIYETFLSSRIHQSRPPSTTVLARSTRKGSKQSFSNGRHLHSKSVESSIEVFKQSELEQLKSLHCYNVEEEFSEVKTEWPATILVFDIETTGFSRRDDRIIEFAVRDLMGGKNSTFQTLINPEKDVKNTYVHGINNSMLCRPDVPRFGEIIPILLQYVWSRQMDGKPVLWVAHNGRSFDVPFLMFEFRRCKVEMPGDWLFVDTLPIAKQLVDSNGSKLSSVSLKFLRERYKIPLTGSAHRAMQDVTTLSYVLQKLTFELKLTVPQLLEKSFRASDLPANRPAK

SEQ ID NO: 359345 - protein, 76 aa, Zea mays
  unsure (1)..(76): unsure at all Xaa locations
  Clone ID: MRT4577_90890C.1.pep
GSYNRAQFSPSTPTTPVTPSSSSNPRGAGNVWPSVFHQGNNLATKGMGANLLDRREPNSPPVXAWLFIIDPRSSPR

SEQ ID NO: 359346 - protein, 123 aa, Zea mays
  Clone ID: MRT4577_90891C.1.pep
TSRPAGILLHTRTDSRAYPLTRKPAACDHPTRAPSHSVFMYDSLVCGASVPHRRLGLPALRPCLRDNLDRGHIQPAFYQVILEDEIDSSALYLVTYYGIQDINIIYECVDLTYSKERLELHMH

SEQ ID NO: 359347 - protein, 312 aa, Zea mays
  Clone ID: MRT4577_90892C.1.pep
NGKAWPYLRVRRRRYRFRILNASNARFFRLSLSAGLRFVHVASDSVYLARPVATERFVVAPSEIADVVVDFAESTAGAAVVLSDDAPAPYPGDPGEKAETIAVMKFVVEGAAEDPDTSTVPATLMPHYPRPDAREAATARHITMYEYTRAGTDEPTHLYLNARSYMDPVTETPKEGTSEVWEVINLTDDNHPLHVHLAVFAVLEQRSLRRVDEFRDCMKRRNDARACGVDRHLAGGRRHVVPRQERGWKNVFKVRPSAVTRILVRFKPLTDAASPEESRFPFDVTTGPGYVYHCHILDHEDNEMMRPMKIVR

SEQ ID NO: 359348 - protein, 134 aa, Zea mays
  unsure (1)..(134): unsure at all Xaa locations
  Clone ID: MRT4577_90893C.1.pep
YEDGVXXSLRKXKXEXXLEVXXLLWMKXXVEWLXELFIIIXXLIGEGELFFFLWDEKXVXIXVXXSVKLXDIXIGVXXEXFWLDXGXXVVXYXXNVLNCGXXMXFXEXFRRXEVXFKEWMEXXXERXXRFGGXL

SEQ ID NO: 359349 - protein, 148 aa, Zea mays
  Clone ID: MRT4577_90894C.1.pep
MAMSLLSAATVPVQQEGGRSEFSGLRSSAPVPMRRNATSDDFMAAVSFRTHALGTSVGPRGAPTDANLNEAVNGFGRIGRNFLRGWHGRGDASPLDVIAINDTVSAKKACYLLKNDSTLGIVDGDVKTVGDNAILRDGKGIKGEADRN

SEQ ID NO: 359350 - protein, 68 aa, Zea mays
  Clone ID: MRT4577_90895C.1.pep
VWGVGFELQGELERGKIKDAVRKLMGEREGAEMRRAAQELCAKLAGCLESTGSSQVAIDKLVSYILSL

SEQ ID NO: 359351 - protein, 194 aa, Zea mays
  Clone ID: MRT4577_90896C.1.pep
MRRPQRRVAAKQTRLREVDEIRLLNEWIDAGKPLPRTKLLPPSKSAGPVPTAGEHPEYGACTLFDELPLSQKTKDGLRKAGFTEMSEIQRAALPHALCGRDILGAAKTGSGKTLAFVIPLIEKLYRERWGPEDGVGCIILSPTNDLAGQIFEVIKKVGQFHNFSGGVIVGKRKGIEIEKERVNSLNILVCTPGR

SEQ ID NO: 359352 - protein, 39 aa, Zea mays
  Clone ID: MRT4577_90898C.1.pep
RSHRISLNIGTTQTKGQSALSSFGLLLVLFLTFVLVLVT

SEQ ID NO: 359353 - protein, 136 aa, Zea mays
  Clone ID: MRT4577_90899C.1.pep
KKKKKKKKKKKKKKKKKKKKKKKKKKIKKKKKNKKKKKKKQKKREASQKVQTLFNRACNFKPFQNCPQISFQGPSFKKFLTGKTLGFPNLTPFAANPPFPNWANSKKAPNFSPSQNFPTLNGKREPPFKGPLNPGG

SEQ ID NO: 359354 - protein, 101 aa, Zea mays
  Clone ID: MRT4577_9089C.1.pep
FCFYGAEESPRGVCFAFGSSEGEEALGSCPTSCRICCCYSPTFVVIVLSDETYMEPVILVWIRGLYMFMLFVFFLLRPGLRALGPFGRFCFFPSCVGVHPR

SEQ ID NO: 359355 - protein, 390 aa, Zea mays
  Clone ID: MRT4577_908C.1.pep
MPPLRGAKRRRKAALEKKAAAVAMASAAAGDPPGDWWEAFCIRMSGTLSSIEDAQRFESIFKMPRRAFDYVCNLVRDEMMVRSCSYTFLDGTVLCLEDRVAIALRRLNSGGSLVTVGSSVGVNHSTVSLITWRFIEAMEERASHHLRWPDSIEMEKIKSKFEKIHGLPNCCGVVDTTHITMCLSSAEPNCKVWLDQEKNYSMVLQAVVDLDTKFTDIVTGWPGSMKESSILHSSGLFKLCEKGERLNGSKLKVSDGSEIGEYLIGDSGYPLLPWLLTPYQEKDLTESSAEFNIRHSSARTVAPRTLAKFKDTWKFLQGEMWRPDKHKLPRIIHVCCLLHNIIIDLQETAVDEAQAWPSDHDAKYRQQVCQLADENGVRVRDKLSQHLISK

SEQ ID NO: 359356 - protein, 194 aa, Zea mays
  Clone ID: MRT4577_90900C.1.pep
VLETERRRIEKRRRDLAVCCQDPARSGAPDCPVCTGQCPVRQAGATRTGRSREIGRRRTAKIHRTVRCAPDCPVSQRSARANGRPRNPRGTRGRANGRKTAPDCPVCTGHVRCANSARSANGLQRSSSPFKETNRAPDSVRCAPDCPVPPTTEGKDGLPDLLSTAPSCLGAIKGAPRRMEEIHKQPLSILDHPH

SEQ ID NO: 359357 - protein, 160 aa, Zea mays
  Clone ID: MRT4577_90901C.1.pep
TLLGVTIDTTTGRKKRQRLIRCRRDFTGYRIIGYYVTAILISMRPRKFCTKLNWSAPFANSMISCIRLYDLYISSHRIPALRGGNSSSSPTLQSPGGLFSVAEALDLCNTNGEASVNTLLVVCVLVAPFDFNVDKGSAKGPKDPNSIVSSGRPFAAGKYD

SEQ ID NO: 359358 - protein, 51 aa, Zea mays
  unsure (1)..(51): unsure at all Xaa locations
  Clone ID: MRT4577_90902C.1.pep
VVALPQSLLKQPSRLALHKVHLXVRGPSSKFWHGGFLSPDQKQRFFGKLKA

SEQ ID NO: 359359 - protein, 61 aa, Zea mays
  Clone ID: MRT4577_90903C.1.pep
LPIWYPVNRSFSGGMSFCFFLFLCWLTLPICYPLKPLLSGAFWIFVFSAVILVKMSLTEFC

SEQ ID NO: 359360 - protein, 89 aa, Zea mays
  unsure (1)..(89): unsure at all Xaa locations
  Clone ID: MRT4577_90904C.1.pep
GLSNDYFNFLNKFLSSFKWSDDESSTICDSNYYAFSSIIXFVKSPNLFQCDLXLNIPSFSHLEKDXKLSFVLXLLNIFLSKNLYSYLLF

SEQ ID NO: 359361 - protein, 65 aa, Zea mays
  Clone ID: MRT4577_90905C.1.pep
MLNAVTELNSSDGVNATIFFTQDVHAPTAVTVSVSVLKPVLHGFHVHALDDTTNGCMSTGPHYNP

SEQ ID NO: 359362 - protein, 66 aa, Zea mays
  Clone ID: MRT4577_90906C.1.pep
CYFLCSFYCFYFFFYLLFFFLKKVYPNPSMCKAHGLLFSTGPISGRLNIANGGCPCHQECLKGGFF

SEQ ID NO: 359363 - protein, 147 aa, Zea mays
  unsure (1)..(147): unsure at all Xaa locations
  Clone ID: MRT4577_90907C.1.pep
PLIYGFGARHHPARRDMEEFKRYVVHVLDATVARLPXRGXRQEKFAAVADLKGWGYANCDIRGYLAALDIMQSYYPERLGRVFLIHVPYVFMAAWKIVYPFIDDNTKKKFVFVADKDLDRTLREAIDDSQLAEIYGGKLKLVAPPAN

SEQ ID NO: 359364 - protein, 150 aa, Zea mays
  Clone ID: MRT4577_90908C.1.pep
YHISSWRIISPAFFPSGLLERDGNWCKLRMMSRVLLARMLRMSSLFFLYTSRSSVLRFCETCVSMRVLEVITTCISESLLGAITVASNIGRRAELSFHLLEFAPAGACGLGEYLVHVYSAYTAGDSGCVARGRRRQWWTAITALIHGAED

SEQ ID NO: 359365 - protein, 104 aa, Zea mays
  Clone ID: MRT4577_90909C.1.pep
ARIRLEQKGGAQFLSPDHHGLNGGGLYKDLRGDNKLHQGGGRGDRDLPKEAWQSGPSEGGQQQEKRVRDHTRWTRKHALEERNSISHEGALRRAAHRATDWTAG

SEQ ID NO: 359366 - protein, 85 aa, Zea mays
  Clone ID: MRT4577_9090C.1.pep
FFFFFWSNVSSHREGTAQQQRSKQGPAPKASDSGRGCWIASSIYQSVAGELTLRLMSRAGAVEHSVVAASRGERREESRWLTPRL

SEQ ID NO: 359367 - protein, 49 aa, Zea mays
  Clone ID: MRT4577_90910C.1.pep
FSGPHINIPAFFVTPPTYKKQLHFTITAFPNQILKFFANPKQLWILMPV

SEQ ID NO: 359368 - protein, 75 aa, Zea mays
  Clone ID: MRT4577_90911C.1.pep
VIGRGGSGVVYRGVLPDGRTVAVKKLARPRDDGDGDGDCEREFRAEMEVLADRMVSSWAHPNLVTLDGWCLYWSV

SEQ ID NO: 359369 - protein, 88 aa, Zea mays
  Clone ID: MRT4577_90912C.1.pep
FQDVHNFIALFHYHNVAVKHLLQSFSSNRKAKYAFICDLSLHSLHLSSWIGLHWHTTVDTRSLSQIIVRVVCMLCFACHHNIDLQSLW

SEQ ID NO: 359370 - protein, 185 aa, Zea mays
  Clone ID: MRT4577_90913C.1.pep
LTASWTYSNKKPRPPVPSFGRLLLLNAPEWKHALVGSSCAVLSGAIQPIFAYGMGCTFSIYYSRDHEEIKDKTEKYAFVFLALVGISFLLNIGQHYSFGAMGECLTKRIRKQMLAKILTFEIGWFDHDDNSTGNICSQLAKDANIVRSLVGDRMALLIQTASMVVIAFTVGLVISWRLALVMIAM

SEQ ID NO: 359371 - protein, 39 aa, Zea mays
  Clone ID: MRT4577_90914C.1.pep
TTDSHIRSIESYDFHYEAGTYFDLLAPSFTVPLQSYSEE

SEQ ID NO: 359372 - protein, 109 aa, Zea mays
  Clone ID: MRT4577_90915C.1.pep
MAAKIFCFLMLLGLSASVATATIFPQCSQAPIASLLPPYLSPAVSSMCETPIGQPYRIQQAIATSILPLLPLVLQQPAGLLQEVPLGPLGGQNIKGQQLPQIGVTKPCW

SEQ ID NO: 359373 - protein, 117 aa, Zea mays
  unsure (1)..(117): unsure at all Xaa locations
  Clone ID: MRT4577_90916C.1.pep
MAAKIFGCLMLLGLSASVATATIFPQCSQAPIASLLPPYLSPAVSSMCETPIVQPYRIQQAIATGILPXITLVLQPPVSLIXQQLPWVNWGPQTFRPHHLHHLGLPNLVDSFKNLKF

SEQ ID NO: 359374 - protein, 108 aa, Zea mays
  unsure (1)..(108): unsure at all Xaa locations
  Clone ID: MRT4577_90918C.1.pep
MAAKIWCFLMLLGLSASVATATIFPQCSQAPIASLLPPYLSPAVSSMCENPIVKPYRINQAFAPGXLTILTLVLPPPASLIQQVPLVHLGAQKIKAQQLPQLGLTKLG

SEQ ID NO: 359375 - protein, 51 aa, Zea mays
  Clone ID: MRT4577_90919C.1.pep
MPPHKIFRIKKNVEKKMRQNRPIPYWIRMRTDNTIRYNAKRTQWRRTPLAF

SEQ ID NO: 359376 - protein, 163 aa, Zea mays
  unsure (1)..(163): unsure at all Xaa locations
  Clone ID: MRT4577_9091C.1.pep
MSHSLSHQLSKMNNFTKTLIVKTISIRRRSALTCIDNIIDYINEKKSVPPMHIRIVLNIKDLQEEILLANYNLYKESTLYLVLRQMXAMQIXLSTLAGQSIILDGDASDAIDNVLHNIHDKEGFPPDQERLIFAXSILEXGRHLADYNLLNYSPPHLMWRSTA

SEQ ID NO: 359377 - protein, 58 aa, Zea mays
  Clone ID: MRT4577_90920C.1.pep
NPQYHPTRVMRESQWCSSAQSYQSASALAIPYLWLARLLQVMLRDLPSPDLSVFPVRK

SEQ ID NO: 359378 - protein, 91 aa, Zea mays
  Clone ID: MRT4577_90921C.1.pep
MAAKIFCFLMLLGLSASVATATIFPQCSQAPIASLLPPYLSPAVSSMCENPIVNPQDHRNRQALHIPCSHTAAIQSPCHCANIGTLTLAQL

SEQ ID NO: 359379 - protein, 134 aa, Zea mays
  Clone ID: MRT4577_90922C.1.pep
ISSPMEIELGMGRQSPLAATSHLSRCPLKYTVLMSHRMSRCDVSRAAVSSIGRGRHLAYALDVGRRAIEFGAKPREITSPQSCRSRSYHICRNEDYRGGEHAFGVSPDAKQVTSCEDGSRSTRGTSGHGSSGSC

SEQ ID NO: 359380 - protein, 130 aa, Zea mays
  unsure (1)..(130): unsure at all Xaa locations
  Clone ID: MRT4577_90923C.1.pep
VNLEGTESSASKSAVLDWIPIGLGGGGGGEKKKIPPFWWVCXGVXLAGGLXXGVACVLGASLLLGCGGCRALRLGFLVCFGCRCXGCAAXAPPAVRRGPVPARFRCVXRGGPXXXALSLPPXSLSLSSCA

SEQ ID NO: 359381 - protein, 88 aa, Zea mays
  Clone ID: MRT4577_90924C.1.pep
SFTAAARSAMSVFGPGQTAIRVHLFAHRREGDNRLFFQHVQLGIDTVFPDGPLYNSGQYINFTWPDSRIIGAHSIVVNPGSATPVVNE

SEQ ID NO: 359382 - protein, 54 aa, Zea mays
  Clone ID: MRT4577_90925C.1.pep
DIISPFDSQRITISETQNMNDNLHACPHSLPDRLMRATDLMIAGKVAVLCEYRD

SEQ ID NO: 359383 - protein, 64 aa, Zea mays
  Clone ID: MRT4577_90926C.1.pep
GQPARAYHIYTLLYFTCVMMNENISSLDLSLVVNTLSSVLAILSMITNYQLYSDVNRNSQSVNL

SEQ ID NO: 359384 - protein, 76 aa, Zea mays
  unsure (1)..(76): unsure at all Xaa locations
  Clone ID: MRT4577_90927C.1.pep
DMWELEAASLPPIENGMXKPLXDSTYELPIYFPQXLLIEMDLHPVQPAIHSHGVTGLILXDHIVPIITSSFIITYT

SEQ ID NO: 359385 - protein, 60 aa, Zea mays
  Clone ID: MRT4577_90928C.1.pep
HLRQLRVVVVLRPYLQFENVAHRSEPVRPGRKLDSLAVDHENSSNCAATTNLSAPMSLFY

SEQ ID NO: 359386 - protein, 129 aa, Zea mays
  unsure (1)..(129): unsure at all Xaa locations
  Clone ID: MRT4577_90929C.1.pep
KGDLRVVXXFSCRRXXQGARLVPLXDIXXCLGPAXXYLASXXLEWVKXTIXXWVXXFYWGMWKTTXXHYVRGRTCFTKFXMNXXPLXFVCGWGYRRLLLLVITSXTQLYXXGYLIXFWXMNTFYQVLGL

SEQ ID NO: 359387 - protein, 77 aa, Zea mays
  Clone ID: MRT4577_90930C.1.pep
ILEPRGHHFVRRDEVWVTHRAESNGHRSSLCPPCQEGCTASLSWALVGLSLAGGPLMGLVPLSVVAAPGELALLVPA

SEQ ID NO: 359388 - protein, 114 aa, Zea mays
  Clone ID: MRT4577_90931C.1.pep
FSPLRLNTGAPLGGGVCLERSPGDINQSFSRERVRCGLQVTWAKKNVRRVEKVVGPGVSGPVPHAYHFYTLLGLVLVGSCSFWLTIFMQGSLGKKKKKKKKKKKKKKKKKKKKK

SEQ ID NO: 359389 - protein, 84 aa, Zea mays
  Clone ID: MRT4577_90932C.1.pep
RPAAVFVFYEVSFAKEDKITILSDRLRWHGVFLAIKSSCGTWFLVGGYSQCGEAWYILYNLHYPSVCTPARSRTTHRAELLVTG

SEQ ID NO: 359390 - protein, 65 aa, Zea mays
  Clone ID: MRT4577_90933C.1.pep
FIYYSYKLWLDPSRRGLLIIASVVPLDLFHHIYKYVRRKEPIISRVAQEKHLTMANTTWHTMIMP

SEQ ID NO: 359391 - protein, 89 aa, Zea mays
  Clone ID: MRT4577_90934C.1.pep
KRRHRKVFGVGRPKNPWVRGPCTPLKCMAKPQGRVHRPGFYPPLFFFCATQGNKAVFFSKRVPFLCYPPPKVKGGFFFFLKKKKKKRLD

SEQ ID NO: 359392 - protein, 236 aa, Zea mays
  unsure (1)..(236): unsure at all Xaa locations
  Clone ID: MRT4577_90936C.1.pep
MANIDMAAVLADMERDAAADARTPRTKLVCTLGPASRSVPMLEKLLRAGMNVARFNFSHGTHEYHKETLDALRQAMHNTGILCAVMLDTKGPEIRTGFLKDGKPIKLTKGQEITVSTDYDIKGDTNTISMSYKKLPQDVKPGHVILCADGTISLAVLSCDPAAGTVRCRCENTAMLGERKNCNLPGIVVDLPTLTEKDKEDILGWGVPNDIDMIAXLSFVPKGSDLVTVTQLLGQH

SEQ ID NO: 359393 - protein, 144 aa, Zea mays
  Clone ID: MRT4577_90937C.1.pep
FTRGSTAESLGGHFGAFEHLNDFSGYSYTASAFEGLPPLERTNALQRMVLFSRVEPSHKKMLVEALQAHNEVVAMTGDGVNDAPALKKADIGIAMGSGTAVAKSASNMVLADDNFATIVATGAEGRAIYNNTKQVIRYMISINI

SEQ ID NO: 359394 - protein, 85 aa, Zea mays
  Clone ID: MRT4577_90938C.1.pep
MCDAFVGTWKLVSSENFDDYMTEVGVGFATRKVAGMAKPNLIISVEGDLVIIRSESTFKNTEISFKLGVEFDEITPDDRKVKSII

SEQ ID NO: 359395 - protein, 74 aa, Zea mays
  Clone ID: MRT4577_90939C.1.pep
VNRDNGSGVGYVEGVRDKKGDGRGCSRCSRNWFLGIEVLLCRFYGFVFVFVILPCVLYLIFFLLCVFFLCFVFC

SEQ ID NO: 359396 - protein, 102 aa, Zea mays
  Clone ID: MRT4577_9093C.1.pep
SDRHLCRGPASRYLFPPPSCSPAVVEISLSHASSRSRALVTAPSPLARSLPLPYPCILSTVTSLCRNVLASASSRHVQSDPIQRRVKKLGCGMHLQRFPFRS

SEQ ID NO: 359397 - protein, 166 aa, Zea mays
  unsure (1)..(166): unsure at all Xaa locations
  Clone ID: MRT4577_90940C.1.pep
GLKSSPSPSCAGPARAHYFPPSPSPSPAPTSPSPRAAMAFSFASPPASNPFQTPAASNPFQTPAASNPFQTPAAPNPFQTPTPATSQAPSLSPSPXPVQLPXPQPQQQPQQQQVAPAVQPPQPQPQHQKLMLYTTDMKPAGYNTKWEELHAESQKALLQNRVGFFL

SEQ ID NO: 359398 - protein, 39 aa, Zea mays
  Clone ID: MRT4577_90941C.1.pep
KKNNIKKKKKKKKKKKKKKKKEKKKKKQKQKKKKKKKKS

SEQ ID NO: 359399 - protein, 251 aa, Zea mays
  unsure (1)..(251): unsure at all Xaa locations
  Clone ID: MRT4577_90942C.1.pep
MGSSRPAGRSLPDFRWNPQSFSRLLLPHPFSLLFFLFIHLVLTSLNQTFHDTNDLILFIMSSALNQLKATGTTVVSDSGDFASIGKYKPQDATTNPSLILAASKKEEYAKLIDVAIDYAKQKGGSVDQQVDDALDRLLVEFGKEILKIIPGKVSTEVDARYSFDTEASVNKALHLIELYGEQGISKDRILIKIAATXEGIKAAEILQRDHGINTNLXTLMFSLVQAIGXAEAGAYLXSPFVGXILDWVQAL

SEQ ID NO: 359400 - protein, 53 aa, Zea mays
  Clone ID: MRT4577_90943C.1.pep
LTQSSAFLSIPSYLPKSFTLTPFFTTFSTLKSIALPILITFHQNPFSPPSLIT

SEQ ID NO: 359401 - protein, 210 aa, Zea mays
  unsure (1)..(210): unsure at all Xaa locations
  Clone ID: MRT4577_90944C.1.pep
KPRSTEGRRSVRSTYRSSRNNEARSRVQRGGGGGEGRRSRTGGGXSAAAHSAWHSPVPYLFGGLAAMLGLIALALLILACSYWKLSGYLEGGAAGRGGEDGSGAGAGAGGGTKPAAGLPPPVWEEKILVIMAGDAKPTYLATPMSSRASSFGGDRSSSKGVDDEEEESNKEVQADEAAVASVMDAGGQNGGEHSERRREGGDQERRIPEV

SEQ ID NO: 359402 - protein, 53 aa, Zea mays
  Clone ID: MRT4577_90945C.1.pep
SDRVHSRTKQNTAARAYNHSHIVTLSIFFFCSVVHAEEAPKLKRFTRQKVIAE

SEQ ID NO: 359403 - protein, 102 aa, Zea mays
  Clone ID: MRT4577_90946C.1.pep
PPWCRTPARRRPHQPVISCPGPPWTGPTTTHPPAPGPFNPSSLTLLVIIHQIQINNKSYLRRASLISLLISTTATHSFGTGESPVSYRIYNPNSCKLYLSLY

SEQ ID NO: 359404 - protein, 59 aa, Zea mays
  Clone ID: MRT4577_90947C.1.pep
AHHHTYAQPKEPTDYLSTSNRYLMLKMVYKQRHIYILYRYIAFRSIDSIGRTDPMDFVM

SEQ ID NO: 359405 - protein, 388 aa, Zea mays
  Clone ID: MRT4577_90948C.1.pep
MPEVLSPPAEEELPKAQKAPAATPKRRRMTSVLDAILETTKALSPAPSKKITEASKVQAEAKAGPSAPIETKVVAPEDKAYQQTSDTAWQQSKGLILSNALRTQKSTEDESRTIALTTFAQSKIKEYEAKYNVQAEAQKVEVEDLRKQLVEAKENCEVAKASQEISEWWKARLEKNIEELRESKERCFEKSLDCVKNLKNSFAKVGAYSSEENFIRGDPEGVIEWINGEAKTFEEILNDRGDICAFSGTPGIVAILEKVGCEYVKAVAQAEDAFYLSDTKDPLAEATLMGRKFYSDVWVNGGRELAHKIIKKNEKDTHDAREEARQTEEAAERERRIAELSPLPEPYNPLAGPEMKEALDVMSLANSIIDEVVDKLLNEAAVKILSEE

SEQ ID NO: 359406 - protein, 520 aa, Zea mays
  Clone ID: MRT4577_90949C.1.pep
MERTINSLMYKGSIPDAINQSRREKKLFVVYISGEDEASSSLEQSSLIDENVVEVIGRCCILLHLKQGNVDASQFSAIYPQKSVPSISVIGLNGVLLWNHDGYINSENLKESIEKAWAALHLQETAATLLTASLATRNSEPVNSATTVLPAQGGSSTLENPSDLSSQSPDVSGASEVAHSTDLVSQIPNSTALYEPLEINEKEGSKSNSDDKTVEKLGSTSTEFDCDLLDSSRKSNTVSSADSKGEDITPSAKRKNKDDGSHTSIPLEDTPSTLTNKGVSSQSRVEQDKATSFVSVKSDDIQLSIRMPSGNRLEIKLTKQDVLRKVKNFVDENQGNGLGSYDLSLVYPKRVFFEQDMEATLSELGIQNRHAMIVVPHRQSGQVSRRHSSASYDMGVNSGADDVGGNSGAGGYFGYLRTVLSYVNPLSYLRGNTNSSNTELQSNEGLRQLRHGSGPWSEPRPLGNRGHEVTDADSANTLRRRPRPFGANIHTLGSEDHGPSDERNVFWNGNSTEFGGDDRK

SEQ ID NO: 359407 - protein, 104 aa, Zea mays
  unsure (1)..(104): unsure at all Xaa locations
  Clone ID: MRT4577_9094C.1.pep
AGFFFFFFFFFGNIKLHKDSSHTAAKEFWVQHRGHNRSIKPTKPQPRFMARDRHGGIXXXPPISPGPXPAYLNHGFLPPSGAAPLVGSALLLVVRLCLGAPFSP

SEQ ID NO: 359408 - protein, 181 aa, Zea mays
  Clone ID: MRT4577_90950C.1.pep
MKKKGQNQTRDDTVEKLGSTSTEFDCDLLDSSRKSNTVSSADSKGEDITPSAKRKNKDDGSHTSIPLEDTPSTLTNKGVSSQSRVEQDKTTSFVSVKSDDIQLSIRMPSGNRLEIKLTKQDVLRKVKNFVDENQGNGLGSYDLSLVYPKRVFFEQGTESLFLVEIIYIDISLYFFILKFLI

SEQ ID NO: 359409 - protein, 88 aa, Zea mays
  Clone ID: MRT4577_90951C.1.pep
GAFFFFFLFLANAKTNVVRSDSRTKQLGFNISVAMYYTTSIRIQRPYVSTNVNITIQRLFQHYNLNTYSSISLSRHLFQLSIPNFDSV

SEQ ID NO: 359410 - protein, 116 aa, Zea mays
  Clone ID: MRT4577_90952C.1.pep
MKACGSLVCFIFNFESVRELYCIFIYALCSSVISNHGNYLYISETGHGSGPWSEPRPLGNRGHEVTDADSANTLRRRPRPFGANIHTLGSEDHGPSDERNVFWNGNSTEFGGDAKK

SEQ ID NO: 359411 - protein, 143 aa, Zea mays
  Clone ID: MRT4577_90953C.1.pep
GIQLGTTTPRSGIKQVEHPGQFLPLTMGHVQGEYSLHFCTECGVLTCICGQVLFGSRPSIRVALGYAGPQRADSSRVVLVRRNNIILRRSCRGGLDCRNDGICNGEQRGPLRGRERIFSRERRQRCSSRRNGFGLEWCCHVAT

SEQ ID NO: 359412 - protein, 34 aa, Zea mays
  unsure (1)..(34): unsure at all Xaa locations
  Clone ID: MRT4577_90954C.1.pep
CYICYXPQANLGHLDRFAGVFYTVYHSKLKELLF

SEQ ID NO: 359413 - protein, 59 aa, Zea mays
  unsure (1)..(59): unsure at all Xaa locations
  Clone ID: MRT4577_90955C.1.pep
IWRAGXFTLLPTNHSLNNSLSPPSKKDRLTTPSFVLKNLLAPTPPPYLSLSTPLITPSS

SEQ ID NO: 359414 - protein, 160 aa, Zea mays
  unsure (1)..(160): unsure at all Xaa locations
  Clone ID: MRT4577_90956C.1.pep
KKKKKKXXXXXXXXXREXRKGTSRPDGKTTVQKEGRPPHRLTQTDKRAPKTSAGNNHQQARTGNTQPPRRQESTTRPAPPQEARGANRRPTRAHRDRGAHPTSRTRAPEDQQPGEGAPAPAATTARTEPTPPAPARTTTRTRRRRTPPPRPGTRPRRRTP

SEQ ID NO: 359415 - protein, 53 aa, Zea mays
  Clone ID: MRT4577_90957C.1.pep
KTHEVSTDTDHEGWRTEPLKDRQLYVSKERTISVKRLLKMHSRHNTERTSTKP

SEQ ID NO: 359416 - protein, 74 aa, Zea mays
  Clone ID: MRT4577_90958C.1.pep
AVVTTQSTFFFFFFFFFWNQKLMGGGGETPYDFTCIQNPAKRAIFPGSHETPVLKPPGGEDQSRTYIAFFSTSN

SEQ ID NO: 359417 - protein, 48 aa, Zea mays
  Clone ID: MRT4577_90959C.1.pep
CLALVLVVQRGSGSAGFVYLCKVLLIHCARLSDSTTTTFSSCTSSTPS

SEQ ID NO: 359418 - protein, 51 aa, Zea mays
  Clone ID: MRT4577_9095C.1.pep
SVLLLLSVFLCWARFLFLVANGLDSTTLCMLTCTRRGTQLAKGSCGQRQRQ

SEQ ID NO: 359419 - protein, 73 aa, Zea mays
  Clone ID: MRT4577_90960C.1.pep
KKKKFLKKKKKKKKKGGGKKKKKKKKKKKKKKKKKKKKKKKKKIKKKKKGGPFLGFPFFLPLLSPFVGWFWGP

SEQ ID NO: 359420 - protein, 42 aa, Zea mays
  unsure (1)..(42): unsure at all Xaa locations
  Clone ID: MRT4577_90961C.1.pep
PPXTRRXLKMRRXXRGAVPFXPFKGLAQLXXEKGXIGAXXLL

SEQ ID NO: 359421 - protein, 207 aa, Zea mays
  Clone ID: MRT4577_90962C.1.pep
MEHQDATIHKLLDEMRLMEARLSERISGRCDDVERHLDERCEEPCDETPSFDKGPIFDEEPCFHRRLLDSDPSSPCDGVDLLSVIRAVAPSSRDLLPPSGIRAVPSSYIASGHPQEDRELVQPLRRVEAATCVESSDPRASSTELDREFIAASAFVTSSATSGTSALEAGARVDAASEPEFPPRATLGAHPDYGLRHVEPVGLLEGR

SEQ ID NO: 359422 - protein, 288 aa, Zea mays
  Clone ID: MRT4577_90963C.1.pep
MKFVTVMWLILDYACIPLHSICLIKKHIHTTHDMFIIVWAATESNIRGKGRLLYILSNLRSPSIQPRGRVRVDLCVEGMKITALLVLKPSTSGAGSSSSGGESGPEAVVLANAIDVSHFGYFQRSAAREFIVFVARTVAQRTQPGQRQSVQHEEYKVHSHNRNGLCAVAFMDDHYPVRSAFSLLNQVLDEYQKAYGDSWKSVTADETQQWAFLTDALTKFQDPAEADKLMKIQRDLDETKIILHKTIESVLARGERLDSLVEKSSDLSAASQMFYKQAKKTNQCCTIL

SEQ ID NO: 359423 - protein, 81 aa, Zea mays
  Clone ID: MRT4577_90964C.1.pep
TRKKQILFTNKKGPPVLHAPFMLIVDDAVDHLQLNSYLFRLIQHVATSEVHMLTDDKYEYQGPGSAVFQNNHTTTTKLPRF

SEQ ID NO: 359424 - protein, 329 aa, Zea mays
  unsure (1)..(329): unsure at all Xaa locations
  Clone ID: MRT4577_90965C.1.pep
RTAFDFVYLIRVCLQFRTAYVAPSSRVFGTGARAFPPVLLVSXHLKXYFAMDFVALLPLPQIVVWRYLHIPDGPDVLTTKTALVWVVLIQYIPRLLRIFPVITDLKRTAGVFIETAWAGAAYYLLWFMLAGHNVGTLWYFLTIEREDDCWHLYCDDPNFGLGCNSSYLYCNNHHHGSYDSWLTNNSTQVFNMCNGGQDNPFNFGIYEQALVSKILSPGNFISKLCYCFWWGLQNLSTLGQGLLTSTYPGEVLFSIAICVLGLILFALLIGNMQSYLQSVAIRLEEMRVKKRDAEQWMHHRSLPPDIRHRVRKYERYRWLETRGVDEETL

SEQ ID NO: 359425 - protein, 102 aa, Zea mays
  unsure (1)..(102): unsure at all Xaa locations
  Clone ID: MRT4577_90966C.1.pep
FPTQSQFGGSTPTRKATCTRDRAFPFGLGRKKLSRGEXAKKETPLGPDPGVGTVWFXATGVKKVYFLDVKPWSPXEGFCFLFKKKKKKKNPQKKKKKKKKXX

SEQ ID NO: 359426 - protein, 38 aa, Zea mays
  Clone ID: MRT4577_90967C.1.pep
KVHSMFCILGHCLGIAGATFKEFPPRPSSLRFVLKKRG

SEQ ID NO: 359427 - protein, 66 aa, Zea mays
  Clone ID: MRT4577_90968C.1.pep
VCVGLFGGWSPPGLWCLLRSVSVLGTGVRWFVDGAGCLVSFGLRLCCSWLPEKGVWSGRSSGSLLR

SEQ ID NO: 359428 - protein, 63 aa, Zea mays
  Clone ID: MRT4577_90969C.1.pep
CLRLVSSIMSSTWNSTLLFECLLLRLRCCLCVGFLFLSGRFIGHWSGLYFHWFCCVVNGRSVL

SEQ ID NO: 359429 - protein, 57 aa, Zea mays
  unsure (1)..(57): unsure at all Xaa locations
  Clone ID: MRT4577_9096C.1.pep
MWIVMIRVLKIPIYDVWIMDREQEVWFIGSSMQVSWSSILTRAWTAPXFSNCINFFN

SEQ ID NO: 359430 - protein, 141 aa, Zea mays
  Clone ID: MRT4577_90970C.1.pep
KHSNCLVSSCFKAQACRGCDVAASLMLTRHFFHQSHVQHFAYKKIYLFFNCMSGRGGLVGEIRCEELVSERATGHRRRVVRCPGPRLRGPDPGRPLPRSRSASAPNSHSGSRVDAGASGESGSARAQPLVHGQDREECGRE

SEQ ID NO: 359431 - protein, 104 aa, Zea mays
  unsure (1)..(104): unsure at all Xaa locations
  Clone ID: MRT4577_90971C.1.pep
MSGCGKGGKGLGKXGSKRXHSEGVHDNMQGIAKPVICQSXRRGGVKRILGLMYEETLGVLNIFLENVIRDAVTYTEHALRKPVTAMDVVYALERQGGTLYGLGG

SEQ ID NO: 359432 - protein, 64 aa, Zea mays
  Clone ID: MRT4577_90972C.1.pep
QLRRRKCKIQIKKRKYRKTHKNKKLVLWTICQNIKYNHILSVLLQSYTIFLTTKNKELALSSVL

SEQ ID NO: 359433 - protein, 102 aa, Zea mays
  unsure (1)..(102): unsure at all Xaa locations
  Clone ID: MRT4577_90973C.1.pep
MIRYVRICRARPTCIHATNHTXSAYTRMQCKTKMNPIGEHGHEQRGLRKTEQQPPNRITTGTIARRLRVFLGYVCLPGPAYEQAHLKQAHHVWYPGPAWGPG

SEQ ID NO: 359434 - protein, 35 aa, Zea mays
  Clone ID: MRT4577_90974C.1.pep
GLSEVASNYASAAPCKGLSLMLKKPLVPNSWGGGA

SEQ ID NO: 359435 - protein, 82 aa, Zea mays
  Clone ID: MRT4577_90975C.1.pep
SVACSCPAMCCGRLASFMACRPCTPVLRFGIDRFSGASSPFGQSVLWSRCKKEVSVICSRMIILTKSSSSSAISAAYRLAIM

SEQ ID NO: 359436 - protein, 44 aa, Zea mays
  Clone ID: MRT4577_90976C.1.pep
KKKKKKKKKKKKKKKKKKKKKLNYKKKKKKKKKKKKVCPCRGGG

SEQ ID NO: 359437 - protein, 342 aa, Zea mays
  Clone ID: MRT4577_90977C.1.pep
VVNTAILLRRLLPCIVNGVGKTTGMEYPERPGQPLCEYYAKNGTCKFGSNCKFDHPRESGFVPVALNNSGFPLRLGEKECSYYMKTGHCKFGGTCKFHHPELGFLTETPGMYPPVQPSPISSPHPYPHHSNWQMGRPAVVPGSFLPGPYPPMMLPPTVMPMQGWNPYVSPMNQTTPAGGQQAVPAGPSYGLSHQEPTSAVTYGSHYAQLYSSGTSSSNIQEYVFPERPGQPECEHYMKTGTCKYGAACKYHHPQYFSGPKSNCILSPLGLPLRPGSQRCAYYAHHGFCKFGPTCKFDHPMGTPNYSLPAPSLTDLPVAPYPHTFSVTPIAPYLLPPDPRPQF

SEQ ID NO: 359438 - protein, 75 aa, Zea mays
  Clone ID: MRT4577_90978C.1.pep
IPPRKKVKPKSVCLTPENGLFQGFWRGNNLICPWVLFVKYCFAPSLNFFFRACQGPCFHGPLFFSAFFGALPFVC

SEQ ID NO: 359439 - protein, 308 aa, Zea mays
  Clone ID: MRT4577_90979C.1.pep
ASPEPASTSKRRFLPWTRRSRDFDKRSAAESLSQEATNPAQDDGPGPAGGWETREFTSRDAETRLRTPVFFASIDQRDGSAGGEGACAALAAVLAAALHAVHPAMPTRPELDALIRDGSSEWRRLCDDEARAARFPNRHLDLDTVLASRAWPIAVRHDRAFVGFFQPESFASLSGAMSFDDIWREIAAGGGRADVYIVSWNDHFFALKVESDCYYVVDTLGERLHEGCDKAYMLRFDGSSQMRAEGTEEVVVAGKECCREFIKRFLAAIPLREELEIEKRGGSGIDGGGAPHRRLQIEFHFTAFTRRQ

SEQ ID NO: 359440 - protein, 206 aa, Zea mays
  Clone ID: MRT4577_9097C.1.pep
WFRNPFVLLQSCNGEDLNEQGTVPVNDIFDVLAAGQELNFGNVTLIIYGGCQGAMGLQVLFAELHPWHHNVFTSIELAIQSWRINGFSPGSCKLNRQSILVATNLQFNYKASKFVSFTDTYQIYKNTCICIGELEPASWRDTCWLPEISHANVSTLASEEIDNMLFQVGDFHPGEIEQLELYMITLIQWDLGPVDFYKSDCRCPAA

SEQ ID NO: 359441 - protein, 450 aa, Zea mays
  Clone ID: MRT4577_90980C.1.pep
MEPYAAAKSGGADAGTGTGLEDSMRRLGLGDDGEAGEEKLPERPGEADCAYYLRTGACGYGERCRYNHPRDRPAPVNGVGKTAVTVEYPERPGQPLCEYYAKNGTCKFGSNCKFDHPRESGFVPVALNNSGFPLRLGEKECSYYMKTGHCKFGGTCKFHHPELGFLTETPGMYPPVQPSPISSPHPYPHHSNWQMGRPAVVPGSFLPGPYPPMMLPPTVMPMQGWNPYVSPMNQTTPAGGQQAVPAGPSYGLSHQEPTSAVTYGSHYAQLYSSGTSSSNIQEYVFPERPGQPECEHYMKTGTCKYGAACKYHHPQYFSGPKSNCILSPLGLPLRPGSQRCAYYAHHGYCKFGPTCKFDHPMGTPNYSISTSSLTDVPIAPYPQSFPVTPMPSYLPSSDLRPQYTQVKDSSANPPPSPGTTYGPVGSISKVYAPHTLIRSPASAAAGMQAS

SEQ ID NO: 359442 - protein, 487 aa, Zea mays
  unsure (1)..(487): unsure at all Xaa locations
  Clone ID: MRT4577_90981C.1.pep
SAVQAGRPREEPAPVNGVGKTTGMEYPERPGQPLCEYYAKNGTCKFGSNCKFDHPRESGFVPVALNNSGFPLRLGEKECSYYMKTGHCKFGGTCKFHHPELGFLTETPGMYPPVQPSPISSPHPYPHHSNWQMGRPAVVPGSFLPGPYPPMMLPPTVMPMQGWNPYVXVSITCHFVLYYFKEGTCVPYINXRYLCSKLASPIXVNSENSVVSXNKIXQWAXGGFIGPHIIGCKLVIPSCLENTILAMNRRHHXCLMIFKNSFWFSXPMNQTTPAGGQQAVPAGPSYGLSHQEPTSAVTYGSHYAQLYSSSGTSSSNIQEYVFPERPGQPECEHYMKTGTCKYGAACKYHHPQYFSGPKSNCILSPLGLPLRPGSQRCAYYAHHGFCKFGPTCKFDHPMGTPNYSLPAPSLTDVPVAPYPHTFSVTPIAPYLLPPDPRPQYTLAKDPSAYPPQAPGTTYGPVGAISKVYARHTLIRSPTSGAAGMQAS

SEQ ID NO: 359443 - protein, 56 aa, Zea mays
  Clone ID: MRT4577_90982C.1.pep
SSRRGFAHNSPRPRTIPPPDPATSHRRSPPSDPPRTNSPPPSTRRIPDELGEVWIS

SEQ ID NO: 359444 - protein, 42 aa, Zea mays
  Clone ID: MRT4577_90983C.1.pep
IPTKHIIRVAYYNAVVPQLINGIEFIYICWDNCIELGSLPPY

SEQ ID NO: 359445 - protein, 138 aa, Zea mays
  unsure (1)..(138): unsure at all Xaa locations
  Clone ID: MRT4577_90984C.1.pep
MVSLAGASAHPATIKGLXSSFISGRXLAVARPAARSIRRPRAAAVVVKYGDKXSVYFDLHDIGNTTXGQWHLYGSDAPSPYNPLQSKFFETFAAPFTKRGLXLLTRLLRXGGSVLAYASSSASPXFLPIKKGPQEPSQ

SEQ ID NO: 359446 - protein, 56 aa, Zea mays
  Clone ID: MRT4577_90985C.1.pep
SCFFKTVTIHHCLSTIFFLCSLTICLFFSYSLFNISLLNCSILFSVFYTFFCLSHF

SEQ ID NO: 359447 - protein, 57 aa, Zea mays
  Clone ID: MRT4577_90986C.1.pep
DMIYIAQQTGSTTAQPRDMARKHAENRTHHILDSVTTRKARHIYWRNATRIVHKQLA

SEQ ID NO: 359448 - protein, 98 aa, Zea mays
  Clone ID: MRT4577_90987C.1.pep
KTVQYLIGSGMDPGTENNPYLGFVYTSFQERATAVSHGNTARLARAPRTGPRRTSPGRSSSAGSLIGKPLFRHLLLTVICAQIMSLAVSVFVTMCLCV

SEQ ID NO: 359449 - protein, 380 aa, Zea mays
  Clone ID: MRT4577_90988C.1.pep
MQAHGIAIRARGPVAATQAPARRRQCRVSAAAVGAPAARARVTHSMPPEKAEVFRSLEGWAARSLLPLLKPVEECWQPADFLPDSSSEMFGHEVRELRARAAGLPDEYFVVLVGDMVTEEALPTYQTMINTLDGVRDETGASNCPWAVWTRAWTAEENRHGDILGKYMYLSGRVDMRMVEKTVQYLIGSGMDPGTENNPYLGFVYTSFQERATAVSHGNTARLARAHGDDVLARACGTIAADEKRHETAYGRIVEQLLQLDPEGAVLAVADMMRKRITMPAHLMHDGRDMDLFEHFAAVAQRLGVYTARDYADIVEFLVKRWKLETLESGLSGEGRRARDFVCGLAPRMRRAAERAEDRAKKDEPRMVKFSWIFDREAVV

SEQ ID NO: 359450 - protein, 237 aa, Zea mays
  Clone ID: MRT4577_90989C.1.pep
TRLSLENASDIFILPERKILPPPPSAVGITHDKECNTDAFRHANHHESLIQMSAACAEVLVREEEKIICTVDTVEFCQLPTEAYNLLKQSGLNTPEAAPCRSRNLRTEAKFGDALSSTTKLEKIMAGTAVKKGSQLKKSIQSSIGRLIHGTERRNAQHSAQGTPTKIIASGCHNNVSPVTVDIRLRRRQSLTGIPPPLPTMSRRSSLGGRSDTSSNDKRGAKTPPPVNSAAKAKRWL

SEQ ID NO: 359451 - protein, 62 aa, Zea mays
  Clone ID: MRT4577_9098C.1.pep
NTLRSSKHGLLHCPSISPRSSGGCSWSSSAVEPVRRRWGSWAAAGRRGWRPCPWWPGCSPGA

SEQ ID NO: 359452 - protein, 106 aa, Zea mays
  Clone ID: MRT4577_90990C.1.pep
VLEIVMTFGLVYTVYATAIDPKKGNLGIIAPIAIGFIVGANILLGGAFSGAAMNPAVTFGPAVVSWTWTNHWIYWAGPLIGGGIAGLVYEVVFISHTHEQLPTADY

SEQ ID NO: 359453 - protein, 185 aa, Zea mays
  Clone ID: MRT4577_90991C.1.pep
RLNGKIPKMLTHRLFTEARYSIWVDSKYQLRRDPIGMLEALLWRTNSTFAISEHGARSNIYDEGKAIVQKHKATPEEVEVQLTRYRQDGMPDTKRLHGLKALAEASVIVRELTPATNHFMCAWFNEVVRFTSRDQLSFPYVLWRLNMHGLSMFPVCTRRDLVNSLGHTRKVKPLTQTNSGSSTTS

SEQ ID NO: 359454 - protein, 41 aa, Zea mays
  Clone ID: MRT4577_90992C.1.pep
APTRPPTRTRTCVSLSQLYSSVNVHLYRFTFIIYFCKTSAM

SEQ ID NO: 359455 - protein, 70 aa, Zea mays
  unsure (1)..(70): unsure at all Xaa locations
  Clone ID: MRT4577_90993C.1.pep
HALPAPYLAFLPNVQXAISXHSNTTVDSEFKIKNLTKDYITELIYRTILAYYTQMLHYYMTLLQHISFLY

SEQ ID NO: 359456 - protein, 39 aa, Zea mays
  Clone ID: MRT4577_90994C.1.pep
IVNGAKLGCVGSQNAHQARLSTITQRMADLYLLWNILTT

SEQ ID NO: 359457 - protein, 133 aa, Zea mays
  Clone ID: MRT4577_90995C.1.pep
IPCPGWVGPSCPGKGLGSDRGRCSPGGQRCLGRVIGGLLKWRAFRLGLTLPTPNKLKALLNRGICFLFPESRRGFFLGSAPFYPGGENPGGFFFPFGWGLGSDGKKKKKKKKKKKKKKKKKKKKKKKKKPPPH

SEQ ID NO: 359458 - protein, 395 aa, Zea mays
  Clone ID: MRT4577_90996C.1.pep
MECHSWYALKSRRSVAIADAGFEDAADGAGDLGGTMSLARKQKVVKETVEMEEEQEFVWKSNLLPYKDDDAFVLPESSKEEYASTSGDTAPSGKMDPRMERSGSNGTSKVPRLGSMLGTASMAGFGKAVEILDTLGCLMTTLSSDGGFVSRTKTKGCKISILAFEVANTILKGASIMQSLSEDTVTYFKQVVLPSEGVQNLVSSEMSELMRIAANDKREELKIFSQEIVRFGNRCKDPQWHNLDRYFVKLESESAPQKQLKETAIAEMQKLMNLVQRTTDLYHELHALDRFEQEYRSRLNGKGNTDRFEKGDNIQIVRLELKTQSSYVKSLKKRSLWSKTLEEVVEKLVEVVHYLHVEIDNAFGPSDGGGVVVNAEPAVSCQRLGPAGLALHYAN

SEQ ID NO: 359459 - protein, 59 aa, Zea mays
  Clone ID: MRT4577_90997C.1.pep
SGSEIRTWALTRTRGLPWSVLSTPSGSTLRATPSSEHGLVFAYASLPRCQVFVISSAVR

SEQ ID NO: 359460 - protein, 79 aa, Zea mays
  Clone ID: MRT4577_90998C.1.pep
SYMAYIIQTGFGLFPFSLCINKWAGCCVFHVLRLDMYTYILMAARVPVTCSINISASHEKKKKKKKKKKKKGGCSRSRT

SEQ ID NO: 359461 - protein, 132 aa, Zea mays
  Clone ID: MRT4577_90999C.1.pep
LSGGMGAALLSKPELIHDILTTLRRNLDTTVTCKIRLLNTPKDTVELARRIEKTGVPALAVHGRKIKDRPRDLAKWDEIADVVSALSIPVIANGDVFEYEDFKRIKDATEHIVGQRCEEHETYLERNDNALF

SEQ ID NO: 359462 - protein, 133 aa, Zea mays
  unsure (1)..(133): unsure at all Xaa locations
  Clone ID: MRT4577_9099C.1.pep
CCGDHHKHLQDPHLQQHHSPRHXIQHRHTHHHYQQXXHKQLHVTMRSQKHXQQHEVHVQTTTTMTXHQQNIQQRHQLQHHECESHQXHDHQSTGHVQQYEQSHVHHXRQSHEQLHRQQYQRHDKHEHPRHAYE

SEQ ID NO: 359463 - protein, 129 aa, Zea mays
  Clone ID: MRT4577_909C.1.pep
RGGKKIGGGGTRGARFWGAGFYFLGGAPLSFLWGLVIHFFWPLFPRLCPGKPPRCPLFFSLVPFSFFPPRFFSCGPPLLPFPNCPSLFCAWCPPLCGGFSPRGVCGSPPCFPSSFRGSLAPSFSLVPFF

SEQ ID NO: 359464 - protein, 36 aa, Zea mays
  unsure (1)..(36): unsure at all Xaa locations
  Clone ID: MRT4577_90C.1.pep
GNYKLPKHCDNNCLLKALFVEAXWVXXDYCTTYLKI

SEQ ID NO: 359465 - protein, 381 aa, Zea mays
  Clone ID: MRT4577_91000C.1.pep
MFLNRECSACYDCPRFSGEITDTSTAYSLPPSSRLRLQVSRGPRFLPEQSRSALRHGDEVGMEYRDKLVLAPMVRVGTLPFRLLAAEYGADITYGEEIIDHKFLKCERVTNESLGTTDFVEKGTDSVVFRTCPQERGRVVFQMGTSNAVRALKAAQIVCRDVSAIDINMGCPKSFSLSGGMGAALLSKPELIHDILTTLRRNLDTTVTCKIRLLNTPKDTVELARRIEKTGVPALAVHGRKIKDRPRDLAKWDEIADVVSALSIPVIANGDVFEYEDFKRIKDATGAASVMVARGAMWNASIFCAKGKTPWEDVKREYVRKSILWDNDVKSTKHTLKEMIMHYSCLELPEGKGVIKCDTSEDLARLYGEEDYYNFVVANRK

SEQ ID NO: 359466 - protein, 113 aa, Zea mays
  Clone ID: MRT4577_91001C.1.pep
DRNPSRRSGAIITGTAFSIQEHALNNTLDSLEDDTLLSLKDCTSQDAYTEQLKRIMNKLLNKGISSFILHLNSLSLQAPHSSSGYSSLTGTHESSQHQIVFISYLQQQNYSSP

SEQ ID NO: 359467 - protein, 58 aa, Zea mays
  Clone ID: MRT4577_91002C.1.pep
VPTVPLAVIVSLVGRTIRKLSTSSPFPKSWTSLLGWPSYVENSRTSGFFRKRRGGLGA

SEQ ID NO: 359468 - protein, 77 aa, Zea mays
  Clone ID: MRT4577_91003C.1.pep
WTGTTCTTTSQKRCSLTRRAMTLSASSARLRTRTAFARSWLTPEDPDPSISVHHTMYICVADSLHVHVRSLRAGEAS

SEQ ID NO: 359469 - protein, 58 aa, Zea mays
  Clone ID: MRT4577_91004C.1.pep
QTCITRGLINKKVTELIARHYVADKGTACCYRRSYYRGFCIHDCSNGSDGQPKHKPIR

SEQ ID NO: 359470 - protein, 58 aa, Zea mays
  Clone ID: MRT4577_91005C.1.pep
RICDLKTLNRKKKVYQSLLQGHPSGLSWLLLWQTQIAGVFRGCPVSALYVVTFWTLYF

SEQ ID NO: 359471 - protein, 133 aa, Zea mays
  Clone ID: MRT4577_91006C.1.pep
MLRAFSSVVRRTAVVQSATVTRPATMSMTKRFYSAGHEDESFESFTERYVKFFDGVEDLFELQRGLNNAFAYDLVPAPSVIESALKASRRVNDFATAVRVFEGLKDKVENEGQYKQYLEELAPIRQELGVLTK

SEQ ID NO: 359472 - protein, 103 aa, Zea mays
  Clone ID: MRT4577_91007C.1.pep
PQVLNSTSILRIDPFRNFVDIHPCSNPHCLVLAMQNPPKLGFKSRNQSTRRRVTRGKMREGSRGVHHGEKKRERKSRCNLRGSTPRAAAFVSCAAGVPASPRV

SEQ ID NO: 359473 - protein, 43 aa, Zea mays
  Clone ID: MRT4577_91009C.1.pep
IMSLRWSYSRQQCSVCCCVYLSVMSLVRSCSSYVCLTAEIEIR

SEQ ID NO: 359474 - protein, 129 aa, Zea mays
  Clone ID: MRT4577_9100C.1.pep
YRSECPTRPTHTAFVSNIYVYTALLNLYNRCGDLLSARRVSYKINDQNSLTWCAMIGGYGMQGDSAGSIHLFGEMLKDGVYPNDIAFTSILSTCSHSGMVTAGKRYFDSMAQHFNITPSMKHYACMVDV

SEQ ID NO: 359475 - protein, 96 aa, Zea mays
  Clone ID: MRT4577_91010C.1.pep
PPILHSPSPFTIHQTEQKQDEGLQGKVMVHDGRVSQFHMTEMIPFVRVATRMITRAGRIRVRLKLARTRVREQKCGKRQFHEGITEHEGGEHSGAR

SEQ ID NO: 359476 - protein, 69 aa, Zea mays
  Clone ID: MRT4577_91011C.1.pep
VFVFFLAFLFFLFFFLLFFFFWNDRQKFIFILANHISSSPARVFIMVIEDGQEGFNIVVSKPRHISFSR

SEQ ID NO: 359477 - protein, 109 aa, Zea mays
  Clone ID: MRT4577_91012C.1.pep
SSTTLKGCITYESSVPPNRDVAQIENGVSSAEKDAQHYSTELSARRKSASPPEKRCANQRAESPRRTPDPSFMCRTNSSSIRRRPYPSLVWRGGTPRMRPLFSVRRRSS

SEQ ID NO: 359478 - protein, 52 aa, Zea mays
  Clone ID: MRT4577_91013C.1.pep
VQKSASATKICIDLYMKFVHMCRLEDVQSFRVINLRVNKHFYLHLHGTLLFF

SEQ ID NO: 359479 - protein, 149 aa, Zea mays
  unsure (1)..(149): unsure at all Xaa locations
  Clone ID: MRT4577_91014C.1.pep
DLWAGFSACVGVATLEVRTKPGVNRGFEVARPKIGVSSSDGNISNHPGNSTFTNSAAVATVEATSAGGVEHHWTINGSDSEDKSYFGGFPDFSGSVSDFDXVATSKAKETKNGXRLRLLRLFLLLRXHAIGEGFAENSVKYSSDFPGNN

SEQ ID NO: 359480 - protein, 86 aa, Zea mays
  Clone ID: MRT4577_91015C.1.pep
REHRRQQLRSRDRRESATAGGLSVVFQIRMLATPCALLHCARSPLLRARRREDLEEGWVFAFGAGKTWRGWSWPGRRPAGGRRRSA

SEQ ID NO: 359481 - protein, 33 aa, Zea mays
  Clone ID: MRT4577_91016C.1.pep
PPSEGWEFVWGRQAQLVRWPAATTTWWAPLVRR

SEQ ID NO: 359482 - protein, 318 aa, Zea mays
  unsure (1)..(318): unsure at all Xaa locations
  Clone ID: MRT4577_91017C.1.pep
MSNAAIAIGTIIFVIFVAAIIACAYRRAEACAGGVARSCAVVSDQQIRHATIEKFLSEIRHEKPFRFTSQQLAGFTGNYTTRLGAGGFGTVYKGVLPNGLAVAVKVFDRSLTQRSQEEQFMAEVGTIGRTYHVNLVRLFGFCSXDVARALVYEYMGNGALDAYLLGRGRGAGLPALRDIAAGVARGIRYLHEECQQKIVHYDIKPGNVLLDAALTPKVADFGLARLVNRADTHVSVSCVRGTPGFAAPEMWMLSGVTEKCDVYSFGMLLLEIVGRRRNFHEEASESQQWFPTLAWTKYESGELVDLVACSSGTGADGG

SEQ ID NO: 359483 - protein, 129 aa, Zea mays
  unsure (1)..(129): unsure at all Xaa locations
  Clone ID: MRT4577_91018C.1.pep
ASLPFTDLTSLGRTLMSKXECSXMPHPLLGXITFVDTXDVISGGKPPSQRRYDFTDGTSRSPAKCDLILLMIDPYMLDLRHKTKRGISSLRRHDYKIRMVLNIADHIDTHQLMRVYDALTCSLVKVLNT

SEQ ID NO: 359484 - protein, 62 aa, Zea mays
  Clone ID: MRT4577_91019C.1.pep
VLKSHVQLAARHDPIIQPAASKRAETTIDCFFPEVRAANPPPISEDQHDGAGQRSLSPYRSD

SEQ ID NO: 359485 - protein, 27 aa, Zea mays
  Clone ID: MRT4577_9101C.1.pep
KELVRIKTLLAEMEEMRKRSSTSDVIL

SEQ ID NO: 359486 - protein, 101 aa, Zea mays
  unsure (1)..(101): unsure at all Xaa locations
  Clone ID: MRT4577_91020C.1.pep
MASTQHLSIVATDVVALVLMAGVETYEADISCCQEVISIARCIFYTRCQDLGPSARXYNGVRSLNNTDRITVDRRADCNCLKNADTGFSGLNAGNAVSIPL

SEQ ID NO: 359487 - protein, 523 aa, Zea mays
  Clone ID: MRT4577_91021C.1.pep
MASPPPALEILVREPDGVTVWSGPPYPPGTTSPPQRLPKTACSATSFSTDGARLLATVASASATVYDCRTLAVVKCFELPGLLAAALSPTGAYLQTFQKSSSPQEKNVTVWHVDTAAALYQHYQKSMSKTTWPMVQFSADESVACRMMPNEIQFFDPKDFAKGILYRIRMPGIATMKLATAPGSHVAGFVPEAKGVPASVQIFSCNKDAQNQVVARRSFFRCSTVQLQWNKGSTGLLILAQADVDKTNQSYYGETKLNYLTTDRAFEGIVPLKKDGPVHDVQWSSSGSEFAVVYGVMPPKATIFNKKCNPLVEFGEGPYNTIRWNPKGRFVVLAGFGNLPGDMAFWDYSEKKLVAKTKAECSVTSEWSPDGRHFMTATTAPRLQIDNCIKIFDHNGSLQFKKMFERLYQADWKPEAAERFTDIADLTTSLSTLKIEETKKQVSAQGSKSAQTSSKAPAITAPKPTAYRPPHAKGSAELQDKLFGGLAPAGGEMSKNALRNKKRREKQKEKKAAEASGSPADES

SEQ ID NO: 359488 - protein, 531 aa, Zea mays
  Clone ID: MRT4577_91022C.1.pep
MATTTSATTAAAAAATTAKPRGSSSALCQRVAGGGRRRSGVVRCDAAGVEAQAQAVAKAASVAALEQFKISADRYMKERSTIAVIGLSVHTAPVEMREKLAVAEELWPRAIQELTSLNHIEEAAVLSTCNRMEIYVVALSWNRGIREVVDWMSKKSGIPASELREHLFMLRNSDATRHLFEVSAGLDSLVLGEGQILAQVKQVVRSGQNSGGLGKNIDRMFKDAITAGKRVRCETNISSGAVSVSSAAVELALMKLPKSEALSARMLLIGAGKMGKLVIKHLVAKGCKKVVVVNRSVERVDAIREEMKDIEIVYRPLSDMYQAAAEADVVFTSTASETSLFAKEHAEALPPVSDTMGGVRLFVDISVPRNVSACVSEVGAARVYNVDDLKEVVEANKEDRLRKAMEAQTIITEELRRFEAWRDSLETVPTIKKLRSYADRIRASELEKCLQKVGEDALTKKMRRAIEELSTGIVNKLLHGPLQHLRCDGSDSRTLDETLENMHALNRMFSLDMEKAIIEQKIKAKVEKTQN

SEQ ID NO: 359489 - protein, 211 aa, Zea mays
  Clone ID: MRT4577_91023C.1.pep
MATTTSATTAAAAAATTAKPRGSSSALCQRVAGGGRRRSGVVRCDAAGVEAQAQAVAKAASVAALEQFKISADRYMKERSTIAVIGLSVHTAPVEMREKLAVAEELWPRAIQELTSLNHIEEAAVLSTCNRMEIYVVALSWNRGIREVVDWMSKKSGIPASELREHLFILRSSDATRHLFEVSAGLDSLVLVLAPCPSPLEIRRRCLPVRL

SEQ ID NO: 359490 - protein, 91 aa, Zea mays
  Clone ID: MRT4577_91024C.1.pep
MATTTSATTAAAAAATTAKPRGSSSALCQRVAGGGRRRSGVVRCDAAGVEAQAQAVAKAASVAALEQFKISADRESLAPRLWKSAAVVASL

SEQ ID NO: 359491 - protein, 133 aa, Zea mays
  Clone ID: MRT4577_91025C.1.pep
MATTTSATTAAAAAATTAKPRGSSSALCQRVAGGGRRRSADRIRASELEKCLQKTVADVLTKKMRRAIEELSTGIVNKLLHGPLQHLRCDGSNSRTLDETLENMHALNRMFSLDTEKAIIEQKIKAKVEKTQN

SEQ ID NO: 359492 - protein, 88 aa, Zea mays
  Clone ID: MRT4577_91026C.1.pep
RQQRRDIKRDSLLPPTPSAGGGAAAREVATKVYGFLLPSPPLAHHLTLYVTVGGGLEHEPVSAGRAVATDGSRASARFEDGGSGGRCI

SEQ ID NO: 359493 - protein, 134 aa, Zea mays
  Clone ID: MRT4577_91027C.1.pep
IMATTTSATTAAAAAATTAKPRGSSSALCQRVAGGGRRRSGVVRCDAALEQFKISADRYMKERSTIAVIGLSVHTAPVEMREKLAVAEELWPRAIQELTSLNHIEEAAVLSTCNRMEIYVVALSWNRGIREVVD

SEQ ID NO: 359494 - protein, 104 aa, Zea mays
  Clone ID: MRT4577_91028C.1.pep
GRVRIPAMVAARVFQLTRELGHRTDGETIEWLLRQAEPSIIAATGTGVTTEEAPPSLVPVAPIASSVSLTPVPYYTALLMQPPPTANESPVASASVSGTVADNN

SEQ ID NO: 359495 - protein, 134 aa, Zea mays
  unsure (1)..(134): unsure at all Xaa locations
  Clone ID: MRT4577_91029C.1.pep
MRSTSCRRRRGASSHSLLGAMARGLKKHLNRLNAPKHWMLDKLGGTLAPKXCSGPHKCRECLPLILIIRNRLKYALDYREVIFILMQRHGLGDXRSWTDRTYPAGVMDVIAIPKTMENYRLVYDSKGRFVFTQS

SEQ ID NO: 359496 - protein, 54 aa, Zea mays
  Clone ID: MRT4577_9102C.1.pep
WNGLSPSSLRGVGVQGVSGVRKGVSLCGVCWCVCGWGCSPVCFQASYLFLLFKI

SEQ ID NO: 359497 - protein, 77 aa, Zea mays
  Clone ID: MRT4577_91030C.1.pep
TPTRTLTIMSIPHASTLCIGIVTSRSQYPERGEDNMAHIGRWWRPYTPTCLLSTDGKSRPLALLKPCSYGTWSSVDN

SEQ ID NO: 359498 - protein, 63 aa, Zea mays
  Clone ID: MRT4577_91031C.1.pep
FSLYYLLLFFIFFFFCFFFFFFFFFFFFFFFFFFKHSIRSDHKIRESLFFYLLSKKTHVTTHF

SEQ ID NO: 359499 - protein, 64 aa, Zea mays
  Clone ID: MRT4577_91032C.1.pep
MSSTCCLASSVTRHRLLLCLSSIQGALALTTEHPNDELMKRTPVVRKGNFIGNIMWRNIMGQAL

SEQ ID NO: 359500 - protein, 156 aa, Zea mays
  unsure (1)..(156): unsure at all Xaa locations
  Clone ID: MRT4577_91033C.1.pep
SKPGRAGRTGLANKARNLKGRAQGPRPLKRTPGGEPPPPPGLKRRTEANGNGHSGFTKVGKGERAGIPKKTGSRRNLPCSPRGKSWATAGIYAVTKEGKKTATRNAVRRTGKPRTSTAACPLFVSFGFFYIVLPFFFFFFFFFFFFFFFFFFFFFX

SEQ ID NO: 359501 - protein, 55 aa, Zea mays
  Clone ID: MRT4577_91034C.1.pep
QSMPSRVCNHFPIKTMRVSNLQREPLLYCLIDIFIPSIELRGHIYHRPFSSPFSS

SEQ ID NO: 359502 - protein, 59 aa, Zea mays
  Clone ID: MRT4577_91035C.1.pep
INTFCSRRFLNCPSRPQAFTLNRRGNLILFGLLKFGSNIDTHTTGLYLAIGWPPKVGPF

SEQ ID NO: 359503 - protein, 507 aa, Zea mays
  Clone ID: MRT4577_91036C.1.pep
MVKRLRRKGDVSSAPPPKASAPGSTKSVKLKKGVKTVPKKLKGLCTESVGIAEASASAQTPAPKSIKTSPAAATAAETADDRVAQNKTVDRNLSRKETMKGREAEKGEMTSDGVAQTKTEDRKASRKETMKGIEKKAEGEEKRTSRKEMMKGREEERVKREEKRRKLTGKEKEKESASGFIFMCSARTKPECYQNGVFGLPRGKMDVVEKIRPGAKLFLYDFDLKLMYGVYKADTRGGLDLVRHAFDGKFPAQVKFSVDKDCLPIPESSFKHAIKENYSSKGRFTQELNSKQVQRLLAMFKPIDLPQSAPQHIEEVRQSHIIEDIRNPSDYEDRRRLQHIEERGAPIDVHAYPLEDQYNITRSLHPPLFDEPRRLVLDPYHMQEPQHVPLNYYHQVATRSPYCQPHMDIMHERTAAEATLMDPLPVRDHRALPGELAARSERVDELYRSYKLSTRGMDFNPGASYQTTYHPSSSVYGEGIQRPVLARGNGPSVPVSSRYSFNGPPAY

SEQ ID NO: 359504 - protein, 261 aa, Zea mays
  Clone ID: MRT4577_91037C.1.pep
MVKRLRRKGDVSSAPPPKASAPGSTKSVKLKKGVKTVPKKLKGLCTESVGIAEASASAQTPAPKSIKTSPAAATAAETADGRVAQNKTEDRNLSRKETMKGREAEKGEMTSDGVAQTKTEDRKASRKETMKGIEKKAEGEEKRTSRKEMMKGREEERVKREEKRRKLTGKEKEKESASGFIFMCSARTKPECYQNGVFGLPRGKMDVVEKIRPGAKLFLYDFDLKLMYGVYQADTRGGLDPHAFDGEFIYPHKIVFLLSFM

SEQ ID NO: 359505 - protein, 56 aa, Zea mays
  Clone ID: MRT4577_91038C.1.pep
GLLCCSTQYAAKLKNIYTMSSEFFSLNENMIISKKKKKKKKKKKKKKKKKKKKKKK

SEQ ID NO: 359506 - protein, 114 aa, Zea mays
  Clone ID: MRT4577_91039C.1.pep
MEAAKERQQRKAAGEGDSTTVQLPTETSPYVQYEGLEDYKMRGYGAQGHLPVSDVPHGGSGTEAPTVPGTAIPVAEPKRRDDVQPQRDLGGDGGGGVRRPGDTSTDAINRHGVP

SEQ ID NO: 359507 - protein, 71 aa, Zea mays
  unsure (1)..(71): unsure at all Xaa locations
  Clone ID: MRT4577_9103C.1.pep
MNVEKLKKMAGAVRTGGKGSVRRKKRXXXKTTTTDXXXXXTTLKXMGXXXXXGIXXGQXFXXXVIXXFENP

SEQ ID NO: 359508 - protein, 59 aa, Zea mays
  Clone ID: MRT4577_91040C.1.pep
LTDVCPQDCFEVFRSRSTFHHQPLVPILASKKFHGSKSLTNSLPFKDGHILEQQLQHER

SEQ ID NO: 359509 - protein, 55 aa, Zea mays
  Clone ID: MRT4577_91041C.1.pep
FVQSFIRYGCSLSYLQQHLWLFLARLYQCLCGTKSPPLSHFSSNRHASVVPLPLL

SEQ ID NO: 359510 - protein, 127 aa, Zea mays
  unsure (1)..(127): unsure at all Xaa locations
  Clone ID: MRT4577_91042C.1.pep
PGHPHLISEILSTPLVSAKFQDEVXALDKVCEHWNYQLDETRLVLLAPTKKIDEFXPRNEEEEEEKLMHSAEVITQKAVCXKVEAHEDNSSLDAQATTIAKIVPEHEFGRDYEVNKKTVRTFREKRV

SEQ ID NO: 359511 - protein, 119 aa, Zea mays
  unsure (1)..(119): unsure at all Xaa locations
  Clone ID: MRT4577_91043C.1.pep
VIMNDNFDTVVTATRWGRCVFNNIQKFIQFQLTVNVAALIINFVSAMTSGKMPLTTVQLLWVNLIMDTMGALALATDTPTKALMRXPPIGRTAPLISNAMWRNLAAQAAFQVAVLLALQ

SEQ ID NO: 359512 - protein, 92 aa, Zea mays
  Clone ID: MRT4577_91044C.1.pep
CLPARMLAFVFGRWWGNRFLLFLVCLENVFAFPWNKLLFFFVLVGPVAFSCPVIASLLPSPPSQRFVLLISFPIFFGLYYFSLFPPKKASLC

SEQ ID NO: 359513 - protein, 35 aa, Zea mays
  Clone ID: MRT4577_91045C.1.pep
GSQSCTVEHVGPLTPPRVSSTRLSTFHARVRERVS

SEQ ID NO: 359514 - protein, 86 aa, Zea mays
  Clone ID: MRT4577_91046C.1.pep
FGSSSSPFLLASFVPPVKIGCLVITVCPTMVHGMSKVHMLRACKGSGYWMGPGVNVATTHACDLLRSDNGPLKQPLSPLNILITVE

SEQ ID NO: 359515 - protein, 40 aa, Zea mays
  Clone ID: MRT4577_91047C.1.pep
NVVGTLSYVKLKVMHYITVQRRSPGGHKCKTVKNKHTSLE

SEQ ID NO: 359516 - protein, 192 aa, Zea mays
  unsure (1)..(192): unsure at all Xaa locations
  Clone ID: MRT4577_91048C.1.pep
MEARASPRPSVSIGGGGGFGAGRGDDSAFSFLSKGWREVRDSATADLRLMRARADSLRTLADRELEHILASASTALISAPPTPLAAGAPIAELEFVRTRIQPKISELRRRYVSQERELGRRVLEGWAPRAAGKPARARVDLSGITAIRNAIVSEVDGXERWRRVVWNGEAEEGKEWEVLRMIPDGIKEFERR

SEQ ID NO: 359517 - protein, 94 aa, Zea mays
  unsure (1)..(94): unsure at all Xaa locations
  Clone ID: MRT4577_91049C.1.pep
EKRCVPRAGRTTLLFSDPVRDGLSLLKIWNLNKCGGVMGVFNCQGAXWCRVTKRTHIHDFSPFTLTCTVRAYYFYAITRVTGDNGDCNEYIVVI

SEQ ID NO: 359518 - protein, 55 aa, Zea mays
  Clone ID: MRT4577_9104C.1.pep
GSFIRWIWGRLWENGSTPPEKKGPMGPSESLKKFVHLQPKSSQSRILCEVADIPR

SEQ ID NO: 359519 - protein, 63 aa, Zea mays
  unsure (1)..(63): unsure at all Xaa locations
  Clone ID: MRT4577_91050C.1.pep
VVVDFFLVCVPRSRXVNSRPDLRSLSRYSFGIERTVSLWFVSRRSQLLRPNRRRARGYAALPP

SEQ ID NO: 359520 - protein, 86 aa, Zea mays
  unsure (1)..(86): unsure at all Xaa locations
  Clone ID: MRT4577_91051C.1.pep
MAPMKLYGAVMSWNVTRCATALEEAGGDYXIGSFNFATAEHKSPNHLVRTPFGQVPSLRGGYCALFXSRELSEYAXAKHYPDLVGG

SEQ ID NO: 359521 - protein, 116 aa, Zea mays
  Clone ID: MRT4577_91052C.1.pep
QGPFPLLFAGGFLFKPFEVPRAGPSFGPSSLVGMTKASSPPGGGISRGLPPWGGTGICLGSTGKNGPPKLFPFGGGVKTRRPPHETPAPSRFSFWRGGLGPPAPHFWGPQKGFFSI

SEQ ID NO: 359522 - protein, 60 aa, Zea mays
  Clone ID: MRT4577_91053C.1.pep
ENLSPKFPPPGKGLTQDQYSCGGDRDIPLKPFRSPNKQGGGLPVFLLRGEFPFVLVKKPP

SEQ ID NO: 359523 - protein, 75 aa, Zea mays
  Clone ID: MRT4577_91054C.1.pep
YSPKIDRPLLGGPTTQDPPIEGLYICLPYMSGQGWTFLWLKMDMFLTSGGLGFSMAWGALRTKPRGAFFSKTPPP

SEQ ID NO: 359524 - protein, 83 aa, Zea mays
  Clone ID: MRT4577_91055C.1.pep
SIWDSQSQLFLPMVVVGQLRHHHQELQLLPLPPLAQVLIHLVGMTTTVPLTGTTGLPNCNLKTTTPDRTSSAILGLGGSYYCC

SEQ ID NO: 359525 - protein, 103 aa, Zea mays
  unsure (1)..(103): unsure at all Xaa locations
  Clone ID: MRT4577_91056C.1.pep
MTLITKRQWSMHPQPHAMAVRALILTYNYVLIALIVDXYTVTGFLIADCVHVDLPMKTNYLVVDINTTAKQIEDAYNEFTTRDDIAIVLISQDIANMIRCLVG

SEQ ID NO: 359526 - protein, 52 aa, Zea mays
  Clone ID: MRT4577_91057C.1.pep
PHIHPHSCLSSVFGPVKQIVSISFLSVKRVFCSVYSILPVYLFISMLFFSGN

SEQ ID NO: 359527 - protein, 102 aa, Zea mays
  Clone ID: MRT4577_91058C.1.pep
KPKQKIWFGFADLVPKKTQNYVFITLMFRIVSHIIHKICRIDKTVITTAPTVALCATTEPSQQCYPSSSQAAFHSDLKHDAKPGSKRNGYDGSTQRNAKYTV

SEQ ID NO: 359528 - protein, 90 aa, Zea mays
  unsure (1)..(90): unsure at all Xaa locations
  Clone ID: MRT4577_91059C.1.pep
SASTHRQYSVAGHRDGVLEKSAQLFRQMLKNAXSNAELKGLDVDSLVSEHIQVDKAPKMRRRTYRAHGRINPYMSSPCHIEMILTEKDQI

SEQ ID NO: 359529 - protein, 41 aa, Zea mays
  Clone ID: MRT4577_9105C.1.pep
EDYSLDCNVGIKDPFAAHDVPLGRSINEVHGTWVVNHIVSA

SEQ ID NO: 359530 - protein, 362 aa, Zea mays
  Clone ID: MRT4577_91060C.1.pep
MAGTAAAAPMDIDAAAPPPPPPGAAAKGKAPLSAGGRAAPWVEKYRPQSLADVAAHRDIVDTIDRLTNENRLPHLLLYGPPGTGKTSTILAVARKLYGSQYSNMILELNASDERGIDVVRQQIQDFAGARSLSFGARPSVKLVLLDEADAMTKDAQFALRRVIEKYTRSTRFALICNHVNKIIPALQSRCTRFRFAPLDGSHVRERLQHIIKSEGLSVDDGGLTALVRLSNGDMRKALNILQSTHMASQQITEEAVYLCTGNPMPKDIEQIAFWLLNEPFSTSFKYISDMKMRKGLALVDIIREVTMFVFKIQMPSDVRVKLINDLADIEYRLSFACNDKLQLGALISTFTDTRTAMVAAAS

SEQ ID NO: 359531 - protein, 85 aa, Zea mays
  Clone ID: MRT4577_91061C.1.pep
VASCGRGHLFSMPTNEYLVVGPDPRAPPSLFSSVQSLHAPNKQSPACYVLLSLNRLVHSVRSLHAPCTVASRLLLIKNFSLRTPC

SEQ ID NO: 359532 - protein, 109 aa, Zea mays
  unsure (1)..(109): unsure at all Xaa locations
  Clone ID: MRT4577_91062C.1.pep
AQSILAIWACQVVLMGAVEGYRVASGPLGEVVDPLYPGGSFNPLGLADQREAFAXLKGKEIKNGPLAMFSMFRFFPHAINLGKGPLQNLNHHIADLVNNKPWAYSTKFI

SEQ ID NO: 359533 - protein, 137 aa, Zea mays
  Clone ID: MRT4577_91063C.1.pep
PPRFAPPKDRELPVFPARAGVLGFQGLNFFLESQNPPYPLPIVVWGNFWKVPGIFFPFPPWKFVPKLGDMGPPNGEFGQKNHGPPKRVTPRLFFPSWWRGMSIWAFKVSPKFFLKNPFMSFSGTWVKKKKWCVPPGA

SEQ ID NO: 359534 - protein, 75 aa, Zea mays
  Clone ID: MRT4577_91064C.1.pep
KFRLHKHDRNRFNNAPHCAKQRKRSASTTRASARNHMQNRATRTRGSLTTCRAYTKYQIDMKEQSDTQFGTDIYL

SEQ ID NO: 359535 - protein, 55 aa, Zea mays
  Clone ID: MRT4577_91065C.1.pep
RNPRGAHLRALNNLELLNADGIPGAFFIHLSHTSQTLNNLSPILTKLYFEDTYIY

SEQ ID NO: 359536 - protein, 72 aa, Zea mays
  Clone ID: MRT4577_91066C.1.pep
KNKNKIKKKYRKKTKKIASKIQLNRHLKKSKRGKKNKNGEITKIRGQIRMPITIKHKNHKTSTIKCKAWAAS

SEQ ID NO: 359537 - protein, 49 aa, Zea mays
  Clone ID: MRT4577_91067C.1.pep
TTWSVEFYNVGDSMKSEDRVHLYHTELTTDETTLTQVRMILEITMMMAF

SEQ ID NO: 359538 - protein, 108 aa, Zea mays
  Clone ID: MRT4577_91068C.1.pep
MGSPLGGWPSYNPHNFSQLVPADPSAQPSNVTPATYVATHRTDPPPNQVITTESRNILLRHFYQKSEKLRPKRPAPDNLDTENNSSSNNKQPRGPVGDVGGQSSSARS

SEQ ID NO: 359539 - protein, 77 aa, Zea mays
  Clone ID: MRT4577_91069C.1.pep
HGWMKRVNLSKWLQHAAKHSTSSTIAPCILPTPLRRWCPGLDVQVSYSSTIAVWLYDVDGKPRMVKYISKKKNRKTG

SEQ ID NO: 359540 - protein, 134 aa, Zea mays
  Clone ID: MRT4577_9106C.1.pep
MRNETRHLLTIQGDVCRTEEDGMRVLTVENLRNPYESNLGGTNKRFKLTLNKLYAWTLVDYERVVMIDSDNIFLQNTDELFQCGQFCAVFINPCYFHTGLFVLQVCTESFVVPLVTCPDTTKICVILLEIVRAC

SEQ ID NO: 359541 - protein, 85 aa, Zea mays
  Clone ID: MRT4577_91070C.1.pep
MVQVGAAQDKNPRLIDTEPWKSKSKTAASSPPVAIQQDKTTDVDLLSGWIGIRIPIRISTRKACRRHLTHYCQMPNHPPKIATKK

SEQ ID NO: 359542 - protein, 107 aa, Zea mays
  Clone ID: MRT4577_91071C.1.pep
MGSPLGGWPSYNPHNFSQLVPADPSAQPSNVTPATYVATHRTDPPPNQVITTESRNILLRHFYQKSEKLRPKRPAPDNLAPENNNSNNKQPRGPVGDVGGQSSSARS

SEQ ID NO: 359543 - protein, 47 aa, Zea mays
  Clone ID: MRT4577_91072C.1.pep
QGYNMGECFLVKWCNQSWDTQYRVYKRVSDVSIAKPPSHCEQSVGLN

SEQ ID NO: 359544 - protein, 394 aa, Zea mays
  Clone ID: MRT4577_91073C.1.pep
MVRETGYYDVLEVSPTASEAEIKKAYYVKARQVHPDKNPDDPLAAARFQELGEAYQVLSNPKQREDYDLHGKPGISTEAIIDPAAIFAMLFGSELFEDYIGQLAMASMASLDGFTENEQIDPRRLQEQMRVVQKEREEKLAEALKDRLHLYVQGNKEEFIQYADAEVTRLSNAAYGVDMLSTIGYVYSRQASKELGKQAKYLGVPFIAEWFRNKGHSIKSQITAATGALALMQLQEDWRKHLSDECHYNEEELEAYMLTHKSVMVDSLWKLNVADIEETLSHVCQMVLHDSSARKEELRVRAKGLKTLGKIFHQAKLSTAEGDPATMNNTINNLDENDDSSPESSPRSPRDQMFDTNPPYSQSPYVEAPELGGYFSFDFPMPIAPPGAQRDPIP

SEQ ID NO: 359545 - protein, 107 aa, Zea mays
  Clone ID: MRT4577_91074C.1.pep
MAKLLLGLLLALAILGTTSAAGCVQDAEDMKRECKQFELFPANPKLPPSAACCAVWKRADVPCLCKYVNKEVEKVWCMEKVVYVANYCKRPFQPGYKCGSYTVPLSM

SEQ ID NO: 359546 - protein, 119 aa, Zea mays
  Clone ID: MRT4577_91075C.1.pep
RRSLSSMKTPGHRNFAKGNVENRFLVRSEGYMLGRLLVTRQGVGRKTRFILKAPGKRGFPIRQSDWKTPLRIRQDVIENRVLIPYGAIESRLLGEGAIEGNGTRRPFVISLILLRPVEI

SEQ ID NO: 359547 - protein, 75 aa, Zea mays
  Clone ID: MRT4577_91076C.1.pep
SPLHKYRNKWTPPSNLSSLVNTHNANYPQTTYFFLKNQQKLKHIFSLSKCSPPSHKKNTMSNPNKTLVPIIKNYH

SEQ ID NO: 359548 - protein, 58 aa, Zea mays
  unsure (1)..(58): unsure at all Xaa locations
  Clone ID: MRT4577_91077C.1.pep
XAGFGVRNQTDGGQTSGKRRWAIAVTDDIEAKLHATGNSTHTAPRFIVEIPQSLRTLI

SEQ ID NO: 359549 - protein, 75 aa, Zea mays
  Clone ID: MRT4577_91078C.1.pep
AGHGLRSLSNDLGALQFRKKGYIPLTTYLRTYKIGDYVDVKVNGADHKGMPYKHYHSRTRRVWNVTKRARYHNIN

SEQ ID NO: 359550 - protein, 130 aa, Zea mays
  unsure (1)..(130): unsure at all Xaa locations
  Clone ID: MRT4577_91079C.1.pep
MACTNNATSASMLVMVGLVLRWEKDKSKVLSANAYATGTDSNVINLSPSNHSXLKQQERLQLSIAISMGXGPVNQTIIIPKGDSFAEQLNSKGPXKGNGTFKLNVNLQVNTDLSQYTTHGNGIAILLTNN

SEQ ID NO: 359551 - protein, 226 aa, Zea mays
  Clone ID: MRT4577_9107C.1.pep
RDFEDADIDNAISWVNFGVFFNHGQTCCAGTRVYVQESIYDNFVKKFKERAEKNVVGDPFSADTFQGPQVSKIQFDRIMEYIQAGKDAGATVETGGKRKGDKGYFIEPTIFSNVTEDMKIVQEEIFGPVCSIAKFKTKEDAIKLGNSTSYGLAAALHTKNLNTAIEVSNALKAGTVWVNTYNTLHHQMPFGGYKESGIGRELGEDALANYTQTKSVSIRLGDALFG

SEQ ID NO: 359552 - protein, 57 aa, Zea mays
  Clone ID: MRT4577_91080C.1.pep
ILLQYSHCCSKTTLPHSLTLIIYFILLIQCYLSRNDTFFTSIYSFLYHKSYYTSYTI

SEQ ID NO: 359553 - protein, 55 aa, Zea mays
  Clone ID: MRT4577_91081C.1.pep
SLPISGGAPLISPHSASNQHLKIIYISKELIWRTVLARPSTLLVILWHQTTQEIS

SEQ ID NO: 359554 - protein, 57 aa, Zea mays
  unsure (1)..(57): unsure at all Xaa locations
  Clone ID: MRT4577_91082C.1.pep
NXSFXITYCXSLIAKXXLXYFHKIKSQQLTKQVLHLLLLPFHLMILHCILLISVKPQ

SEQ ID NO: 359555 - protein, 374 aa, Zea mays
  unsure (1)..(374): unsure at all Xaa locations
  Clone ID: MRT4577_91083C.1.pep
MSAAAAAAAAARCVPLRVSSPETAKSAASIPTSSAASASAPLRAAVAAGPGRRLPAPPFRCSSSSPENSAPRDLGLLLEVEGVLADVYRFGNRQAFNVAFRSLGLDCANWTEPIYADLVRKACGDEERMLALFFDRIGWPTSLPTSEKGSFIKSVLREKLKALEEFSASDSLPLRPGVEKXTSSFYYXFIDDALGEGVPLAILAAYGRNGEKISRSIAMKLGPERISKIKIVGNVEVEESFYGQLVLGKGVTSGLDEQLVREAQKAASAEKQRIAEKVASILKLSVDITASESSDKVIAALRAGSEYVGCDVQSCILVAGSQSGVLAAERIGMPCIVVRSSFTARAEFHSAKAVMDGFGDTDLTVSKLLSKKWF

SEQ ID NO: 359556 - protein, 133 aa, Zea mays
  Clone ID: MRT4577_91084C.1.pep
KKTLLPRVGGFLPLGGGGKTSLWGANRGLQQGGGPKLAQGALGGFGSSWTGIQRWGAPGYQDKPHGAKALKQPRGHNGGGPPPLWLRLGSEHIACKPQRGTLDPHTFQHKPLPLHWKCGTIVEQMAKKLLSRQ

SEQ ID NO: 359557 - protein, 24 aa, Zea mays
  Clone ID: MRT4577_91085C.1.pep
MATIAKATARATARATVTVARSEA

SEQ ID NO: 359558 - protein, 72 aa, Zea mays
  Clone ID: MRT4577_91086C.1.pep
PAQKSCTPLENKLALAGEKRFKSLIFKQQFPPTLNPQGVPKPNGGILGNKKAGDPLWGVGGLTKFYQEKGGP

SEQ ID NO: 359559 - protein, 188 aa, Zea mays
  Clone ID: MRT4577_91087C.1.pep
SYGVGDQSKFEFECTGSEAAQPYRLSGRLRRRRRRKPPIAPSPGRRLSAPPFLPPLSLFFSILRLNLSQRRRRPVGGCVDPGPPGVDPLVPSPDLVSCRPGVLLRCTARLSGVVHGQNNVIIEEVNKGLNPGMVVLLVVASFLLLFFAGNYALYVYAQKTLPPKKKKPVSKKKLKREKLKQGVSAPGE

SEQ ID NO: 359560 - protein, 98 aa, Zea mays
  Clone ID: MRT4577_91088C.1.pep
SVPVHHQRVQSPQGQPVPAPGAPVPPHLWQYAAAGLHWRGLTDVLDRLASAERHSISSPCMIRPCSCMYVAMPYAKHASLCKWFLYTAWCDTRDLLAR

SEQ ID NO: 359561 - protein, 274 aa, Zea mays
  Clone ID: MRT4577_91089C.1.pep
ARKILEKNGMAACNPCQVPMEARLKLSKFSTEPPLDFTTYRSVVGSLRYLVNTCPDIAFVVGYVSRFLEDPRKDHLAAVKHILRYLAGTKTWGLWFERRKKEEAKLIGFSDNDFAGDVDARKSTTGVIFFLNSSPIIWQSMKQKVVAQSSCEAEYIAAANAACQAVWLARVLAEVQGTTTKAPMLRVDNQSAIALIRNPVHHGQSKHIQVKYHFVRESEDEGLINVKFIRSEDQLSDILTKPLGKTKFLELRSKIGLINVQQLAPQGLGGECRK

SEQ ID NO: 359562 - protein, 44 aa, Zea mays
  Clone ID: MRT4577_9108C.1.pep
VALHSGRDSPKNRLAVRHFYKFRGCGASLNKFKGLEMGFQSLWT

SEQ ID NO: 359563 - protein, 74 aa, Zea mays
  Clone ID: MRT4577_91090C.1.pep
SNTHLILLQLNSMLDCLRIYQVYINIVLPSNLPDIYDIQICEPISGSLLYNTIILLISRTICILVRHSGYKLLF

SEQ ID NO: 359564 - protein, 66 aa, Zea mays
  Clone ID: MRT4577_91091C.1.pep
VLCRRSNEAGESGWRRRKQVLVVRSVAHGVETEVSGIVRVLEVIGAVAQGNHFVSTGHGLSCSIRF

SEQ ID NO: 359565 - protein, 59 aa, Zea mays
  Clone ID: MRT4577_91092C.1.pep
YKILFKSRASIWHLLGLVALLIADITNLSLPAKPRLSRLHYYTNQSALASICHLLLVIP

SEQ ID NO: 359566 - protein, 143 aa, Zea mays
  unsure (1)..(143): unsure at all Xaa locations
  Clone ID: MRT4577_91093C.1.pep
MAPKAAPTKKGDAKTQALKGDNVEKIGTAKKTKEDPGRGVTLHRPKTHEKGKDPKDPKITTNGRNKLDHQQIVKYPLNTESAVKKIEDNNTLVFIVHLKADKKNINAAVTKMNDIHADEKNTLIRPDGKKKAYXSLRADYDAA

SEQ ID NO: 359567 - protein, 66 aa, Zea mays
  Clone ID: MRT4577_91094C.1.pep
ARYNTPKRVSVVKFEYLSIHLICKKHNSMRIWRFIKWNTCCIRTAFFFLTLAKENKRKLFPSKTRD

SEQ ID NO: 359568 - protein, 65 aa, Zea mays
  Clone ID: MRT4577_91095C.1.pep
GPFLFYPPSSFFPSPPGGCPCNLGLFFRGGHRFNTPMGPFPKQKGARHWCLFQKTKQKCERHWCL

SEQ ID NO: 359569 - protein, 50 aa, Zea mays
  unsure (1)..(50): unsure at all Xaa locations
  Clone ID: MRT4577_91096C.1.pep
LHSXHISKPLFSIITQTTSIPIPKLNNQHNLQTQQLFYKHTKFTSPFNNN

SEQ ID NO: 359570 - protein, 143 aa, Zea mays
  Clone ID: MRT4577_91097C.1.pep
GDWAHRGRPGVEVFQSSHLIVVSDPMDNLGVLLLLVVAARAIAAEHGRDTPTDIKLIKGTDASAADDDRMECEYTELIRTGSILKAATDTNVTSGAGRRGRKRRADLEPARLQRHHGLRLLLLPAHEPVHLQRASSLQILVSV

SEQ ID NO: 359571 - protein, 37 aa, Zea mays
  unsure (1)..(37): unsure at all Xaa locations
  Clone ID: MRT4577_9109C.1.pep
VFRDVFFQCFYSVVEAAIECPISVLSAIRVVGGLXLL

SEQ ID NO: 359572 - protein, 166 aa, Zea mays
  Clone ID: MRT4577_910C.1.pep
GLLCVQQSQADRPSMAEVVAMLTVTAPAARRSVRTAVPLPLPPPLLSRRRTRRLEHTATPSISRRRRSKSPRRLHLSFSRRRRRSTRRLHSSRFLILELDLSRRYWLVVHDYTSIAVAGSSSKSIYTSEFMYVAGILPKIHVHGNFYKRVVLLLYSRSGISSSFPV

SEQ ID NO: 359573 - protein, 100 aa, Zea mays
  Clone ID: MRT4577_91101C.1.pep
GPVRDCLKNLADSVGHLRDAAQEIGGAGMARAGTRAFRWHLSNVQTWCSAALTDENTCLDGLSSRAVDAATRAAVRGRVVEVAQVTSNALALVNKVGPGY

SEQ ID NO: 359574 - protein, 58 aa, Zea mays
  Clone ID: MRT4577_91102C.1.pep
TPAGRVCLLNGLLRINHNLPIIVARLKVGARRPGYTVTQPLRGICCRLLGNCYRQYTV

SEQ ID NO: 359575 - protein, 141 aa, Zea mays
  Clone ID: MRT4577_91103C.1.pep
KKRPGLGYIYRIKTYYGGPIKIGVPETQLGQPKWMGTPVHGPKNGPQTWGGGGQTGKPGFFFFYPPPPQFLWWGASWALFIFGQPPPQGGGEKIISRGAQRGEKQGGGGNLEPLPKMKPGGAFPDPRGGLKKRGAGFFWGP

SEQ ID NO: 359576 - protein, 71 aa, Zea mays
  Clone ID: MRT4577_91104C.1.pep
RNISLLETSQNLSFTILVYLLCSMFLSFILNLCFALLLSVRMIIRHSGNSNLFVLSVLFWNSNEPHILMAV

SEQ ID NO: 359577 - protein, 87 aa, Zea mays
  unsure (1)..(87): unsure at all Xaa locations
  Clone ID: MRT4577_91105C.1.pep
NNPSSVSSAAFXLTAYSRYLGGGLLRCPAGAPAAPSDLLALARSQADYILGRNPLRLSYMVGYGRRYPVRVHHRGASIVAPDAWADA

SEQ ID NO: 359578 - protein, 108 aa, Zea mays
  unsure (1)..(108): unsure at all Xaa locations
  Clone ID: MRT4577_91106C.1.pep
AAGPTGSFIQGRPRYENNTNFFIRTGSHRKSQLGLLPLIDPGVLHRCTQLVLHQVACRGSLLGTEASRAATSYDALGAEQNRCLPDSRQXEGILHSHQLSCIERLLAY

SEQ ID NO: 359579 - protein, 119 aa, Zea mays
  unsure (1)..(119): unsure at all Xaa locations
  Clone ID: MRT4577_91107C.1.pep
TPGSPTPSGPLYIMAPDPPSXCPVPPSHHDPPLXPPPPXWISPPPPISFLARPTVPSPSIPPPXRSWRFFTPXSPSSPPSAPFGPLPSFSFPLAFALRRAPPTLLKLPRLPFFHLPTPT

SEQ ID NO: 359580 - protein, 46 aa, Zea mays
  Clone ID: MRT4577_91108C.1.pep
MSPPDYGDNTSAAVTVRALPGRKTAAAVVALATTSTWLLIALTVSG

SEQ ID NO: 359581 - protein, 83 aa, Zea mays
  unsure (1)..(83): unsure at all Xaa locations
  Clone ID: MRT4577_91109C.1.pep
VDHRTEEKLLVLPCGPSAVGIMLLTILSGVYVIHCVWAAAEAYSVPSIVLTSRSXDWLHVFDDFREXYGWLRHNTDADDNVAS

SEQ ID NO: 359582 - protein, 32 aa, Zea mays
  Clone ID: MRT4577_9110C.1.pep
MYLNRDTSQVIVQCSHFLVSVYILSHIRMYIL

SEQ ID NO: 359583 - protein, 685 aa, Zea mays
  unsure (1)..(685): unsure at all Xaa locations
  Clone ID: MRT4577_91110C.1.pep
MATTTFPTSTPFFAAHHGPRRSRPSISAAVYARGRRWRPLRVACEKVVGIDLGTTNSAVAAMEGGKPTIVTNAEGARTTPSVVAYTKSGDRLVGQIAKRQAVVNPENTFFSVKRFIGRKMNEVDEESKQVSYLVIRDDNGNVKLDCPAIGKQFAAEEISAQVLRKLVDDASKFLNDKVTKAVITVPAYFNDSQRTATKDAGRIAGLEVLRIINEPTAASLAYGFEKKNNETILVFDLVGVTFQLSFLXESGFXEFRLLTXSGSRPMRGHTWRXRDVNWLLALLRRDEDNVFLKDKVEAWTLEFLIXAGEKLKNELSSLLATSYLLPQIIDIADGXIENCLSSDKFEELCSDLLDRLRTPVDNALRDAKLQFKDIDEVILVGGSTRIPAVQELVKKMTGKDPNVTVNPDEVVALGAAVQAGVLSGDVSDIVLLDVTPLSLGLETLGGVMTKIIPRNTTLPTSKSEVFSTAADGQTSVEINVLQGEREFVRDNKSIGSFRLDGIPPAPRGVPQIEVKFDIDANGILSVSAVDKGTGKKQDITITGASTLPKDEVERMVGEAEKFAKEDKEKRDAIDTKNQAESVIYQTEKQLKELGDKVPGDVKGKVESKLQELKDAVAGGSTQTMKDAMSALNQEVMQIGQALYSQQGAPGAGPGAADASSAGSAGTSEKPGDGGDVIDADFTDSK

SEQ ID NO: 359584 - protein, 145 aa, Zea mays
  unsure (1)..(145): unsure at all Xaa locations
  Clone ID: MRT4577_91111C.1.pep
TQPALGDASRASLASQDPNSARGLDAGSPPSKPXNTAXTTAPPASPQSSPSRPPAPPSPRPRPPPTRRRRTRSDTXPQRPVVTSSSVSPPXPGGSAPHPAXPGSDATHTSLGARRIPPXTPSAPAMPCPRSPSAVAAPIPSADAA

SEQ ID NO: 359585 - protein, 158 aa, Zea mays
  Clone ID: MRT4577_91112C.1.pep
PVDKGTGKKQDITITGASTLPKDEVERMVDEAEKFAKEDKEKRDAIDTKNQAESVIYQTEKQLKELGDKVPGDVKGKVESKLQELKDAVAGGSTQTMKDAISALNQEVMQIGQSLYSQQGAPGAGPGPADASAGSAAGTSEKPGDDGDVIDADFTDSK

SEQ ID NO: 359586 - protein, 111 aa, Zea mays
  Clone ID: MRT4577_91113C.1.pep
MASKVELVVEVKSPADKLWAALRDSTELFPKIFPENKVVSYSVVDGELADFYKNFKITLKVTPAKAEGEGGAVVSWAMEFDKANDQVPDPDVIKETATKTFHDLDDYLLKN

SEQ ID NO: 359587 - protein, 683 aa, Zea mays
  Clone ID: MRT4577_91114C.1.pep
MATTTFPTSTPFFAAHHGPRRSRPSISAAVYSRSRRWRPLRVACEKVVGIDLGTTNSAVAAMEGGKPTIVTNAEGARTTPSVVAYTKSGDRLVGQIAKRQAVVNPENTFFSVKRFIGRKMNEVDEESKQVSYRVIRDDNGNVKLDCPAIGKQFAAEEISAQVLRKLVDDASKFLNDKVTKAVITVPAYFNDSQRTATKDAGRIAGLEVLRIINEPTAASLAYGFEKKNNETILVFDLGGGTFDVSVLEVGDGVFEVLSTSGDTHLGGDDFDKRIVDWLAGNFKNDEGIDLLKDKQALQRLTEAAEKAKMELSSLTQTNMSLPFITATADGPKHIETTLTRAKFEELCSDLLDRLRTPVDNALRDAKLQFKDIDEVILVGGSTRIPAVQELVKKMTGKDPNVTVNPDEVVALGAAVQAGVLSGDVSDIVLLDVTPLSLGLETLGGVMTKIIPRNTTLPTSKSEVFSTAADGQTSVEINVLQGEREFVRDNKSIGSFRLDGIPPAPRGVPQIEVKFDIDANGILSVSAVDKGTGKKQDITITGASTLPKDEVERMVGEAEKFAKEDKEKRDAIDTKNQAESVIYQTEKQLKELGDKVPGDVKGKVESKLQELKDAVAGGSTQTMKDAMSALNQEVMQIGQALYSQQGAPGAGPGAADASSAGSAGTSEKPGDGGDVIDADFTDSK

SEQ ID NO: 359588 - protein, 139 aa, Zea mays
  Clone ID: MRT4577_91115C.1.pep
MASKVELVVEVKSPADKLWAALRDSTELFPKIFPEQYKSIETVEGDGKSAGTVRLLKYTEAVPMLTFAKEKLETADDDVLLRCALVLRVNKALLVHCASLRTIGHSCFVDCLNYLVKSVKHSAKFLASVTLNKKLSLNC

SEQ ID NO: 359589 - protein, 56 aa, Zea mays
  Clone ID: MRT4577_91116C.1.pep
ISDGSAGPCNEDAFMQEILKKVPPLSSRLKEGMTFAEFSRQTTKQYYGGNGIQQNN

SEQ ID NO: 359590 - protein, 70 aa, Zea mays
  Clone ID: MRT4577_91117C.1.pep
TNRMLASQRWIEWARRTWATERVTYFMFISILLLPFYSELTMIVRHWGCRDYYDPVLVLNAHGGDINGQS

SEQ ID NO: 359591 - protein, 179 aa, Zea mays
  Clone ID: MRT4577_91118C.1.pep
MESPPDQAAAAAARQDKEQRDYRLIAKAVDEAYRAVECDGGGYPFGAVVVHGGGDDEVVSSSHNSVRKDADPSAHAEVTAIRQACKKLGKTSLAGCEIYTSCEPCPMCLGLIRLAKIKKVVYGAKSEVAAAAGLNGVLPEVFREYYQKSGVEMRQAEGEAATRIAEEVFEKTKGKFRNK

SEQ ID NO: 359592 - protein, 154 aa, Zea mays
  Clone ID: MRT4577_91119C.1.pep
MASKVELVVEVKSPADKLWAALRDSTELFPKIFPEQYKSIETVEGDGKSAGTVRLLKYTEAVPMLTFAKEKLETADDENKVVSYSVVDGELADFYKNFKITLKVTPAKAEGEGGAVVSWAMEFDKANDQVPDPDVIKETATKTFHDLDDYLLKN

SEQ ID NO: 359593 - protein, 65 aa, Zea mays
  Clone ID: MRT4577_9111C.1.pep
GAQHRNSGATSSRAKKDVAAGTVALRLPCAIVVRVRIQCFVRRSIRSEQEPRARLAGRPVHGTMY

SEQ ID NO: 359594 - protein, 42 aa, Zea mays
  Clone ID: MRT4577_91120C.1.pep
VIQWLLKRVNDELAIVNPYPHSYFPRGCFSRYRRGRRLVTSG

SEQ ID NO: 359595 - protein, 41 aa, Zea mays
  Clone ID: MRT4577_91121C.1.pep
DLSMLGKQFRSIKVSLFILHKQYKLAFIYSNCHTQNPVNSV

SEQ ID NO: 359596 - protein, 217 aa, Zea mays
  unsure (1)..(217): unsure at all Xaa locations
  Clone ID: MRT4577_91122C.1.pep
MASITMRLSSTAFCVKAVNWPPSLFSEPRVTMHKTSTKGTTGANLRKTVKHPXRMIYLRPLSCAPQSYLTXEFPGXDYXWYTAXLLANPETITNNRELNVIHSRCIMLNAVGCMVPYLLNRNAVKDIHAVWFKAVTQIFMEVVVHYLENPNLIHAXIILAIXTAEDVLMLYIQRYRAASNPLGDVDYPLYPGXRFDPIGLFDYPEAFAELKVKELKN

SEQ ID NO: 359597 - protein, 80 aa, Zea mays
  Clone ID: MRT4577_91123C.1.pep
NEQTLEQKPVKTSKITLKRGLNVSDSLSNVISTYRTCYVHRAFNRPDTHRATRRALLTASLLFCPLFCLHFPTDPPTDDS

SEQ ID NO: 359598 - protein, 128 aa, Zea mays
  Clone ID: MRT4577_91124C.1.pep
KPRAIARTLHSVRAIGREGEVAGCTPGGISSTVRPLAGAMALLAGCVDPSGGRIGACEAIACRELFTGARSSRREAPHRGPTSARHLCRRTSDRGSKCSVGEVAEQELIEGEEQVVQGEPYNEEYELI

SEQ ID NO: 359599 - protein, 82 aa, Zea mays
  unsure (1)..(82): unsure at all Xaa locations
  Clone ID: MRT4577_91125C.1.pep
GPSRPRPRNHNQQKKRDTXRSGHRESARSTFGIGVGTLLFALAAPAMKRDERRMSKVFVRSYFCPMILKKCSPVCCWIVVGP

SEQ ID NO: 359600 - protein, 101 aa, Zea mays
  unsure (1)..(101): unsure at all Xaa locations
  Clone ID: MRT4577_91126C.1.pep
RVGRTTLGTNCKTRLDLIIARIKLLSNRRPPQLINMRNEMVQYLQTAQESIGRTRVGHIFGEPTTLAAYETAALXCESALARAPIVXRPKRMPXELGEAIA

SEQ ID NO: 359601 - protein, 37 aa, Zea mays
  Clone ID: MRT4577_91127C.1.pep
ICLPCLIYAIVASRLWVPVTSPGSSFPGSQLLRSFPD

SEQ ID NO: 359602 - protein, 50 aa, Zea mays
  Clone ID: MRT4577_91128C.1.pep
HKICTVGFSSRLLWTSLESLLNEEHHPFYLHFLNLYFLLLHLLLRPNPIF

SEQ ID NO: 359603 - protein, 95 aa, Zea mays
  Clone ID: MRT4577_91129C.1.pep
EQVVVGIQCSQSHVYSGSKGSAVLQVPRRGNSSMTILLLWQMASARVAPGHLNRVRAVGIRKCSPAHGVFEEENRRPKIVGVGHQSDVVLPDRPA

SEQ ID NO: 359604 - protein, 72 aa, Zea mays
  Clone ID: MRT4577_9112C.1.pep
RKHHTSRDRSLIPNSGEHIRDMNANACPNESRAYPAIPAAQEAPHRSKELGLTRLNMKVIPTGCKHEQDRCT

SEQ ID NO: 359605 - protein, 104 aa, Zea mays
  unsure (1)..(104): unsure at all Xaa locations
  Clone ID: MRT4577_91130C.1.pep
AHDGLYVGDDTATHSTRXXGQEDGTGTAGEITLERDTPKRSNTPWPACTDKTSDRSTETNGGVSWWLSCFLAWGAPYRSEDAFNPRLFLAKARGGTCTLAPCDP

SEQ ID NO: 359606 - protein, 550 aa, Zea mays
  unsure (1)..(550): unsure at all Xaa locations
  Clone ID: MRT4577_91131C.1.pep
VILEHFAIAVTIVVVAVPEGLPLAVTLSLAFAMKKMMSEKALVRQLSACETMGSATVICSDKTGTLTTNRMSVTKACICGNTMEVNNSSVLSSFSSKVPEFALQILMESIFNNTAGEVVINQDGKCQILGTPTEAALLDFALTIGGDFKEKRQETKIVKVEPFNSTKKRMGIILELPGGGYRAHCKGASEVVLAACDNFIDARGTIVALDKTATKKLSDVIETFSKEALRTLCLAYREMDDSFSVDEQIPLQGYTCIGIVGIKDPVRPGVRQSVATCRSAGIAVRMVTGDNINTAKATGRECGVFTVSXFTFSLQIFRDIXEIELFEFASKMQVLARSSPLDKHALVKYLRTTFNEVVAVTGDGTNDAPALREADIGLAMGISGTEVAKESADVVILDDNFSTIVTVAKWGRSVYVNIQKFVQFQLTVNVVALLVNFSSACFTGDAPLTAVQLLWVNMIMDTLGALALATEPPDDNLMKKSPVGRTGRFITNVMWRNIXGQSIFQFEVIWYLQTQGEYLFGLESSEANTVXNTIIFNTFVSCQVFNEISS

SEQ ID NO: 359607 - protein, 47 aa, Zea mays
  Clone ID: MRT4577_91132C.1.pep
GRVGDSDTVVIDNSYGITAPVGAWSLIPTIVGADTNVYGAKIYCDPT

SEQ ID NO: 359608 - protein, 279 aa, Zea mays
  Clone ID: MRT4577_91133C.1.pep
MAGVVVVFDFDKTIIDVDSDNWVVDGLGATELFDRLLPTMPWNTLIDTVMGELHAQGRTLRDVADVLRAAPIDPQVVAAIRAAYSLGCDLRVLSDANRFFIETVLDHHGLRGCFSEINTNPSHVDADGRLRIAPHHDFHAAPHGCGLGTCPPNMCKGQVLHRIRASAAAADGARKRFIYLGDGRGDYCPSLRLAREDFMMPRRGYPVWDLIREDPARVQAEVHPWADGADLEETLLRLVGRALVEEAALPPPLDCKLESTMPVAAQDGGMPIMPLGVKN

SEQ ID NO: 359609 - protein, 91 aa, Zea mays
  Clone ID: MRT4577_91135C.1.pep
PWIEKSEWCLVCLLFLLIGEVSADAQTEDGHVRGTQEAPDLKLEDAGRHDVSQSGRWSVNVVAWATLAMAAATGVGADAFSFLQIKAQWAG

SEQ ID NO: 359610 - protein, 57 aa, Zea mays
  Clone ID: MRT4577_91137C.1.pep
WGRGNLETQDGIHCKHDKARLNWNKALLAKGLDRMPPEPFVAEKNRKFTVRNHIPFF

SEQ ID NO: 359611 - protein, 71 aa, Zea mays
  Clone ID: MRT4577_91138C.1.pep
VCVWDVPLVHLRMVLGDLFHGRMHVRHGDVRVVWLWAGLKVQRLVVLHVGLYPSQVEGDHHHVIDLATQLQ

SEQ ID NO: 359612 - protein, 89 aa, Zea mays
  Clone ID: MRT4577_91139C.1.pep
RKTYTPIHQTLHALRLAPIANLTPPDDLPPAKTYLVKGTKTTFCPPKTRSSGPQGPPTVTQSPLNLTPTKLERLTQSPSPVGPPPHNTP

SEQ ID NO: 359613 - protein, 47 aa, Zea mays
  Clone ID: MRT4577_9113C.1.pep
MVCSGLFSSVKIFRCQLPQNNAFYSAQPPKHDGSDKPLCPGGSVVFC

SEQ ID NO: 359614 - protein, 112 aa, Zea mays
  Clone ID: MRT4577_91140C.1.pep
GVDHWSTHNHGNKPGEQTGGPTAGQGGGGGKLGKPTRSQKRAGTPPTDPTDLKRKPNPKRAPKPSWGAPQGCTRGEKPFYNLRIKTWIETAPWLPILNRPTVKRKGPKDLWG

SEQ ID NO: 359615 - protein, 98 aa, Zea mays
  Clone ID: MRT4577_91141C.1.pep
SNPCIYFCSYLLGPLDIPRFDNRRFNSHKEQIIKDVELKFAFPRQTIHLTRDWILRTVNNRWRAYKSKLKKQYFNRDERTLKEILREKPLTTNEHQWR

SEQ ID NO: 359616 - protein, 94 aa, Zea mays
  Clone ID: MRT4577_91142C.1.pep
NWLPRACPKKGASPVKTEDQPPPEGGELRFGPFSLFKKKNLLNFLTGMKTFQGWAPKKKGAARHFIKMEWLGFYPRKKRLTRPKKFFPFLLRRF

SEQ ID NO: 359617 - protein, 86 aa, Zea mays
  Clone ID: MRT4577_91143C.1.pep
RRVPFDEYLPRTPLSRVKPRPQATAAGQTPLLDDPPCSLIVLHIGNSEEADGVVDEPNPFEDDLQDAFEQEGDAGNFDGDLDDGEF

SEQ ID NO: 359618 - protein, 104 aa, Zea mays
  Clone ID: MRT4577_91144C.1.pep
MRSLRRVLIPLVLLAGLVFRVDDGGGAFLPPPPPALPAPPPRLALNGEAAPEDDGAAVSRSTEIVAAEARSTEFVAPARPKKQSLRWLLVRAEAGRHEPAGWVA

SEQ ID NO: 359619 - protein, 100 aa, Zea mays
  unsure (1)..(100): unsure at all Xaa locations
  Clone ID: MRT4577_91145C.1.pep
SHSSPTRTSAHRRTYDSHTTKIATHFCAKAPNRDARYLPAHDDIKLMDPNILDPSPLPVPEEVFPHREDEVPQTTARARAGAEPHLRTHGRTRXLIIRLT

SEQ ID NO: 359620 - protein, 171 aa, Zea mays
  unsure (1)..(171): unsure at all Xaa locations
  Clone ID: MRT4577_91146C.1.pep
PGGKILFXVSALASGGRCVQPTLVVLTRAGPLVKGELFGPVLYAVKFQTFKEATDINNSVAHXLSSSLFTKRPNIIFKWLGPYGPDCGVLNVNIPTLXAPVGGAFGGEKAAGGGLEAXSDSWRPXMWRATWREVLEVVGHLFTPWWPSRAGLGGAYGCYGLRERRFFWMAA

SEQ ID NO: 359621 - protein, 58 aa, Zea mays
  Clone ID: MRT4577_91147C.1.pep
AADTSLLYSLAELKRTNTCAFVTVRQQISSAQRDSSVQSQHGSSVHEGRSVHILFCSI

SEQ ID NO: 359622 - protein, 61 aa, Zea mays
  Clone ID: MRT4577_91148C.1.pep
ASATYSRIVARTSGAFLARCAQGAVDKRQEIVGDLEEQTADPPVEPMCLRTRDRMRARTSE

SEQ ID NO: 359623 - protein, 43 aa, Zea mays
  Clone ID: MRT4577_91149C.1.pep
SGMRFLLSPCQFYHVKMKDPDQKYYRNGTSVGEQHESMYVHSG

SEQ ID NO: 359624 - protein, 98 aa, Zea mays
  Clone ID: MRT4577_9114C.1.pep
QNGFCPGNPPPPIFRFPFGPRTLPFAWVKRQGAGAFFSNFFGHGAFFLPFKIFPNPLTQKKKICFLVTGLKNFSSPPKKTPLVFFLRKTPPKAWISFF

SEQ ID NO: 359625 - protein, 220 aa, Zea mays
  Clone ID: MRT4577_91150C.1.pep
MLALQLHDHHHPTPPRPRQSPQHPRHRRSYEMDRSCEDNAKIVEVDVGEPVRRGAAGKDRQLYAGGRSSPAPSLAATELLSPRAYSAHFDDLSVANTAQSSPRQAPEACCPGYMANTESSRAKARSQSAPRQRTDALERLPSRRKQGTPPRAAARMHLQRSSSLAGNYSSPWSSSAARLDVSAASLKDSECGSTSSVLTAATLYSRTRSLVGSEVRRGLY

SEQ ID NO: 359626 - protein, 37 aa, Zea mays
  Clone ID: MRT4577_91151C.1.pep
LSLKDSECGSTSFVLTAVTLYSRTRSLVGSHARGGLY

SEQ ID NO: 359627 - protein, 118 aa, Zea mays
  Clone ID: MRT4577_91152C.1.pep
VTSYVQVLPAGTILAQHNHRPKIRKYIFASNTIHGMEGQIHPWSEGSESVVPAQQHDDAALDDVESGPVLLEAPAQASSAPPAPHKLHLCFNTHPLSLSVSLWCGDRGSERSVEKECC

SEQ ID NO: 359628 - protein, 512 aa, Zea mays
  Clone ID: MRT4577_91153C.1.pep
MQSSVKLAVLALLLAAAAHHGLLPLPTARCYWLNPEIYDAGGLSRRAFPDGFVFGTAASAYQVEGMAKHGGRGPSIWDAFIEVPGTIPNNATADVTVDEYHRYKEDVNIMKNMGFDAYRFSISWSRIFPDGTGKVNQEGVDYYNRLIDYMLQQGIAPYANLYHYDLPLALHEQYLGWLSPKIVEAFADYAEFCFHAFGDRVKNWFTFNEPRCVAALGYDNGLHAPGRCSGCPAGGNSTTEPYLVAHHLILSHAAAVRRYRDKYQLHQKGKIGILLDFVWYEPFSDSNADQAAAQRARDFHLGWFLDPIVHGRYPYSMQEIAKDRLPLFSDEEARMVKGSIDYVGINHYTSFYMKDPGTWNLTPVSYQDDWHVGFVYERNGVPIGAHANSYWLYIVPWGINKAVSYVKETYKNPTMILAENGMDQPGDVSITQGVHDTVRIRYYRDYITELKKAIDDGARVIGYFAWSLLDNFEWRLGYTSRFGLVYVDYKTLKRYPKDSAFWFKHMLSKKRS

SEQ ID NO: 359629 - protein, 40 aa, Zea mays
  Clone ID: MRT4577_91154C.1.pep
FFGYIYIYVHRSLYLVVWLASLTSWLELSNEPSRARCLAY

SEQ ID NO: 359630 - protein, 96 aa, Zea mays
  Clone ID: MRT4577_91155C.1.pep
LAHTSILFHILKFHGPRLGGFSRTDPIYPLNELHPPKITRLLVDPISSWNSHTCHAAVKTPTPTTIAIIIQPPFQNQLQSFAFSPPRTLNTARNPT

SEQ ID NO: 359631 - protein, 200 aa, Zea mays
  unsure (1)..(200): unsure at all Xaa locations
  Clone ID: MRT4577_91156C.1.pep
GNEELGFDAYRFSISWSRIFPDGTGKVNQEGVDYYNRLIDYMLQQGIAPYANLYHYDLPLALHEQYLGWLSPKIVLTQLHAVPNRREAFADYAEFCFHAFGDRVKNWFTFNEPRCVAALGYDNGLHAPGRCSGCPAGGNSTTEPYLVAHHLILSHAAAVXRYRDKIAYQRGRXGILLDFVWYEPFSDSNADQAAAQRARD

SEQ ID NO: 359632 - protein, 523 aa, Zea mays
  unsure (1)..(523): unsure at all Xaa locations
  Clone ID: MRT4577_91157C.1.pep
MAFFFFFRFLVGMVALLEIVFSLIRGMKKQGTIPNNATADVTVDEYHRYKEDVNIMKNMGFDAYRFSISWSRIFPDGTGKVNQEGVDYYNRLIDYMLQQGIAPYANLYHYDLPLALHEQYLGWLSPKIVKVSRLMQISTIMTSHWHSMNSTWAGLAQRLCKNCKLDDIEKPNFKLIRPCVSQSDPAAHRAQSKGXAFADYAEFCFHAFGDRVKNWFTFNEPRCVAALGYDNGLHAPGRCSGCPAGGNSTTEPYLVAHHLILSHAAAVRRYRDKYQLHQKGKIGILLDFVWYEPFSDSNADQAAAQRARDFHLGWFLDPIVHGRYPYSMQEIAKDRLPLFSDEEARMVKGSIDYVGINHYTSFYMKDPGTWNLTPVSYQDDWHVGFVYERNGVPIGAHANSYWLYIVPWGINKAVSYVKETYKNPTMILAENGMDQPGDVSITQGVHDTVRIRYYRDYITELKKAIDDGARVIGYFAWSLLDNFEWRLGYTSRFGLVYVDYKTLKRYPKDSAFWFKHMLSKKRS

SEQ ID NO: 359633 - protein, 109 aa, Zea mays
  unsure (1)..(109): unsure at all Xaa locations
  Clone ID: MRT4577_91158C.1.pep
ADPLSXRKDDDRLDRPEIAAAGATPTLFKSGVMVXEPAKGTHRTLMDHIDEIXSXKKXKXGLTYQIFXWWKKVPRPXRFPKRVGEGXSAAMXARXAPLFGAGPPPLXVL

SEQ ID NO: 359634 - protein, 56 aa, Zea mays
  Clone ID: MRT4577_91159C.1.pep
PKIFLLGEASAHPPHSPVSIEVTSRGICCVYAVARNRTPHHTSPLTCTLFYHSTSC

SEQ ID NO: 359635 - protein, 70 aa, Zea mays
  Clone ID: MRT4577_9115C.1.pep
RPRVLIPQLVIADTEVPEPLKRPDELHLEIQHRVQRDGKPQFECVLRRTPPLLSVKIPGSGGNLQGDPRL

SEQ ID NO: 359636 - protein, 50 aa, Zea mays
  Clone ID: MRT4577_91160C.1.pep
RSHRRFPAYDPARSYSPPSFTGMADEVRPATDLFSRTNPIYLPSNGPLLL

SEQ ID NO: 359637 - protein, 102 aa, Zea mays
  Clone ID: MRT4577_91161C.1.pep
PGRPTRPRTRGRTRGRTRGGLGSVTLTVIVSMSEAEEEIGFMITGTEDQNTEASDLYRNGRDSERGGHRYRSGDMTNDRGRMRSRSRSPTRHGYGRSGSPNH

SEQ ID NO: 359638 - protein, 39 aa, Zea mays
  unsure (1)..(39): unsure at all Xaa locations
  Clone ID: MRT4577_91162C.1.pep
KKKKKIKKKKKKNKKKKKKKKKKKKKKKKKKNXQKERRY

SEQ ID NO: 359639 - protein, 98 aa, Zea mays
  Clone ID: MRT4577_91163C.1.pep
GGYPGPPFLGPLGGGRPPSVLSSTKVGGWASRPSRGALGLRTGWGEEFFPGERFGGKPAGPGFIRHFQVRPFGQDGVLSGGPGRAPREKFLSFSGKKN

SEQ ID NO: 359640 - protein, 113 aa, Zea mays
  Clone ID: MRT4577_91164C.1.pep
KRNNKGQKRDTRCKQGNKHQRKAEPPPAQQPSKKPKKTPPPKAPEGLNRGLKKQNPSPWGEGPNPRKPHGLGENRPVNLKAPFFTRTRKNPVGPPTPSLRHLFPKREPPNTKG

SEQ ID NO: 359641 - protein, 125 aa, Zea mays
  Clone ID: MRT4577_91165C.1.pep
GIISPCNSKNKFQLVQLDSAVGYVGTRFTLPVPKTNLTGCRNACMGNCSCIAVFFDQTSGNCFLFDQIGSLQQRDGGVLVYVGFCIYRRRSHHTPSQDGGGSSEDDGFLHTISGAPTRFTYRQLQ

SEQ ID NO: 359642 - protein, 199 aa, Zea mays
  Clone ID: MRT4577_91166C.1.pep
MGPAFSVPDAEDLPARRSDASDVAGNVWDLATLPTPPAGGGREIYIYRNTFNLVPRSIGGRARGLRSLKFFGNDVEVLPADSGDELDGLESLQVKVSAPRVSGAPLRRMQALKELELSMVPPRPCSCSILAEVARLKCLTKLTICHFSIRYLPPEIGSLKKLQELDLSFNKLKNFPNCIIELSALKFLKVTNNKFGGCT

SEQ ID NO: 359643 - protein, 93 aa, Zea mays
  Clone ID: MRT4577_91167C.1.pep
VLSRQSPSASVVRTSCGVLWKHWVCQIQRRTSLVSVSPSFSSFSCQVSQFVSASFCGSAQIHRSAPDGVALPVVGAWGSSTALSSERSDGQSR

SEQ ID NO: 359644 - protein, 113 aa, Zea mays
  Clone ID: MRT4577_91168C.1.pep
VDPDGDPLYYPISLFYTVQYRMLLVPCIGMTTRLVYISWAPTVSTGEGRVQGSLTDRAELGRPHIVELLVFPAQAKLIIGWETVLLQDDWTLYPEDPNSGRVGPAQKKRCIGW

SEQ ID NO: 359645 - protein, 80 aa, Zea mays
  unsure (1)..(80): unsure at all Xaa locations
  Clone ID: MRT4577_91169C.1.pep
DSAGGDTRASKRQTRGVHPHPAXXHPKHRHRHHRGHLQGRRLVYRRRRGESHLCWREIGASPAAGPHTNHSLLSLSSRPT

SEQ ID NO: 359646 - protein, 83 aa, Zea mays
  Clone ID: MRT4577_9116C.1.pep
EEEAPPPRAGTTGTSWTTYRLISRRHLFLAAACSLPFFASRGSGETSGLARTKRRRETGARANAERCEVTSHIMTLLPAPTGK

SEQ ID NO: 359647 - protein, 195 aa, Zea mays
  unsure (1)..(195): unsure at all Xaa locations
  Clone ID: MRT4577_91170C.1.pep
MEVELPNIHKATSSDHWSLTSSQYPSGKFPKVSVGIMIPKAGSIPRARGGDATPTPTFDRNLSQGTDGLSRPKGDNTSLRVSQEALNHDVSTEGAPKADPVTKVSVSQPDDNTCEQTGTFSFGTRREQGISVEKLETPEFLSSQRKQNTESADKAKPNSEMLRMKVGEILGGTSQNKQAAASPXPDDMKTPDQAK

SEQ ID NO: 359648 - protein, 43 aa, Zea mays
  Clone ID: MRT4577_91171C.1.pep
SPLSLNPLLQPYMNQQAIEAGILPLSPLFLQQPSALLQQLPLY

SEQ ID NO: 359649 - protein, 48 aa, Zea mays
  Clone ID: MRT4577_91172C.1.pep
KIQTLDIYHGPYMSLINVGPHVSKIVMVRPQSGDLLMVWIQISLKTKK

SEQ ID NO: 359650 - protein, 168 aa, Zea mays
  Clone ID: MRT4577_91173C.1.pep
MASLVPGVLVKLLQHMNTDVKVAGEHRSSLLQVVSIVPALAGSDLFTNKGFYLKVSDSSHATYVSLPEEQHDLILSDKIQLGQFIHVDRLEAATPVPILRGVRPVPGRHACVGTPEDLVVTSSSSFHGSKKAQPSNGTNDASILSLEKETQLEKIKLSRKLTTNKKPM

SEQ ID NO: 359651 - protein, 83 aa, Zea mays
  Clone ID: MRT4577_91174C.1.pep
QYGWVLSNLPVQIRTIILRYLYVVRSIHFSLSSIMSRIANGIDISWRVRFIFLKQRRSTTNRNIIIKDATTNKLLVYLLETWY

SEQ ID NO: 359652 - protein, 113 aa, Zea mays
  Clone ID: MRT4577_91175C.1.pep
ACVVVHVRQVFNVTCRPARRRVLGMVTLPYGSVDGRSLRHSHMVRRVGGVVGILHQTAYTTAARMGRHVCALMDARQARLQRAVLGGTRRHRARLGRGSHLGLLPGARPAPAS

SEQ ID NO: 359653 - protein, 116 aa, Zea mays
  Clone ID: MRT4577_91176C.1.pep
IRLESFLGLDEWFQHGTGPSPCELANGRHIWTLCGRDARFGKLFDNWMVADSALIMDVAHKECGDVCRGVGSLVDIAGGLGDATHTIASVFPDVACRALDLPHVVANAPTDTTVKY

SEQ ID NO: 359654 - protein, 73 aa, Zea mays
  Clone ID: MRT4577_91177C.1.pep
TPTATSTRCSKVLMVAVRMTVDYSFAKVSVSLSPAGIKISAVAFADQMNANAEIFRIAATMNVLMLFRFAGPF

SEQ ID NO: 359655 - protein, 151 aa, Zea mays
  Clone ID: MRT4577_91178C.1.pep
LRDYEHAPLLLLSHLERRRRGAIAEVLIAALRTGMSYLLSHFVMHMNLNGGDSIYTCTAFYLYAHHSIYDEDDMDIHVYKGSCTSTCCRTHSCTGSFIDSSPADIASASLPPMSTTTTRPMWNLYSVRRSVFLHGADPVRSLTMTVSPGFL

SEQ ID NO: 359656 - protein, 50 aa, Zea mays
  Clone ID: MRT4577_91179C.1.pep
DRPLTRGSASTHRADAASPLQVTRRERGRTGESQQRHPQGALKEPLTDLF

SEQ ID NO: 359657 - protein, 76 aa, Zea mays
  Clone ID: MRT4577_9117C.1.pep
MGGLPDPAASPSPPDTRTRDDRGSSRRAMVGGGAHGGTTYKGYTIPHNKRWHTVAGKGLCAVMWDRDIKLPTLGGR

SEQ ID NO: 359658 - protein, 108 aa, Zea mays
  unsure (1)..(108): unsure at all Xaa locations
  Clone ID: MRT4577_91180C.1.pep
ARSPESSPTSLRLSVGRRRRDSTLKVKASGNVFGNYFQVATYXESHGRGADSRYHEXPPRIPLTEADVQAELDRRRPYQSIITTPIKETDTCKIXYQGHIDGMTTGTP

SEQ ID NO: 359659 - protein, 65 aa, Zea mays
  Clone ID: MRT4577_91181C.1.pep
YPIPKHPLNYGITLLTLKPLSENRANKADPFKNPQTLDLNSKNPQPFLPTPLFLPFFTPKPTPPL

SEQ ID NO: 359660 - protein, 55 aa, Zea mays
  Clone ID: MRT4577_91182C.1.pep
SAEVQYNWKNKLKKTWSKVTFSSNVCVLNALPENCGDANLVPMNILSICYLFRGL

SEQ ID NO: 359661 - protein, 60 aa, Zea mays
  Clone ID: MRT4577_91183C.1.pep
LWYFFCPHQCSPLRSHFCPFPRSIMPSLCQWLPLPLTSYLTIAKTSQGLTIPHDPLSTFF

SEQ ID NO: 359662 - protein, 123 aa, Zea mays
  unsure (1)..(123): unsure at all Xaa locations
  Clone ID: MRT4577_91184C.1.pep
HQCKNFTAPTKFCLGRGLSRRRVYSVTKAQALSFSEQTKKKKKKKKMLCPVTFWPSRFHSTDGKPETIPNLTSFRSGDHTSGIWRSSPSLRRLSLRSPFSSASLTTLAMATCCCTLLXXSSSS

SEQ ID NO: 359663 - protein, 86 aa, Zea mays
  Clone ID: MRT4577_91185C.1.pep
GKIGMLCECLAKSDADILSCDHFCCNTQVTYNAMDTSSNQLLLYSLVSLNLKLRSKEINRFIEYLMYMFFMCQIHHQTFEYTHKNQ

SEQ ID NO: 359664 - protein, 50 aa, Zea mays
  Clone ID: MRT4577_91186C.1.pep
MDTTAASSLLKSSFAGSRLPSTTRTTTPPSVAEVPPGAGGGTIRAPIASP

SEQ ID NO: 359665 - protein, 126 aa, Zea mays
  Clone ID: MRT4577_91187C.1.pep
AGTSRPRIQRVLSAGRNYRRTSWRKWEWPLRRRKSTLVAVGTPDSGVELARLDQVPHQHRDLSREEEAYERRVFDRGRDRHHLGVMGAHRLLLGEVLSATPTIVEVGDWGCKRSCDEGARGRIPAG

SEQ ID NO: 359666 - protein, 202 aa, Zea mays
  unsure (1)..(202): unsure at all Xaa locations
  Clone ID: MRT4577_91188C.1.pep
ISSEALAGTRARGKTRADDFQIGQDLLLSSKEDIEFTIVRDSIKNKLEAXICDEVVVHPSKALRKLPRVQHLSAQLAARIRNEDDEFEILNTLHPSPAVCGLPTEEARQFIRDCEIFDRGMYAGPVGWFGGAECEFAVGIRSALLGKGHSTLVYAGAGIVEGTNPSFEWDELDLKASQFAKLLRYQERPIRYQEAENLGTVI

SEQ ID NO: 359667 - protein, 124 aa, Zea mays
  Clone ID: MRT4577_91189C.1.pep
IRNSEPSSPLLRVDNKSPISLIKNPVHPARSKHIYTRFLFIREYENSGQIKVKFISIEKQLGDILTNPLGKVKFQELCPKIGLSLVGLGRGGFCLHEKRVLPHVSPRQLGWHLPIMVMGGQAGC

SEQ ID NO: 359668 - protein, 252 aa, Zea mays
  unsure (1)..(252): unsure at all Xaa locations
  Clone ID: MRT4577_9118C.1.pep
ACRFRSGIPGSTHASVYSVSFGGDPGAEEGQARKSQLQRRFKEFLRQYRVGTDRTGFTFKYRDELKRHYNLGEYWIEVEMEDLASFDEELADHLHKQPAEHLQLLEEAAKEVADEVTRPRPAGDELLQDIQVMLKSDASPSSIRILKSDMMSHLVKIPGIIISASAVRAKATRISIQCRSCHNTLTNIAMRPGLEGYALPRKCNMDQAGRPKCPLDPYFIMPXQCKCVDFQTLKLQELPDAVPHGEMPRHMQ

SEQ ID NO: 359669 - protein, 127 aa, Zea mays
  Clone ID: MRT4577_91190C.1.pep
FPTPFGHQFGRPPLPSVPVPQNPTPPKKGGGGGGEKAKGKRFGGAPKKSDNTKNYEILGGPKSGPQNDLKKAYRKEVIKNHPEKGGDPKKFKELAQANEVLRDPKKREIYDQNGENALKKEMGGGGP

SEQ ID NO: 359670 - protein, 126 aa, Zea mays
  Clone ID: MRT4577_91191C.1.pep
SRPAGSRPKNRALSLLPFRAQIAADPSLSREPLRRRVLYTDLFAYLQLLLGDPWLSSPPPSPASCAVGIGLPVYSTFRAIEKKDEQEKERMLLYWAAYGSFSIAEVFADKLLSRYEHLTLFKCLTF

SEQ ID NO: 359671 - protein, 56 aa, Zea mays
  Clone ID: MRT4577_91192C.1.pep
SKHIDTRFPLIREYENSGQIKVKFLSIEEQLGDILTKPLGKVKFQELCPKIGLSLV

SEQ ID NO: 359672 - protein, 128 aa, Zea mays
  Clone ID: MRT4577_91193C.1.pep
MASSKAFFLVALNLVLFTVANACGGGCPTPTPPTPTPPSPSTGGKCPKHALKFAACANVLGLVSAEVGHPPAEPCCSILGGLADLEAAVCLCTAIKANVLGITVDIPVKLSLIINYCGKNLPSGFICA

SEQ ID NO: 359673 - protein, 107 aa, Zea mays
  unsure (1)..(107): unsure at all Xaa locations
  Clone ID: MRT4577_91194C.1.pep
MRAWLAGLALLALGESATFTHTSGGCGCQPPSPVHLPTAVHLPPXIHLPTPKHLPPPVHLASEVHLPPSVHMPPPDHMTTPPCHYRTKTSRPKTYNKSHSCTCQQTH

SEQ ID NO: 359674 - protein, 136 aa, Zea mays
  unsure (1)..(136): unsure at all Xaa locations
  Clone ID: MRT4577_91195C.1.pep
IRLVVWHLTRFLGAGLYSGAGILFMEQGAWELVRGRVPTVLGDRAQGARKFAQHKSLKNNYXSIAGPVCAQTYMTFIYLTGRVSAEEPAEPAVLLIEATNGQRQTQPGSPGGLSFGPLKLAPADGLLALDTEIVPL

SEQ ID NO: 359675 - protein, 34 aa, Zea mays
  Clone ID: MRT4577_91196C.1.pep
SAEHIEDPQREHHEHAHQLSYTNWFRQLPRPVNC

SEQ ID NO: 359676 - protein, 81 aa, Zea mays
  Clone ID: MRT4577_91197C.1.pep
RARPGRRDRPSSLTRGNEGAGWEPQPYPYPISPAGMLVPVCSVAPSLVPLWPVTASHVVARVARRVDVGAALKSYADSLVA

SEQ ID NO: 359677 - protein, 102 aa, Zea mays
  Clone ID: MRT4577_91198C.1.pep
MSTTEPLLSAGSNDGEAWKKQKQKSSGEGRRRVSIDEALSAHAGEFGRWQLRHFVLVSAAWALEALHTMVIIFADREPATSGARRPLRRRRRGPGRRRRGRR

SEQ ID NO: 359678 - protein, 123 aa, Zea mays
  Clone ID: MRT4577_91199C.1.pep
VQVAIKRLGQCSGQGVEEFRSEAVLIAKLQHRNLVRLLGCCIDGDEKLLVYEYLPNRSLDSIIFDAASKHLLDWPTRFKIIRGVCRGLLYLHQDSRLTIIHRDLKTSNILLDADMSPKISDFG

SEQ ID NO: 359679 - protein, 102 aa, Zea mays
  Clone ID: MRT4577_9119C.1.pep
MGGLPDPAASPSPPDTRTRDDRGSSRRAMVGGGAHGGTTYKGYTIPHNKRWHTVAGKGLCAVMWFWVFYRAKQDGATLLGLRHPWDGHDDHSHGHGHGNEAS

SEQ ID NO: 359680 - protein, 159 aa, Zea mays
  Clone ID: MRT4577_911C.1.pep
QGNPIFFLITFKFYGELKNNGGGQNFPYWGASQTWSHWAPPLQEPNGPPLYRGDPFLGGEIFGPAMGGFNSRGRPPNLAREKKGFANPPALDVKKGGLTGPPRIQERGLPGDRGLHGDPLGVKHVLPLFGLLPQPREGPPGSWGCSPDAGAGPFTRWDL

SEQ ID NO: 359681 - protein, 49 aa, Zea mays
  Clone ID: MRT4577_91200C.1.pep
NKKNTCIFQHQSIQVHTPFSFPKTMKLGIIAGELTCPGQNLWPGPMPCF

SEQ ID NO: 359682 - protein, 63 aa, Zea mays
  Clone ID: MRT4577_91201C.1.pep
SQSIQTRPKEVVKLGAQELVNYMKNMAAAREVSQKETDERSFWTWLRSLFGCEQNQGSGPVPV

SEQ ID NO: 359683 - protein, 187 aa, Zea mays
  Clone ID: MRT4577_91202C.1.pep
VRIKISDVCQKQDIYRLVKVIGTHKVPEKYSIGKKMTNVALEILNLNKKEIITMDTISNHDFTEEECKRLRQSMKCDLISRLKVGDILEKAKILQYVRVNDWFENEKQRLGHLRDRASETGRRKELREYVEKLQLLNDSEERTRRIIEILELHVDSHMDPNYESAEETDEKGTGIYLPVMLMLHVAC

SEQ ID NO: 359684 - protein, 98 aa, Zea mays
  Clone ID: MRT4577_91203C.1.pep
GGGDRGYGGGGDRVYGGGGDRGYGRGGGGGYGGGGGGGRGCFKCGEEGHMARDCSQGGGGGGYGGGGGGGYGGGGGGRECYNCHQEGHISRDCPEKMR

SEQ ID NO: 359685 - protein, 67 aa, Zea mays
  unsure (1)..(67): unsure at all Xaa locations
  Clone ID: MRT4577_91204C.1.pep
MSNALDCNVSDTHTNYMRESIRSDXGYELIIKDIGXLGLHYRKHITAYGDCNERLLTCRHETLDINT

SEQ ID NO: 359686 - protein, 32 aa, Zea mays
  Clone ID: MRT4577_91205C.1.pep
VGIYCVGPAHKFKSTLCVSVYQFRFKMKFGKK

SEQ ID NO: 359687 - protein, 102 aa, Zea mays
  unsure (1)..(102): unsure at all Xaa locations
  Clone ID: MRT4577_91206C.1.pep
GEISPPLRVERPICLAPVIDTAXMALGTELGGHXKVLMICDWGQLTRRVVSQYGQWSYDKRETIGAILRARELPLXTVFVGVGDEPWDMVHQFDDNIPVGEF

SEQ ID NO: 359688 - protein, 112 aa, Zea mays
  Clone ID: MRT4577_91207C.1.pep
KPGLWVKWGPGHTKIVHSLGQKWAIQLQGKHLSLIRAGKKFIYNTGFVYKGVGTIQPNTGHRGKIFYANPPKLVGPNPHLFWDQVEKEHFWDNITVGGGASWGGFAGKFQTP

SEQ ID NO: 359689 - protein, 52 aa, Zea mays
  Clone ID: MRT4577_91208C.1.pep
FFFCITSRIYNISITYIYKYVLYDYAGMTSKKNPSLKRTHLIGYYIKFNKKI

SEQ ID NO: 359690 - protein, 233 aa, Zea mays
  Clone ID: MRT4577_91209C.1.pep
MAMRSLARLHRQLSPSLLHRHSTRRGWPPASDAAFLWRGLASSSPSAAGREKSSRRTLGYLLGVAVAMVGASYAAVPLYRRFCQATGYGGTVQRRESVEEKISRHARDGTTTSREIIVQFNADVADGMPWKFIPTQREVRVKPGESALAFYTAENRSSAPITGVSTYNVAPMKAAIYFNKIQCFCFEEQTLLPGEQIDMPVFFYIDPEFETDPKMDGVNNIVLSYTFFKVNDS

SEQ ID NO: 359691 - protein, 329 aa, Zea mays
  unsure (1)..(329): unsure at all Xaa locations
  Clone ID: MRT4577_9120C.1.pep
MASSSEPSALPTLLVFRVRELRFLAALRERYRVLDFFTSGSPLAAFLAAAAGGADPPRALVTVGGDSVRVDAALLDAVPSLRFVHSTGAGLDHIDLGECARRGVGVASSGTVXSTDVADHAVGLLVDVLRRVSAADRFVRRGLWPLHGDYPLGTQLGGKRVGIIGLGNIGTLIAKRLAAFGCVICYSSRKPKESVSYRYFPSVHDLASESDVLVVACALTRETRHIVNKDVLAALGKDGVVVNIGRGPNIDEAELVAALKEGRIAGAGLDVFDKEPKVPAELFSMDNVVLTHHVAVFTTESRSDLRDVTIXNLEAFFAGRPLLNPVLHS

SEQ ID NO: 359692 - protein, 109 aa, Zea mays
  unsure (1)..(109): unsure at all Xaa locations
  Clone ID: MRT4577_91210C.1.pep
PALPSRGRKAAKKPSVNKPAEEEPATEKAEKAPTAXKPKAAKRLPAVMCDFLEGCLGIKGKXIANKSVETYKIYTFKXLKQVHPDIGSGSQAXSIINSLNNDIFMKLTA

SEQ ID NO: 359693 - protein, 40 aa, Zea mays
  Clone ID: MRT4577_91211C.1.pep
DDYIQILTEGYIYCLIRGAVLITCLLSQYFFHSRLYKELW

SEQ ID NO: 359694 - protein, 431 aa, Zea mays
  Clone ID: MRT4577_91212C.1.pep
MARQLQAGTYPKYNGSTDPAQYIMSYQVAVASSGGDDATMAKSFIIALEGPALTWYTRLPPLSIDSWKSLRDKFLLNFQGYRPDTDALAELSLYKQQEKETLREYYRKFLTLNQADIIFLHAFDRMGISHSLLKPSDNPLYGFDGKGTFPVGMIELPLSFSVAPNARSEQVTFDIVDMVYPYNAIMGRGSINKFKAAIHGLYLYMKILGPQGVITVYDNQQTARNIERDFVLGQRNVHCLTTQREVSKVTRPTTDEKVKAQLQSNDGTKTVPLDLATPKQTVVISEDLTSQDEEKLISCLFRNKDVFAWSTLDLVEVSRTVIEHSLGIDPSVHPKKQQLRKMSDEKTEAAKAKGHRLLEANFIEPIAYPTWLANVVMVQKKSDKWRMCIDFTSLNKACPKDNFPLPRIDKIVDNAAGCEVMSLLDCFSGYH

SEQ ID NO: 359695 - protein, 71 aa, Zea mays
  Clone ID: MRT4577_91213C.1.pep
IAVCLLLLLLQLLSIKKKKKKKKKKKKKKKKKKKKKKKKKKKKKKKKKKKGGAVLKNQSLLTRACNVKIFL

SEQ ID NO: 359696 - protein, 103 aa, Zea mays
  Clone ID: MRT4577_91214C.1.pep
SLRLAFAPFRDFFPPGGSSVCFFLAQSLHGACAPCTRIPLAWERQCLPRSVLCPCLPEWVPGGQPRAMVGNSGPIKKGIRVGLAFPRCLGDAAAFLKKNTPVI

SEQ ID NO: 359697 - protein, 72 aa, Zea mays
  Clone ID: MRT4577_91215C.1.pep
SPFTPSLAAGAPPCLLLPTTAPWGHVNRGAAAARTSWRWVVPPMFAAPVGLTSILGVVGVARRHVLIRCSAS

SEQ ID NO: 359698 - protein, 111 aa, Zea mays
  Clone ID: MRT4577_91216C.1.pep
KHFQVMGNGPFYIKWEPCFWRANELPPCHGEEGQEIFASDSGQVCQQYPSYPEYEPPANFLRNKRVMVKVILDRGQGGRPQLLGSVPHLNGVFSRRKFGAICPGLWETGVG

SEQ ID NO: 359699 - protein, 35 aa, Zea mays
  Clone ID: MRT4577_91217C.1.pep
DGCAIRKLVPLIHSQTGSTLRKHQALRQSILTMQP

SEQ ID NO: 359700 - protein, 80 aa, Zea mays
  Clone ID: MRT4577_91218C.1.pep
RPHRNPQTLGRSHRRDRRLCISSIYCYHVRQIAFLFKSWIGVETFHIIFRFVLTPMSSYHKIIPGNLSNICHTIRKNTPL

SEQ ID NO: 359701 - protein, 80 aa, Zea mays
  Clone ID: MRT4577_91219C.1.pep
GQPGAQKLQMITQLEGAAAPRNSLDKPALMQKQQQLLAAQGLTPMPIMRAQNIPPMGGLPQYQLPSSRPNPCGVSAPIPP

SEQ ID NO: 359702 - protein, 74 aa, Zea mays
  Clone ID: MRT4577_9121C.1.pep
MVGGGAHGGTTYKGYTIPHNKRWHTVAGKGLCAVMWFWVFYRAKQDGATLLGLRHPWDGHDDHSHGHGHGNERS

SEQ ID NO: 359703 - protein, 132 aa, Zea mays
  Clone ID: MRT4577_91220C.1.pep
HASASAALLVLALALVAVIVPQVAEAKRKRAVESGEAADANNIHDVFCSTLCEGKKGTDLVVRKESCALYQQSNLVAVRYDPVLGHVLRSDWHYCAGHEGLSGGVRQGLPGEGGRGYQGLQRLLRLGEEPAP

SEQ ID NO: 359704 - protein, 720 aa, Zea mays
  Clone ID: MRT4577_91221C.1.pep
MALTTRGGAGGGDPAKAPSASDPSLGFLTKRDTEVKLPRATRVKNKTPAPIQITAEQILREARERQEPEIRPPKQKITDPHELSDYRLRKRKEFEDVIRRVRWSVSAWVKYARWEEQQRDFARARSVYERALDVAHRDHTLWLKYAEFEMRNRFVNHARNVWDRAVSLLPRVDQLWYKYIHMEELLGAVANARQVFERWMSWRPDTAGWNSYIKFELRYGEVERARAIFERFVAEHPRPDTFIRYAKFEMKRGEVERARRVYERAADLLADDEDAEVLFVAFAEFEERCREVERARAIYKYALDRVPKGRAEELYRKFLAFEKQFGDREGIEDAIVGKRRFQYEDEVRKNPLNYDSWFDYIRLEESVGNKDRIREVYERAIANVPPAEEKRYWQRYIYLWINYALYEELDAQDRERTREVYKECLRLIPHKKFTFAKMWLMAAQFEIRQRNLKAARQILGNAIGMAPKGKIFKKYIEIELYLGNFDRCRTLYEKYIEWSPANCYAWRKYAELEKNLSETDRARSIYELAIAQPALDTPEVLWKEYLQFEIDENEFERTRQLYERLLDRTKHLKVWISYAEFEASAGLGGEDSEDKEKKNEVSYQEQQMERVQKCRAVFERAFDYFRTSAPELKEERAMLLEEWLNKEVNFGDLGDVSLVQKKAPRKVKRKRPIPTEDGSTIAYEEYIDYIFPDEVALAPNLKILEAAYKWKKQKTGDGDE

SEQ ID NO: 359705 - protein, 162 aa, Zea mays
  Clone ID: MRT4577_91222C.1.pep
EYRNVALASAIPGLQISKDNPVQSIELPGGGIYAPFLTSDQGNGQVNHFFALIDANPGQVDYVRFANGTYSFEDSAFGDRDFNDLRFAVNILPQGGFVPPAIGLTANAGVFTANGLVDLKNGGATARRFSPDLSTHSPNSTRHCPIRPVWCGLHQRFVRERH

SEQ ID NO: 359706 - protein, 60 aa, Zea mays
  Clone ID: MRT4577_91223C.1.pep
ELELQVNVRSYRKQNRQAEQSPWQNERRYIGWLEDEEFVTSCHTVVVMWKTCLSPSQLDR

SEQ ID NO: 359707 - protein, 74 aa, Zea mays
  unsure (1)..(74): unsure at all Xaa locations
  Clone ID: MRT4577_91224C.1.pep
NYEHPFSQPWFLLHIASTSIMLNFTLLTVKTLETNHIYWGALYHSXHLSTKITXLQSTHHLFLNPHLHPXLXHT

SEQ ID NO: 359708 - protein, 76 aa, Zea mays
  Clone ID: MRT4577_91225C.1.pep
IRHEARVPARNKKNCSVAAPAPPRRLHECDLSRAWLLRLDSGKEGLAIALLLQKVKTQGPGVGGPLLSRGQLPSAA

SEQ ID NO: 359709 - protein, 67 aa, Zea mays
  Clone ID: MRT4577_91226C.1.pep
LGGLGLFEPWEGRGEVVSGPPERHVPRGLVGRRGLPSRVTKVRAASSKEGVETGRVDPPGRVGGRVG

SEQ ID NO: 359710 - protein, 46 aa, Zea mays
  Clone ID: MRT4577_91227C.1.pep
HGRNVSLIQVISPGMHYRFTLVSLRAIDHKLRLAPRVRPRVLGRVG

SEQ ID NO: 359711 - protein, 55 aa, Zea mays
  Clone ID: MRT4577_91228C.1.pep
YKSFGISYFLLQKIGFKGKAKALKQPYKGVKQALFFEGVLIRAQRKDLPRKLKSC

SEQ ID NO: 359712 - protein, 54 aa, Zea mays
  Clone ID: MRT4577_91229C.1.pep
SDIILATNTHLHHAILRLLKILTSFNRFSLPSSTTCCTKRLNKMNRWLGANLLG

SEQ ID NO: 359713 - protein, 332 aa, Zea mays
  unsure (1)..(332): unsure at all Xaa locations
  Clone ID: MRT4577_9122C.1.pep
PTRPPTRPPTRPPTRPPTRPRTRGPVVCTFGVVXADVLGLFFRXGLLALIGTLPCLLLIPGLFFIPESPRWLARMNMMDECETSLQVLRGVDADITAEANDIKIAVASANKSGAMSFQELNQKKYRTPLILGMGLLVLQQLSGINGIIFYAGSIFKAAGLKNSNLDTCILGAIAVLATAVTTMILDRAGRRILLIISSFGMTLSLLVVAVVFYIKDNISHDSDLGNTLSMVSLVGVLAYVTAFSFGMGAIPWIIMAEILPVSIKSVAGSFATLANWLTSFGITMTANLLLTWSAAGTFAFYMMVSAFTLVFVILWVPETKGRTLEEIQWSFQ

SEQ ID NO: 359714 - protein, 128 aa, Zea mays
  unsure (1)..(128): unsure at all Xaa locations
  Clone ID: MRT4577_91230C.1.pep
GRDAARSSAQPTRSKPYFSGLVSSVPAGELHMFIAAPVPNHSSGTKILAREDGCYRELNEMRDAGSCKRMATLAELSSAAHAPTESIIGHTGTENLLVQGHRRDDPLTCGGQDRCNSARFWRXVFTGA

SEQ ID NO: 359715 - protein, 688 aa, Zea mays
  Clone ID: MRT4577_91231C.1.pep
MKALGAHAADLLRGPHLLRAAVFAFAVALAFFVGYHWPNASPRLVFFSSDASSSSPRPSSRSPSVVLSPNSNVSFDPSLIPIPSTPPASSTPNAWSPPSLPPPTSAPPPPLPPPPPPARLGIVGEDGAMQDDFDIGNVGANDTDLATDETAPQEPSDVGASGGPPRVRIERFPVCPESMREYIPCLDNEDDIKRLPSTERGERFERHCPAKDKGLSCLVPAPNGYKAPIPWPRSRDEVWFSNVPHTRLIDDKGGQNWITKVKDKFRFPGGGTQFIHGANQYLDQISQMVPNVAFGSHTRVVLDVGCGVASFGAYLLSRDVLTLSIAPKDVHENQIQFALERGVPAMAAAFATRRLLYPSQAFDIIHCSRCRINWTRDDGILLLEVNRLLRAGGYFAWAAQPVYKHEEAQQEAWKEMENLTARLCWEFVKKEGYIAMWRKPLNNSCYINRGPEGKPPLCDADDNPDDVWYVGLKACISRLPENGEAPTPVQWPARLMEPPKRLQGVEMDAYSSKNELFKAETKFWDDIIDGYIRIFKWRKFKVRNVMDMRAGFGGFAAALIRQKLDWWVMNVVPISEPNTLPVIFDRGLLGVAHDWCEPFDTYPRTYDLLHASGLFSKEQNRCNISSILLEMDRILRPGGKAYIRDRKEVIQEIKEITNAMGWRGTIRDTAEGAYASRKVLMCDKPMAR

SEQ ID NO: 359716 - protein, 234 aa, Zea mays
  Clone ID: MRT4577_91232C.1.pep
SQAFDMIHCSRCRINWTRDDGILLLEVNRLLRAGGYFAWAAQPVYKHEQAQQEAWKEMEDLTTRLCWELVKKEGYIAMWRKPLNNSCYMNRGPAVKPSLCDADDNPDVVWYVSLKACISRLPENGEAPPPVQWPARLMEPPKRLQGVEMDAYPSKNEIIKAETKFWEDIIDGYIHVFKWRKFKLRNVMDMRAGFGGFAAALISRKLAIEVSNCQAGVNFQELLELSRAAVETFD

SEQ ID NO: 359717 - protein, 140 aa, Zea mays
  Clone ID: MRT4577_91233C.1.pep
MASIVATLRCMAWPWLAFACLVALATPRASADQTSPAAEAEAYIVHMDKSAMPRAFSSHERWYESALAAAAPGADAYYVYDHAMHGFAARLRADELDALRRSRGFLTCYPDDPKVVRRDTTHTPEFLGVSAAGAGGGGGL

SEQ ID NO: 359718 - protein, 67 aa, Zea mays
  Clone ID: MRT4577_91234C.1.pep
KKKKKKKKKKKKKKKKKKKKKKGEKKKGGKKTKKYKYYHKKGGALLKVPTFLPRSANSFVFFLGPLI

SEQ ID NO: 359719 - protein, 122 aa, Zea mays
  unsure (1)..(122): unsure at all Xaa locations
  Clone ID: MRT4577_91235C.1.pep
PPFSVRLHCTTRXGRIISVFAAXXLCLRTPRLDRFQFRTWTRPRRRSRPRSLHARSYMVLFRSIDGILATYFLFLATNLNLTRCGLLFYWPPAIHNNNDNVAAGPGHRLDIAVTVHNKPPRR

SEQ ID NO: 359720 - protein, 73 aa, Zea mays
  Clone ID: MRT4577_91236C.1.pep
FCSGKTRSRMSYPCLYIGWQRFPQALLFHSVLSHCTHTPTLKRYLSYKVFGTPTPPTMFCEGQYTFDVNVYSF

SEQ ID NO: 359721 - protein, 149 aa, Zea mays
  unsure (1)..(149): unsure at all Xaa locations
  Clone ID: MRT4577_91237C.1.pep
MAHEAGDNGGELPPPAKKKSPAEEEAEKRRKKLTHGSLMKGIIRSGSGDATPAEGDQVILHCTTRTMDGIIVNSTRREHGGKGIPLRFVLGKSKMILGFAEGFPTMLKGEIAMFKMQPKIHYAEDDCPSAAPDGFPXDDEPSFEIEMVD

SEQ ID NO: 359722 - protein, 84 aa, Zea mays
  Clone ID: MRT4577_91238C.1.pep
AIATINLVTLFGTCFVLFYYFPPHIVFYYITLFGTCSVLFYYFPPHTLHFTISDPKFVPSQTITCFTRLQKKDIRISTITNEHH

SEQ ID NO: 359723 - protein, 79 aa, Zea mays
  unsure (1)..(79): unsure at all Xaa locations
  Clone ID: MRT4577_91239C.1.pep
MSHKSLDVVFLKFDCSMFNNLLDKEXGIKVVPTLKIFKGGKIVKEVTGAKMIELAQAIAPVQSAWQRYQLMHLASVDDE

SEQ ID NO: 359724 - protein, 110 aa, Zea mays
  Clone ID: MRT4577_9123C.1.pep
MTAGGTACNGAGEALKAEFAPEKVVAVSLEEKPVGEREGEDVGGPFLIVNGGDSDGHSEPGSDLGKAPDEDPAFEEDDVPTFNAAPDAAVAGDHGTAERQVGAHGAALCA

SEQ ID NO: 359725 - protein, 89 aa, Zea mays
  Clone ID: MRT4577_91240C.1.pep
LWAPSPGVRRTPKASPFPPNPHGSFVLGSPALNHGQAPGAFPPKLSPGRSPTAQTPGQSSPNGRQVSINPPGPHKKGGESSPPQRLVFG

SEQ ID NO: 359726 - protein, 86 aa, Zea mays
  Clone ID: MRT4577_91241C.1.pep
IRPPGCLSWPCLVGLWTGGYTVSHRRDFNASDSPNTVSDLVPTFAPGQEQVPQDEAHGGCRDEFVRGLGRRLPNNFGLLDRCHLIM

SEQ ID NO: 359727 - protein, 158 aa, Zea mays
  Clone ID: MRT4577_91242C.1.pep
QFEFKTINSRNQLSKLDEANEEEEEEEDDTEEVESDAGKFACPRPVNKWLANISKLSTSLKGVNLTNKTQRQLYAGPKFVDPVKSNSNDSGSQHCNWGSANDMLPSSVSFVKLADMKPETWCLFLEKFQELLPETFRSRKCSVKEQRAKQRLGTSCQF

SEQ ID NO: 359728 - protein, 64 aa, Zea mays
  Clone ID: MRT4577_91243C.1.pep
IHDLIPNPYSSYITVPKFQNRLETEWKQHQETDPSSKHALSCRHDHLRGTICPDSSFSKILAPG

SEQ ID NO: 359729 - protein, 104 aa, Zea mays
  Clone ID: MRT4577_91244C.1.pep
RRRRCRSWAYSSECRSKRDSPSLFRHARGIMYALKEKGIDMAIASRSPTPDIAKVFLDKLEFQSMFVAQVRILPQPAVIFVWVVVSLSAYKNSLMQHSSGKLFL

SEQ ID NO: 359730 - protein, 67 aa, Zea mays
  unsure (1)..(67): unsure at all Xaa locations
  Clone ID: MRT4577_91245C.1.pep
MAKIKIGINGFGRIGRLVARVSLXSDDVDLVVVNVPLISTDYMTYLYKYDTVHGQWKHHEVKVKDSK

SEQ ID NO: 359731 - protein, 52 aa, Zea mays
  Clone ID: MRT4577_91246C.1.pep
QAGRPQLGRWHCRQAHGERIEICSCPFSKPSRQRQVARACLEQYNYGQSCDM

SEQ ID NO: 359732 - protein, 140 aa, Zea mays
  Clone ID: MRT4577_91247C.1.pep
EVQLVEVLGERLCEVVGVGVTWRVDVLLVYVFWMAYVISGLLVLVEHARGVGKKKNFVGDGVVLHSTGLSALGKNDLSRSLCLMASHLVLGHGAGDVKQVAADNDPDGAGSGLAERREHHAGPPASSACSERSREGMVRR

SEQ ID NO: 359733 - protein, 69 aa, Zea mays
  Clone ID: MRT4577_91248C.1.pep
VQEIQVVLQVNLFIFLCQARQEELCESCINFPLLLHESRQPDKLASNARGPLNHKKKLLMQQSERATFK

SEQ ID NO: 359734 - protein, 116 aa, Zea mays
  unsure (1)..(116): unsure at all Xaa locations
  Clone ID: MRT4577_91249C.1.pep
FLILEHRMLAHIGNTVTMPYEGRIFRLLDWADIVNAPIDTGPVIVDSLQLKGLTIGRGLLMLAETSSAPNLAHXDNTASAVKIAEQHSDNGMGFISINPTSWAATPWSPVLIHATP

SEQ ID NO: 359735 - protein, 376 aa, Zea mays
  unsure (1)..(376): unsure at all Xaa locations
  Clone ID: MRT4577_9124C.1.pep
MMMMSGRAATAGRYPFTASQWQELEHQALIYKCLASGKPIPSYLMPPLRRILXLPTARRSASAPSSPTARGRGTXCFGMGFSRKPADEDPEPGRCRRTDGKKWRCSKEAYPDSKYCEKHMHRGKNRSRKPVEMSLATPAPASSATSAAAAATSSSQAPSYHSPAPAVPYHAPYGAAYHHTQTQVTMSPFHLLHLETTHPHPPPPPPPPYYYADQRDYAYGKEVGERAFFSDGAGERDRQQQAAGQWQFKQLGTMEATKQPCTTPLLVPAAGYGHGAASPYGVGQAKEDEEEEETRRQQQHCFVLGADLRLAERPSGAHDAAAQKPLRHFIDEWPHEKGSNKAGSWMGGLDGETTQLSMSIPMAAAADLPVTSRYRT

SEQ ID NO: 359736 - protein, 59 aa, Zea mays
  Clone ID: MRT4577_91250C.1.pep
LILGMVILRARLCASVTFIHCFCLCHHLTMKNEKSHNRLHINQDLQKVKLLYTQSSNFS

SEQ ID NO: 359737 - protein, 45 aa, Zea mays
  Clone ID: MRT4577_91251C.1.pep
VSGRAMVVHELVGRGGVGDGRDASAWCGSVAAGVVVAMVVKVKRQ

SEQ ID NO: 359738 - protein, 80 aa, Zea mays
  Clone ID: MRT4577_91252C.1.pep
NPGGVQTNPRKPRGGAGHLWLWGVHLKGIYLLERRFFFIIPPLWRVLLNFGGRIQYRARLFEAGRRSAPVGGRTLRGGGP

SEQ ID NO: 359739 - protein, 159 aa, Zea mays
  Clone ID: MRT4577_91253C.1.pep
MTEAAVTRYWCHGCVRVVEEAMGEEIKCPFCGGGFIEEMIGEEFDGLASQQSERDSSQWGASNNPFEQPRAEADSEDEDDDDDYDDDIGRAFESFIRRHGRPSALRRAFDSIQDDLKADRDSDFSILINAFTQTLALQRSVLDADEGRDDQVDLAMMMA

SEQ ID NO: 359740 - protein, 57 aa, Zea mays
  unsure (1)..(57): unsure at all Xaa locations
  Clone ID: MRT4577_91255C.1.pep
EALKWVTDQPAWQRSEGRDHVIPVHHPWSFKSVRRFVKKAIWLLPDMDSTXNWCGIH

SEQ ID NO: 359741 - protein, 62 aa, Zea mays
  Clone ID: MRT4577_91256C.1.pep
GAFHKGHAAPHHRIHSNIPHPVLHHPPITLPFSLQHLRHNSPTIYILVIFLTYVQHLHCSRL

SEQ ID NO: 359742 - protein, 77 aa, Zea mays
  Clone ID: MRT4577_91257C.1.pep
PFFCLLEAGGRLIKGGPPPGGGIQNFPGKRETWGCCWPRHKRPIGFFSFGSLWEKFLNGVEPNFDVSYAGMESFNFF

SEQ ID NO: 359743 - protein, 533 aa, Zea mays
  unsure (1)..(533): unsure at all Xaa locations
  Clone ID: MRT4577_91258C.1.pep
MLGLGPRAGGATAITSGGSPVSHCSPVTAMAGKQFPSPANSRSASASSRRLLAAVAASLILLTASYFLLLSPSSNRSAPAILANPSATTSFLASLDRFLSDPHPSASAAAPVELDAAIRVQEDARLYGDPTWPAPAAGLLRVYVYEMPSKFTYDLLRLFRDSYRDTDNLTSNGSPVHRLIEQHSIDYWLWADLIAPDSQRLLKSVIRVQQQEEADIFYVPFFTTISYFLLEKQECKALYRXGASLKEALKWVTDQPAWQRSEGRDHVIPVHHPWSFKSVRRSVKKAIWLLPDMDSTGNWYKPGQVYLEKDVILPYVPNVDLCDHKXCVLETXSKRSILLFFRGRLKRNAGGKIRSKLVEELKSAKDIVIEEGSTGAQGKAAAQDGMRKSLFCLSPAGDTPSSARLFDAIVSGCIPVIISDELELPFEGILDYREIALFVSASDAVQPGWLLKYLRGINAKRIREIQSNLVKYSRHFLYSSPAQPLGPEDLTWRMIAGKLVNIKLQIRRSQRLVKESRSICTCECRVGNTTRML

SEQ ID NO: 359744 - protein, 51 aa, Zea mays
  Clone ID: MRT4577_91259C.1.pep
NGCFYMSLCAYINQQHKVTLLNKYISLRLQGRACMLQIIRRSARQHAQSHP

SEQ ID NO: 359745 - protein, 159 aa, Zea mays
  Clone ID: MRT4577_9125C.1.pep
MNSSSATAMDQIGKYWGMWGARRSSSSSSSTIPISAWAAAYGGSSEPSWEEQAFARDAAEHLGGCVWPPRSYSCTFCQREFRSAQALGGHMNVHRRDRALLRLGGSSSPEDVHATTNDQPHPQQGDGDANTTTTTTYLPRIIKESKNKRFMPMPDHSVS

SEQ ID NO: 359746 - protein, 154 aa, Zea mays
  unsure (1)..(154): unsure at all Xaa locations
  Clone ID: MRT4577_91260C.1.pep
FSLGARVHAVLTAALEDHEHEVYRQEIPVDREDVDCVXGYDSTKLQELDEMNLLLREMEDESAALREMHAKVGKDMLDPNATTSENRDEMDSLSVFVGNVDYACTPEEVQPHFNSXGTSYRVTILTDKSVQPKGSAYVEFVEDEAAQEAIKLNE

SEQ ID NO: 359747 - protein, 77 aa, Zea mays
  Clone ID: MRT4577_91261C.1.pep
SVQIPPQFIQTARSGGGTHTPGGPSNPSSWPSRLAGSDQPRGRCVSTLIVSVRHRLDEKWNDHPSQLEQVLLSGKTW

SEQ ID NO: 359748 - protein, 62 aa, Zea mays
  Clone ID: MRT4577_91262C.1.pep
LPNLHLYTSSMTYHHQMLSRLISKAKMQAFSFNHGQVTKRPCIAHLLLYADISRTETGQCSF

SEQ ID NO: 359749 - protein, 136 aa, Zea mays
  Clone ID: MRT4577_91263C.1.pep
AHKLTDDWKCKMARGLLQVVIKFPQAASTQAPKSLRPRPPPPELGHERHQCNRQSQRRRQEIRSYGRPEEDCEDAHAAALLRRALTVEHCFGGLSEETHRKPPRDGPNPLPKPLHVGPRVTWDRHSSGSSSRSRYT

SEQ ID NO: 359750 - protein, 103 aa, Zea mays
  unsure (1)..(103): unsure at all Xaa locations
  Clone ID: MRT4577_91264C.1.pep
TRGRAGFNMLALSHRCPYYETHQFLXYEMMSXLNACCYFQQQLXPFSQLATWYSHAQQMVAFYQLXALNPADYLEEHLLLPFSQLAAAHRAFFLSQQQLLSFY

SEQ ID NO: 359751 - protein, 178 aa, Zea mays
  Clone ID: MRT4577_91265C.1.pep
MAAVWSRIGRGAQLSLSLSLSRTFYDGASAASTLRSAAALSRARGQHASSLHSLAGRSAGQLLQPPSRGIVTTPARLHPASSAAVVAELSDAEARESEAVAAPPRQMPSLGPTRPGEKPRVVVLGTGWAACRLLKDVDTRAYDVVCVSPQNHMEDPQLLLSKKELALPYPFLDLIQTH

SEQ ID NO: 359752 - protein, 69 aa, Zea mays
  Clone ID: MRT4577_91266C.1.pep
RWGRRPRRRSKPLLGHEDRPSRLPPPHLPQSNIQVPARRHSHLGPLFPGRHARRGPATRLRNIHLGHER

SEQ ID NO: 359753 - protein, 164 aa, Zea mays
  Clone ID: MRT4577_91267C.1.pep
HLVGDPSPPGPSALCLCVQRICTAEKECWRGECTNWSLERTCYDLLTKCAAHLQELNCRFNGQTRHRGQMSRIPPRKLRLRDPLNTHPMQPCPQPMDPSSRYVCSPPSVQLSCYRQVSNQASKLMMMLCMLDCVSLPSRHGNGPPDPRFAAANSSIRVRGWGNF

SEQ ID NO: 359754 - protein, 69 aa, Zea mays
  unsure (1)..(69): unsure at all Xaa locations
  Clone ID: MRT4577_91268C.1.pep
AAGGYAGQRRQAEGAADYDAGGGGYGGXGRSAVDGGYGSREGGGGYGSGGGGGGYGGSRGGSGGGNWRE

SEQ ID NO: 359755 - protein, 62 aa, Zea mays
  Clone ID: MRT4577_91269C.1.pep
MADPGGCLEVRLFYVRVSPHGGAAPPPRLALDLRPAGGEAAPVPLRLDRHDAASGEATYVST

SEQ ID NO: 359756 - protein, 245 aa, Zea mays
  Clone ID: MRT4577_9126C.1.pep
MNSSSATAMDQIGKYWGMWGARRSSSSSSSTIPISAWAAAYGGSSEPSWEEQAFARDAAEHLGGCVWPPRSYSCTFCQREFRSAQALGGHMNVHRRDRALLRLGGSSSPEDVHATTNDQPHPQQGALLYRAAASNPSTTTPSTTAAAGTTAAGPAAAITIAGAGDGDANTTTTTTYLSRIIKESKNKRFMPMPDHSVAGMREDQAAAIDDHRHNEDGDSWRSASAAEKRRRLDHPLATAAALLIF

SEQ ID NO: 359757 - protein, 82 aa, Zea mays
  Clone ID: MRT4577_91270C.1.pep
KKKKKKKKNLKKKKKKKKERKDCRSISIQTYISRPSNIHNIFNRETLNQIRLARHFTTHALAKTTGSIPELTLPFTTIPLSP

SEQ ID NO: 359758 - protein, 133 aa, Zea mays
  Clone ID: MRT4577_91271C.1.pep
TRCPVCIPYSHVLLFRFMKKLLALIVLPFQLGTLPGCWLSLPAGHRGPGAVDGPPEAGGAHAESPVGVRRTGSDWRGREGEPLTPPPSPRLPRRRLRADRESGRERKMERRRCEEDEETAAAVGVRVKKPHAY

SEQ ID NO: 359759 - protein, 40 aa, Zea mays
  Clone ID: MRT4577_91272C.1.pep
ILAIFGPKPKPTGPGSFKGLSWVSRQLKWLNRPLERRGWA

SEQ ID NO: 359760 - protein, 245 aa, Zea mays
  unsure (1)..(245): unsure at all Xaa locations
  Clone ID: MRT4577_91273C.1.pep
FGTRHKTAFQTHVGHYEFRVMAFGLTGAPGTFQRAMNHTLAPLLRKCVLVFFDDILIYSATLTDHVRHLQQVFELLDRAQWKVKMSKCSFAQNKVSYLGHVVSSQGVATDPTKVQAVADWPTPTCLKELRSFLGLAGYYRKFIRHFGVICKPLTVLLKKGSLFVWTSDHDLAFNTLKRALISAPVLSLPDFSTPFVVETDASDDGVGAVLMQNGHPLAFLSKALGPXSRGLSTYEKEYLAVILAV

SEQ ID NO: 359761 - protein, 78 aa, Zea mays
  unsure (1)..(78): unsure at all Xaa locations
  Clone ID: MRT4577_91274C.1.pep
MAKQARQGLAAHCDLAITLPSRPPPQTRPPNYLTSWGVGXTXXYCGDRCQXGPCRSGGGGSNGGGGANVASVXTGSFF

SEQ ID NO: 359762 - protein, 53 aa, Zea mays
  Clone ID: MRT4577_91275C.1.pep
VHYFSSSYVPIVPHEQQVRTQLEAVPGPGSRLCTPHFILREGRATFLNPCYQN

SEQ ID NO: 359763 - protein, 51 aa, Zea mays
  Clone ID: MRT4577_91276C.1.pep
EFCILVYSLFFPCASQVKITQFFWTVKLCMVLDPFCSTTESEEESIKAHFT

SEQ ID NO: 359764 - protein, 85 aa, Zea mays
  Clone ID: MRT4577_91277C.1.pep
QVTSAISQSSNNLSIIMGYLCAISTSEQNISASAWLAINIPPKLSPYLPPLFCKQLPTERCKIDRLARKINRMDCEEDYQAPRVR

SEQ ID NO: 359765 - protein, 115 aa, Zea mays
  unsure (1)..(115): unsure at all Xaa locations
  Clone ID: MRT4577_91278C.1.pep
WSKAGGPARTLLSPGTWGTEATTGRGGRXPWPASRAPSSPHPPPPSSSPPPSSYPAQRASSPRPAWAAPXPMXARTRASRPSSPARSRPPXPRCPSPSSCSSPSPPRSCQHHGGR

SEQ ID NO: 359766 - protein, 201 aa, Zea mays
  Clone ID: MRT4577_91279C.1.pep
HLRPHQVRSSLSLRFLHPFLLLCALRWRGHCFLWPSASLASAPCGYAFANVHLGACVSFCNSSIRTPPNTTVTSLCTALNSATAKVYTGIQRMMAAWGGVSDLARADAGDHGRASVDRPTVTPGTLERVRIPQSHGLHQRFCQQCSRFLDHLIISMVCWHWKNFCAGAVIKKVNFDRTISHKCISNFMVKCLLPNSLDKLG

SEQ ID NO: 359767 - protein, 150 aa, Zea mays
  Clone ID: MRT4577_9127C.1.pep
SRPPRHLLAPARLCVLHFTRLFLHQQSSTPSCPHARSPPWTPVQLPRPAILCPVILAPARRSCACRPHHPCMSALGLPPSRVAMYTIASPFSTGRNSSLFLSLPQEGWIRRHIARRDSWINLVLNRCPVGWFLPQAPMAGCPGARGSAQC

SEQ ID NO: 359768 - protein, 119 aa, Zea mays
  Clone ID: MRT4577_91280C.1.pep
LPSRSRHPRRLQYRGHTFSSSLHAWQVRHPTFLGKKKLKNPTPQYCLTYLRYIWMLLLIFATQACLQLRSAVLEKRGLYFLSPRRRFLLPRATAAAPHASPASVFPSSFLLLLPASVYR

SEQ ID NO: 359769 - protein, 122 aa, Zea mays
  Clone ID: MRT4577_91281C.1.pep
MRKTQAVHPIQTFWAGDGAGWALDSKAAMEELEGGKGVILADDWNPGDQTAQQPQLAAPTKDQLGRRCQKITSSRVKTLPKNLIRPLPVQDLEDEGFRRPALLIVGAPLRSGRRELKRRLSL

SEQ ID NO: 359770 - protein, 157 aa, Zea mays
  unsure (1)..(157): unsure at all Xaa locations
  Clone ID: MRT4577_91283C.1.pep
LLYPPALHQFXHXLPYHLTIPSTXSLSXLSPXLSXPXLXNPLLPSSLXPXXPIXPIITTTSXXXSSSPSSTSIXYNSXXXLTXSXXXSSLXLPYFTYSPHSSLSLLXSTTSSSTSSPVFSSSFAFSLLHHHLQLQPLQENLIKIHHIDHLTYILSYT

SEQ ID NO: 359771 - protein, 141 aa, Zea mays
  Clone ID: MRT4577_91284C.1.pep
PPPIFCFPPPNPTRLCFPPFVENPRGVAAKGEDAPGCDKFPKYYRSLGPGEWVYPWNQPRENGPFPGPLLSPQAKEVCPPGVGPASPPWERAPSSLFWGPPPKKKPLFGLKKPLLLSPPAMLGPPENPGPPLPIFFNPSRK

SEQ ID NO: 359772 - protein, 95 aa, Zea mays
  unsure (1)..(95): unsure at all Xaa locations
  Clone ID: MRT4577_91285C.1.pep
MADGEDIHPLVWDNGTGMDKAGFAGDDAPRALFPRIGGRPRHTAVMVGKGQNDTYVRDQAXSKRGVSTLKNPSEHRLSNNWDDMEKARPHTFYNE

SEQ ID NO: 359773 - protein, 81 aa, Zea mays
  Clone ID: MRT4577_91286C.1.pep
MAAAPSSLASSHLSPIAAVSTPAVPHQLRIGCSRRRAGRIVAMAGSGKFFVGGNWKCVSACSASPALRALGSRTDDPGDAM

SEQ ID NO: 359774 - protein, 51 aa, Zea mays
  Clone ID: MRT4577_91287C.1.pep
WHNAILYGPSRNEFMISNYFIKSNYYFLYKLLVEVSPCRQCMSQVMIICNH

SEQ ID NO: 359775 - protein, 110 aa, Zea mays
  unsure (1)..(110): unsure at all Xaa locations
  Clone ID: MRT4577_91288C.1.pep
VDWCPGGFKFGFNYQPPSVVPGGWLAKVQRYVCMISYSPSVVXCYTASPFSIDLXMLAKRXAFVHWYVGEGMEEGEFFEARENLAALHRDYEXVGSQFHQGEQGDDADEY

SEQ ID NO: 359776 - protein, 72 aa, Zea mays
  Clone ID: MRT4577_91289C.1.pep
RKTRGKPPFFLTPPLFFFPLGPEKTRLWRPVSPRFSSYVYAATAVHTLDANSLSLTGSGGVAFLDAGGPWGG

SEQ ID NO: 359777 - protein, 87 aa, Zea mays
  unsure (1)..(87): unsure at all Xaa locations
  Clone ID: MRT4577_9128C.1.pep
LAPEDRGLSGSMFHGHKKSIPRRALILVFIFTQAHFLTTHYTFPGGGGGHXRPXGPPXPRGAEETRRPPSSLFWPGAPSFRAPGVAT

SEQ ID NO: 359778 - protein, 56 aa, Zea mays
  Clone ID: MRT4577_91290C.1.pep
RPHTSLPTRPKKKKIHKINTSHHSPTIKTHVRLHESFLLFYVLGWVPLSTSVFTTS

SEQ ID NO: 359779 - protein, 102 aa, Zea mays
  Clone ID: MRT4577_91291C.1.pep
GPKIKPKPGIRKKIRVVIMFFFQKTFFKKKGGPGELKIHQLGISPKRVSPRVPKPMRGGRAFLVNPSKFKLQPWKFAVKRNLMVSATKPLCRKGGRAFLLPH

SEQ ID NO: 359780 - protein, 119 aa, Zea mays
  Clone ID: MRT4577_91292C.1.pep
ASKLLIISRVSNEKVLPWMISSSGAVRCFDTISLSQKLSLHRLAVRPIQLHLLAWEKPSAPNPAERAVRSPKLTMPSTLLPHLQQNLVETIEGGVDAEEEYVGNLSFRIDDISFESSWV

SEQ ID NO: 359781 - protein, 80 aa, Zea mays
  Clone ID: MRT4577_91293C.1.pep
GWVGSFKEFFFAFGGGCLIYPLSFLQWGMIIFYIHRGCLHHFDSDLYWVISEGESGGVSTFMRVWCQIKLGLLVWSKITF

SEQ ID NO: 359782 - protein, 101 aa, Zea mays
  Clone ID: MRT4577_91294C.1.pep
MPPLCLLILSAEQASSGYIVKGGKADLGRSWLTSREVLEGLVYLHEQGVIHRDIKGANILSTKEGLGKLADFGVATKLTEADINTHSVVGTPYWMAPEVGY

SEQ ID NO: 359783 - protein, 111 aa, Zea mays
  Clone ID: MRT4577_91295C.1.pep
NSLENNSSTMRPPIKGRKIGSKLPPHHKKKIGGPFNPPTKWVGPPPPPQGGGFEAKKKELESLFTPLFPKMYQGPGKNKGGPGGKDKNPPPGKGGPGPKKKEGDKTGCCPS

SEQ ID NO: 359784 - protein, 171 aa, Zea mays
  Clone ID: MRT4577_91296C.1.pep
MASRQHNAQFHKSKTLDNKYMLGDEIGKGAYGRVYKGLDLENGDFVAIKQVSLENIPQEDLNIIMQEIDLLKNLNHKNIVKYLGSLKTKSHLHIILEYVENGSLANIIKPNKFGPIPESLVALYIAQVLEGLVYLHEQGVIHRDIKGANILSTKEVNGCILFPSFFLCFNH

SEQ ID NO: 359785 - protein, 80 aa, Zea mays
  Clone ID: MRT4577_91297C.1.pep
MPPLCLLILSAEQASSGYIVKGGKADLGRSWLTSREVLEGLVYLHEQGVIHRDIKGANILSTKEVNVCILFPSFFLFFNH

SEQ ID NO: 359786 - protein, 187 aa, Zea mays
  unsure (1)..(187): unsure at all Xaa locations
  Clone ID: MRT4577_91298C.1.pep
WVPRGRPGIISKLLEVYRGFEGVDVLVDVGGGTGSTLRMVTAKYKHLRGVNYDLPHVIAQAPPVQGVEHVGGSMFEYIPSGNAILLKWILHLWRDEECIKILKNCHRALPANGKVIVVECVLPASPEPTQVAQGALLLDVVMLNRLRGAKEXRTEREFAELAAEAGFSGGCRATYVFTGAWALEFTK

SEQ ID NO: 359787 - protein, 33 aa, Zea mays
  Clone ID: MRT4577_91299C.1.pep
FFFFFFFFGYMHVGYCGNQSRYVFPRAMLLTVS

SEQ ID NO: 359788 - protein, 51 aa, Zea mays
  Clone ID: MRT4577_9129C.1.pep
SWRFLKKKFWECYFPPGWWGGPPLILKIRRGCTFFFFSWKFRKSLLKPQSI

SEQ ID NO: 359789 - protein, 81 aa, Zea mays
  unsure (1)..(81): unsure at all Xaa locations
  Clone ID: MRT4577_912C.1.pep
VTLPQPRRVASYDPQLSLLAAIAMNYPTVSAEYSEAVEMARRXLRALIVEKSCASLMLRLVSXSAGTFDVSSRTGDPLGTM

SEQ ID NO: 359790 - protein, 368 aa, Zea mays
  Clone ID: MRT4577_91300C.1.pep
MASRQHNAQFHKSKTLDNKYMLGDEIGKGAYGRVYKGLDLENGDFVAIKQVSLENIPQEDLNIIMQEIDLLKNLNHKNIVKYLGSLKTKSHLHIILEYVENGSLANIIKPNKFGPIPESLVALYIAQVLEGLVYLHEQGVIHRDIKGANILSTKEGLVKLADFGVATKLTEADINTHSVVGTPYWMAPEVIEMSGVCAASDIWSVGCTVIELLTCAPPYYDLQPMPALFRIVQDVHPPIPEGLSPEVTDFLQQCFQKDAMQRPDAKALLMHTWLQNLRRALPGSLRQPTPLRNIDGDDEGSRGDNSLGFCDTPGDIQTTITSNVDQENGSKEPIMDSTVQSNSEELHDGNLKLTEGSSSNSVALMKDN

SEQ ID NO: 359791 - protein, 88 aa, Zea mays
  Clone ID: MRT4577_91301C.1.pep
MKILKNCHRALPANGKVIVVECVLPASPEPTQVAQGALLLDVVMLNRLRGAKERTEREFAELAAEAGFSGGCRATYVFTGAWALEFTK

SEQ ID NO: 359792 - protein, 158 aa, Zea mays
  Clone ID: MRT4577_91302C.1.pep
SVDWIYSSRAKKEKRFPVEAADSHKKDDVFESLAPKAKPGYRSNIGAASLPCWCLVGHATLDLPLVSKMTADAMASCSPPAWVQPWHGVGTTPALLPVHVASTTEPVELCPLLRDEPRDDDVVCASGTIDGGVESAIRLDGKKRYLRWIPVAHGAPAG

SEQ ID NO: 359793 - protein, 66 aa, Zea mays
  unsure (1)..(66): unsure at all Xaa locations
  Clone ID: MRT4577_91303C.1.pep
PPFPIPXLPITQGKDFLPXXXXXFLPIXXLYTNXFXPFPLSVIXTFXHLISFILGRIKSIHQFPAR

SEQ ID NO: 359794 - protein, 199 aa, Zea mays
  unsure (1)..(199): unsure at all Xaa locations
  Clone ID: MRT4577_91304C.1.pep
PRPRPRGQFSKQCAAVEALKHFIPTYLVSSGEKXASDIISKYVALLDDPXVAARRGAALALGILPFKFLMLKWMPVMSKLCSSCTIEDKPDDPDAEARVNSVRGLISVCETLTASFDQLSNGDSLYAYIKDYVMRALFRALDDYAVDNRGDVGSWVREAAMDALVRCMFILCKRDIVALRAVSATGHDSELGDMEVNAS

SEQ ID NO: 359795 - protein, 70 aa, Zea mays
  Clone ID: MRT4577_91305C.1.pep
ADPRERSNPITHFHFLLLHSQLNLVCPLSNPTVLLPLYPLSPSFSLLFALILLFLFIHHIDQFLYYYLLL

SEQ ID NO: 359796 - protein, 68 aa, Zea mays
  unsure (1)..(68): unsure at all Xaa locations
  Clone ID: MRT4577_91306C.1.pep
SVSVKGSKRVKWTYIXRSCGRVCQPGQDLTSELLTFRVMTSVPPTSSSWHVLPAHCRFGVTYQASGNF

SEQ ID NO: 359797 - protein, 105 aa, Zea mays
  unsure (1)..(105): unsure at all Xaa locations
  Clone ID: MRT4577_91307C.1.pep
GARAREPRGVILQDTSWSPGLTDXARXDRTDHSTGTIMPLTTPTGGYRVHSYLDPAXPNHRPTKTLLLHLTTHRRLHMMPKLLKEDERPLLTNGEQACQGRQGQL

SEQ ID NO: 359798 - protein, 203 aa, Zea mays
  unsure (1)..(203): unsure at all Xaa locations
  Clone ID: MRT4577_91308C.1.pep
KPAAKTYYMSGGLQPVPIVFRGPNGASAGVAAQHSQCFAAWYGHCPGLKVVSPWNSEDAKGLIKSAIRDNNPVVVLENELMYGFXFEFPPEAQSKDFLIPIGKAKIERQGTHITVVSHSRPVGHCLEAAAVLSKEGVECEVINMRTIRPMDMETIEASVMKTNHLVTVEGGWPQFGVGAEICARIMEGPAFNXLDAPAVRVTG

SEQ ID NO: 359799 - protein, 59 aa, Zea mays
  Clone ID: MRT4577_91309C.1.pep
RILVCMHKVKKPPTPHFEQAHKLLFQLKKAPMVQANNTKVFYLSTKLKTASKFFRPKAE

SEQ ID NO: 359800 - protein, 59 aa, Zea mays
  Clone ID: MRT4577_9130C.1.pep
NHPTSKYSWTDRPAQYAAANTDSAAHSYNPYLTTTNSYPSPLSHPLDETSAASNRRDHI

SEQ ID NO: 359801 - protein, 58 aa, Zea mays
  Clone ID: MRT4577_91310C.1.pep
RRRYSGTEVSPAKQQQGAPVVKTRQEAQCPCFRPRMEYVRCYVCVREAGYLSRASGVV

SEQ ID NO: 359802 - protein, 184 aa, Zea mays
  Clone ID: MRT4577_91311C.1.pep
MSNKAAYIVEAKANPLEVRDAPLPSAGKGEVVVKNHAAAVNPVDWKIQDYGAFLKTYPMVLGTDVAGEVHEVGEGVTHVKKGDRVLGHAFSLVSQNPQNGGFQLYTSLNALVVSKIPDSLSYNAAAVLPLAISTAAACLFKKEALALPLPKTSDANPPASGKSVLVWGGSSSVGATAIQLAGGA

SEQ ID NO: 359803 - protein, 88 aa, Zea mays
  Clone ID: MRT4577_91312C.1.pep
GAQGKKVQSTNGLEVWGGPLNNHKKAVVFWNRQGFQATLPAQWSSIGVAFSPAVPACDLWGPLSFLGQGQLSALVPPPDCKMYVFPPN

SEQ ID NO: 359804 - protein, 89 aa, Zea mays
  Clone ID: MRT4577_91313C.1.pep
KKAKKEEKKKKKKKKKKKKKKKKNFLSVTTLGGNFGGFLQKGGFSAFFGGGQLAPMGGPIKINWGAFYNPGTKKTWFNQIKTPGSKSPF

SEQ ID NO: 359805 - protein, 147 aa, Zea mays
  unsure (1)..(147): unsure at all Xaa locations
  Clone ID: MRT4577_91314C.1.pep
RTRGYKNKDPDHVEWAKALKELYIPNLRDYVKRYYPLGPVWQPPGSAANKAPSAPSVPPPCLSISSASSSQPKSGMSAVFAEISSGKPVTQGLRKVTDDMKSKNRTDRTXVVAAEGKETRNSPPFISTKGPAKLELQMGRKWVVEHH

SEQ ID NO: 359806 - protein, 72 aa, Zea mays
  Clone ID: MRT4577_91315C.1.pep
GPHYSSFIFYTKALDKKNNSPYYIGDGKFNSFLLKQTKPAGGIINATGKDPGGKNRVNPSPKYITLHNNYCF

SEQ ID NO: 359807 - protein, 75 aa, Zea mays
  Clone ID: MRT4577_91316C.1.pep
AFSSMENGDGPVAAIISSARLFSNGHQPHSTWRSTDQGHLIRWEVLSPLVPATYMVPWCHLDSAESIIVPCRIVV

SEQ ID NO: 359808 - protein, 41 aa, Zea mays
  Clone ID: MRT4577_91317C.1.pep
ILLACIINTQILMLLSALIIVHILLNLPSSLLKIYPCDEIP

SEQ ID NO: 359809 - protein, 104 aa, Zea mays
  unsure (1)..(104): unsure at all Xaa locations
  Clone ID: MRT4577_91318C.1.pep
SRRALLARFASATNAFIIPHCXLAPSSIITQILPPVTALSFXHPAVQAYTLQQAIVLSVIQQPISEMQQQFLAHVTIQTIATQQQRQFXLPSLSHLTMVNPAGY

SEQ ID NO: 359810 - protein, 229 aa, Zea mays
  Clone ID: MRT4577_91319C.1.pep
MVTMLAASSLVNSNLACSSRISSCSDFTYSHSWRPIHAMKLHQMRAVSSIRISCAATKPAKTPAEEEWKVKRQLLSEKRVRSVDVKEALRLQKENNFVILDVRPEAEFKEAHPPGAINVQIYRLIKEWTAWDIARRAAFAFFGIFAGTEENPEFIQSVDTKVGKDAKIIVACSTGGTLKPTQNFPDGKQSRSLIAAYLLVLNGYSNVYHLEGGLYTWFKEGLPAVAGEE

SEQ ID NO: 359811 - protein, 50 aa, Zea mays
  Clone ID: MRT4577_9131C.1.pep
IFVPDERSEKCINFFGGFIIQTFDFVTELILNALCFSQFLGGRLFPSQKI

SEQ ID NO: 359812 - protein, 249 aa, Zea mays
  unsure (1)..(249): unsure at all Xaa locations
  Clone ID: MRT4577_91320C.1.pep
WVPCGSSGYQCTECGGSSSVTPPPTTTFLPSESSSNARDLCGSRFCVDVHSADNRFDPCAAAGCAIPAFTGGLCPRPCPPFSYTYGGGALVLGSLSRDSVXAREQRRRRPSPRXFPGLCFGCVGSSVREPIGIAGFGRGALSLPSQLGFLGKGFSHCFLGFRFARNPNFTSPLVMGDLALASSATDGFVFTPMLTSATYPNFYYVGXEGVDLGGGGVDAQGNGGVLVDTGTTYTHLPDPFYASVLSSVG

SEQ ID NO: 359813 - protein, 295 aa, Zea mays
  Clone ID: MRT4577_91321C.1.pep
MWNGCTDSMETGKLPRVLQGQELMSFRTCHVPCAPQTAEAAKLQSSDASRFLSNAHGCALGGPTSRLAVHSSGFTYQCVGFNESIGFSEVLQGQEISRAVPKFQGMMSEACSLKDRYGLHSYMRAPVAVNGLSATTHECSLALSTPPGAGVPSLYPGNVVNRTVVPQLGLARKFGGGGTNGQQSGPFDRPRELWTRPQHETPDQMNLDQFETRRPSVPVDAAKLGSGGGEVRKTSCRLFGFSLTEKILPADDDDVKEVSYETECQNPRMLDLFGYNCSTPSAALPALCAAAPFGM

SEQ ID NO: 359814 - protein, 139 aa, Zea mays
  unsure (1)..(139): unsure at all Xaa locations
  Clone ID: MRT4577_91322C.1.pep
SHYQIYYDVCSPPSAAKNSSASIREWRADKFSYDTXQGSTETLYLRNDMAEPYALNEHHATMPKGAEHYRHSEHQDLYTACRHXSHMARQGGTYQARXGKDRPSAPTRSLFAGSQRKGTPCTGYTPGYCDHWTPLSQWY

SEQ ID NO: 359815 - protein, 96 aa, Zea mays
  unsure (1)..(96): unsure at all Xaa locations
  Clone ID: MRT4577_91323C.1.pep
PFITSASYTYHQYSLAPNAYMPTPSYYTTLPLTTPTFSPFSQLSPLYSSPYAASTAXCVAGPKGLNHLDPSHIHQIQTQLMFQHQQQKGLHAAFLG

SEQ ID NO: 359816 - protein, 65 aa, Zea mays
  Clone ID: MRT4577_91324C.1.pep
IDDVYKLPLQQFQQGSPENLTEGALYGIVEDLAAATRQIKLHYKTNRKIFCSTTQIEYEPSGPYK

SEQ ID NO: 359817 - protein, 137 aa, Zea mays
  Clone ID: MRT4577_91325C.1.pep
QPELGPWQAALQGGLLEAGVAPDNGFTFDHFDGTKVGGSIFDADGRRHTAADLLRYARAEGLDVLLRARVAKILFFNVRGRRSGRRTAARGVVFHDSEGRMHKAFLSAGRRNEIILSAGAMGSPQLLMLSGVGPADH

SEQ ID NO: 359818 - protein, 107 aa, Zea mays
  Clone ID: MRT4577_91326C.1.pep
LLDAERLIVHRVTAVVRHVQQEFQRRHAEYIPVQCHRSRKAPARYGLQSNAPRTALCHVHVGSTAGDQRLQTGVQTADALERHETDPASAKPPYAAATALVQERGQA

SEQ ID NO: 359819 - protein, 89 aa, Zea mays
  Clone ID: MRT4577_91327C.1.pep
GRLGDDELGSSPKESFYRISADRRNKLMKSGLSHSSSSHGDKNIVNSSQLTETPKKFDGRQALEPSAINQGEITQLSEPISSLTDWMDE

SEQ ID NO: 359820 - protein, 59 aa, Zea mays
  Clone ID: MRT4577_91328C.1.pep
PDLLKRPDLRPWSWNLPRCNVPRQRSAPLPEFKAAAKNNLKFYLNNGKANVGPARDFRP

SEQ ID NO: 359821 - protein, 52 aa, Zea mays
  Clone ID: MRT4577_91329C.1.pep
ARILYYGRPRRVRIFIRSYYLNFNSDGRFVPDGVNANRQHTTWYYSDKQAPR

SEQ ID NO: 359822 - protein, 65 aa, Zea mays
  Clone ID: MRT4577_9132C.1.pep
QLWLHFISFKKKDCILLILVALTCTRFNLLICRCFCHKKTIHMGYVCSVCLSIFCRNQKTCSTCG

SEQ ID NO: 359823 - protein, 70 aa, Zea mays
  Clone ID: MRT4577_91330C.1.pep
AHLQQSIKNARHSVINSYIRKYQAFAHTFQQSRGFGTKFPFSYQSTTTGTTASDPFASAGPPPNNYDLYS

SEQ ID NO: 359824 - protein, 155 aa, Zea mays
  Clone ID: MRT4577_91331C.1.pep
MKIQKANAGVLTNFEVLDFLRSRGAKIDPMGCLGAVAVSECKVYEYILKTPACNQTRESIYEFVKRSEGFRLAEADKLNVINWRPSSAADAYAMIEECGKRFSRDERGEACDEDERVQEFLDMVKEVLPAPPKAEVETAEAEAVEAEAEVEAMQE

SEQ ID NO: 359825 - protein, 100 aa, Zea mays
  Clone ID: MRT4577_91332C.1.pep
MTPSTHTQNILRTTTLYIWSTPRANHLNTRLSSERIHYKRHDLGTNVTFEGPFGMSHYSRLFGPSDTSLSTCADLGRAIHPTNHGRVLHISQYPLRHSHP

SEQ ID NO: 359826 - protein, 56 aa, Zea mays
  Clone ID: MRT4577_91333C.1.pep
MAWGDVVKQRKFGPLFLGKRKKNMAPKKKKKKKKKKKKKKKKKKKKKKNSRRGRGY

SEQ ID NO: 359827 - protein, 69 aa, Zea mays
  Clone ID: MRT4577_91334C.1.pep
DCENLTARSLHHRQGKLSTFRSRRRYTASRIRTLSHLTKLSTALFPVRYSDQYYQQAIATTDFSRLAYF

SEQ ID NO: 359828 - protein, 66 aa, Zea mays
  Clone ID: MRT4577_91335C.1.pep
EFSVLIARRLLSYVVLAQRICCVLNGLISHDGYILCFGFIYLLHRVCLLAVMTVSIVIDTLLIQRT

SEQ ID NO: 359829 - protein, 139 aa, Zea mays
  unsure (1)..(139): unsure at all Xaa locations
  Clone ID: MRT4577_91336C.1.pep
MSAAEEAKVPAVEKPVEEVKAPKLAKEKKPKAPKEKKPKQAKTASHPPYLQMIKDALIALNEKGGSSPYAIXKYMEEKHKAVLPANFKKILGLQLKNQAARGKLVKIKASYKLAEAAKKVKESTAKATKESRPKRNKIA

SEQ ID NO: 359830 - protein, 100 aa, Zea mays
  Clone ID: MRT4577_91337C.1.pep
NTQATHIHHSLTTMDDLISLVTEIFALLAIAAHAVITTQGSLVPKCIIAPSRPNSNVNGIRKLNWARTYGPASLRGESITSSKRLTATTMLGASNNTWHM

SEQ ID NO: 359831 - protein, 41 aa, Zea mays
  Clone ID: MRT4577_91338C.1.pep
GSSYLNCPKRSGIHTSMRMDTYLEKCTGFDSMPLPMQLQMP

SEQ ID NO: 359832 - protein, 92 aa, Zea mays
  unsure (1)..(92): unsure at all Xaa locations
  Clone ID: MRT4577_91339C.1.pep
XXTRATHSRCINTPMAHYLILLALLKQRQSQLIENHQILIFTIFPSFFLIIFTFNSYPFLLKMINSLHRYSSIVIGSFYPPNINPHPPAYAH

SEQ ID NO: 359833 - protein, 93 aa, Zea mays
  Clone ID: MRT4577_9133C.1.pep
PDPTLRSFGSSPNRTEDAPDRRLDDAPRPGRQRLDQRGVPRVRSSRWKTPRRPPSNPPAASRSGPAPQSTSAACSILPAMSPPNSGTGYSYHT

SEQ ID NO: 359834 - protein, 100 aa, Zea mays
  Clone ID: MRT4577_91340C.1.pep
LRELPLCIYCLLQVLLLCVFSLSDNGGRSSFRKLIRPFNSVTIVLQGQCLHSQCLLLADAKIWVLHYQHEKLLKLLKPPYLASPASMHHTSSLALDFFFK

SEQ ID NO: 359835 - protein, 78 aa, Zea mays
  unsure (1)..(78): unsure at all Xaa locations
  Clone ID: MRT4577_91341C.1.pep
DLDLGSRETESCIETTQDXLMYLQDSKQGSKGXITIDTEIFEVTPFYNVLKVKKTAGDTLEXEIVCSEVLRPSLSDIC

SEQ ID NO: 359836 - protein, 91 aa, Zea mays
  unsure (1)..(91): unsure at all Xaa locations
  Clone ID: MRT4577_91342C.1.pep
KKGLLKPKKARGKILGGGGPKPKKGAPGSFFXTNMSLSGKKPPLYMGGWCQPKFSPKNNPGWFGFKFQRKLQNPLIILFSGNFLGGSTHFF

SEQ ID NO: 359837 - protein, 268 aa, Zea mays
  Clone ID: MRT4577_91343C.1.pep
MGLLSNRVERSEIRPGDHIYTWRAVYAYSHHGIYVGGSKVVHFTRKKETETSDSSDSTSSLVSEISSECQTFPDCGFQLSNSGVVLTCLDCFLRNGSLYCFEYGVPSAVFLAKFRGGTCTIAESDPPEVVVHRAMYLLQNGFGNYDMFEKNCEDFALYCKTGLLPVEEPGIGTSGQASSAIGVPLAALLSTPFKLLAAGPLGMATVTAGMYCAGRYITDIGVRKDVAKVEVEKLSSHPGFHLVEDEESVNKRSEKPKTLLPMKRKRER

SEQ ID NO: 359838 - protein, 195 aa, Zea mays
  unsure (1)..(195): unsure at all Xaa locations
  Clone ID: MRT4577_91344C.1.pep
MSRRGDWVYENNGGTCVAIAGADYCVVAADTRLSVGYNILTREHSKICELADKCVIASSGFQGDIKALQKNLAARELLYQHQHNKRMSCPAMAQLLSNTLYYKRFFPYYAFNMLGGLDSEGKGCVYSYDAVGSYERTGYSAQGSGSTLIMPVLDNQLKSPSPLLVPARDAVTPLSESEAVDLSXDVFASATERDI

SEQ ID NO: 359839 - protein, 159 aa, Zea mays
  Clone ID: MRT4577_91345C.1.pep
LFERTSLEFFFFFFFFFFFFFFFFFFFFFFFFFWEKNNGHFLLTFSRPGPPGYTKTRFHPCSGKTKKFIGGGKENPSNFFGFSKTQKRGKKLNGKIQEALTLFEMPSGFEFNLFFSPNVGGRGNLFATRGKTHPSISPIWQPAKLCLPNGRSKREPNPL

SEQ ID NO: 359840 - protein, 107 aa, Zea mays
  Clone ID: MRT4577_91346C.1.pep
SGFMDALHTATDADEVPSHGRRGSAEDSGRRREIDVAPQPHDPIAWHIRLPQAKTILQKPTPRAETPQRRLSLAAARISLSLSPARLSVGDGGLVFGDWNTAPAGLE

SEQ ID NO: 359841 - protein, 318 aa, Zea mays
  unsure (1)..(318): unsure at all Xaa locations
  Clone ID: MRT4577_91347C.1.pep
FRCCRAAAVTSILDDGXLVVCERSLGANQGGPSMPLVQPFVRGEMLPSGFLVRPSDGGGSVIHIVDHMDLEPWSVPEVVRPLYESSAMVAQKMSMAALRYLRQVAHEDTAHSVITGWGRQPAALRALSQKLTRGFNEALNGLADDGWSVIGSDGVDDVCVSVSSSPSRVVSCNATFSTGPVVGTGSSSVLCAKASXLELXDVSPPELLRFMREQRSQWADSNLDAFFASAMKPDFCSLPIPPRLGGFGGQVILPLAHTFDPEEFLEVIKVGNAGNYQDALLHRDLFLLQMYNGVDENMAGTCSELIFAPIDASFSDDS

SEQ ID NO: 359842 - protein, 80 aa, Zea mays
  Clone ID: MRT4577_91348C.1.pep
FVVLDMISIEFLENGCYVVSAAALVVVYEFVVGMSVIILDRSVDLSLAVHFIGLIGYRLGHVLGSEVCSVIETVMMVGIC

SEQ ID NO: 359843 - protein, 61 aa, Zea mays
  Clone ID: MRT4577_91349C.1.pep
MSAYCGKYKDQLIKNAADIGSPGKGIVAADDSTGFIGRRLSTVDVDNLQDTVRCPRSVPIR

SEQ ID NO: 359844 - protein, 77 aa, Zea mays
  Clone ID: MRT4577_9134C.1.pep
GVFGTVYKGRSRSDLLSPSSTMCLVVTIPTHVKAAPINTSAGLLLSSLCSVRQGTSKTGPLWPLNRCTTTTSGAWSN

SEQ ID NO: 359845 - protein, 772 aa, Zea mays
  Clone ID: MRT4577_91350C.1.pep
ATFKLECENSLRKKKKRFESFVPVPDTLLEKARQDQEHVTALDPKSRAAGGTETPWAQTPVTDLTAVGEGRGTVLSLKLDRLSDSVSGLTVVDPKGYLTDLKSMKITSDAEISDIQKARLLLKSVTQTNPKHPPGWIAAARLEEIAGKLQVARQLIQRGCEECPKNEWVWLEACRLASPDEAKAVIARGVMSIPNSVKLWLQAAKLESSDLNKSRVLRKGLEHIPDSVRLWKAVLELANEEDARLLLHRAVECCPLHVELWLALARLETYDQARKVLNKAREKLPKEPAIWITAAKLEEANGNTQSANKVIERGIRSLQREGMDIDREAWLKEAEAAERAGSVLTCQAIVKNTIGIGVDDEDRKRTWVADAEECKKRGSIETARAIYAHALTVFLTKKSIWLKAAQLEKSHGTRESLDALLKKAVNYNPRAEVLWLMAAKEKWLAGDVPAARAILQEAYAAIPNSEEIWLAAFKLEFENNEPERARMLLAKARERGGTERVWMKSAIVERELGNVGEERRLLEEGLKLFPSFFKLWLMLGQMEDRLDNGAKAKEVFENGLKHCPSCIPLWLSLANLEEKISGLSKSRAVLTMARKKNPATPELWLAAIRAELRNGNKKEADALLAKALQECPTSGILWAAAIEMAPRPQRKGKSTDAIKRSDHDPHVIATVAKLFWLDRKVDKARSWLNRAVTLAPDVGDFWALYYKFELQHGNVDTQKDVLKRCVAAEPKHGEKWQAISKSVENSHLPVEALLKKAVVVLDVEENANPAGA

SEQ ID NO: 359846 - protein, 360 aa, Zea mays
  unsure (1)..(360): unsure at all Xaa locations
  Clone ID: MRT4577_91351C.1.pep
MRPAEGAARLACLLLLAAVAAGHAGVQPLARIAIHRARFALDASAAVRASPELLGTKGEDTAWVKVDLVTPHPSADDWVGVFSPSKFNASTCLGSHGSGPGPVICSAPIKYQFANYSSGYGESGKGALQFQLINQRQDFSFALFTGGLSNPKLIAVSNAIAFANPKAPVYPRLAQGKSWNEMTVTWTSGYESDEAYPFVEWGMKWSPPVRSAAGTVTFDRESVCGEPARSVGWRDPGFIHTAFLTDLWPNKEYYYKIGHMLPDGSVVWGKLSSFKAPPFPGQKSLQRVAIFGDMGKAERDGSNEYSNYQXGSLNTTDTLVKDLDNIDMVFHIGDITYANGYISQWXDQFTQQVEEITSRV

SEQ ID NO: 359847 - protein, 160 aa, Zea mays
  unsure (1)..(160): unsure at all Xaa locations
  Clone ID: MRT4577_91352C.1.pep
XXGNKKEXNALLAKALQECPTSGILWAAAIEMAPRPQRKGKSTDAIKRSDHDPHVIATVAKLFWLDRKVDKARSWLNRAVTLAPDIGDFWALYYKFELQHGNVDTQKDVLKRCVAAEPKHGEKWQAITKAVENSHLPVEALLKKAVVVLDVEENANPGGA

SEQ ID NO: 359848 - protein, 35 aa, Zea mays
  Clone ID: MRT4577_91353C.1.pep
PQRDSDFTNRLNQDYRTRDSRCTPLRRSQNHTRRR

SEQ ID NO: 359849 - protein, 62 aa, Zea mays
  Clone ID: MRT4577_91354C.1.pep
ITMDPTKFRPFSRHDTTVTTTNAGGSVWNDNEALTVGPSGPILLEEFDLIWNEGRFGRGLFI

SEQ ID NO: 359850 - protein, 89 aa, Zea mays
  Clone ID: MRT4577_91355C.1.pep
MSEQGARRAGSSGNARPWIRERQRESRDWGCAMGIRGQRILATSRGRRRLGEERQGKQGQTTLEIRLASRIFNRPERRLGKNQARAAAG

SEQ ID NO: 359851 - protein, 90 aa, Zea mays
  unsure (1)..(90): unsure at all Xaa locations
  Clone ID: MRT4577_91356C.1.pep
SSPLLVVTSAHLLPPPPVACSSLNSHHEINRTRHLDIEAIAHHIYGRLPPHDSRSYKIGGVDYREINRLEKDRFEMIKRAFKXLWVLNKV

SEQ ID NO: 359852 - protein, 80 aa, Zea mays
  Clone ID: MRT4577_91357C.1.pep
MPTATHRHIAARRYKERRYTTTSASTLRQGKKETDPVVRNESCALSQHSNLVLHGSIQRKPKRTEHKGIPAPPMNVCQEE

SEQ ID NO: 359853 - protein, 115 aa, Zea mays
  Clone ID: MRT4577_91358C.1.pep
MPRKIATAYGPTGYNRGAGSHSEGIPPFPSNWFGCMVCTPFFWFLTRSVGPGINGAIAFPAPTCPSCAPARGSKRLRCELQISRALDVGPLLAISFLLLQVCGHHVLIFPFLQLS

SEQ ID NO: 359854 - protein, 151 aa, Zea mays
  Clone ID: MRT4577_91359C.1.pep
NCIKHKQSQKNHETCRHVMISYVELMIKKLRLFRSCHSLYVSLHISRSALCFFSTLSFLSFRCCSACARAASFSTAFFSRGTRSSRNTGEEGWRKEEDGVEGCETKKGGVEPDELTNSTKPARDALEGNLGLETHMGRQPQLHPCELPWPL

SEQ ID NO: 359855 - protein, 61 aa, Zea mays
  Clone ID: MRT4577_9135C.1.pep
RRHQQKDGLAYISTFPTGPGQRWFFPPKPPGPPPLGPGPPNLFFLSRNPPFNGYGVHMSCP

SEQ ID NO: 359856 - protein, 52 aa, Zea mays
  Clone ID: MRT4577_91360C.1.pep
VVHGGVLNKVQRAVCMISNSSSVVEVFYRIDHKYDLMCVKSAFVQWYDCQCI

SEQ ID NO: 359857 - protein, 84 aa, Zea mays
  Clone ID: MRT4577_91361C.1.pep
TPLGPHRWGKNPGVNEEKPNSFPNWEGKGKKAFEARPLLLTPAAGAPFGGTGGERGGTPGGPNPKVPKKRPGLVFKTWGAPSWG

SEQ ID NO: 359858 - protein, 66 aa, Zea mays
  Clone ID: MRT4577_91362C.1.pep
HVTCWILLLQATQGTHTSKSVGRLLHMHRSCTHIEALAYRPSNMAPHALGIHPLRKQQSHQCLVNP

SEQ ID NO: 359859 - protein, 231 aa, Zea mays
  Clone ID: MRT4577_91363C.1.pep
MAGGGSDEVKLLGMWASPFVLCVQLALSLKGVGYEYVEEDLKSKSELLLKSNPVLQKVPVLIHDGKPVCESSVILQYIDEAFAGVGPSLLPEEPHGRAVARFWAAYIDGTLVKASSQASMAKTEEEKAEGKKQVTAAVETLEGALRDCSNGKPFFGGDTAGYVDVMLGGLLAWVHAGDKMKGVKTFDPATTPLLAAWADNFGSLDAVEAVMPDVGKLVEFGMAMHARAAAA

SEQ ID NO: 359860 - protein, 550 aa, Zea mays
  Clone ID: MRT4577_91364C.1.pep
MKRVSSHVSLASEAEINLDLSRLIIDKPRFTLERKRSFDEQSWSELSHRQNDGFDSVLQSPAFPSGVFDSPFSVGTHFGGPHPLVNEAWEALRKSVVYFREQPVGTIAAVDHASEEVLNYDQVFVRDFVPSALAFLMNNETDIVKNFLLKTLHLQSSEKMVDRFKLGAGAMPASFKVDRNKNRNTETLVADFGESAIGRVAPVDSGFWWIILLRAYKSTPGDVSLSESPECQKCMRLILNLCLSEGFDTFPTLLCTDGCSMIDLHEGIYGYPIEIQALFYMALRCALQMLKPEGEGKDFIEKIGQRLHALTYHMRNYFWLDFHQLNNIYRYKTEEYSHTAVNKFNVIPDSIPDWVFDFMPCRGGYFLGNVSPAMMDFRWFALGNCIAIVSSLATPEQSVAIMDLIEEKWDELVGEMPLKICYPALENHEWRIITGCDPKNTRWSYHNGGSWPVLLWLLTAACIKTGRPQMAKRAIELAESRLLKDGWPEYYDGKLGRFVGKQARKFQTWSIAGYLVARMMLEDPSTLMMISMEEDRPVKPTMRRSASWNA

SEQ ID NO: 359861 - protein, 230 aa, Zea mays
  Clone ID: MRT4577_91365C.1.pep
ASTSTRLFSRRTGARQVAAEAAGMKRVSSHVSLASEAEINLDLSRLVIDKPRFTLERKRSFDEQSWSELSHRQNDGFDSVLQSPAFPSGGFDSPFSVGTHFGGPHPLVNEAWEALRKSVVYFREQPVGTIAAVDHASEEVLNYDQVFVRDFVPSALAFLMNNETDIVKNFLLKTLHLQSSEKMVDRFKLGAGAMPASFKVDRNKNRNTETLVADFGESAIGRVAPVDSGI

SEQ ID NO: 359862 - protein, 103 aa, Zea mays
  Clone ID: MRT4577_91366C.1.pep
MCSASFDGVRPAAVASAVQPVPAFPERAKVVSLVAAIMLLCNADRVVMSVAVVPFAAQYGWSSSFVGIVQSSFLWGYVLSSMVGGALADKYGGKKVMAGAAAL

SEQ ID NO: 359863 - protein, 93 aa, Zea mays
  Clone ID: MRT4577_91367C.1.pep
VPAIWKFDMIIAPFWWNSRCLVSPNPIKLSPGSWQLTSVKALVGAFGPALQIRTGVVSLLTGEGSGLVFCSTHQLFHRRQANHMVSICPALDF

SEQ ID NO: 359864 - protein, 33 aa, Zea mays
  Clone ID: MRT4577_91368C.1.pep
RGWFFFKKGPQYSCNMFYNTRTVLTKNVTGPIF

SEQ ID NO: 359865 - protein, 49 aa, Zea mays
  Clone ID: MRT4577_91369C.1.pep
MFLIFTLTQSMHCPSYITFFDWHQHNTNVVLPDRSKKIAVAQHGSCLRK

SEQ ID NO: 359866 - protein, 49 aa, Zea mays
  Clone ID: MRT4577_9136C.1.pep
LPSHHSVTADHCRSRPGSPSSSNPDTSEDASDYALHSLGSSWVERRGMY

SEQ ID NO: 359867 - protein, 85 aa, Zea mays
  Clone ID: MRT4577_91370C.1.pep
SSFFFFFFFFFFFLCFFFFFVWFFGFFFLTFRCLVSSYFLELFYCTPPNICSHKTTGLAGSTSIPDGNYRTTGGGGTMDRAQRGR

SEQ ID NO: 359868 - protein, 70 aa, Zea mays
  Clone ID: MRT4577_91371C.1.pep
PVTHLRGPSSPIRQYSLLADISNPGWLILLTLPVKYYPLVLLPQDPDCYMFSLSIEPTHLSLFPCHASCK

SEQ ID NO: 359869 - protein, 121 aa, Zea mays
  Clone ID: MRT4577_91372C.1.pep
FRPLRAPRLVFLSRPLVPPLWPPLVGGLSFLRGTVSPGEKFVGPSLFHPGRRPKKRSFVRFHSAPLDLGAAVSGAPFSFLCRGSLCCNMNTLRCLHYKENRTRGARQLFRIRALRDACIAS

SEQ ID NO: 359870 - protein, 42 aa, Zea mays
  Clone ID: MRT4577_91373C.1.pep
HLFRFRLVLPRQLFLLLTPMNLIPTAYPILYRWHLYCASFHY

SEQ ID NO: 359871 - protein, 88 aa, Zea mays
  Clone ID: MRT4577_91374C.1.pep
SNTKDPRQEFLGAEAEPKIEVAESFSSKGVLLLRRGKRNWLNIFQLQVRRCPISTEMLNGHHITPWKKGVFSRHQPPTKPHGVASHCC

SEQ ID NO: 359872 - protein, 60 aa, Zea mays
  unsure (1)..(60): unsure at all Xaa locations
  Clone ID: MRT4577_91375C.1.pep
IIFNIEQSLSTIEDRHSSARTRTHASSIRASHDXKFPAKCGEQAAKRTLEITSKCLIHHR

SEQ ID NO: 359873 - protein, 468 aa, Zea mays
  Clone ID: MRT4577_91376C.1.pep
MTWMADLEPAVSPGRCPLHFPCAGSGGHYNNVLVFKHCGAAHQQPRDLNVAQRTEDIGLYAGFVGASFMFGRCLTSTVWGIAADRVGRKPVVVFGISSVVVFNTLFGLSVNYWMAIATRFLLGALNGLLGPIKAYAIEVCRPEHEALALSLVSTAWGIGLIIGPALGGYLALPAENFPTVFSPDSIFGRFPYFLPCLCTSIFAAVVLISCIWMPETLHKHKVHENRSRNIEALEARLIDSNEKVEESGSLDSKKSLFRNWPLMSSIIVYCVFSFHDMAYTEVFSLWAESDKKYGGLSLSSEDVGQVLAVTGASLLVYQLFLYPSINKVLGPIKSSRVAAILCIPILFAYPYMTYLSEPGLSIVLNIASVIKNNLGVTIITGTFILQNNAVPQDQRGAANGLSMTGMSFFKALAPAGAGIVFSWAQKRQHAFFFPGDQMVFFLLNAVELVGLLLTFKPFLAVPEQYDTR

SEQ ID NO: 359874 - protein, 211 aa, Zea mays
  Clone ID: MRT4577_91377C.1.pep
DATLGALASALMIYDTNAESISASDPVDIEKTLLKQFKPKVPFLVQERIIEALASLYSNPVLCKTLADSDAKRLLVGLITMAATEVQDDLTKSLFALCKKDCDLWQALQGREGVQLLISLLGLSSEQQQECAVALLALLSKENDESKWAITAAGGIPPLVQILETGSPKAKEDSATILGNLCNHSEDIRACVESADAVPALLWLLKKEVIM

SEQ ID NO: 359875 - protein, 183 aa, Zea mays
  unsure (1)..(183): unsure at all Xaa locations
  Clone ID: MRT4577_91379C.1.pep
AAAFFFFFLFFFFFFFFLTKEDDPYHTQTALREIRLTERTGTHPSHDTSSCXRGWLGAPRARRRGPTTFTTRRPLFFAHVXCGPRRTRXRGGPCLLRTGLRAAPPPPPPGGRPLPCRSGPPFPVVSCAVPARGFSPVRAPGGFPGAWALAAPAVCARAFLVGLLGLPLGRCLRLGGPVPGGPP

SEQ ID NO: 359876 - protein, 90 aa, Zea mays
  unsure (1)..(90): unsure at all Xaa locations
  Clone ID: MRT4577_9137C.1.pep
SGTGTSESDEEENHALQVGNRKGEIDDTINLYATGTGPQRWDALGLLHXIADFSRMEEDKFLDRLDIEKGTREGINHDERGPILRAMDGC

SEQ ID NO: 359877 - protein, 77 aa, Zea mays
  Clone ID: MRT4577_91380C.1.pep
QYTFNLWARKKRYHNRMADSDHFSFGTHTTILYIYRQALQAQTHYSFLYIQYIGLNTTKCLYPKRKARPWWNHQASG

SEQ ID NO: 359878 - protein, 90 aa, Zea mays
  Clone ID: MRT4577_91381C.1.pep
QKNPWKKVYHRYYRAYLGGQPLGGGSWGGGGPPTIYKDHRGIMLLVLESYSYGNTPRGPRIWGQGLFFFFLIKRGWRLGQQPMTQFNKGA

SEQ ID NO: 359879 - protein, 287 aa, Zea mays
  Clone ID: MRT4577_91382C.1.pep
MASFPHLTQMEHGLASGASHGTPSFFFCHGTATADSASLETSSGVLDTSPRGTSSDDNKACRKHKEDSGASFSSARSKDSNSKESSKRSGGKRDRSSKKVDEEEPKGYIHVRARRGQATDNHSLAERVRRERISERMRVLQALVPGCDKVTGKALILDEIINYVQSLQNQVEFLSMRIASLSPVLYGFGMDSSDAFSDLITQKIEGMAHHEAFAMPSSSVLNGTPSEALVDTHTSSSSPSYEVHGDGGTASVSFPQDSGSYMVQTVGEPRQELFSQVVFSNHMCPFQ

SEQ ID NO: 359880 - protein, 53 aa, Zea mays
  unsure (1)..(53): unsure at all Xaa locations
  Clone ID: MRT4577_91383C.1.pep
SQQXPDQXPFGLFLEDLFCSHSHLLNKIYIALSCTKHSFRSQCLSTYSPKAQN

SEQ ID NO: 359881 - protein, 93 aa, Zea mays
  Clone ID: MRT4577_91384C.1.pep
MDKSMLGDLDNLPDEDKMRMSAMIEQLQMRDSLRMYNALVETCFKDCVDTFRRKTLDKQEESCVRRCAEKFLKHSMRVGMRFAELNQGVATPD

SEQ ID NO: 359882 - protein, 185 aa, Zea mays
  unsure (1)..(185): unsure at all Xaa locations
  Clone ID: MRT4577_91385C.1.pep
LDSRLXFLGMPIVPAVTELIAAQFLWLDYDDRTKPIYLYINSTGTMRSKSKVYTINLSMAYGQAAMLLSLGVKGKRGVLPNSITKLHLPKVHKSGGAAIDMWIKAKELDTNTDYYLELLSKGVGKPKEELAEFLRGPRYFRAQEALDYGLADTILHSLDGSFKPKDLTAQLAKAQAMRQSGKRAA

SEQ ID NO: 359883 - protein, 113 aa, Zea mays
  Clone ID: MRT4577_91386C.1.pep
MDKRASSTSLLVLISILLALADPVAAGMKATFAAGVGVAADTAVLRHLMTTRLEDGVAPELTVDVELHRRVLAGGFVKSNVLNPDKAACIKSCPARGRPYTGRGCSNIYQCPH

SEQ ID NO: 359884 - protein, 434 aa, Zea mays
  Clone ID: MRT4577_91387C.1.pep
MISLLIPTLPLSTLSIPSRLQSNPPQARREETRRGRDPQFTHTPLPMALALRCPPAATSSRSPFLPSTSPAPAGKVPRRPPASWRCLAYYGDGGFRKNYDHIPKQFREENLKDGLMDNYKHVPQFLYGLSAAQMEMFMNDDNPYNRQSQKVTEESVSAARSYDEFGMYTLPGMHEGPASYSMGMGMGGSMSMSMGRGGRGYRRMRSSAPDLPSLLLDSRIIFLGMPIVPAVTELIAAQFLWLDYDDRTKPIYLYINSTGTMDENNELVASETDAYAIADFINRSKSKVYTINLSMAYGQAAMLLSLGVKGKRGVLPNSITKLHLHKVHKSGGAAIDMWIKAKELDTNTDYYLELLSKGVGKPKEELAEFLRGPRYFRAQEALDYGLADTILHSLDGSFKPKDLTAQLAKAQAMRQSGKRAAAGAGRWSTPTAPR

SEQ ID NO: 359885 - protein, 146 aa, Zea mays
  Clone ID: MRT4577_91388C.1.pep
RGRPGRDRRLEPDPFLFLSSSHDVAWRCLPFASLRSPIAAMTGAKQSRRCNLLTFFSTILATVLLLIFQRFSPTAAAVPQWRRGGTQEHIDVARGAEAVGHGQGRCEDSLRGGSSRWRRRRGFADGGRGTRVRLALQHAAVGNWEL

SEQ ID NO: 359886 - protein, 151 aa, Zea mays
  Clone ID: MRT4577_91389C.1.pep
LASHEHTLKNRSPNPLSAPSVRVRRTASLLGLLVHLSDRIDLIGAPRHQAASELSSPLGYLGKVTSLQGFRVMPVNDYCLVQRSAPASSLRLYQTRRRMPAQHPFAVSSSFGVSSSTATGAASGSTSAAGSVSAGPAGSSTWPGGGSSLPG

SEQ ID NO: 359887 - protein, 91 aa, Zea mays
  Clone ID: MRT4577_9138C.1.pep
LITTLLLDIKSRVTTLYTLIKTFLMQCHSNNKTRYYSKKRGGGQNPYKILIIANYTIYAHSYIKTSPIKLGLKCLNLVTNFHNMLIAHFAY

SEQ ID NO: 359888 - protein, 146 aa, Zea mays
  Clone ID: MRT4577_91390C.1.pep
PDRRSRDDPPRITPAQNQPKLLRIGETPADPPQRGHQHQERGATKKAEKPGGSHTRDANQKTEPHPEGRGTTPRREKAPAEAGEAREETNHENAHATSTQAGDQKENEAKERRNRQNPQLRENPTKTMTGHPKGAAGGTEAAAPTQ

SEQ ID NO: 359889 - protein, 99 aa, Zea mays
  Clone ID: MRT4577_91391C.1.pep
SVEKGPRGWGSPLPSASGILSSSPFTKHCPPEFHYSNGGCCILCPPKIVKSLFWGFKGKSKKKLYASPCRRILDLGKIRCPCKHLGLAFLVTCSIRMSR

SEQ ID NO: 359890 - protein, 172 aa, Zea mays
  unsure (1)..(172): unsure at all Xaa locations
  Clone ID: MRT4577_91392C.1.pep
KSQARGRKKKKKRTQKKKKKKKKKKTNIFFFPKKTQNTGAGIQGTNRAPQRGQRKKPAPQNGPAGRXQTQPGGPXKPPMARPKKRKPGGPPPPRPPGSQPKPGAQPGGTSPRGEGPPPPGGKTPGPPNPWAPSKKPPRPGGPQERPGPPXEPKKGPPPRGXGGPPKPAGGGP

SEQ ID NO: 359891 - protein, 178 aa, Zea mays
  unsure (1)..(178): unsure at all Xaa locations
  Clone ID: MRT4577_91393C.1.pep
MAEQAGAGRYWCHMCAAVVSPAEGEAEVKCPHCHSGFLEEMETVRGTPAAXIGDGDGAVAQVYPGADRPSSIWAHAILSTVDSSVRRRRNRRQTEAAGDVYDGNDPEFALRRRRVTAFLRLLHELRDRQLQRLEAAAGVALEGDQXPLSAGASSSAQLAAASMAWALGDYFLRPSLDA

SEQ ID NO: 359892 - protein, 65 aa, Zea mays
  Clone ID: MRT4577_91394C.1.pep
KRSISDSAGNPTNRHTQSSTSRRTEARLTEHRAIEGNWRKYHSTDQPKRTNESIRSKSKGTRPVG

SEQ ID NO: 359893 - protein, 63 aa, Zea mays
  Clone ID: MRT4577_91395C.1.pep
PTRPPTHGHTRLRTWTRDNRFHCRTGVEHLYFVNSATSNTLRAISTLTTTTYGATIETIHIRG

SEQ ID NO: 359894 - protein, 154 aa, Zea mays
  unsure (1)..(154): unsure at all Xaa locations
  Clone ID: MRT4577_91396C.1.pep
RGKKEENFXAEEAKDXGEXXXAAEGKGTXXEXKXXEFSEVXKKGGGEPQKTEEGDNKKDAEKGEMKDAAEKTEEXEEKKEEAPTGEAEEKTGEGGDKKEGAPAEKTDEKREAPAGEAAEKNEEGXEKKXEEPXAKKKNGEKEGAPXGNAQRNRT

SEQ ID NO: 359895 - protein, 423 aa, Zea mays
  Clone ID: MRT4577_91397C.1.pep
MARAPSSWTPSLAMVLLVVAAAAVVASSEAARVPAAVGNWTGEELRGAAARRGGRRSRRRAFENGLGRTPQMGWNSWNHFGCGINENLIKQTADALVNTGLAKLGYEYVNIDDCWAESDRDYQGSFVANRQTFPSGIKALADYVHAKGLKLGIYSDAGTRTCSQKMPGSLDHEEQDVKTFSSWGIDYLKYDNCNDAGRSVMERYTKMSNAMKTYGKGIFFSLCEWGRQNPATWAGGMGNSWRTTDDIADNWGSMTSRADQNDRWASYAGPGGWNDPDMLEVGNGGMSEAEYRSHFSIWALAKAPLLIGCDVRAMSQQTMGILSNSEVIAVNQDSQGAQGKKVQSSNGLEVWAGPLSNNRKAVVLWNRQGYQATITAQWSSIGLASSTAVTARDLWAHSSFSAQGQLSASVPPHDCKMYVLTPN

SEQ ID NO: 359896 - protein, 423 aa, Zea mays
  Clone ID: MRT4577_91398C.1.pep
MARAPSSWTPSLAMVLLVVAAAAVAVSSEAARVPAAVGNWTGEELRGAAARRGGRRSRRRAFENGLGRTPQMGWNSWNHFGCGINENLIKQTADALVNTGLAKLGYEYVNIDDCWAESDRDYQGSFVANRQTFPSGIKALADYVHAKGLKLGIYSDAGTRTCSQKMPGSLDHEEQDVKTFSSWGIDYLKYDNCNDAGRSVMERYTKMSNAMKTYGKGIFFSLCEWGRQNPATWAGGMGNSWRTTDDIADNWGSMTSRADQNDRWASYAGPGGWNDPDMLEVGNGGMSEAEYRSHFSIWALAKAPLLIGCDVRAMSQQTMGILSNSEVIAVNQDSQGAQGKKVQSSNGLEVWAGPLSNNRKAVVLWNRQGYQATITAQWSSIGLASSTAVTARDLWAHSSFSAQGQLSASVPPHDCKMYVLTPN

SEQ ID NO: 359897 - protein, 226 aa, Zea mays
  unsure (1)..(226): unsure at all Xaa locations
  Clone ID: MRT4577_91399C.1.pep
CIVLQYHGGLWLEKKNHFGCGINENLIKQTADALVNTGLAKLGYEYVNIDDCWAESDRDYQGSFVANRQTFPSGIKALADYVHAKGLKLGIYSDAGTRTCSQKMPGSLDHEEQDVKTFSSWGIDYLKYDNCNDAGRSVMERYTKMSNAMKTYGKGIFFSLCEXWGRQNPATXAGGMGNSWRTTDDIADNWGSMTSRADQNDRWASYAGPGGXWNDPDMLXEVGNGG

SEQ ID NO: 359898 - protein, 122 aa, Zea mays
  Clone ID: MRT4577_9139C.1.pep
CTHVPAVPHARHGVEFIPSLTRVWFPCPWSRPCYARAYARDASKFAFSSIPRDALCSPISCLTPLLLTNACSASRIQGRPRLLARRRPSLCPPVPRRLGAFMAAVLPCLPWRAVVVGWCWWQ

SEQ ID NO: 359899 - protein, 102 aa, Zea mays
  Clone ID: MRT4577_913C.1.pep
NARTSVLDVFAVLWTFYAPVYQWALMGRLYPPSRPAIHRAQEQPEALRAPAIARRRSSRQEPPDAVGRSPGLQVCLPRFLVINEMIYLIQKKKKKKKKKKKK

SEQ ID NO: 359900 - protein, 318 aa, Zea mays
  unsure (1)..(318): unsure at all Xaa locations
  Clone ID: MRT4577_91400C.1.pep
MARAPSSWTPSLALVLLVVAAAAAASSEAARVPAAVGNWTGEELRGAAARRGGRHGWRSRRRAFENGLGRTPQMGWNSWNHFGCGINENLIKQTADALVNTGLAKLGYEYVNIDDCWAESDRDYQGSFVANRQTFPSGIKALADYVHAKGLKLGIYSDAGTRTCSQKMPGSLDHEEQDVKTFSSWGIDYLKYDNCNDAGRSVMERXKAQERCLAXPHCGRCVGHRARAGLLGDLWLWPLLLXYTKMSNAMKTYGKGIFFSLCEWGRQNPATWAGGMGNSWRTTDDIADNWGSMTSRADQNDRWASYAGPGGWNDPDML

SEQ ID NO: 359901 - protein, 196 aa, Zea mays
  unsure (1)..(196): unsure at all Xaa locations
  Clone ID: MRT4577_91401C.1.pep
MVLWVFGYGSLIWNPGFDFDEKILGFIKGYKRTFNLACIDHRGTPQHPARTCTLESEDEAICWGIAYCVKGGLEKEREAMQYLERRECEYDQKISVDFYKDGNSLEPAVTDVLVFVSTPDPVGNKYYLGPAALEDMARQIATASGPNGYNRDYLFSMEKALSNISHEDDSIIVLADEVXEVLSRSTGEEVTGLDYH

SEQ ID NO: 359902 - protein, 234 aa, Zea mays
  unsure (1)..(234): unsure at all Xaa locations
  Clone ID: MRT4577_91402C.1.pep
ILFANYSPRKKRRPYIRLTGVDQRPSFPAPGSGTSLGSRLILRVSSAGFCSIVGVGIMVAAVDAVAEKVVAQLREECATPATRLDGVATAMEEEMRAGLHQEGGSKIKMIISYVDNLPNGSEEGLFYALDLGGTNFRVLRVQLAGKDKRVVKRESREVSIPPHLMSGSAAELFGFIASALAKXVADEGDNKVLDGKQRELGFTFSFPVRQSSIASGTLIKWTKAFAIDDAVGED

SEQ ID NO: 359903 - protein, 54 aa, Zea mays
  Clone ID: MRT4577_91403C.1.pep
ITKQKNGPWPCNFCSQLLLAKWSHLPFQGFQIVPPRLVVLRTGLSLGHSTKHCK

SEQ ID NO: 359904 - protein, 500 aa, Zea mays
  unsure (1)..(500): unsure at all Xaa locations
  Clone ID: MRT4577_91404C.1.pep
MARAPSSWTPSLAMVLLVVAAAAVVASSEAARVPAAVGNWTGEELRGAAARRGGRRSRRRAFENGLGRTPQMGWNSWNHFGCGINENLIKQTADALVNTGLAKLGYEYVNIDDCWAESDRDYQGSFVANRQTFPSGIKALADYVHAKGLKLGIYSDAGTRTCSQKMPGSLDHEEQDVKTFSSWGIDYLKYDNCNDAGRSVMERYTKMSNAMKTYGKGIFFSLCEWGRQNPATWAGGMGNSWRTTDDIADNWGSMTSRADQNDRWASYAGPGGWNXRALRHRKILSSCLNARGSLPFHTRFVRHSDPDMLEVGNGGMSEAEYRSHFSIWALAKXLCYIRTFLRVDSXATYYCDVKHVLRFRFPHWIRTWSALPLRLCCCXAPLLIGCDVRAMSQQTMGILSNSEVIAVNQDSQGAQGKKVQSSNGLEVWAGPLSNNRKAVVLWNRQGYQATITAQWSSIGLASSTAVTARDLWAHSSFSAQGQLSASVPPHDCKMYVLTPN

SEQ ID NO: 359905 - protein, 176 aa, Zea mays
  Clone ID: MRT4577_91405C.1.pep
MVLWVFGYGSLIWKPGFDFDEKILGFIKGYKRTFNLACIDHRGTPQHPARTCTLESEDEAICWGIAYCVKGGLEKEREAMQYLERRECEYDQKISVDFYRDGNSLEPAVTDVLVFVSTPDPVGNKYYLGPAALEDMAKQIATASGPNGYNRDYLFSMEKALSNISHEDDSIIVLAD

SEQ ID NO: 359906 - protein, 111 aa, Zea mays
  Clone ID: MRT4577_91406C.1.pep
MVLWVFGYGSLIWNPGFDFDDKILGFIKGYKRTFNLACIDHRGTPQHPARTCTLESEDGAICWGIAYCVKGGLEKEREAMQYLERRECEYDQKISVDFLQDGNSLEPAVTD

SEQ ID NO: 359907 - protein, 133 aa, Zea mays
  Clone ID: MRT4577_91407C.1.pep
GGDKTINGLWGETPLCGPEKPKTRITPGPPTGTKKFLPGGTKRDPHMKHKSSKAGGPKQGQKRPDGPHNGPQPRKPWGREKTFLSQPNPPVFFYFPMTQPGGPRNGLKNKTPPGRFFSPTPGNGGGGGSPGWA

SEQ ID NO: 359908 - protein, 69 aa, Zea mays
  Clone ID: MRT4577_91408C.1.pep
LLVGSTLDPPVIGRIIFFKIGDKVLKLIMFFIKVLSSLDVGANVGHSFLIHSGYKKQGNTIRSSLIFIL

SEQ ID NO: 359909 - protein, 50 aa, Zea mays
  Clone ID: MRT4577_91409C.1.pep
KIHLRSPMGLSSVPQMALLCHSVPSRISISQQAKTLVDVRAVELHGPVQG

SEQ ID NO: 359910 - protein, 52 aa, Zea mays
  Clone ID: MRT4577_9140C.1.pep
REVVGVRSGGEARTCVKCHGVRRGSTSWLAPAVWLLGVRRSVGGYMAPCASG

SEQ ID NO: 359911 - protein, 92 aa, Zea mays
  Clone ID: MRT4577_91410C.1.pep
LTRNGREIEHSLCYDTIKIQSREAITNKGHSNTGFIFPYSQSQKNEAPVYQQLGYTHTHTIRAGKKKFHSSSFRHRMRLETACAKEILLGIS

SEQ ID NO: 359912 - protein, 125 aa, Zea mays
  unsure (1)..(125): unsure at all Xaa locations
  Clone ID: MRT4577_91411C.1.pep
PNQMHLERGHTLXXITSGHSTHSLDTSCRXXHAWALKDXVLXWGFNGDXWFLGRHSXDERRXXSXXEAXPAPHRRWCGVTLEYVRQLILDXRVGAPPHRXHAXEVRSVAEASIAEISRGHRALRR

SEQ ID NO: 359913 - protein, 418 aa, Zea mays
  Clone ID: MRT4577_91412C.1.pep
MAEAATSSSSSGSFAPRRLHDAGVVRESLPYSVLAAPPPPPLPPVQVQVAGSGGGGGGKISPAVLFIIVILALVFFISGLLHLLVRVLLKKQHRRGGRRGTASAAAPRTGVEAGGVDVALQRQLQQLFHLHDSGLDQAFIDALPVFAYRDIVVGGGGDGDKEPFDCAVCLCEFDAEDRLRLLPLCGHAFHLNCIDTWLLSNSTCPLCRGVLFVPGLMGDGNPMFDFEERLEEGRLSEDCDVGFGLPGLKASGLAQTPVVEKKVFPVRLGKFKNVGTQGAVEGGHANANANANANPRVLSRDEGESSSSSLDGRRCFSMGTYQYVLGTSELRVALQPGRIRNGTGGAMMGRPPGLSSINADIMEGKKICTRNKGESFSVSKIWQWSHIKGKLPAGSDECSDAGSLPWMKRGGAADTSNL

SEQ ID NO: 359914 - protein, 122 aa, Zea mays
  Clone ID: MRT4577_91413C.1.pep
AAAYKMFETINRTPEMDAYSTTGRKLEDVRGDIEFRDVYFSYPTRPNEQIFKGFSLAIPSGTTIALVGQSGSGKSTVISLIERFYDPQLGDVLIDGVNLKEFQLRWIRSKIGLVSQEPVLFA

SEQ ID NO: 359915 - protein, 65 aa, Zea mays
  Clone ID: MRT4577_91414C.1.pep
HRLIVGASSTLIRVNRFKIITSSWIHMNPLPASEKRVKTPCLYQAEKCITNAQANTVSTYESGSP

SEQ ID NO: 359916 - protein, 75 aa, Zea mays
  Clone ID: MRT4577_91415C.1.pep
GGGEKTRKPYTSKQKGTGSTKREVETRKKHPFVRRTPNLNRGIEKLKRKREGNQTAIVLERTLVSPRAKESKPWA

SEQ ID NO: 359917 - protein, 87 aa, Zea mays
  Clone ID: MRT4577_91416C.1.pep
LAEQAERVEEMVEFMEKVFKTVDLEELTVEERNLLVVAYNNFIGARRSLWRIIFFIEHKEDGQGLDVLVSLIKDYFGKIDTELIIDL

SEQ ID NO: 359918 - protein, 171 aa, Zea mays
  Clone ID: MRT4577_91417C.1.pep
MLRRSRHGGVRLGRKLLGLWQRALCGGRRRRGGYGPLKQHQQQPCAGTPERAARKLAPALLRWGRSLARRLRLGWRAGGGRRMLAGGEAEVATTPKGQVAVYVGGGEAAQSLRYVVPVVYLNHPTFGELLREAEEEFGFQHPGVITIPCPAARFEQAAALAGAGKKGFARW

SEQ ID NO: 359919 - protein, 108 aa, Zea mays
  unsure (1)..(108): unsure at all Xaa locations
  Clone ID: MRT4577_91418C.1.pep
IMSPLAKWHRSRPGLTERFELFVNKHEVCNAYTELNDPCVQRQRFEEQLKDRQSGDDEAMDLDEVXALEYGLPPTGGWGLGIDRLTMLLTDSQNIKEVLLFPAMKPQE

SEQ ID NO: 359920 - protein, 79 aa, Zea mays
  unsure (1)..(79): unsure at all Xaa locations
  Clone ID: MRT4577_91419C.1.pep
NYLPLXNIPGRPKPTTLAPAWXWRNGHDKMVVQISSKKHLCLLKSGRTRYLKKKSLRTAQQEIRLNSSSCRQLNVSIHT

SEQ ID NO: 359921 - protein, 68 aa, Zea mays
  Clone ID: MRT4577_9141C.1.pep
ISSTALYAIWRASCLARETGPCFQVAVSCKACPDLAPAGGPCVPHVCGRKLRTSLAALESAFSAIAPV

SEQ ID NO: 359922 - protein, 83 aa, Zea mays
  Clone ID: MRT4577_91420C.1.pep
WPPVRYGSKNPGFFWAAVNGLISHFIFPFHPFGCEQNLSPLFNRSITMLVRAQTHFAVSISFFRPLAALRRICLLTAPVVPLK

SEQ ID NO: 359923 - protein, 119 aa, Zea mays
  Clone ID: MRT4577_91421C.1.pep
MGKASWRTPSLVALALLVALLAAATVAAAAEEEGSSAAPAPAVADADAPAAADEDTAGGGGDGAPAPAPVSEEPSHKTIGAKAKAGLHTVMASISKGKNKFECKVLGRHCPASEAPSAQ

SEQ ID NO: 359924 - protein, 160 aa, Zea mays
  unsure (1)..(160): unsure at all Xaa locations
  Clone ID: MRT4577_91422C.1.pep
LIFFLLASYQGRSFHGTLDYECQYCHALFWYGEKSSINCQTERPRYHXLXCKSGKIDIPSFKDRPEPLASLAIFNGDSRSRKFMRSIRQYNCRFAFTSMGAQIDNSINNDGRRPPLFKICGQVHHRVGSLLPLDDSASQFLQLYVYDTANEVSNRMKCTF

SEQ ID NO: 359925 - protein, 81 aa, Zea mays
  Clone ID: MRT4577_91423C.1.pep
TSRVEEIEETSLAWWMRAARASQGDCLRSTTTSRRTASSATDGGHRQVILGYQSSALIAMRGPSSPALYRTMLGVTLTVLI

SEQ ID NO: 359926 - protein, 102 aa, Zea mays
  unsure (1)..(102): unsure at all Xaa locations
  Clone ID: MRT4577_91424C.1.pep
IRLELKYSGRLFFLNAGICQRCLGDPIAITNSLGRFLEXDPFFCGSRDFTLXTVLLXSMDEGDVAKFTDARKKYDSXLTTLDSWKTTLLLTANIELQKKVDR

SEQ ID NO: 359927 - protein, 30 aa, Zea mays
  Clone ID: MRT4577_91425C.1.pep
HFVWHSPPVSYDAFHMIMYELWLRHNVIKY

SEQ ID NO: 359928 - protein, 284 aa, Zea mays
  unsure (1)..(284): unsure at all Xaa locations
  Clone ID: MRT4577_91426C.1.pep
PLLVYSARRPGVRPLLSATVFFLTANPSSTASPANTLRQLTPASTSGKLHFAAFPLRLPRHACARTYRSAAFGRGSPVAGRREKDYYATLNIRRDSTLQEIKSAYRILARKYHPDMNKSPEAEEKFKEISAAYEVLSDQDKRSLYDRFGEEGLSGDYRNGDIGTHGIDPYELFNAFFGSSDKLFGDSMGSGGFHYSAEAKDNRALNISYNLLLSFEESILGGKREINVFRHETCGTCHGTGAKCSNDITECTRCRGQGRLMKTQRTPSGIVSQISSCLNCEGSX

SEQ ID NO: 359929 - protein, 68 aa, Zea mays
  Clone ID: MRT4577_91427C.1.pep
HQFNCIHDSHTHDMDSLKNDAPEKWTLAKAHGTTLTLPSDDHIGISEVGHIALDAGQILAHSAKLVEQ

SEQ ID NO: 359930 - protein, 467 aa, Zea mays
  Clone ID: MRT4577_91428C.1.pep
MECVELLDSPDLFFLDGGDAHATDFSLENHLESSSSAGAKAKAAPGHSHSHSRRAQLHGSNAPVPPPLPGTSYYGARRKAKACRRARVPEGGVLDSWDRLFLEGYQSDLRVSTDGGAEIPSHSCVLGVKSPVLRAMLEEARLRDDGFRCIRVSGAPSEAVRVFIRFLYSSRFEQEQMKEHALHLLVLSHVFSVPSLKTVCVDQLERGFLAPDNVVDMLQLARLCDAPRLALACVRMVIGDFKTISLTDGWKVMRRANPSMEQELLESLVEADTRRQERAKRMEEKKVYLQLYEAMEALVHICRDGCRTIGPRDQALKGSLAAACKFRACKGIELLVRHFSACGVRVPGGCANCRRMWQLLELHSRMCFLPDTCKVPLCRHFKEKMRNLGRKEETKWNLWCARCWSGEELWVLFPEGEKISSILRPAGSCHVAPLVFETPKPRRGFMLEKGTRRSRNKKKKNVRTAVA

SEQ ID NO: 359931 - protein, 78 aa, Zea mays
  unsure (1)..(78): unsure at all Xaa locations
  Clone ID: MRT4577_91429C.1.pep
PEGTIKAASXGPLKGIMGYMEKDLVSTHFLGDNRSSIFDAKAGIALNAPFVKLVSWYANEWGYSNRVVDLIPPMFKTQ

SEQ ID NO: 359932 - protein, 57 aa, Zea mays
  Clone ID: MRT4577_9142C.1.pep
GAARALSDSQPVSVSASCRDARTHGHALLSPRPCAVEPAITISAPAFSAGLEERASC

SEQ ID NO: 359933 - protein, 98 aa, Zea mays
  Clone ID: MRT4577_91430C.1.pep
MPSAKFDEVYKKVSAMGEKLKASGAQGPSNDEQLKLYANAKIAQGADINAAKKPGMFDLTGKAKYNKWKEVADAGTTQEQAEQEYIKTGEEVLAKYDK

SEQ ID NO: 359934 - protein, 56 aa, Zea mays
  Clone ID: MRT4577_91431C.1.pep
TRTQCKEHYRQYYTPKHHSHYGLYAVPHSAKLILPFPNIHHVAIIPLLRKAQQSPA

SEQ ID NO: 359935 - protein, 142 aa, Zea mays
  Clone ID: MRT4577_91432C.1.pep
GMLPLAPVIVAGGSKNANPRCSLGCFADSRAEDRSAPQGRQVLPSAWDPAPLCTSPLDSSTSTLKSCSLLGTHRGYTQKDPRRAATHPHHRELRQGVSTYLLCRCTPSLQKFLLMPTHLCSTSSPRMLARLEASTVDDDDNS

SEQ ID NO: 359936 - protein, 269 aa, Zea mays
  Clone ID: MRT4577_91433C.1.pep
VYVRYQIDCGAQVVQLFDSWAGQLSPQDYDTFALPYQQKVVKLVKEIHPDTPLILYISGSAGILERMGKSGVDIVSVDWTVDMADARQRLGKEMKVQGNMDPGVLFGSQDFIKERILDTVRKAGQGGHIFNLGHGVLVGTPEDNVRFFFETAKQVDRKFSQESKHIEYAAVRFKDDYRILCNSKENAKKLLDILSHQLSQYNLSLNESKTSFLNLPDGLYREHNRAYFPHVLRRKKYISFRKFEHTLLIALDIHRKHPGTSIIEKFIAE

SEQ ID NO: 359937 - protein, 80 aa, Zea mays
  Clone ID: MRT4577_91434C.1.pep
PHSMSHGGSYIDDHCRCTSTSMPTVWHSARVAEPCRHTCTAGFCCTVSHCGGHETTAVTAIDPADAPRYDVHAWALRLPG

SEQ ID NO: 359938 - protein, 72 aa, Zea mays
  Clone ID: MRT4577_91435C.1.pep
APCFVDLEPFLWSGKLGLERDLLSGGCIILQGRHASYVHAMRRRAAICMPVHCVLCSAVRPGVLPRGFCCCC

SEQ ID NO: 359939 - protein, 51 aa, Zea mays
  Clone ID: MRT4577_91436C.1.pep
QKCYVLCSAPLGSGRSAIVAEAILGGAAKVWWVHIIFKNSEFLDGIFWLNL

SEQ ID NO: 359940 - protein, 83 aa, Zea mays
  Clone ID: MRT4577_91437C.1.pep
VRLFPVVHRGHGGARRRVLLLVGGLAIPAPRLGRHRVPTRQRGVAGGRMFYGSSLLALRTIELEGRSNGNSSLWPVANPIPDL

SEQ ID NO: 359941 - protein, 96 aa, Zea mays
  Clone ID: MRT4577_91438C.1.pep
TGRYKISPSNESLPCLPINRVGPVHAPRARRPAQAQHDYWTGPGTPLVGPGRVRAGLRPCRVTGPLPTRPVWTCIEESSHVFALFSASCCVVALPS

SEQ ID NO: 359942 - protein, 38 aa, Zea mays
  Clone ID: MRT4577_91439C.1.pep
ITSITPFPLRPPASTRTERDDGAESRLERKLELPDASH

SEQ ID NO: 359943 - protein, 263 aa, Zea mays
  Clone ID: MRT4577_9143C.1.pep
PRGRPGSLPSASSPPRGPSTTGGTGSGGGSGSGCTNQACAACKYQRRKCNTDCPLAPYFPADQQERFLNAHRLFGVRKILKTLENISPELSADAMATLIFQSDMRAQDPVGGCYHLILSLERQLQIEMAEHSAMVQRLALFRQAATTMPPDQGGGTVGLDYTASSKQPLFHNAQQEVVYALYKNNHGGGHGPNKDDHGGQQHQVFDYYINLDNMQQFHFNDSCAAVDKVDLTLAADEMRHHQHFDENCQIDNKDYFEIEAALA

SEQ ID NO: 359944 - protein, 139 aa, Zea mays
  unsure (1)..(139): unsure at all Xaa locations
  Clone ID: MRT4577_91440C.1.pep
FRPRHPSHMDTKLSHAELTHPDELDEEFDTFPSSRPAEIVRMRYDRLRSVGXRVQTVVGDLATQGERAHALLSWRDPRASAIFVFLSLVVAVVLYVTPFQVLMVIGMLYLLRHPRFRSRMPSVPFNFYRRLPARSDMLL

SEQ ID NO: 359945 - protein, 93 aa, Zea mays
  Clone ID: MRT4577_91441C.1.pep
MGGIPPIGLKMSSTFVGNSTSIQEMFRRVSEQFTAMFRRKAFLHWYTGEGMDEMEFTEAESNMNDLVAEYQQYQDATAEDEEYEEEEEEEEET

SEQ ID NO: 359946 - protein, 445 aa, Zea mays
  Clone ID: MRT4577_91442C.1.pep
MREILHIQGGQCGNQIGAKFWEVICDEHGIDHTGKYAGDSDLQLERINVYYNEASGGRFVPRAVLMDLEPGTMDSVRSGPFGQIFRPDNFVFGQSGAGNNWAKGHYTEGAELIDSVLDVVRKEAENCDCLQGFQVCHSLGGGTGSGMGTLLISKIREEYPDRMMLTFSVFPSPKVSDTVVEPYNATLSVHQLVENADECMVLDNEALYDICFRTLKLATPTFGDLNHLISATMSGVTCCLRFPGQLNSDLRKLAVNLIPFPRLHFFMVGFAPLTSRGSQQYRALTVPELTQQMWDSKNMMCAADPRHGRYLTASAMFRGKMSTKEVDEQMLNVQNKNSSYFVEWIPNNVKSSVCDIPPIGLKMSSTFVGNSTSIQEMFRRVSEQFTAMFRRKAFLHWYTGEGMDEMEFTEAESNMNDLVAEYQQYQDATAEDEEYEEEEEEEEET

SEQ ID NO: 359947 - protein, 55 aa, Zea mays
  unsure (1)..(55): unsure at all Xaa locations
  Clone ID: MRT4577_91443C.1.pep
MAQTVXVLKVGMFCEGCGGAVKRVLGKMEGVESYDVDILEQKVTVKGNVTPDAVL

SEQ ID NO: 359948 - protein, 234 aa, Zea mays
  Clone ID: MRT4577_91444C.1.pep
MAGTAKTPVLGFLLALVATSTPAAATTLTLHNLCPYPVWPLVSPNTGFPAISENTGRLDGGGRGLVSFRFPDSFWAGRVVARTGCSSGHSRCETGSVAPATVVQLVVHAEGQDLASYSVSLVDGFNVPAVVSPQAVGGGQCPALGCAADLNAGCPPSQRVLGAGGGVVACKGPAGYFKERCPLTRTTPTDVEPVPQRCLAPGELKVVFCQSAMVNAAAAAAAETERIRTVVADN

SEQ ID NO: 359949 - protein, 464 aa, Zea mays
  Clone ID: MRT4577_91445C.1.pep
MGDLLGSPRVARGRRTTPSRPRSRPKPKNLSPSSTLIPTMAAAATTPHSLLLQRAAIPAAPSRASAAASPVRLPVRAARISCAAVAAPSPAAAAAADEVERGVYNFAAGPATLPLSVLKRAQAELVDYHGSGMSIMEMSHRGKEFDAAIKKAESDLRALLAVPDTHAVLFLQGGATTQFAAVPLNLCTGPSDPADFVVSGSWSDKAFKEAKKFSAASVAWSGKDGKYTALPPFDAIAQNPEARFLHICSNETIHGVEFKDYPEPRNRSGILVADMSSNFCSKPVDVSRFGVIYAGAQKNVGPSGVTIAIVRKDLIGAAQPITPVMLDFKTHADNASLYNTPPCFAIYVCGLVFEDLLAQGGLAEVEKKNARKAGALYDTIDASGGYYVCPVDKSVRSHMNVPFTLAKGPDFEKQFIAEAAKEGMVQLKGHRSVGGVRASIYNAMPLAGVEKLVAFMKDFQARNP

SEQ ID NO: 359950 - protein, 91 aa, Zea mays
  unsure (1)..(91): unsure at all Xaa locations
  Clone ID: MRT4577_91446C.1.pep
MHIFDKTLTGKTMTXLEVEYSDTIDNDEAKLQDRDGIAPDQQWLMFPGEHLEDGRTLADYNIQKESALHLVLRPTGGMQILGKTLTGQTIT

SEQ ID NO: 359951 - protein, 63 aa, Zea mays
  Clone ID: MRT4577_91447C.1.pep
TVVIVGCYISGPKFVHDTRSSQPTDHEPTARIKGSNRYSLGPIPSAHLQSTATIQAPKAVRLN

SEQ ID NO: 359952 - protein, 65 aa, Zea mays
  Clone ID: MRT4577_91448C.1.pep
YCLSLGEPDITTIVSSPVRATPVADHISPMPGESVHSVKRQLVEHHQVGPTPVGTVVLEPNSELT

SEQ ID NO: 359953 - protein, 123 aa, Zea mays
  Clone ID: MRT4577_91449C.1.pep
APPLPPRPCPKHRRSSTSVFRLSSCQKVASLEGFEPVDDPRGSWPVFCALLRARKFKICSFLPCYQHAWVVEFGSWVPNRTLVSGQGVGGGGGGELASRAKAAARAWPCCDSCGGCTRPEPPW

SEQ ID NO: 359954 - protein, 52 aa, Zea mays
  Clone ID: MRT4577_9144C.1.pep
ARNSARACLQEKIVCALSLKTPSSELEGYCLMWNLRPYIDDDVMRLAWKMCP

SEQ ID NO: 359955 - protein, 64 aa, Zea mays
  Clone ID: MRT4577_91450C.1.pep
KQTGIFLAHSPLSYLTLFLAGTIDRMKPTRGLGSMGRPLPGGRGIKAMGAGNHFGERMGGKLFR

SEQ ID NO: 359956 - protein, 64 aa, Zea mays
  Clone ID: MRT4577_91451C.1.pep
KLVHLLVLEWFSMAWLVKFMIFKYRCRLEHLLHILLFNVLMWTFYFVNNYGNDCGAWKKIPLKF

SEQ ID NO: 359957 - protein, 86 aa, Zea mays
  Clone ID: MRT4577_91452C.1.pep
YNSKTLEKGINFFFNQGRGGNPEKKAGCPKTEFPHHHRLGAGPFGTLKGGERPFCALGGGGALWVFARPPTGGWNLGTHNLSGGRI

SEQ ID NO: 359958 - protein, 116 aa, Zea mays
  Clone ID: MRT4577_91453C.1.pep
CCIRSRALVPLVNNFLNQCSCLLHPINVCWYLSQISSHVMHLSPCQVAGLNVNPDLAYLDIVSKMRLILRDNVAMDTHPVSPSRFIDIFTADGGRPPINKLVEPPLYSVPAPAGGP

SEQ ID NO: 359959 - protein, 62 aa, Zea mays
  Clone ID: MRT4577_91454C.1.pep
YGEKKRRRSPGRKTIACISIFLTPIRIFSRLLKLFVIGFQKIWFLLVFFPCLNVFWKPWHGS

SEQ ID NO: 359960 - protein, 128 aa, Zea mays
  Clone ID: MRT4577_91455C.1.pep
MATLSYLPPVKPSAVALGTVYSHAISLAVLGPVFGDTYRQAQASNSKEEFFKSKEAASAASAWGTSLVGSAVQSYGVGALINATGTLSYKGAAYLGSLIFFASSAPSFIAQITTEKRPLEVHALAPPF

SEQ ID NO: 359961 - protein, 55 aa, Zea mays
  Clone ID: MRT4577_91456C.1.pep
RNNVGIYASIIRSNYVPLGTWAWVAPSGLFLTQKEDKQTQTILLRYLQLSIGLGL

SEQ ID NO: 359962 - protein, 88 aa, Zea mays
  Clone ID: MRT4577_91457C.1.pep
IITGVRQIKKRYYTESGDNKQKILKFFWWIVYMGIVVSRRNARGSHLKVLSSALPPLISLSCWRDLFRRGTRKHSFCVFGLYLGFKLF

SEQ ID NO: 359963 - protein, 39 aa, Zea mays
  Clone ID: MRT4577_91458C.1.pep
GRVTRRQGNSGVVRARFKWNLPPGSMGGRVRVFMSPSSI

SEQ ID NO: 359964 - protein, 165 aa, Zea mays
  unsure (1)..(165): unsure at all Xaa locations
  Clone ID: MRT4577_9145C.1.pep
LQRGAPMASSPARPAAASVSGAFGLPPDARCSFDQTRRRAEXVLPDYLSVCLSASISLLLPPPREVPRSRAFLRRGLMRVXRGKQDSQDKRQLVRTFVNVYGQEGYPKEAVMAAVEECMRKQAEGLLHSLEGIGGRLSQLELYCYKLERSIGELRSDVMDYHSEV

SEQ ID NO: 359965 - protein, 79 aa, Zea mays
  Clone ID: MRT4577_91460C.1.pep
FYWPNLNYLLHDEGLILLAWNPRISWPLGLPYVAATFQVKAEQLVIFMICASLKDAKKLGLYTLDQRIHSIVGELNVCL

SEQ ID NO: 359966 - protein, 169 aa, Zea mays
  unsure (1)..(169): unsure at all Xaa locations
  Clone ID: MRT4577_91461C.1.pep
MSCFVCFGSAAHDGESRKPPAAGAGKDVPPDRAVVRVGSDKSRSQGGPESKKDLIIHRDGNSQNIAAHTFTFRELAAATKNFRQDCLLGEGGFGRVYKGRLENGQAVAVKQLDRNGLQGNREFLVEVLMLSLLHHTNLVXLIGYCADGDQRLLVYEFMPLGSLEEHLHD

SEQ ID NO: 359967 - protein, 65 aa, Zea mays
  unsure (1)..(65): unsure at all Xaa locations
  Clone ID: MRT4577_91462C.1.pep
PHSAEEYLHWNPRNKMGVFMARTGNAVALGSDWHLGVGSADLALALDHQISTQAVPVSRMRPXCV

SEQ ID NO: 359968 - protein, 86 aa, Zea mays
  unsure (1)..(86): unsure at all Xaa locations
  Clone ID: MRT4577_91463C.1.pep
RVLWDLGPFVALSRSVWRACHLALLGSWVRGSLPCCSCCGSAVSSGVPGVRFVLXAVPERSGTRPLPCPGALARIRVSFLWGIXRT

SEQ ID NO: 359969 - protein, 98 aa, Zea mays
  Clone ID: MRT4577_91464C.1.pep
TLDYIKSHLYKIYRRQVLFIVRISNRTAACALKREQMLDYIKSNVYKNKFKVWQVVISTAGLVNERLLILYKKNGQYVLSSRKNRHIFSSFLLIQSAS

SEQ ID NO: 359970 - protein, 85 aa, Zea mays
  Clone ID: MRT4577_91465C.1.pep
GGRAIGDGENFFNEYACKFGGEISSGELTGDAPEEKTEINSDADTAAGDTPGCAVTGEAPDEKIAYIGIDEPIITEMTEQQTVAG

SEQ ID NO: 359971 - protein, 53 aa, Zea mays
  Clone ID: MRT4577_91466C.1.pep
VVWCCLPFCNVGGGFLLFCALPRVRAFLCASLVADLVLYPPPETVRFLGSVSG

SEQ ID NO: 359972 - protein, 75 aa, Zea mays
  Clone ID: MRT4577_91467C.1.pep
SRLVLSVKCLSLVSISSSWSSHISCTSSERLLVSQHVLSAKLVLERLLVHGGADRRQCPSDVHYGVVGVDSCLGL

SEQ ID NO: 359973 - protein, 42 aa, Zea mays
  unsure (1)..(42): unsure at all Xaa locations
  Clone ID: MRT4577_91468C.1.pep
LIAIAVHLMIWLPDXXIXXMEFGSKMFQKAXGRFXSASNRST

SEQ ID NO: 359974 - protein, 79 aa, Zea mays
  unsure (1)..(79): unsure at all Xaa locations
  Clone ID: MRT4577_91469C.1.pep
KKIRARDQAAPQPAPDQGAGGGRQSRAAGYPGPRTARRKARSALRPAGERPAAEAETGHGGALEQPLGXAXXGPGRRVN

SEQ ID NO: 359975 - protein, 48 aa, Zea mays
  unsure (1)..(48): unsure at all Xaa locations
  Clone ID: MRT4577_9146C.1.pep
PVSWQFLTGAGLGXDVAPKYGRCFCAPSSRSEDTSHLKSXVGTCNFKS

SEQ ID NO: 359976 - protein, 115 aa, Zea mays
  unsure (1)..(115): unsure at all Xaa locations
  Clone ID: MRT4577_91470C.1.pep
MCYEKCHINIADIVHVXDSVKLTTTGHLIYKLESVGSLLIYKLDKEGGEMNNRSFKYTMVLDXLKGDRARCITIDIALGKFETTKYYWTGIDAPGHREFIKNMITGASQAGCAVL

SEQ ID NO: 359977 - protein, 207 aa, Zea mays
  unsure (1)..(207): unsure at all Xaa locations
  Clone ID: MRT4577_91471C.1.pep
MASRAAAAIAVLALVCAAVHSSEGQLSPNFHAATCPDLEHIVEFHVAETFRRDVGVAPALIRILFHDCFPQGCDASVLLKGAGSELNEVPNQTLRPVALDLIERIRAAVHSACGPTVSCADITVLATRDSLVEAGGXRFDVSLGRRDALAPASSALVXLLPAPFFDVPTLISSFSNRSLDVXADLVSLFRAHTFXVXHXPAFEDRFK

SEQ ID NO: 359978 - protein, 180 aa, Zea mays
  Clone ID: MRT4577_91472C.1.pep
MASRAAAAVAVLALLCAAVHSSEGQLSPTFHAATCPDLEHIVEFHVAETFRRDVGVAPALIRILFHDCFPQGCDASVLLKGAGSELNELPNQTLRPVALDLIERIRAAVHRACGPTVSCADITVLATRDSLVEAGGPRFDVALGRRDALAPATKDQVGLLTAPFFNVSTLDSSFGDREPR

SEQ ID NO: 359979 - protein, 112 aa, Zea mays
  Clone ID: MRT4577_91473C.1.pep
RAGTNACHPRHHRRNVTRISYPTIKGRCQGSPTPQLYDPHHPRLPSTPTLSMVGRRGSTPSRPPPHLLCPTLLPTPSMARTNPKWPRVRPTLLPTQSMARAGRVRGRVRPAG

SEQ ID NO: 359980 - protein, 209 aa, Zea mays
  unsure (1)..(209): unsure at all Xaa locations
  Clone ID: MRT4577_91474C.1.pep
MEVAAATCTLLAAVALPVSSSAAAARSATKQSYSRRKTTAVRAVMARPHQVPPPATATATATTYRDNWFDKLAIGYLSRNLQEASGMKNGKDGYEGLIEAALAISALFRVDQQWDTVASALQRAFPSYILTMIKVMMPPSRFSREYFAAFTTVFFPWLVGPCXRFLESTNCVGMCTNLCKIPCQRFIQDSLGTAVYMSPNFEDMSCEMI

SEQ ID NO: 359981 - protein, 189 aa, Zea mays
  unsure (1)..(189): unsure at all Xaa locations
  Clone ID: MRT4577_91475C.1.pep
RPAGPGFCKRAPPRPLSPRPQSPPPSSRLPRPQISTAAAASXPXPPSSQESSRRKPPRHHRTSHLPSPTITDRPASVLPSRNPRKPSSPRVCAPAPGHLPTAAAAPSGLRWSGTPPPRSDPSVVRPSCPRRPSPSYSRPRPAPSRKDPLPLLPPPAWSPTPAHGGAGHCLAGSRSHRDPTTRPRKADTR

SEQ ID NO: 359982 - protein, 88 aa, Zea mays
  Clone ID: MRT4577_91476C.1.pep
PKRNGGNNISWVRKNVPSLDTEIFQTIAGLGKGGKTKRGPPPNRGPENKKHHEGGLGQILKKPKQRGLGRCHVKPKEGTFNHEGAFCT

SEQ ID NO: 359983 - protein, 260 aa, Zea mays
  Clone ID: MRT4577_91477C.1.pep
MEVAAATCTLLAAVALPVSSSAAAARSATKQSYSRRKTTAVRAVMARPHQVPPPATATATTYRDNWFDKLAIGYLSRNLQEASGMKNRKDGYEGLIEAALAISALFRVDQQWDTVASALQRAFPSYILTMIKVMMPPSRFSREYFAAFTTVFFPWLVGPCEVRESQVDGREERNVVYIPKCRFLESTNCVGMCTNLCKIPCQRFIQDSLGTAVYMSPNFEDMSCEMIFGQQPPEDDPALKQPCFRTKCIAKQNHQVNCSI

SEQ ID NO: 359984 - protein, 122 aa, Zea mays
  Clone ID: MRT4577_91478C.1.pep
CREGPSPHPFNPGAPRRLQHSMEFGARDPREKTPPNPWEPIAQGGPRPTPGGQGRPIGSKKNPGIPGPCPEGYPLFLKGGGLQPGGNKGQTVSRGKKLFAHKFPQKTRREPKRENPGGPTGG

SEQ ID NO: 359985 - protein, 64 aa, Zea mays
  Clone ID: MRT4577_91479C.1.pep
LDPMFLTGTMGMGIAVALVLNSSRGYCPRPDQYALSLHLHASPPALMQPAVSILQKKSSYLVNC

SEQ ID NO: 359986 - protein, 62 aa, Zea mays
  Clone ID: MRT4577_9147C.1.pep
TCMCQWLWSRLGWCSSRVSGRGHCGASAPLRTRAGSWGHLVPWSLDKQCFGGSGQLCGVCVL

SEQ ID NO: 359987 - protein, 79 aa, Zea mays
  Clone ID: MRT4577_91480C.1.pep
LLGYLWSIFPFPLPLVYSPLLSSTNQPPASLYVPIIQGHPALNLDLWLQQHRAWRGVPVSTRRLVSIRASAPRVRQSEV

SEQ ID NO: 359988 - protein, 69 aa, Zea mays
  Clone ID: MRT4577_91481C.1.pep
PPQKKFRLGYKMISLWMGGAIMGSGEAFGMRKAVGFPFPLPVTPFFSVKIKCPARRFFFFLIPGFFFCP

SEQ ID NO: 359989 - protein, 128 aa, Zea mays
  Clone ID: MRT4577_91482C.1.pep
QFNRMPNQAVVSGLGLGPPPPGMAAAPKASPPPGQDLPPFPPFGAAAAPPDDNRGVLLFIVVPPPLGWGFFNILQPGVNQINRIKSDLPASWQQPRGRRSVGITGWPVVIYSVKHGWFPALVFSLFEF

SEQ ID NO: 359990 - protein, 106 aa, Zea mays
  unsure (1)..(106): unsure at all Xaa locations
  Clone ID: MRT4577_91483C.1.pep
MTDASDASYLAQGFNSLFTKTNRRTGNTHGRTETPQYNNGERLPCCEKIGLNKGPWTHDEDKVLVGHIQSFXHTNWSTLAKQALLFRCTKSSQLRXINYLSHDIKR

SEQ ID NO: 359991 - protein, 201 aa, Zea mays
  Clone ID: MRT4577_91484C.1.pep
HHLPQMAVTAALNGVGLALQIPAIYAFVADSVDGASRGMAFGWLAVAGKAGTVAGTSLGLLMAPTSFLGLPGWRLAFLLLGVLGAAVGVSIRAFAASDGAARGRVVVSPATSKPVRQEVQEFVREAKAVMRIPSFQVIIAQGLTGSFPWSALLFTAMWLELVGFSHGETAALMTLFKVATSLGALFGGKVGDVLARRFKNS

SEQ ID NO: 359992 - protein, 81 aa, Zea mays
  Clone ID: MRT4577_91485C.1.pep
DHAESWSNRLIASLVSPSVTCMRLKQDNRNVVFADLYPVGVKCPILCLRLLVSIGVSIALCLCMPVIPLFLSLKAQWEIFT

SEQ ID NO: 359993 - protein, 81 aa, Zea mays
  unsure (1)..(81): unsure at all Xaa locations
  Clone ID: MRT4577_91486C.1.pep
EELNGDIVLHATWRIPDSQSLDLSAACVXETDRVXTSRLKHXSRTSDPSVXALGDVASPMTLTPVALMEATCFARTVLGGQ

SEQ ID NO: 359994 - protein, 109 aa, Zea mays
  Clone ID: MRT4577_91487C.1.pep
SERERERERWSKGLVSSCGDSLLVVRRYAQTTQCRTNKKKRKEDAGYHSFGSSFLSCFPPESTFVFLASLNPVMYKSAPRVAVHSDSSCSVTVANPSSSSADTAPWAGN

SEQ ID NO: 359995 - protein, 95 aa, Zea mays
  Clone ID: MRT4577_91488C.1.pep
LGPMPYYPRRCRVCLPNLSWRKKTKNFMYQTTHHFFMVCTLIMRPPISKLPYESSCCVSLRSMNCFIHLGHSFLVLVQLLLRSTYTMPYSFVDTG

SEQ ID NO: 359996 - protein, 74 aa, Zea mays
  unsure (1)..(74): unsure at all Xaa locations
  Clone ID: MRT4577_91489C.1.pep
LGGSXVRLYRPDXIHHVEXNXVVMRXXCVICFLSVMFIFYVLIGRMLLFCFXMVSYXFSAIPXXXXYVCCEGDI

SEQ ID NO: 359997 - protein, 67 aa, Zea mays
  Clone ID: MRT4577_9148C.1.pep
QFVFYGKITRALNIWRENIKGDKQYGGDFWIPHTQVLSLDNTKLHKVGGPVQKNHYDVGRHEKFFTL

SEQ ID NO: 359998 - protein, 107 aa, Zea mays
  Clone ID: MRT4577_91490C.1.pep
GPKSAKQKSYLRIRICPRKISRSSLRILIANRLRILKLNKPKKPKKLKRQKNVAPPQGEGPEFRRTIHAHVMHPRPSPRQASESARVWISTISHIIHDLVNECGLHI

SEQ ID NO: 359999 - protein, 201 aa, Zea mays
  unsure (1)..(201): unsure at all Xaa locations
  Clone ID: MRT4577_91491C.1.pep
MSDEYVDLPVSDIDEEELEDEMDDGDGESGGGSSKKKAKQHVEQLKRLQQKDPDFYKYLEEFDKDLLGFDDDDDEIENDRETGVEEKEQYVSKEELKHVKPITMEMVDSWCNGVENEKIGSIRSILQAFRRACHYXXEDHGDNSTPKLSVMSGSVLDKVMHFVLKHMDKVLRQLLGAPSYGGKKEVISELMLSKSWKRHGN

SEQ ID NO: 360000 - protein, 163 aa, Zea mays
  Clone ID: MRT4577_91492C.1.pep
SHFLPPSTANLAPTFCSIIETRREKQKRLAMDNENKKVHVRAHGRVLRHQGVDWRPLRRGGGDPGVEAGSGGSHLRAAGGGGRASAGGASVPAHVVIDILEGVSKEAEKAKGVAPWQPSSRPVSHGEQFQSRGQFQGTTQGTGQQQFPSVPPQQLVALSSPFP

SEQ ID NO: 360001 - protein, 65 aa, Zea mays
  Clone ID: MRT4577_91493C.1.pep
APADVPSWFVAMYAPKIEQSIVDITVVIVVSGLMLSRVGACRDEQIGSHKLKRSYIEGRRNEAQL

SEQ ID NO: 360002 - protein, 99 aa, Zea mays
  unsure (1)..(99): unsure at all Xaa locations
  Clone ID: MRT4577_91494C.1.pep
VALNNYMYPLRSTKLYTFLIKKARSQNRGDSWGLIHHLLPFLEVQSLGALPEEEDQQKDVAEMPQHDVAEEVVLHAQVLFQKFLHHEWAGGARXLFFLA

SEQ ID NO: 360003 - protein, 103 aa, Zea mays
  Clone ID: MRT4577_91495C.1.pep
KTRADAHASDRLFALLFTLFSSRSRTRDIGKITREKEMANNKDKALNVSGKPRHSNDVDRPNDNTGACTPLQLLEHFRKYRSADLDVQDACHDGPLREGAQER

SEQ ID NO: 360004 - protein, 61 aa, Zea mays
  Clone ID: MRT4577_91496C.1.pep
KKYRYEVPLHDRLYIPPGGGILEADKLKPSYLGRVNKKRQLRPDTITPQYASTVMAAESHK

SEQ ID NO: 360005 - protein, 118 aa, Zea mays
  Clone ID: MRT4577_91497C.1.pep
MAAPPTSAPRRTALPLPLVLVSAVLLLLLLLSVVAGHATRAVAAASSTRSQEEQQRDVSKVGAEERSSMSMSFAAGDDERCGSEGVGGGGEDEECLMRRTLAAHTDYIYTQGQGGGHS

SEQ ID NO: 360006 - protein, 132 aa, Zea mays
  unsure (1)..(132): unsure at all Xaa locations
  Clone ID: MRT4577_91498C.1.pep
DFLSSPTGFPPPTQRNKKRAEKSLPTYKAPPTPPGKTTPRVGPPEKAAPRPDAPHSFSLRRHKNPGQKKXKTPSSPKKNFPXKSPKQPPRKKKGKPPGPXEGPTPPKWGGAPPPLLXEKPPPPPKKKNPPPG

SEQ ID NO: 360007 - protein, 95 aa, Zea mays
  Clone ID: MRT4577_91499C.1.pep
RFPNSSALSRALAMATKYAAAAADLVTGRPRKRARFGWDVASAAEVNAPHRLLSSPICCNSGYCSPLHAAIPHRTIIYPVRYQYLVMVFVDTLIF

SEQ ID NO: 360008 - protein, 152 aa, Zea mays
  Clone ID: MRT4577_9149C.1.pep
HNTLIGERNNTYKQIHRYVATKNGLKELYPGCHNGTGYVVRIPFVHHPTHLPSRQGLQAWNTRVSPLTLATSLTWRSLSMAATISPLHSRRDQLVLACSTPMALIKYPLCIRFATKVATTGSPMMSSPTTSTMSPPTRPLSACNQTLIRDDE

SEQ ID NO: 360009 - protein, 75 aa, Zea mays
  Clone ID: MRT4577_914C.1.pep
SNHISCMGTLTQTPMENGQVPGGNKTGRVHCLAGGNAITLIKVRTVVNLIKQEGLLILIHRSGSGGVRFPCRLCG

SEQ ID NO: 360010 - protein, 86 aa, Zea mays
  Clone ID: MRT4577_91501C.1.pep
CTEYSTTTRYKSARLQGIKPAAVLPASDSRQVPLHCIPNSQENIVRTSQMVQTLGFKVQILHSSQQSSSPQQSSSSRLKSASDSKR

SEQ ID NO: 360011 - protein, 135 aa, Zea mays
  unsure (1)..(135): unsure at all Xaa locations
  Clone ID: MRT4577_91502C.1.pep
GISLSSYILPAAAVGAMGPCYMRRKGWPLSDVMFATKHNMANAGQSMSKQPEQVXDXLAAPKRHITQPVENTDASSDEQEEGSTAITNXVKDVKDDLSQLEWEVRSMDMMGAGLEGKIELLENKQDATDTGIWHL

SEQ ID NO: 360012 - protein, 161 aa, Zea mays
  unsure (1)..(161): unsure at all Xaa locations
  Clone ID: MRT4577_91503C.1.pep
KRRPTPHARQRGXPXPTPPRSPXRAPPSRRREGARGRGGRXRGARRGGGGGXRNRSPKRRSXPTRGPGRTPTXRSGQERGKTTQXEAGQAKTHTETERXQRQRPGKEDRKKXRNXXXHKGHRKTEKRRTDEAASRAQTAGASEEEAKNQRKKATPGPTREK

SEQ ID NO: 360013 - protein, 64 aa, Zea mays
  unsure (1)..(64): unsure at all Xaa locations
  Clone ID: MRT4577_91504C.1.pep
GVASFNKGGPSRGPLFRFSGRKKGAAKFQPSAGWARFPGXFFFWGFSGVFWAFFSFRGWPSPFF

SEQ ID NO: 360014 - protein, 105 aa, Zea mays
  unsure (1)..(105): unsure at all Xaa locations
  Clone ID: MRT4577_91505C.1.pep
YKSARLQGIKPASVLPVSDSRQXAIALHHKFTRKYSSNFTDGLDFRLQSPNSPQQSAIQFSTAIQFQSSVVHQRQRAVSVVSRDACRALEVAPASGHRCTEERDG

SEQ ID NO: 360015 - protein, 97 aa, Zea mays
  Clone ID: MRT4577_91506C.1.pep
NNAPDRESKHQPAFIWEAKSQGFAIHFPKNSAIVQPPGPLFLLKQKPFIFLDPKTQNKGGNNPPGGPHHINRGALLPWEGVLGFLGGGLPLRYTGGN

SEQ ID NO: 360016 - protein, 85 aa, Zea mays
  Clone ID: MRT4577_91507C.1.pep
PSSMMFSKSKRSFYVFRLIYDDCCWGLILKCYELRTRQHKMLKVKGPSSIEALFPLGYNDLQKKVTKDIPSSSQYIVMKEEAYET

SEQ ID NO: 360017 - protein, 83 aa, Zea mays
  Clone ID: MRT4577_91508C.1.pep
FGFAPLPNGPNNVGAEPKTGGSLFPVAFQILVNNQPAPKPPVESVKTLNNPIFCPPQKIKTALQCYALLSRVPPRGGGGDYQP

SEQ ID NO: 360018 - protein, 126 aa, Zea mays
  unsure (1)..(126): unsure at all Xaa locations
  Clone ID: MRT4577_91509C.1.pep
SFERTTAIKEGLVFNADEADHAAALERXKECAGMPANIWKLAKREMRRVRKIQPYQPGYSTXRAYLELFADTSXQKASEQRELDLIAAKESLGQSXYGLXPKFSYRIIEFFXVNRLKPCCXGPGLC

SEQ ID NO: 360019 - protein, 112 aa, Zea mays
  unsure (1)..(112): unsure at all Xaa locations
  Clone ID: MRT4577_9150C.1.pep
FSFSPSAQTLAIKFGFHHCXDQEWVKLPAQCQKAIPSRKDGGTDTIGENMIVHSGLYAVTXHLLMAIXGMITIPKGRHRDEQEWRELFSKAGFSEPQIVKQFGDRVAFKVYP

SEQ ID NO: 360020 - protein, 124 aa, Zea mays
  unsure (1)..(124): unsure at all Xaa locations
  Clone ID: MRT4577_91510C.1.pep
MKSFFYINSLKASCYXSCLDGPRCILAGDHLQLPPTIQSVEAEKKGMGKTLFERLTEAYGEEITSMLTVQYRMHEHIMSWSSKELYNNKIRAHSSVAGHMLYDLEEVTRSSSTEPTIVLIDTTG

SEQ ID NO: 360021 - protein, 83 aa, Zea mays
  unsure (1)..(83): unsure at all Xaa locations
  Clone ID: MRT4577_91511C.1.pep
FNQLEALNPDGYLQQQILLPFSQIVAANSASLLRXQQLLPFXEQFVANLGTLLXYNXLLPFVEXDLPPPEVLINKXIIGGALF

SEQ ID NO: 360022 - protein, 647 aa, Zea mays
  unsure (1)..(647): unsure at all Xaa locations
  Clone ID: MRT4577_91512C.1.pep
MAGRGGGGKGAAGRMMSLQEFVSCMQPLIDLEKAAEISAESETSAKSLERRGCVIANLKCTDAQTGLMGKTLLEFQPNKGDVLPSHKFGTHDVVALKPNKADAGSASLGQGVVYRLKDSSITVAFDDIPEDGLNSPLRLEKLANEVTYRRMKDALIELSKAVQTGPCANLVPVLFGEKAPMRSKDAMKFSPFNKNLDDSQKEAISKALGSRDVFLLHGPPGTXGKTTTIIEIILQEVKRGSKILACAASNIAVDNIVERLARYRTKLVRLGHPARLLPQVLDSALDAQVLRADNSSLAGDIRKEMKVLNSKLLKAKDRNTKRDIRKELKTLAKEERKRQQLAVTDVLKNADVVLTTLTGASSKKLNGITFDLVVIDEAAQALEVACWIALLKGPRCILAGDHLQLPPTIQSVEAEKKGMGKTLFERLTEAYGEEITSMLTVQYRMHEHIMSWSSKELYNNKIKAHSSVAGHMLYDLEEVTRSSSTEPTIVLIDTTGCDMEEVKDEEESTMNEGEAAVSIAHAKLLVESGVNASDIGIITPYAAQVTCLKMMRNKDAKLKDLEISTVDGFQGREKEAIIISMVRSNSKKEVGFLSDHRRMNVAVTRARRQCCLVCDVETVSSDRFLKRLVEYFEENGEYLSASEYQSS

SEQ ID NO: 360023 - protein, 41 aa, Zea mays
  unsure (1)..(41): unsure at all Xaa locations
  Clone ID: MRT4577_91513C.1.pep
SSSSRNCIXSRGQSSTTSAARAADKMDATHLYAPWCPFTRV

SEQ ID NO: 360024 - protein, 39 aa, Zea mays
  Clone ID: MRT4577_91514C.1.pep
LLIFFFFFFFFFFFFFFFFFFFFFFFLLNFWTQCSLNYM

SEQ ID NO: 360025 - protein, 148 aa, Zea mays
  unsure (1)..(148): unsure at all Xaa locations
  Clone ID: MRT4577_91515C.1.pep
KKGEKKKKKNLGKKTLWPILKKKKFFPINQKRCIKLGFNLQQQKIPLSKELVANPKQFFPFNKLEELNFPAYXKKQQLLPLSKLGGVSPATFLKKPKLLRFNKNGGPNVGTLLKLQKLLQLNQLVLKNQEGFYQQPIIGGPLFKIFYE

SEQ ID NO: 360026 - protein, 231 aa, Zea mays
  Clone ID: MRT4577_91516C.1.pep
MAAATCLPLFVLVSVLMAASTSPSSAAETPQELLLDFKASLQDPSGALSAWSSSTPYCNWPHVACAISAAANATVSVSISLQGLGLSGDLAASSLCRVRGLIALSLASNGFNQTIPLELSRCASLASLNLSAGAFWGPLPEQLAMLTSLVSLDLSRNSFEGQVPAGLAALGGLQVLDLGENLLSGVLHPALFGNLTSLHLLDLSRNQFLDSELPRELGRMSSLRWLFLQGS

SEQ ID NO: 360027 - protein, 107 aa, Zea mays
  Clone ID: MRT4577_91517C.1.pep
YITVLLRLILPCPAVLLDNKTQIPVRQTNQRCIPTARTTPTSRRVAQRQTPEERARSSPAATTRTHRPQPPPAHHSSSQRRCRRDRGPRGSHPPPRRSAAGGLPPWP

SEQ ID NO: 360028 - protein, 66 aa, Zea mays
  Clone ID: MRT4577_91518C.1.pep
IPTLQLLFFLLLSLSSASSLRPSSDGSTSRGKGISGGASRWTENVDQLEGQLQGCATACCHSASTR

SEQ ID NO: 360029 - protein, 107 aa, Zea mays
  Clone ID: MRT4577_91519C.1.pep
TSGPREQHRAVAGGASAISREEGWATLAREEDQSSHRRGSCRGELDHGDPGRPWLVKALRGCQHGGNSRATTRERLGEHQRAAPAWRGMREGLAQEGRTKGKGGRER

SEQ ID NO: 360030 - protein, 181 aa, Zea mays
  Clone ID: MRT4577_9151C.1.pep
MELAWSCCCFLLAACARSLRRLLQLPALLCCEAMAWAVTFLAFPLRMLTAVERERKLGWLVAEMQAQMDDLALENAALEDRLRAALREREAVEAVLDDVEDEHEDALARIHVLDAQLKALRQENVRLNEHKGKSRWDDKPAAQAQAASHQSDDKLKPAGKRDREDAAVATTAQSANHAGGG

SEQ ID NO: 360031 - protein, 88 aa, Zea mays
  Clone ID: MRT4577_91520C.1.pep
TPIITQDALQCTKMGEFHAQMNAMAQNLSFTPWFDVQTTLLCLHILNSLIAKSHIINRYIILSYYKNKHNHQPTKCTVIKSKLVINQQ

SEQ ID NO: 360032 - protein, 199 aa, Zea mays
  unsure (1)..(199): unsure at all Xaa locations
  Clone ID: MRT4577_91521C.1.pep
NGTTKGTLHRAEQPEPYAAGRTQPVLGSQARHGRRKRRKSFRWRCSEGWESGGEWREDGDNGXKVPFHSMFKCADRTDVLLMLAGMVGALGNGMSMVVMTIIFGQMVDAFGGATPDTIVPRVSKVLPPMQAIYSLQXEISCWTMTGERQATRIRSLYLKSVLRQDMPFFDVEMTTGQVVSSISADMTLIQGAIGEKVST

SEQ ID NO: 360033 - protein, 156 aa, Zea mays
  Clone ID: MRT4577_91522C.1.pep
MLTASMELQMGDSQITGNYNDSALAELSPAITEYRDFSQPALEETSKTISEDDGVGRTEKSKILGGEAFLESIIALQLQQSLDGKEFSVILAESDLEQKLPEHNIVHSQASKDYDSQTDYAAFCQLPEQVTTVETADVYDFMATQSNSKTEDDQSK

SEQ ID NO: 360034 - protein, 66 aa, Zea mays
  Clone ID: MRT4577_91523C.1.pep
LSRGEKQLMLEAKIVIRSELPHHGISRIGKRPSFCFLDYCREQRFTRHPQGPGTTGQGEIRPENSR

SEQ ID NO: 360035 - protein, 559 aa, Zea mays
  Clone ID: MRT4577_91524C.1.pep
MSAAGATAVCTRDGGLLPLRPHCARSSSSFAAAAAAIVIYLTAPGLAVLPMRVMASDSIASVKLRVQTSRGVRARKQKLVFGGRELARDDGRILDYGVADGNVVHLVIRVPDVRLITVETVQGGKFRFRVEPGRTVGYVKQQIAKDHPAAARPGEQRLVLEGEDLDDRHLIHDVCRADGAVIHLLVRRSVVARDAGSGRPSPPPRRDDVRIEPVGGDHKAAVRGMVDAALAGMESGNAPIMSSEGTGGAYFMRDATGQRHVAVFKPADEEPMAANNPRGLPVSSTGEGLKKGTRVGEGALREVAAYILDHPPRSGTADDGFAGVPPTALVRCTHGAFRQGGAGAGARAPVPKLGSMQAFVSNCGSCEDMGPSAFPVQEVHKICVLDIRLANADRHAGNILVRKHDGGGGGGMSLVPIDHGYCLPESFEDCTFEWLYWPQCREPFSDETVEYVRSLDAEEDVTMLRLHGWEVSRECARTLRVATMLLKKGVERGLTAFHIGSIMCRETLTKESAIEEIVREAAERGGGCETVFLQAVSEIMDRRLDDISKDMLASRYAHG

SEQ ID NO: 360036 - protein, 110 aa, Zea mays
  Clone ID: MRT4577_91525C.1.pep
MSLEDSFKERVAMWRREHDIIYNQLPVLLEKMDILFPAENMENSEPENKSETKNLVAPLPAVTPEEIGERYKDLEESIRGFIKDLDEAEKEEEEDGGTSEAASPSSVDDE

SEQ ID NO: 360037 - protein, 547 aa, Zea mays
  Clone ID: MRT4577_91526C.1.pep
MSGDHAKREIVTGDKAKSSGRKNEWTPSRESSDKYKEESASSIKSHRKGKPPYFDGKDYCMWSDKMRHHLTSLHESIWDIVEFEVQAPQVGDEDYDSDEAIQIRHFNSQETSILLASLCREEYNKMQGLKNAKEIWDVLKMAHEGDKVTKVPKRETIEGELSRFILNKGEEPQAKYNRLKTMVNQVRNLGSTKWDDYEMVKVILRSLVFLNPTQVQLIYGDPRYKQMSPEEVIGRFVSFELMIKDSKHIVNLEQGATSTLEVQPVAFKATEENKEESTRSRLPIDASKLDNEEITLIIKCFRPILKQKKGKDYKPRSKRLCYRCGKSGHFIAKCPYTTDSDRDDDKKGKKKMEKKRYYKKKGGEAHIGREWDSDESSTDSSDDKDATNIAINKGLLFPNISHKCLMAKNDKRKKVEKCENLSKELNICNDSISCLRDENASLNAKIEELNACNISTSTVEHITICTRCRDVNIDAIDDHLTIIKEQNDHIAKLNAKIAEHELENENFKFDCSMLYNGRHPGIKDGISFQQGSQSNTKLNAPKNRLSN

SEQ ID NO: 360038 - protein, 188 aa, Zea mays
  Clone ID: MRT4577_91527C.1.pep
MAAVAALSWPAPPRVFRCAKTLPAPSAATSSRGRVGYGSSYARRWQCRRWAHRPDAATTRIRRATPRRTAVVRVNCAYSPRAETITACSWNEYVICSDVPVLIEFWASWCGPCRMVTRIVDEIAQEYSGRIKCYKLDTDDYPQVATAYSIERIPTVLLFKDGEKIHSITGTLPKAVYVKAIEKSISEQ

SEQ ID NO: 360039 - protein, 240 aa, Zea mays
  unsure (1)..(240): unsure at all Xaa locations
  Clone ID: MRT4577_91528C.1.pep
MLSAAFAVHPAAVAPRLHSVRQRQQFCAPIGTATPRRRLPVAMLSVTNAVTTQSRESAPAAPRKLSFPILVNSCTGKMGKSVAEAAVSAGLQLVPVSFSAIEVPDGKLNICDRDIHIHDPSESERILRSIAKDYPDMIVVDYTVPDAVNANAELYCKLGLPFVMGTTGGNRQLLNTTVQDANVYAVISPQMGKQVVAFLAAMEIMAEKFPGAFAGYKLEVMESHQAXXLDVSGTXQAVIS

SEQ ID NO: 360040 - protein, 139 aa, Zea mays
  Clone ID: MRT4577_91529C.1.pep
TVQNMLIPGRNVLPDSLGGASFWLGAVFTTATSLDSILLGGILFSFLKHPKQLIFSQRLSLERTDQSADLVVLTMGAPVVGRVYMPHPPSSLPPCADDLAYSLSIVVGALCAVNVISVGGNVVRRDEHLLHAFARRRIC

SEQ ID NO: 360041 - protein, 200 aa, Zea mays
  unsure (1)..(200): unsure at all Xaa locations
  Clone ID: MRT4577_9152C.1.pep
FGTRRPPRPIPLTPPRPQSPPPRPRHPSPPPATSRLARHQLTAALLRTWFVFSFARAASRLVSSNAAGVGSLEVGAAADTSNASKQGLGEPSANHSSLGGSPPPVQIWARKARARCPWPRRGVRPRRSRKTAARLLHLRGQLGVPAALLPPVSSEEAAXSTQESGGLEDEELQVQDAVASGSKRSXDXAAXXTRXANVSS

SEQ ID NO: 360042 - protein, 71 aa, Zea mays
  Clone ID: MRT4577_91530C.1.pep
RFHFLELVHIGPRKYLARPFVFNSGFCYRSNYNLCPCKVSNFFISLSFSIIKRSRVDLRFVAFGWFGLGQC

SEQ ID NO: 360043 - protein, 55 aa, Zea mays
  Clone ID: MRT4577_91531C.1.pep
CNMAERAALSHKVPGTLGMRNGNEEPGMSVKATWNGDGYTADPRSFDKWNMFPPI

SEQ ID NO: 360044 - protein, 69 aa, Zea mays
  Clone ID: MRT4577_91532C.1.pep
APPRVNALSQWPRGGPSWATRSRCSRRLPPMASRALKMLELVFSVSPCVPLSYRGSWPWSPMLCIPSSR

SEQ ID NO: 360045 - protein, 816 aa, Zea mays
  Clone ID: MRT4577_91533C.1.pep
FIESHTLETGALGEATVNLADYADALKPSAVTLPLKGSPGTLLHVTIQRVVGGAGGYGDDASESGDASPVAKTPQRRTTLQNQLSRFEDEDGEKARAATDAMSPVQDGLLITKPPGMRFPSRRNVPMSVDPVGHLHNGSSFDAVSVSGSDASSGRYTPKISATMHNSYLQDSSNALSPFANNGTGRNPLTSSGDWSGSSLLMLVQGAKRMIHDSNGSEKRLSDGDDPWSQIEELKQDLNHEKNLNADLRLQLQKMQESNSELLLAVKDLDESLDKKNREISILQEDTQEDPQEAEYEHALSNVHNSGQKLALSETSSYQEKEDELMLDALAKKRDDISTSELEKKVLELSNEIELYKKDREDIEMQMEQLALDYEILKQENHDVSSRLEQTQLREQLRMQYECSAHLAIISDLEANVESLDNELHTQAKKFEADIAEIMSAKVEQEQRAIKAEDSLRKIRWNNATTAERLQEEFKVLSSQVSSAFSANEQQLVQARKEVAELQLQKSQLEELLQKAQGDLGSVQDQHRVKVQQLITLVDFKSKEIDRLLMELKSKSDEFHNQKRCDEAKLNALSEEIDLLNSKIDKLSSERNELFEKNEQKEKELAGISEKDMQLQDKTAEITSLNKELVFLKDQVKMHLDELHSLKRLKNEREETIGKLQIDIGSLKLQCDNLKTSLSKKESEKDSLASQVLKLRRSVETRERAKANGQISDVKDNQHANNKRTKHNTGSTGSIAALPGTNRQGEDGDCNGPDMRNSTDQSAKELASLKEKNRAIEEELKELHERYSEISLRFAEVEGERQQLVMTVRSLKNSLR

SEQ ID NO: 360046 - protein, 201 aa, Zea mays
  Clone ID: MRT4577_91534C.1.pep
AGRILVVTVCSPLKHEPPRCLNYLTSPHVLIWSAVTASCAFPGLFEAQELMAKDRFGQTIPFHAPFLLGMEERTVAPTFRWRDGSLESDLPMKQLKELFNVNHFIVSQANPHIAPLLRLKEIIRAYGGSFAAKLAELAEMEVKHRCNQVLELGFPLGGLAKLFAQDWEGDVTVVMPATLAQYSKMIQNPSYAELQKAANQG

SEQ ID NO: 360047 - protein, 140 aa, Zea mays
  unsure (1)..(140): unsure at all Xaa locations
  Clone ID: MRT4577_91535C.1.pep
QDNQHANNKRTKHNTGSTGSIAALPGTNRQGEDGDCNGPDMRXSTHLNVADTDTXSSETHXTTNLTDISFCLQRLVCVVRNSTDQSAKELASLKEKNRAIEEELKELHERYSEISLRFAEVEGERQQLVMTVRSLKNSLR

SEQ ID NO: 360048 - protein, 391 aa, Zea mays
  Clone ID: MRT4577_91536C.1.pep
MAREARAGDGRSRRADITACFMARIAHTQQEIARKQRLPETGCLGHNQPTTRELSRTHIITTTHNHTTTAKSSTHPTTHIHTIRKGSSVDFGTKRQKMDHYQSVNHVALTGPVVQTRWSHVPLTFDARDVDLRSAPHVDAMVINCSVAGWDLHKVLVDNGSQADIMFLHAFDRMGISHSLLKPSDNPLYGFGGKGTFPQNARNIERDFVLGQQNVHCLTTQREVSEATRPATDEKVKAQLQSNDGTKTVPLDLATPKQTVVISEDLTSQDEEKLISCPSRNKDVFAWSALDLVGVSRTVIEHGLGIDPSVRPKKQRLRKMSNEKMEATKVEVHHLLEANFIEPIAYPTWLANVVMVQKKSGKWRMCIYFTSLNKACPKDNFPLESRLEGGK

SEQ ID NO: 360049 - protein, 887 aa, Zea mays
  unsure (1)..(887): unsure at all Xaa locations
  Clone ID: MRT4577_91537C.1.pep
MDDIASEAPVGAFAIGPSTALGGAVALRVLLCGSAARLRHRLAAALRAALPVAAAWLHPRDNTRGILLAVCAVALLLRGRRGRAGLRARVQSAYRCKFWRNMMRAALTYEEWAHAARMLELEAAPRRASDADLYDEELVRNKLRELRHRRQEGSLRDIVFCMRADLLRNLGNMCHTELHKGMLQVPRLIKEYIEEVSTQLKMVCDSDSDELPLEEKLAFMHETRHAFGRTALLLSGGASLGSFNVGVVKTLVEHKLLPRIVSGSSVSXIMCSIVATRSWPELESFFEEWHSLKFFDQMGGIFPVVKRILTHGALHDIRHLQVLLRNLTSNLTFQEAYDITGRILVVTVCSPRKHEPPRCLNYLTSPHVLIWSAVTASCAFPGLFEAQELMAKDRFGQTIPFHAPFLLGMEERTVAPTRRWRDGSLESDLPMKQLKELFNVNHFIVSQANPHIAPLLRLKEIIRAYGGSFAAKLAELAEMEVKHRCNQVLELGFPLGGLAKLFAQDWEGDVTVVMPATLAQYSKMIQNPSYAELQKAANQGRRCTWEKLSAIRANCAIELALDECVALLNHLRRLKRSAERASASQGYGPVIRFCPSRRIPSWNLIARENSTGSLDEEMLASPHTNHQGPGGVAGTSTRNQYLQRNAHESSDSESESIDLHSWTRNGGPLMRTASANKFISFVQNLEIDTEFRTIPSRENLTDLVTPNAGTLAAHAVSREATDRSLDISALDIHDTATPRSTFGRSTSIVVSEGDLLQPEKIENGILFNVVRRDTLLGSSSGVESQGSPREPDVETVQTECLDGISASDDDDKELNVIVDEATDPMSSNNLQDQGSSLEENSAGHFPLNSADETSTNKPETASIFDICTEMHPASISLPEGSSEKAEL

SEQ ID NO: 360050 - protein, 88 aa, Zea mays
  Clone ID: MRT4577_91538C.1.pep
SPGWYSWKRMRWGYMPPAVIAASRVLTLKRDAALRTWARRSPGGRGTGARRRRAGMPCVAPVSSSSLCAAVPSSASAEWCVMVSRPAR

SEQ ID NO: 360051 - protein, 84 aa, Zea mays
  Clone ID: MRT4577_91539C.1.pep
MEPLGKKPARARARAKGQAGGRVRFQVNRVQTWGSPAFTNPGMCMEGFKGQPPFFREPVGRKVAGAMPLPAMGLAFINPMAKQM

SEQ ID NO: 360052 - protein, 63 aa, Zea mays
  Clone ID: MRT4577_9153C.1.pep
MSMAEEGSEAEEGSEAEALEKDGSKASLPLVPGKHHGQGRKASRVVVSRCVGMDVLSLPMGSS

SEQ ID NO: 360053 - protein, 62 aa, Zea mays
  unsure (1)..(62): unsure at all Xaa locations
  Clone ID: MRT4577_91540C.1.pep
NNKGXLTAMPSWPTNKDCHVTFTARGCMYTFMWTTTEVNGREHAEAQHTNTDENLCLPHLTK

SEQ ID NO: 360054 - protein, 80 aa, Zea mays
  Clone ID: MRT4577_91541C.1.pep
GGGGGGAQKPKPPSPGVGSLISALGPKVFSLGVGRFVHPPGLGGFPPVGPPGFPPYLLGVSFLFRFPGLHFFPGGIVCCL

SEQ ID NO: 360055 - protein, 306 aa, Zea mays
  Clone ID: MRT4577_91542C.1.pep
MFGLRARAAAQLQRPTPSPSSASSASFSLARLGCASPLAALAPLASAPPSPSARETQPTSLSARWPAAPMRPWGTRGHSRPTTRVLCTAAGSVQREGKELLVQHLLVGEKDVRLLVDLEKNIIAEGADLSDLAVEHSLCPSKENGGMLGWVRRGQMVPEFEEAAFSAPLNKVVRCKTKFGWHLVQVLAERDQCVLQDIDPEELHAKLQDPSFLEEAQLIDVREPDEVEKASLPGFKVLPLRQFGTWGPVMTDEFNPQKDTYVLCHHGMRSMQVAKWLQSQGFKKVYNVAGGIHAYAVKADSSIPTY

SEQ ID NO: 360056 - protein, 61 aa, Zea mays
  unsure (1)..(61): unsure at all Xaa locations
  Clone ID: MRT4577_91543C.1.pep
ADLYREEKWYMPMLAEQAXMYHEMAAFMEKASKTVDMAELTEDDRNLQSDAYKNVIGAPSA

SEQ ID NO: 360057 - protein, 92 aa, Zea mays
  Clone ID: MRT4577_91544C.1.pep
AHGGGGLPHDHQPVHRLLPLQGHRRAHAQGAGQGTLAYDSAPPRDGLIQACHRCAFLLTEWGYSVKKCVCPLFLGKWYANRKTSRFLPRSDP

SEQ ID NO: 360058 - protein, 65 aa, Zea mays
  Clone ID: MRT4577_91545C.1.pep
WGGFFFLVFFKQKLMGPLAHLIKRGSTLGVHRFKGIQIVNYIQTGSGKRNWWDYKQRTNVNKRRA

SEQ ID NO: 360059 - protein, 85 aa, Zea mays
  Clone ID: MRT4577_91546C.1.pep
PRPHAYATSKFFSSSILFTLKHLVTRKSFQFSGQQHTHTSTLFPYSARNKYCSNLILNIYSLQPRTQHHISKSHSLSFLKLTIPP

SEQ ID NO: 360060 - protein, 177 aa, Zea mays
  Clone ID: MRT4577_91547C.1.pep
MRKLLFISFVLSLSAAAVHGEDGAYIGVNIGTAMSSVPAPTQITTLLRSQNIRHVRLYDADPAMLAALSNTGIRVIVSVPNEQLLSAQPNAAPLLMPAMRYLQNALVAAALDRYIKVSTPHSSSIILDSFPPSQAFFNRSLDGVLVPMLRFLQSTGSPLMLNVYPYYDYMRSNGVIP

SEQ ID NO: 360061 - protein, 96 aa, Zea mays
  Clone ID: MRT4577_9154C.1.pep
AGHVSLRSSGVDVLRLDFDLLLLVLGTYAQCFRVEIHLTGGPRGSLAFAGAEVDNVCIFQSKRHRLSLLMLRISIESLLFRGYYPLEGSLIFHRHV

SEQ ID NO: 360062 - protein, 40 aa, Zea mays
  unsure (1)..(40): unsure at all Xaa locations
  Clone ID: MRT4577_91550C.1.pep
XNANLPRXXXLTNXPGVKSQGNNNGLHFKFAVHVLFAESL

SEQ ID NO: 360063 - protein, 60 aa, Zea mays
  Clone ID: MRT4577_91551C.1.pep
APPLPGSFFLTRLLPLLTFGRSPPCLLARPSSYPFVFPRSSSLQPWLERCFINTCYLAID

SEQ ID NO: 360064 - protein, 114 aa, Zea mays
  Clone ID: MRT4577_91552C.1.pep
MGMGSGTCYFSGVAVVTTSDPSKDHSRLSSSHTRHLRLFCWKHDWLSRVLLSSGHGSCVYAGKNGTSLMNGTSLAPSSNSTEGGSGAHRAFGGVSSLVRIVSTALLFSVLLLLL

SEQ ID NO: 360065 - protein, 60 aa, Zea mays
  Clone ID: MRT4577_91554C.1.pep
SGQRFQGGVLKKNFVPSPVQTRWGNYFNFFYKWGGFPPRGKKTQGVILLGAKKFFFFPGW

SEQ ID NO: 360066 - protein, 124 aa, Zea mays
  Clone ID: MRT4577_91555C.1.pep
SAYQLATAIIFPPLVPTLGPELGAPSDGALALGIGPAGGRALALLFLLAITSTIHSPPWCGCGVCFLLPSSAVVGGPRSACPWRPPPAPPTTAPPSPPFSYPIRVRPPPPPRWGPPPVPFLFLL

SEQ ID NO: 360067 - protein, 94 aa, Zea mays
  Clone ID: MRT4577_91556C.1.pep
SCSRFPRPWTLGSIHPSSTTRSPLFILLTSHQVSVRRLCSPLGVSVIPSFDAETQELLALTTRHAPPLLQSIHHQLSSPPPVTESILQRAYSLY

SEQ ID NO: 360068 - protein, 103 aa, Zea mays
  unsure (1)..(103): unsure at all Xaa locations
  Clone ID: MRT4577_91557C.1.pep
RPARPPYPSGTPSFHSLLPCSGSGVGSFILSTLYSXXPXLLXPAPLGRCRSAQPRRPRRAPLATVRCSVDATKXAQDGVATVVXAXAPASRKECFGGFCTTYD

SEQ ID NO: 360069 - protein, 35 aa, Zea mays
  Clone ID: MRT4577_91558C.1.pep
SCVASVAAFISYLFAKSFFFVINRVNRKPRRLRKC

SEQ ID NO: 360070 - protein, 126 aa, Zea mays
  unsure (1)..(126): unsure at all Xaa locations
  Clone ID: MRT4577_91559C.1.pep
TPSPPPPPPPLSPPXPRSPSPPXPRRRVPPPREWWEPTRSPPPPPRRCRRRGTPPPPSAASAXHAGLVPPLHRPRPLSGPPSVSVPARRTFFRFPPQPSLVISISSFSLPRREFIRKEKRGTRKRF

SEQ ID NO: 360071 - protein, 107 aa, Zea mays
  Clone ID: MRT4577_9155C.1.pep
HSHARTFGQLCCASFSLLSYWYVLDILILHCRDLGGGGVLLLFIGVFPCYLVLEDALLHVFVYVESGSATHAIWSGLVIILVMLNVRPLSSGSSTVAFSSHCSSAST

SEQ ID NO: 360072 - protein, 44 aa, Zea mays
  Clone ID: MRT4577_91560C.1.pep
IDPNVPLVHLMSMHTAARSTWVYSCVGNLIGYSESGIGLKVFSV

SEQ ID NO: 360073 - protein, 71 aa, Zea mays
  Clone ID: MRT4577_91561C.1.pep
IFFRGLIFDFDPIWVPKTRKLQASNFFRGPNFGGLTKKSFFQGIQAHGFLSNHRVLLWETFFNPALTIFEI

SEQ ID NO: 360074 - protein, 62 aa, Zea mays
  Clone ID: MRT4577_91562C.1.pep
GPSPCVSIALWLSQTLLHQLLDGFMKWVGLKRRGLHSEHECLPRLLPTFLARRSLKKTMVSA

SEQ ID NO: 360075 - protein, 79 aa, Zea mays
  Clone ID: MRT4577_91563C.1.pep
RSVMISADSLLEGVTTQRYFFFFFFYLQGGLNCRCHRINHGVLRYDGCRPCDNQSTTTKRRREKLPPGGGPVLCVVPAA

SEQ ID NO: 360076 - protein, 85 aa, Zea mays
  Clone ID: MRT4577_91564C.1.pep
PALTSNLPPSRVMSRPHSSATLGPCSFLSNPWGLRGIKSPISQNPPQSTLIPLNPHGLGMKRTKPSWDIMYRPLLIYMVRQRLEQ

SEQ ID NO: 360077 - protein, 175 aa, Zea mays
  unsure (1)..(175): unsure at all Xaa locations
  Clone ID: MRT4577_91565C.1.pep
MAEADSCLESFELYESESKFYILGTNCNKTIWRLLKIDRMEPSEVNVHEDSTVLSQSDYLDMLKNLDEQHRSTGGVKFVTNCFGIIGFIKFLGPYYMLIITEQRKIGDIFGHMVYQVSKTAMIELSNSTTRPKLINSKDENRYXKLLPTIDLRKDFSFSHSYHIMRSLLKNFNDP

SEQ ID NO: 360078 - protein, 216 aa, Zea mays
  Clone ID: MRT4577_91566C.1.pep
MAAAAAEAEVDSCLQSFELYEAESKFYILGTNSNKTIWRLLKIDRMEPSELNVDEDSTVHSQSDYLDMLKNLDEEHRSTGGVKFVTNCFGIIGFIKFLGPYYMLIITEQRKIGDIFGHPVYQVTKTAMIELSNSKSRPKLINSKDENRYKKLLQIIDLRKDFFFSHSYHIMRSLQKNFNDPQEGWELYDTMFVWNEFLTRGVRDILKTTLWTVALV

SEQ ID NO: 360079 - protein, 90 aa, Zea mays
  unsure (1)..(90): unsure at all Xaa locations
  Clone ID: MRT4577_91567C.1.pep
FENEDGPDELQSQMEHDHDIGTTIRDXIMPHAATWITGEAEQGEDSGESGDDDEDDDDEDDDEDDEDEEDDDDDEEDHEEESKPAWKSGS

SEQ ID NO: 360080 - protein, 27 aa, Zea mays
  Clone ID: MRT4577_91568C.1.pep
KDNVNELSQLSYQEHVHLSWLILVGDV

SEQ ID NO: 360081 - protein, 290 aa, Zea mays
  Clone ID: MRT4577_91569C.1.pep
AARGGRPGSAAERLADIKVAAGIPKDLDGDVVTVPKERNSGEMQVWKDLILSPTPAIRRILLSAVGLHFFQQASGCDSVVLYSPSVFRGAGITGDNKLLGVTCAVGVTKTLFILVATFLLDRVGRRPLLLTSTGGMVISLISLGTALTVVGHHPDAKIPSVVALCIASTLAFVAFFSIGLGPITGVYNSEIFPLQLRALGFAVGVACNRVTSAVISMTFLSLSKAITIGGSFFLYSGIAAVGWVFFFTCLPETRGRTLEEMGKLFGMPDTDMAEADDTAAKEKVVEMSTK

SEQ ID NO: 360082 - protein, 43 aa, Zea mays
  Clone ID: MRT4577_9156C.1.pep
PRCQLVLATTTLHFHRYMIYDCFFLFLSSGCLCGVMKYHSFSF

SEQ ID NO: 360083 - protein, 147 aa, Zea mays
  unsure (1)..(147): unsure at all Xaa locations
  Clone ID: MRT4577_91570C.1.pep
RCWLXPPSPGGGGGVGFCPERSVPPSSHGGSAPPSGFQPPPXPCGHRRVISFXPXPTEGGGGVWPSLTPTASGSPGSPSTPTTPGAPGLSFPPSSPCAPGSLPFTPTTPGSPGSTFPPSTPGVPGCVGPSPLSSGSTFPSSTSGAPG

SEQ ID NO: 360084 - protein, 45 aa, Zea mays
  unsure (1)..(45): unsure at all Xaa locations
  Clone ID: MRT4577_91571C.1.pep
KKNTYKXIYHVYFLVPHPYTYAAYAKKKERPIITQGNFSSYAEKL

SEQ ID NO: 360085 - protein, 72 aa, Zea mays
  Clone ID: MRT4577_91572C.1.pep
RGPPTCLGLKPFIFLEFPPPQKPFPLPRGVYPPRCSLAPHQDWVPIGPPKNFAWRLLMLRHRPRFASRFFFF

SEQ ID NO: 360086 - protein, 86 aa, Zea mays
  unsure (1)..(86): unsure at all Xaa locations
  Clone ID: MRT4577_91573C.1.pep
TLVKAVAVLGSSRXVKGTIFFTQVGDGPTTVTGSVSGLKPGLHGYHVHALGDTTNGCMSTGPHYNPASTEHGAPEDDNRHAGDLGN

SEQ ID NO: 360087 - protein, 218 aa, Zea mays
  unsure (1)..(218): unsure at all Xaa locations
  Clone ID: MRT4577_91574C.1.pep
EGTRRRRLRRAQQGADHGEQQELSAAGEAHHGSRQGTRESHRGRRTRGQASAGSQVEXRSKRRRAGGRRAKGRGSGKHQGEECRELELQIERGGATERHGDGRAEQPNGHLGRQGARRGRNEXRGSGRAGRSSRGREAARERERKGTVEKSTGARPWPSRGTXRARSLQGIRREMGRARHGRAGAVGRAGTSAGAGRDEQREGEACRGRRSSAAGAWR

SEQ ID NO: 360088 - protein, 232 aa, Zea mays
  unsure (1)..(232): unsure at all Xaa locations
  Clone ID: MRT4577_91575C.1.pep
ALDSCYRQFCNKYEKIAGKQFSICDAEYFVFHSPYNKLVQKSFARLYYNDFLRNCSSVDDDAKEKLQSFSNLTGEESYQSRDLEKASQQVAKHLHDIKVQPSTLLPKQIXNGQRIVMFSYGSGLTSTMFSLRLNNGQHPFSLSNIASVLDVTEKLQSRHETLPEKFVETLKLMEHRYGAKDFETSRDTSLLQPGTFYLTKVDSMYRRFYSQKLSEETGGGKTKCCNGLANGH

SEQ ID NO: 360089 - protein, 44 aa, Zea mays
  Clone ID: MRT4577_91576C.1.pep
ITHEQPHYRQGGPLVYRAMVRSAEKRLAAGALNSGKETAWFDPT

SEQ ID NO: 360090 - protein, 150 aa, Zea mays
  Clone ID: MRT4577_91577C.1.pep
ALTFKLFIYGVVLPSFLKADNYLCVSLQNGQRIVMFSYGSGLTSTMFSLRLNNGQHPLSLSNIASVLDVTEKLQSRHETLPEKFVETLKLMEHRYGAKDFETSRDTSLLQPGTFYLTKVDSMYRRFYSQKLSEETGGGKTKCCNGLANGH

SEQ ID NO: 360091 - protein, 470 aa, Zea mays
  Clone ID: MRT4577_91578C.1.pep
MDRKDVGILAMDIYFPPSCVQQEALEAHDGASKGKYTIGLGQDCMAFCSEVEDVISMSLTVVNSLLKKYKIDPKLIGRLEVGSETVIDKSKSIKTWLMQIFEESDNTDIEGVDSSNACYGGTAALLNCVNWVESNSWDGRYGLVVCTDSAVYAEGPARPTGGAAAIAMLIGPNAPISFESKYRASHMAHVYDFYKPDLASEYPVVDGKLSQTCYLMALDSCYRQFCNKYEKIAGKQFSISDAEYFVFHSPYNKLVQKSFARLYYNDFMRNCSYVDDDAKEKLQSFSNLTGEESYQSRDLEKASQQVAKHLYGIKVQPTTLLPKQIGNMYTASLYAALASVLYNKHDSLNGQRIVMFSYGSGLTSTMFSLRLNNGQHPFSLSNIGSVLGVTEKLQSRHETLPEKFVETLKLMEHRYGAKDFETSSDTSLLQPGTFYLTKVDSMYRRFYSQKPAEETGGGKTKCCNGFANGH

SEQ ID NO: 360092 - protein, 124 aa, Zea mays
  unsure (1)..(124): unsure at all Xaa locations
  Clone ID: MRT4577_91579C.1.pep
MPPLRRARSILLLLHYVAASHLLLRAAAATLPDPAPLDPALVATPVQPAAAVPGGTIPAFPAQSDSLAGSSSTCPLAPSPALLPAVRASCAXXAALPPRLRCCPALAAWLFAGYAPXXLAERPL

SEQ ID NO: 360093 - protein, 127 aa, Zea mays
  unsure (1)..(127): unsure at all Xaa locations
  Clone ID: MRT4577_9157C.1.pep
MGVLAMRNIKGYTGKVSITIGSKQARALALRWLLQASSXRPGLNKSFELSSQVVEAGQGSWGAIVKKQETHILAEANRGHAHFVKPCTQSRYCSHMDPYLSIGKESIQGESHDILFRTLQKAKKTDK

SEQ ID NO: 360094 - protein, 45 aa, Zea mays
  Clone ID: MRT4577_91580C.1.pep
TSHRDVTCQPHTVDLSTYAITPVHSRLQTCDLPTIPLCNAGYSYQ

SEQ ID NO: 360095 - protein, 79 aa, Zea mays
  Clone ID: MRT4577_91581C.1.pep
RSAPPFPLLCVCVCVCVCTASRLPPPASAIGPGGGHNTAIEGYGREFYHFNDQLRLETAAFSGLSLSDSIWSPAGWRSN

SEQ ID NO: 360096 - protein, 532 aa, Zea mays
  unsure (1)..(532): unsure at all Xaa locations
  Clone ID: MRT4577_91582C.1.pep
MIYSLRDYLKDSVSNNISNLNWSASKRRSGRRFRQGDTGTSTPTFSGSPGKGGFGHSTDTSEKKGTEETHSENTGDPLSIDGVKSDSPLPTAVTTNHSKHDSTNLGLSLSSPVKITQRPLRNCSIDSKSKESKTRDTTLHPLIFKEDGLADNTLLTYKLKNGEALKQGYKRGTCIICNCCNQEFSPSHFEEHAGMGRRRQPYHNIYTLEGLSLHKLALQLQDHLNPNGFDNASVSSVSDYHNLTSSGCGREPSTXPVDLLFXKRTLQERVVETESCYFCGYGHTTIGNINPDTIIFCNQCERPCHIKCYNNRVVKKKVSLEILKEYMCFRFLCCQECQSLRARLEEGLEKCVGITVLRRIRSNICWRLLSGMDASRDVKLYMPQVIDIFKDAFMDSTDEHSDIISDMVNGKNGDQEKDFRGMYCALLTASTHVVSAAILKVRIEQIAELVLIATRSECRKKGYFILLLKSIEANLRAWNVSLLTAPVDPEMTQIWSEKLGFTILSAEEKESMLESHPLVMFKNLVLVQKSLA

SEQ ID NO: 360097 - protein, 1327 aa, Zea mays
  unsure (1)..(1327): unsure at all Xaa locations
  Clone ID: MRT4577_91583C.1.pep
MLVIVHILLQYLETTLSCVRHWSALQFEKHVGAESKNQNGNILLTNDKLLYDLFHELRNWPPCAEEFRATAGVLMTVPATEASSAPQGQQAGAPASWEPNGVQVDGVTVDPPLPGRGAMVMLTEEEKASLCLLGLKQSSSTAELDTICGIEGPAAEQIKDEAGGDHVMHDALVGVTETEYQLDSDLRDVRGLLSTGLLEGFRVTYMKDEVEEVGRINGQGYSCGCSKCNYNSNIMNACEFEEHYGQSFDNQIDHIFLDTGISLFRVVEALKPCKLNMLGDFIEEKIGFPPNLDEYNKWKASFQKRKDYLDAVASDGCLTQSSQGLAAGEMIYSLRDYLKDSVSNNISNLNWSASKRRSGRRFRQGDTGTSTPTFSGSPGKGGFGHSTDTSEKKGTEETHSENTGDPLSIDGVKSDSPLPTAVTTNHSKHDSTNLGLSLSSPVKITQRPLRNCSIDSKSKESKTRDTTLHPLIFKEDGLADNTLLTYKLKNGEFSPSHFEEHAGMGRRRQPYHNIYTLEGLSLHKLALQLQDHLNPNGFDNASVSSVSDYHNLTSSATTHQRHDLGRPPMPYPYSLPHDLGRIHNPINLVSEMLRDPPTTTLPPTTSTSPPLSISAVAPLPAPTSLMLTSSPSAIVTLLTLEGLNAKFDASLTSISNTVATRHPRALRGVAFSSQLPTTVGGNXPPATTHLLLPPPVIAPPPXATSAPSACPIGASTSTPAGLPLHLISMPPSLFPVSSYVLSSTTTPEFTMAMPPTLTVSSVPSHKVLYGGVDDTLFLGAPTSXATSRATHPGHTTLCHPLATXDLAPPRFYKLDFPTYDGARDPLNCLNQCAQFFGGQRTLASDCTWLASYHLTGAAQTWYYALEXDEGMPSXERFCELCTLRFGPTVHGTCLFELARLPFTSSVQEYADRFNAVLCHARGLSGPXKAKLFVGGLSDHIHIDVELLEPRDLKSAMYLARAFEACAAASPPAPTARGANSXRAGQPAPTRAPLCAPLQQQPPTPRGHANPSRKRQPFSPVSSSLPYRTTTRGHVCKRLFYLELADFIDDDIPANISATTGCGREPSTTSGPIVPLKRTLQERVVETESCYFCGYGHTTIGNINPDTIIFCNQVSLEILKEYMCFRFLCCQECQSLRARLEEGLEKCVGITFLRRIRSNICWRLLSGMDASRDVKLYMPQVIDIFKDAFMDSTDEHSDIISDMVNGKNGDQEKDFRGMYCALLTASTHVVSAAILKVRIEQIAELVLIATRSECRKKGYFILLLKSIQANLRAWNVSLLTAPVDPEMAQIWSEKLGFTILSAEEKESMLESHPLVMFKNLVLVQKSLA

SEQ ID NO: 360098 - protein, 120 aa, Zea mays
  Clone ID: MRT4577_91584C.1.pep
MIISIESPERLQNLGPRWVSGLGQLWQQYSPTRMGDKDAPVCQYMEWNRGHGKAPMLDELVDATELDDKDTDGDATCDCTGSRLQSLSRWHARSVLEVLPHRNHPAGAPMASYRRTRRGF

SEQ ID NO: 360099 - protein, 100 aa, Zea mays
  Clone ID: MRT4577_91586C.1.pep
ALKQGYKRGTCIICNCCNQEFSPSHFEEHAGMGRRRQPYHNIYTLEGLSLHKLALQLQDHLNPNGFDNASVSSVSDYHNLTSSGCGREPSTTSGPIVPLK

SEQ ID NO: 360100 - protein, 61 aa, Zea mays
  Clone ID: MRT4577_91587C.1.pep
THNRDFLFASGGNLAIGGKKSLGGPGILPKPLLLPLVTLGIKFLILARSGQKAPQRGRYPF

SEQ ID NO: 360101 - protein, 47 aa, Zea mays
  unsure (1)..(47): unsure at all Xaa locations
  Clone ID: MRT4577_91588C.1.pep
LVWGGFXKXITGGALPYETRHIXHTYIGLLPPHSVREHHRVQILFVK

SEQ ID NO: 360102 - protein, 92 aa, Zea mays
  Clone ID: MRT4577_91589C.1.pep
SQLVDFNKAGSCIYNLCKLKTYIYIYVALICVNILFVKKSNHTITCMTSIVCTSRASTDQVLYRTYHVVAQLNDLSWHPFQDGECVCCAGLN

SEQ ID NO: 360103 - protein, 297 aa, Zea mays
  unsure (1)..(297): unsure at all Xaa locations
  Clone ID: MRT4577_9158C.1.pep
MDDFVVHHSFSPFPPRTNQQLHYTAANAATDHAMENAVVGLIVVAGTSVAVAALCLLLAFLCRRHSSKSRLKPCSRQRCCSAAAGSTLPVSVSDGMTPDYLSWSFYSTTAEASLQKLSLADLAAATGGFSPDNIIGDGSFGFVYRAVLPDGAAVAVKRLSGDGDAGAGNREFRAELEVLGSLSHSNLARLLGYCADGRDRILVYELLERGSLDAWLHGGDADDSGGTGTLRWPARLRVARXAAAALEFLHHGRRPPVLHRXDVKSSNVLLSEGFEAKLADFGLXRIIRGSPCQSHVS

SEQ ID NO: 360104 - protein, 151 aa, Zea mays
  unsure (1)..(151): unsure at all Xaa locations
  Clone ID: MRT4577_91590C.1.pep
QGKRLRQRAKSGSRGPGAGSTNVHGGGNNSSVRSRSPGSNETRAPKMEELTRADGKRRRSCHHHGSRASFPGQTGWEPSCRLGPQSGPGGRAPLVNQVSYPVKYVFVPKGGVIVPAKXTATCVLYIRRLAQFPAGMGGTYWFLSVAFCFSE

SEQ ID NO: 360105 - protein, 35 aa, Zea mays
  Clone ID: MRT4577_91591C.1.pep
RARPLPRTQTGRGPPPGWRRAALLRGRHPGRPTRL

SEQ ID NO: 360106 - protein, 105 aa, Zea mays
  unsure (1)..(105): unsure at all Xaa locations
  Clone ID: MRT4577_91592C.1.pep
AACVQDAALSVRRRVIPSVLPEDTGLITKQAATVRTELLMAEPGTERGQGPLIQCPGCDSEARHKLAXILLPGLAVVCVDWATGDPFQRPTAVDVDLRMGRVGLH

SEQ ID NO: 360107 - protein, 264 aa, Zea mays
  unsure (1)..(264): unsure at all Xaa locations
  Clone ID: MRT4577_91593C.1.pep
IIRQKIRFSYYFYLISNTQELPARDYRSIWLAKSISLPSRPQSSEAAVQQEMCILEAIISSPSTCIVTMCDGLRRLGDIYSSVVEMTHLPSNQVCSSQQRKMLDGETESSLELLDLCNTMQEIFVELKAIIQDLQVALRKXGATVQAKIQFYSRLVKKAKQSFKKACKKVTPASTDCAIIRLLTKAREITISLLESTLQLLSKQIETPKQSLVSKAFSKRKAAVCEEGQLQVLESSIGDLESGAGHLFRILVQSRVSLLNILSS

SEQ ID NO: 360108 - protein, 40 aa, Zea mays
  Clone ID: MRT4577_91594C.1.pep
VFHGISDYCSYKARCTQLPTTMICKYTQPFLTDEYGLSAR

SEQ ID NO: 360109 - protein, 64 aa, Zea mays
  Clone ID: MRT4577_91595C.1.pep
ATQGCFQFRFCKEWANTLCFGRERTKQSDQSLAILKSRSATYSPPMFVLLFLFIFSLRCIRTRC

SEQ ID NO: 360110 - protein, 85 aa, Zea mays
  unsure (1)..(85): unsure at all Xaa locations
  Clone ID: MRT4577_91596C.1.pep
IFYIFALVCSKLALLSYFHLTCFNMFVNECQENNLIGFFWYLSXLLLLELSCTKFIQTEHKYYSLRPKLKFVLDLGRRQYSVIDS

SEQ ID NO: 360111 - protein, 42 aa, Zea mays
  Clone ID: MRT4577_91597C.1.pep
DHRASLLQIPETAAPSLSVREDEPTSSRFHRLQVKHRPPPRV

SEQ ID NO: 360112 - protein, 152 aa, Zea mays
  Clone ID: MRT4577_91598C.1.pep
PAGTPMRIRVWRRVAVAATTPTPTRGSTPGLFCSNEGIQLQLSGRQLAVLFEIQNPARSVLALLAGAALSTQAIDLQFHACGGVCWADQLLLLHSTPLHRPAPLVTHAGRRPRPCQCHAAGLIHASSIGALPSASCGCAGKRSGGRGGGEGE

SEQ ID NO: 360113 - protein, 136 aa, Zea mays
  Clone ID: MRT4577_91599C.1.pep
HTRISTNFFQFCKYYIRNILPYQSVNTLLQSMGAYGLCHSRITSHGITIVSNTFIAWAKLAHHCRLQQSCHAHHLSIHSAISLTSCATVFLTDYTRSFCTSDSSMSYSCTSDGYSPCFQNGQQKTVSSLSIPFRRA

SEQ ID NO: 360114 - protein, 85 aa, Zea mays
  unsure (1)..(85): unsure at all Xaa locations
  Clone ID: MRT4577_9159C.1.pep
GQMSDPSTAXEPCQPRAIQPPPPPRPLPCPCPSVGLLCPSHPLSLSPSLSLSGGRRGSGGANWGSAGRLAGGYLQVWVLEGSPRG

SEQ ID NO: 360115 - protein, 137 aa, Zea mays
  unsure (1)..(137): unsure at all Xaa locations
  Clone ID: MRT4577_915C.1.pep
KGRFTKEEIXKMVQKVXKSKAEAEEVKKKVAVKNPLENYAYNMRTPLKDDKFASKLLADAKKKIEAPVKSPPTWLATNHLIKVGEFKNKIKELEGFCNPIFAKMYQGAGAGMGNSVGMDKNAPFGGNGVGPKIKKVD

SEQ ID NO: 360116 - protein, 60 aa, Zea mays
  Clone ID: MRT4577_91600C.1.pep
PVIVQILHLGCYLRHIPGPHPDRQCANAEQGNLLPKGLARATTDDKPHGKHDHAHRDLEA

SEQ ID NO: 360117 - protein, 59 aa, Zea mays
  Clone ID: MRT4577_91601C.1.pep
FFIHTKGTGTTMEKKEKDYMIQRQRANTPKVTGRRWPRPLTNTWHHAACASSCDTMTLT

SEQ ID NO: 360118 - protein, 60 aa, Zea mays
  Clone ID: MRT4577_91602C.1.pep
INILKKSKPSLSVIPKISHPNLQLYLLSLKKNLFQLCEKIPPSVPFKKIKILNNFTNLTN

SEQ ID NO: 360119 - protein, 285 aa, Zea mays
  Clone ID: MRT4577_91603C.1.pep
MSTSEVWSLSDFEISKYIGEGRFGKVYLAREKQSGYVVALKVIFKAKLQKYHFHAHLRREIEIQQSLDHPNVLRLFTWFHDEERVVLVLEYAARGELYKVLRAAGRFTERTSATYVASLAGALAYCHKKQVIHRDIKPENLLIDIEGRLKIADFGWAARSNAKRHTLCGTIDYLAPEMVEKKAHDHAVDNWTLGILCYEFLYGSPPFEADEQDDTLRRIVRVDLAFPSSPCVSSEAKDLISKLLVKDSSKRLCLEDIMKHPWIKKNADPSGSCIKQKDVTRSKLL

SEQ ID NO: 360120 - protein, 46 aa, Zea mays
  Clone ID: MRT4577_91604C.1.pep
NIPLSFFKRISLRKPLAFPLLTFLTNIPFYGTRVIPKNPPPIPFSK

SEQ ID NO: 360121 - protein, 285 aa, Zea mays
  Clone ID: MRT4577_91605C.1.pep
MPTSEVWSLSDFEISKYIAEGRFGKVYLAREKQSGYVVALKVIFKAKLKKHRFHAHLRREIEIQQSLDHPNVLRLFTWFHDEERVVLVLEYAARGELYKVLRAAGRFTERTSATYVASLAGALAYCHKKQVIHRDIKPENLLIDIEGRLKIADFGWAARSNAKRHTLCGTIDYLAPEMVEKKAHDHAVDNWTLGILCYEFLYGSPPFEADEQDDTLRRIVRVDLAFPSSPCVSSEAKDLISKLLVKDSSKRLCLEDIMKHPWIKKNADPSGSCIKQKDVTRSKLL

SEQ ID NO: 360122 - protein, 50 aa, Zea mays
  Clone ID: MRT4577_91606C.1.pep
QANTIRPLHGGSRADAMELAAATAETESADYEQRPTDRRVHTADPYGETP

SEQ ID NO: 360123 - protein, 128 aa, Zea mays
  unsure (1)..(128): unsure at all Xaa locations
  Clone ID: MRT4577_91607C.1.pep
GVXLFLGGFSXXSGVRVGXXXWCWXXLGAXFSXXPALLPGCXFXGCXRXSGXXXSAASCCGXCPLFPGCVCCXXXXVXPSRGFLPPLCXRSXXXLGXALSPVFLGXXXVWLLFAGVLFAFXCRRPPFV

SEQ ID NO: 360124 - protein, 95 aa, Zea mays
  unsure (1)..(95): unsure at all Xaa locations
  Clone ID: MRT4577_91608C.1.pep
IKGPHDLGGQVIKQKLDYLTMLGSTTRKRMIFYAMCFPKEFCAKTGPGLSPRLVPIGIRLLPAAAMPLYSAFLXVHIRTRILSGSPLLFLSGSVL

SEQ ID NO: 360125 - protein, 148 aa, Zea mays
  Clone ID: MRT4577_91609C.1.pep
LHAPGRTGWTHPCVSFHGGRGGGGAASVRHQTDRSYRKAGDDQCSLPSRHVEGRLVRTDRNDNTQHWIKDMKYTTSVKDEKGYPAMILDDKTTGEAIKHSLGQSHPVLLTRHKTYTLDETVLWTESKDVADGFPCLMMVNNIYLHFDA

SEQ ID NO: 360126 - protein, 141 aa, Zea mays
  unsure (1)..(141): unsure at all Xaa locations
  Clone ID: MRT4577_9160C.1.pep
DRKLTNTDSRAKCFIRXTETSHHRXQYELSTIHKGAGSPWPAHYTILXSSDSCQGHGXRPRESKGTVATSRGGXRSWXXRGPXRRGXXRGCGDXARAGGAXXGAALGAGXGXXATGCGXXRXQXXRKATXXMXHPXWPXXR

SEQ ID NO: 360127 - protein, 73 aa, Zea mays
  Clone ID: MRT4577_91610C.1.pep
MATDTQPLENLLHLHLQDEDDNESYELGPSKQALERACGVTKPHIACSLTSNDGIQLRLQVQCLMDSIANVLI

SEQ ID NO: 360128 - protein, 53 aa, Zea mays
  Clone ID: MRT4577_91611C.1.pep
HDMLLRSMNKLHLERPNMKHSVRPPEQGRLRGLGLQEVERVHLLARNVLLSHS

SEQ ID NO: 360129 - protein, 72 aa, Zea mays
  unsure (1)..(72): unsure at all Xaa locations
  Clone ID: MRT4577_91612C.1.pep
ARLYMDAGLASAVTMLRTCTDVVHLAHVLEQFRLAWCGKLVRDTRAXRSVKGLCFDLFIIRGGNRAFNVCWR

SEQ ID NO: 360130 - protein, 121 aa, Zea mays
  unsure (1)..(121): unsure at all Xaa locations
  Clone ID: MRT4577_91613C.1.pep
RACPPHAAADVDTDADADDDHHDGGTHDRREGREAGNKAREARNARXEKHADKKPTENATRGXXXPADSKKXRADXDSNSRPTGDKHXDRQNTAKKRAQRTHDGDGDRRGPKTQPQPNTXK

SEQ ID NO: 360131 - protein, 62 aa, Zea mays
  unsure (1)..(62): unsure at all Xaa locations
  Clone ID: MRT4577_91614C.1.pep
AKGTXTPAXLTGTGIPPMRGIGNYRGIMGWDPFNDVQNNYXXHFKGRGVVAYQSYNTPSIYI

SEQ ID NO: 360132 - protein, 244 aa, Zea mays
  unsure (1)..(244): unsure at all Xaa locations
  Clone ID: MRT4577_91615C.1.pep
SLPTNRPGMMRRETXLXXHCQGAGQVFKEKDRCKKCKGKRTSQEKKVLXEIYIPRGSMQGERIVLEGEADQHPDQTPGDIVFTLVEEPHDVFTRIGHDLSAELTVTLGEALSGFSRTVFKHLDGRGIHIERPRGKILRPGDCLKIPGEGMPMKRGEAKGDLYLIVKVEFPEDGWLKEDSEHDALQKMLPTAPANVEGXEVDEVEYEDDADIEKMGENSGDGRFGGDWEDDDDDMGDGQAQCQTQ

SEQ ID NO: 360133 - protein, 494 aa, Zea mays
  unsure (1)..(494): unsure at all Xaa locations
  Clone ID: MRT4577_91616C.1.pep
MRPSSRYPPQPALLALALALALAAAAPELRPLAAAVAVTVTPPSERTDEEVRRLYEEWRSENDAGPRRGATGGSLGLGDADAGEDDDARRLEVFRDNLRYIDAHNAEXADAGLHGFRLGLTRFADLTLEEYRARLLLGSRGRNGTAVGVVGSRRYLPLAGEQLPDAVDWRERGAVAEVKDQGQCGGCWAFSAVAXAVEGINKIVTGSLISLSEQELIDCYKFQHQCCDGGLMDNASVFMIKNGGIDTEADYPFTGHDGTCDLKLKNTRVVSIDSFERVPINYERALQKAVAHQPVSASIEASRRAFQLYSSGIFDGRCGTYLDHGVTVVGYGSEGGKDYWIVKNSWGTQWGEAGYVRMARNVRVRXPASAGIAMEPLYPVKEGPNPPPGPTPPSPVKPPNVCNAEYSCPEATTCCCVSEYRGKCLAYGCCELENATCCEDHSSCCPHDYPVCSVRDGTCRKSANSPMMVKALQRKPAMYTGGGGGGEQSGRSSW

SEQ ID NO: 360134 - protein, 53 aa, Zea mays
  Clone ID: MRT4577_91617C.1.pep
QRLIKQQGGKGRPYVCASIGVKLALVQYYIWMLIVRKKKDKVDRVIGARYTQA

SEQ ID NO: 360135 - protein, 38 aa, Zea mays
  unsure (1)..(38): unsure at all Xaa locations
  Clone ID: MRT4577_91618C.1.pep
LXNTSCYQLLPVLLXIRAVSGWXKSLVLXHTXIIRXSV

SEQ ID NO: 360136 - protein, 113 aa, Zea mays
  Clone ID: MRT4577_91619C.1.pep
VPRGRPGRIMIVSPYCRCNRLPTPVLRSCFHLNHPGLLAQTSPLGYKSQALQPPRPPNPRALDVELTQDLTRGKAERSIATWLLAHAVVLSAWSSQGASRVVGEVVHGLDGKD

SEQ ID NO: 360137 - protein, 54 aa, Zea mays
  Clone ID: MRT4577_9161C.1.pep
TGRCSGSPICEKQRAGTSNFGKLIYLSYGNMNKKKKKGRAVRSIGANLSEPCMS

SEQ ID NO: 360138 - protein, 38 aa, Zea mays
  Clone ID: MRT4577_91620C.1.pep
CSTLCRGMIKFPMLDLNNYERLCMLKTIVSNLMYLDRI

SEQ ID NO: 360139 - protein, 81 aa, Zea mays
  Clone ID: MRT4577_91621C.1.pep
TKPSSTALLERRIFHRPCGAKAQKYRVENLFKGPPDDAHSNALRNCDPEGPLMLHVSKTKPASYKGRFFAFCRGFLGKVAT

SEQ ID NO: 360140 - protein, 164 aa, Zea mays
  Clone ID: MRT4577_91622C.1.pep
PKKKVGKFFLQGPHPKIKDFVEKPPSKCILFRGPIVKAPPLTNFFLNTAHGGGAEIQNHLGEFFGPKNNYGERGFSNPVPRVGFFYTKKKKPPLNQKISKVPLWVVLGYKKNPIGPAGPYCKRDCKEIFLLKARGPKKFRPFFCGGKKKKKKKKKKKKKKKKKK

SEQ ID NO: 360141 - protein, 74 aa, Zea mays
  Clone ID: MRT4577_91623C.1.pep
FRGAGKFCTPVPVFKIFLEKKSVLFGRKRVFFSAYPPRLGVGPGSKEIKFPFLHPKCVNGVKRNEMCCLYLQFQ

SEQ ID NO: 360142 - protein, 41 aa, Zea mays
  Clone ID: MRT4577_91624C.1.pep
CCLVTFFVFSNFGLLFIAFYCCPVEKRQWPYFPNSPGPHFK

SEQ ID NO: 360143 - protein, 67 aa, Zea mays
  Clone ID: MRT4577_91625C.1.pep
FLPSCITYSAVQSFTMTPTESQSALRQGMSTGLARPASTSAEPPRHCTNRSSRAVSLVTLVAPPSAG

SEQ ID NO: 360144 - protein, 266 aa, Zea mays
  unsure (1)..(266): unsure at all Xaa locations
  Clone ID: MRT4577_91626C.1.pep
NPKTTVLPNPPLPSPMQAFARLSSPAASRKVVSGVSGAVTRPCYRTWRWKAHAAPLSAPGPPKGKKREYISKNERKARMKEFIEGYQASNDGRFPTMQMIRQSVGGGHYTIRDVLSEVKYNQIKFPFDKSKAAQLQETAEGAEQSRPEEDSGNSSFNSQSFNGNQDEDDTLQSQKDSPAGTTIMENTEALMSLDAKEAKLPLYNSEAAQLHETGECAEKSRLEESXSSTLSPDDTLLSQKDSAMGAXIIEKHQPFGISRVRRLLSL

SEQ ID NO: 360145 - protein, 85 aa, Zea mays
  unsure (1)..(85): unsure at all Xaa locations
  Clone ID: MRT4577_91627C.1.pep
LLGGVGWGAPXPPPPPRKDSLNNEVSLRRPQSKSRGFQTAFSITCDGVRLMVGFGVSPGPSLSAQLHPHVDYPVFAPDYLLFFPL

SEQ ID NO: 360146 - protein, 81 aa, Zea mays
  Clone ID: MRT4577_91628C.1.pep
SHASLKKKIFLFKKKKKKKKKGPRVNNTRLNTPTHTLHNSSIMSPKSKLMCLCFTNTTTKKNPNVTPLYLNFTTFPFPFLA

SEQ ID NO: 360147 - protein, 61 aa, Zea mays
  Clone ID: MRT4577_91629C.1.pep
LISPSAFLGWESAHELFYGRYPNRPAFIWTFGPNPSFLCPPPAKVGANPFFVNVNVGLPRV

SEQ ID NO: 360148 - protein, 34 aa, Zea mays
  Clone ID: MRT4577_9162C.1.pep
VGAVTRRKDGACSIDGQAGWTRIHVFHFIYCLEF

SEQ ID NO: 360149 - protein, 55 aa, Zea mays
  Clone ID: MRT4577_91630C.1.pep
ELCISNNQFSENKEYFPYFYKKKKKKKKKKKKKKKKKKKKKKKKKKKKKKKKNKT

SEQ ID NO: 360150 - protein, 82 aa, Zea mays
  Clone ID: MRT4577_91631C.1.pep
MSRAKRRSAEKQKGVDEDEESSPAQFRPEARVKPEERARKAAFERHENLERCIANVDGSGEKVFRALVDTRVSLLNILSPGF

SEQ ID NO: 360151 - protein, 93 aa, Zea mays
  Clone ID: MRT4577_91632C.1.pep
SGVGKPPHRSPALCGNGHCAQAPPLWLRVSSAPVAKPVSSLKSKPKSTQKVPVTNLGHRSSTQFPHSWVPGSTKSPFNAPNSEEKVQRSRFRW

SEQ ID NO: 360152 - protein, 88 aa, Zea mays
  Clone ID: MRT4577_91633C.1.pep
ACTFHTAPVIAGVESGALHPHRSICADCPWLFGSKIVYKQEIPLLIGLLPSMWLNVSHRLFVDLSYEQFVIARAFLATHVCCSIDCTR

SEQ ID NO: 360153 - protein, 104 aa, Zea mays
  Clone ID: MRT4577_91634C.1.pep
PRLRRGKITDAPFAKTVPLGSKPKKPRWLMPTFIGFPCKMERNQVISGRSCVYKRNCSPPLDLNHLSTSPTLGCGKLANPLFLQMGGNLGAKFETRLFWSFFNG

SEQ ID NO: 360154 - protein, 446 aa, Zea mays
  Clone ID: MRT4577_91635C.1.pep
MGHGASCGRPSEEVDFFGAAQSGDMARLAAALRSRPTLLSRTTLFDRLSALHIAAAHGHLQVVSLALDLCVHPDVVNRHKQTALMLSAMHGKTDCVRRLLDAGANIVMFDSSHGRTCLHYAAYYGHADCLRTILSAAAKSAPVSESWGFARFVNVRDDTGATPLHLAARQGWRRCVHVLLENGAIVSASSGAFGFPGSTPLHLAARGGNLDCVRQLLSWGADRLQRDSVGRIPYEVAAKRGHVACAALLNPSSAEPLVWPSALKFISELEPDAKSLLEAALMEANRERERRILKGAKNALPSPSHPDDGAHDTAIAEASDAEVCSICFEQACSIEVRECGHQMCSACTLALCCHAKPNPATQSQPLPTCPFCRGGIARLVVATRTRAGDDEERCKLESPRHCRSRRSMNLSGDAGSTSTLMGSIASSIGKMGRRRTESSEQVDDKP

SEQ ID NO: 360155 - protein, 30 aa, Zea mays
  Clone ID: MRT4577_91636C.1.pep
GFLNMAGWAFKGPRVQVLSSIDEPARGEIP

SEQ ID NO: 360156 - protein, 81 aa, Zea mays
  unsure (1)..(81): unsure at all Xaa locations
  Clone ID: MRT4577_91637C.1.pep
AASGSLPLMQXLHAVLVDHALSSGLRGSGALRVLQDHQVRGGAPRGAAPGGGGRPRGGRRWLLPVAIRIADSRSFPLYRFV

SEQ ID NO: 360157 - protein, 65 aa, Zea mays
  Clone ID: MRT4577_91638C.1.pep
NTQCESHLFIIPSSLATKKSPPLARFVLGNTARMRAPLQSAYYLLFKRWHLQLMGCIKAGFIHKN

SEQ ID NO: 360158 - protein, 90 aa, Zea mays
  Clone ID: MRT4577_91639C.1.pep
MSARGTHKVPCVQFAFSDDTVLSVSAEQTTDMRLYPNRTRCTILGKTHRRRFINKWSRRLSVSLRHHKSLTMTPSPNWHQHRIPHGKSRL

SEQ ID NO: 360159 - protein, 605 aa, Zea mays
  Clone ID: MRT4577_9163C.1.pep
VPKGRPVPGPPRTVCYRQLRALVREAGVRPLTLMATDPAEYFAVMEAAGGADISLGVKLGVQYSLWGGSVINLGTKKHRDKYFDGIDNLDYPGCFAMTELHHGSNVQALQTTATFDPVTDEFIINTPNDGAIKWWIGNAALHGKFATVFARLILPLQGKGGEAADMGIHAFIVPIRDLETHAVLPGIEINDCGHKIGLNGVDNGALRFRSVRIPRDNLLNRFGDVSRDGKYTSSLPTINKRFAATLGELVGGRVGIAYCSVGVLKVAVTIAVRYALLRHQFGPPKQPEISVLDYQSHQHKLMPMLASSYAFHFATVQLVDKYSEMKKTNDEDLIADVHVLSSGLKAYITSYTAKSISVCREACGGHGYAAVNRFGALRNDHDIFQTFEGDNTVLLQQVAGDLLKQYQEKFKGGTLSVTWNYLRDSMGTYLSQPNPVTARWEGEDHLRDPNFQLDAFRYRTSRLLHSVAARLQKHSKTLGGFGAWNRCLNHLLTLAESHIESVILAKFIESVKSCPDEKSREVLKLVCDLYALDRIWQDIGTYRNVDYVAPNKAKAIHKLTDYLSYQVRLVARELVDAFDLPDLIIRAPIGMQSEAYAQYTQYVGF

SEQ ID NO: 360160 - protein, 418 aa, Zea mays
  unsure (1)..(418): unsure at all Xaa locations
  Clone ID: MRT4577_91640C.1.pep
TASPQSWTCMDLYVFATPYRVAWDYYMRSNENHTFEIKAWEDAAEMEYVKQHGIAVFLMPSGMLGTLLSLADVAPLFSNTGWGQDANLAFLGKHMGASFERRRSANTIIRREDVRSGDFLALSKIRGRWGGFQTLEKWVTGAFAGHTAVVLKDGDANLWVAESGYENNKGDEIISMTPWDEGGXMALKDESNPQIALLPLHPDVRARFDESAAWEFARSMCGKPYGYHNMIFSWIDTASDNYPPPLDANLVMAIMSMWTRLQPRYASNMWNEALNKRLGTEKLDLHGIIRETERRGLSFNQLLTVPERDDWEYSDGKSTTCVAFILSMYKAAGVFAPYTESIQVTEFTIRDAYMLKIFEDNQTRLPSWCNAAADGLPFCQILGEYKMGLPEYNTIEPYANMNENCPSAPPTYSRPSRC

SEQ ID NO: 360161 - protein, 154 aa, Zea mays
  unsure (1)..(154): unsure at all Xaa locations
  Clone ID: MRT4577_91641C.1.pep
MSSEEGKLFVGGLNFNTDEQALEDHFSSFGPISEVVVVKDRETQRSRGFGFITFTNPEHASDAMRAMNGESLDGRQIRVDHAGKSARGSRGGAFGGRGRSYSRGGGDQGYGSGRYDSRPGGYGYGYGRSRDYSGRSQGGYDRYSGGNYRDNYXH

SEQ ID NO: 360162 - protein, 67 aa, Zea mays
  Clone ID: MRT4577_91642C.1.pep
LVGRLNIIGLWIWSGQVNCTRLSGLKYPTVNTKMYLQYNKMDRLEPYDSFSDTFVYKLIMLLCLIHP

SEQ ID NO: 360163 - protein, 72 aa, Zea mays
  Clone ID: MRT4577_91643C.1.pep
TGLTLSARPVEGHPYFQLESEDIVAPILRLITYNPKVNGKRLGRFKSTLFGRSWRWCPNWFWSATFITCSIN

SEQ ID NO: 360164 - protein, 640 aa, Zea mays
  Clone ID: MRT4577_91644C.1.pep
MEEVQNCVMKLRSNPRRHRDKVYVGCGAGFGGDRLMAAYKLLQRVKELNYLVLECLAERTLADRYRIMVSGGKGYDPRVKEWMSLLLPLAFERKVCIITNMGAMDPLGAQKEVLNLASVLGLEITVAVAYESSFETQGSPVLSDESTGGRGGCSTYLGAASIVHCLENYKPHVVITSRVADASLFLAPMIYELGWNWNDTQLAQGTLASHLLECGCQLTGGYFMHPGDAYRDFPFEQLLDLSLPFAEVSCRGEVIVSKVDGSGGLLSPHTCAEQLLYEVGDPANYITPDMVVDFCNVQFHQISKDKVSCDGAKPSNACCPEKLLQLSPTESGWKGWGEISYGGHQCLKRAQAAEYLVRSWIGERYPGINEKIVSYVMGYDSLKAIGGDEDSYLAKQVLDVRLRMDGLFELEEHAVQFVEEFIALYTNGPAGGGGISTGHRKEIILQKMLVDRENIFWRSHAKKASIPCLHNQATYSETGQARISQAQRNPTCRTMAIQHFEASTETPASPAPALPGKRVALYHVAHSRAGDKGNDMNFSVIPHSPADIGRLRSVITPDWVKNAVSPLLGSSSFPDERDVQHRNKLLELVTVEIYYVPGISSLNVVVRNILDGGVNCSRRIDRHGKTLSDVILCQQVILPP

SEQ ID NO: 360165 - protein, 89 aa, Zea mays
  unsure (1)..(89): unsure at all Xaa locations
  Clone ID: MRT4577_91645C.1.pep
PRVRSVPLPPVTLPTIAIXRKPEPDKKGPPKAGPTASASPTPTPKPKPALDQCPIDALKLGACVDLLGNQVHLGDPNVQCWPLVKGIAG

SEQ ID NO: 360166 - protein, 45 aa, Zea mays
  Clone ID: MRT4577_91646C.1.pep
AHGPGTFTIRYAKNLHKILHHRAPPLLLHPTNAALTIVHHIADVL

SEQ ID NO: 360167 - protein, 175 aa, Zea mays
  Clone ID: MRT4577_91647C.1.pep
AVLLRYYLALVSWTSHESCFLGSFRRFQALYVSENLVPSGGEIDELVGHTYLYLKEQLERPVMPPSSILHGTIIDQFIACGNTGEKAHDLASKIWLAVIDSLEENQQTFLLLKRVAQEGEFFLPFPYSRSYRVLWRVFDKLFTDFRDCFSGAEYHDALSTAKSRFQPVPFTWLGH

SEQ ID NO: 360168 - protein, 102 aa, Zea mays
  Clone ID: MRT4577_91648C.1.pep
ATPRASKATPYQPENQQSSPMEEEEKKKKEGVGGPAHQPAHIVLPLAALGCLSRPPSSCCRPRLRRCRLRFAAAGDDSDAAANNLNVAAPNSASSCPGRESR

SEQ ID NO: 360169 - protein, 168 aa, Zea mays
  unsure (1)..(168): unsure at all Xaa locations
  Clone ID: MRT4577_91649C.1.pep
PLFFQQSSALSQRFPLVHXLAQPVRVPEVQQLVLANFDAYYXLHQFLPFNLLPAVNCDYHLQQHRLPFSQLSDAYPQQFLPFKHLTALNSHVYXQQQLLLPFSQLAGVSPVTFLTQPQLFPFQQQAAPNAGSLLQXMQQLLPFKHLALTTPSAFYHHPVGGGALFDIS

SEQ ID NO: 360170 - protein, 91 aa, Zea mays
  Clone ID: MRT4577_9164C.1.pep
CDVDMFNPWVFGSPFKGVHGQVVIFSFLTRSPCQMTRLNPLVFRLSPCLICMVGRWDKVLPGNVILKVFLLGDFGSGGIRWCPRFSECWLP

SEQ ID NO: 360171 - protein, 102 aa, Zea mays
  Clone ID: MRT4577_91650C.1.pep
MKFKCVVVVGEYAPSGRGKPQLYALCGHCNKPLFGQFGKWEAGPPWPLFPTVVGDIGPVAFAFLRPLTPGGFVFYPQFIGRGLGSPSLGLFRWLPYRFRPVP

SEQ ID NO: 360172 - protein, 90 aa, Zea mays
  unsure (1)..(90): unsure at all Xaa locations
  Clone ID: MRT4577_91651C.1.pep
PSSSSSTKLKTLSICLVKVTWQPYNAPELDGMIFSSVXNIDEEINRMQCPMICFXCVEWHLPHRVEKQFGRNQIWLVEDRFCNIKVFQVF

SEQ ID NO: 360173 - protein, 77 aa, Zea mays
  Clone ID: MRT4577_91652C.1.pep
PNSYPRHRCHRVQQAKGWRATAPTAVAPYPPAPPLLTALDDKDLTQRRAVQLHILTPNFRTTKGSPFSATVTAGPTT

SEQ ID NO: 360174 - protein, 106 aa, Zea mays
  Clone ID: MRT4577_91653C.1.pep
MANGGGYVWALAAGFNAALAAISAKFFSTLLLKYGTVILFNVTMWGCYVNSLKALSSLQATVTNFAANFISSGLAGCFLFDEPLPSKVIREFSVFIWCILRISTEK

SEQ ID NO: 360175 - protein, 106 aa, Zea mays
  Clone ID: MRT4577_91654C.1.pep
MFNNAVISFLQLWLATLAFAAPIADDISATSAKPWHYGTGGGIIGFIVLVLDILVWIEVLQSNRPVSHKILWCLVVFLFPIVGMLVYYLFSNRQAHMRSGGYEPVP

SEQ ID NO: 360176 - protein, 38 aa, Zea mays
  Clone ID: MRT4577_91655C.1.pep
TCYFKAFPYIKWWASSKAKVDLLTLPYVFTTLYETILP

SEQ ID NO: 360177 - protein, 69 aa, Zea mays
  Clone ID: MRT4577_91656C.1.pep
TDEYIFSWLCRSSMDCQSLTSKNLMLCKAATFEQKSTNYKKQQCFAISVRSQTEKQNTTKVHQHIILFS

SEQ ID NO: 360178 - protein, 163 aa, Zea mays
  unsure (1)..(163): unsure at all Xaa locations
  Clone ID: MRT4577_91657C.1.pep
RRYRRRRPNTRRMRRTRTXITRRHRRSLPSRNHRRRISNRHSTRHHQPRNRQMSLTKSRPPRKPPQPHRTNRMRTRRRRSTRNMLLQSITHPTRTRLRPSRHPRGSLKSSRLHTTLRRRHTTSSLINNNSHSRNKRSISRTNSSKKRRNNILKHINQPKGSKP

SEQ ID NO: 360179 - protein, 71 aa, Zea mays
  Clone ID: MRT4577_91658C.1.pep
ELLFDRCIYRYPHSRIHRIPVLPTHINFQYARNDERGLGLELCPGFIRNSTGHEGYEGRSGTLAGYTRPPG

SEQ ID NO: 360180 - protein, 50 aa, Zea mays
  Clone ID: MRT4577_91659C.1.pep
PPFYFKGGITLKHTPSPGGDGSGTILTPGGPPARGEPFLGERNAQKWGAV

SEQ ID NO: 360181 - protein, 236 aa, Zea mays
  unsure (1)..(236): unsure at all Xaa locations
  Clone ID: MRT4577_9165C.1.pep
VAGDLLKQYQEKFKGGTLSVTWNYLRDSMGTYQSQPNPVTARWEGEDHLRDPNFQLDAFRVSRLFLVTESXSSPMPPLSCADRVTFPXYRTSRLLHSVAARLQKHSKTLGGFGAWNRCLNHLLTLAESHIESVILAKFIESVKSCPDEKSREVLKLVCDLYALDRIWQDIGTYRNVDYVAPNKAKAIHKLTDYLSYQVRLVARELVDAFDLPDLIIRAPIGMQSEAYAQYTQYVGF

SEQ ID NO: 360182 - protein, 91 aa, Zea mays
  unsure (1)..(91): unsure at all Xaa locations
  Clone ID: MRT4577_91660C.1.pep
GAPWGGGDPDRSLCLLPGGEPPPRPLGGEPPLLGALEGXPPPGGPXKTPPWGPLKKTPPFGGPLRETPPFDPLRETGPFDPLNANPPFWVP

SEQ ID NO: 360183 - protein, 34 aa, Zea mays
  Clone ID: MRT4577_91661C.1.pep
YSPHNFFSSSLMCIKLQMYNLFSHGYVQIKGAPI

SEQ ID NO: 360184 - protein, 60 aa, Zea mays
  Clone ID: MRT4577_91662C.1.pep
SACCHMAHRCYTRLESLISSERIMQHGFGFFVMLCMYVRVAHHCLCRHQRLGSRLSGSVC

SEQ ID NO: 360185 - protein, 141 aa, Zea mays
  Clone ID: MRT4577_91663C.1.pep
FFSPPKVRGRSGDRAIPRFRLKVSFSFGEWALFGKGSPKKKKKGGPPFGFFKRPPTLVKVPPPLKENKALGFSALNGTGAPRIILNRFQYSGPQSTVPPREVQCRPSFVWCDFPLVFPKQLFSAVSVQPPLARPFLCRAAV

SEQ ID NO: 360186 - protein, 72 aa, Zea mays
  Clone ID: MRT4577_91664C.1.pep
GGARVLDPLFQAEVRGDRRRGAHHKVQYRRCVSRGQGPRASYDEAWTPERACKQYCLTCQSQSHFGLRWPTC

SEQ ID NO: 360187 - protein, 58 aa, Zea mays
  Clone ID: MRT4577_91665C.1.pep
FYQLFIRLFPMRRYIYLIYTMYNFLSRISYNNNNKNCIFVYYSIETTMPDRVRYCTKQ

SEQ ID NO: 360188 - protein, 120 aa, Zea mays
  Clone ID: MRT4577_91666C.1.pep
CGFQTASIYFHVWPATRQLRSPHSSRRPRSMSCLRLASTHCADISRGNFAARQRPWTPLPSRIAPLLLQGLAPDARFSWTGYEFSIVKVVPMAARVGPPLMKLPIGILLCPETFGSKLNP

SEQ ID NO: 360189 - protein, 123 aa, Zea mays
  unsure (1)..(123): unsure at all Xaa locations
  Clone ID: MRT4577_91667C.1.pep
VVLWGGDDAFSTFFSESXAGKHVSRAVIVDLXPCVSDDVRTGTXRQRFHPEQLISSKVDAAYNFARGHHMIGKEIVELCIDCIRTLAYNCTRLQGILVIIASSGRVGSWLGSLHLYCLSVDYG

SEQ ID NO: 360190 - protein, 93 aa, Zea mays
  unsure (1)..(93): unsure at all Xaa locations
  Clone ID: MRT4577_91668C.1.pep
YCAARETESWGGLYEYRGLQPTAAGGNTIPDVAAQQQPSAISSEEWKRRHAGLVSIAXIADGSANMMINNMVHVDVMVLNTFQDPNPPVEVAS

SEQ ID NO: 360191 - protein, 53 aa, Zea mays
  Clone ID: MRT4577_91669C.1.pep
GRFFFSFSLGRMDLIHSNAREHNAERGHPYSKPHKLNPKKHTFNLGMVATTSH

SEQ ID NO: 360192 - protein, 62 aa, Zea mays
  Clone ID: MRT4577_9166C.1.pep
GRPFFFFFFFFFFFLFFFFFGKQPLFIECFHRKFIHTCLLIGVDPADHLKLAVYRLTHHVAT

SEQ ID NO: 360193 - protein, 83 aa, Zea mays
  Clone ID: MRT4577_91670C.1.pep
VNLTSIIHNTYKRNWNASQNGVNRWNLSWCKAGNGQKAKRPSRSCCKPQWFNSGRSCSWGLFYWGPLSNCSWTQDPPQLRTQY

SEQ ID NO: 360194 - protein, 45 aa, Zea mays
  Clone ID: MRT4577_91671C.1.pep
KNKSSIDRRGQKKMTGRRRDHGPGWCSFPPRVLEWKARRRRCFLP

SEQ ID NO: 360195 - protein, 61 aa, Zea mays
  Clone ID: MRT4577_91672C.1.pep
SDISNSHMNLVTSICLKDVEMEFTRGYRCHLLWIQYRLSKRRNNSNSYMIMVAALCLENVE

SEQ ID NO: 360196 - protein, 64 aa, Zea mays
  Clone ID: MRT4577_91673C.1.pep
YIQTFHIGCKLPFLESVRRKLLAIEGVPYCLHKDMQLIKAFNHIKSTNCQSHISKRIDMVVYAY

SEQ ID NO: 360197 - protein, 64 aa, Zea mays
  Clone ID: MRT4577_91674C.1.pep
VAVYGFRQLRYMWRLMVTVQSPNNQDVPVSSMQQQFGVNAYGSITPRMRVDRSITLVPATSRPS

SEQ ID NO: 360198 - protein, 35 aa, Zea mays
  Clone ID: MRT4577_91675C.1.pep
SPAAPRPRAPFYRPEQGRIHIQPNRQLQVFCHGEP

SEQ ID NO: 360199 - protein, 104 aa, Zea mays
  Clone ID: MRT4577_91676C.1.pep
RGLVFKKKTKNRLNRFKGKRGQQIFFCFWQKNWGPGGLFFPPNTLEGLKSHYLKGGGGPLKKFLGTTRGPPVLPFSLEGRGLPPAEGAKTKSRKPRPKSFFLIW

SEQ ID NO: 360200 - protein, 84 aa, Zea mays
  Clone ID: MRT4577_91677C.1.pep
APGGGPPPPFQGGGGVIRPPGLPQRPVSLSKWGLVKTGPLFHFFSKKRGWSIFFFGSVRVRGPHGNGLIRPCPRGEGFPRPLWL

SEQ ID NO: 360201 - protein, 136 aa, Zea mays
  unsure (1)..(136): unsure at all Xaa locations
  Clone ID: MRT4577_91678C.1.pep
MRKRLSIHMRXATCQLXKAYYHLYCHQHGIQDDGQMPXDNTIGGRDDAFNTFFRETGAGKHLPRAGYSDPDPTGFEEVRXTATYHRLVHADHVIRDYDDAXNTITREHYCIVHIIDSTTLDRIRKXIADNCTXLQG

SEQ ID NO: 360202 - protein, 56 aa, Zea mays
  Clone ID: MRT4577_91679C.1.pep
HVIWLPYVLAPKIIGLVSRVLLSIGPRRSCDIYYSQITLSPPFFRHEFNAKDPPKK

SEQ ID NO: 360203 - protein, 72 aa, Zea mays
  Clone ID: MRT4577_9167C.1.pep
VTSSASSPVYPQMDEPRCRSSFLMIQLSILCPVAGRAVSAIVCADVLSRSTQCVRFAKTVSTLRIMCLKSIK

SEQ ID NO: 360204 - protein, 196 aa, Zea mays
  Clone ID: MRT4577_91681C.1.pep
MESPAPARSARAPATPTCTVPGLLVGLTKLLSLTKACAAPTPAADDGGGEAAAAAATKPGHDPGPDPRLVLMRLFDAVSALKSGYVKLQRAHFPYDPDRVASADEAVASELDSVAALHCLCSSRRGIGPLVDDRWSLVQRLEAEARGEDADIAALGRELRRLQHDNARLSRRGRQEQERRRASQGASAVLRAQRAG

SEQ ID NO: 360205 - protein, 117 aa, Zea mays
  unsure (1)..(117): unsure at all Xaa locations
  Clone ID: MRT4577_91682C.1.pep
TVLGKNKSGINGFXRIGRLVVRVALQSEDVELAAMNDPFITADYMTYMFKCHTVHGQWTHSDIDLRDCKTLLLREKPVTGFGIRNPAEIPWGEAGAEYALESTAVYTDQDKAAVHLK

SEQ ID NO: 360206 - protein, 235 aa, Zea mays
  Clone ID: MRT4577_91683C.1.pep
MARSSPIAPNVGRLSRSQVAAKRGLYKGKKTGTAPAKEEKPTTVEKSIGGAKNGEKRTISTDKAQKYYPAEDVRKPKASRKTPGTTQLRSSITPGTVLILLAGRFRGKRVVFLKQLDSGLLLVSGPFRLNGVPLRRVGQAYVIATSTKVDLAGVSVPETVNDAYFTKSKAGKEGKEDQFFGDNKEKKLLSDDRKSEQKTVDAALLANIKKVDNLSKYLKSTFSLSRGDKVHELKF

SEQ ID NO: 360207 - protein, 42 aa, Zea mays
  Clone ID: MRT4577_91684C.1.pep
RKKKKKKKKKKKKKKKKKKKKKKKKKKKKKDRDVKKMDVLRS

SEQ ID NO: 360208 - protein, 131 aa, Zea mays
  Clone ID: MRT4577_91685C.1.pep
MQAAKKGIETFKETAANIGASAKSGLEKTKATIQDKNEKMNAEDQTQMDMATKRKEETINQADMEKQQARKYYAAAKHYAMAEHMAKGNHDTVGPRIETATHITSGPETDNAMYSNTGPGTETATVTTRGL

SEQ ID NO: 360209 - protein, 57 aa, Zea mays
  unsure (1)..(57): unsure at all Xaa locations
  Clone ID: MRT4577_91686C.1.pep
SARALEYLHETCSPSVVHKNLSXSNILLDGELTPHLSDSGFAGLLANQEFQVLLVHL

SEQ ID NO: 360210 - protein, 64 aa, Zea mays
  Clone ID: MRT4577_91687C.1.pep
GVPLRSSLFWAPPKVSLPMGAGNQAPFPLISLILAGIPGPRPGLSEEAMAFAPPFSSRGPFFLV

SEQ ID NO: 360211 - protein, 93 aa, Zea mays
  Clone ID: MRT4577_91688C.1.pep
KVVVPPAKWTYFWARTGPTPKELGLSRAKYPPINPAGVVAFVCVMDRKGREAPREGVVMCVPAGSNEEDNAWGDPVRRVPRPSFKSFQAQHVW

SEQ ID NO: 360212 - protein, 104 aa, Zea mays
  Clone ID: MRT4577_91689C.1.pep
ERRHRRFKRLGDDLVLRARVPLVGALTGWQLSFRLLGGDRFRCAFRDEVICPGYVKVVRGGGMPVAGGAKGARGDLVVKFDVVFPEDLTDEQRKGLAEILRGCG

SEQ ID NO: 360213 - protein, 75 aa, Zea mays
  Clone ID: MRT4577_9168C.1.pep
GPGGPSNGSMTRWRRAAICSSSSPLTTSSRQCGRSSSRSDRDHKLDMFFLSIYILCLEMYFFILYNRLTMDCSFR

SEQ ID NO: 360214 - protein, 69 aa, Zea mays
  Clone ID: MRT4577_91690C.1.pep
YSSGLQIVIRETLCPQHIRVWYTAFTSLAMGMKCPQGLAKGSPMIFFCVLLLFFFSFIREHGKSCGLRR

SEQ ID NO: 360215 - protein, 114 aa, Zea mays
  Clone ID: MRT4577_91691C.1.pep
MPFIIGNETFEKLDTLGTSVNLLVPLTQVFHGGSVDAATLPDGCCSSTCCSPGSPTSPGAASPGRALRLPSDPFLALSRVVMPPVFGRKLDLSPLVAFMAIDIIIMILRPQPRM

SEQ ID NO: 360216 - protein, 112 aa, Zea mays
  Clone ID: MRT4577_91693C.1.pep
SYLRSGDGAVRRRRRGRRRRPAPPRQALGVVVVVQLVRREPGQENRLPVFVVVHACARGGAGTVWTAMAHIITAVIGSGVLSLAWSVAHLGWMGWRFSDASVHSDIKLWPLQ

SEQ ID NO: 360217 - protein, 100 aa, Zea mays
  unsure (1)..(100): unsure at all Xaa locations
  Clone ID: MRT4577_91695C.1.pep
GGPRGGDPRGSSGLPPRPXHLCVCAGGPPPPPWREGGGXRKSPPPPKKKVRXRKPTRKLPFFGCTRRPSRAKRRGRRGPAWSGCSPRLFFFLAPPPPRGF

SEQ ID NO: 360218 - protein, 154 aa, Zea mays
  unsure (1)..(154): unsure at all Xaa locations
  Clone ID: MRT4577_91696C.1.pep
MARGHIVHLKRXAAPKHWMLDKLTGVFAPRPSTGPHKLRECLPLIIFLRNRLKYALTGDEVKKICMQRFIKIDGKVRTDITYPAGFMDVISIDKTGENFRLIYDTKGRFAVHRITPEEAKYKLCKVRKIFVGTKGIPHLVTHDARILRSWRSGS

SEQ ID NO: 360219 - protein, 122 aa, Zea mays
  Clone ID: MRT4577_91697C.1.pep
ARHVPPLLPVSLAHCSSPLLPRGIATPPPLLALSTAAALLYQLAASLRRGLVAPSPLLPRGGGPASLLTLRPESPAPRRLLEPPPCSHPPLRCSDFGSLQTETASSSDANAWLTVRVIAMIL

SEQ ID NO: 360220 - protein, 58 aa, Zea mays
  Clone ID: MRT4577_91698C.1.pep
KKKVVLGTLTGSFGGSVLRGSLPSCALPTSLLGKSLPLQIDGSLLNNFNCVVAGPKSP

SEQ ID NO: 360221 - protein, 61 aa, Zea mays
  Clone ID: MRT4577_91699C.1.pep
NFYLFFILFNLFIFFNHQITLYPPLKIWRASLHVFNGWARHLAAHIGDSSPHGTKLEEVTS

SEQ ID NO: 360222 - protein, 49 aa, Zea mays
  unsure (1)..(49): unsure at all Xaa locations
  Clone ID: MRT4577_9169C.1.pep
THALQYLGTRMDPSLVPRILQMTLVKYVSFCTLSLSNYSSCLLALCIXE

SEQ ID NO: 360223 - protein, 92 aa, Zea mays
  Clone ID: MRT4577_916C.1.pep
TQASRTCVASNTFSALLILHLYLQHISKWLFMSLISIMSLATSWITGNTVEVMCPPWLIVAVVRLPGHVLPVIPFQRYSSFICISSNPACGE

SEQ ID NO: 360224 - protein, 50 aa, Zea mays
  unsure (1)..(50): unsure at all Xaa locations
  Clone ID: MRT4577_91700C.1.pep
VSDPAXCSSSWEEVMVPSRMAPCERGRVVRGCSKSHREXACRLKLLRALA

SEQ ID NO: 360225 - protein, 57 aa, Zea mays
  Clone ID: MRT4577_91701C.1.pep
IGVQSFWWIVLDVVSPSPLLVICGRPVYKHYMIGLISTRLEPFLGKKSSGVPKTPLL

SEQ ID NO: 360226 - protein, 137 aa, Zea mays
  Clone ID: MRT4577_91702C.1.pep
PRVRTCVRHGRGHERADKESDNEGDETNEPTMDRIKDDLKDDVENYEGIASSCETSGDEDVHVEVHMKSLKVRNTMLTDIKGENTASYTATDEDADVQVKVEYKGLYHTVLYTTQHITEQTYGHTERHRVIARVNPY

SEQ ID NO: 360227 - protein, 42 aa, Zea mays
  Clone ID: MRT4577_91703C.1.pep
PIRQTINFHFLYRNNITFEGQGASSVLLTITTLTKSNSFIYK

SEQ ID NO: 360228 - protein, 136 aa, Zea mays
  Clone ID: MRT4577_91704C.1.pep
GSFENPSEKKKGYVLPRAKMVNADLARIITPDEVQSVVNPIKDGPKRAVLKKNPLKTLNVMFKLNPYAKPAKRMSLLAEASRVKAKKEKLEKKRKVVTKEEAQAIKAAGKAWYQTMISDSDYPEFDNFTKWLGASQ

SEQ ID NO: 360229 - protein, 219 aa, Zea mays
  unsure (1)..(219): unsure at all Xaa locations
  Clone ID: MRT4577_91705C.1.pep
QLPYLCRGLFFCVAIGPWAGLIIGFVTEYYTSNAYSPVQDVADSCRTGAATNVILGLALGYXIAALGMLSTIATGLAIDAYAPISDNAGGIAXRTDAVDAAGNTTAAIGKGFAIGSAALVSLALFGAFVSRARVMVVDVLSPKVFIGLIVGAMLPYWFSAMTVKSVGSAALKMVEEVRRQFNTIPGLMEGTAKPDYATYWKISTDASIKEMIPPGALVM

SEQ ID NO: 360230 - protein, 230 aa, Zea mays
  unsure (1)..(230): unsure at all Xaa locations
  Clone ID: MRT4577_91706C.1.pep
HASAHASAHASADAWVIIGFVTXYYTSNAYSLVQDVADSCRTGAATNVILGLALGYNDNAGGIAXRTDAVDAAGNTTAAIGKGFAIGSAALVSLALFXGAFVSRAGVKVVDVLSPKVFIGLIVGAMLPYWFSAMTVKSVGSAALKMVEEVRRQFNTIPGLMEGTTKPDYATYWKISTDASIKEMIPPGALVMLTPLIVGTLFGVETLYGVLAGALVSGVQPSFSLNRKEL

SEQ ID NO: 360231 - protein, 419 aa, Zea mays
  unsure (1)..(419): unsure at all Xaa locations
  Clone ID: MRT4577_91707C.1.pep
SLHSSALCPCLEPSPLCLRFPWHDDCWYCCNHCLLDHPLLFSSVRIIVCLITTLFATDFFEVKAVKEIEPALKKQLIISTTLMTVGIAVISWLALLAKFTIFNFGTQKDVSNWGLFFCVAIGPWAGLIIGFVTEYYTSNAYXSKPTSLLCFFFSSFLCDGVLIILTCLFYGSPVQDVADSCRTGAVTNVILGLALGYKSVIIPIFAIAVIIYVSFSIAAMYDIAVAALGMLSTIATGLAIDAYAPISDNAGGIAXRTDAVDAAGNTTAAIGKGFAIGSAALVSLALFGAFVSRAGVKVVDVLSPKVFIGLIVGAMLPYWFSAMTVKSVGSAALKMVEEVRRQFNTIPGLMEGTAKPDYATYWKISTDASIKEMIPPGALVMLTPLIVGTLFGVETLYGVLAGALVSGVQPSFSLNRKEL

SEQ ID NO: 360232 - protein, 163 aa, Zea mays
  unsure (1)..(163): unsure at all Xaa locations
  Clone ID: MRT4577_91708C.1.pep
RRITFLIGPDVSAHFFMSNESDMSQQEVYRFNVPTFGPGVVFDVDYQVRQEQFRFFTEALRANKLRSYVDQMVAEAEEYFPKWGESGTXDLKYELEHLIILTASRCLLGREVREKLFDDVSALFHDLDNGMQPISVIFPYLPIPAHRRRDQARTRLAEIFATI

SEQ ID NO: 360233 - protein, 168 aa, Zea mays
  unsure (1)..(168): unsure at all Xaa locations
  Clone ID: MRT4577_91709C.1.pep
MLKICCIGAGYDGGPTMTMIALKSPDIEAGTIDISKXPRIEAWNXDTLTIYEAGLYYFFTQRRDRNLFLNTDVDENVAQADIIFVSVNTPTKTRXIEDGKAADLTYWESAARMIADVSKYDYIDVEKYTGPDKTAEAIEKISTHNSXGINHQIFSNPESLAEATAIED

SEQ ID NO: 360234 - protein, 75 aa, Zea mays
  Clone ID: MRT4577_9170C.1.pep
LRKRLEVHASKGILKNTDSVLMPQNSEKDRVYDSDGNVRKKVPNFEIEMFDQKNLELAPGAKALESLRAKKPFPR

SEQ ID NO: 360235 - protein, 48 aa, Zea mays
  Clone ID: MRT4577_91712C.1.pep
TGQRAVLKFAAATGATPIAGRFTPGTFTNQIQAAFREPRLLVVTDPRA

SEQ ID NO: 360236 - protein, 65 aa, Zea mays
  Clone ID: MRT4577_91713C.1.pep
SAIKMGLRYNLVSDILSQSTFIRFCSVYDKRFGLNLTVWTATTAIYEDKNTVEMVEVDPDSSQAH

SEQ ID NO: 360237 - protein, 76 aa, Zea mays
  Clone ID: MRT4577_91714C.1.pep
APHKRFTPSRGNSGFKITRNIFFFYYNSRHLKWPGSKTTVEFLCYGWDRSYNMHLPAVKHNFKKGQPKWPREKLGS

SEQ ID NO: 360238 - protein, 122 aa, Zea mays
  Clone ID: MRT4577_91715C.1.pep
GSIPIHAAMFVKKKKKFRRYAHQSGTDAPLCIREKDFAYDQVRELQDQLRIKNEEFEVLAKSHQLQANSYEKQIYYLQEKNHYMEEVLEHRSGITRNQETRKQMFSLIFHDPVLICSLQCLQ

SEQ ID NO: 360239 - protein, 103 aa, Zea mays
  Clone ID: MRT4577_91716C.1.pep
GTKQREERKRKTKVDMERGNEKRLEMIGYTHPCARTLTCGFYWIFNSIIPSLLGIKSFDVLLVVDYDQEKLARSPTIYSSKHYRNSNSYLFEELIHNSQNMVI

SEQ ID NO: 360240 - protein, 93 aa, Zea mays
  Clone ID: MRT4577_91717C.1.pep
QKTKRGFFNLIGRFHICHSYLWNKDLHLTGAWDLFMAHQLHIESHGAGHTSLLYKLVTFKTPLHRWLSARTDIFYNSLGRPPLIKHSWIDLPD

SEQ ID NO: 360241 - protein, 98 aa, Zea mays
  Clone ID: MRT4577_91718C.1.pep
MGKSASVQRGHVPVLVGEAGKEEEELRRVLVHRKVLQHPYFAGLLELAAAEFGHDQKGVLRIPCDVRRFHGVVQLIRRSRTRRRKKVTVPCLVFLKLL

SEQ ID NO: 360242 - protein, 153 aa, Zea mays
  unsure (1)..(153): unsure at all Xaa locations
  Clone ID: MRT4577_91719C.1.pep
ECTSDEGWQAAVPKGRSTGSRRTGAGTRRPNLAKINTSSLNSENGRYKGRGISNFSSPRVSPSEAAVSIGSRPLAKKLAKSSSFNSKAVSTAVSSNTGENSFNLNSKPASPAIATAAAKVIPSTTPSASQTVRKSLSYKEVAIAAPGTLAXAS

SEQ ID NO: 360243 - protein, 208 aa, Zea mays
  Clone ID: MRT4577_9171C.1.pep
MVKHNNVIPNGHFKKHWQNYVKTWFNQPARKQRRRIARQKKAVKIFPRPTSGPLRPIVQCQTRKYNMKARAGRGFTLEELKSAGIPKKLAPTIGISVDHRRKNRSLEGMQSNIQRLKTYKAKLVIFPRRARKVKAGDSTPEELATATQVQGDYMPITRGEKRSVEIMKVTEEMKAFKAYGKLRVERMNQRQLGARTKKAAEAEKEEKK

SEQ ID NO: 360244 - protein, 44 aa, Zea mays
  unsure (1)..(44): unsure at all Xaa locations
  Clone ID: MRT4577_91720C.1.pep
RLVATSYDDAGYHRFAGSCLLYDXKLSYSQLNYPRRSLSHAEPL

SEQ ID NO: 360245 - protein, 70 aa, Zea mays
  Clone ID: MRT4577_91721C.1.pep
GIKSLLNFRLGKRDGYQRKYIMGLGGSESHFLALAGLYGTDLPIHMNPKRGFTGQQPTSITPNLCSHTPA

SEQ ID NO: 360246 - protein, 170 aa, Zea mays
  unsure (1)..(170): unsure at all Xaa locations
  Clone ID: MRT4577_91722C.1.pep
MASLLARCYXYCANKAYPKFHFHRAVRDPKIQIFHLDQECANTHNFTLXCVHLVYNKYHHLSSEALEDAHICVNEYLTQNIVKEAFHLRLPAHLFHVXTMIKNMVCSGXADILQIAMPAAWLYTTXTVARVNIEHILMSVLTRDANRAXALECLRRSHYKFPXRQKIIVS

SEQ ID NO: 360247 - protein, 83 aa, Zea mays
  Clone ID: MRT4577_91723C.1.pep
WFFLSPHGVGVSSNAFRVEVDLVKAHRKHVDDDSSKRERRYYVFDNLPVHMQMVNRPQLQSKLASSTPTGSESHYLADSTVDP

SEQ ID NO: 360248 - protein, 195 aa, Zea mays
  unsure (1)..(195): unsure at all Xaa locations
  Clone ID: MRT4577_91724C.1.pep
MLIGLRVDCVLKDLGXATLFFSVEVQTTDGIHLSQTKHAXNFLNRVGMMNCKLTXTTLLNTSEKLRIGEGELLDPEDVTRYRSIVGALQXLALTQPDLCFSVNKVCRFLHALTTHHWSDVKRILRYIKFTLEDGVKIXKYPSMLVSAFSYVDWPGDIDDRRSTGGFEVYLGRNVVFXCNRKQPTASRSSAEAEYP

SEQ ID NO: 360249 - protein, 196 aa, Zea mays
  Clone ID: MRT4577_91725C.1.pep
PCSQTRAASSQSAPHLPRRAPSTGFPWSPRAQLCHGRALPFSSSSLSSLQLAELCPLPMVELHPCLSPPQLASFSSDLVLLRPYACSARSHSHGELAGVHPLRLLAVEFPSFLRRAHARLPARCRVPYRALSIPLALSSVLSSSIRSRAGALRRARPCTSCSPLLFSVGRCTAPARISAVRSLVRHPVLLHGWPML

SEQ ID NO: 360250 - protein, 73 aa, Zea mays
  unsure (1)..(73): unsure at all Xaa locations
  Clone ID: MRT4577_91726C.1.pep
YVVGFIRXKKKKKKKKKKKKKKKKKKKKKKKKKKKKKKKKKKKKKGRAFLKEPNFTSGGLQLFSFFLGPPKLN

SEQ ID NO: 360251 - protein, 49 aa, Zea mays
  Clone ID: MRT4577_91727C.1.pep
LSKDQAIGRVETRHRLFKAFWLQACFVENHPLKLGHVCKIKIAARLEPN

SEQ ID NO: 360252 - protein, 200 aa, Zea mays
  unsure (1)..(200): unsure at all Xaa locations
  Clone ID: MRT4577_91729C.1.pep
MADKRLRLLMLLGLSAGAVTATIMPQCSHAAIAFLLPPYLIPAXSSYXENPIIXPYRIQQAITGGMLPXLSTLQLQQXNPITSHTSVXHPLAHNIXAQHLQHRALANLAAYSHKQQSIPFNQLPALNSAYYLPHHHLPCSQLRDGYPQXSFPFNATDTIELYWLLXQDQQLLPLNQLAGVSPATFLXQPQLLTLHQHAVP

SEQ ID NO: 360253 - protein, 122 aa, Zea mays
  unsure (1)..(122): unsure at all Xaa locations
  Clone ID: MRT4577_9172C.1.pep
MGLIAHXDFQHILRLLNTNVDGKQKIMFAMTSIKGVGRRFSNIICKKADIDMNKMAGELTPEELERLMTVVANPMHFKVPDWFLNMNKDYKDRRFSHVVSNALHMKLIDDLLRLKKIRNHRG

SEQ ID NO: 360254 - protein, 956 aa, Zea mays
  Clone ID: MRT4577_91730C.1.pep
MKIPSDQGLIAIHGSQEAARRAGGNWTDSKAIHNIDGAEACEQYKYRREKAASADQPKPMLICDDIAEQKVLLGSQLSEEQEKTLIRFLFNNKVVFAWSANDLCGVNRDVIEHSLNVDPSFRPRKQRLRKMSNDKAEGARNEVKRLLSAGVIREVKYPEWLANTVMVKKVNDKWRMCIDFTDLNKACLKDEFPLPRIDSLVDAAAASELMSLLDCYSGYHQIWMKEDEPKTSFITHSGTYCYLRMPEGLKNAGGSFSRMTAKVLHSQIGRNVLTYVDDIIVKSTKQENYIADMQETFANFRQVGLKLNPEKCVFGVKKGKFLGCLVSTKGIEANPNKIEAILRMEPPSTKKGAQRLTGRLASLNRFISRSAERNLPFFEVLKSVKVFQWGPVQQKAFDELKQYLIDLTTLTPPMPGAPLLLYVAASHSAVSVALVQEKLEGQVKKQAPIYFVSEVLSLSKKNYTELEKVLYAVLMASRKLRHYFQAYNIIVPSSQPLKDIMRNREATGRVGKWAAELNEFCIDYVHRSSIQSQALADFIADWTPGAQEEEASKDAEAWTVLCDGSWGTFGAGATSVLIAPSKARTCYAVKLDFSCTNNIAEYEALLLGLQKLKAMGIRRAVLKTDSQVISGHVDKSCKARDLKLEKFLDTVRRLEASFEGFSVKNIPRGKNEHVDLLAKWGLDLLGPLPPAQGNLKYVVVAVEYFSKWIEANPLATITSVTVQKFFWQNIICRFGVPKAITVDNRTQFDAEAFREFYEQIGTKIHFASVRHPESNGLVERANGIIMTGIMKFIFNQPRGKWPDELIKVVWSHHTTKSRSTGFTPFKLLFGDEAITTEEAKAGSIRTIASTEDEADYSVAKDAIEGIMLQDVENINKYQVETIKWRDRKVRLKNIKPGHLVLRRVANPDTVGKLQLKWEGPFLVVSSSRPSSYRLKDMDGNDIPRSWNADEFRRYYV

SEQ ID NO: 360255 - protein, 479 aa, Zea mays
  Clone ID: MRT4577_91731C.1.pep
MGIRRAVLKTDSKVISGHIDKSCKARDPKLEKYLDTVRRLEASFEGFSVKNIPRGENEHADLLAKSAAQGLPLPSEVFFETIKAPSIDLLERAVLNISPVCSEDWRTEIMSFLQGNFLSDDEAYQKRIAARARPYVIIEGELYKHGVCSPLLKCLSRAEDQRQPSSLTQLIQPTWPLQRWGLDLLGPLPPAQGNLRYVVVAVEYFPKWIEAKPLAIITSVTVQKFFWQNIVCRFGVPKAITVDNGTQFDAKAFKEFCEQIGTKIHFASVRHPESNGLVERANGIIMTGIMKLIFNQPRGKWPDELIKVVWSHNTTMSRSTAITPEEAKAGSIRTVASTEDEADFSVAKDAIEGIRLQAVENINKYQAETIKWRDRKVRLKNIKPGHLVLRRVANPDTVGKLQLKWEGPFLVVSSSRPGSYRLKDMDGNDIPRSWNEDELRRSTRAISPEDVNVKTEHAPSSAKRKGKTGRSSTDVPKGM

SEQ ID NO: 360256 - protein, 697 aa, Zea mays
  Clone ID: MRT4577_91732C.1.pep
MVSFNNHTGVASAPKLVLPITGGSCSKPANKKQKKEAQRRVQHVGVQGPFIKSRWSHIPITFSQEDLQLKDYPHNDVMVISCVIKGFLVHNILVDTGSVADIIFAKAFRQMQEPEDEIHDATHPLCGFGERLASLNRFISRSAERNLPFFEVLKSTEVFQWGSAQQKAFEELKQYLIDLTTLTPPAPGAPLLLYVAASHSAVSAALVQEKSEGQLKKQAPVYFVFEVLSLSKKNYTKLEKVLYAVLMASRKLRHYFQAYHIIVPSSQPLKDINEFSIDYVHRSLIQSQALADFIADWTPGAQEEEASKDAEAWTVFCDGSWGTFGAALLLGLRKLKAMGIRRAVLKTDSHVISGHVDKSCKARDSKLEKYLDTVRRLEASFEGFSVKNIPRGENEHADLLAKSTAQRLPLPSEVFFETIKAPSVDLLERAVLNISPVYSEDWRTEIMSFLQGNFLSDDEAYHKRIAARACPYVIIEGELYKHGVYSPLLKCLSTDEGIMKLIFNQPRGKWPDELIKVVWSHNTTMSRSTDFTPFKLLFGDKAITPEEAKAGSIRTVATVEDEADYSVAKDAIEEIRLQAMENINKYQAETIKWRDRKDRLKNIKPGHLVLRRVANPDTVGKLQLKWEGPFLVVSSSRPGSYRLKDMDGSDIPRSWNANELQRSIRAVSPEDVNVKTEHAPSGAKRKRKNREKLERRP

SEQ ID NO: 360257 - protein, 412 aa, Zea mays
  Clone ID: MRT4577_91733C.1.pep
MGIRRAILKTDSQVIAGHVDKSSKARDPKLEKYLDAVRRLEASFEGLSVKNILRGENEHADLLAKSTAQGLPLPSEVFFEAIKAPSVELMERAVLTISPVHSEDWRTEIISFLQGNCLSSDEAYNKRMEARTRPYVIIEGELYKHGVCSPLLKCLSRIEGMELMKEIHAGPLPPAQGNLKYVVVAVEYFSKWIEAKPLATITSVTIQKFFWQNIVCRFRVPKAITVDNGTQFDAEAFKEFCEQIGTKIHFASPRGKWIDELIKVVWSHNTTISRSTCFTPFELLFGDEAITPEEAKAGSIRTVAATEDEADYSVAKDAIEGIRLQAVENINKYQAKTIKWRDRKVRLKNIKPGHLVLQRVSNLDTVDKLQLKWEGPFLVVSSSRPGFYRLKDMDGNDIPRSWNADELRRYYV

SEQ ID NO: 360258 - protein, 164 aa, Zea mays
  Clone ID: MRT4577_91734C.1.pep
KPSPWNIVHARHVTNPLPLVPEKVDSPGRSICAPNRISPTNMVNLFKKSSPTPNFVNCPPKDYDFESPPVPSEKLKSLGWTPRPMEKPLLAPLEYFEKAGFLRDPKGYPCRPPPHFFISLLTNEIDSCKPIPPPPIPFLAKKKKKKKKKKKKKKKKKKKNTPHK

SEQ ID NO: 360259 - protein, 67 aa, Zea mays
  Clone ID: MRT4577_91735C.1.pep
NLLFSPWATLSNEPYPLSNQSTLLVFLGRTLNSPVQHCIHCSQSTLICCNFREAVFYHDLHCTDYYP

SEQ ID NO: 360260 - protein, 662 aa, Zea mays
  Clone ID: MRT4577_91736C.1.pep
DVIEHSLNVDPSFRPRRQRLRKMSDDKAEGARNEVKRLLNVGVIREVKYPEWLANTVMVNKATGKWRMCIDFTDLNKACPKDEFPLPRIDSLVDAAASSELMSLLDCYSGYHKIWMKKEDEPKTSFITPSGTYRYLRMPEGLKNAGGSFSRMTAKEKLEGQLKKQAPVYFISEVLSLSKKNYTELEKVLYAVLMASRKLRHYFQAYHIIVPSSQPLKDIMRNREATGRIRKWAAELNEFSIDYVHRSSIQSQALVDFIAEWTPGAQKEEASKDVEAWTVFCDGSWGTFGAGAAAVLIAPSKVRTCYAVKLDFSCTNNIVEYEALLLGLRKLKAMGIRRAVLKTDSQVISSHVDKSCKARDPKLEKYLDTVRRLEASFEGFYVKNIPRGENEHADLLAKSAAQGLPLPSEVFFETIKAPSVDLLERAVLNISHVYSEDWRTEIMSFLQGNFLSDDEAYHKSIAARARPYVIIEGELYKHGVCSPLLKCLSRAEAITPEEAKAGSIRTVASGEDEADYSVAKDAIEGIMLQAVENINKYQAETTKWRDRKVRLKNIKPGHLVLRRVANPDTVGKLQLKWEGPFLVVSSSRPGSYRLKDMDGNDIPRSWNADELRRSTRAISPEDVNVKTEHAPSSAKRKRKNREKLERCPKGDAEHDEATKSHS

SEQ ID NO: 360261 - protein, 1006 aa, Zea mays
  Clone ID: MRT4577_91737C.1.pep
MPVTFGFVNNTRTEQVVFDIVDMEYPYNAIIGRGTLNAFEAILHQAYLCMKIPSDQGPIAIHGNGAKACEQYKYRREKAASADQSKPMFLCEDIAEQKVLLGSQLSKEQEKTLIRFLFNNKDVFAWSANDLCGVNRDVIEHSLNVDPSLRPRKQRLRKMSDDKAKGAWNEVKRLLSAGVIREVKYPEWLANTVMVKKANGKWRMCIDFTDLNKACPKDEFPLPRIDSLVDAAASSELMSLLDCYSGYHQIWMKKEDEPKTSFITPSGTYCYLRMPEGLKNAGGSFSRMTTKVLHSQIGRNVLTYVDDIIVKSTKQENHIADLQETFANFRQAGLKLNLEKCVFGVKKGKFLGCLVSMKGIEANLNKIEAILRMEPPSTKKGAQRLTGRLASLNRFISRLAERNLPFFEVLKSVEVFQWGSAQHKAFEELKQYLIDLTTLTPPTPGAPLLLYVAASHSAVSAALVQEKLEGQTKKQVLVYFVSEVLSLSKKNYTKLEKVLYAVLMASRQLRHYFQAYHIIVPSSQPLKDIMRNREATGRVGKWAVELNEFTIDYVHRSSIQSQALADFIADWTPGAHEEGTSKDTEAWTVFCDGSWGTFGAGAAAVLVAPSKVKTCFAVKLDFSCTNNIAEYEALLLGLRKLRAMGIRRAILKTDSQVIAGHVDKSSKARDPKLEKYLDAVRRLETSFEGFSDKNIPRGENEHADLLAKSAAQGLPLPSELIQPTWPLQRWGLDLLGPVPPAQGNLKYVVVAVEYFSKWIEAKHLATITSVTVQKFFLQNIVCRFGVPKAITVDNGTQFDAEAFKEFCEQIGTKIHFASVRHPESNGLVERANGIIMTGIMKLIFNQPRGKWPDELIKVVWSHNTTISRSTGFTQFKLLFGDEAITLKEAKAGSIRTVASAEDEADYSVAKDAIEGIRLQAVENINKYQAETIKWRDRKVRLKNIKPGHLVLRRVANPDTVGKLQLKWEGPFLVVSSSRHGSYRLKDMDGNDIPRYWNADELRRYYV

SEQ ID NO: 360262 - protein, 577 aa, Zea mays
  unsure (1)..(577): unsure at all Xaa locations
  Clone ID: MRT4577_91738C.1.pep
MEPPSTKKGAERLTGRLASLNRFISRSAERNLPFFEVLKSTEVFQWGSAQQKAFEELKQYLIDLTTLTPPAPGAPLLLYVVASHSAVSAALVLEKIEGQLKNQAPVYFVSKVLSLSKKNYTKLEKVLYAVLMASRKLQHYFQAYHIIVPSSQPLKDIMRNREATGRIGNCTNNIAEYEALLLGLRKLKAMRIRRAVLKTDSQVISSHVDKSCKARDPKLEKYLDTVRRLEASFEGFSVKNIPRGENEHADLLAKSAAHGLPLPSEVFFETIKAPSVDLLERAVLNISPVYSEDWRTEIMSFLQGNFLSDDEAYNKRIAVRAHPYVIIEGELYKHGVCSPLLKCLSRAEXNIVCRFGVPKAITVDTXTQFDAEAFKEFCEQIDTKIHFTSVRHPESNGLVERANGIIMTGIMKLIFNQPRGKWLDELIKVVWSHNITMSRSIGFTPFKLLFGDEAITPEEAKAGSIRTVASPEDEADYFVAKDAIEGIRLQAVENINKYQAETIKWRDRKVRLKNIKPGHLVLRRVANPDTVGKLQLKWEGPFLVVSSSRPGSYRLKDMDGNDIPRSWNADELRRYYV

SEQ ID NO: 360263 - protein, 1296 aa, Zea mays
  unsure (1)..(1296): unsure at all Xaa locations
  Clone ID: MRT4577_91739C.1.pep
KNEPQRKGYLVHIVVFATGCAEETISAKAFNQMQKLENKNQDATXRLCGLGXRHIVIIGIITMSVTFGFVHNTRTKEVVFKIVDTEYHYNAIIGRRTLISFETILHPTYLCMKIPSDQGPIAKKLGRGGGGGKTALPEAARKAEGNWIDSKAIRNIDGVEACEQYKYTREKAASADQPKPMLLCEDIAEQKVLLGSQLSEEQEKTLIRFLFNNKDVFAWSANDLCGVNRDVIEHSLNVDPSFRPRKQKLRKMSDDKAEGARNEVKRLLSVGVIREVKYPEWLANTVMVKKANGYHQIWMKKEDEPKTSFITPSGTYCYLRMPEGLKNAGGSFIRMTTKVLHSQIGKNVLTYVDDIIVKSTKQENHIIDLQETFANFRQAGLKLNPEKCVFGVKNGKFLGCLVSTKGIEANSSKIEAILRMEPPSTKKGAQRLTGRLASLNRFISRSAERNLPFFEVLKSAEVFQWGPTQQKAFEELKQYLIDLTTLTSLVLRALLLLYVAASHSAVSVALVQEKLEGQVKKQVSVYFVSEVLSLSKKNYTEMEKMLSSIQSQALADFIADWTPGAHEEGTSKDAEAWTVFCDGSWGTFGAGAAAVLVAPSKVKTCYAVKLDFSCTNNIAEYEALLLELRKLRAMGIRRVILKTDSQVIADHVDKSSKAWDPKFEKYLDAVRRLEASFEGFSVKSIPRGENEHADLLAKSAAQWLPLPSEVFFETIKAPSVELMERAVLTISPVHSEDWRTEIISFLQCNCLSSDEAYNKRMEARSRPYVIIEGELYKHGVCSPLLKCLSITEGMELMKEIHAGLCGSQIGCRPLLGKVFRQGFYWPKAASDAAELVQKCEGCQKCAKDQKQPSSLTQLIQPTWPMQRWGLDLLGPLPPAQGNLKYVVVAVEYFSKWIEAKHLATITSVTVQKFFWQNIVCRFGVPKAITVDNGTQFDAEAFKEFCEQIGTKIHFASVRHPESNGLVERANSIIMTGIMKLIFNQPREKWPDELIKVVRSHNTTILRSTGFTPFKLLFGDEAITPEEAKAGSIKTVASAEDEADYSVAKNVIEGIRLQAVEDINKYQTETIKWRYRKVRLKNIKPGHLVLRRVANPDTVGKLQLNSTRAKSSKYVNVKTEHAPSSARKKEKTGRSSKVVPKGMQSTTKLKKSFLRERSADASALKIRLRQKEKEAVVSCFVVYEKKRSFVILLLSFVILYILKYCKENSSLKEKVSTRFQEGDSCAPRSYQGTEITMSGYNFIKGINFTLDMFEGPWQVFSRRTKFFTTGSNRIENLLQPLYTSATELQTFVLKLCQ

SEQ ID NO: 360264 - protein, 51 aa, Zea mays
  unsure (1)..(51): unsure at all Xaa locations
  Clone ID: MRT4577_9173C.1.pep
LYKFHQALRSCSLPLVMLFLQSRLIQPKYXQLLQQQXCHVLRQIEPQYIHQ

SEQ ID NO: 360265 - protein, 55 aa, Zea mays
  Clone ID: MRT4577_91740C.1.pep
RVVCSLVMLCICCVRCSFSVYGYYIKLEEDRYCFFLVLEENEKEWVDACEDEWVE

SEQ ID NO: 360266 - protein, 368 aa, Zea mays
  Clone ID: MRT4577_91741C.1.pep
MDAQYDVTQEWLDRVKITRKGLRGTKRRPRKQRLRKMSDDKAEGAQNEVKRLLSAGVIREVKYPEWLANTAMVKKANGKWRMCIDFTDLNKACPKDEFPLPRIDSLVDAAASQADLKLNPEKCVFRVKKGRFLGCLVSTKGIEANPNEIEAILRMEPPSTKKGAQRLTGRLVSLNRFISRLAERNLPFFEVLKSAEVFQWGSAQQKAFEELKQYLIDLTTLTPPTLGAPLLLYVAASHSAVSVALVQEKLEGQTKKQVPVYFVSEVLSLSKKNYTELEKVLYVVLMASRKLRHYFQAYHIIVPSSQPLKDIMRNREATRRVGKWAAELNEFTTDYVHRSSIQSQALADFITDWTPGAHEEGTSKDTEA

SEQ ID NO: 360267 - protein, 56 aa, Zea mays
  unsure (1)..(56): unsure at all Xaa locations
  Clone ID: MRT4577_91742C.1.pep
XXFXNWEMVXVVLCAAARRXGQDLGWAVPWRXETTRQLVRAQXPWEIXTXGQXKKX

SEQ ID NO: 360268 - protein, 66 aa, Zea mays
  Clone ID: MRT4577_91743C.1.pep
PGGGGPGEGGTKGKKKGNGGGHGPKVQKGRPGKERPRINRRRQNFKFDEPGSIPPQKRWQIPSLGP

SEQ ID NO: 360269 - protein, 39 aa, Zea mays
  Clone ID: MRT4577_91744C.1.pep
TPGALPTAWGPRATLLLMIPYDRILFLDIIHRRFLYFIL

SEQ ID NO: 360270 - protein, 91 aa, Zea mays
  Clone ID: MRT4577_91745C.1.pep
HASAHASAHMSGAIPLPISSLSFNVAMAPVDISSKYTMKAYRGDSRSYYEWRPVEMSMHGRCLIGEAELSVDRGSLALGNYCYSAKVAYVV

SEQ ID NO: 360271 - protein, 74 aa, Zea mays
  Clone ID: MRT4577_91746C.1.pep
ACRFRSGIPGSTHASERSSAFLLSTVFKILSFKQVNQHSRGGPADVHPRPPRAHRRQLLPPVSGHFQHVAFSLS

SEQ ID NO: 360272 - protein, 106 aa, Zea mays
  unsure (1)..(106): unsure at all Xaa locations
  Clone ID: MRT4577_91747C.1.pep
KIRKVNYKPRGIIYIHTYVHDHXACDTSXHKVSYLLIDTHEGSVCTQSTEFXQLKPYETTNIIKDFNEPPFLDPISLLLGPTKFMVIQGEPGAVIHGKKGSGGITV

SEQ ID NO: 360273 - protein, 413 aa, Zea mays
  Clone ID: MRT4577_91748C.1.pep
AQESLFHQCARLFRPGSSKICVTPIYSSLPSEQQMNAFKPAPAGTRKVVLATNIAETSVTIPGIKYVIDPGMVKARAYNPVTGMESLIIIPVSKAQALQRSGRAGREGPGKCFRLFQESEFDKLVDSTVPEIKRCNLSNVVLQLKALGIDDIIGFDFMEKPSRTAILKSLEQLILLGALTDDYKLSDPVGHQMARLPLDPMYSKSLIVSSKFKCLEEMLIVVSMLSVESIFFSVREKLEEARAARKRFESSEGDHITLVNVYRGAAECLEKSRNANAKEKTMEKALNRWCRENFINYRSLRHARDVHRQIQGHVQQMGLSMSSCGDDMVLFRRCLTSAFFLNAAMRQPDGSYRALATGQSVQIHPSSVLFRTKVDCVIFNELVRTTQNYIKNLTRIDPLWLAELAPQYYATEE

SEQ ID NO: 360274 - protein, 85 aa, Zea mays
  Clone ID: MRT4577_91749C.1.pep
VWWHARICRRLDGSAWRRRRRRTGTQIRGAAQRRWSWRPGSGRNLRRSRRHRSRPWPPGVNHKSHTVDCRSRGWVLASMGVAFGR

SEQ ID NO: 360275 - protein, 241 aa, Zea mays
  Clone ID: MRT4577_9174C.1.pep
MYPPPRSSPFGELHGCEGDGCASDQDTWPLHHVLRSGVHCRLCCSCILLSHRSLYCCRCFLLVTSPSCNYDNGDTLMAPPAPTVTCQVCHDAVAHLPCLYPPPTDGVFVCPPCTAAQNGRPFTYAPPCRQPLDERNARVLVLGARIALALLQRHATAAREAAERLAMEARDARARAHDALIAAFDLDAEEDLSCVVPQPTENDLAASEEEEEEEDSEAETDEEVMLVPRNVMPALVTPTID

SEQ ID NO: 360276 - protein, 52 aa, Zea mays
  Clone ID: MRT4577_91750C.1.pep
PLFVGCRILEQRAGVRIYWVYSYGVKSVERRYISRDAHANILYRDSSEVMLG

SEQ ID NO: 360277 - protein, 59 aa, Zea mays
  Clone ID: MRT4577_91751C.1.pep
VSGFRVRLSRGFTPSCCKVLDVKKSNPSCPSPGVGEKFFEGVYPRGLLIGPAKEKDSAM

SEQ ID NO: 360278 - protein, 50 aa, Zea mays
  Clone ID: MRT4577_91752C.1.pep
VEVRWSRLGERRRWQAPRPRVHRAALHHLARHGSVSCCSHLDQHTHGWVG

SEQ ID NO: 360279 - protein, 65 aa, Zea mays
  Clone ID: MRT4577_91753C.1.pep
NISIITGRSLQASLGEVFSPIYSPFCLHIDSSFYVPNFPLGKMPLPTQFTLFEIHLSLEALRFKK

SEQ ID NO: 360280 - protein, 102 aa, Zea mays
  Clone ID: MRT4577_91754C.1.pep
GGSSLPCSSPGFRGPFFSVSAGSFCGWLALGWPFFLCGSFVTSQGFFGLPSCFWDPPRFFWSPLPVFAFAFRPPLGGGALVFFNKSPPGCRVGWGGINKMVG

SEQ ID NO: 360281 - protein, 50 aa, Zea mays
  Clone ID: MRT4577_91755C.1.pep
ARNKGFLVKLKTSFGNQKFYFLDLEPHISPEKYTFFFFQQNFVGGCVTEE

SEQ ID NO: 360282 - protein, 628 aa, Zea mays
  Clone ID: MRT4577_91756C.1.pep
FSGMFTLAVKMGLQFPVGQTNIDGILHLRENELKRHAGEKSTAIEAYCAYVAEGFENLLDWNDVMKFQAKNGSLFNSPSATAAALVANYDDKALQYLNLLVTQFGSAVPTVFPQNIHYQLSMVDTLESVGISRHFSVEKKAVLDMIYSLWLQKEEEIMLDAETCAMAFRILQMNGFDVSTDWLSHIAEASNFHNSLQGYLCDTKTLLEMYKASKVILSERDLTLENIGCWTGSLLREKLCSDGAQRVPILEEVEYALKFPHYAVVDPLNNRRSMEHLDARGSQTLKTKYLPCHVSQDILALAVEDFCFSQSIYQDELQNIISWEKENRMDQLQFVRQRLAYCYLAAATTISPHELSDARVACAKSIMLTVVVDDFFDVGGSKEEQENLIELVENWDEHHKVEFCSEKVEIVFYAVYNTVNQLGSMASAVQKRDVTKHLAESWLKVLLCMLTEADWQRRQFVPTVEEYMANAVSSLALAVIILPAQYFLGETLSDYMVKDHEYSNLSELMFTCSRLLNDIRSVEREFEAGKLNSVSLLALHSGGSMSIEAAKKETHGSLESYRRGLVALVRRQDSVVPRSCKELFWKLCKTIHLFYFQIDGFTSPKEMVGAVNQVINEPLELQSSNTHV

SEQ ID NO: 360283 - protein, 75 aa, Zea mays
  Clone ID: MRT4577_91757C.1.pep
TAKIIKIFLDLEERNNTVYWLDTYTTVYRRLCGKDVVFEYPMVERCVNIAPGYRDFISVNLDVSLVSQLDCYVCT

SEQ ID NO: 360284 - protein, 113 aa, Zea mays
  unsure (1)..(113): unsure at all Xaa locations
  Clone ID: MRT4577_91758C.1.pep
PKDVPTAAHQPPSPSQYPTQPGPPQPQAEXQPRQCQQTHHKPVXLHGTCRPGSNHSLSQCKQILTHQCTPTGTPYKQHNFITLGSTIARPIFGADIGANHQGTAAAATRAICD

SEQ ID NO: 360285 - protein, 84 aa, Zea mays
  Clone ID: MRT4577_91759C.1.pep
RSVVMNLAMRAWYRAHWVSSCVSTKRRRRRVGVVLGRELARSRARMPRCPSPCQSDQMLLAVAQLARVRQALRVACLGFCPRAE

SEQ ID NO: 360286 - protein, 81 aa, Zea mays
  Clone ID: MRT4577_9175C.1.pep
IWIETCLIPLKTVDSSPLSPNFAPILMGASFFQGVYHPGSSGWHFLAWGGQFIFLRATSPLGKFLDLWGPGPRFSMVNLWP

SEQ ID NO: 360287 - protein, 50 aa, Zea mays
  Clone ID: MRT4577_91760C.1.pep
LYTQVLTTSLVLPKFFLKLKKGLVTNRVFGLRNKLVYFFKTQGIRATPQI

SEQ ID NO: 360288 - protein, 271 aa, Zea mays
  unsure (1)..(271): unsure at all Xaa locations
  Clone ID: MRT4577_91761C.1.pep
MACAAGSARKASAVLYHYPCPDGAFAALAAHLYFSAAALPVRFFPNTVYDPIRSDGLPFDEIEDVYLLDFVGPPGFVADIAPKVQSVTILDHHKTAMESLCGSATLGENVNKVIDMQRSGATIAFDYFRNKLLTEASTSRNHGSGNSVTEMKYLPENKLEMVHKLFKFIEDGDLWRWTIPNSKAFSSGLKDLNIEFNVNSNGKLFDQLLELDPEQVISRGQVTLSQKQTLIDDCLEKSFEIALGCGQXLGNCLAVNADAISMLRSETRNQL

SEQ ID NO: 360289 - protein, 265 aa, Zea mays
  Clone ID: MRT4577_91762C.1.pep
MEKKQKKHAHARSRSFTGGGLASFLRSTVSSFSSAFPPSGRRSSFNHRNAFSGPIVVSIVPPEARGGGGRRKRPGYVTPEPSSPKVSCIGQIKRSNSRRQKKVNPSCGKGGGACPLPPRPPAEDKKPCSRTSSSRGSLVKRMPFFRRSRSRPRSRAASSKDGLIVVGDGKESDGDSAVADPAPPPPPMGLGQMKRFTSGRAAFQDFDWREEERTTGRDSDEDDDGFVAHSAPLVLGGGVVASEPRKEVNLWRRRPIVPPTQLQLP

SEQ ID NO: 360290 - protein, 108 aa, Zea mays
  Clone ID: MRT4577_91763C.1.pep
NHPRTGLLFVVPTIRFGCCPYITRTPYSFSIFEARLLTFGGFGYVEKKAPYLCFDFEVRGIKGPVGIWRPRGAFCFVGRFVHPPYELSILFGGFVSLGLVWPSFLRSR

SEQ ID NO: 360291 - protein, 75 aa, Zea mays
  Clone ID: MRT4577_91764C.1.pep
CRSMNVLARTTQPAATEHPRISEQDHKNNLQKTTSTHEGLIADDSHHQHNSAHSADGAANNGSMDISGDSSSVDL

SEQ ID NO: 360292 - protein, 81 aa, Zea mays
  Clone ID: MRT4577_91765C.1.pep
AGIMVLESSPGRGRVGCFPPQARRSLPPPPLKKMLSVFALVGVMEQQAGLVWDAPGGFPGPVFFRPWSRGPVAPVVGRTPP

SEQ ID NO: 360293 - protein, 73 aa, Zea mays
  Clone ID: MRT4577_91766C.1.pep
KRVKKLFLTHDRANVVELKNMEKEIGKQVNAAIGKAKESSMPETFDLFPNVYKKGFSVESFGPARKELKASLP

SEQ ID NO: 360294 - protein, 44 aa, Zea mays
  Clone ID: MRT4577_91767C.1.pep
FIQEKSRQQKHKAGRPTTATTLFWFVTPQQICIVQEIQSFSHNT

SEQ ID NO: 360295 - protein, 110 aa, Zea mays
  unsure (1)..(110): unsure at all Xaa locations
  Clone ID: MRT4577_91768C.1.pep
GSPTSSGLLERIEMASSDAQYPCFVTQLYCSTNHHXSIHNYFITYSDVLECKIILNRETHKSSRFRLFTYSKPETILNAIHCMNHNDQHRRIIIVHKAQHTVRRHNYLPG

SEQ ID NO: 360296 - protein, 114 aa, Zea mays
  Clone ID: MRT4577_91769C.1.pep
HLPFTGSESGLGISHQALSSEAPPLVSTGSPAASRQVSYGMRCCTSNLEIRLLFEAIGDLALGKSRDVEIFQVVFHCHSQYLVWANFAEQTCVLQFLFRSFIVRRRITLLKEIP

SEQ ID NO: 360297 - protein, 38 aa, Zea mays
  Clone ID: MRT4577_9176C.1.pep
GPPDHGSSIPGAVLENTLVNSAQLVINLPYGSKRGCRD

SEQ ID NO: 360298 - protein, 258 aa, Zea mays
  Clone ID: MRT4577_91770C.1.pep
MARARAYKTLPDLDCTLPRTLKPHRSLARRRLSVRSESAAAQSLCHRRPASGAIPNSVQPLEKTVHTSVKLPEQGIGVCFAGEASPRSPELSTPPEYVDRVNHSTILRFLVHMVAMLPREAHHALGLNQFAVVWPVYSPPTRTPACTRGPGDSGHLRRQAVPRRDRQSLPEPTPPFAGPPSPPDCNLADGEYILVPEQGAAQEVAPDPAPEPAPEDLPATALEGSLEEMVAGITWPSTLPPGWTVEWDPASAEEEHEE

SEQ ID NO: 360299 - protein, 185 aa, Zea mays
  Clone ID: MRT4577_91771C.1.pep
MARARAYKALPGFDCTLPRTLKPHRSLARRRLPVRSVSAAAQSLCHRRPANRAIPNPVQPSEKAVHTSVKLPERGIGVCFAGEASPRSPELSTPPEYVDRVIHSTILRFLVHTVTTLPREAHRALGLNQFAVVWPVHSPPTRTPACARGPSDSGHPRRQAVPRRDRQSLSEPTPPFAGPPSPPKL

SEQ ID NO: 360300 - protein, 93 aa, Zea mays
  unsure (1)..(93): unsure at all Xaa locations
  Clone ID: MRT4577_91772C.1.pep
ALKLEKFGQFRHTNGIIMTGIMKLIFNQPRGKWPDELIKVVWSHNTTISRXTGFTPFKLLFGDEAITLEEAKAGSIRTTSLAEDEADYHVAKD

SEQ ID NO: 360301 - protein, 167 aa, Zea mays
  unsure (1)..(167): unsure at all Xaa locations
  Clone ID: MRT4577_91773C.1.pep
HIHHNFAQTTMILAQTFYRAPGKHHIRFVALSKLSGFFDDARDVDELEASGVEHDRGLQSSTQVARNWKIDRRNRRARRGSGLDRRRRIRGLLASTLAPNLPPKLYIRLELHKNNDXDRGSGLYVEFLASIAWSFHFPSHPYALLRFHTSTNRWCCSRENMTTRGKV

SEQ ID NO: 360302 - protein, 160 aa, Zea mays
  unsure (1)..(160): unsure at all Xaa locations
  Clone ID: MRT4577_91774C.1.pep
LFGXXPCAXXXPRVFGAPAGXFVPXRFLGXXGRXLLPXVXWSPGRXXXXPXVXXXXCPGXXFVVLVGXLLLVXLFLRXXPFXAGVGXXLLGSXVXFXGVXXAXSGPGXXARPARVVSAPPPVSPFSFSSFLFLSPRPPLPVCWRCLLLSLSAGWPVASAS

SEQ ID NO: 360303 - protein, 125 aa, Zea mays
  Clone ID: MRT4577_91775C.1.pep
GGKRPILFRGGSSKHTIFTFQGFIKLKKKIPRAFFFFFFGGKPGGGEAKLLPAGKVRGYFGVTPIPNNKAPGMGPLLGKLNPFKKKALLEQVGDLFPFGGIPKAYKNRGGGEPRGPIFPTLRGGP

SEQ ID NO: 360304 - protein, 94 aa, Zea mays
  Clone ID: MRT4577_91776C.1.pep
NNTAGTSACIVTVSVLQRQKRRMVISKGSMHALSIVEARVATFVTEKSSPTRLTEPEDLKERKKDRNTIISRLSKYPHKSPIHRMAISRQRDRH

SEQ ID NO: 360305 - protein, 147 aa, Zea mays
  Clone ID: MRT4577_91777C.1.pep
ASSYSPISATQRGPPSPILLSFLTTGADTPFRQHHEGVHLDPHRAGRDAGGKPLLRAVLTEAWEGGRCKNTGRKSEGTYKIYIFKVLKQVHPDIGISSKAMCMMNYFINDIFKKLAGEGDKLERYNKKPTITYREIQTYERLVLPAE

SEQ ID NO: 360306 - protein, 95 aa, Zea mays
  Clone ID: MRT4577_91778C.1.pep
FFFFFFFRRFFFFFFSQKIFSPLQKKTFFFQTKLKRKNPTDCLTPIQPKSSKPLFSPKIPSNTKTILTPPALLKPIRYPLTKDKTNLGPSIPNKQ

SEQ ID NO: 360307 - protein, 77 aa, Zea mays
  Clone ID: MRT4577_91779C.1.pep
KQGGVGITLPSYFIKKNNNRQVNFSLHKAPYRVHQNYKLKLFELFPQQQQTFPFGLCPSNKLVRSYYQPNIFFTRLA

SEQ ID NO: 360308 - protein, 68 aa, Zea mays
  Clone ID: MRT4577_9177C.1.pep
GLKHPHHFMPMHSASGTMHSDAPEQDRHRPFLKTIITDWRPNHPCGGGIRKDLFLFLPNKRLLASPGR

SEQ ID NO: 360309 - protein, 78 aa, Zea mays
  Clone ID: MRT4577_91780C.1.pep
GILTKRGEPGRKGPTTSAEVPTQPTLFRIQGLDLEPQGFGKAYVGFAVLVPYPGAVTSPLVVGILDPLARGIYTRNFG

SEQ ID NO: 360310 - protein, 64 aa, Zea mays
  Clone ID: MRT4577_91781C.1.pep
CIFPYTLCIWLSRACTPVFETNYLGCVISEVRGVFTSLVGVVIVSHLSPKGRTRFSQKGAGAQQ

SEQ ID NO: 360311 - protein, 107 aa, Zea mays
  Clone ID: MRT4577_91782C.1.pep
MADGGAVSRGPPDGSPPAALLLQQPLLHAYEARKDPAVCGREAHGHGFGLDPDGGGGGGASFVRTCFNGLNGLSGVGLLSIPYALSEGGWLSLALLLLVAAVCCYTG

SEQ ID NO: 360312 - protein, 85 aa, Zea mays
  Clone ID: MRT4577_91783C.1.pep
KGASYEDFKKAFKAASEGPLKGFMGYGEEDLVFHDFLGGTRSGIFDPKAGIAFNDPFVKVVSWFSHEWGYSNRVVGLIPPMFKNQ

SEQ ID NO: 360313 - protein, 203 aa, Zea mays
  Clone ID: MRT4577_91784C.1.pep
WTRIARELHKSARRLSGFMKPGRRGSGGLRRLWPPAEASRRWRRSRASLHLARRRRQRQAPEAPNRRRLCRRPAYRPRFLPPLVVSYYSCGARRSPSSFVSDVMLLCCRHPLPYDGFLVPVAKASPSLLLAGDLSLDANNRVRLLTDRRVPVVPSWRHCTCSFSSAVVRRSLAVIEISSVSCYPASPSVLCSDLLVYHPKWLI

SEQ ID NO: 360314 - protein, 154 aa, Zea mays
  unsure (1)..(154): unsure at all Xaa locations
  Clone ID: MRT4577_91785C.1.pep
FGSSSGIRFEFLEAITKLLTTGVSPCLPLRCTITGWGELIPLSYIAGLITGRPTAHXMNREXRKVDAPEAYKIAGFEGGXLKLNPTEGLAIVNGTSVGSALVXTEMYDAYLLAVLSEALCAVFXEGMNGKPEYLDHLTHKLKTHPGXSIEAAVI

SEQ ID NO: 360315 - protein, 95 aa, Zea mays
  Clone ID: MRT4577_91786C.1.pep
HNPDYEFIHNNHTYIYIHSLSDYDIELELTGRKCVMRSDGYETAVTSESLTRWRSNCRDNVGLVCVGSPGRIGICGGLSIVSPVPRWFMDCVGVP

SEQ ID NO: 360316 - protein, 225 aa, Zea mays
  unsure (1)..(225): unsure at all Xaa locations
  Clone ID: MRT4577_91787C.1.pep
RAATAGAPNAPRRMQAARGTARTPRRRKEGAPRHAQSRTAKASAQRPQDEDQRHKPNHKRSKGDNEQHRRARTGEGHPHPQTAAEDKGHPRARHTTDNHTANGKRAGRRTANQXARPARRSPTPDRXHRKTPAPPTPTPRXRRQPDRTRTXAPAPEPRKQPRQPQAEPXRRKSRPERPQAPTNPEGSGPTTNRTSPPPPRNHPPTPRTPPTKGAPSPPTRQRPKN

SEQ ID NO: 360317 - protein, 91 aa, Zea mays
  unsure (1)..(91): unsure at all Xaa locations
  Clone ID: MRT4577_91788C.1.pep
VLGVLFTHTQSQVNLDATTWDRLLGRLVCXISVHNTIHQNYADLFTLNTSWGDGTGLFYIKXETRPXLGKVGVVNXNEVWVCWXFLVRGLF

SEQ ID NO: 360318 - protein, 52 aa, Zea mays
  Clone ID: MRT4577_91789C.1.pep
QRSPTHTKAKSIITIMARACVFLVVLLLAVVAVAPIAGAARVDVVEGMFMAF

SEQ ID NO: 360319 - protein, 48 aa, Zea mays
  Clone ID: MRT4577_9178C.1.pep
FPRMQKQSMKRPHAAPGARLDHAKDSPRRASPDARLHPGPGSCNLGRL

SEQ ID NO: 360320 - protein, 94 aa, Zea mays
  unsure (1)..(94): unsure at all Xaa locations
  Clone ID: MRT4577_91790C.1.pep
GPVGPCAGSXGAPPXRVXLSPPPGXCSXAXSGFLRASXXXXXRXASLXPPXSXAAGVGFRAPAAXSXSGGSGFRLPSSCAPSRXXLGRAXARWL

SEQ ID NO: 360321 - protein, 67 aa, Zea mays
  Clone ID: MRT4577_91791C.1.pep
RPPFSPPAPFRPPPAPPPPGSPPPAPAPGGPAPTAFPPFPLPGAAPGTTPAPGNKTSPGASLALPVV

SEQ ID NO: 360322 - protein, 104 aa, Zea mays
  Clone ID: MRT4577_91792C.1.pep
RNNKKRTKTKNANQSGKRQRKPTPQNQQEESKGEHAERDAEREERHHNQHPQQEQHHHKRQTRAAPEAAKEGPRHRPKGQQDRRAGREQSAPRGTPTSTETPQP

SEQ ID NO: 360323 - protein, 129 aa, Zea mays
  Clone ID: MRT4577_91793C.1.pep
KKILTFLSKKKRPSRAKGGFKLQGNKQKTGAHFLKQNNKIKKQINKWFQKRELRLWGGPPLDKTDPGKNARPPFGGALGGGGALPTKNGAVIWGEGLPDVRQKGDQPVGNPFGPKGAGIKNSPKQKPGV

SEQ ID NO: 360324 - protein, 61 aa, Zea mays
  Clone ID: MRT4577_91794C.1.pep
IEYSAQHNFLTRSIRSIEEVTFPGFIYCFYIGAPSELILDIGIGDIKANSYLKYMEIWNKL

SEQ ID NO: 360325 - protein, 165 aa, Zea mays
  Clone ID: MRT4577_91795C.1.pep
MPPKFDPNEVKVIHLRATGGEVGASSALAPKIGPLGLSPKKVGEDIAKATGDWKGLRVTVKLTIQNRQAAVSVVPTASSLIIKALKEPPRDRKKEKNIKHNKSVALDEIIEIARTMRYKSFAKDLSGTVKEILGTAYSVGCQVDGKPPQSVIEAIDSGDIDIPEE

SEQ ID NO: 360326 - protein, 174 aa, Zea mays
  Clone ID: MRT4577_91796C.1.pep
PQQSAHGFTSTSTMRRDGARSSKGSPRRGGTSPSSRRHAAPAPRSSKEAAARRYESAARWHLEGRRCPRVPRTTSPAGVLHHAPEESSSLKITPYSNAFFLACAGSGGLSSVEEQGRRSKAGAGTARPACAAAADRWCWRRSGRRRSSSGGDGAPRPGQKMVTWTRPSRQAARV

SEQ ID NO: 360327 - protein, 85 aa, Zea mays
  Clone ID: MRT4577_91797C.1.pep
LKTYPYNENPSCIPLNGRNKLPISHHTFAKMCTQKKARGRPETHADRIAGPMLLDPIPAHRERNPHQTDRGPPTPRTVLLQTLGP

SEQ ID NO: 360328 - protein, 147 aa, Zea mays
  unsure (1)..(147): unsure at all Xaa locations
  Clone ID: MRT4577_91798C.1.pep
AEAAGAAVDLQDVLLRLTFDNVCMIAFGVDPGCLRPGLPEIPFARAFEDATEATTLRFVTPTAAWRAMRALGVGHERVLRRSLAAVDEFAYDVIRRRREELGGDDAGAGRRSSDLLTVFTRMRDEDGRPYTDKVLPDICVNXILAGR

SEQ ID NO: 360329 - protein, 82 aa, Zea mays
  Clone ID: MRT4577_91799C.1.pep
PCPHLSMTHQNTNRRRDNIIRIILIESTIRRRMKRKTSTMPLLLHTLLISNRRTQHNRRPRRTTRRQRLDKKRERHHSRLDN

SEQ ID NO: 360330 - protein, 102 aa, Zea mays
  Clone ID: MRT4577_9179C.1.pep
KNKRCRPIFLDEDDGHEQQEQQDTTYVHQPSLGTAAKRKRAAFQFRTAAPQPSNMEKEKRKVATMLRRTPKQVVDDRRSSGSHQTTIEAALKPKADREYVNE

SEQ ID NO: 360331 - protein, 67 aa, Zea mays
  Clone ID: MRT4577_917C.1.pep
RVPVRLSYFWRAIRRAQALVLGSVMSGRRISVQPCLLPLLLLSVQGRSLAAIVRCLARACSNSAHGN

SEQ ID NO: 360332 - protein, 47 aa, Zea mays
  Clone ID: MRT4577_91800C.1.pep
SAREQVVVAAASINQGSVYKRSLSMATAAAESNDEGLSVVLGSSGLA

SEQ ID NO: 360333 - protein, 49 aa, Zea mays
  Clone ID: MRT4577_91801C.1.pep
YLLSVRAFSLVFQAYAPQLVIANARARYRCCEELTMRRRPGMFSLGLVV

SEQ ID NO: 360334 - protein, 67 aa, Zea mays
  Clone ID: MRT4577_91802C.1.pep
LREPLLLFRGSSVARSAVPLIRMVDLSRPDKLVLVSVLDNELLELGDGIRNLAQNVEEHYRQQGVRL

SEQ ID NO: 360335 - protein, 87 aa, Zea mays
  Clone ID: MRT4577_91803C.1.pep
PAPSSANFTLIVICFRASRNRRSSFGDQMIQFFKFYEIEYPEHLFGEGQEQVPQDEVHGGCCDEFVRGLGRRLPVNFGLLDRCLLIM

SEQ ID NO: 360336 - protein, 205 aa, Zea mays
  unsure (1)..(205): unsure at all Xaa locations
  Clone ID: MRT4577_91804C.1.pep
FKVLYPPLXDYDIRXYYIXXELLKALDYCHSQGIMHRXLKPHNVMIDHELRKLXXLIDWGLAEFYHPGKEYNVRVASRYFKGPELLVDLQDYDYSLDMWSLGCMFAGMIFRKEPFFYGHDNHDQLVKIAKVLGTDGLNVYLNKYRIELDPQLEALVGRHSRKPWLKFMNADNQHLVSPEAIDFLDKLLRYDHQERLTALEAMTHP

SEQ ID NO: 360337 - protein, 34 aa, Zea mays
  Clone ID: MRT4577_91805C.1.pep
YLINRRNIPVTSLKCFREGLGTNKTSTKQALNQP

SEQ ID NO: 360338 - protein, 372 aa, Zea mays
  unsure (1)..(372): unsure at all Xaa locations
  Clone ID: MRT4577_91806C.1.pep
MSKARVYTDVNVLRPKEYWDYEALTVQWGEQDNYEVVRKVGRGKYSEVFEGINVNNNEKCIIKILKPVKKKKIKREIKILQNLYGGPNIVKLLDIVRDQHSKTPSLIFEYVNNTDFKVLYPTLTDYDIRYYIYELLKALDYCHSQGIMHRDVKPHNVMIDHELRKLRLIDWGLAEFYHPGKEYNVRVAXTSRPAGSVMIDHELRKLRLIDWGLAEFYHPGKEYNVRVASRYFKGPELLVDLQDYDYSLDMWSLGCMFAGMIFRKEPFFYGHDNHDQLVKIAKVLGTDGLNAYLNKYRIELDPQLEALVGRHSRKPWLKFMNADNQHLVSPEAIDFLDKLLRYDHQERLTALEAMTHPYFQQVRAAENSRTRA

SEQ ID NO: 360339 - protein, 70 aa, Zea mays
  unsure (1)..(70): unsure at all Xaa locations
  Clone ID: MRT4577_9180C.1.pep
STKDPWSLSFTIGRALRVSTLKAWTAKVGYLEKVIFSFLDRCKTNSXATVGTHKGDEAAYSESLHVKDYK

SEQ ID NO: 360340 - protein, 130 aa, Zea mays
  unsure (1)..(130): unsure at all Xaa locations
  Clone ID: MRT4577_91810C.1.pep
VDAATTYYVGDSNGWSFSSPSWPNGKHFRAGDTLXVRLSITQHAGRLLVTEDGHALSVMRGVAAVFRYIPWIHNVVAVDEDGYNGCTTPPGSRTYTSGADSVTLARGDNFFICTRFGHCNLGMKLVVYAA

SEQ ID NO: 360341 - protein, 43 aa, Zea mays
  Clone ID: MRT4577_91811C.1.pep
TPSAFSACYRLFFRPTSTLLDITIERAVEGNESARHHGEREDQ

SEQ ID NO: 360342 - protein, 36 aa, Zea mays
  Clone ID: MRT4577_91812C.1.pep
ADINLTQEPSMTMISPRSNTSHYSASWSASSYLLLN

SEQ ID NO: 360343 - protein, 116 aa, Zea mays
  unsure (1)..(116): unsure at all Xaa locations
  Clone ID: MRT4577_91813C.1.pep
RPTRGILLSKRNPLMSMNLQRNGMNTCMTSPRDWLRRDLSVICLGLIRWMGPSSIPVINGNRLTALFFYNIVQELAHLPTHAPVTXHIWLWLVTWHLCLLIVLTLGQIGFKGKTED

SEQ ID NO: 360344 - protein, 98 aa, Zea mays
  unsure (1)..(98): unsure at all Xaa locations
  Clone ID: MRT4577_91814C.1.pep
QILGALTQSIPRRTVSELHEEKDLATCMHKTGTLKSKKVLTYGLAIARGMTXLHQCKRDPIMHCDLKAKXRHMFLHSXGAHLKIAGLPETRMSKVGTD

SEQ ID NO: 360345 - protein, 81 aa, Zea mays
  unsure (1)..(81): unsure at all Xaa locations
  Clone ID: MRT4577_91815C.1.pep
MQRAGAGDHTDQLEQHHHQECAKVPSSVAQALVHYATSNETPHQTVAEAGAAARVLARRAPCSLLVLGLGPDSALXAALNH

SEQ ID NO: 360346 - protein, 122 aa, Zea mays
  Clone ID: MRT4577_91816C.1.pep
KGTANLIQCPTENGLSLHHSGVSEHINQNLGNGMYSPHPTSTQFNLQQLTRLGENVRGELMRQADVPLDDKGPSDERLMGLRHCRGRFQRNGSPPRIKGPAAFSWTGPLETSAFLRLNTNIL

SEQ ID NO: 360347 - protein, 156 aa, Zea mays
  Clone ID: MRT4577_91817C.1.pep
MWMYESFMSILNGYVSTHARHEASMIEGYYTKEVIESGGPFCKSILKDQVAIGLPPSLHKVRLYGSRRMGRKYFIPSDYNIVLEAHHNILHHLEIMEPFIQQHINELREQNPRHTNDWVMKQHKQRFNTWLMVKDIPHGETIEEQTIKGLASEQPR

SEQ ID NO: 360348 - protein, 89 aa, Zea mays
  Clone ID: MRT4577_91818C.1.pep
GEVAGARAQTLGTRLYLRPQPRWRLLGITRQAPAPGASAVILSWRTTKGGFDYGDWTGAGAGHGSLLRLGLLASDLLGTFRSLARSRGF

SEQ ID NO: 360349 - protein, 55 aa, Zea mays
  unsure (1)..(55): unsure at all Xaa locations
  Clone ID: MRT4577_91819C.1.pep
NHVRQGMSILPLVLKFFLLATXLPYILIWAHLRDPKNRLAIHIFCTMMFTFWDAI

SEQ ID NO: 360350 - protein, 36 aa, Zea mays
  unsure (1)..(36): unsure at all Xaa locations
  Clone ID: MRT4577_9181C.1.pep
VKVGGPLNHVGTFKTRDXNEVDLIRVXSILXXXEET

SEQ ID NO: 360351 - protein, 55 aa, Zea mays
  Clone ID: MRT4577_91820C.1.pep
LTRRTTHRSTGKYIYKAHARGKDMTNTGSAAKNSLIFPSIVVFANVQVKAYLKTL

SEQ ID NO: 360352 - protein, 109 aa, Zea mays
  Clone ID: MRT4577_91821C.1.pep
ILAIWGCQVVLMGPVKGTRVPGGPLEKVVNPLYPGGSFDPLGLPDDPEGFPELKVKEFKNGPPAMFPMLGFFVQAMVPGKGPLENLADHIADPVNNNAWAYAPNFVPGK

SEQ ID NO: 360353 - protein, 105 aa, Zea mays
  Clone ID: MRT4577_91822C.1.pep
WGCQVVFLGPVKGYRVSGGPLGKVVDPLYPGGSFDPLGFPDDPGGFPELKVKEFKTGPPPMFSMLGFFGRAFVPGKGPLENLADHFADPVNNNAWAYAPNFVPGK

SEQ ID NO: 360354 - protein, 87 aa, Zea mays
  Clone ID: MRT4577_91823C.1.pep
DVRFMRQRQQTSVVKDLVPPVYTRDVQLMVQDDLREGAGHHHAQAQQQQGHPTRRRRHDRCNQPPRETDTCRHYALMIEQVATRCST

SEQ ID NO: 360355 - protein, 61 aa, Zea mays
  Clone ID: MRT4577_91824C.1.pep
MASKHLVLAGCLLLLLPTASVDTDVDYWSKKDYPGKVIGVQILSDPVEPGGGRAFQDFRSY

SEQ ID NO: 360356 - protein, 51 aa, Zea mays
  unsure (1)..(51): unsure at all Xaa locations
  Clone ID: MRT4577_91825C.1.pep
CAPLPCLGPRRFPPXAXCXGCFSLLXXPQPCSPXLXAXPRXLAPSLXXCFP

SEQ ID NO: 360357 - protein, 38 aa, Zea mays
  Clone ID: MRT4577_91826C.1.pep
EGTGARREAPEDHHGPGTTRMVLVKPEPGRHPVSTMTT

SEQ ID NO: 360358 - protein, 52 aa, Zea mays
  Clone ID: MRT4577_91827C.1.pep
LTRIEGTMHVILMEKRCTQLKAGSSLILLASIHSDRSSNPNSSDDPRALQGR

SEQ ID NO: 360359 - protein, 128 aa, Zea mays
  Clone ID: MRT4577_91828C.1.pep
MANSIAAALSRMRRQSRLHLTIPLCSWRVKPKADWETEQDRSRACQPPVRSLRRIAGDKRSTGLAADVVHAKAQAPSSLRQAEAKTIKDFNDRMTEATKTTRLCLTQCKKGPVCNPAHVVEPRPQVAM

SEQ ID NO: 360360 - protein, 45 aa, Zea mays
  Clone ID: MRT4577_91829C.1.pep
DRYLVPRHGYRCVQGFPSLGVVWRGAIYPTSASAYRRHEVARKRK

SEQ ID NO: 360361 - protein, 91 aa, Zea mays
  unsure (1)..(91): unsure at all Xaa locations
  Clone ID: MRT4577_9182C.1.pep
HXCRRWWXTAPSSRPAARPPGSAASPFLAAARVRGLQXGPTSLTLPPIGLSLQDLSVPAXLASKWGGKTVVEIASDXSFFSDLLTLHFNNF

SEQ ID NO: 360362 - protein, 112 aa, Zea mays
  unsure (1)..(112): unsure at all Xaa locations
  Clone ID: MRT4577_91830C.1.pep
AASDVEYRCFLTGPKSDTGDHSLHRALTTYXEMAXSKIILYRGTRSQTCSKTKTXNPACRLSRSENGLXAAELDRRNITVNEDQSPIYLSRAPARSFIYRVMREATFQDSNG

SEQ ID NO: 360363 - protein, 105 aa, Zea mays
  Clone ID: MRT4577_91831C.1.pep
TARERPWGAGKEAPRGQNKERRWLDLDQAVGEGAGCRDTGQARRQGSDSLLPKGRMSLLRKGRHTQQAGEKTGGVKDFSFYRRKIQGGTSSSLTALSCRLPFLSY

SEQ ID NO: 360364 - protein, 137 aa, Zea mays
  Clone ID: MRT4577_91832C.1.pep
GAVYWCSTAHLVHEAVQHMAAHNVGALVVLKSGDMNQLAGIVTERDFARKILLPGRPSQQTRVEDIMTEEDKVITVSGRTNILRAMEVMTDKRIRHVPVFDDKVVGMISIGDVVRTIVDQQHQEVKQLKKYIRGDYY

SEQ ID NO: 360365 - protein, 188 aa, Zea mays
  Clone ID: MRT4577_91833C.1.pep
EVQPSSTVPAVAPQSTAAANDSTPPPYPLFPPGLIPGMVRKMQIGSGVPYSSLSPLDIPTTIPPSTVPESEILERVSKFFSDIGEVNPSEGPMRQGEPDDYDDYERELPARKGGACIPPPPNLLLNPETGMHADGSVDSKPGSSGRLGLGASADPNEVSQYDDVYSSYRKQRSSTYHISITARSSTSR

SEQ ID NO: 360366 - protein, 74 aa, Zea mays
  unsure (1)..(74): unsure at all Xaa locations
  Clone ID: MRT4577_91834C.1.pep
TYIFMRSQIHSACSPLINHLFTGCFLLDLFQLVASXSLVHHLAFQEFCHFVISCQYCQLQSLESSLQLIVLMHL

SEQ ID NO: 360367 - protein, 111 aa, Zea mays
  Clone ID: MRT4577_91835C.1.pep
RMGSSKLKPGFQMREPSRKSRSCMVTPCDISDSPGGGEFGGGVRPPRTIRGRSRSCGQEGSEILGSCAVPVSSPRTARSSVFLSSSPTCLRGNSDEREKARAGRPEGSYWG

SEQ ID NO: 360368 - protein, 171 aa, Zea mays
  unsure (1)..(171): unsure at all Xaa locations
  Clone ID: MRT4577_91836C.1.pep
MVGNRLARFISLPTTRSKLGRVLLYLGERVHGRYPQHRHGAPPLGESKPNWTAGVMDLLKRELEKKRKAATADFGGKSFVRRSELEQKQLQKRREEHRXRSSPRPARRRSXNSAAAATGSDPSNLDAAAQTAPSVPPALAPKKTAQEEALLSEERRIDELDLPRHEVVRRC

SEQ ID NO: 360369 - protein, 438 aa, Zea mays
  unsure (1)..(438): unsure at all Xaa locations
  Clone ID: MRT4577_91837C.1.pep
MDLLKRELEKKRKAATADFGGKSFVRRSELEQKQLQKRRDEHRQXSPRPARRRXANSAAAATGSDPSNLDAAAQTAAANPNPSSSAAASSSAPSVPPALAPKKTAQEEALLSEERRIDELDLPRHEVVRRLRVLREPVTLFGEDDDARLARFKLVLKSGVIDDIDDIDMTEGQTNDFLRDMIEMRKRQKSGRDTYAKGKSKRVGGGDGGDGGAAGDSADDGDAKGSGDDADADKDSKRMRTKFEELCNEDKILVFFKKLLNEWNQELDEMTELEKRTAKGKSMVATFKQCARYLSPLFEFCRKKVLPDDIRRALLVIVECCMKRDYLAAMDQYIKLAIGNAPWPIGVTMVGIHERSAREKIYTNSVAHIMNDETTRKYLQSIKRLMTLCQRRYPALPSKSVEFNSLANGSDLQALLSEENGSGKASEERLRLMPASKE

SEQ ID NO: 360370 - protein, 173 aa, Zea mays
  unsure (1)..(173): unsure at all Xaa locations
  Clone ID: MRT4577_91838C.1.pep
MSQQPAPAPPYRPYRQVREATPHRRAVSCLRYSPCGRLLATDSXDGNVALLSPVSLTVIAVLRGHSDGVSDLSWSTESFYLCSASDDRTIRIWDIRPVLAGGAQAAADSSADRCVRVLKGHTNFVFSANFNPQTSSQIASGGFDCTVRIWDATSGRCTRAIEAHSEPVTXVHF

SEQ ID NO: 360371 - protein, 41 aa, Zea mays
  Clone ID: MRT4577_91839C.1.pep
DLVMSTINSSDYDYECFMPAEAAANRCRSMVFYTLHGLDSD

SEQ ID NO: 360372 - protein, 140 aa, Zea mays
  unsure (1)..(140): unsure at all Xaa locations
  Clone ID: MRT4577_9183C.1.pep
SPFRGAARAGVWWSRSSXXCSLWCCFFXARPCAGRXLWGACLAACSXRRPLSGPSRSWSGRSRRACGXGGXWWWXGXXXXXXXXPSSPXVVLALGCGFLFLCSPXVXXVAXPGLAXXCXFGXGXSXPPGLRRSXPAPPPR

SEQ ID NO: 360373 - protein, 82 aa, Zea mays
  Clone ID: MRT4577_91840C.1.pep
FCYPPVESLKDRNFDPACSIFKIPMFLGFGSKKSIGCPLFWFGIVIKKGKRFCKHPYCMVVTQNCGLALACEGTRLYAPLWW

SEQ ID NO: 360374 - protein, 86 aa, Zea mays
  Clone ID: MRT4577_91842C.1.pep
EEQGAEDGLFASVEYVEQTHPNFTEEKVDGSIPTPASSEQPDQLEVVRPWDDAPNSTLRSKPPSNYSQPMQGSDLDVRNMDALGSI

SEQ ID NO: 360375 - protein, 91 aa, Zea mays
  Clone ID: MRT4577_91843C.1.pep
PTRTPTRPPYFPFFLSLSIFYKPLAFIKTSPIPILHHTLLQIFFTPTSYNYQLLLSNPSSYNTFQNYYIIYNTLINVFKLFLFTTLLSFYY

SEQ ID NO: 360376 - protein, 94 aa, Zea mays
  unsure (1)..(94): unsure at all Xaa locations
  Clone ID: MRT4577_91844C.1.pep
QHPQTQSISVKANIYNNNCRLIIMIFDQISVTDILKDDDGYVDLSKKTNYIHFDKNTTVXQIQDAFKEYTTMDDIAIVLMNKYNVNIIRCLVDS

SEQ ID NO: 360377 - protein, 95 aa, Zea mays
  Clone ID: MRT4577_91845C.1.pep
LSLKRTVTCTCCPNPCIETCSASSATVLLQKQRRSISRLFIGVLIRERMPGTKLSVYYSLERKKKQDRGFIYLSSERRCKIYSTRNKNCLREGVK

SEQ ID NO: 360378 - protein, 112 aa, Zea mays
  Clone ID: MRT4577_91846C.1.pep
LIHLSLCVETVHTSVTTVWHTGIMPRIDLVASIISMACVVNSKLQLVWRVSIISCIRMHASFVDLEEGLPSLIYSRIFSWIGRDQAEGAGHTYSGGTAPALAQLAMRFLGGV

SEQ ID NO: 360379 - protein, 79 aa, Zea mays
  Clone ID: MRT4577_91847C.1.pep
HHASIPKKKKKKKKKKKKKKKKKKKKKKKKKKKKKKKKKKKKKKKKKKKKKKRGGPFLEDPIFPPPAWQGKTFFLGPLN

SEQ ID NO: 360380 - protein, 85 aa, Zea mays
  unsure (1)..(85): unsure at all Xaa locations
  Clone ID: MRT4577_91848C.1.pep
GRLLDTLALLALSASATCTHTSGGXRCQPPPQGYLPAAVHVAPGGHLPPPGHVPPPGHLPADVHLAPPGHVATPVYLPAAPCQYP

SEQ ID NO: 360381 - protein, 142 aa, Zea mays
  unsure (1)..(142): unsure at all Xaa locations
  Clone ID: MRT4577_91849C.1.pep
MRSVVRSLRQLRRFTQHHAEGHSQATRLFGQQNALIMCGSTSGSLSTLRCNGEISRFASPGVELMRSMFSTVVTDPIKDIGRGGPMVEYERRIASGELVDGDSXQVDTIQQLQRLYEELIENEEDCQLDRYKSSEKSGPESM

SEQ ID NO: 360382 - protein, 74 aa, Zea mays
  Clone ID: MRT4577_9184C.1.pep
INFHKTFASSFDRFDWGNHEGGKGKWPTQLSRLRLGVHANGSAHKTQKSDQQLAHMSQQELATPLNEFTTQQEL

SEQ ID NO: 360383 - protein, 114 aa, Zea mays
  Clone ID: MRT4577_91850C.1.pep
ARNSSARTAVGLALPEHAFRTGMSASPRPVRDNPLQQNKRRPGAQIRRGVKLLGPARKPKPKPRRPPQLLTAPSRPVPLARQRLCPRGARVFSSPRILGRHETGQSEKCGKRLR

SEQ ID NO: 360384 - protein, 162 aa, Zea mays
  unsure (1)..(162): unsure at all Xaa locations
  Clone ID: MRT4577_91851C.1.pep
MRSVVRSLRQLRRFTQHHAEGHSQATRLFGQQNALIMCGSTSGSLSTLRCNGEISRFASPGVELMRSMFSTVVTDPIKDIGRGGPMVEYERRIASGELVDGDSFQVDTIQQLQRLYEELIENEEDCQLDRYKSSEKSXRSRWLWSRLITQPSTYAPIKGFTS

SEQ ID NO: 360385 - protein, 120 aa, Zea mays
  Clone ID: MRT4577_91852C.1.pep
RKDARGGHCHVAWGTVCRPIELGGLGISSLKELAWSLRMRWLWLAKTDPTRPWTSIPIQVPKKVKDFFSMAMQTDIGNGASTFFWTDRWLSGHRIADLAPRLFRTISKQRANRRTVLDAL

SEQ ID NO: 360386 - protein, 414 aa, Zea mays
  Clone ID: MRT4577_91853C.1.pep
SSKWTEFFPAMLCKSRTANNLVNGMGGRSESLLLMYEELHVMSPVVPTREFCFLRYCRQIERGLWAIADISVDLQQRDARFGAPPSRSCRLPSGCLIADMADGSSKVTWVEHMEIEDRVPIHLLYRDLILSGAALGAHRWLAALQRACERCACLVPAGMPHRDIAVAGVTPEGKRSMMKLSQRMVSSFCASLSASQLHRWTTLSGPSDVGVRVTVHRSTDPGQPSGVVLSAATSIWLPVPCDRVFAFVRDEHTRSQWDVLSHGNPVQEVSRIPNGSHPGNCISLLRGLNASQNSMLILQESCTDGTGSLVVYAPIDIPAANVVMSGEDPSAIPLLPSGFTILPDGRPGAPSSSSAGGPLVGSPAAAGSLVTVAFQILVSSLPSSRLNAESVATVNSLISTTVEQIKAALNCASH

SEQ ID NO: 360387 - protein, 87 aa, Zea mays
  Clone ID: MRT4577_91854C.1.pep
EPNFPVLGNQTLLFIGTSARAWCSCPPPKRTSLNGRFSLNVRVAPPGPPSRVVHYLPGPILLSSQILEAPYFGVGLPPTNFKKPPPK

SEQ ID NO: 360388 - protein, 202 aa, Zea mays
  unsure (1)..(202): unsure at all Xaa locations
  Clone ID: MRT4577_91855C.1.pep
STRVRAAVVLGVPYSARHAHARPITEAFAAFGEGFYINQFQEAGRAESAFARYDVATVLKKFYSIEIDDVTAPPGVEIIDFLEASPSPLPWISEEELGQYAEKFHKSGFIGALNYYRXVEANSRLLAPWNGAKITVPVKFIAGDKDIGAQSFGTGEYIKSAEFKSTVPDLEVTVIEGHHFLQQEQAERVNSEMVSYLVRFTS

SEQ ID NO: 360389 - protein, 119 aa, Zea mays
  Clone ID: MRT4577_91856C.1.pep
CLFRAPFPLSFSPLHFTPSPFPTQLFGKPYRFPPLVTHLKCPFRFPFLTRWGPNRKAFPPCPFPLFPIDNACWGPFIAAPFRGSLTGTLPFLTSLLPAPLGLFLYFFSLVFFFTFPVFT

SEQ ID NO: 360390 - protein, 64 aa, Zea mays
  Clone ID: MRT4577_91857C.1.pep
QWCSFNKQPSLGRIFCQTNPFELNRGRTPILKDIILVHPSFRTWVTRLGERLALEGVKHHNHKY

SEQ ID NO: 360391 - protein, 138 aa, Zea mays
  unsure (1)..(138): unsure at all Xaa locations
  Clone ID: MRT4577_91858C.1.pep
EIIKHIYGIPLHINSQQLQRLVLSDLCXYSQQQXYFTFNQLAASNSASYLQHQHLPFRHLPAAYPQQLLTFNQLTHLNYDLYLQQXHLLQFTKLLVVSLATFLIHPHLLPSYNNTKPNAAPLLQFNQLLPFTQLPFTN

SEQ ID NO: 360392 - protein, 128 aa, Zea mays
  Clone ID: MRT4577_91859C.1.pep
MKRASPESGTVRREGTKEDGGGAEMGSPLGGWPSYNPHNFSQLVPADPSAQPSNVTPATYVATHRTDPPPNQVITTEARNILLRHFYQKSEEKLRPKRAAPDNLAPENNNKQPRGPVGDVGGQSSARG

SEQ ID NO: 360393 - protein, 82 aa, Zea mays
  Clone ID: MRT4577_9185C.1.pep
YFIPNSSQTLILDILKPHTKISFNQHYDYHQPHHKHASINHINQFETLVGIINHNTKIMTHRTKTPSIRHMYIHLSSTIITY

SEQ ID NO: 360394 - protein, 49 aa, Zea mays
  Clone ID: MRT4577_91860C.1.pep
KKKKENLNNQFSIQKHKSRSNAGIFKKLGSTHYARWLQIIQLATRFQFN

SEQ ID NO: 360395 - protein, 113 aa, Zea mays
  Clone ID: MRT4577_91861C.1.pep
GGPKTYYFLKFFNPFVQGPHLVFTVGRKNNRVFFKKPPPKGGRAPLSFGAFFIKFPPSLFFQTGDFIFPNLQAPLFIKIKGENPCGPLDKKTLLSKSQKPGPGVPPGIFPPGP

SEQ ID NO: 360396 - protein, 110 aa, Zea mays
  Clone ID: MRT4577_91862C.1.pep
RPRECQGLDRCARPCRYGQCCGVLGGRWRRVHRSCRRRSRASLSASKTPQHLIRGYLYLEFVSVRVSLRERACLCRSGAVIGLRRSHVLLDVVQSFYIQSRCSPLYDEAL

SEQ ID NO: 360397 - protein, 106 aa, Zea mays
  Clone ID: MRT4577_91863C.1.pep
MGSPLGGWPSYNPHNFSQLVPADPSAQPSNVTPATYVATHRTDPPPNQVITTEARNILLRHLYQKSEEKLRPKRAAPDNLAPENNNKKKQPRGPVGDVGGQSSARS

SEQ ID NO: 360398 - protein, 71 aa, Zea mays
  unsure (1)..(71): unsure at all Xaa locations
  Clone ID: MRT4577_91864C.1.pep
EVERSFSFWXTAEGDVVHPTECMPQLLEQVRHHKANIDCNDYIVMVTTLVLEVEDLSTQQVNDKLLEAVQP

SEQ ID NO: 360399 - protein, 61 aa, Zea mays
  Clone ID: MRT4577_91865C.1.pep
GVLLACASPLPKWLLARCTLSLLKLWTAKSKSSTYLRSGSTLGRSSWGCCNSGLLPRVLAP

SEQ ID NO: 360400 - protein, 163 aa, Zea mays
  Clone ID: MRT4577_91866C.1.pep
MRSWIPLRHPPPPRHGRPRRPRVPLPEVAGMVRAAIAGVTTATRFQELVDWMEERKAAFRDDGKWTETVNLGLRSPALIMFGLLQFAIDRDLGFGKTSLVLPWVRHGRLGSASVTVVPCPNGDGSWFFGGTRMWSRLMEVVESDPLMKPTANPRMVTPAGSRL

SEQ ID NO: 360401 - protein, 160 aa, Zea mays
  unsure (1)..(160): unsure at all Xaa locations
  Clone ID: MRT4577_91867C.1.pep
MACTNNAMRALILLILFXIVHGEKEEAXGIATKAFPPGETFNITKLGASGRGXTDSTNAVQDAWASGVVGGTXGKQTILIPKDDXLLRQLNLTGPCXGDVTMQECGNXLLATTDLIQYKDHGNWIEIVRVDNLVMTGKGNLDEQGPIERSKNCRTKIHDC

SEQ ID NO: 360402 - protein, 44 aa, Zea mays
  Clone ID: MRT4577_91868C.1.pep
SVGLRGYLKNSAKALGFWFVKAQRAGKVWPAPAKKGGLPAKRLF

SEQ ID NO: 360403 - protein, 79 aa, Zea mays
  Clone ID: MRT4577_91869C.1.pep
TWVRAGGLLHDGSYSIRARRSAGFHGGGAQSTHRGPVSRQRGAYVRRPDSQVLSFTCSPCLRAMTYEALRLRAAARRIP

SEQ ID NO: 360404 - protein, 124 aa, Zea mays
  unsure (1)..(124): unsure at all Xaa locations
  Clone ID: MRT4577_9186C.1.pep
PFLSPPTYTAGPTRHRPGPEPIPTPTTDTPTARXPTPKPXPPTYXSGRQTVRCLTPVPXPWTTSLKPPTPMPTPPTYTLSPKPPPTKATTPKACPSTYTPXQSLRRPKATPPTGTPSPKSSTPK

SEQ ID NO: 360405 - protein, 120 aa, Zea mays
  unsure (1)..(120): unsure at all Xaa locations
  Clone ID: MRT4577_91870C.1.pep
FLSSHSVGSPCVRNSGSSHRPLHGIEVVLENGVSIEVCGSXRGGKEVTMDEXPLXEGAEVGAXRDERGIGSGGERVGGGCGGEGERLKGPERGGKPSRVVELKDGAAWILHLRRPAAGGR

SEQ ID NO: 360406 - protein, 157 aa, Zea mays
  unsure (1)..(157): unsure at all Xaa locations
  Clone ID: MRT4577_91871C.1.pep
FYRDVGSKEPERVKQIMADAANDLAGRTKLLRGTQKRAGPDGFEXITGYPWVILNREYMEYCIRAWENMPRIMLMDFNNERQPDEGYXFQTVICNSLDFRNSTVNNDLRLTGQEDSREKKGLLTSREHYEHMVDSGAPXRRPVEENEPLRSRSTAIY

SEQ ID NO: 360407 - protein, 79 aa, Zea mays
  Clone ID: MRT4577_91872C.1.pep
SAPLSFSSSSPVQVPLFPFAVLLTTFWGPRSVLASRGMVCSYDPGSRSTAYPLAAMLPRILLLYCSGFLIGCLSLIVVC

SEQ ID NO: 360408 - protein, 54 aa, Zea mays
  Clone ID: MRT4577_91873C.1.pep
ADVRPFEQPVNVGKEPADRACSGGTSEHSRCGLRPVPLLHGLDLVLALVGGRRV

SEQ ID NO: 360409 - protein, 528 aa, Zea mays
  Clone ID: MRT4577_91874C.1.pep
MKSLLPRSELRRSSAAAVRSSAGGAAGGDGAVADGGGAGPRAPASSTFWFLLHALCCLISLFLGFRFSRLLFFLLFSTTALYRSSTSSSSAAVLRATTTTTTTTTTTTTTTNTFTLSFAAANTPPSTPANRTALDAADKGAASGNPQSHVVVGRHGIRIRPWPHPDPVEVMRAHRIMERVQEEQRRWYGVKEPRQVLAVTPTYSRAFQALHLTGLLHSLRNVPYPLTWIVVEAGGTTNATASMLARSGLTFVHIPFPDRMPHDWADRHATENRMRLHALRVIRERKMDGVVVFTDDSNVHSMELFDEVQKVQWMGAVSVGILAHTGTADQLRLSEEDKQNMPLPVQGPACNSSGHLVGWHTFNSLPFSGKTATVVGEAAPVLPRGLEWAGFVLNSRMLWKEAEGKPDWVKDLDAVGENGEEIENPLTLLNDPSSVEPLGNCGKKVLLWWLRVEARADSKFPQGWVIEPPLEVVVPAKRTPWPETTTELPAELLDDKQKQEDRRLSRANKSSRPRGTTKRKGDPQGQDN

SEQ ID NO: 360410 - protein, 56 aa, Zea mays
  Clone ID: MRT4577_91875C.1.pep
APRVFLFRLWGRMFFAIVKGLPFFPGAFFCPLFAKFCGPPGRGGWYPRGARPNIPL

SEQ ID NO: 360411 - protein, 59 aa, Zea mays
  Clone ID: MRT4577_91876C.1.pep
WNLFVANVKNFAIVGRPDWLLCPVTCLKTTPPGLLKPAAFWRAWTKCSPIYFLAVQFTP

SEQ ID NO: 360412 - protein, 52 aa, Zea mays
  unsure (1)..(52): unsure at all Xaa locations
  Clone ID: MRT4577_91877C.1.pep
CMVPELIGIKRLYARERLLLKDFRELNSSTFKHKGMYSGVXXXWISKHKIYH

SEQ ID NO: 360413 - protein, 71 aa, Zea mays
  Clone ID: MRT4577_91878C.1.pep
VEAADEMLYGAMFFGDPPAPLPDEFGDVGGLFDGEGGEEDAMFAGLGELPECAMVFRRHAGDGISVAGRVK

SEQ ID NO: 360414 - protein, 110 aa, Zea mays
  Clone ID: MRT4577_91879C.1.pep
KNAEPVFKTFPGGPGGMQQPNSGGAVGLLIQHDRLQMWGGNRGICFGKNMEGPDPNNHFPLRGPILFVLWRGMVPAEATLTKLSPFLKRQLLFLFSCNRPMIPARLRTVC

SEQ ID NO: 360415 - protein, 175 aa, Zea mays
  unsure (1)..(175): unsure at all Xaa locations
  Clone ID: MRT4577_9187C.1.pep
MPTWRRPAGSEPLQEAVARGASRLPRPRQEAPAEARRVRRPHAPPPLQQQAPPPPPPRRAGAGAEPGADVHVVPVHGPRCRGGAPVPAQPRPRPPAXRRGRGRGRGSRPRRPCRAGPWTPPPPCAASTSTVPARWSSAARARLCTHAGAACACIRAAATRRSRSRSRSGTSRARR

SEQ ID NO: 360416 - protein, 66 aa, Zea mays
  Clone ID: MRT4577_91880C.1.pep
LCTSTAHPQCHDAVNLSFPYHTLGIENLHAISYDLDSVHIVSDLPLSTYDSIRQPITLRHRGCRLT

SEQ ID NO: 360417 - protein, 116 aa, Zea mays
  Clone ID: MRT4577_91881C.1.pep
KERRGGRPKGRPGGETQAPGQAAGRKRGRRAARARELQPGLEGHIPSQGPKVKREKKKEAHPPPDGELQSTHPPHPGPAMGGRPLALAGARRQVPLNIGVRASSKQVRWGPSGPAA

SEQ ID NO: 360418 - protein, 172 aa, Zea mays
  Clone ID: MRT4577_91882C.1.pep
TLVLGSDINQWELTPFLKHHSNYHQLHLLDISQGYTTSMGRVTSASPESSTAGNGGGSPRTAPTMGLDGDDRALSVVTGAMLSCSAFEMLQYQRALLGVPIFQISHSQQSRRTLRGTQVPRARRGAQARRPQPARSGRRGREITGPAIATARWRRRDARRDHGEEPGREARR

SEQ ID NO: 360419 - protein, 145 aa, Zea mays
  Clone ID: MRT4577_91883C.1.pep
PRPPPKTAAFQLNGARHRLFGAQQGVVGQIGYPHLRVGFIQSPSRRIWKRFHHSGWFPIPRPGSSLDSPNPFWRWAFQRRRRWVFTPLQLFGGFRPRVFKAGRFMLLTQTRPLFFMYICASFHLPLSGPAFSPHDFFKQPGGSGP

SEQ ID NO: 360420 - protein, 106 aa, Zea mays
  Clone ID: MRT4577_91884C.1.pep
VSEPRGGRRRKKKDGGRIAWIAVFLYFMLSQYMLSSNAICSSCLQRPKVFIVFLYRYGEHDQDYLFGRSVQPTLGSHNWLRRRLCATYCYVSPVAGYLFTILSFLH

SEQ ID NO: 360421 - protein, 177 aa, Zea mays
  unsure (1)..(177): unsure at all Xaa locations
  Clone ID: MRT4577_91885C.1.pep
GTEPEWPDRPTRTNLQTGKEEEEGRRSEGKNAHPPHRGKGKQTRKRANRNRGKEKPDPREDPKKQEKHNRHTQATRQTRQNKARKEEKPGTKXKKRKPERQRPKKETHTKKKEATRHKRRKQENNAHTTKEGPNSQTKKRGRKPHKHRGQNKKKGNKKEATKKKKKSQQKKKNNSRT

SEQ ID NO: 360422 - protein, 72 aa, Zea mays
  unsure (1)..(72): unsure at all Xaa locations
  Clone ID: MRT4577_91886C.1.pep
PWLPLFSPLSTPXSEPGCHYVFTYAHFSRDLKMSKKLHIPQKTCRTLPASLQIPLRTLLYYPPLPMAGNKTE

SEQ ID NO: 360423 - protein, 92 aa, Zea mays
  Clone ID: MRT4577_91887C.1.pep
DGPRLLRTANERATKENGTTITTSKLDRWPPSVVPPPMPSAAGAVEPPSVSPCAPSALSFTNRAVRLRRPHSHRRTRLHMIDSRQQKDVTEL

SEQ ID NO: 360424 - protein, 103 aa, Zea mays
  unsure (1)..(103): unsure at all Xaa locations
  Clone ID: MRT4577_91888C.1.pep
RRPPRPASPPPPWGCGPLVACCGVWXCRXXXVAPPPAXRXPGLRSLVVXARLXVLPSCCRXXLSCRGLGAXXFGASDVXGVRXRSSPLLLXXXVNLSFGGVKG

SEQ ID NO: 360425 - protein, 93 aa, Zea mays
  Clone ID: MRT4577_91889C.1.pep
VAAPVSAKDYPSVAKKGKVDMMELELKKLEETIKNIHEEMLYLREREEEMQDVNRRTNSRMAWLGFLSLGVCLSVAGLQLWHLKTFFERKKLL

SEQ ID NO: 360426 - protein, 37 aa, Zea mays
  Clone ID: MRT4577_9188C.1.pep
VRLGCDQLAEMGLQSISTRWGRALHPAYTRLPMKLAT

SEQ ID NO: 360427 - protein, 89 aa, Zea mays
  Clone ID: MRT4577_91893C.1.pep
GPPPRAPEGPPCVRLGGDQFVGPLKHPAGPNRGPPPRMGGARPLHHQLRGLRGVGPKRPPRPLALFYKGFGPGFFLLPVTGGGKNVFFP

SEQ ID NO: 360428 - protein, 225 aa, Zea mays
  Clone ID: MRT4577_91894C.1.pep
QQLNIEACEASPDNSSTLARMDTFFRNACQSSCEGIMLKTLDVDAGYSASKRCDSWLKVKRDYVQGLGDSLDLVPIGAWYGNGRKAGWYSPFLMACYNPETEEFQSVCRVMSGFSDEFYKEMKEFYSGERILPKKPVYYKTDEQPELWFTAEQIWEIRGADLTLSPVHHAAIGLVHPSRGISVRMPRYIRSVPDRSPEDCGTAADIASMFKAQTRKMDVSSEGQE

SEQ ID NO: 360429 - protein, 83 aa, Zea mays
  unsure (1)..(83): unsure at all Xaa locations
  Clone ID: MRT4577_91895C.1.pep
QSVAHQLQMFIQLXRAAPPNTNLYEPALIQQQQQLLAAQGLPPMAMMMAQNIPAMGGLFQYQYQLPSFRPHPCGVSAALPPYY

SEQ ID NO: 360430 - protein, 72 aa, Zea mays
  Clone ID: MRT4577_91896C.1.pep
LFGTPPPFGFPPFKRGVFAFKNTRGIGFPVPVVWGLLSKNSSPGKFSPFVGLSQVVNSWGPKGVPGPVVFHF

SEQ ID NO: 360431 - protein, 143 aa, Zea mays
  unsure (1)..(143): unsure at all Xaa locations
  Clone ID: MRT4577_91897C.1.pep
AHARLKPLVVRKRRKGGTSAAGGPQLCQPGEEVRGTIRALQRLREQQRGVXDELLLIKNSMRPAHNRAAQIIAFLAKLSDDPGLVLRTMLAEKEQLSLSFYGSKVHPGKRRVSCPSPWTWFRAGAGAPCRFRSTVIEQSVLLA

SEQ ID NO: 360432 - protein, 60 aa, Zea mays
  Clone ID: MRT4577_91898C.1.pep
YSPSCKACRPPASRTLLVSVSRVINASLPHFCRGSRSFLRACRSTCALLTSQYSPRRRCR

SEQ ID NO: 360433 - protein, 65 aa, Zea mays
  Clone ID: MRT4577_91899C.1.pep
GSGGEGLKLRVRYSRSVTINQEVLSAELSPPSALTNLPWIKVIFALIQYSTFRVCIVLLLIHIYI

SEQ ID NO: 360434 - protein, 50 aa, Zea mays
  Clone ID: MRT4577_9189C.1.pep
GVFLSAHIITMPFLSSGLSRVPNSCSLQPVCKPTFRKEKELSYSGIRRGT

SEQ ID NO: 360435 - protein, 148 aa, Zea mays
  unsure (1)..(148): unsure at all Xaa locations
  Clone ID: MRT4577_918C.1.pep
FYTPGACLKTIKAYPGLAHGGXXVQGKREISSFFAHATHETGHFCYISEINKSNXWCXXTXXQWPYTPGXKYYGRCPLQISWNYNYWPAGRAIXFDGLXDPXRVARDSLVAFKAALLFFMNSVHGVGPQGFGATTRAINGALECGGNN

SEQ ID NO: 360436 - protein, 55 aa, Zea mays
  Clone ID: MRT4577_91900C.1.pep
YATIAWTVPAIFSAILLTLMWGLTVKQEEPKAMDSKASTPGALFYMISITSSANS

SEQ ID NO: 360437 - protein, 423 aa, Zea mays
  Clone ID: MRT4577_91901C.1.pep
MAQGINFPDFIGAVGGHDGGVDFGGNFCDMAFYQKLGEGTNMSVDSLNSMQTSMHGGSIAMSVDNNSSVGSNSDSRTGMLGHPGLKGPAIVGSYSVGHSIFRPGRVSHALSEDALAHALMDNKFPTETLKDYEEWTIDLGKLHLGMPFAQGAFGKLYRGTYNGMDVAIKLLERPEADPEKAQLLEQQFVQEVMMLATLRHPNIVKFIGACRKPLVWCIVTEYAKGGSLKNFLSKRQNRSVPLKLAVKQALDVARGMAYVHGLGFIHRDLKSDNLLISGDKSIKIADFGVARIEVKTEGMTPETGTYRWMAPEMIQHRPYNQKVDVYSFAIVLWELVTGNVPFANMSAVQAAFAVVNKGVRPAIPHDCLPALAEIMTMCWDTNPEVRPPFAEIVRMLEQVEVEVLTTVRKARFRCCIAQPMTLD

SEQ ID NO: 360438 - protein, 37 aa, Zea mays
  Clone ID: MRT4577_91902C.1.pep
KGYYRPILLMTNYYFYKKMLHFNWCYSPGFEQLPISL

SEQ ID NO: 360439 - protein, 68 aa, Zea mays
  unsure (1)..(68): unsure at all Xaa locations
  Clone ID: MRT4577_91903C.1.pep
MAQGINFPDFIGAVGGHDGGVDFGGNFCDMAFYQKLGEGXTWSVDSLNSMQTSMHGGSIAMSVDKTAA

SEQ ID NO: 360440 - protein, 115 aa, Zea mays
  Clone ID: MRT4577_91904C.1.pep
PTRPPNIVKFIGACRKPLVWCIVTEYAKGGSLKNFLSKRQNRSVPLKLAVKQALDVARGMAYVHGLGFIHRDLKSDNLLISGDKSIKIADFGVARIEVKTEGMTPETGTYRWMAP

SEQ ID NO: 360441 - protein, 68 aa, Zea mays
  Clone ID: MRT4577_91905C.1.pep
GPLQKTCIIKGTATPRGFFKQHIEGQIFGGGLTTNLNYGETNPPRGLKRPKVKLPKKSVKTGPKVFFF

SEQ ID NO: 360442 - protein, 164 aa, Zea mays
  unsure (1)..(164): unsure at all Xaa locations
  Clone ID: MRT4577_91906C.1.pep
KQQGRGFPNSRDPPPGFFPRNSPFQKSPPETPKKKKKKPLKTXPPKIKPPFPGPQRGARNXPKIRAEKPPPQGAGLGKRVPXGPWPWGSPPGPRTPPPPCPKGPRPGKPTPWGGPPPGKPPPPGXPPPLDVXREGLWKPPRPPSCAPNXKGPPPPTQKKGVPPP

SEQ ID NO: 360443 - protein, 286 aa, Zea mays
  unsure (1)..(286): unsure at all Xaa locations
  Clone ID: MRT4577_91907C.1.pep
QCLGYTEYWLVXTHVRFFSPVGMTPVVALLGFGLFERSFPVVPLALSRSPFRVPNVGMLTGNGLLIRLMSDNCIXGRCVEIGLPMLILFVVLXGPTGKKKKTLDYSVLSTHQIHDLGEFKRTXLCISVVSQYLKNIQIKEIPILXERFSLFICVALVWXAYAQILTSGGAYKNSAEVTQNNCRTDRANLISSAPWXYPCQHHVKCTVEFIYIGLSFGIIDPLTSHRIKIPYPLQWGAPTFNAGQSFGIVSAVLVSLVEVMISSLGSLFCFGIPFGSGTKLTLTQCA

SEQ ID NO: 360444 - protein, 64 aa, Zea mays
  unsure (1)..(64): unsure at all Xaa locations
  Clone ID: MRT4577_91908C.1.pep
MLLLLAVMCKKKKNFKKKKKKKKKKKKKKKKKKKKKKKEKHKKKPXXTNRGIQLPPLGTPKIKL

SEQ ID NO: 360445 - protein, 51 aa, Zea mays
  Clone ID: MRT4577_91909C.1.pep
ENRSILTVCLCSQPTQSKRRIVCVRTQMWTLRTCVGTVGKAMLMESCGSGA

SEQ ID NO: 360446 - protein, 276 aa, Zea mays
  unsure (1)..(276): unsure at all Xaa locations
  Clone ID: MRT4577_9190C.1.pep
MAATWSSSCCAATASSSALLRHARVKSAPWVAGASRSSYRQRRRRRELSIRATAAAPPPVVYADAGAGAGADNVASLKIKLLSAVSGLNRGLAASQEDLDRADAAARELEAAAGCPVDLSRDLDKLQGXWRLLYSSAFSSRTLGGSRPGPPTGRLLPITLXGQVFQRIDVVSRDFDNIVELELGAPWPLPPLEATATLAHKFEIIGTSGIKITFEKTTVKTKGNLSQLPPLEVPRIPDNLRPPSNTGSGEFEVTYLDDDTRVTRGDRGELRVFVIA

SEQ ID NO: 360447 - protein, 55 aa, Zea mays
  Clone ID: MRT4577_91910C.1.pep
YVYLVVHIWTQSFSEKNILAKHGMSYITCCLFYALWNSIMRPFKRNTYTRIWKFQ

SEQ ID NO: 360448 - protein, 197 aa, Zea mays
  unsure (1)..(197): unsure at all Xaa locations
  Clone ID: MRT4577_91911C.1.pep
REASISSSLTLSTXPWRYLTQQLIWPCLWLSPALGFFSALFWCLYSPSLAGSIPTFXLAGYARHXSESYPTYGSTSSASTMYTHCTRTLXHATTRTADRYYRMDTDLKSCSSYAAKHLTLMMCGSSTLPSPLMKSRDEETRHLLLERYDMTEFVMILINTLHGIRIEGTVDKPLPLLEDYIIMQDAADTTTGVAQLC

SEQ ID NO: 360449 - protein, 43 aa, Zea mays
  Clone ID: MRT4577_91912C.1.pep
NNLIYYQKVSDNLGRGFKLLVFLNLQVLNEIHIPSVNYNFRHT

SEQ ID NO: 360450 - protein, 50 aa, Zea mays
  Clone ID: MRT4577_91913C.1.pep
TFPSFFFFPLSIFFWVVNLSKGACQHKESLGINPEIRTETLRLTRYQNTG

SEQ ID NO: 360451 - protein, 94 aa, Zea mays
  unsure (1)..(94): unsure at all Xaa locations
  Clone ID: MRT4577_91914C.1.pep
HDGSQTLVHRDITXTAYLLRVRNYEPRLSDFGTAKLLGSASTNWTSVAGXYGYMAPELAYTMXVTETCDVYSFGVVALEVMMGKHXGDLLSSLP

SEQ ID NO: 360452 - protein, 109 aa, Zea mays
  Clone ID: MRT4577_91915C.1.pep
PAGPGGGPGPSSAPAEGWEYGKRPASLRLISGGEAPHRGMGQDVVAHVYDVATAGSDTTVLHINRFFKDAIGLGGIFHTAIQVIRFSKSHHHFLNACNARKDWISTPAV

SEQ ID NO: 360453 - protein, 74 aa, Zea mays
  Clone ID: MRT4577_91916C.1.pep
ICICNIYVFGHNLYKQDLSGSGPALTPNSRTIAYYSIIKSSRRSSNFFIQRDFKYVALINSNTQFVLLSSSSKT

SEQ ID NO: 360454 - protein, 77 aa, Zea mays
  Clone ID: MRT4577_91917C.1.pep
CHSAACLLAIGLGFGEHHGSLGLVPQLEGAQSSRTRSYEEDIGSADGFRTPVHVDVEGVCWLVGGLDDDASSSGSGS

SEQ ID NO: 360455 - protein, 123 aa, Zea mays
  Clone ID: MRT4577_91918C.1.pep
MGDPESMTRVPSGPAYSVFSKNTKRWILALVTAASFVSPMTANIYFPAIPPIAQDLNISVSLVNLTLTSYMIFQGLSPTIFGDFGDMAGRRPAYILAFLIYICANIGLALQRNFVALLILRCV

SEQ ID NO: 360456 - protein, 134 aa, Zea mays
  Clone ID: MRT4577_91919C.1.pep
RAAHVWQISLVTLAIGPGIGIAGGTYAYVTIGLMARVRKSYVKAGEIAEEVIGNVRTVHAFVGDEKAVRSYREALLRTYKYGKRGGLAKGLGLGSMHSVLFLSWALLIWFTSVVVHKRISNGGECFTTMLNVVI

SEQ ID NO: 360457 - protein, 67 aa, Zea mays
  Clone ID: MRT4577_9191C.1.pep
FVPKLPYLERFFLTRFFFPLKIKKKGTLAWFFFPNKFALYGLVYQQLYRSHLKLFKILPIFFLLGPA

SEQ ID NO: 360458 - protein, 139 aa, Zea mays
  unsure (1)..(139): unsure at all Xaa locations
  Clone ID: MRT4577_91920C.1.pep
TTVWXMRDLRELSYLSLGGXIATLLEFLSDGLNDATDGIGLHSTVKVANWRGMPFAIGIYGFCYSGHPLFPNIYQQKSDRSKFTKALLICFAICTAMHASYADIXFLLSGENILSPHTLTIQKHPIDSTAALWTTTNLP

SEQ ID NO: 360459 - protein, 47 aa, Zea mays
  Clone ID: MRT4577_91921C.1.pep
WETLQTIIGSLLMLMEFLNQMYCDKNMSRSQTALNTPDQFRGLSVNL

SEQ ID NO: 360460 - protein, 559 aa, Zea mays
  Clone ID: MRT4577_91922C.1.pep
MDAARESMAALLDAGLFGPAQTLGCFLVSSAGAGNDAGMSMKVESLVQHGDALYGEKEFRRALNAYKQAMQYSRSIPRQATSNTRSSVSVTGRSPSPNSSNLLSFNENEVKFKIALCHSALCEHREALHEMEGIPSKVRTLKMNMMLGKLYRISRNSRTAVVCYKECLRQCPYVFEAITALAEMGLSAKEFSLLFSQAPNRGGKLSGDFVDTQRWWSRYVEAQCCIASHDYKGGLDIYLELMQRFPNNVHILLEIAKVEAIIGRNDEAIMNFEKVRLIDPNIMTYMDEYAILLKSKSDYIRLNKLVHDMLHIDPARPETCVALAAMWERKDERKALTYAEKSLRVDDRHITGYIMKGNLHLSLNRPDLAVTDFRGAQELRADLRSYQGLVRAYLALSKCKDALFTAREAMKVMHQSAKALKLVGDVHAISSSGREKARKFYESAIRLEPGFLGAALALADLHVAEGRNKEAVMLLERYIQQWSDDSLHIKVAQVHAATNMLSDALSHYQSALRINPQNEAAKNGLERLEKQMKGVDPDAPEDDEENEEEDVDVDRDDFI

SEQ ID NO: 360461 - protein, 136 aa, Zea mays
  unsure (1)..(136): unsure at all Xaa locations
  Clone ID: MRT4577_91923C.1.pep
MLSSRGYGLRRSQLNVVKTVSLDKGXSSRXIGCMAQKMDVRASIGVSLINGLMAVXGXALKRYVSSLRPXAQILTVEXLSMGSVKAKVVLEQXIKPYSVDFRSAFELYRIHSGGRRLKNWSTQQYNFRPGSCRRGC

SEQ ID NO: 360462 - protein, 100 aa, Zea mays
  Clone ID: MRT4577_91924C.1.pep
MRDPSPKHLRIRLERGIELTPEKKNKKEKNVTMAKQIKVKKTKSPQKKKFKKKKKKIKKQHKKKKKKPTKKKKKKKKKKKKIKKKKKKKKKACTCPAGRR

SEQ ID NO: 360463 - protein, 69 aa, Zea mays
  unsure (1)..(69): unsure at all Xaa locations
  Clone ID: MRT4577_91925C.1.pep
EKPARSFLRSSAEARIVHVVLHEENFRPQDKGFQXPFPSMQERFSPHVILVPWHNRGAHHVFKDKPCEF

SEQ ID NO: 360464 - protein, 52 aa, Zea mays
  Clone ID: MRT4577_91926C.1.pep
ILEPCTTTFYLDSFFLIALPTCESKQAAGATFHRIEQVEFCGHPVFFIAPSP

SEQ ID NO: 360465 - protein, 105 aa, Zea mays
  Clone ID: MRT4577_91927C.1.pep
VGGFFFFFLPTKNTSFLFFFKPWPRSWACSRPGSLYHTPRRNANVVPNRGSGFGRQARPYGLMWLPPTVLIAYAPRDFLGSTTWVKFMRGDAFFPPLPPLPMPLA

SEQ ID NO: 360466 - protein, 80 aa, Zea mays
  Clone ID: MRT4577_91928C.1.pep
SPSCRLPWSLWNTPILSLKGPLSPDRSVIQNLKCSLSTSSLVTLNLVKFPSLGFALQLGPRKRSKRWRKSRRDGLDAQPR

SEQ ID NO: 360467 - protein, 59 aa, Zea mays
  Clone ID: MRT4577_91929C.1.pep
SLLFGESSSLQKDSLTAALVQTPLNNSLSPHHRAPHWLVPTEDITKEHISCPSGLQTMH

SEQ ID NO: 360468 - protein, 88 aa, Zea mays
  Clone ID: MRT4577_9192C.1.pep
SSVFTSIIRQPLDLLTLPRGRVSRSDHSTAYSMTSFRAFFILHSTRHSSTRKKRRLQLFTRPLTRPHGSSTVLNPFQYFVALSIRASS

SEQ ID NO: 360469 - protein, 90 aa, Zea mays
  unsure (1)..(90): unsure at all Xaa locations
  Clone ID: MRT4577_91930C.1.pep
LKEPNRLTGSVLRXGKGKVGLDPNEGNEIAIXNSRHNIRNLGRDGFIIKKPKKIHFKSHXKKGRXAKQKGRHXXYGKSKGTRXAPLPTKV

SEQ ID NO: 360470 - protein, 95 aa, Zea mays
  Clone ID: MRT4577_91931C.1.pep
LFAVTVFFFGICWYQRWGNITGNPEVRVNMAGRAAGVLENHEEGRRYAMHGLRSFLHYKTSEIMPAINKFLTDPKRSMLIVILLLLLATGVFTLC

SEQ ID NO: 360471 - protein, 82 aa, Zea mays
  Clone ID: MRT4577_91932C.1.pep
VGSASLPRINLLDLPHGHENGKTQPRSRFLSRSGAQILAFAYLYLTREASFITFRLTEWAPLVHTLAARDAMRMHLDVCCTQ

SEQ ID NO: 360472 - protein, 69 aa, Zea mays
  Clone ID: MRT4577_91933C.1.pep
LAQRGGGHLVNLPTKRGRKARPNLKGGLCGKPGGNPSFVAFFGKGGGDYVSCPPFRVPIVRLTPAQGLV

SEQ ID NO: 360473 - protein, 149 aa, Zea mays
  Clone ID: MRT4577_91934C.1.pep
MSIKVGINGFGRIGRILLRNALEKPELSVVAVNDPFIEPTYAAYMLKYDSSHGLFKGEVEVDGQNLVVNGKPIRFYSERDPANIKWSETGAEYIVESTGVFTTVDKAKAHLNGGAKKVIISAPSADAPMFVMGVNHKEYDGTPSVLSNA

SEQ ID NO: 360474 - protein, 49 aa, Zea mays
  unsure (1)..(49): unsure at all Xaa locations
  Clone ID: MRT4577_91935C.1.pep
EPAXGCAQRFWFSPPMTGRAWSNVHPLTWCHSIMQASSILFAHPLPLYI

SEQ ID NO: 360475 - protein, 38 aa, Zea mays
  unsure (1)..(38): unsure at all Xaa locations
  Clone ID: MRT4577_91936C.1.pep
EGMVDVSXQSHTGRPEGAVENTGHSRCHXRFGEEPIGR

SEQ ID NO: 360476 - protein, 84 aa, Zea mays
  Clone ID: MRT4577_91937C.1.pep
PVRVYTQSCGHQNPAAVASHLQCENSYETGACSKLANAYCLIATGGSYNCHSAFEGRLADTIPVGKTSIGSTRRLCRLSGGNNN

SEQ ID NO: 360477 - protein, 63 aa, Zea mays
  Clone ID: MRT4577_91938C.1.pep
LMHCDFVRGVSADRLTCSLAFSPFSSTDHMLSCILILDVCRQGDELAVAESDGGGLNYSRRKT

SEQ ID NO: 360478 - protein, 776 aa, Zea mays
  unsure (1)..(776): unsure at all Xaa locations
  Clone ID: MRT4577_91939C.1.pep
MEAAAAAPHLLHCGGFGRVAHLPALHRRGQFPRVRAVATEPKPSTSTSSSSRGRTRSRNDLSDTRFGEVSKEIQRVRKQMEQDEQLATLMRGLRGQNLRDEQFADDNVRLRLVEVESADNNEGLPLVYSPEIISAYWGKRPRAVATRVVQLLSVAGGFISHLVSDLINKKLKENEVARAIELREIVTSLGPAYIKLGQALSIRPDILSPAAMTELQKLCDKVPSFPDDIAMALLEEELGQPWQAIYSELSPSPIAAASLGQVYKGRLKETGELVAVKVQRPFVLETVTIDLFIIRNLGLVLRRFPQVSIDVVGLVDEWAARFFEELDYVNEGENGTYFADVMKEDLPQVVVPKTYHKYTSRKVLTTQWIDGEKLSQSTEDDVGSLVSVGVICYLKQLLDTGFFHADPHPGNMIRTPDGKLAILEFPRVTKLTDDQKYGMIEAIAHLIHRDYDAIVKDFVKLGFIPEGVNLDPILPVLAKVFDQALEGGGAKNINFQELAADLAQITFDYPFRIPPYFALIIRAIGVLEGIALVGDPEFAIVDEAYPYIAQRLLTDESPRLRSALRYTIYGKTGVFDAERFIDVMQAFENFIRAAKSGGGENLKGNMAELAELGGQPSTSLVPVFAMAVAQPEQPVKARAALAFLLSERGNFFREFILDEIVKAIDAISREQLIQIAASFGIGNAAPVFSMVPVRARALLPTITEEDRVILNNVEKVVKFLTXRDCNSNSXGGDVNVVSVVQELLPVLPGISSKILPDVLSRLSSRVFARIIRETFL

SEQ ID NO: 360479 - protein, 49 aa, Zea mays
  Clone ID: MRT4577_9193C.1.pep
TLRARAVFHLNFSLAKYSIPFSSSLWKSGRTRARIECADAWYELVAQRF

SEQ ID NO: 360480 - protein, 122 aa, Zea mays
  Clone ID: MRT4577_91940C.1.pep
MEAAAAAPHLLHCGGFGRVAHLPALHRRGQFPRVRAVATEPKPSTSTSSSSRGRTRSRNDLSDTRFGEVSKEIQRVRKQMEQDEQLATLMRGLRGQNLRDEQFADDNVRLRLVEVRPDCNPP

SEQ ID NO: 360481 - protein, 60 aa, Zea mays
  Clone ID: MRT4577_91941C.1.pep
LQLDSRKVLTTQWIEGEKLSQSTEDDVGSLVSVGVICYLKQVSLKSICLHLINTIHILHD

SEQ ID NO: 360482 - protein, 65 aa, Zea mays
  Clone ID: MRT4577_91942C.1.pep
TPRGSRLEEESVAPPHLLVFVRMFPLVHLSRSYSLALLLMSNRLGGSSRALEWNQCKRKSCGQTR

SEQ ID NO: 360483 - protein, 137 aa, Zea mays
  Clone ID: MRT4577_91943C.1.pep
GFLVIVRCSFKTKGLSFFASQIVKAIDAISREQLIQIAASFGIGNAAPVFSMVPVRARALLPTIPKEDRVILNNVEKVVKFLTSGTATPTVGGDVNVVFVVQKLLPVLPGISSKILPDVLSRLSSRVFARIIRETFL

SEQ ID NO: 360484 - protein, 192 aa, Zea mays
  Clone ID: MRT4577_91944C.1.pep
MAGMASLQGAMASLSISALGAATASSSSFWGNRLATYSAPQPGVRFMVKICPIEMRLKRWERKKCKPNSLPVLHKMHVRIGDTVQVIAGREKGKVGEVTRLFKHNSTVIVKDLNLKSKHKKGTDDEPGEIVMIEGPIHSSNVMLYSKEKSVVSRVGHKFLEDGTKVRYLVKTGEVIDSVEKWVKVFKEGNSE

SEQ ID NO: 360485 - protein, 41 aa, Zea mays
  Clone ID: MRT4577_91945C.1.pep
QVMTENSPNLVKNINIQIQKTAETSNGINLKESMPKHIMIK

SEQ ID NO: 360486 - protein, 121 aa, Zea mays
  unsure (1)..(121): unsure at all Xaa locations
  Clone ID: MRT4577_91946C.1.pep
RNVDGPQRDHPCDIDMQPMWKCLDXMNGKGICGPCSSTRSINDRCSPTCYYXSTFIPHECKSXRAQPTQRCYHIPQSWLHPSYNILXAYEHNGDDLTHISFSRRAVTSACSLXSXDFPSLD

SEQ ID NO: 360487 - protein, 94 aa, Zea mays
  unsure (1)..(94): unsure at all Xaa locations
  Clone ID: MRT4577_91947C.1.pep
VIGYIRFQRNAGLNRKKSLSPAGSYLDRRGGPADHKKKKGLXLRKIKQACLPMLAFLGLAGQPPAAGKGPLTNWAAYLSDPLLPPIFDGLGGSS

SEQ ID NO: 360488 - protein, 41 aa, Zea mays
  Clone ID: MRT4577_91948C.1.pep
FTRLPAIGSSGSPLTMGGRVIDDLNLPLEWKGVIYREKGCL

SEQ ID NO: 360489 - protein, 84 aa, Zea mays
  unsure (1)..(84): unsure at all Xaa locations
  Clone ID: MRT4577_91949C.1.pep
LVMLDDLSEELDTRTLPLQCSQAHICCLLPTYVLPAVSSVYENPVLQPYAIHHAITAGILPLSPXCLQQSSXLLQQLPLVHVLA

SEQ ID NO: 360490 - protein, 74 aa, Zea mays
  Clone ID: MRT4577_9194C.1.pep
KAQFSAEDIVRKEERMQSYTNCGYGEYETFAKHDTKDNICQSIVVTNVGLSNRIKHTCRDRIAFTISNNIHLEL

SEQ ID NO: 360491 - protein, 109 aa, Zea mays
  unsure (1)..(109): unsure at all Xaa locations
  Clone ID: MRT4577_91950C.1.pep
MCCPLNLAAVYYRAAFKKNRVNLRHLSARHGRIGKHRKHPGXSGNPXCIHHHPILFYKYHPGYFCKGGMRYFHKLRNKFYWPAVNIQRLWSMVPPDNAAECRPLQSPAY

SEQ ID NO: 360492 - protein, 103 aa, Zea mays
  Clone ID: MRT4577_91951C.1.pep
GLVMPLLERALLPSGFSLCDSNTFGTQHTPACSTWASASLRVRRLRRLTQHSPLCSITLAIARWRRMTTSGFFLWRGDTEHRVCFVGPPTYGIIPPVVGMLVL

SEQ ID NO: 360493 - protein, 67 aa, Zea mays
  Clone ID: MRT4577_91952C.1.pep
VMSISCSMKSERYNQRSWSRSVTHLEDKSEMSESACNLLILSTNLNYNYVIMEPLDEFSEYGMRRRH

SEQ ID NO: 360494 - protein, 285 aa, Zea mays
  Clone ID: MRT4577_91953C.1.pep
MAASPSPSGSGGGKAGVDRIKGPWSPEEDEALQRLVRRHGARNWSLISRSVPGRSGKSCRLRWCNQLSPRVEHRPFTPDEDDAILRAHARFGNKWATIARLLSGRTDNAIKNHWNSTLKREREREREYYADARPGPGDQRSLKRTSSDGPPGSPSGSDLSDSSHQSLPTVMPSAASTAVTSQQQLQHVYYRPVPRAGGVVLLPVAPPSPQAPPATSLSLSLSLPGLDQQPEPSPPPPPTPQAQASSPLSAEFLLMMQEMIRIEVRNYMSGSGFDARAVMGMAEID

SEQ ID NO: 360495 - protein, 120 aa, Zea mays
  Clone ID: MRT4577_91954C.1.pep
YVWTEPYCAKLVERINSCLVCKRPYLINSVESKILLPGAYYLSGIIVDESDQKPYQNVIYTGTIVGILAVSYCTLSIEFLIHAGNRSIELFEHGHIASVSSSRKKRTWPSRWSSVSGQLM

SEQ ID NO: 360496 - protein, 82 aa, Zea mays
  unsure (1)..(82): unsure at all Xaa locations
  Clone ID: MRT4577_91955C.1.pep
PTRPIKLRDCREDAVSNLAPAESYLKAELADPFAXREWNRCLYINSFDLEADYLTTTYKTLEAACDELHGSRLFHNILDASL

SEQ ID NO: 360497 - protein, 51 aa, Zea mays
  Clone ID: MRT4577_91956C.1.pep
GEIIIIYRRYCLLKKDVLDRFLEIFELYCRMWIIWLENLLMMKIVEGLIEL

SEQ ID NO: 360498 - protein, 95 aa, Zea mays
  Clone ID: MRT4577_91957C.1.pep
TRRGKARKGTAEPGYAGEGESREAHRSRGENEGGCVSSWVAGADWTQRPRCSAASWASTSTRSTTSSSLSLPLPSLARRSPPRPATTASSRRPPL

SEQ ID NO: 360499 - protein, 70 aa, Zea mays
  Clone ID: MRT4577_91958C.1.pep
SAMTSCYHLDRSVLRTLGLAVPVRANSEVVAQQADEAHLLFLWRRRRWDSHEHARLQTTVGWQRWCAAQS

SEQ ID NO: 360500 - protein, 45 aa, Zea mays
  Clone ID: MRT4577_91959C.1.pep
VNFHYCSRFLARYRLTCWPGYKAGLPVMFTLFNSLPLFFVMVKMW

SEQ ID NO: 360501 - protein, 105 aa, Zea mays
  unsure (1)..(105): unsure at all Xaa locations
  Clone ID: MRT4577_9195C.1.pep
RNPVRARVRLFPQCSQAPIGCFLLPYLXRGVLXLCENAILLPYSIQHGMGDGLLSLSPWLVQHPVALLQXIPLLHLLGQXNMKGQHLLQLVLGNLAGFSQKSSIF

SEQ ID NO: 360502 - protein, 240 aa, Zea mays
  unsure (1)..(240): unsure at all Xaa locations
  Clone ID: MRT4577_91960C.1.pep
EHRGAVEQXPDMRKMQRAPMSPTAGLGERHGKPGRSSAAGDQRERQPSAMGRSGGKSGMQGRSTVHGRGGRRAAEEHRGHGRTRGWERGGGARGEGGLGWARLGKTQVAGELEDLVAWSGAPRPERAKGRGAGEDARSELGDGKEEELDPGMEKRPSAEDGGGELGWCPRHGRGSNRPRRAGARSRARRPWRAAGGRPSREGQLARWSRRPGARCRGSEQGKAAREGGDKHREKISRERE

SEQ ID NO: 360503 - protein, 106 aa, Zea mays
  unsure (1)..(106): unsure at all Xaa locations
  Clone ID: MRT4577_91961C.1.pep
IQFTHLHFTTSXLKKLFXTQLNHLAKHNSLTRLLNNQKKNTNHTIPTLSHPQIPILLSLYHHIKRSLKYQYTHLNTYTFHLPIAQLLSFLPLLSSHIHQLYPSNSK

SEQ ID NO: 360504 - protein, 127 aa, Zea mays
  Clone ID: MRT4577_91962C.1.pep
PAGIGLAVVIDAPPLHRPRRRDYHATYALALALSRVRVPPRSAGPRPHPSPPPPHIGPVPGAGAAMPRIKSGDLALAAQARKKPRRAGGRVTCSGPRRRAQPQYDPPSSFAECDRTRIPSSIRIGSP

SEQ ID NO: 360505 - protein, 285 aa, Zea mays
  Clone ID: MRT4577_91963C.1.pep
PRVRPRVRVASTRRLHCAATTHDYNVFSFHPDNSPCHGFEEVLACYRKIVPHLKLSGPTSFAPIVEAAVDIVDRSGGQYHVLVVVADGQVTRSVDTGDGDLSPQEKRTVDSIVMASSYPLSIVLVGVGDGPWDDMRRFDDKLPARDFDNFQFVNFTAIMARAATAQQKESAFALAALMEVPIQYKATMELGILGRSTGNAKRVAPAPPPLPHAQRQASSLRRGASNVGGAAAAPRDDQVCPICLTNAKDLAFGCGHMCCRECGESLTRCPICRQPIRSKLRLYSG

SEQ ID NO: 360506 - protein, 288 aa, Zea mays
  unsure (1)..(288): unsure at all Xaa locations
  Clone ID: MRT4577_91964C.1.pep
VPRSSSGTSPATSTHQIENYNEPYLNALNEYDDGRDLTSYDFEADCFSSPYDDANKKKLAYRHRAIGEKYAKGLEKVLDGHMVKVCNDQYSLTDKYTDGWLSSAHKLLEEALGKSASAPSANSSSINCIVTSGSLIPSLAKCLLYHLDDVVSSENVYSSWEVGKLQCFKWIKERFDGPNVRFCAIGDGHEECSAAQVMKWPFIKIEFRPEAHHRFPGLDLPTVQTYMDVIYESSSKDXDRRLMSILFSPLTXPPMELLFEETVSKEMSWERNVSSSLDLSPWRIRRQV

SEQ ID NO: 360507 - protein, 353 aa, Zea mays
  unsure (1)..(353): unsure at all Xaa locations
  Clone ID: MRT4577_91965C.1.pep
MDEAVPALATGQASTDGVTEQPVNVYIWDMDETLILLKSLLDGSYAGAFDGLKDHEKSTEIGKRWENLILELCDEHFFYEEIENYNEPYLNALNEYDDGRDLTSYDFEADCFSSPYDDANKKKLAYRHRAIGEKYAKGLEKVLDGHMVKVCNDQYSLTDKYTDGWLSSAHKLLEEALGKSASAPSANSSSINCIVTSGSLIPSLAKCLLYHLDDVVSSENVYSSWEVGKLQCFKWIKERFDGPNVRFCAIGDGHEECSAAQVMKWPFIKIEFRPEAHHRFPGLDLPTVQTYMDVIYESSSKDXDRRLMSILFSPLTXPPMELLFEETVSKEMSWERNVSSSLDLSLWRIRRQV

SEQ ID NO: 360508 - protein, 120 aa, Zea mays
  Clone ID: MRT4577_91966C.1.pep
MCCYVGKATKIFLCLVAALLVAGLVLGFGLARHTWGAERTRQQPDCRWPDCQQHQGGDPPLLPDAVTTQPNPLTQPAVAAFPGATATPSPSAGGAAPPTGGPYFGPPGPFVVGLGPAAHA

SEQ ID NO: 360509 - protein, 128 aa, Zea mays
  unsure (1)..(128): unsure at all Xaa locations
  Clone ID: MRT4577_91967C.1.pep
GGATQPTRAPITFRPHSYCFFSDPPMAGIDQFVWXSHYYPLIHTSHLLQSHXMGAMKTQIPVKDDNQGQHIPLQLMHTDNLREARAVSLPTWAQHSGLISPIREXFEGHLVGRSNQIGDNLRDEGASV

SEQ ID NO: 360510 - protein, 63 aa, Zea mays
  Clone ID: MRT4577_91968C.1.pep
ITNQYHAPAKAPSPFVQYLKRSRHLLFFLNHHSLAHNGFTIHIRAHIFVDSNIQMFVEVVTYY

SEQ ID NO: 360511 - protein, 119 aa, Zea mays
  Clone ID: MRT4577_91969C.1.pep
FYSYGAHLCLAEGGALCLPQEGTRAVLLLLGGARVRLHHKSVTEEREVRVSLALQSSQSSHLGLVENKNVIDTQRLEEEKKRWEVSAFLCSLHYLFYKPSYSLLHPFCNSSVMLTMKFY

SEQ ID NO: 360512 - protein, 99 aa, Zea mays
  Clone ID: MRT4577_9196C.1.pep
LVLDRERPPRPRVRGRVGAPWRRRRRPGGRRRRRSGGAPSRRCAPSCSSPSGAPTPRPSRNQGVLASSCVAFCARLFVCLFVCLRFRKQSVYYLQWYNF

SEQ ID NO: 360513 - protein, 185 aa, Zea mays
  unsure (1)..(185): unsure at all Xaa locations
  Clone ID: MRT4577_91970C.1.pep
MRAMRTSLSLRMLSNNSFYACQVYSCAWSKIVKYVKFTLEYGQNYSXSXSMLVSAFSNANXAGDIDDRRTTVGFTVYLGKNLVSWCARKQPXVSRSNTDAEYKTIANATGILMRVKSLLQKVKVSCPPAARIWCDNVGATYITANPIFHSRIKHVEIDFHFVRERVAXRLLEVRITSPKNQVAGG

SEQ ID NO: 360514 - protein, 65 aa, Zea mays
  Clone ID: MRT4577_91972C.1.pep
QEGSVDNDPFLTLLRDGLQNGLCGFQKKTFVEYKYQSYHMTPKEKRVENVGRLCRAILWRVWLIC

SEQ ID NO: 360515 - protein, 80 aa, Zea mays
  Clone ID: MRT4577_91973C.1.pep
VFTVRSVLKKKRAMLLQEAIGLSGAFMLLNDVNGPLDAHLACGVALKLRNKFLIKVRHPCPLTGHGTLLPHGLFFTFDHT

SEQ ID NO: 360516 - protein, 90 aa, Zea mays
  Clone ID: MRT4577_91974C.1.pep
CDWWQSVLTSCIRRETHILSWLPLRGPLGEQRVLEMHLINQMGLILTTATLQLLAEPAVQQGETKNEESQLVESEPMGHNIRACPFKKMD

SEQ ID NO: 360517 - protein, 140 aa, Zea mays
  unsure (1)..(140): unsure at all Xaa locations
  Clone ID: MRT4577_91975C.1.pep
DAWVSNFCCCRNTYLLLWILATXLLNMWYTGYAVFQCLKNEQFSVYCGINXHLFVEFYDLLNVLACIHSNLTXVINRPWTMTNDLQELYMFKXPTLMIPPTTILIINLYDKVTCIYXVIHTGYNXGGTLFRKLFFYFWFI

SEQ ID NO: 360518 - protein, 68 aa, Zea mays
  unsure (1)..(68): unsure at all Xaa locations
  Clone ID: MRT4577_91976C.1.pep
MAAADVEYRWGXNGKKRATGDHSLHNSPTTYGEGLESNITLDRKTQNNRCLGSVNLKTEGATRNAIQS

SEQ ID NO: 360519 - protein, 104 aa, Zea mays
  Clone ID: MRT4577_91977C.1.pep
KNKGLPTPKKPIFQPSKKKTYFPPGMPFPQKKIFFFKKLSHARGTLLKAQRFVKKKAQKGCLPKGENGGFQKTFPKFEKKGSRPKIGTQKGLSPYQPKVGPHPL

SEQ ID NO: 360520 - protein, 64 aa, Zea mays
  Clone ID: MRT4577_91978C.1.pep
LNQSLIFNVNAYTVTSNTDIRMFCSARPKKSVDLFFRMKEMRSSEFIYKICMIQLLFVACVGGD

SEQ ID NO: 360521 - protein, 193 aa, Zea mays
  unsure (1)..(193): unsure at all Xaa locations
  Clone ID: MRT4577_91979C.1.pep
PRVRSDGRSVKSIIAHVXPLKLILVHGSAEATEHLKMHCAKNLDLHVYAPQIEETIDVTSDLCAYKVQLSEKLMSNIISKKLGEHEIAWVDAEVGKEDEKLILLPPSSTPPPHKPVLVGDLKLSDFKQFLENKGWQVEFAGGALRCGEYIMVRKVGDSILKGSTGSQQIVIEGPLCEDYYKIRELLYSQFYLL

SEQ ID NO: 360522 - protein, 69 aa, Zea mays
  unsure (1)..(69): unsure at all Xaa locations
  Clone ID: MRT4577_9197C.1.pep
LSFFCNRVFWPLFLPTKPFFPFHSGWLSFXASAPAPEGSRAEPVRQRQKVQAFFFGRVGGRVWSAPXFR

SEQ ID NO: 360523 - protein, 542 aa, Zea mays
  Clone ID: MRT4577_91980C.1.pep
LSAPVYATEPVFRLGLLTMYDHFLSRWQVSDFDLFTLDDVDAAFQNVVRLKYSQNYLLNGEGVVIAPHVAGHLLGGTVWKITKDGEDVVYAVDFNHRKERHLNGTVLGSFVRPAVLITDAYNALNNQGYRKKQDQDFIESLIKVLATGGSVLLPVDTAGRVLELLLLLDMYWDERRLQYPIYFLTNVSTSTVDYVKSFLEWMGDQIAKSFESSRANAFLLKKVTLIINKEELEKLGDAPKVVLASMASLEVGFSHDIFVEMANEARNLVLFTEKGQFGTLARMLQVDPPPKALKVTMSKRIPLVGNELKAYEEEQERIKKEKSLKASLVKEEELKASHGSNTKASEPMVIDASSSRKSVNASHFGGNNDILIDGFVPPLTSVAPMFPFFENTAEWDDFGEVINPDDYMMKQEEMDNTLMLGPGDGLDGRIDDGSARLLLDSTPSKEDEKLILLPPSSTPPPHKPVLVGDLKLSDFKQFLENKGWQVEFAGGALRCGEYIMVRKVGDSILKGSTGSQQIVIEGPLCEDYYKIRELLYSQFYLL

SEQ ID NO: 360524 - protein, 74 aa, Zea mays
  Clone ID: MRT4577_91981C.1.pep
HVGFCPPPPLICIFEPSLVHLQYYTLDPLLIPVCLGLALHPNAIYESYVVFVKDGSLLSQLICIHTKKKKKKRP

SEQ ID NO: 360525 - protein, 737 aa, Zea mays
  unsure (1)..(737): unsure at all Xaa locations
  Clone ID: MRT4577_91982C.1.pep
MGTSVQVTPLSGAYGEGPLCYLLAVDGFRFLLDCGWTDLCDTSQLQPLAKVAPTVDAVLLSHPDMMHLGALPYAMKHLGLSAPVYATEPVFRLGLLTMYDHFLSRWQVSDFDLFTLDDVDAAFQNVVRLKYSQNYLLNDKGEGVVIAPHVAGHLLGGTVWKITKDGEDVVYAEDFNHRKERHLNGTVLGSFVRPAVLITDAYNALNNQGYRKKQDQDFIESLIKVLATGGSVLLPVDTAGRVLELLLLLDMYWDERRLQYPIYFLTNVSTSTVDYVKSFLEWMGDQIAKSFESSRANAFLXXXVTLIINKEELEKLGDAPKVVLASMASLEVGFSHDIFVEMANEARNLVLFTEKGQFGTLARMLQVDPPPKALKVTMSKRIPLVGNELKAYEEEQERIKKEKSLKASLVKEEELKASHGSNTKASEPMVIDASSSRKSVNASHFGGNNDILIDGFVPPLTSVAPMFPFFENTAEWDDFGEVINPDDYMMKQEEMDNTLMLGPGDGLDGRIDDGSARLLLDSTPSKVISNEMTVQVKCSLVYMDFEGRSDGRSVKSIIAHVAPLKLILVHGSAEATEHLKMHCAKNLDLHVYAPQIEETIDVTSDLCAYKVQLSEKLMSNIISKKLGEHEIAWVDAEVGKEDEKLILLPPSSTPPPHKPVLVGDLKLSDFKQFLENKGWQVEFAGGALRCGEYIMVRKVGDSILKGSTGSQQIVIEGPLCEDYYKIRELLYSQFYLL

SEQ ID NO: 360526 - protein, 395 aa, Zea mays
  Clone ID: MRT4577_91983C.1.pep
MMDQKSNFQKILLSTIACLLLLTIGALGWACKIRGKWHKKKIQTRRMLEYLSSTDEAGGKNIEFSFIAFENIVTATDNFSDCNILGKGGFGKVYKGMLEGTKEVAIKRLSKNSGQGAEEFRNEVVLIAKLQHKNLVKLLGFCVHEDEKMLVYEYLPNKSLDYFLFDSSRKSTLQWPTRFKIIQGVARGIMYLHHDSRLTVIHRDLKASNILLDKEMNPKISDFGMARIFSGDQLQANTNRVVGTYGYMSPEYAMKGAFSVKSDTYSFGVLILEIVSGLKISSPYLIMDFSNLITFAWNMWKDGKPEDFLDSSVTESCSLDEVSGCIHIGLLCTQDDPSCRPLMSTIVSMLENKATPLPTPKQPKDFALRDYNPGNEGVHRELSVNDTSLTMVQGR

SEQ ID NO: 360527 - protein, 124 aa, Zea mays
  unsure (1)..(124): unsure at all Xaa locations
  Clone ID: MRT4577_91984C.1.pep
RFRGAFFPFPPLFYMLGGTFPRGPDQRVFFESPLFGXRAIPVFSFQGLERMERPQTFNQWRVGFQKIGFRQLPFNQGFFKGVSQKVRCFPKGFLFFKNPRWFFQGWKGRLVLGLSPWKPDPRFF

SEQ ID NO: 360528 - protein, 56 aa, Zea mays
  Clone ID: MRT4577_91985C.1.pep
ILSSQHNAEATARLNCDGATEGCDYDSKVTRRTWRAGIEFTLLYDRKIFVLDHLDG

SEQ ID NO: 360529 - protein, 430 aa, Zea mays
  unsure (1)..(430): unsure at all Xaa locations
  Clone ID: MRT4577_91986C.1.pep
MYKKVRRKSSLLKILLPIILCVLLLMLGALVWTCKSRGKRQKKRVQKRRMLEYLSSTDDAGDKNINFPFISFENIVTATDNFSESNLLGKGGFGKVYKGMLEGTKEVAVKRLSTGSGQGKEEFKNEVVLIAKLQHKNLVKLLGCCIHEDEKLLVYEYLPNKSLDYFLFGXEIPVFDTVNDVQQINVLCAXDMPCFILFLLASARKSMLQWPTRFKIIQGVARGIMYLHHDSRLTVIHRDLKASNILLDKEMNPKISDFGMARIFSGDQLQANTNRVVGTYGYMSPEYAMKGAFSVKSDTYSFGVLILEIVSGLKISSPYLIMDFSNLITFAWNMWKDGKPEDFLDSSVTESCSLDEVSRCIHIGLLCAQDNPSCRPLMSTVVSMLENKATPLPTPKQPKDFALRDYNPGNEGVHRELSVNDTSLTMVEGR

SEQ ID NO: 360530 - protein, 88 aa, Zea mays
  Clone ID: MRT4577_91987C.1.pep
LGSRAHPNPFPPPERGLKPPPQGTGCLGSIIGLPSPRIFFTQRFKEHTNRRNNSLAKRRSKLSPAAKAFGAPSAYAPPPFWGLCKVHL

SEQ ID NO: 360531 - protein, 89 aa, Zea mays
  Clone ID: MRT4577_91988C.1.pep
WFIRLVMRRWFLTMVFLYVTYILVISKTFILISWYLSLPKSIFSDGIPCMSFPAATSASGKCSTGIVNDVGYSSFWLASRRRCCSLDPP

SEQ ID NO: 360532 - protein, 68 aa, Zea mays
  Clone ID: MRT4577_91989C.1.pep
MPKRLVPLDHTWGLGYIIWTPQAKSQGPLADKKKSFPNLVFFQGFIWHIAPTNLISTGFLSGVCSDLA

SEQ ID NO: 360533 - protein, 99 aa, Zea mays
  unsure (1)..(99): unsure at all Xaa locations
  Clone ID: MRT4577_9198C.1.pep
RCAAPARRAAASPPPPSSWPPPPPPRRSLSPTPPTRRPAPCCRRSSPWTPPAPAPXDRPXPCSPAPPALPHGSCTSSSSPCNCSPQLCVLDGLRPGRPR

SEQ ID NO: 360534 - protein, 107 aa, Zea mays
  Clone ID: MRT4577_91990C.1.pep
YGGRYLLPRKKELTRRRNPEELYLGKKIMDRRVKVVAPSLWGPIPPVNTEMRCPFYMPANAKHSGFLCADSKIDHGLLNILEENANLLNQIEVIFLTSQAHNIIELF

SEQ ID NO: 360535 - protein, 43 aa, Zea mays
  Clone ID: MRT4577_91991C.1.pep
GVVGSILSSIVTPNCCCNSLCSIANIFHLRAIPTMNIICCLLF

SEQ ID NO: 360536 - protein, 48 aa, Zea mays
  Clone ID: MRT4577_91992C.1.pep
LLSCYIHAWLHIGQKLANNQTLLVFNKQSLLLNWHDLVCILSACINNF

SEQ ID NO: 360537 - protein, 40 aa, Zea mays
  Clone ID: MRT4577_91993C.1.pep
VVRILWYGLIIFMGMVSPNEIKVYPLYPLIDLMILWARAQ

SEQ ID NO: 360538 - protein, 185 aa, Zea mays
  Clone ID: MRT4577_91994C.1.pep
MGATSLSSTTAAAILHLALLLAAARRHGATDYTVGDSAGWAIGPNYLIWSQKYNFTAGDTLVFNYVKEQHNVYQVTQDEFRTCEPPANQSTRVWATGHDLVNLTVPGDYYFLCNVAGHCLGGMKFSIAVAAPPPPPPPPPPPPALTPPPPPPPSSGCVPRISRRRAWAEVGRIPFLAAIGLLVLT

SEQ ID NO: 360539 - protein, 87 aa, Zea mays
  Clone ID: MRT4577_91995C.1.pep
SSSTHRRVLFSPHQSASPWLSMSVVLCASVFGRCLLLTIPYSISSSSFALALARRSCSSDVRSRTSAEGCRQATTKSSCDVVRSLIA

SEQ ID NO: 360540 - protein, 52 aa, Zea mays
  Clone ID: MRT4577_91996C.1.pep
SLGAFSDHGDVLWVMESELLEMSYDQFVTSAKDDVRRHVIGVRVREVRVCSI

SEQ ID NO: 360541 - protein, 104 aa, Zea mays
  Clone ID: MRT4577_91997C.1.pep
PSFLKVIRLSAATQDVPRSVICNVHGVNPKFIEIGKLKHQQLCQREQAFFKGAYYIGKMVWSKGYTELLQLLHKHQMELSGLKMELYGSGEDADEVKASAERLS

SEQ ID NO: 360542 - protein, 57 aa, Zea mays
  unsure (1)..(57): unsure at all Xaa locations
  Clone ID: MRT4577_91998C.1.pep
PRRDHFLHKIKNLEGLXNPIISKMFQGRGKNLGGPAGMNKYAPSGKGGPGPNIEKVD

SEQ ID NO: 360543 - protein, 74 aa, Zea mays
  Clone ID: MRT4577_91999C.1.pep
CSPLTCKGRAVIVLSLVVLGKGAPNKLGVPFGVVAILFRQGYPPSWPIRFLFRNVFFLWKGTLLLVGKYLILPA

SEQ ID NO: 360544 - protein, 78 aa, Zea mays
  unsure (1)..(78): unsure at all Xaa locations
  Clone ID: MRT4577_9199C.1.pep
HSAASFVEGGIXDSCEYACSMCLAASCASDPAASTGCKXSLILNAYYNGARXTAQCPLWEDTITMMEPTSCDLPEGCH

SEQ ID NO: 360545 - protein, 302 aa, Zea mays
  unsure (1)..(302): unsure at all Xaa locations
  Clone ID: MRT4577_919C.1.pep
PLVRRCVIILDCYSDPLGWKQKIQNQHHQGNSAKQFSTNKDNITVYRSVKDVTKLMSSTTELGGGFEGEGKTYFSVAVDSISSMLRHASVSSISGLLSNLRSHEQVSSIFWMIHSDLHEPKVPRAFECLSTMVACVEPALVDPVCGESPGNMSILEQNYSKAKFIVRLKRRNGRVKHLYENLYIEGNDIKFDSAPSVSIEVNQSLVPKVQFNLELSEKERSDRANVVLPFEHQGNGQPIHIYDGRRSLPEAQRDPNLTAPALVDELKKSQIWNCKGXEIHYFRDSDDEQPDSDEDPDDDLDI

SEQ ID NO: 360546 - protein, 45 aa, Zea mays
  Clone ID: MRT4577_91C.1.pep
FLMKWFAMAYRPELNQLVKDQPEDFGSTLDMAYLRSVLLSALAFD

SEQ ID NO: 360547 - protein, 103 aa, Zea mays
  Clone ID: MRT4577_92000C.1.pep
NELNLLVCVYIVVQKVWSYEWSKGKCRGRPVWFPSDYSRNQRVCSKVQSRKFSIINTFPDTSIYSQGWAMCTMVDPQKRRSVNSVAPTSCMAGTLLPVCSFPI

SEQ ID NO: 360548 - protein, 221 aa, Zea mays
  unsure (1)..(221): unsure at all Xaa locations
  Clone ID: MRT4577_92001C.1.pep
MAGTVTVPGSSTPSTPLLKDELDIVIPTIRNLDFLEMWRPFFQPYHLXFKDSACRCFGYMVSKKKYIYTIDDDCFVAKDPSGKDIDALEQHIKNLLSPSTPFFFNTLYDPYREGADFVRGYPFSLREGAHTAVSHGLWLNIPDXDAPTQLVKPKERNERYVDAVMTIPKGTLFPMCGMNLAFDRDLIGPAMYFGLMGDGQPIGRYDDMWAGWCVKVICDHL

SEQ ID NO: 360549 - protein, 171 aa, Zea mays
  Clone ID: MRT4577_92002C.1.pep
HTAVSHGLWLNIPDYDAPTQLVKPKERNERDLIGPAMYFGLMGDGQPIGRYDDMWAGWCVKVICDHLSLGVKTGLPYIWHSKASNPFVNLKKEYKGIFWQEDIIPFFQNVTIPKDCDTVQKCYIYLSGQVKEKLGTIDPYFVKLGDAMVTWIEAWDELNPSTPAAANGKAK

SEQ ID NO: 360550 - protein, 364 aa, Zea mays
  Clone ID: MRT4577_92003C.1.pep
MAGTVTVPGSSTPSTPLLKDELDIVIPTIRNLDFLEMWRPFFQPYHLIIVQDGDPTKTIKVPEGFDYELYNRNDINRILGPKASCISFKDSACRCFGYMVSKKKYIYTIDDDCFVAKNPSGKDINALEQHIKNLLSPSTPFFFNTLYDPYREGADFVRGYPFSLREGAHTAVSHGLWLNIPDYDAPTQLVKPKERNERYVDAVMTIPKGTLFPMCGMNLAFDRDLIGPAMYFGLMGDGQPIGRYDDMWAGWCVKVICDHLSLGVKTGLPYIWHSKASNPFVNLKKEYKGIFWQEDIIPFFQNVTIPKDCDTVQKCYIYLSGQVKEKLGTIDPYFVKLGDAMVTWIEAWDELNPVTPAAANGKAK

SEQ ID NO: 360551 - protein, 137 aa, Zea mays
  Clone ID: MRT4577_92004C.1.pep
RETKAVVDTFDHKAVKTTPLTVADIEQQDDFETRRAWKKVSDAINKGNMDLTSSEKTIIETRQREMRQQEKDAGKEWERKFFSRAPQYPLFEQLAKKIGEGINDGQTNGVWSFDKQKADAAKSPFHPDVVPPIYERK

SEQ ID NO: 360552 - protein, 52 aa, Zea mays
  Clone ID: MRT4577_92005C.1.pep
QKCYIYLSGQVKEKLGTIDPYFVKLADAMVTWIEAWDELNPATPATENGKAK

SEQ ID NO: 360553 - protein, 168 aa, Zea mays
  Clone ID: MRT4577_92006C.1.pep
GAAGQALAILVSLCAKSVFAPHLGCSGFRTRNSRRLLLSPLSQLQKLTPTLSLLRNGHRFHQWSLRLAVDHDYPSPSAPLPSSPHSIKSRSSRSLIPYRVAQASSRNASPSTAQLAQAAGCSLSYRASLELRPNRAPVPHLCPFTVVHSLAKLPAHRIWLEVEEVQND

SEQ ID NO: 360554 - protein, 395 aa, Zea mays
  unsure (1)..(395): unsure at all Xaa locations
  Clone ID: MRT4577_92007C.1.pep
MAGTVTVPGSSTPSTPLLKDELDIVIPTIRNLDFLEMWRPFFQPYHLIIVQDGDPTKTIKVPEGFDYELYNRSDINRILGPKASCISFKDSACRCFGYMVSKKKYIYTIDDDCFVAKDPSGKDINALEQHIKNLLSPSTPFFFNTLYDPYREGADFVRGYPFSLREGAHTAVSHGLWLNIPDYDAPTQLVKPKERNERYXFCSRLLSDILATALLLHEGLGLTPFFFRYVDAVMTIPKGTLFPMCGMNLAFDRDLIGPAMYFGLMGDGQPIGRYDDMWXXGWCVKVICDHLSLGVKTGLPYIWHSKASNPFVNLKKEYKGIFWQEDIIPFFQNVTIPKDCDTVQKCYIYLSGQVKEKLGKIDPYFAKLGDAMVTWIEAWDELNPAGPAAGKDKAK

SEQ ID NO: 360555 - protein, 412 aa, Zea mays
  unsure (1)..(412): unsure at all Xaa locations
  Clone ID: MRT4577_92008C.1.pep
MLSLARHHSRQAMAGTVTVPGSSKPSTPLLKDELDIVIPTIRNLDFLEMWRPFFQPYHLIIVQDGDPTKTIKVPEGFDYELYNRNDINRILGPKASCISFKDSACRCFGYMVSKKKYIYTIDDDKKCFVAKDPSGKDINALEQHIKNLLSPSTPFFFNTLYDPYREGADFVRGYPFSLREGAHTAVSHGLWLNIPDYDAPTQLVKPKERNERYVDAVMTIPKGTLFPMCGMNLAFDRDLIGPAMYFGLMGDGQPIGRYDDMWAGWCVKVCGLAVLASTASYFLPKTXSTGLMMILQLKQNNLXICDHLSLGVKTGLPYIWHSKASNPFVNLKKEYKGIFWQEDIIPFFQNVTIPKDCDTVQKCYIYLSGQVKEKLGTIDPYFVKLGDAMVTWIEAWDELNPSTPAAANGKAK

SEQ ID NO: 360556 - protein, 358 aa, Zea mays
  Clone ID: MRT4577_92009C.1.pep
MAGTVTVPGSSTPSTPLLKDELDIVIPTIRNLDFLEMWRPFFQPYHLIIVQDGDPTKTIKVPEGFDYELYNRNDINRILGPKASCISFKDSACRCFGYMVSKKKYIYTIDDDCFVAKDPSGKDINALEQHIKNLLSPSTPFFFNTLYDPYREGADFVRGYPFSLREGAHTAVSHGLWLNIPDYDAPTPLVKPKERNERYVDAVMTIPKGTLFPMCGMNLAFDRDLIGPAMYFGLMGDGQPIGRYDDMWAGWCVKVICDHLSLGVKTGLPYIYTIDDDCFVAKDPSGKDINALEQHIKNLLSPSTPFFFNTLYDPYREGADFVRGYPFSLREGAHTAVSHGLWLNIPDYDAPTQLVKAK

SEQ ID NO: 360557 - protein, 109 aa, Zea mays
  unsure (1)..(109): unsure at all Xaa locations
  Clone ID: MRT4577_9200C.1.pep
GXRXGLRFPXXFXGAVXGXGXXXXXXXXXGVXXAXXAVXXXXXXLVXGPPLGVVGRXXRLGXWGLXGXXFLASAGXAAGSXXXXXXRRPRXXXXAAARGSCRXXXXXXR

SEQ ID NO: 360558 - protein, 364 aa, Zea mays
  Clone ID: MRT4577_92010C.1.pep
MAGTVTVPGSSKPSTPLLKDELDIVIPTIRNLDFLEMWRPFFQPYHLIIVQDGDPTKTIKVPEGFDYELYNRNDINRILGPKASCISFKDSACRCFGYMVSKKKYIYTIDDDCFVAKDPSGKDINALEQHIKNLLSPSTPFFFNTLYDPYREGADFVRGYPFSLREGAHTAVSHGLWLNIPDYDAPTQLVKPKERNERYVDAVMTIPKGTLFPMCGMNLAFDRDLIGPAMYFGLMGDGQPIGRYDDMWAGWCVKVICDHLSLGVKTGLPYIWHSKASNPFVNLKKEYKGIFWQEDIIPFFQNVTIPKDCDTVQKCYIYLSGQVKEKLGKIDPYFAKLGDAMVTWIEAWDELNPAGPAAGKDKAK

SEQ ID NO: 360559 - protein, 395 aa, Zea mays
  unsure (1)..(395): unsure at all Xaa locations
  Clone ID: MRT4577_92011C.1.pep
MAGTVTVPGSSTPSTPLLKDELDIVIPTIRNLDFLEMWRPFFQPYHLIIVQDGDPTKTIKVPEGFDYELYNRNDINRILGPKASCISFKDSACRCFGYMVSKKKYIYTIDDDCFVAKDPSGKDINALEQHIKNLLSPSTPFFFNTLYDPYREGADFVRGYPFSLREGAHTXAVSHGLWLNIPDYDAPTQLVKPKERNERYXFCSRLLSDILATALLLHEGLGLTPFFFRYVDAVMTIPKGTLFPMCGMNLAFDRDLIGPAMYFGLMGDGQPIGRYDDMWAGWCVKVICDHLSLGVKTGLPYIWHSKASNPFVNLKKEYKGIFWQEDIIPFFQNVTIPKDCDTVQKCYIYLSGQVKEKLGTIDPYFVKLGDAMVTWIEAWDELNPSTPAAANGRAK

SEQ ID NO: 360560 - protein, 94 aa, Zea mays
  unsure (1)..(94): unsure at all Xaa locations
  Clone ID: MRT4577_92012C.1.pep
PSSPLPKTRQMNKKSGFLKGGEKISFNNSLGKCSTLMAPPGYDFLQDFFQKRGGAHWVSLGGGLKTWGPIFRAVFQGEAXLGGVVTRSKGGFST

SEQ ID NO: 360561 - protein, 115 aa, Zea mays
  Clone ID: MRT4577_92013C.1.pep
ARNSARGTFAGTFSRTRRADRPRGPYGVSRGWQPSRARARHARRENPGTKTTTPLGTRGKRGTNTKWGRIKSNNRTPAETDKSTDCESANPGEQIYEKTITGMHLGKIALITSLK

SEQ ID NO: 360562 - protein, 48 aa, Zea mays
  Clone ID: MRT4577_92014C.1.pep
VRRVLLQPRGQTPLFFRAPSLISTPREEPTQAPFPNLVVQDYMNLYLP

SEQ ID NO: 360563 - protein, 213 aa, Zea mays
  unsure (1)..(213): unsure at all Xaa locations
  Clone ID: MRT4577_92015C.1.pep
AGRAGIITPTTTLPHLTNNQSTTHTKTTTQQTTTTXIIKMDKAKAAITDFMGRSGXTTTPLSTRQLPPLFSTRSSSLTYTRRSTLPLTRRFTRTTTTALSSPSTTVRSCQSNTLLSSVLFSTASLTTAXDATKRAXSTTRLALLTSAALRTPPTARVLPLLLAESTSTTTSTRLSSPLFRRRPSSPTLSTPPSPSMRAAITRLPTMRLLLSQP

SEQ ID NO: 360564 - protein, 92 aa, Zea mays
  Clone ID: MRT4577_92016C.1.pep
PFPGVLFGEKKNGGVGGPPFGPPPLFFLTRGSLKGGDLNLCQKRFSLFVFKTDFDPGGDPVPKGVGDYQPKPGGKERFFKQGLTGTLEGVVF

SEQ ID NO: 360565 - protein, 69 aa, Zea mays
  Clone ID: MRT4577_92017C.1.pep
KDLKKLQGWGTCTGGATSPYFHRPILACHLKLRLWVPVAPTVFGQHGHYQGEPRGLAFLTKRVFLTNTT

SEQ ID NO: 360566 - protein, 73 aa, Zea mays
  unsure (1)..(73): unsure at all Xaa locations
  Clone ID: MRT4577_92018C.1.pep
NXSLRGGASRIQLPYRSGSYRQGCSTLKKVIREYTSIFAFSILLYQLCGGGGGXXXXSXDXTNIVRENQVVVK

SEQ ID NO: 360567 - protein, 65 aa, Zea mays
  Clone ID: MRT4577_92019C.1.pep
ISQIKIKYLQTKVLCKTRLIQLMNKAYTCSIEYSPEPISCNNTNQNRIIKVKRQRSKNFLEKRAS

SEQ ID NO: 360568 - protein, 76 aa, Zea mays
  Clone ID: MRT4577_9201C.1.pep
LIMRAATDMILIHDSSTCTGHSVSGPGYPCLKLPFPSMRMYISVLYKVSVVSLSMFCHGNQCAINPLYRWPACPAG

SEQ ID NO: 360569 - protein, 62 aa, Zea mays
  Clone ID: MRT4577_92020C.1.pep
LSNSAEGGSLLKDIPATKDGRVDWSQDFFCKPAFLTVSGQLNGETYASALSDIYTFGPTFRA

SEQ ID NO: 360570 - protein, 97 aa, Zea mays
  unsure (1)..(97): unsure at all Xaa locations
  Clone ID: MRT4577_92021C.1.pep
ARISILKPKKNEWGCGFFCNGPGHPXTCENSAWNASYYSAFWILNTNGWGTFXWHWKHITLWQGNDSQINETSTYXMGWLRDHPXINSSQLINVYKL

SEQ ID NO: 360571 - protein, 79 aa, Zea mays
  Clone ID: MRT4577_92022C.1.pep
GIIWYNYNQIDSGNMLTKAKATCDQSTLPSLVAGISLSREPPSALFESYIIEVDKNIKRIQTRMQQEKPRSKKAKWMAT

SEQ ID NO: 360572 - protein, 310 aa, Zea mays
  unsure (1)..(310): unsure at all Xaa locations
  Clone ID: MRT4577_92023C.1.pep
GYLEAGRVGILSDLVQALSIVCLLGDDEILLVTEVYNNCIIRYLEEPSDSVSLLRDGDKLAAYRLPKRHEKSPLVVFTHQHFVQHSSDGNLTPQMREFEAPLLAALPEEISGLSLQDIYLKLLSPFQLSNGASSLNDCMESNSDSVDTPSDSGSINFQNSQLEDXLKATTVVLXCEITKGPDDLYDGGSGSNKEAHMVDFEFYLKSERGEGQQQKIEINELHLLFETAPSRLHVNVHWLQNASRKYATSMLNNLPEIHKLELIPKGTEDSVALHGCLEAFLKEEPLGPEDMWYCPRCKKHQQAMKKLDLW

SEQ ID NO: 360573 - protein, 99 aa, Zea mays
  Clone ID: MRT4577_92024C.1.pep
IDHNHRCLLPNSPVNHVSSTTNVKISHHGSWSIVVWVCGTVVVFFAGVVGLYAWVHIASIGSDLTESPEPVKSRPFLGIMAVPHSKFSGLVHACDGDKL

SEQ ID NO: 360574 - protein, 83 aa, Zea mays
  Clone ID: MRT4577_92025C.1.pep
LAMAKGYSDVDAPEQKTTKRVKFGRLLKQAAGCMVPDWTRFCPFLTHWAQKSFHSKCPLGNNQHDTDEDWPSGLGETTRQRTG

SEQ ID NO: 360575 - protein, 47 aa, Zea mays
  Clone ID: MRT4577_92026C.1.pep
KLQPFARPLKVSRCSIAKVCSFGGGGNPPHPTVEALRCAADEAEGER

SEQ ID NO: 360576 - protein, 58 aa, Zea mays
  Clone ID: MRT4577_92027C.1.pep
KGSLVWTSILHCFTGIPQGCLTILKYCHRTRSLMGLPYRSFLEKPKAAGLVGPWAPHF

SEQ ID NO: 360577 - protein, 61 aa, Zea mays
  Clone ID: MRT4577_92028C.1.pep
NYFPPEKNTKKWNPKIKSHCSNQNLGGKEHLMAKRGQKLQQIWNLQTQRNLRYQHSLQAAF

SEQ ID NO: 360578 - protein, 140 aa, Zea mays
  Clone ID: MRT4577_92029C.1.pep
MTKDIKELASEWLELDEDKTTTDEIYKLLVNGDHDELERRLRHRIAFGTAGLRGPMQGGFACMNSLTVIQASQGLAAYLLKTEENVKKRGVVIGRDARHNSEKFAKLTAAAFVAKGIKVWWDEEPSHTPMVPFGVRELEA

SEQ ID NO: 360579 - protein, 88 aa, Zea mays
  Clone ID: MRT4577_9202C.1.pep
MLLLRASTAPFAYAKVDKVDAEEARHLRAQYLIHKVLEEKSPRPPAALARTSRPRVGVRLKKLRLAVRGLRARACPALLRHLRNLRRL

SEQ ID NO: 360580 - protein, 119 aa, Zea mays
  unsure (1)..(119): unsure at all Xaa locations
  Clone ID: MRT4577_92030C.1.pep
YFLGNPGGKEGPXGITSQKTPAGGGPPRGGPPKKEPKKTPPQQGVSCKGGLKGKRGAKGKNWVRGKKRKRVPQTPGLAKGETKGPGAPGRDPPRGELPGPGGGPKGAPAGNQTGGKSGK

SEQ ID NO: 360581 - protein, 425 aa, Zea mays
  Clone ID: MRT4577_92031C.1.pep
MKDWSIFSKLDHNGGYLPRFPMDSPISHDIGLRLVSQVGNLVECSFQHPRHICATGSGAVQEAFSCFNKFAGAFYFWFSRASNPKLFQRLSAAAGSSSRACRSHIKQVTSCLQHLPGLEFGSQLREDHAVQVLLARLASATFGRLWTEVEERHACNILMLAAATVIPPFENISPKMLAASMALRKDRGNIEPTEQSYSEENRPGCACVAVPRVLLPEDATEPTTGIKFPTVLEDNSNLTTEVLVGMGFRSMRIMRVKNLNLYAFGLYIQPDSVCKKLGPKYAYIPDAELKDHPDFYEDLLRENIDMTVRLVVSYNGLSIGTVRDAFEKSLGFRLQKMNPNTDYGCLKTFGSCFSEDIRIPAGTKIDFRQTSDGQLITEIDGKQIGTVQSKDLCRAFFDMYIGDPPVSVETKQDIAQNVAGLIRRC

SEQ ID NO: 360582 - protein, 127 aa, Zea mays
  unsure (1)..(127): unsure at all Xaa locations
  Clone ID: MRT4577_92032C.1.pep
ARFYSGFIQNFXPHRMQCLVNYQATLLHSLIDLLLAHWLYLHNAPSFLVSPSVAAHENLYTRSVWSGYRGAECHQIHGCXVGSIRSGILAADSAYASSGDASVSRLRWLGCSLLLLSQPMWRYYLSV

SEQ ID NO: 360583 - protein, 144 aa, Zea mays
  unsure (1)..(144): unsure at all Xaa locations
  Clone ID: MRT4577_92033C.1.pep
MPARHNPQVKELEEGPNKAPGWNSSVVGXKPAAEGPKAAAASSPAKRGQLAAPEGRRAVLLGLGAVSAVTAPTGSAKATTWIFFFHHTPGKKVLKAKNRLATGGENFGGAYPGEFGGGQFPYDFPGCQDLPNQKKGPFFGDDLQ

SEQ ID NO: 360584 - protein, 72 aa, Zea mays
  Clone ID: MRT4577_92034C.1.pep
SIHTGSQAPLPIAAIAILQCQPQRSQILQFSTRPYPSFRPTRWLPAQAHQLHGRSGTRRPRAQANLFWLLRR

SEQ ID NO: 360585 - protein, 149 aa, Zea mays
  unsure (1)..(149): unsure at all Xaa locations
  Clone ID: MRT4577_92035C.1.pep
HAKQLELPVINXKPLANLSPYSQQQQXFLPFNQLSTLNPAAYSQQQLLPFSQVDTVYSQQQQLSSFXNQLAALNPAAYSQRQILLPSSQLAAANRACFLTQTQLLTFYHPNAANPATLLQLHTTEPLSQLDPRDLLASYQERIQASGSG

SEQ ID NO: 360586 - protein, 111 aa, Zea mays
  Clone ID: MRT4577_92036C.1.pep
LSPRCFGVLNGPCLKFKKFPPGNNWPFGARKIFFWFNPRGAPCLFLLFFPPFFLEKGQGFFIFFRPFLEFMGVFFCLVHLARRSCSPTPFGARKCFFFNAPPVSVPVLLAV

SEQ ID NO: 360587 - protein, 63 aa, Zea mays
  Clone ID: MRT4577_92037C.1.pep
VKGISSSVSSTHGNAFLLMCLRHRTGGHPGLVSSEHNTGRYYNWNPCSVDNRTLQTCPCILLV

SEQ ID NO: 360588 - protein, 82 aa, Zea mays
  unsure (1)..(82): unsure at all Xaa locations
  Clone ID: MRT4577_92038C.1.pep
HICFGFLMRACMLADIFPKKNLKKANXXVLXXXKKCFXSRSPKARRGGNPSFFGTNEKHTIYAALGMQVLTIFSKKKKKGRP

SEQ ID NO: 360589 - protein, 85 aa, Zea mays
  Clone ID: MRT4577_92039C.1.pep
LPVGMPNKSMSFRPMEFIGDKGSQDAPMYCQEKDRAKIRSPSYYILRSCSTEILMRPHSSYIYTSLVACSVRSELNGIKCLVSQN

SEQ ID NO: 360590 - protein, 185 aa, Zea mays
  Clone ID: MRT4577_9203C.1.pep
RKQLPNVHVLNQVTNKANSEAHFRLTGPEIWKDTAGKVDVFVAGSGTGGTVSGVGKYLKMQKPGVKIICVEPAESPVISGGAPGKHKIQGVGPGFLPEVLDTSVIDETVTVSTEEAMANARRLAREEGLLVGISSGANLAACLKVASRQENKGKMIVTVFPSGGERYINSDLFADVREECIAMTF

SEQ ID NO: 360591 - protein, 106 aa, Zea mays
  unsure (1)..(106): unsure at all Xaa locations
  Clone ID: MRT4577_92040C.1.pep
IRIGQTGIQVGNACFYLYCLKHWRGGDVHIPFNKTIAXGDDAFNTFFSETGAGKHXPRADFVDLEPTDIDEERTGSYRQLLHPEQIIRDKEDANNNFARSNYTIGK

SEQ ID NO: 360592 - protein, 64 aa, Zea mays
  Clone ID: MRT4577_92041C.1.pep
RGGAAYIKCDSFFCAYGYTAHLVKCAKSSTICAPPDWKRSSDPNQASKTHLSCDLHRDQGPWPL

SEQ ID NO: 360593 - protein, 151 aa, Zea mays
  Clone ID: MRT4577_92042C.1.pep
MAPRSRPSSKRPLWFIVLVAFVCAVAIGAYLYTPRHYTACYLVPSEACNSRPPPEPARVYTDDEIAARAIMRDIIRARPVQSKNPKIAFMFLTPSSLPFEKLWEKFFMGHEDRYTIYVHASRDRPIHASSVFSGRDIRSEKVIWGTISMVD

SEQ ID NO: 360594 - protein, 372 aa, Zea mays
  Clone ID: MRT4577_92043C.1.pep
MAPRSRPSSKRPLWFIVLVAFVCAVAIGAYLYTPRHYTACYLVPSEACNSRPPPEPARVYTDDEIAARAIMRDIIRARPVQSKNPKIAFMFLTPSSLPFEKLWEKFFMGHEDRYTIYVHASRDRPIHASPVFSGRDIRSEKVIWGTISMVDAEKRLLAHALQDPENQHFVLLSESCVPLHNFDYIYSYLMETNVSFVDCFDDPGPHGAGRYSDHMLPEIVKKDWRKGAQWFTVKRQHAVLILADTLYYGKFKRYCKPGNEWHNCYSDEHYLPTLFNMADPTGIANWSVTHVDWSEGKWHPKVYRAVDTSFELLKNISSIDESVHVSSNAKHVAQRRPCVWNGMKRPCYLFARKFYPEALGNLMNIFSNFTVI

SEQ ID NO: 360595 - protein, 119 aa, Zea mays
  Clone ID: MRT4577_92044C.1.pep
GPASRSPRVRRSGRPVLIPRQQYVTTLPALLSTPPPEHVGCSPELILARIWEDRFCGGGVSLLRVRGWNLATGPPTPIRRLFFLIRDPQVWCDELPSFDGCLCSPLQVDGPGLYTTWFL

SEQ ID NO: 360596 - protein, 130 aa, Zea mays
  Clone ID: MRT4577_92045C.1.pep
ADTLYYGKFKRYCKPGNEWHNCYSDEHYLPTLFNMADPTGIANWSVTHVDWSEGKWHPKVYRAVDTSFELLKNISSIDESVHVSSNAKHVAQRRPCVWNGMKRPCYLFARKFYPEALGNLMNIFSNFTVI

SEQ ID NO: 360597 - protein, 129 aa, Zea mays
  unsure (1)..(129): unsure at all Xaa locations
  Clone ID: MRT4577_92046C.1.pep
KKKKKKKKWEKETNKNLKKEKKKKKKKEKKKKKQKKKKKYKXKKRRGESKKKKEETKQIKKRKKKIKXKKKKXKQKKRRMTKKQTRKKSTKKKMKTKKKKEKQKNTIKKKSKNKENKIPEKENKKIIMK

SEQ ID NO: 360598 - protein, 276 aa, Zea mays
  Clone ID: MRT4577_92047C.1.pep
RRQLCRIRVQTSRHEDRYTIYVHASRDIPSHSSTVFAGRDIRSEKVIWGTISMLDAEKRLLAHALQDPENQHFVLLSESCVPLHNFDYIYSYLMETNVSFVDCFDDPGPHGAGRYSEHMLPEIVKKDWRKGAQWFTVKRQHAILILADTLYYGKFKRYCKPGNEWHNCYSDEHYLPTLFNMVDPTGISNWSVTHVDWSEGKWHPKVYRAADTSFDLLKDIASIDESVHVSSNAKHVAQRRPCVWNGMKRPCYLFARKFYPEALDNLLNIFSNFTII

SEQ ID NO: 360599 - protein, 44 aa, Zea mays
  Clone ID: MRT4577_92048C.1.pep
AHLGSVKDRPYHLTSVPVLLLPSQNLLDGRIQPNLFWKTYGNSR

SEQ ID NO: 360600 - protein, 111 aa, Zea mays
  Clone ID: MRT4577_92049C.1.pep
PQHFVPFTHRAALKPAGFFQRQRLPPFTQVVVVSPVPFLAPPRGVRFYRPGGPCAGPLFPLPRLLPSPPLGLASPPGFFPQPTMGGAPFCSVFGVSSPLKVFWRLFVPSPI

SEQ ID NO: 360601 - protein, 137 aa, Zea mays
  unsure (1)..(137): unsure at all Xaa locations
  Clone ID: MRT4577_9204C.1.pep
MTAQFFLLAAXPPPGPPRTSHAPYSSARPFHSGHFIRRLAXGAATDRELVVEDATKNGVTVLKEASEEEGVATLTKDDDGPTXVNVRITXGYTPGRHGFHLHEVDDTTNGSISRGPHYNPHKLTRGAPEDKSRHGGD

SEQ ID NO: 360602 - protein, 80 aa, Zea mays
  unsure (1)..(80): unsure at all Xaa locations
  Clone ID: MRT4577_92050C.1.pep
MAAAGGGAGGKVSFKIILTSDPKLPFKVFSXVPEAEPFTEVLKYSAEEFKVPPQTXSAIIANEGIGIHPQRSASHGCLEH

SEQ ID NO: 360603 - protein, 63 aa, Zea mays
  Clone ID: MRT4577_92051C.1.pep
QQWRTRNGGILMLLALATCEGNTNIGPQFSQANVATLNTPYLPSMIDFLSENPGLDLYRIHRA

SEQ ID NO: 360604 - protein, 49 aa, Zea mays
  unsure (1)..(49): unsure at all Xaa locations
  Clone ID: MRT4577_92052C.1.pep
RTSPKQKKKKINKSKKKXKKKKKKKNKYKKKKKKKKKKKKKKKKKIKNL

SEQ ID NO: 360605 - protein, 63 aa, Zea mays
  Clone ID: MRT4577_92053C.1.pep
ILGSPPGWGETSSASVFWWVGWFCFKRCAALLRDLRLYNPNFVLGIKICKCWLRLLLYGAKYC

SEQ ID NO: 360606 - protein, 398 aa, Zea mays
  Clone ID: MRT4577_92054C.1.pep
MANTTCLRSRLLVLPPPPAPRTVVSFRLRPCATTISSSSRKRRPRLAARAAPPGGAVAPASAASKEDDQGEMGSGGGLSADDAERLCQFLRADLPHLFDDVGIDRSAYDDRVRFRDPITRHDTIDGYLFNIRLLKLLFRPDFYLHAVKQTGPYELTTRWTMVMKFMLLPWKPELVFTGLSIMGVNPKNLKFNSHVDLWDSIQNNEYFSSEGLWDVFKQLRIYKTPDIETPNYLILKRTAHYEVRSYAPFLVVEAKGDKLTGSSGFNNVTRPGFGNNASSEKIPMTTPVFTQASDNTLSDVSIQIVLPMNKDLDSLPAPNTAVTLRKVEGGIAAVKKFSGRPKEEIVLQKEKDLRSQLLNDGLKPHPGCLLARYNDPRTKSFLMRNEVLIRLIDFTLEL

SEQ ID NO: 360607 - protein, 89 aa, Zea mays
  Clone ID: MRT4577_92055C.1.pep
AYESSFPHPPLGKKEIVHPGDSNKNGFLSSRKVRRNPVPEWGYGPPPSGEPEFCSLYHSSGPIVVERTLALWIMFSRFVLTLPTYPMDP

SEQ ID NO: 360608 - protein, 135 aa, Zea mays
  unsure (1)..(135): unsure at all Xaa locations
  Clone ID: MRT4577_92056C.1.pep
MQKNKRASGHASSLRKVQSTIKKKEKIGSSRKRGITTRKGHLRENIFGYSSPDRDISSTKFEERQFGNVYEPGQADWCELSKRLASHLSVEVVSLALFDGDKMLYACTGIVLPRXTSRLDLTRFLTSSQLVAVFN

SEQ ID NO: 360609 - protein, 201 aa, Zea mays
  Clone ID: MRT4577_92057C.1.pep
DARIYLADTLPVFVRRVIYLDSDVVVVDDVRKLWSVDLGERHVVAAPEYCHANFTKYFTDAFWSDRELRAALRDRRPCYFNTGVMVMDVARWRRGGYTRRVEEWMAVQKRKRIYHLGSLPPFLLVLAGDIRPVDHRWNQHGLGGDNVEGRCRSLHPGPISLLHWSGKGKPWLRLDSRKPCTVDYLWAPYDLYKAAATALEE

SEQ ID NO: 360610 - protein, 51 aa, Zea mays
  Clone ID: MRT4577_92058C.1.pep
QFEHKICPPGRLLFPTPNQKNRVYFESREKKIPFLGFKVKWSQKGPLEWIF

SEQ ID NO: 360611 - protein, 221 aa, Zea mays
  unsure (1)..(221): unsure at all Xaa locations
  Clone ID: MRT4577_92059C.1.pep
MPEITTLLFDCDNTLVLSEELAFEACAGLINEICEARQVEMRFTGETLIKEFVGQNFRGMLTTLQKNYNIEISPEDMETYVRKEEDAVIAKLKESLRPCVGVDEQLEKLAASGKYTMSVVSSSALRRVRASIEKVGQDKYFQGDVVFSAATSLEKPTSKPDPAIYLHALEKLGKKAEEAVAIEDSKSGTLSGTRAGIKVIGYXGSYAEDKQPEMEKTLRDA

SEQ ID NO: 360612 - protein, 79 aa, Zea mays
  Clone ID: MRT4577_9205C.1.pep
TYFPQSLNLLVFFLIFCPVHIFVVTFSILILIFSQLFFQLFFCPPHLFLGSFPSVLPFFKKKKKKNKNIFFFFYFFLKY

SEQ ID NO: 360613 - protein, 80 aa, Zea mays
  Clone ID: MRT4577_92060C.1.pep
CLRESSLAFCEVGRGWHAYFRAEAFMALVGFAQSSGATGPPRGFWGPPRHRIVNLSRVGRHQCRNFDPPPGSIPCARQTE

SEQ ID NO: 360614 - protein, 33 aa, Zea mays
  Clone ID: MRT4577_92061C.1.pep
WYAVDVIKTSILTPNLLDHLLQLCVNLNIGLSL

SEQ ID NO: 360615 - protein, 90 aa, Zea mays
  unsure (1)..(90): unsure at all Xaa locations
  Clone ID: MRT4577_92062C.1.pep
TLTLFQSQRYEEMVDFMDIVAGAVDSEELTVKDRILLYDAYKNVIVTIRASXRIISFIDHMEEDHANVDHVTLINNYLPTIESDLNTYLL

SEQ ID NO: 360616 - protein, 50 aa, Zea mays
  Clone ID: MRT4577_92063C.1.pep
KFLFLTKENILGECFTRRAPLTNPRTPPTTLKHESPALPLIIHSPTQEAN

SEQ ID NO: 360617 - protein, 61 aa, Zea mays
  unsure (1)..(61): unsure at all Xaa locations
  Clone ID: MRT4577_92064C.1.pep
AFSVLDNANGGTTPRTRRYSAXGAGGDASVXLTRPCRHAAAALGDLIFVYDGLRGGADPQI

SEQ ID NO: 360618 - protein, 83 aa, Zea mays
  Clone ID: MRT4577_92065C.1.pep
DAPATAALLRRGCHGMARSFRREVLLHSSPLLFSRTLVYRVRHFGEGTLAHIPLVTVPDRKNSPRQCRLKSLFERAVIKTVRA

SEQ ID NO: 360619 - protein, 542 aa, Zea mays
  Clone ID: MRT4577_92066C.1.pep
PIIFQRTKATCFAYGQTGSGKTYTMQPLPLRAAQDMVRLLHQPVYRNQNFKLWLSYFEIYGGKLFDLLSDRRQLLMREDGKKQVCIVGLQEFEVSDVQIVKEYIERGNAARSTGSTGANEESSRSHAILQLAVKKHIIVKDTRRQRDRDANEAKNTKAVGKISFIDLAGSERGADTTDNDRQTRIEGAEINKSLLALKECIRALDNDQIHIPFRGSKLTEVLRDSFVGNSRTVMISCISPNAGSCEHTLNTLRYADRVKSLSKGGNTRKEQSTGPTTTSSRDSLSALSYSLPAEAEEIPNQVQEKRPVDTYRKGTENFISNPSVESDRNSFSTIPNYSNRGREENGAASGNDRESYDLKSSQPAYTSKPQLVQNSANTQEEEKVTKVSPPRRKAYREDKSDRQSNYMKKDNGPETSRVGYKMQQAKQLQQQQRPASASASSRQSEKESSCDDVEIDAILEEEEALIAVHRKEIENTMEIVREEMNLLAEVDQPGSLIDNYVTQLSFLLSRKAAGLVSLQSHLARFQHRLKEQEILSRKKPSR

SEQ ID NO: 360620 - protein, 73 aa, Zea mays
  unsure (1)..(73): unsure at all Xaa locations
  Clone ID: MRT4577_92067C.1.pep
GKKKKKKKKKKKKKKKKKKKKKKKKKKKITKKKKKKKKKSXTEKSKKWNIKKTMTFKXKKKNHSQKKRKNSWR

SEQ ID NO: 360621 - protein, 84 aa, Zea mays
  Clone ID: MRT4577_92068C.1.pep
YVSPILNKSHVDTIICVKGNIVSINPSTAVLVYILERQYCEIIVTCVLKRDTILPRREIMSLVELLLLIISGVFVNDLDLAIYL

SEQ ID NO: 360622 - protein, 574 aa, Zea mays
  unsure (1)..(574): unsure at all Xaa locations
  Clone ID: MRT4577_92069C.1.pep
SRRLAAKLAPQRRSQRLAGGGAGSAAAAAAQPPGASSAHAATGDSGDAVMARWLQSAGLQHLATSSAAGAGGADYRGGMPGFGGAGAGSMLSSLLMQGYGPESIEEKQRLYTLLRGLNFSGESVPTSISEPYTPTAQSFGGGNXVEGFYSPELRGDLGAGLLDLHAMDDTGLLSEDVASEPFEPSPFMPKDIDDDDEDVIAGSQQASVDNYGVVTSEKETTARENNVAKIKVVVRKRPLNRKELSRKEEDIITVEDSSFLTVYEPKLKVDLTAYVEKHEFCFDAVLDEHVSNDEVYRETVEPIIPIIFQRTKATCFAYGQTGSGKTYTMQPLPLRAAQDMVRLLHQPVYRNQNFKLWLSYFEIYGGKLFDLLSDRRQLLMREDGKKQVCIVGLQEFEVSDVQIVKEYIERGNAARSTGSTGANEESSRSHAILQLAVKKHIIVKDTRRQRDRDANEAKNTKAVGKISFIDLAGSERGADTTDNDRQTRIEGAEINKSLLALKECIRALDNDQIHIPFRGSKLTEVLRDSFVGNSRTVMISCISPNAGSCEHTLNTLRYADRVKSLSKGGNTRKE

SEQ ID NO: 360623 - protein, 86 aa, Zea mays
  Clone ID: MRT4577_9206C.1.pep
PQVLWCYGSRPRRQGQQGTKVCRLLAGQGTDGRRERPRDEASPGREDVVCSGLRLSIAATDSLILRERSERTSSRAKGALSRIDSL

SEQ ID NO: 360624 - protein, 805 aa, Zea mays
  Clone ID: MRT4577_92070C.1.pep
MGDSGDAVMARWLQSAGLQHLATSSAAGAGGADYRGGMPGLGGAGAGSMLSSLLMQGYGPESVEEKHRLYTLLRGLNFNGESAPTSMSEPYTPTAQSFGGGNPVEGFYSPELRGELGAGLLDLHAIDDTELLSEDVASEPFEPSPFMPKDIDDDDEDVISGSQQAPLDNYGLVTSEKESTTRENNVAKIKVVVRKRPLNRKELSRKEEDIITVHDSSCLTVYEPKLKVDLTAYVEKHEFCFDAVLDEHVSNDEVYRETVEPIIPIIFQRTKATCFAYGQTGSGKTYTMQPLPLRAAQDMVRLLHQPVYRNQNFKLWLSYFEIYGGKLFDLLSDRRQLLMREDGKKQVCIVGLQEFEVSDVQIVKEYIERGNAARSTGSTGANEESSRSHAILQLAVKKHIIVKDTRRQRDRDANEAKNTKAVGKISFIDLAGSERGADTTDNDRQTRIEGAEINKSLLALKECIRALDNDQIHIPFRGSKLTEVLRDSFVGNSRTVMISCISPNAGSCEHTLNTLRYADRVKSLSKGGNTRKEQPTGPTTTSSRESSSAPSYSLPAEAEEIPNQIQEKRPVDTYRKGTENFTSNPSAEPDRNSFSMVPNYSNKGREDNGAASGNDRERYDLKSTQTAYTSKAQLVQNSTNTQEEEKVTKVSPPRRKAYREDKSDRQSNYMKKDNGPETSRVGYKIQQAKQLQQQQRPTSASASSRQSEKESSCDDVEIDAILEEEEALIAAHRKEIENTMEIVREEMNLLAEVDQPGSLIDNYVTQLSFLLSRKAAGLVSLQARLARFQHRLKEQEILSRKKPPR

SEQ ID NO: 360625 - protein, 35 aa, Zea mays
  Clone ID: MRT4577_92071C.1.pep
ISHLCKINCHLMYDANVIFRTRGAWREPGIGARGR

SEQ ID NO: 360626 - protein, 164 aa, Zea mays
  Clone ID: MRT4577_92072C.1.pep
MPQSVLVDRATSESLIGPDWSLNLEICDVLNHDPSQAKDVVKSIKKRIGHKNSKIQLLALTLLETLIKNCGDFVHMHVAERDILHEMVKIVKKKPDYHVKEKILILIDTWQEAFGGARARYPQYYAAYQELLRAGAVFPQRSESSVPIYTPPQTQPLQNYPPPA

SEQ ID NO: 360627 - protein, 67 aa, Zea mays
  unsure (1)..(67): unsure at all Xaa locations
  Clone ID: MRT4577_92073C.1.pep
RSAYCTYPRNIHALQCTNYGCASSLCSSSLEGRGPYSSVRLISETQEPQWALPDAWXLCLFVPFXWR

SEQ ID NO: 360628 - protein, 124 aa, Zea mays
  Clone ID: MRT4577_92074C.1.pep
AGKRAQPRPKGDHPWQLQSPNLQPPKTGGPTHPNLGFKKTKLWQRGKTYPTKAPPLGGFNPRAQKTKPSPAGLKTLQKPPLAESPKGGRENIKSPFFSPSRAHKNGQKKPPPPLERTQRSPPPP

SEQ ID NO: 360629 - protein, 93 aa, Zea mays
  unsure (1)..(93): unsure at all Xaa locations
  Clone ID: MRT4577_92075C.1.pep
KDRATRRIDKVKPSFVREEKYTTRNHACLVYSFFFLVPIVVRSSRALVXVLCAGSTHMLPLGNVRRCVSIILARASPPESPLKVVVGVLNTSN

SEQ ID NO: 360630 - protein, 94 aa, Zea mays
  unsure (1)..(94): unsure at all Xaa locations
  Clone ID: MRT4577_92076C.1.pep
MASVTARAPVAALRPSSASLKSSSAFLGHSSRPVGIVLSTRRILKAEAQGEWLPGLSFPSYLDGSLXGDNXGFIPMCLSDDLFILGWFYAHFMY

SEQ ID NO: 360631 - protein, 70 aa, Zea mays
  Clone ID: MRT4577_92077C.1.pep
YILTSYAIRSTNIHTDTRTYMSTKTYAKHAQRDIKLNNSVTLSLTHTTQYLCIAASSSSLIIVQPPPQAK

SEQ ID NO: 360632 - protein, 94 aa, Zea mays
  unsure (1)..(94): unsure at all Xaa locations
  Clone ID: MRT4577_92078C.1.pep
MACTNNAIRALFLLVLFCVVHGEKEESKGIDAKASGPGGSFDITKLGASGNXMTDSTYAEHEACASAFGXTGKQTMLIPNGDLLVXHLNFSSPC

SEQ ID NO: 360633 - protein, 60 aa, Zea mays
  Clone ID: MRT4577_92079C.1.pep
EQLKTEIYTSFGNYIMIIPKKELVWVAGWTLQGILYLDPSIYTTLRLHYIMVIKLVCSTC

SEQ ID NO: 360634 - protein, 102 aa, Zea mays
  Clone ID: MRT4577_9207C.1.pep
MAPPACYPGCCTGCCSICACAEEEEDLCGRLKWVQTPHGRACEIQEEYVGRRSRGNLGARDSFVRREEVKRDPVLYRVVMWRRFMEDGPTGTTGMGGFYHWQ

SEQ ID NO: 360635 - protein, 868 aa, Zea mays
  unsure (1)..(868): unsure at all Xaa locations
  Clone ID: MRT4577_92080C.1.pep
MYVHRHVVMFNILSMRATWALPSLLLFLAFSSSFCKASASASTKQDKVYIVYLGKHGGAKAEEAVLEDHRTLLLSVKGSEEEARASLLYSYKHTLNGFAAILSQEEATKLSERSEVVSAFQSEGRWAPHTTRSWRFLGFEEGLDRRPPDDGGDQWLLPSSLDKASEDIIVGILDSGXDRALLAPCSSFLVLFICMPRIWPESRSFSDQGLGPVPARWKGTCQGGDSFPSSSCNXVSLSPVLDPRVNPRSHSRSPLLHIHLANFDRSQFGATRRKIIGARYYLKAYEAHYNGGLNATYAYRSPRDHDGHGTHTASTAAGRAVAGASALGGFARGSASGGAPLARLAVYKACWPIPGPDPNVENTCFEADMLAAMDDAVGDGVDVLSVSIGSSGAPPRFADDGIALGALHAAARGVVVSCSGGNSGPRPATVSNLAPWMLTVAASSIDRAFHAPVRLGNGVTVMGQTVTPYQLPGDKPYPLVYAADAVVPGTPANVSNQCLPNSLASDKVRGKIVVCLRGAGLRVGKGLEVKRAGGAAILLGNPAASGSEVPVDAHVLPGTAVAAADADTILRYINSSSSPTAVLDPSRTVVDVRPSPVMAQFSSRGPNVLEPSILKPDITAPGLNILAAWSGASSPTKLDGDHRVVQYNIMSGTSMSCPHASAAAALVKAAHPDWSSAAIRSAIMTTATTSDAEGGPLMNGDGSVAGPMDYGSGHIRPRHALDPGLVYDASYHDYLLFACASSAGSQLDRSVPCPPRPPPPHQLNHPSVAVRGLNGSVTVRRTVTNVGPGAARYVVAVVEPAGVSVTVSPRRLRFARAGEKRAFRIKMEAASRGRSGARVARRQVVAGSYAWSDGGAHVVRSPIVVIFD

SEQ ID NO: 360636 - protein, 42 aa, Zea mays
  Clone ID: MRT4577_92081C.1.pep
DKVPWSTSVKHQPRLHALGALHLMTALTRQSPHLSCHGCRFQ

SEQ ID NO: 360637 - protein, 179 aa, Zea mays
  unsure (1)..(179): unsure at all Xaa locations
  Clone ID: MRT4577_92082C.1.pep
FTSLGAHRIRGSASSSSAKRWAVPLLTKDIVQERXSSXLMRPHLYRYMCLNPSSRRPNGFDSRLSSKVKACTLIPNFGYRSHKSTKAYLPNTFKKFLVLNVSDPESLMMHNFTYCAEIAHNPATKKQQGRSFELAAQLDIVVTIKLARLRSQGGPLVWFLVLTTTCHVAIPFCKKLLCL

SEQ ID NO: 360638 - protein, 79 aa, Zea mays
  Clone ID: MRT4577_92083C.1.pep
GVHLSPPAVLSIPCVSCGLAPKALGGLSPPVRFLAVSGPCDICVRHTIQQVREPVALLQAVVVLLLAVSACASVTSDVC

SEQ ID NO: 360639 - protein, 120 aa, Zea mays
  unsure (1)..(120): unsure at all Xaa locations
  Clone ID: MRT4577_92084C.1.pep
ERPIEIGVHTERAASRCSRNSRGGTRTSMSPLSPCLAEGLDSTISTKPSFLALLLHLPGSTRSGTSTTVRSGKGRPTLISHRCFLSRQLSSPKIRAGVDSSDIDXIVSRHTIPAGLEVPN

SEQ ID NO: 360640 - protein, 61 aa, Zea mays
  Clone ID: MRT4577_92085C.1.pep
HWGVFYSLFFFSRSCSCPENPMLCADVSELTGRWPSGRRSSSCEVRDEGVLNVLAGDCDYW

SEQ ID NO: 360641 - protein, 778 aa, Zea mays
  unsure (1)..(778): unsure at all Xaa locations
  Clone ID: MRT4577_92086C.1.pep
MATEERSPPTHPDPSSSPRPLRRAGNSAMDPPRGGTVIDPTKCRLMSVDEKRELVRDLSKSPESAPDRLQSWTRREIVEILCSDLGRERKYTGLSKQRMLDYLFRVVSRKSSGPVEHVHEKEKGKDKESILEPNTTNHQSPAKRPRKSDNPSRLPIITNNSAASDVTGPTNNLRFCQNLACRAILRDNFCRRCSCCICFSYDDNKDPSLWLSCSSDQHLQKDTCGFSCHLECALKDERTGILQSGQGKKLDGGYYCIRCWKQSDLLGCWKKQLVIAKDARRLDVLCHRIYLSHRILVSTEKYLVLHDIVDTALKKLEAEVGPLSGAPNMGRGIVSRLTVGAEVQKLCAQAVDAVESLFSGVSPASSKIQRPCMMRPNFVKFEAITQTSVMVFLDLVDCPMLAQEATSFNIWHRVAVTESYPSNPTGIILAPLKKLLVTWLAPATSYIFKVVAFKNSIELGSWEIRMKTSCQKDXQGVQCXGTGLGQNSESPKANSDGQSDPSSEGVDSNNNTAVYAEXTDKMDDFGHKDSFSEVSYEYCVRVVRWLECEGYIETNFRMKFLTWFSLRATLQERKIVSVYVDTLIEDPVSLSGQLVDSFSERIYSKKRPSMPXVSAWIWVIVGPRYSGSVPPTAPRSVENSKDNGGRASKPKPCDIVVQNGSSKPEREPGNSSNKRATDKMDDFGHKDSFSEVSYEYCVRVVRWLECEGYIETNFRMKFLTWFSLRATLQERKIVSVYVDTLIEDPVSLSGQLVDSFSERIYSKKRPSMPSGFCMDLWH

SEQ ID NO: 360642 - protein, 267 aa, Zea mays
  unsure (1)..(267): unsure at all Xaa locations
  Clone ID: MRT4577_92087C.1.pep
MPGGTGLGQNSESPKANSDGQSDPSSEGVDSNNNTAVYADLNKSPESDFEYCENPEILDSNKASHHPSERINDLQNIQMAADGVTEVTELEEAPGLSASALDEEPNACVQTVLLRDSNPLEHNQRTVVPRSHDTSNILAGHELVIVGPRYSGSVPPTAPRSVENSKDNGGRASKPKPCDIVVQNGSSKPEREPGNSSNKRATDKMDDFGHKDSFSEVSYEYCVRVVRWLECEGYIETNFRMKFLTWFSLRATLXERMIVSVFGASLI

SEQ ID NO: 360643 - protein, 74 aa, Zea mays
  Clone ID: MRT4577_92088C.1.pep
SAAYRAPRRSGSPACTWRWTMRDFKFVLHSVSEELWYYMGQVLRIGCEVGWQFRFRCDARSGTFLSVETDATIG

SEQ ID NO: 360644 - protein, 61 aa, Zea mays
  unsure (1)..(61): unsure at all Xaa locations
  Clone ID: MRT4577_92089C.1.pep
ILLTFFYNILTSKTLSLPNLILLHHIPLSSTFLITNMPTPLTLPNTYSSLMPNLTHPLXTH

SEQ ID NO: 360645 - protein, 73 aa, Zea mays
  Clone ID: MRT4577_9208C.1.pep
VFVQKIIIVGPPLKEAKNFFWPLKLKAPLGALKKKKTPYLEGGDSGNPQNSPNELSKKIKLVSRSSSLKDPWA

SEQ ID NO: 360646 - protein, 86 aa, Zea mays
  unsure (1)..(86): unsure at all Xaa locations
  Clone ID: MRT4577_92090C.1.pep
MARRIALLXLFLALAVVVADALAHAARPTGTPNVTAIVTKILQNSMHMPMFMQMMKDTQLDTQLNSQLNSSYASNSGWYTMFTPTN

SEQ ID NO: 360647 - protein, 100 aa, Zea mays
  Clone ID: MRT4577_92091C.1.pep
PPNGGVLQKKRGPAPLTKKNGLPPFRGPGAGVPNCQPPSGGGNPKKKKRPGGEKNPGLPPLKIYWGKVASGPKTYLWHRNFEKKHPPLGCFSEGPTPLVF

SEQ ID NO: 360648 - protein, 47 aa, Zea mays
  Clone ID: MRT4577_92092C.1.pep
EVFGLGYACLTGIHNKGNCRKFRRLISRMEAKCKLSNDRSLIHACVQ

SEQ ID NO: 360649 - protein, 184 aa, Zea mays
  unsure (1)..(184): unsure at all Xaa locations
  Clone ID: MRT4577_92093C.1.pep
CCDEQRAGGGEEDQRGDEEQEKQQAKTSTTSSLPSSSERSSSSACNNLTEGGXAAPNPLLVNQLKLLLPCPAWHXGAESDEEIRRVPEMGGASASASSGAGADELPKGEDDKQGQVAAPNQLLVNQTVACFAPLIYQEKFECLLHSHWTFVTVWLRLCLAIFLRNLVFPMRYGPRLMAILIYLG

SEQ ID NO: 360650 - protein, 53 aa, Zea mays
  Clone ID: MRT4577_92094C.1.pep
LVAALTVCYISDFFKARPPQHCLKEEELERKPSLSLTLTLGEADHNHYGYPHS

SEQ ID NO: 360651 - protein, 49 aa, Zea mays
  Clone ID: MRT4577_92096C.1.pep
LAIRFNIGEHRSKCRLQRPVYIVVLCCRAVLDKLVHVNQSVTRFGGVCS

SEQ ID NO: 360652 - protein, 39 aa, Zea mays
  Clone ID: MRT4577_92097C.1.pep
GKSWMINQKLEKKNVFQTKCTEHLVMDCLKLRFFQLKIA

SEQ ID NO: 360653 - protein, 819 aa, Zea mays
  unsure (1)..(819): unsure at all Xaa locations
  Clone ID: MRT4577_92098C.1.pep
MATNAIVVNITLDGQNYSEWAFCVKTALRGHGLLFHLTDAAPVLADDRRNAVDIKTWQLNDVVLYYTLMQQTHVIEQNDMSIDEYYSAFDRLMSALTSMVPACTADPCPAYKFIEKVFTYRFVMGVRAEFDSLCARLLQGSDTLTMAKALSDLLAIETRLNSLSSTGGNPHSVLAAAQKPKNIFKPCDHCGKTNHRSELCFVKFPDKLTDFRARRAARGCGPGPSNRGSVVVATTPSACTSESAWVLDSGASFHVTSDQSKLASTTPVIDGASVQTADGTDLRTGEVIGTGRCRRAAPRLYILDSLRLPSLATSPAHFFTSEGTLAQLSCPSAHAQNGVAERKHRHIIETTRTLLISSFVPSHFWGEAVSTAVYLINRQRQLSSKLFGKTPGEVLFKTPPRYDHLRVFGSLNIKANDVMIHLLVACVFLEMGIIFVTVAIAAPERYGFSRAGVVIVEPSSYKEASGIPEWQLAMTDELNALHRTCTWDVVPLPAGVVPITCKWVFKVKTKSDGSIERYKARLVARGFQKTQDDDPDHIAHVKASLSKEFQMSDLGALSYFLGIEVLQTQNGIYLSQAKYIQDLLDRSCLSDTRTVATPMDLHLSLCPTDGTPLEDPSQYRHLVGSLVYLTVTRPDIFFLIIHEGQNTMXFYDSNSPLQLHAYSDATWASDPTDRRSITGYCILLGSSPVAWKSKKQAVVSRSSTEAELRALATTTAEIIXIRWLLADLGVSCDSPTLLRCDNTGAIQICHDPVKRELTKHIGVDVSFTRSXVITHQKTIDLQYVPSELQLADFFTKAQTRAQHQFHLLKLNASNPSLPP

SEQ ID NO: 360654 - protein, 134 aa, Zea mays
  unsure (1)..(134): unsure at all Xaa locations
  Clone ID: MRT4577_92099C.1.pep
EQARGPGHLAGWPWRSPSRLGRAGQRIHHXGPRRQAAXRRQQRTGALTVPPWGLHGRNHEAAHRHATQAQASRQLQRDRDREKDRAATSPRPCQKVVIAVSRGARAVASIRSLLACFISLQLDGCLAMARQCPV

SEQ ID NO: 360655 - protein, 57 aa, Zea mays
  Clone ID: MRT4577_9209C.1.pep
DVENEASSFFFFLIKTKHFIMTHAYIIGHTTRDNACRFTALLHILYRESMFEVISQQ

SEQ ID NO: 360656 - protein, 46 aa, Zea mays
  Clone ID: MRT4577_920C.1.pep
VRTHSGTPAGAACCHSGHHGPKYLQSGRAARADHLQLEAVHTVRGG

SEQ ID NO: 360657 - protein, 1841 aa, Zea mays
  Clone ID: MRT4577_92100C.1.pep
MAASAAAGRSWDPAVSLRLGHPALVLLERCRGARPFRAILAHLLRLGLAMETFPMSRLLHYAIVVSSPRLTREAELLFQHFTPRPNLYIYNLMLSAAAARDSSSSTQAAALYRSMLASSVLPDQQTFLALLRSVERLSAGRQVHAHVVVSGLHSRVYLRNSLIKMYIDAGDVETAELMFRSALVLDTVSCNIMLSGYVNEGCTLKALWFFRDMASRGIVVDQYTAVALLTCCGRLKNELIGRSVHGVIVRRMDAGDHGLILVNALLDMYAKCGRMNAAKTIFGEAGEKDAISWNTMVSGFANAGMLDLASRFFSEAPSRDLISWNTLLAGYARYKGFNEVMKLFHDMLASCVNLDKVTAVTLISAAAGKGSLNHAKSVHGWVVKEFGHQDAFLASALVDMYCKCGNVKIAYYVFEKALDKDVTLWTAMISGLAFNGHGTEALELFWKMQTEVVAPNGVTLLAVLSACSHSGLLDEGCKIFDAMKQRYSIEPGIEHFGCMVDLLARSGRLIDALALARRMPMRPSRSIWGSILNASLAGQNIEVAEIASKELLRLDPAEEGGYVLLSNLHAAGGHWNHSDKVRQNMERKGLRKLAGVPSGSCLRRPQLGAPSGVRRLLPARGSSLRRPPPVAVRRPLPVPARSPPPSSCARQESAALPVLARSGSRSVAALPVPARSPPPSSCARQERISIGSRRISALRRHRICVVRLRSVPSACALLYAVTISALRPRHFCAGQDCRSLHRRCRRCFCVGGCHCGQSRGDLDYLQQVSTFAAQDLRQLVQVGLLSAAAPLVCLVSLISIEFNIATNAIVVNITLDGQNYPEWAFCVETALRGHGLLFHLTDAAPVLADDRRNAADIKTWQLNDGKERFVQDSGVILHTLMQQTHVIEQNDMSIDEYYSAFDRLMSALTSMVPACTADLCPTHKFIEKFFTYRFVMGVRAEFDSLRARLLQGSDTLTMAKALSALLAEETRLNSLSSTGGNPHSVLAAAQKPKNIFKPCDHCGKTNHRSELCFVKFPDKLTDFRARHAARGRGPGPSNRGSVAVAATSSACTSESAWVLDSGASFHVTSDQSKLASTTPITYGASVQTADGTDIRTGEVIGTGRRRRAAPCLYILDSLRLPSLATSPAHVLSATLASVASFAQWHHRLGHLCGSRLSTLIKSGCLGHTSVESDFHCKGCHLGKQIQLPYFTSHSHSVQPFDLVHSDIWGPAPFVSKDGYKYYVIFIDDHSRYTWIYFMKRRSELISIYKTFARMIHTQFSTHIKTFRSDSGGEYLSDNFRQFFTSEGTLAQLSCPGAHAQNGVAERKHRHIIETARTLLISSFVPSHFWGEAVSTAVYLINRQSSSKLSGKTPGEVLFGTSRYDHLRVFGSLNIKAIDVMIHLLVACVFLETGIIFVTVALLQLQNVMGFPVLVQSLLNHHLYKEASGIPEWQLAMTDELNALHRTCTWDVVPLPAGVVPITCKWVFKVKTKSDGSIERYKARLVAKGFQQTQGIDYDETFAPVAHLTTVRALLAVAASSSWTISQMDVKNAFLHGDLHEEVYMHPPPGIEVPSGHVCHLRRALYGLKQAPCAWFERFVSVIKACGFYSSDHDPALFIHVSSRGRTLLLLYVDDRQGRIFSRLRWSSARAASPSAPAPPVLSAARGGFRQGGSSPACAIYLSPPNYLHQPAPDSAATSTVLHLRPILSLVSAAPVCRPLPASPAVLRPVAVCLLHVSVNPAQRHRLLRPASSPSAPGAATVGRLFNSDFATITFFTSSNPGCPQQVIAWSATDADSCSPSVSSGTISRQIAMLTVALVNNDHVWRLPFRVSPAVRSHRLPLRLDPSGHSSLAIGLKKAART

SEQ ID NO: 360658 - protein, 82 aa, Zea mays
  Clone ID: MRT4577_92101C.1.pep
AGALLGYEERHVVAVRVCAVGDGVRHEVLLSVVAQESGRLRAHFPAEFDRGDLLRDPGVGSFVLGAKISVPTRPPTRPRTSR

SEQ ID NO: 360659 - protein, 267 aa, Zea mays
  Clone ID: MRT4577_92102C.1.pep
MASGTGSGQPQPAAADADPGAGDNKLVFETPLQPQPVREDYVENAVKFLSHPKVRGSPVVYRRSFLEKKGLTTQEIDEALRRVPDPEPITTATASPQQQVGSQNQSAGAQTYAPARSMHPATAGPVVRPRFSWYQAFLAAGLLLGFGASTAVFIKKLFLPRLKSWIRNVVAQGDGAEGNQLKHRIDEETAEAVKASASAVSAIAKTNQQLLASRDEEKKILVTLTQALDSQAKELKSLTESINRTREPINITRDDRFSQHRPLEDHV

SEQ ID NO: 360660 - protein, 68 aa, Zea mays
  unsure (1)..(68): unsure at all Xaa locations
  Clone ID: MRT4577_92103C.1.pep
TRSLTSAAEFGAFVAXSXAGEEDMKPAVAGGAHIXLKVKGQDGCEVFFRFXWSSLLGXLLNACCGRLS

SEQ ID NO: 360661 - protein, 146 aa, Zea mays
  unsure (1)..(146): unsure at all Xaa locations
  Clone ID: MRT4577_92104C.1.pep
LFPKGGMFXFPQKQLPPKPLGGAKKAGKTPNFFFSPKLLEAPGFSPVPGFGFGQKKGVFPLWAIFLPPEENFPPLMWGFKKFPPSFLGQNGGSPRFFCPHKKKGPPPPFFFSAPPSKPVIGALFYIFCCNRPPNSALSPPCMFSLF

SEQ ID NO: 360662 - protein, 117 aa, Zea mays
  unsure (1)..(117): unsure at all Xaa locations
  Clone ID: MRT4577_92105C.1.pep
MPKASGAVPASTVSDPPAIGFAASNLQTLPPSAASGXIAGAYRPPTVAESPXFGAEDAGGGGRGGSAGSADAXGQGGWSRSVAPRAXLCPTVAVCTSDAVPRIWLSVFPCRGPFAAR

SEQ ID NO: 360663 - protein, 70 aa, Zea mays
  Clone ID: MRT4577_92106C.1.pep
IAWVLRGHAGALEFPAKVIRCMPLFAQHFKWGRQEDAHEFLRYVVNACHTVDLRMRKGLLAANANGNYGE

SEQ ID NO: 360664 - protein, 108 aa, Zea mays
  Clone ID: MRT4577_92107C.1.pep
WLVNTLLGNPKVFLKLNPGTPWGFGGGGRFHGAQKKKFLRNFLVGGPNPFFFLGILGRGPFPGAKNFSGFFGRGKFFFPPKKKKKKKKKKKREKKKKKKKKKKKLEGG

SEQ ID NO: 360665 - protein, 111 aa, Zea mays
  unsure (1)..(111): unsure at all Xaa locations
  Clone ID: MRT4577_92108C.1.pep
RPRGSNMVXXQWAIAHSCIIAESNHCLRLYVRSIIIXTEHEGERLLVGSGPANFLGTYRWDDTVAASVAPTSLEGRTEESRALDVTDCRIHPAPVYPFFGLQEHRCACVVV

SEQ ID NO: 360666 - protein, 88 aa, Zea mays
  unsure (1)..(88): unsure at all Xaa locations
  Clone ID: MRT4577_92109C.1.pep
MLLYGTLTATMLDAESLYNLHPASFGALKFIQKLAQGMEVTLGVGKGATKIYATDDLXMALVVRTRLIFNEPWILGRYEYFHIYCAHM

SEQ ID NO: 360667 - protein, 55 aa, Zea mays
  unsure (1)..(55): unsure at all Xaa locations
  Clone ID: MRT4577_9210C.1.pep
RTDKKKPIIFTMARLDRIKNMTGLAEVYGKNARLTXLSYLEIDAGDHGEEFNWQK

SEQ ID NO: 360668 - protein, 100 aa, Zea mays
  unsure (1)..(100): unsure at all Xaa locations
  Clone ID: MRT4577_92110C.1.pep
QKLIFLQLHFLVRDFTIFCALNKLPXLXXXNIHSXSXNFTRXXXIIIXSTSKHIIPTILISISILXYTFSKSFYNHIPXIXPXLYXNXXTLTNSYFSPHL

SEQ ID NO: 360669 - protein, 110 aa, Zea mays
  Clone ID: MRT4577_92111C.1.pep
KKKNAYRLRKFGNAKAWNEIKGGRSRKVFLRRGHQYPVCAHQEQNSPGRKIYCCTKEPLAFLSCYGLFLANCLTIATVTFVKLLSNGSHFMYACQISLLFLKTKPAKYFF

SEQ ID NO: 360670 - protein, 710 aa, Zea mays
  Clone ID: MRT4577_92112C.1.pep
TRVRRRVGSVYNSGKAVSSHSIHNKKIKCPIKCSCPYPGIASLRFDLTAIMSTQGMTNSNSDRHLKDHLHSENPKEMLQPGTLDSPSRVHEMDSPSRESLEGCLLRFSLCFLHLWDVDCELDKLLVDEMQVCKPEGCHIATGVVGDKGSFTLMFPGKEATLELWKSSAEFCAMRSLSIISLAQLMIKLSRSCTNSSSALAAFYTRHFAEKVPDIKPPSLQLLVSFWQHPSEHVRMAARSLFHCAAPRSIPQPLRVNKNKVVNAPLSSSDNMNVLICAVQTASVSNHGELKEDDENVDKDDIDTANMILWLESFENQEWLSWIGGTSQDAVASNIIVAAALVVWYPSVVKAKLSSLVVSQLIKLVMSMNDRYSSTAAELLAEGMENTWKACLGAEITHFMSDILFQIECLSTAPSSNAINKTAVAITMREALVGTLLPSLAMADVTGFFGVIESQIWATSSDSPVHVASIKTIIRVVRGAPKSLVPYLDKAINYILHTMDPSNLIMRKACIISSMMALREMARVFPMVALNESMTKLAVGDAIGEIYDGTIRVYDIESVTKIRILDASGPPGLPSLLAGSSNRTTTILISVLSFSPDGEGLVAFSENGLMIRWWSLGSAWWERLSRSLTPIQCTKLIYVPPWEGFSPNSARLSIISSILDDKPGRSEKELGEADNLKLLLHNLDLSYRLHWIGGKTIKLTRHGQDLGTFQL

SEQ ID NO: 360671 - protein, 118 aa, Zea mays
  Clone ID: MRT4577_92113C.1.pep
RWLHPSGHYPRNGCRGVLASLCPLLNHAIPLQVIDRGKKRDPPHMLPARKDGNQRAPCRALLCKECMEPNDGHDAEKSGDDLDWLDFFYIRLELQVARCEITHWMMETMRRDTANDVT

SEQ ID NO: 360672 - protein, 57 aa, Zea mays
  Clone ID: MRT4577_92114C.1.pep
DRLHKIMNFFQIHLFSCWYTKTNMSYARKFICFCLKEGNSFVKYVIFRLAYDDWFLE

SEQ ID NO: 360673 - protein, 368 aa, Zea mays
  Clone ID: MRT4577_92115C.1.pep
MTRLLVILFAGATLVVATTAHEHHGEAPTCAGGSEHVLAEFRPGEVTVDGHNEDWESVEASEFALLPALDPDDDKAYSGGKIAVKAVHDGVNVFFLLQVDGAYAYTKGESNKCPSVALMFQVGEKATFYNMGGCKDMPGSCTSKSCRGHEVDIMHFSIGNAIPGRLYGGNHIDNAAGNGNDRFGHLVDVYAWNPHCRYLDGVGPKENNSNAQNDWHGAWWHSSLTFHSGFVDDDNPYGQQDEKGTYYFEFSRPLRTMDQFQQDAQFTIGRPSNMSVALWYPDDGKAWSNSDHYSASCNWLVLDIQPSSEATYYRPAPNRSWDAATGFALLLSVVAICMSIFVGYRFSRNRSTAQFTPLEQIQFAEERH

SEQ ID NO: 360674 - protein, 135 aa, Zea mays
  Clone ID: MRT4577_92116C.1.pep
GPHPAWSATTRSSGACGGSGQRPPLFPRRALGVPLEVEPVSNAAGGVCRQVCLVPSRPYVGRRIPHCRVLEGRIQPILLAGNFRSIVRGRGFSRRALGLLFSLVFRCVVCFSVRCFIVCRSKDSLLASIVAGNSI

SEQ ID NO: 360675 - protein, 143 aa, Zea mays
  unsure (1)..(143): unsure at all Xaa locations
  Clone ID: MRT4577_92117C.1.pep
LVAKIENLGFQAQXFRQQGPKVRRKMWLQNMKIKLLVLGIIMALILINILGVGHGFKSGSKLGGGLSDGGGLPCPALGPGKRRSPHVGFFFCFLSGRVKSSCAHNFWWSPDKKAFPGSVLNAVGWSENDWFNPGSEWKGGCFV

SEQ ID NO: 360676 - protein, 107 aa, Zea mays
  unsure (1)..(107): unsure at all Xaa locations
  Clone ID: MRT4577_92118C.1.pep
IGRGSFSLLVGWSACCWFLPLARPQSKHAWRYTGVSSHDQLXLQTAAFWGLSFGDSIWSPAGRRNNSNDVLFAGFASPADAAKSNAVVGLKLNDGGPGLIGSGKLAF

SEQ ID NO: 360677 - protein, 34 aa, Zea mays
  Clone ID: MRT4577_92119C.1.pep
YSYPMSGLFGVRPPFKGFFSLKPAILFNKPSQCF

SEQ ID NO: 360678 - protein, 342 aa, Zea mays
  unsure (1)..(342): unsure at all Xaa locations
  Clone ID: MRT4577_92120C.1.pep
MYFDHYWRLCLLPQPLPQKQAHLNPYRCDWRYPPAPVGRGLIHSTAGGVLGGMAEVVLPWVLRGQLPASLHYTSPYHVAAQNVNPRLMDQPFMAAINSQPFVEDIEPVKKASGDMPATTGSGCFECNICLDFASEPVVTFCGHLYCWPCIYEWLRPGVESAASDNSSSARRQCPVCKATLSTDTLVPLYGRGGNSKKSLDGMAIPRRPMVHRETVEEQQNAQSNVNDQHYHQSMEDNSQRQPLLQAHHHPIPXGLTSSXSSTSRAWLDPXTAGGVLGGMAEIVLPLALRGQMPASLYYTNPYHAATQNVNPRLRRHQMEIERSLHQIWFFLCVFVVLCLLLF

SEQ ID NO: 360679 - protein, 111 aa, Zea mays
  Clone ID: MRT4577_92121C.1.pep
MSTTDGIAGSSAKSATHFRVLSWNVGGLNTPIKRRKVLDRLQRERAQIVLLQETHWRRKDKQTLKGKWLQYVIDSSYKSKSKGVATLISRDLQCSILRTHKDKNGRLYDRP

SEQ ID NO: 360680 - protein, 115 aa, Zea mays
  Clone ID: MRT4577_92122C.1.pep
PKKIPPPEVSGVAGYHLFKGEVPSSPQKFFSFSKFKEMSGSAFSPMEPPLPEKPSGASGSPLVGKTASPLFFFPGLLLLGRGVAPLPPKAPKGGFFALSFPPWCWGHNFCWGWLV

SEQ ID NO: 360681 - protein, 58 aa, Zea mays
  Clone ID: MRT4577_92123C.1.pep
ICRGCNLLPSPWRRPRKVYSLLFNLITVLPFVSTFDVCNKNGLMKMPFAVIRSLQIPN

SEQ ID NO: 360682 - protein, 29 aa, Zea mays
  Clone ID: MRT4577_92124C.1.pep
KNGIILFSKHYNRSFMSLITLTHFPNDDT

SEQ ID NO: 360683 - protein, 121 aa, Zea mays
  Clone ID: MRT4577_92125C.1.pep
TTKNKGPSRNKGPPRGRRNPKTRVNQKDSLIRGGPVPRGARNERGPGGPLVPGVQRPAWENAGVGKIKGFGKYPPFPNLPLWQKGPIDRSSQQLPLPNGGGKWKGIEFCKGSGYVYVKVDF

SEQ ID NO: 360684 - protein, 79 aa, Zea mays
  Clone ID: MRT4577_92126C.1.pep
GSGSCGSQGMNGMNESKLVDLLNGSEYVPTYEDKDGDWMLVGDVPWEMFVESCKRLRIMKGSEAIGLAPRAMEKCKNRS

SEQ ID NO: 360685 - protein, 85 aa, Zea mays
  unsure (1)..(85): unsure at all Xaa locations
  Clone ID: MRT4577_92127C.1.pep
HHTWCRNNRHETDTRTYNNKKHIKKSLGCLKRSLSNSNMQLLPKGAMLSTHEELKEVTNNHCYLITGRTXCKAYRGTLQDHTEDA

SEQ ID NO: 360686 - protein, 99 aa, Zea mays
  Clone ID: MRT4577_92128C.1.pep
QGRVRKNPGRAQLKSGGGKPPLPPGGNSENAPSHRPFQKKPNLNGKRGPPRTGALKEGGGGVTPRVTPSLGKGLNPPTLRFFPFFLTTRGGFSREALKG

SEQ ID NO: 360687 - protein, 76 aa, Zea mays
  Clone ID: MRT4577_92129C.1.pep
RPPFVFFLTAPCPVCNISPSCSVQSELITFPLAPRIPLSMVLNAGFALPPPEQPALSLPHELPWPPPYSFLLMVFL

SEQ ID NO: 360688 - protein, 142 aa, Zea mays
  unsure (1)..(142): unsure at all Xaa locations
  Clone ID: MRT4577_9212C.1.pep
FPVDQRPLHHHHHSPVSGSRGRPPLRIPEPTGFXLAAATGRLFAGFVXHALGXCVDYAPPTSPRPEVGASELAFELDENLAEASPACEPYAQELLASAQDRHRIFHEELVVKAFLEAEKAHRGQTRASGDPYLQHCVETAVL

SEQ ID NO: 360689 - protein, 122 aa, Zea mays
  Clone ID: MRT4577_92130C.1.pep
HIINVYYVFLKKKKKKKKKKKKKKKKKKKKKKKKEKKKKKKTTKKEGPPETGGPPPTAGRGGAGPGPPGPGGGPPRPGAAAGPPRGRETQAARQLSGGAQPPAGPSRPAGGGGPHGPPPPPA

SEQ ID NO: 360690 - protein, 71 aa, Zea mays
  Clone ID: MRT4577_92131C.1.pep
VEVPFGSYRCLGGSGHIGHSSYSIRAINRKLGGKAPSLKGMVLERDPFFLEDMEQLVSATLVGRTEFTLIG

SEQ ID NO: 360691 - protein, 213 aa, Zea mays
  unsure (1)..(213): unsure at all Xaa locations
  Clone ID: MRT4577_92132C.1.pep
KAAATSSSTYLAIGRKTLNPAPSVSLAGHEEYIVRGGRDLFPLLPEAFKGIKQIGVIGWGSQGPAQAQNLRDSLVEAKSDIVVKIGLRKGSKSFEEARAAGFTEESGTLGDIWETVSNSDLVLLLISDSAQADNYEKIFSHMKPNSILGLSHGFLLGHLQSLGFDFPKSISVIAVCPKGMGPSVRRLYVQGKEXNGAGINASFAVHQDVDGRA

SEQ ID NO: 360692 - protein, 109 aa, Zea mays
  Clone ID: MRT4577_92133C.1.pep
RSSSVTVDLGFLRATDRRPRRCFTALGHRCHCSAMLWARTLYFLATASPFAVGEKDSRTFWWKGEESSCVAREVLEVMPELEIMIVFMESWPSRRIKILLSYRRSRSSF

SEQ ID NO: 360693 - protein, 220 aa, Zea mays
  Clone ID: MRT4577_92134C.1.pep
GYPSEAGHEEYIVRGGRDLFPLLPEAFKGIKQIGVIGWGSQIGLRKGSKSFEEARAAGFTEESGTLGDIWETVSNSDLVLLLISDSAQADNYEKIFSHMKPNSILGLSHGFLLGHLQSLGFDFPKSISVIAVCPKGMGPSVRRLYVQGKEINGAGINASFAVHQDVDGRATDVALGWSVALGSPFTFATTLEQEYRSDIFGERGILLGAVHGMVEALFRR

SEQ ID NO: 360694 - protein, 579 aa, Zea mays
  Clone ID: MRT4577_92135C.1.pep
MAAATSSSTYLAIGRKTLNPAPSVATAATSVSFPATQHPCLVAASADRRRAVAAKVSSPSVIGTAMPSLDFETSVFKKERVSLAGHEEYIVRGGRDLFPLLPEAFKGIKQIGVIGWGSQGPAQAQNLRDSLVEAKSDIVVKIGLRKGSKSFEEARAAGFTEESGTLGDIWETVSNSDLVLLLISDSAQADNYEKIFSHMKPNSILGLSHGFLLGHLQSLGFDFPKNISVVAVCPKGMGPSVRRLYVQGKEINGAGINASFAVHQDVDGRATDVALGWSVALGSPFTFATTLEQEYRSDIFGERGILLGAVHGMVEALFRRYTEQGMDEDSAYKNTVESITGIISKTISKKGMLEVYNSLTEEGKKQFIEAYSAAYYPCMDILYECYEDVSSGSEIRSVVLAGRRFYEKEGLPAFPMGKIDQTRMWKVGERVRSTRPQGDLGPLHPFTAGVYVALMMAQIEVLRKKGHSYSEIINESLIESVDSLNPFMHARGVAFMVDNCSTTARLGSRKWAPRFDYILTQQAFVTVDKKAPINQDLISNFMSDPVHGAIEVCAQLRPTVDISVTADADFVRPELRQSS

SEQ ID NO: 360695 - protein, 235 aa, Zea mays
  unsure (1)..(235): unsure at all Xaa locations
  Clone ID: MRT4577_92136C.1.pep
NALATYCIKGEYDFEIDKSEPSRLRVHCTYERCRWRMHASKMRDSTLIQVKVNPFPHTCPSVERKETLKIAKSRWCADVMLDWVRDNPCIGPTALIKKIHEKYGMKVPYMRVFYGKEMALDKIYGPWKDSFKLMYTFKAEVEKACPGSVVEIDKHTVXQSEEDXMEKECFRRVFVSFKACWKGFLDGCRPYLAVDATALNGRFRGQLVAACAIDAHXWLFPVAYGRQQRNSSSGP

SEQ ID NO: 360696 - protein, 58 aa, Zea mays
  Clone ID: MRT4577_92137C.1.pep
KKKKKKKKKKKKKKKKKKKKKKKKKKKKKKKKKKKKKKKKKKKKGGPFLGVQFLLPRL

SEQ ID NO: 360697 - protein, 82 aa, Zea mays
  Clone ID: MRT4577_92138C.1.pep
EEGGGPPPRSHKLSYRQPIATAAQGSHNKYYKVDPEAVRASSQISYRPGPSIAPEPPSEAQNSSYSTTPSSPTWCISMSTSK

SEQ ID NO: 360698 - protein, 80 aa, Zea mays
  unsure (1)..(80): unsure at all Xaa locations
  Clone ID: MRT4577_92139C.1.pep
NTRKAHSHPSLLYDXFITPKAYXXGTAQQQYSICMGKYIXVYISHGLDCRXXNDEAPXMSIQDFVGIRFERLLXGEEGLA

SEQ ID NO: 360699 - protein, 83 aa, Zea mays
  Clone ID: MRT4577_9213C.1.pep
KPSWTNGPNCRRCKMDPASSAHRWLKPISLFMCHQRHRLSLSPLAQLSALNPPAKIHQVQLVPLVQRNAASAPPPRRSYSCCL

SEQ ID NO: 360700 - protein, 259 aa, Zea mays
  unsure (1)..(259): unsure at all Xaa locations
  Clone ID: MRT4577_92140C.1.pep
KTVVYTSVPHLVSAKAAATPPRTTAVVHPLLARRLRPHTHNSRRPSPPASRRNHPKSTIVSLRGRTGSRSGQTVTYAILRWLIVDVDRAGGDPNPWQRPRSNSGHPRRLCCPPPGSTVSVTNPSSPPVPGASDIVAADEVCTIFMDLPADVKETALHNLLCWLLGFEVSEMNFKGNQPMGFALFSTVHQAITAKAMFQVCFNSCCXDEXTPTGTRHLQNTVFDAETKVLLQTDMAKKNLFVKRCEICPLVFHMVSLLSL

SEQ ID NO: 360701 - protein, 67 aa, Zea mays
  Clone ID: MRT4577_92141C.1.pep
GGTNTQQLLELFPWGGGTFKATDHKPVGARGFKICTSFPGGRKLNYWYKPLRLKKEKPRQIYYSCGF

SEQ ID NO: 360702 - protein, 34 aa, Zea mays
  Clone ID: MRT4577_92142C.1.pep
FTFVYSAFCFTTVFTPKSLKNEIDILHTTTLVCI

SEQ ID NO: 360703 - protein, 71 aa, Zea mays
  Clone ID: MRT4577_92143C.1.pep
CFHSPVGWGASEGLLPLPPALRFYLLKPTSIPLQRASIHIVPLPHTVNKVPTFSRLPPRLLQLQCRTVNLA

SEQ ID NO: 360704 - protein, 1171 aa, Zea mays
  unsure (1)..(1171): unsure at all Xaa locations
  Clone ID: MRT4577_92144C.1.pep
MTTMSDDGDRTCPLCAEEMDITDQQLKPCKCGYDICVWCWHHIIDMAEKEETVGRCPACRTCYDKDRIVKMAATCDRTVAEKNAEKKHRTQKVKPKAAPSAAATSTVESKKHLASVRVIQRNLVYIIGLPAHLCNESVLECREYFGQYGKILKVSVSRPTGPPSQQASANSNISVYITYAKEEEAIRCIQAVHNFVLXGKVLRACFGXTTKYCHAWLRNMTCGNPDCLYLHDVGSQEDSFTKDEIISAYTRTRVPQMASGVSQRRTGTVLPPPGDDFSYSAVVSAKHTFKNGTLNTTSQPRLSPPNSSSGRSTLPSAASWGQRDLNARTTATGATSSQSHTKPKSESQSNPFSSSSVFSCTKTPSSWNDDTSTAAKISEGQQLSEKESRTLQPYKPGISKETQALSSLESSLDIDFSTIPSAWNDDDIVVPDVMPKGSDENQVANKNGELTHPASKSLVLSKKDIKMNITSKTPSDFVSSPAISKSDVSTSDGDHSLTNITPKCLASNAVECQSSHTAVEKMLEDIGSKDIDMEKISSQISSVTLGGNDKIQSMAGNQQPDVMPCTSIDVPMDQNFGRDRSHLNLNELLLPSENKDSILSCQYSSDKRLAWSLKMQNCSVTPLNDTIDSAMLTDKPHSILLEGSEQPSYPPFVEFPSTWDTSLWNDTENNAASTIDTITSSQMQPGFSSTDNTYALLNGGQDGLGTVYTHDNVSVYTHGNVSGHPGMGSHHHRAMGSLRNNSIGSFDKTISVNKYERRIISDTLSEFNPWDDSYSTANNFARMLRESKNNDVHCIAPSWKSGTGIKESRFSFARQDNQGNLFDSSLRNCGTGTEQNFSLLPQNSRGNIYQNGLAFQSLENEFSNNNSPGVLDMATTGTSMSKISAPPGFSAPTRVPPPGFSTAFPSQDSLNPTPVFPSGILCHGGSIPPPRFSSFSSGISTQEVSKPPTRPPSPFSSRFSSQDGLDPSSRFPFSSGFSSHDGSNQSYGSTNPENLLRGTVQGGNSNHYQSQFGRHSSDMEFDDPAILAMGKGLMPGIGDSGLEMKNTPAFQAQLQPASSDPRFQLHVQPNVQSRQNMRFTDPMQDGLNHMNDNYLASRFLAQNQGPLSPYVQIPQQPRNSQVINGHWDGWSDLRQGNNAPMSDMSRILYPSEVNKLHMLGSNDVHNRAFGM

SEQ ID NO: 360705 - protein, 68 aa, Zea mays
  unsure (1)..(68): unsure at all Xaa locations
  Clone ID: MRT4577_92145C.1.pep
LSTIAYPSGHHQRTISHSLRLHSIARMFTDAHITDKHIHSSSSAKYQTVWVMSHRMFMAXPSALHPHE

SEQ ID NO: 360706 - protein, 307 aa, Zea mays
  Clone ID: MRT4577_92146C.1.pep
MGHRMFSPLGFLLLAIVVLYGGTEQRRAEAAEGGSPHRLLATISVSKPSYPTVTTPMSAYGDPVSTPATPYSTFPSLATGNGGAGAGAGGGAGVGGGGGGGAGVGGGGGGGGTWCVASQSASPTALQVALDYACGYGADCSPIQQGGSCFNPDTVHDHASYAFNSYYQKNPAPTSCDFGGTATITNTDPSSGSCQYPSSSGGAQSTMPPPSPTSMPPTVPTAPMTPTPMTPDTTPTTGTPVYGLSPPDYGSLSPPDSGSMSPPGYGSTSPPDYNDVGAAATTGQGGAALALALLCVLVATVSLHVSK

SEQ ID NO: 360707 - protein, 115 aa, Zea mays
  Clone ID: MRT4577_92147C.1.pep
SFAPAVARNILVLRSLQHHIYGVRRRRGQGYMEEARLDDLHRHATGWYVPTGVCSCRYHWCWALRQSYRRRCNPVTLLLPPTFLRRRIHASRSLTIVSSHLRHDPSPHAHNMCWF

SEQ ID NO: 360708 - protein, 56 aa, Zea mays
  Clone ID: MRT4577_92148C.1.pep
PYTRLKSGHRPSVRHRRLHEPLEQIGYIDHTSSSERRKPGPLAKWSRNSRTRQTES

SEQ ID NO: 360709 - protein, 639 aa, Zea mays
  Clone ID: MRT4577_92149C.1.pep
MEKISSQISSVTLGGNDKIQSMAGNQQPDVMPCTSIDVPMDQNFGRDRSHLNLNELLLPSENKDSSLSCQYSSDKRLAWSLKMQNCSVTPLNDTIDSAMLTDKPYSILLEGSEKPSYPPFVEFPSTWDTSLWNDTKNNAASTIDTITSSQMQTGFSSIDNTYALLNGGQDGLGTVYTHDNVSVYTRGRGNVSGHPGMGSHQHRAMGSVRTDSIGSFDKTISVNKDESRIISDTLSEFNPWDDSYSTANNFVRMLRESENNDVQCTAPSWKSGTGSKQSRFSFARQDNQGNLLDSSLRNCGIGTEQNFSLLPQNSRRNIYQNGLAFQSLENEFSNSNFPGLLDMATTGTSMSKISAPPGFSAPTRVPPPGFSTAFPSQDSLNPTPGFPSGILSHDGSIPLSRFPSFSSGVSAQEVSKLPTRLPSPFSSRFSSQDGPDPPSRFPFSSGFTSQDGSNQLYGSTNPENLLGGTVLGVDGNHYQSQFGRHSSDMEFDDPAILAVGKGLMPGIGDSGLEMKNTRASQLQPASSDPRFQLHVQPNVQSHQNMRFTDPVQDGLNHMNDNYLASRFLAQNHGPLSPYVQIPQQPRNSQVTNGHWDGWSESRQGNNIPMSDMSRILYPSEVNKLHMLGSNDIHNRAFGM

SEQ ID NO: 360710 - protein, 66 aa, Zea mays
  Clone ID: MRT4577_9214C.1.pep
VRCRPCQTRSRSFNHEIDSGGVAGDSAASAANTHTITRTSRCRPPQRRRQSRCHSRRRCRTPCCHR

SEQ ID NO: 360711 - protein, 51 aa, Zea mays
  unsure (1)..(51): unsure at all Xaa locations
  Clone ID: MRT4577_92150C.1.pep
MVKRWLPLEANPDVMNQFMWGLGVPEDVGFCVGGGLXDXLLXMVPXPVLAV

SEQ ID NO: 360712 - protein, 111 aa, Zea mays
  unsure (1)..(111): unsure at all Xaa locations
  Clone ID: MRT4577_92151C.1.pep
RPRVRENPAKLMYLPNQRSARTVLHDIRTPHLNYSDMXVNAMDCPLHXEVHANLALLXLIHLCTYNHDPYHSHFIMTHYLNALIXTIYEQYDHVTNFRKIRAPESNFAQYL

SEQ ID NO: 360713 - protein, 130 aa, Zea mays
  unsure (1)..(130): unsure at all Xaa locations
  Clone ID: MRT4577_92152C.1.pep
VKTVQERVRVSILKMDRVYTHLYPMRTLTPCGMXKTRELHVAGRLTFTVWVHMHSVYCKHVLPTTHYRHPIYTLEIEHLHIQGMQMKAARLGRAEPPMLQEVVEYMLDMDIDMINLMGSKDKLYRSTCVF

SEQ ID NO: 360714 - protein, 41 aa, Zea mays
  Clone ID: MRT4577_92153C.1.pep
GTAHSPRVFFFFFFFFFFFFIQGSLAFIYDIIDTGIITTTN

SEQ ID NO: 360715 - protein, 72 aa, Zea mays
  unsure (1)..(72): unsure at all Xaa locations
  Clone ID: MRT4577_92154C.1.pep
ISNAQGLMTNLHAINATLKTVDGPSTNDCRGQRATNFNIIPNITGAAKASXKVLPVLNWKVXTGMSFRVPTC

SEQ ID NO: 360716 - protein, 572 aa, Zea mays
  unsure (1)..(572): unsure at all Xaa locations
  Clone ID: MRT4577_92155C.1.pep
MTLPEANAGATAQRKKNSPEMEFFSEYGDANRYKIQEIIGKGSYGVVCSAIDQHTGEKVAIKKIQNIFEHLSDAARILREIKLLRLLRHPDIVEIKHVMLPPSRRDYRDIYVVFELMDTDLHQVIKANDDLTKEHHQFFLYQMLRALKYIHTANVYHRDLKPKNILANXANCKLKICDFGLARVAFNDSHTTVFWTDYVATRWYRAPELCGSFFSKYSPAIDMWSIGCIFAEILTGKPLFPGKNVVHQLDLMTDLLGTPSADTISQIRNEKARRYLSSMRRKQPIPFSEKFPNADHSALKLLQRLLAFDPKDRPTAEEALADPYFKGIAKVEREPSCQPISKMEFEFEQKFTKEDVKELIFQEILQYHPQLLKDYKNGSEKTSFLYPSAVDRFRRQFASLEENGERNAALDRKHVSLPRTTTVHSTPIPAKEGPAATSQVAQRIPAARPGRVVGPVLPFESASVTDQHIARRVARNPAVPPATNTSSVYCYHLKSDSSDRQEHHLEREKDRRQYRPGQHFMDAKVAPEMGRDIRPSQYYVSRGLPKADLTDRATLHRSALHGVAPFNGIAAA

SEQ ID NO: 360717 - protein, 195 aa, Zea mays
  Clone ID: MRT4577_92156C.1.pep
MAATGTLALLLPVTLSSGPSHRTRAFMQIPRRQQPRRLTAAATEASSYNLPSRSSPEAPETRQIRLETESALEWGGVCERLAHFAATAAGRAACEGGRVPVGRSREESERLIDQTAAAVLLPTPLDFGGVEDVSALVAAAVAGRALAVRELCAVGRSIRAVRAVFHQLKRLADEMPDGRYSSLVDILQGCDFLTE

SEQ ID NO: 360718 - protein, 156 aa, Zea mays
  Clone ID: MRT4577_92157C.1.pep
MTMPEANASATAQRKKNSPEMEFFSEYGDANRYKIQEIIGKGSYGVVCSAIDQHTGEKVAIKKIQNIFEHLSDAARILREIKLLRLLRHPDIVEIKHVMLPPSRRDYRDIYVVFELMDTDLHQVIKANDDLTKEHHQFFLYQMLRALKYIHTGMHL

SEQ ID NO: 360719 - protein, 132 aa, Zea mays
  Clone ID: MRT4577_92158C.1.pep
MLHLSNLAARPGRVVGPVLPFESASVTDQHIARRVARNPAVPPATNTSSVYCYHLKSDSSDRQEHHLEREKDRRQYRPGQHFMDAKVAPEMGRDIRPSQYYVSRGLPKADLTDRATLHRSALHGVAPFNGIA

SEQ ID NO: 360720 - protein, 102 aa, Zea mays
  Clone ID: MRT4577_92159C.1.pep
CNVDNAVADPGTLSRSALSLRQSVVARLATVVSSKHLIVILSNVFTGQLGFLAAVSLQAVQSVGGVSGYSYYLRIRIVAARSRRLLESCECISGVLQKQQPE

SEQ ID NO: 360721 - protein, 155 aa, Zea mays
  Clone ID: MRT4577_9215C.1.pep
ILIRGRGSCSVCRSVLQGFLAFSLLFLPFFTRIRTGKSSFPPTFSSGGFFLKNLIQFHVSAANPFLDAHAAHRHRTLRCEPLQPLAPRSILHRVSASPLPIHTGLRHLRLPPSLSRVAPAAPPSYVRALWSTHAIVFPSLLLPLHFFAYTLPDRY

SEQ ID NO: 360722 - protein, 89 aa, Zea mays
  Clone ID: MRT4577_92160C.1.pep
MALLKSQDNRALFLLAMVVVAMAIVLAPCPAHGGDDERCTHMPGCNISRCRSQCKQWGYANPVINCWNTPPNTELDTCCCFSNAARKLA

SEQ ID NO: 360723 - protein, 79 aa, Zea mays
  Clone ID: MRT4577_92161C.1.pep
PVGFLDRFYFGPPTYSFVLVVLPLCLVSFCWLAAPVVTHQISFVIFEIVLSASGSPPQKKKKKKKKKKKKKKKKKKKKK

SEQ ID NO: 360724 - protein, 72 aa, Zea mays
  Clone ID: MRT4577_92162C.1.pep
SRSQRRRAAAASPSPPSPQTCLVFLAQAGNTPGLRPSGAERFVRAADSEEFILPRCLPESYTSFSRLARLAR

SEQ ID NO: 360725 - protein, 161 aa, Zea mays
  unsure (1)..(161): unsure at all Xaa locations
  Clone ID: MRT4577_92163C.1.pep
GRKFRGDPRGRLPLGQLGGQKNRGQQIQQLGVTNPCGNFQQKQVFPINQMGAMKFGGXLPPPFPFNQVGCAHPQQFFPFHPLTAFEFGGYFQQPPLLPFNQVSYVSPGAXFNQQQVVPVHPAAKPNAGPPFQMPPMVPIHPPGFANPTGVYPPPHHGGAPL

SEQ ID NO: 360726 - protein, 100 aa, Zea mays
  Clone ID: MRT4577_92164C.1.pep
RMGFAPQLRSYSTSSPSLPSPRPKHWLSHRIQAVLPSNRPSHLRQAVLLLLPRHPSLLPRELPLIRHLKPAPRPAMPLPNRNRRVGSLDQLPSRPPASIH

SEQ ID NO: 360727 - protein, 185 aa, Zea mays
  unsure (1)..(185): unsure at all Xaa locations
  Clone ID: MRT4577_92165C.1.pep
MHLPPGPKGWAVAGSLGPLQHPLQPELVLLQLEEPHAHAMLLPGHHXSHPGLRLVPQKQPISTENLPPGLDSPTCHSRRGGNIQLLATDTALQEVFQLIHAAQGFKLIAKETVSFGSIDSYDRRNTAPASLSVXGKRLCRQPIKVNWAYTSTTMEDTLRHFXIFNGDLCPEITEATLFAFIFEYS

SEQ ID NO: 360728 - protein, 53 aa, Zea mays
  Clone ID: MRT4577_92166C.1.pep
GRPKQQHWSQLKGEILFDWILISLLSSKSPAETTPLVSISGVAPPPFSAVYRL

SEQ ID NO: 360729 - protein, 89 aa, Zea mays
  Clone ID: MRT4577_92167C.1.pep
WSGKSRHVREYRASISMNLQWVWNAPLPRKNSSFRAIMLWMLSEKKKTGGKRLKKATMMWASASATRLHSNHIIVLAKEPEGNQRHVRF

SEQ ID NO: 360730 - protein, 83 aa, Zea mays
  Clone ID: MRT4577_92168C.1.pep
SRFSVLNPLQKRRRWCPSPAWRRRHFQLCIGCSSVDIFCYSPPISAEDGTVDGGSIPAADGAAGLTAGQLFDQLCNSPYSVNY

SEQ ID NO: 360731 - protein, 93 aa, Zea mays
  Clone ID: MRT4577_92169C.1.pep
LSRHLLLQPSHLCRRWNRGWREHSCGGWSSGPNCRPEMVLGWYHSHPGFNCWISDVDINTQQVFTNPLGCLKGCFDSVYQSRIAVIRGLYYMP

SEQ ID NO: 360732 - protein, 121 aa, Zea mays
  Clone ID: MRT4577_9216C.1.pep
QRRVPFFFFFFFFGFSLKRARVPFKGKMPRINWAQGPPPNPSLTGANQTRSLVPGPLIKGGPAPHLPLNFRPTYRPAPDRRVGFPLNGHRWSPFQKSLPGPGGGVGWGGGLPPFLWVVPTV

SEQ ID NO: 360733 - protein, 169 aa, Zea mays
  unsure (1)..(169): unsure at all Xaa locations
  Clone ID: MRT4577_92170C.1.pep
QSKALKVMADHXYCMKFRMIKXMYKTMDTVNDGIVXIEELNTXMAKLGFDLGGLELQMLIEPVVTISRRXALDYSRIYGLXLHLLRMANYQHLLWAFXLFFYHDRNRLIXEPNELHEVLHDDDLANTLEEDVTNILSEVESDQDRKIKCEEXEATITTATNWTKATGSS

SEQ ID NO: 360734 - protein, 93 aa, Zea mays
  unsure (1)..(93): unsure at all Xaa locations
  Clone ID: MRT4577_92171C.1.pep
AAGQSSARGRAEREGAAAAPSSGHRXPAXGXGXXRXEKADXRGPNHTAXRXGXRHXDXAXDHQNEXEXXDAPAEAXQTGXXKREDXXNTTKXX

SEQ ID NO: 360735 - protein, 166 aa, Zea mays
  unsure (1)..(166): unsure at all Xaa locations
  Clone ID: MRT4577_92172C.1.pep
RNPAVRLSCTTSLPAWSGATLLAALVSVRAALDFGFYNKTCPSAQTIVQXTVLAEFTNSSGVCPGLLRIHYHDCFGRSCHSSALSDSTANNNAEKDWILISPGLMLLDHEDLVKGFLEALCPCAGSXARILAFVGGDSSLXSGGLCYMVPFERRDCLIFYATHALI

SEQ ID NO: 360736 - protein, 60 aa, Zea mays
  Clone ID: MRT4577_92173C.1.pep
SIASKILHSSKMQFSPFEHILLHFIKSPFLNLKLRTLYSFSSQYLSFTFKLHIKSQQPFI

SEQ ID NO: 360737 - protein, 85 aa, Zea mays
  unsure (1)..(85): unsure at all Xaa locations
  Clone ID: MRT4577_92174C.1.pep
KVKLVTSRYSFVPLPVLHQKCLLQYFRSRITQLSIADGWIEISLFRWQLSLLVVLIVVISTSGGVQLVDDXTIGWPSSAHMSASW

SEQ ID NO: 360738 - protein, 101 aa, Zea mays
  Clone ID: MRT4577_92175C.1.pep
FLVFAHGGSDRSEPVPVDQACERIARSYRAVAPNAPTVQTRLDADPGFRLPTATLDRILSNLLDNAHAYGAPPVFIETARTPAGYVLSVSDSGGGIAPRDL

SEQ ID NO: 360739 - protein, 90 aa, Zea mays
  Clone ID: MRT4577_92176C.1.pep
MRRPCPASRNNIMWIVRLALRRPYTFVVLALLIFIAGPLALLRTPTDIFPNIDIPVVSIVWSPNGFPAEDMAKRITSNYERALTSDVEPG

SEQ ID NO: 360740 - protein, 94 aa, Zea mays
  unsure (1)..(94): unsure at all Xaa locations
  Clone ID: MRT4577_92177C.1.pep
MSAARLSAVAQSTVYAFSARPLAGXGSPWSLGSLRGRVLLIENVASLXGTTTRDYTDMNDLQKRLGPRXGLVVLGFPCNQFGHQENGKNEEILN

SEQ ID NO: 360741 - protein, 61 aa, Zea mays
  Clone ID: MRT4577_92178C.1.pep
QTRSLLMRRAFSACFADSRLSPQSSQANAATLLPLNVTSMLTSSCLNTDIDAYWLEDALFI

SEQ ID NO: 360742 - protein, 91 aa, Zea mays
  unsure (1)..(91): unsure at all Xaa locations
  Clone ID: MRT4577_92179C.1.pep
VSFPVLLPKASLSAIRSRRQSPPGVPQTSTRVASTRTNXCWIERRIAVKSPRPRLAKRLLAVRSAIVTVRLSPYRAFIACTHXXSFLLXAV

SEQ ID NO: 360743 - protein, 101 aa, Zea mays
  Clone ID: MRT4577_9217C.1.pep
MEMRRERENGAAPPPGEFTGEIRWRDAVAAMALSAHALLVALVEHCLDAHHLGQKRRRRNRGAAVQVRLHPEHARGLSQVHPAAGPLANVGVHFLLKELAS

SEQ ID NO: 360744 - protein, 497 aa, Zea mays
  Clone ID: MRT4577_92180C.1.pep
MAGRCGDSAAAAPLLENKAAPASEAGEGYHHHNYYYYVDGCPGCAVDRRKAASPGIPYANFIYVWIVTLCTALPISSLFPFLYFMIRDLNVAERTEDIGFYAGFVGASFMFGRCLTSTAWGIAADRIGRKPVVVFGISSVVVFNTLFGLSVNYWMAIATRFLLGALNGLLGPIKAYAIEVCRPEHEALALSLVSTAWGIGLIIGPALGGYLALPAENFPAVFSPDSVFGRFPYFLPCLCTSVFAAAVLVSCIWMPETLHRHKVHESTSQDVEKVQESGIRKKKSLFRNWPLMSSIIVYCIFSFHDMAYTEVFSLWAESDKKYGGLSLSSEDVGQVLAVTGASLLVYQLFLYPRINKVLGPIKSSRIAAILCIPILFAYPYMTYISEPGLSIILNIASAIKNNLAVTIITGTFILQNNAVPQDQRGAANGLSMTGMSFFKALAPAGAGIVFSWAQKRQHAFFFPGDQMVFFLLNVVELVGLILTFKPFLAVPERCDSR

SEQ ID NO: 360745 - protein, 340 aa, Zea mays
  unsure (1)..(340): unsure at all Xaa locations
  Clone ID: MRT4577_92181C.1.pep
MGSRDYYEILNVDRSATDDDLRRAYRRLAMRWHPDKNPAGKAEAETRFKEITEAYNVLSDADKRAVYDQYGEEGLRGDVPQPGGGGGTDDIFAEFFGSTPFTYCSXPAAGGSPHRPRSGTAGSAGRSGAXGGGGGAASSRMAPPPPPVESRLACTLEELCMGGTKKMRISRNLVDASGKTKTESEILWIEVKPGWKKGTKITFAGKGNQQWNQLPADLVFVVDEKPHPVYRRDGNDLLAEVRVTLAQALGGTVVVLTALDGRELAVDVGGGGEDEDDEDDAPVVCPGYELVLPGEGMPIAREPGRRGNLRIRFDVAFPERLTRRQRAEIKRALEDSTGVC

SEQ ID NO: 360746 - protein, 138 aa, Zea mays
  unsure (1)..(138): unsure at all Xaa locations
  Clone ID: MRT4577_92182C.1.pep
VTIITGTFILQNNAVPHDQRGAANGLSMTGMSFFKALAPAGAGIXSMISSNSSLPALCLLENDLLCLLHVMHGTLHLXFVSGFRFSWAQKRQHAFFFPGDQMVFFLLNVVELVGLILTFKPFWQCQIYAIVNSCFFGG

SEQ ID NO: 360747 - protein, 339 aa, Zea mays
  unsure (1)..(339): unsure at all Xaa locations
  Clone ID: MRT4577_92183C.1.pep
MAGRRGDSAAAPLLENKAAPASASEAEAGGGYHHHNNNYYYYVDGCPGCAVDRRKAASPGIPYANFIYVWIVTLCTALPISSLFPFLYFMIRDLNVAERTEDIGFYAGFVGASFMFGRCLTSTAWGIAADRIGRKPVVVFGISSVVVFNTLFGLSVNYWMAIATRFLLGALNGLLGPIKAYAIEVCRPEHEALALSLVSTAXWGIGLIIGPALGGYLALPAENFPAILSLTXXFGRFPYFLHALCTSVFSAAVLVSCIWMPXTLHRHKAHESTSQDVEKVQESGIRKKKSLFRNWPLMSAIIVYCIFSLHDMAYAEAFSLWADSDXKYGGLSLSSEDVG

SEQ ID NO: 360748 - protein, 81 aa, Zea mays
  unsure (1)..(81): unsure at all Xaa locations
  Clone ID: MRT4577_92184C.1.pep
RLVRYLMPXQTIPNEAAXHIINDKLMLDGNPFLNLVVLVTTWMESHCDRHSMDSINKNYIQMNXNPFTTELHNTVINMIVL

SEQ ID NO: 360749 - protein, 42 aa, Zea mays
  Clone ID: MRT4577_92185C.1.pep
SWRVESACRVRREDIDGGKTMLDAARGAARSRTDVALHGQPL

SEQ ID NO: 360750 - protein, 40 aa, Zea mays
  Clone ID: MRT4577_92186C.1.pep
AAHHHAAVPLAPGPWLRSGILMPPMALWFPLGSFPFWAFA

SEQ ID NO: 360751 - protein, 73 aa, Zea mays
  Clone ID: MRT4577_92187C.1.pep
MLIRCQYQSNRHSASLHQIKMLPFPGRPCPNLFMGLIWHPPWALALTFSQRRGPKFYNRRPSALGYCSSLVYS

SEQ ID NO: 360752 - protein, 76 aa, Zea mays
  Clone ID: MRT4577_92188C.1.pep
CGLLNALLRHLVFVEFITSRHVALLHIRSEHERLEKTVSSDLRSNMCHLTTLFSPSSRPAMVSYRGLRTRGSVRTG

SEQ ID NO: 360753 - protein, 81 aa, Zea mays
  Clone ID: MRT4577_92189C.1.pep
APTMFTSVSSHEPNILAICLPIPMLSGLSLLHNREHRMASLSVYPQGGVLRPCVGQVRSTCLDQIQMLSAMCPILTVRSIP

SEQ ID NO: 360754 - protein, 107 aa, Zea mays
  Clone ID: MRT4577_9218C.1.pep
GPGLRPPSQNPMAHLPSSPAAAVPTGHRVSPSPHSCRSLPQLKTVLLSIGAAAGPPRRSWRGVESVAAAPTGSDNAGQEGPIAQALYDLILEDMRSGPPSVRIPIPY

SEQ ID NO: 360755 - protein, 124 aa, Zea mays
  unsure (1)..(124): unsure at all Xaa locations
  Clone ID: MRT4577_92190C.1.pep
RDAICTSRTPYGPHGELAWSYTTLILRDDXCAITAXKIATIIXKAVNMKXRVASCASTHSASSLEKRNVQDLILSDASGGEAAXPDAAAVPADDDATAAAPAVEEKNEEVKEESDDNMSFSLFD

SEQ ID NO: 360756 - protein, 56 aa, Zea mays
  Clone ID: MRT4577_92191C.1.pep
QRRVRGLSVGSGGGSAPVAAAAPAGGAAAAAAPAVQEKKEEAKEESDDDMGFSLFD

SEQ ID NO: 360757 - protein, 70 aa, Zea mays
  Clone ID: MRT4577_92192C.1.pep
LPDWGQFIRVVRDKFGVEEYPQAMGTLVSMKHQHGVEEYSQAFDDIRYAPPLHNSQLDTFVTHYVRVLKS

SEQ ID NO: 360758 - protein, 78 aa, Zea mays
  Clone ID: MRT4577_92193C.1.pep
HPHRQTTMLSHHLSKVPRSKIMAPRGMHLCRRVKKEHRRHGIFDAKIKINACQLQFYSPQEIKSPKATLEGVPFFLSH

SEQ ID NO: 360759 - protein, 210 aa, Zea mays
  unsure (1)..(210): unsure at all Xaa locations
  Clone ID: MRT4577_92194C.1.pep
AIQLSSEHNACYEEVRQELQSSHPDDPIRLELKHNVWRVKGIIQISRSIGDVYLKKPEYNREPLHSKFRLRETFQRPILSSEPQITEHRIQPNDQFVIFASDGLWEHLSNKEAVDLVQSSPRNGIARRLVKAAMQEAAKKREMRYSDLKKIDRGVRRHFHDDITVVVVFXAMSKASWSKSPSVSLRGGGVTLPAESLAPFSAPAWLKSTN

SEQ ID NO: 360760 - protein, 92 aa, Zea mays
  Clone ID: MRT4577_92195C.1.pep
MLAAVMDYFSTCWGPRSRAGHRGKGSDAAGRQDGLLWYKDAGQLVTGGFSMAVVQANQLLEDQSQVESGSLSLADYGPQGTFVGVYDGHGGP

SEQ ID NO: 360761 - protein, 399 aa, Zea mays
  Clone ID: MRT4577_92196C.1.pep
MLAAVMDYFSSCWGPRSGAGHRGKGSDAAGRQDGLLWYKDAGQLVTGEFSMAVVQANQLLEDQSQVESGSLSLADPGPQGTFVGVYDGHGGPETSRFINDHLFNHLRRFATEHKFMSADVIRKAFQATEEGFLSLVSKEWSLKPQIASVGSCCLVGVICAGTLYVANLGDSRAVLGRLVKATGEVLATQLSSEHNACYEEVRQELQSSHPDDPHIVVLKHNVWRVKGLIQISRSIGDVYLKKPEYNREPLHSKFRLRETFQKPILSSEPQITEHRIQPNDQFVIFASDGLWEHLSNQEAVDLVQSSPRNGIARRLVKAAMQEAAKKREMRYSDLKKIDRGVRRHFHDDITVVVVFLDSDAMSKASWSKSPSVSLRGGGVTLPAKSLAPFSAPAQLNGTH

SEQ ID NO: 360762 - protein, 62 aa, Zea mays
  Clone ID: MRT4577_92197C.1.pep
HIYNPTTRQTCVTLVQLAIMRRHLQPHSTPRRRSYSFNYVLDTATPTVAAMPMLIAYFTLAI

SEQ ID NO: 360763 - protein, 120 aa, Zea mays
  Clone ID: MRT4577_92198C.1.pep
GPGFFPPYGYGGGLKFPPPLGYSPYFLSPGWGNKVQCKTRPWSLVSPGKNQLFCLPCWGPRLLDQRPFLPFVSRAPINAGHVVLACKPGRGKGPPFLEGGFPPSRGYPGLQFLEFFGAGG

SEQ ID NO: 360764 - protein, 112 aa, Zea mays
  unsure (1)..(112): unsure at all Xaa locations
  Clone ID: MRT4577_92199C.1.pep
MLAAVMDYFSSCWGPRSGAGHREKGSDAAGRQDGLLWYKDVGQLVTGEFSMAVVQANQLLEDQSQVESGSLSLADTGPQGTFVGVYDGHGGPXXTSRFINDHPLTXLRRFAT

SEQ ID NO: 360765 - protein, 126 aa, Zea mays
  Clone ID: MRT4577_9219C.1.pep
GSRVFNVTAMNRHNYVLGDFIGAAGIVLCFFGLLYGGFWRIQMRKTFGLPRSRWCFGSASLTDYTQWLFCWPCVLAQEVRTGNLYDAKNGSFYEKVMDGDGVETDAGSVDTAELPVSCGVEEANGI

SEQ ID NO: 360766 - protein, 51 aa, Zea mays
  Clone ID: MRT4577_921C.1.pep
MATQISKRKKVVRDGVLYGELNEMLTWKIEEDGYCGAEETCAQVYIGMMIA

SEQ ID NO: 360767 - protein, 36 aa, Zea mays
  Clone ID: MRT4577_92200C.1.pep
QYTQQVLDYTCITYGCRLLDLRITYSHTYIRYRRIW

SEQ ID NO: 360768 - protein, 127 aa, Zea mays
  unsure (1)..(127): unsure at all Xaa locations
  Clone ID: MRT4577_92201C.1.pep
ITKRYDEATPCFACSDFRGCRCGAWRRGVRESGSADRVALRLAPCVSGADDPQSTPTSSCCSAVHAIGQSPSSVCAAPSSAAAGTAGVKLGIIXXEVAKLPXXQALCNMXPIAXRRLPKCGDYHAXX

SEQ ID NO: 360769 - protein, 68 aa, Zea mays
  Clone ID: MRT4577_92202C.1.pep
LPPSLCLRVFLAFRSPPPLFQKKGGKKFKAPWPKKKKKKKKKKKKKKKKKKKKKKKKKKKKKKKNTPP

SEQ ID NO: 360770 - protein, 48 aa, Zea mays
  Clone ID: MRT4577_92203C.1.pep
THVSNYVSKAEQTPDSLDPIIVAKLKAAAGLANMETKKYKLAARKVSH

SEQ ID NO: 360771 - protein, 358 aa, Zea mays
  unsure (1)..(358): unsure at all Xaa locations
  Clone ID: MRT4577_92204C.1.pep
LWKLHENGPPNSTTHQQAHLVLPPNGCTHDLSDISKGXERLSISAVNEFGSENCLPSFYYIPRNLVSQDSYVNSVETIGDKDCCSDCSGNCLYASEPCACARKTGGEFAYTRDGLVRTKFLDECISMTPRPEKHNMFFCKSCPLESIRNEPSPELCRGHIIRNFIKECGSKCGCNAQCGNRVVQRGITCNLQVFSTREGKGWGLRTLDELPKGAFVCEYVGELLTNTKLHEMTTQNMHNARYSVLLDAGWGPDGVLKDEEALFLDATFCGNVGRFINHRCYDANLVEIPVEKETPDHHYYHFAFFTTKKVEAFEELTWDYGIDFDGDKHPVKSFECLCGSRYCRGRKHSRTRGKAASK

SEQ ID NO: 360772 - protein, 284 aa, Zea mays
  unsure (1)..(284): unsure at all Xaa locations
  Clone ID: MRT4577_92206C.1.pep
GCVGGVGVGGGQQFVDRSKVRILLCDGDASSSREVLRLLCNCSYHVTCAKSPRQVINILNYEGGEIDIILAEVDLPVSKCFKMLKYIARNKDLRHIPIIMMSNRDEVSVVVKCLRLGAAEYLVKPLRTNELLNLWTHVWRRRRMXGHYADSALEKHAQLRCLXSCCTCMNYSLNRVLVLXLGLPEKNFFNDNFELVLSEPSDANTNSATLLSDETDDRPKENTNQETGTSNQLEYESNPSVAERDQRDKIGAPGSALDASQACKIFQPDLYSANWSSFLLLTTS

SEQ ID NO: 360773 - protein, 207 aa, Zea mays
  unsure (1)..(207): unsure at all Xaa locations
  Clone ID: MRT4577_92207C.1.pep
RKRVPRVQGGKPPLAPPAPRRGXPFPPGPFPFSRSPGQKRTXGARPPPQNXGGGPGGGGPWLRRFSLPRAPRKKKGPPGPPGGRRRKKPPLFRLIDPPXCCPPPCATRXCESYIQPPPFFARVRFFAPPPRPNKGGSVIFCLYTGGFACACVCSWSGAPKNVCPFDFLPCLVVYVFPKKKKKKKKKKKKKKKKKKKKKKKTRGRARV

SEQ ID NO: 360774 - protein, 67 aa, Zea mays
  Clone ID: MRT4577_92208C.1.pep
IPQPPIRIGRWRHCPRPLIKAFRQQTGKGGPAFPQGLCGPSCFLRTGGARSIFRKAPPPPLGWPGFF

SEQ ID NO: 360775 - protein, 50 aa, Zea mays
  Clone ID: MRT4577_92209C.1.pep
LFSRLMRFYRCSRFFSLPIPRRFQGSYSMEQGSLRLQQIWRTELSSARES

SEQ ID NO: 360776 - protein, 157 aa, Zea mays
  unsure (1)..(157): unsure at all Xaa locations
  Clone ID: MRT4577_9220C.1.pep
AATKGHNEIVGLLLENGADVNSLNYCGQTALMQACRYGHWEVVQTLLLFRCNVTRADYLSGRTALHFAAVNGHARCIRLVLADFLPRDKLNSLSETGVVTAKNKSEQSALSKFVNKAADGGIXTAIHKAGLDGLFDCVQLLLDLEANVFDGTFYFGT

SEQ ID NO: 360777 - protein, 118 aa, Zea mays
  Clone ID: MRT4577_92210C.1.pep
DRGHFSRTADWFFWAKAPTSSTSGDRHQGCSLGVVLVGFRLLFRNKPPPCFACWRNNLEIYEPCRFLSKGFVCSKTWCMSIGPLYPRCRMGFWEPLFVYKCVQHGCSLRNMNTGLWFV

SEQ ID NO: 360778 - protein, 168 aa, Zea mays
  unsure (1)..(168): unsure at all Xaa locations
  Clone ID: MRT4577_92211C.1.pep
MMVYHDXLLYGDELLSDSFSYNELENDVLWEDDGKKVTQRPADEDIVANPSSDGGEDESIDDTTVKVVDIVDTFRLQERPPFVXKSIVSDIKKYIKNLTAVLEPEKADEFKKDVEGAAKSLLSMLKDLELYVVESMNDDASVVFAYYKDEATSPTFLYFSHGLKEIKS

SEQ ID NO: 360779 - protein, 46 aa, Zea mays
  Clone ID: MRT4577_92212C.1.pep
FLGDSTSSGDAPGDLLTWSTLRSLPQETKSRSYEEKKTTLRHRGPS

SEQ ID NO: 360780 - protein, 143 aa, Zea mays
  Clone ID: MRT4577_92213C.1.pep
MAAVVDTENPAATVVVGPPCAVDDDDLSQRANWLRAAVLGANDGLVSTASLMLGVGAVKADARAMVISGFAGLLAGACSMAIGEFVSVCSQRDVELARLDRGAEEEKALPSPVQAAAASALAFSVGALLPLLAAGFVTDYRLR

SEQ ID NO: 360781 - protein, 265 aa, Zea mays
  unsure (1)..(265): unsure at all Xaa locations
  Clone ID: MRT4577_92214C.1.pep
TRPTEDIDLPLTRTRPVKKVALVVLTGERGLCGSFNNNVLXRAETRIDELRQVGLQYTVVSVGKKGNAYFQRRPYIPLERDLEVSSVPTVGNTGXFGDPKPNPSEPISLAPIPSRPLSLPLPPDPIIQTLLPMSPKGEICDVNGVCVDATEDELFRLTTKEGKLTVEREKVKIETQPFSPVVQFEQDPGQILDALLPLYLNSQILRALQESLASELAARMSAMSSATDNAIELRKNLSIAYNRQRQAKITGEILEIVAGADALAG

SEQ ID NO: 360782 - protein, 151 aa, Zea mays
  Clone ID: MRT4577_92215C.1.pep
GNASEILALASRSTAASSNFKGVDSSHCSVDAIEAAKALALSSSAVVAVSGAVDFVTDGKQVISVSNGVPMMQKITATGCAVTALIAAFVAMEPSDAIVAAACALAIFGLVGEIGMESAKGPASLRMHLIDALYCLNEETVTSRVRISLRP

SEQ ID NO: 360783 - protein, 246 aa, Zea mays
  unsure (1)..(246): unsure at all Xaa locations
  Clone ID: MRT4577_92216C.1.pep
MSCSHLSTAWSSSALASSASTTRRRSPPRSGLLVRCSLRELRTRIDSVRNTQKITEAMKLVAAAKVRRAQEAVVSSRPFSEALVEVLYNMNQEIQTEDIDLPLTRTRPVKKVALVVLTGERGLCGSFNNNVLKKAETRIDELKQLGLQYTVVSVGXKKGNAYFQRRPYIPLERDLEVSSVPTVRSSPLASSTAPSMKDSQXILRLVYSLFVSEEVDKVELLYSKFXVSLXRSDPIIQTLLPMXAQG

SEQ ID NO: 360784 - protein, 359 aa, Zea mays
  Clone ID: MRT4577_92217C.1.pep
MSCSHLSTAWSSSALASSASTTRRRSPPRSGLLVRCSLRELRTRIDSVRNTQKITEAMKLVAAAKVRRAQEAVVSSRPFSEALVEVLYNMNQEIQTEDIDLPLTRTRPVKKVALVVLTGERGLCGSFNNNVLKKAETRIDELKQLGLQYTVVSVGKKGNAYFQRRPYIPLERDLEVSSVPTVKDSQAICDLVYSLFVSEEVDKVELLYSKFVSLVRSDPIIQTLLPMSPKGEICDVNGVCVDATEDELFRLTTKEGKLTVEREKVKIETQPFSPVVQFEQDPVQILDALLPLYLNSQILRALQESLASELAARMSAMSSATDNAIELRKNLSIAYNRQRQAKITGEILEIVAGADALAG

SEQ ID NO: 360785 - protein, 242 aa, Zea mays
  Clone ID: MRT4577_92218C.1.pep
QTSSKWQQSINDRGSSTSTLYASRSQSPARNQQKVLCSNTARSNSTKKIATRNPIYQALTSAAASPPPKKCAVTQRGSLRKNTQSKEKKSPKQIGAHYCCPMRTQTSRSRGEDPGRRPGSWPPPPRRRGRRTGTAAAAAAAAAPAASGAPAAAAAGASAAGGGGCPRRRSSPQARRRPDRNPGRTEPAHGSIHGSADCGEQIDGFGSEFSSGIEQGNAGKEGGFLGVFSSSFSPGPPPERRT

SEQ ID NO: 360786 - protein, 59 aa, Zea mays
  Clone ID: MRT4577_92219C.1.pep
VRLHITQRMPGARSERPKQGMVGPFYHGLSALPTDWRSFFLTYFLGDNVLNSGDRDGDM

SEQ ID NO: 360787 - protein, 40 aa, Zea mays
  Clone ID: MRT4577_9221C.1.pep
RIHYSGPLMPPGGNIEDMLKEHERHIQEAVRKARLCKGSK

SEQ ID NO: 360788 - protein, 93 aa, Zea mays
  Clone ID: MRT4577_92220C.1.pep
PRVRFPQYGSRLATPLLILNGACDTWQGTSALSPRTAEPKKTSPQCKLDIKICSAIQLTASQILRTYVLKAHRITHAQLMLINSCNAHCELRS

SEQ ID NO: 360789 - protein, 51 aa, Zea mays
  Clone ID: MRT4577_92221C.1.pep
HAATAMELGTCQSVTHFTHQRAFMARGTACSEPDVGSCCCHPCHIGSLGVH

SEQ ID NO: 360790 - protein, 234 aa, Zea mays
  unsure (1)..(234): unsure at all Xaa locations
  Clone ID: MRT4577_92222C.1.pep
MADGAGSASGLVEKLAELSTGGAGQNPPPAGEGGEELQLSKNAKKREEKRKKLEEERRLKEEEKKNKAAAAAASGKPQKASAADDDDMDPTQYYENRLKTLDSLKAAGVNPYPHKFPVGISVVEYIEKYKTLNNGEKLTDATECLAGRIMNKRTSSSKLFFYDLYGGGMKVQVMADARTSELDEAEFSKYHSSVKRGDIVGICGYPGKSNRGELSLFPKKFVVLXSCLHMMPRQ

SEQ ID NO: 360791 - protein, 161 aa, Zea mays
  unsure (1)..(161): unsure at all Xaa locations
  Clone ID: MRT4577_92223C.1.pep
RPAPGQAVNHALGMPEGLPTTVHAVTGTQTTGDGRLFKDXTGARAXSCNMMPRKTFFFFAESKLLCVLNGQPTGMPLLVPTVDVTGDDPTVRXGKSATSEEIEASRTAWATGRMTVILPFFKEDLALTSLQRERTFTITEAKASIGSDATSREDTASDYNN

SEQ ID NO: 360792 - protein, 85 aa, Zea mays
  Clone ID: MRT4577_92224C.1.pep
TPASSPWPRIRTSFFDFPLKISTFFGDADAIFTVVDLLSLFTAVLIYNMLFYYLTRMIVSPHFAQILWRRDIAPSLGKEKRAFTL

SEQ ID NO: 360793 - protein, 68 aa, Zea mays
  Clone ID: MRT4577_92225C.1.pep
LNAFFPVVAKLKTAHASPFQSITASKNNQGAPAPDQLQLSLHKLHYPSRVLFHSEQIYIQCINAFAIL

SEQ ID NO: 360794 - protein, 108 aa, Zea mays
  Clone ID: MRT4577_92226C.1.pep
WAPSARLLNKLAAPSGHDARSSAVASPQFGSLDLGIRLVTLCLWDPTRPFRRLDHIPLTHESERIVHRRRSVTVSSTKSLSVAIPVNWGGWKASLACSGSNRGVGGNP

SEQ ID NO: 360795 - protein, 71 aa, Zea mays
  Clone ID: MRT4577_92227C.1.pep
NLNVHYHVTSVYGQLLHVSGHRILQEKHKSTSAYPITRGIKTSVHRGFLHLGEPQKAQSIKKKLSYNFNNP

SEQ ID NO: 360796 - protein, 30 aa, Zea mays
  Clone ID: MRT4577_92228C.1.pep
LNAYKNKNEPSNHHRQVIYRDLNICHFQHN

SEQ ID NO: 360797 - protein, 51 aa, Zea mays
  Clone ID: MRT4577_92229C.1.pep
LHLLCCISRQNFGECYEMQHLTPCFLGKRHCNDLKLRMWIPPHSDTLILRL

SEQ ID NO: 360798 - protein, 44 aa, Zea mays
  Clone ID: MRT4577_9222C.1.pep
EITLPNHQGSVGPSTPSNLNSRLPGSPAMVLGNNSPFPSTLSSP

SEQ ID NO: 360799 - protein, 77 aa, Zea mays
  Clone ID: MRT4577_92230C.1.pep
LKFNISLRKLTTKSSICMHGYFPLVSINHYYLNCMLVPPIYIISAISSHLFMLVIIKFSIIILTRIITSSHNKLSFH

SEQ ID NO: 360800 - protein, 176 aa, Zea mays
  unsure (1)..(176): unsure at all Xaa locations
  Clone ID: MRT4577_92231C.1.pep
DVSARYNNILSGLLRDPENIECADCTSQGPRXWGSVNLXIFIWMTCSGIHKNLGVHISQERSATLDTWLTHPAVFILSMGNEEADSYCQAELPPNYDRVGINNCIRVLYDXQTWVPRRCRHQNLPPAFEMKRANSLQVLLIRVGHVLTSSFEQNRASPTLPNKVAHAATRISSQVS

SEQ ID NO: 360801 - protein, 97 aa, Zea mays
  Clone ID: MRT4577_92232C.1.pep
HASHARHAADLTDKDQGVYSTLPAELQALVTRFQSVFALPVGLPPVRDWDHHISLLPGAQPFHVRPYRYAPALKTEIERQVQEMLSSSIIQHSNSEF

SEQ ID NO: 360802 - protein, 38 aa, Zea mays
  Clone ID: MRT4577_92233C.1.pep
SPSTPSLASHDRRRSQHCTVQFSCCRPCLSRRVRPRSV

SEQ ID NO: 360803 - protein, 100 aa, Zea mays
  unsure (1)..(100): unsure at all Xaa locations
  Clone ID: MRT4577_92234C.1.pep
APNLGLSKSPFARPFRXGRVFFWXPPKKVFHWAARVFFFSKTPFWRLFWSLPGKKLGVFDGNKNFPLWKKTLVGEWHQIPPFYPKAPPSFSPPVFFKKKL

SEQ ID NO: 360804 - protein, 117 aa, Zea mays
  Clone ID: MRT4577_92235C.1.pep
FDRALTGSELHRVKYNPRWSYRQRRHWPPANRSIPSTTISFDHSLSSTSISVAPYLLSTSLPSSPTPLPCGIRCWVQQAMTANCRRAVQSLQKSWYCSSSTAADDATASCRRALPPT

SEQ ID NO: 360805 - protein, 56 aa, Zea mays
  unsure (1)..(56): unsure at all Xaa locations
  Clone ID: MRT4577_92236C.1.pep
CRSCCWWRSRARCCPVCVAVRCSCLWWSLSXAAVVSSVAAXWAGRSSGRVRGCVRR

SEQ ID NO: 360806 - protein, 58 aa, Zea mays
  Clone ID: MRT4577_92237C.1.pep
HTRAHNSCSQGTIVMISIQDRGVSNQDNAVGDSFLLDIASATLCSDIGTCDKLSVGSS

SEQ ID NO: 360807 - protein, 551 aa, Zea mays
  unsure (1)..(551): unsure at all Xaa locations
  Clone ID: MRT4577_92238C.1.pep
MPRENLLSEKLADGGTDAEIFGDITKQGNETRRSLYPEMKFRRAIQWPPNFKVSNVDKYETKQDSGGWLVVYTTAARAVRATEDVMTAYLPIVLGQDALQWLRHLPRHCIDDWSDFSQRFIANFQSLSDKLAQPWDLKSIRRHGDETLRSYLKRFQTMRNCIPEVAEVAVIEDFYRESNDXSSSEPYCKRRRPPPSSCSWRQTSTSPPMNGLRTSSGSEXLCLHHXDANQQTDKRWEKRPHEEVHVAGPPVSRSRGAPRGGERTLDDILDSQCSYHKDMRHSLRNCRDFKHSVGNGRPFQXYHLPHREEGPVXPRRPQQXRGRRWSXRTSTKRSTSSSEDTGKYPLLVDPVIRESRVKKVLVDGGSSINITFPRTLLGLGVALKELHESDTPFFGIVPTEGEYPLGHIYMPITFGTLKNYRTEFLRFEVASFDCKYNAIIGRPGLAKFMAILHYSCLILKMPGQQGIITGRADFQGAAKCFRVAIQAALTTKPLTTSSVQANSKPEGDLAIPENEAQVVTSIRPTEEMKRINLGFADERKTAIISSSLDDK

SEQ ID NO: 360808 - protein, 43 aa, Zea mays
  Clone ID: MRT4577_92239C.1.pep
INYLRADVKRGNISKEEEDLIIRLHRLLGNRWSLIASHLPGRT

SEQ ID NO: 360809 - protein, 201 aa, Zea mays
  Clone ID: MRT4577_9223C.1.pep
RTRGRTRGVSSRLRNAAALGGPGAESVKPGNESHVVASRAIDIAAQVKQPTHSTSKSTCEKFSAEDSVPGFRVEPRALPTSAQVPECGSTWNNTGDHHRSVLGRVCSSVRVARKKGPSNSNTPQYDAADLRNGGDRNQRADRPAVSSQKKDQQEDRGRKYKRIHYSGPLMPPGGNIEDMLKEHERHIQEAVRKARLCKGSK

SEQ ID NO: 360810 - protein, 117 aa, Zea mays
  unsure (1)..(117): unsure at all Xaa locations
  Clone ID: MRT4577_92240C.1.pep
HFYLPLSSQAYQEFQDLNAMLATEQILNNSRDQCIYIXGGWGAHNFSSKKIYRLPYRNMQPLDHFVWIWKSKCCNKLRVFIWLLLMDRLHTRNILFFCLSIHSKLLGLDSNSVTASL

SEQ ID NO: 360811 - protein, 61 aa, Zea mays
  unsure (1)..(61): unsure at all Xaa locations
  Clone ID: MRT4577_92241C.1.pep
SPLASVCDXQGVVACLESQCIVLRYITTHTISCAILDRFNSPNNCKAISHFHVSHKTYIHT

SEQ ID NO: 360812 - protein, 81 aa, Zea mays
  unsure (1)..(81): unsure at all Xaa locations
  Clone ID: MRT4577_92242C.1.pep
TTTTTHTKVKQRRETPKPTGHKTTTTRQHHTVPNNNMLPTTTTAKNKPSHSSTMFKPHRRNXAGQIGFHPHRKPSXQXTER

SEQ ID NO: 360813 - protein, 78 aa, Zea mays
  Clone ID: MRT4577_92243C.1.pep
YATRRRHGDRAALARQPTRAMGSNSRYRARDARIDRGSYRLPSRDAIIEGSSDRCRDKDFDVGGGDSEDPAYGSAGVD

SEQ ID NO: 360814 - protein, 269 aa, Zea mays
  Clone ID: MRT4577_92244C.1.pep
MSFADLEAGALRAPLGRKARGGPNDARALVFQITTAVASYRRLLNSLGTPKDTITLRDNLHKTSQNILQLAKDAKDKLQKAAEADKSTDTSADKRIADMKLAKDFAATMEEFRKLQSLAIQRETAYKPVVPQNTQSNYSTDERSSESGNMPEQRALLAESMRQEVLQLDNEIVYNEAIIEEREQAIQDIQQQIGEVHEVFKDLATLVHSQGIIIEEIDMNIENSAAVTKEAKTEVAKAVKTQKSNSSLICLLMVIFGVVLLVVIIVLAA

SEQ ID NO: 360815 - protein, 72 aa, Zea mays
  Clone ID: MRT4577_92245C.1.pep
FPSITLSRSHRRQSSPSPLMDLSAGQAALSESSTPPSPHSETDFSSRARPENYPATNDATLSACLPNTTSVT

SEQ ID NO: 360816 - protein, 71 aa, Zea mays
  Clone ID: MRT4577_92246C.1.pep
IRLEGPAEEVQRSRDGPQTAGAPQTPQPTLLLRRDHALRAEPAAEPPDKYKAIEVLERRQNQLGDQRERKC

SEQ ID NO: 360817 - protein, 271 aa, Zea mays
  Clone ID: MRT4577_92247C.1.pep
MDTAVFSPADLFHGVDDSDDDRDEMQICSDGEKPVALEYQERVHDFPDMKLSVREFSCHELNANLLWPGTFSFATWLVKNRSILDGRRVLELGSGTGALAIFLRKAFEVNITTSDYDDGEIEKNISYNCRANALDVLPHIRHTWGDPFPVCTPNWDIVIASDILLYVKQYDNLVKTVSFLLNEYKQKDHKSGCITITDKSGTQISAKPPVFLMSWRRRIGKGHQSLFFDRCEKTGLQVQHLGDLVYLISNKQEADFVETKSDGGSSEGMIF

SEQ ID NO: 360818 - protein, 227 aa, Zea mays
  unsure (1)..(227): unsure at all Xaa locations
  Clone ID: MRT4577_92248C.1.pep
MRCKSAPMGRSRWRWSIRRESTTSLTCGTGALAIFLRKAFEVNITTSDYDDGEIEKNISYNCRANALDVLPHIRHTWGDPFPVCTPNWDIVIASDILLYVKQYDNLVKTVSFLLNEYKQKDHKSGCITITDKSGTXNQFDLXSLEDAVRNVSXHLAGTQISAKPPVFLMSWRRRIGKGHQSLFFDRCEKTGLQVQHLGDLVYLISNKQEADFVETKSDGGSSEGMIF

SEQ ID NO: 360819 - protein, 63 aa, Zea mays
  Clone ID: MRT4577_92249C.1.pep
IFFLWGPKEKIWGRGIVTPGQKLSSQIFFILNGKFARHPFDERTPLNRGKRFFLPWEKFTLYA

SEQ ID NO: 360820 - protein, 87 aa, Zea mays
  Clone ID: MRT4577_9224C.1.pep
MCKPYRKGSITCPPGRQKEKNFLFRRLCCLLFFNGFFLPFEGVHDLVLIAQQINKWYSHAPDARQVYSMIMGPKRGRCTSADRVAPG

SEQ ID NO: 360821 - protein, 80 aa, Zea mays
  unsure (1)..(80): unsure at all Xaa locations
  Clone ID: MRT4577_92250C.1.pep
THPLNPHPXFFLPHPXTLPPXNXLPPPPPTLLIXPQKHWYXXPTTLLSILPHSXNSVSPLFMSXQYNSVSRXNKKKKTPP

SEQ ID NO: 360822 - protein, 258 aa, Zea mays
  Clone ID: MRT4577_92251C.1.pep
MPPPNNRLCVALAIALVVFSSLHTPAATSAVDGDTLAAGQALAAGDKLVSRNGKFALGFFQFRQNLPGGGGTGTSAAVVVPSPGWYLGVWFNKIPVCTPVWIANRDRPITESELKVAQLRVASTDGNNKLLVVVTSNTNTSADNSIIIVANTTTNGSSVHVVLTDTGNLVLLPQTEALLSSASAPAASSSSSSSSSSLWQSFDYPTDVGLPGAKIGWTKLAGGRYFSRRFISKKSLVDPSPGSYSISIDTNGFMQLTR

SEQ ID NO: 360823 - protein, 112 aa, Zea mays
  Clone ID: MRT4577_92252C.1.pep
RGGVFLKPPCGGILIAHLTDTASQLVHAGLGGPCTRQAWFFFFFTRTQVGGGGGSHGRRPRMRLPLGIPTSPFEGAGALGGWVPGDWRVPLPAARTSAAGVHYPSVCSCVPR

SEQ ID NO: 360824 - protein, 135 aa, Zea mays
  unsure (1)..(135): unsure at all Xaa locations
  Clone ID: MRT4577_92253C.1.pep
SLLLSLLAVAAYGRLISNGGGFDQLLSVILLSRSFPAAEAGNKALEKCEHSYGLLPCTXTSVLINHYXLALTYGYLMYNADTYLSSVSELLLEIILPRLVGSLLLHILHALPDALLVLTYGLFGSKDEAHSHVLI

SEQ ID NO: 360825 - protein, 61 aa, Zea mays
  unsure (1)..(61): unsure at all Xaa locations
  Clone ID: MRT4577_92254C.1.pep
SDWTLANAHCSVVFRSLATGRSRTRTAASCSGAYITTDVVXRKIPRAHSLLEWWTCAAAAL

SEQ ID NO: 360826 - protein, 55 aa, Zea mays
  unsure (1)..(55): unsure at all Xaa locations
  Clone ID: MRT4577_92255C.1.pep
LAQSPSSREVIHVSPVSYVMSSQPVRXITWLTRCIVRRKNMFFNSLRDSFEVEES

SEQ ID NO: 360827 - protein, 92 aa, Zea mays
  Clone ID: MRT4577_92256C.1.pep
AASKHNPRRYCSGPQSPCIHTVLALSKAGAYVSMFWHSTPWSCKVVAFSSGASAIRRSVYCRNSSITSQSCQLCHCPLTALCTSDRTKKDKT

SEQ ID NO: 360828 - protein, 86 aa, Zea mays
  unsure (1)..(86): unsure at all Xaa locations
  Clone ID: MRT4577_92257C.1.pep
PQPPSKHSSRRDQRARSRAAKKPXXRTAXGSHQEAXHPGAXKAAXXEXNTTXSXDXAGQGXGRAXSKXTGGGPTTPAGRNAAARAH

SEQ ID NO: 360829 - protein, 412 aa, Zea mays
  Clone ID: MRT4577_92258C.1.pep
MAAPQHVRAAPLARALRATATATATATASVPVPVPVPAGIKSQGTSRRALLGLSEPQLRQLAIDLGQQSYRGKQLHDLLYKSRAKQIQEFNHVPKAFREALLGAGWSVGRSPVHHAVTASDGTTKILLKLEDNRLIETVGIPVDDDNKGSSRLTACVSSQVGCPLRCSFCATGKGGFARNLQPHEIVEQVLAIEETFKHRVTNVVFMGMGEPMMNLKSVLEAHQCFNKELKIGQRMMTISTVGVPNTIKMLASHKLQSTLAVSLHAPNQKLRETIVPSAKSYPLGALMDDCKSYFLETGRRVSFEYTLLAGINDEKEHAEELAELLRMCGGGYHVNLIPYNPIEGSEYKRPYRKVVQAFVDALEARKITVSVRRTRGLDANAACGQLRNEFQKNPLLEIEPSPSTERTLVAA

SEQ ID NO: 360830 - protein, 90 aa, Zea mays
  Clone ID: MRT4577_92259C.1.pep
TPKGAPLEELQIYIGRPSGFNRKICVGPTPCPFGEVLYSNFPRPGGVKSFIFFKTKMFCPPYFFFFPVLGKKCFPPPFWDKKVFLLLFPV

SEQ ID NO: 360831 - protein, 288 aa, Zea mays
  Clone ID: MRT4577_9225C.1.pep
MEGKEEDVRLGANRYSERQPIGTAAQGTEEKDYKEPPPAPLFEAEELTSWSFYRAGIAEFVATFLFLYISILTVMGVSKSSSKCATVGIQGIAWSFGGMIFALVYCTAGISGGHINPAVTFGLFLARKLSLTRALFYMVMQCLGAICGAGVVKGFQEGLYMGAGGGANAVNPGYTKGDGLGAEIVGTFVLVYTVFSATDAKRSARDSHVPILAPLPIGFAVFLVHLATIPITGTGINPARSLGAAIVYNRSHAWNDHWIFWVGPFIGAALAAIYHVVIIRALPFKSRD

SEQ ID NO: 360832 - protein, 62 aa, Zea mays
  Clone ID: MRT4577_92260C.1.pep
LVGGLAGSTEQIWTFVKGWIIAQCYHNNNWAWGGTSGLFTKCRCMKWGALNDMVTRSGSFTC

SEQ ID NO: 360833 - protein, 89 aa, Zea mays
  unsure (1)..(89): unsure at all Xaa locations
  Clone ID: MRT4577_92261C.1.pep
MEPGLSIESGSAIRVAVLPVGGPIPPPRLREYAALVARHARIDLASLRTYYAEHQKSPFQHQPWETGCLRLKFVLGGCVPXPWEDLQGS

SEQ ID NO: 360834 - protein, 79 aa, Zea mays
  Clone ID: MRT4577_92262C.1.pep
PSGRMLVLGTLSRTPQPFMAQARGLLVLTFCSTSAPGYRWPHPVEKTRKSSALTTHLTCTSKAVICCMNSIGGTNSVVA

SEQ ID NO: 360835 - protein, 70 aa, Zea mays
  Clone ID: MRT4577_92263C.1.pep
SMVLLTPSWEIGRLNRPLKRGMYPFLLPHIKCYPCIPGHLITYVWGFATKMVSIYRGTRMSVENYRITHI

SEQ ID NO: 360836 - protein, 56 aa, Zea mays
  Clone ID: MRT4577_92264C.1.pep
EAIYSFQIAKQQHLLERILGWSSCPEVGLLCNTVQFLSSVYLCVIQFSFSVSQIAK

SEQ ID NO: 360837 - protein, 236 aa, Zea mays
  unsure (1)..(236): unsure at all Xaa locations
  Clone ID: MRT4577_92265C.1.pep
MAGNVRQPIDVASLERYIEAHVPEIRXPLDVKQFGYGQSNPTYQLTDKTGKKYVLRKKPPGQLLSKTAHKVDREYRIIHALENTDVPVPRALCLCQDEKVIGTDFYIMEFLDGRIFEDPVLPDVTPEDRTKMWHSAITTLAKFHRVSPSSVNLASYGKHSGFYTRQIATFNTISQSQASAKDKETGEPVGKIXIKTTWSPSSATTAPNXDRATFVHGDYKIDNVVFHKTEPRVIGI

SEQ ID NO: 360838 - protein, 576 aa, Zea mays
  Clone ID: MRT4577_92266C.1.pep
MYRAAASLASKARQAGSSSAARQVGSRLAWSRNYAAKDIKFGVEARALMLRGVEELADAVKVTMGPKGRNVVIEQSFGAPKVTKDGVTVAKSIEFKDRVKNVGASLVKQVANATNDTAGDGTTCATVLTKAIFTEGCKSVAAGMNAMDLRRGISMAVDAVVTNLKGMARMISTSEEIAQVGTISANGEREIGELIAKAMEKVGKEGVITIADGNTLYNELEVVEGMKLDRGYISPYFITNSKAQKCELEDPLILIHDKKVTNMHAVVKVLEMALKKQRPLLIVAEDVESEALGTLIINKLRAGIKVCAVKAPGFGENRKANLQDLAILTGGEVITEELGMNLENVEPHMLGSCKKVTVSKDDTVILDGAGDKKSIEERADQIRSAIENSTSDYDKEKLQERLAKLSGGVAVLKIGGASEAEVGEKKDRVTDALNATKAAVEEGIVPGGGVALLYASKELDKLQTANFDQKIGVQIIQNALKTPVHTIASNAGVEGAVVVGKLLEQGNTDLGYDAAKDEYVDMVKAGIIDPLKVIRTALVDAASVSSLMTTTESIIVEIPKEEAPAPAMGGMGGMDY

SEQ ID NO: 360839 - protein, 65 aa, Zea mays
  unsure (1)..(65): unsure at all Xaa locations
  Clone ID: MRT4577_92267C.1.pep
YDAAKDEYVDMVKAGIIDPLKVIRTALVDAASVSSLMTTTESIIVEIPXEEAPAPAMGGMGGMDY

SEQ ID NO: 360840 - protein, 153 aa, Zea mays
  unsure (1)..(153): unsure at all Xaa locations
  Clone ID: MRT4577_92268C.1.pep
PHPKNLGQPKFFPKPNPGGGKPGGGDQSPQGXGGPHXGKTSPIPQGPTFGPREKTPPGPQTHPIFPFGGNKGPLGEGXGPKDPXFGKRGGPKFPFGPKGEGWXKGGPPGGGESPXRPGXRAKTGGKKGPGPXKGGGTLKKLTPWKGGGPGAPF

SEQ ID NO: 360841 - protein, 577 aa, Zea mays
  Clone ID: MRT4577_92269C.1.pep
MYRAAASLASKARQAGNSLAARQVGSRLAWSRNYAAKDIKFGVEARALMLRGVEELADAVKVTMGPKGRNVVIEQSFGAPKVTKDGVTVAKSIEFKDRVKNVGASLVKQVANATNDTAGDGTTCATVLTKAIFTEGCKSVAAGMNAMDLRRGISMAVDAVVTNLKGMARMISTSEEIAQVGTISANGEREIGELIAKAMEKVGKEGVITIADGNTLYNELEVVEGMKLDRGYISPYFITNSKTQKCELEDPLILIHDKKVTNMHAVVKVLEMALKKQKPLLIVAEDVESEALGTLIINKLRAGIKVCAVKAPGFGENRKANLQDLAILTGGEVITEELGMNLENFEPHMLGTCKKVTVSKDDTVILDGAGDKKSIEERAEQIRSAIENSTSDYDKEKLQERLAKLSGGVAVLKIGGASEAEVGEKKDRVTDALNATKAAVEEGIVPGGGVALLYASKELDKLQTANFDQKIGVQIIQNALKTPVHTIASNAGVEGAVVVGKLLEQENTDLGYDAAKGEYVDMVKTGIIDPLKVIRTALVDAASVSSLMTTTESIIVEIPKEEAPAPAMGGGMGGMDY

SEQ ID NO: 360842 - protein, 52 aa, Zea mays
  Clone ID: MRT4577_9226C.1.pep
VSLALLQADYSKGDALDALQLFPHCSRGMPMPHVAPIEKLLNCNPLKKPEPS

SEQ ID NO: 360843 - protein, 74 aa, Zea mays
  Clone ID: MRT4577_92270C.1.pep
ELKLSAVGQIRKCVSQSCQSQEMCSTCEKRAHTVGRLEKKDPEAGESSGGLLGRKGCTHTEHGALKISLSDHCT

SEQ ID NO: 360844 - protein, 114 aa, Zea mays
  Clone ID: MRT4577_92271C.1.pep
GMYDSLKPVLLTEKLQDNFFASLALGWMITNGASLASYPLDTIRRRMMMTSGEAVKYKSSMDAFAQIVRNEGPKSLFKGAGANVLRAIAGAGALAGYDQLQLIFFGKKYGSGGA

SEQ ID NO: 360845 - protein, 101 aa, Zea mays
  Clone ID: MRT4577_92272C.1.pep
QHPTVTEISIACWAILRFHHEQQQSLQSQASWNRLDISCRLSQRNTFFWGGLQIPKYCSVLMQKPQCSPPPCCKLTNTQSAPEGPLTLTDACSPFPTTIPS

SEQ ID NO: 360846 - protein, 103 aa, Zea mays
  unsure (1)..(103): unsure at all Xaa locations
  Clone ID: MRT4577_92273C.1.pep
MVGLQYDLVGNPLGAVRATFVRTVVAVAVQFGGADPVAVVXGEDWGAGDLXRSFLFEQDGFGKVPVLDLXNFGLIKPETLVRFWGMVEDMLGNEFYIGGFKDG

SEQ ID NO: 360847 - protein, 78 aa, Zea mays
  unsure (1)..(78): unsure at all Xaa locations
  Clone ID: MRT4577_92274C.1.pep
RNGRDNNWCNFWQPEHSSNIIQVRPYMVGGCWPPSESMNTQMFHVWYCASCSVNRLQRPGGFGRFFYPPKKKKKKKXK

SEQ ID NO: 360848 - protein, 94 aa, Zea mays
  Clone ID: MRT4577_92275C.1.pep
VKVAKALTVVLGSVLERSAAGIRRVLYRVHIRRSWDKLLRAVERVLCRSGRQHAHIRDQRHCRRRRQLHRHLSSVYRTCVYTVAPPLLLSAAPL

SEQ ID NO: 360849 - protein, 71 aa, Zea mays
  Clone ID: MRT4577_92276C.1.pep
RADPRVRLVLLLILLHHVFPYEITSKRRHLKERKGSSICTLHTTLLYTPENKRTTSQSHRRQSSARSYSNN

SEQ ID NO: 360850 - protein, 192 aa, Zea mays
  Clone ID: MRT4577_92277C.1.pep
MAATVMASMSPLASATPGARRAFPVRLLQASTLAPRRRALAVRAQSDDAEPKEEVASSSPSPSATPAPKSKAAATASPGLWDALAFSGPAPERINGRLAMVGFVSALAVEASRGGGLLSQAGSGSGLAWFAATAAVLSVASLVPLLRGDSAEARSGAVMSADAELWNGRFAMLGLVALAFTEYLTGAPFINA

SEQ ID NO: 360851 - protein, 129 aa, Zea mays
  Clone ID: MRT4577_92278C.1.pep
VECDWSAKRSFYRIFPQKGEIWAMLKNWRITLNTTDIDKCEPRMVEILSEYSDENGVNVCSLARVKGCFTFFHRVAVEDFCLTRWIPRSEMLSFSHRVPAFVIVDIKDHDIPQGSWYLEPSALPTRIIH

SEQ ID NO: 360852 - protein, 381 aa, Zea mays
  unsure (1)..(381): unsure at all Xaa locations
  Clone ID: MRT4577_92279C.1.pep
MGSKPTNSNTPASTAAAASASXSAAAAAPSDASATKAPAASAANSASPSESAXSAAPSTQNSAGGYQDRINMANFQNMMYPSSAAQGRVQSPQLKASSGRGTPSSTATTTPAATPPNLIMMKNSSLHQQQAKVPMQALYTPGHQSQTSLSSSKVGPSLTNLSTGGGDLSRSSNAPVASGSPSNSVSKSTGGSPPATGNAKGVQQPVQLPSPQQQSAKNSASTSGSRTTPTNHFSMAMPSILGQQPNASPGSNPGSKQHSHTQPASMKQQPFPQGHFFISNTYAPPAPGAGGAAALGLYQKRPGDKTQQQQQQQASHQQSAMSAAGGNNVKALHPSSGGFMHLAAQSAGGMAHTHVSAGQLTFGTMPTPLKPSSDQKPAAGK

SEQ ID NO: 360853 - protein, 67 aa, Zea mays
  Clone ID: MRT4577_9227C.1.pep
FLVHLATIPITGTGINPARSLGAAIVYNRSHAWNDHWIFWVGPFIGAALAAIYHVVIIRALPFKSRD

SEQ ID NO: 360854 - protein, 90 aa, Zea mays
  unsure (1)..(90): unsure at all Xaa locations
  Clone ID: MRT4577_92280C.1.pep
ANCYEEVKDRCTLAEKLGGSAVISLEGKPLXEPLLAPCLEHLXSPTPALGGCRLPPSCQTGRAGGIPAGGGQSLHPSCQTDPPPPGFYFS

SEQ ID NO: 360855 - protein, 57 aa, Zea mays
  Clone ID: MRT4577_92281C.1.pep
QMQIKSGGTLLGLAVLSGGTYKVAHYKGAHQLGLSAHGPERSAPFNGGGRTTGTKLK

SEQ ID NO: 360856 - protein, 54 aa, Zea mays
  unsure (1)..(54): unsure at all Xaa locations
  Clone ID: MRT4577_92282C.1.pep
DPKKPDHGYLPGIGIRNTLFVLAGTNFLGMLKSVFVPESKGMLLXEISKENVDY

SEQ ID NO: 360857 - protein, 248 aa, Zea mays
  Clone ID: MRT4577_92283C.1.pep
PAGTAKNDRLKLPFHADHIGSLIRPEALSRTQEQADAGQVSAEQPVATQKAAIADIVKKQQEHGVRAISSGEFDRKYYFGGFFERLGGFKEYEPVPWDLVRLSAPPIAALKKAGKQYPMAAICESKIEYKQSPYLENWKMLRECVPREQWAECKFTMPPPCYFHLRLASGKCYSPEAYSNDEDFFADLAKAYRQEFQTLYAEGVRNIQIDDPTLAYFCSDEMLQSLRGLRVLTPDKLVDTYLKAHNDA

SEQ ID NO: 360858 - protein, 218 aa, Zea mays
  unsure (1)..(218): unsure at all Xaa locations
  Clone ID: MRT4577_92284C.1.pep
TQTETFTLQDEIYQLLLRXINIFYSYKDMCLGMFISHSSDAVHKMMLEMLTXMSKLDARXELFLHIIADNEHQTPPPSLDSVIVMTKGELVHNLLTIARLWINECMKALAACADVPMIAKIGALFYSGXLVRERIVVTTKHNDYHEYAWESHDGGSFTDNRDTIGEHVDGCTKMNLYLKDDLMEYLEERRIKDLVNNHSEYIGYPISLWTDNTPTSNF

SEQ ID NO: 360859 - protein, 68 aa, Zea mays
  Clone ID: MRT4577_92285C.1.pep
ARHPLLLRGRCQGLQQPPPQTPFVTPPRPTIQPRRRERAVHVLPPQPHLRVHHGLRQLWRRHPRPLHA

SEQ ID NO: 360860 - protein, 66 aa, Zea mays
  unsure (1)..(66): unsure at all Xaa locations
  Clone ID: MRT4577_92286C.1.pep
GGGYKTLIPYLYRGKLSLHGAYAQHLVECLYLHRAFNDIHASFKWLXANGSPNVCLTGYCIGGALS

SEQ ID NO: 360861 - protein, 85 aa, Zea mays
  unsure (1)..(85): unsure at all Xaa locations
  Clone ID: MRT4577_92287C.1.pep
LRYNLLFSVRFLTGHSRNGGTDPLYVAGNAADPDTTLVVYMGLSTLASLAPKLMKHGLPPDTPAVAVXRGTTPHQLMLFAXVKDL

SEQ ID NO: 360862 - protein, 71 aa, Zea mays
  Clone ID: MRT4577_92288C.1.pep
WHLCNPIIYEAVDTSCHSAESLLKRIAVLAAFSIFKLFTYSSTKFTDEAILHSLVAMSACVFIRGPRPPSI

SEQ ID NO: 360863 - protein, 56 aa, Zea mays
  Clone ID: MRT4577_92289C.1.pep
KFCSSLQTKTGLLQICGSGLCTKHSAHTTCQLTIKLPSIRALPILSKQTSSVPLQT

SEQ ID NO: 360864 - protein, 289 aa, Zea mays
  unsure (1)..(289): unsure at all Xaa locations
  Clone ID: MRT4577_9228C.1.pep
MEGKEEDVRLGANRYSERQPIGTAAQGTEEKDYKEPPPAPLFEAEELTSWSFYRAGIAEFVATFLFLYISILTVMGVSKSSSKCATVGIQGIAWSFGGMIFALVYCTAGISGGHINPAVTFGLFLARKLSLTRALFYMVMQCLGAICGAGVVKGFQEGLYMGAGGGANAVNPGYTKGDGLGAEIVGTFVLVYTVFSATDAKRSARDSHVPILAPLPIGFAVFLVHLRTXIPITGTGINPARSLGAAIVYNRSHAWNDHWIFWVGPFIGAALAAIYHVVIIRALPFKSRD

SEQ ID NO: 360865 - protein, 51 aa, Zea mays
  Clone ID: MRT4577_92290C.1.pep
MCVMMVQFFLNVVSVVLLIQDCRIAVSTRIGQDHPANPPPPMCTLDRSQNR

SEQ ID NO: 360866 - protein, 87 aa, Zea mays
  unsure (1)..(87): unsure at all Xaa locations
  Clone ID: MRT4577_92291C.1.pep
EQPQVPCTWTGSTWEAFSGLWDFLKRIRASGTLMCLETWYYQVLVLIASLLPNPELALDALSVCMTVNXXVLMIAAGYNAAAIVRVS

SEQ ID NO: 360867 - protein, 204 aa, Zea mays
  Clone ID: MRT4577_92292C.1.pep
MGDIPFSLMHDVFVLVFFLFNLTRIVKCSARRKGKKKKDHLKDSARDMAFSSSCLLPQCYLLLSEGLSMMLAVLRNESRSFQLPSIFNTEQERFMQHFDLLLKARVPEHISFYSFKESSSRAGMSDLVKYNFFKEIQKIVPSLRGSFASEPEKLAEVRRIEQVAEHNRIALNIISQVGAGDPSLRVTRPRTRGPHFAVAVVKRS

SEQ ID NO: 360868 - protein, 97 aa, Zea mays
  Clone ID: MRT4577_92293C.1.pep
GKSLMQIKDAISGHTGKNQVSGILLMQYMRIPFDCEDKLWTQILVESVSITEKAHHSPSLPHSSLLPRHNPAMAFCAAAASTATACASTAKIVLGSE

SEQ ID NO: 360869 - protein, 191 aa, Zea mays
  unsure (1)..(191): unsure at all Xaa locations
  Clone ID: MRT4577_92294C.1.pep
NKKAKEKKKKKKIQIKKERKNEKKKKKKKYKXKKSKKKNKKXKKLKKKKHKKKKKKRXKKKTNKKKKKKKXKKKKKKKKKKKRQKKKXKKKKKKKKNIKKKKKKKNIKKKKKKKKKRKYKEKIKKKKKNKKKERQXEIKKQQKKKKKKIEKDNQYQKQNKHKKKRHXRNIKKKKKKQHTINKNKKQKTKHH

SEQ ID NO: 360870 - protein, 235 aa, Zea mays
  Clone ID: MRT4577_92295C.1.pep
MGRGKVELKKIENPTNRQVTFSKRRMGLFKKANELAILCDAQIGVIIFSGSGRMYEYSSPPWRIASVFDRYLKAPSTRFEEMDIQQKIVQEMTRMKDERNRLRMIMAQYMAEDLASFSAQDLSNLEQQIEFSLYKVRLRKQELLDQQLLEIHQREMHMPAEQGGYLCLMNPAAAIASGQHQQAGEMVGINPRPFPWWDVGASGSGSGSQSQQQLLHGRDAAESSMTALGLSQLHG

SEQ ID NO: 360871 - protein, 77 aa, Zea mays
  Clone ID: MRT4577_92296C.1.pep
MGRGKVELKKIENPTNRQVTFSKRRMGLFKKANELAILCDAQIRVIIFSGSGRMYEYSSPPWRCVKHYLFIYLCIYF

SEQ ID NO: 360872 - protein, 49 aa, Zea mays
  Clone ID: MRT4577_92297C.1.pep
QIHDMVLDRKTKRAGFLTEATRQHECLIWERPACFPCWTHTETWSFIFS

SEQ ID NO: 360873 - protein, 80 aa, Zea mays
  Clone ID: MRT4577_92298C.1.pep
PLSNLKTKFKILAAGFLSWKRKFLPPPKNGEKKAPVVFWPLKILGRFPKEICPRFFSPKNPFPGGPVFQGLGGPKKFVFP

SEQ ID NO: 360874 - protein, 144 aa, Zea mays
  Clone ID: MRT4577_92299C.1.pep
VDHLTREYKAHRLPLDLDEVELLLEAEGLFQRGLHQLDSDPLVPIKGAPDLISRTQSLVDQQLEALVDPPNTGLGIKPDPQLIGHFLGQGMDILLDPERLLRRLQQHPGERQELTGLVDELTTLGEGAHIADLHSIDELCEALL

SEQ ID NO: 360875 - protein, 60 aa, Zea mays
  Clone ID: MRT4577_9229C.1.pep
SCVNVVVVRGTFESIGEAPVVNIRLQDAQSDPLHPDRQDNRARTSPSGSARRSGRVGGRV

SEQ ID NO: 360876 - protein, 40 aa, Zea mays
  unsure (1)..(40): unsure at all Xaa locations
  Clone ID: MRT4577_922C.1.pep
AVSYKKSSSRVALLMISCSARRXARLGIQVVIRMLSCHLP

SEQ ID NO: 360877 - protein, 69 aa, Zea mays
  unsure (1)..(69): unsure at all Xaa locations
  Clone ID: MRT4577_92300C.1.pep
SYFICFFLTCKWCCSFYILXXKEXXKTRAPRWTSHFGXRKGXXXXNKXXQKTHXQXXHRKXGRRTKXXR

SEQ ID NO: 360878 - protein, 101 aa, Zea mays
  Clone ID: MRT4577_92301C.1.pep
LACTGISLNILFTTVAYSPGRDLIYNGRANVLENLMHRIGYTPSNLLNNDVSIILRPLCMSDIHEANNYVDPCFIKFNLKRCECRLTLYNLRNKLMADLML

SEQ ID NO: 360879 - protein, 63 aa, Zea mays
  Clone ID: MRT4577_92302C.1.pep
VHPSLAVMRDLVEHAWLLEGAVVHFSILLLRPSRVTRLSDACIACRYRCHCGGPTCHESTMSI

SEQ ID NO: 360880 - protein, 110 aa, Zea mays
  Clone ID: MRT4577_92303C.1.pep
LISTNVGALQTCCFFGDHPSQKMRELNTNQPARQHSVLLLARRFSPFSLPSREQRRQARPGCASGHHPLPLLAPRAGPRRQPVETAGPRARLWRYRYQRPPACGHSGHPT

SEQ ID NO: 360881 - protein, 50 aa, Zea mays
  Clone ID: MRT4577_92304C.1.pep
LAYFTDDARPGFRPMVLSCVVCPGLVLSEPQPSLLSKAPKKKGRPPTRGL

SEQ ID NO: 360882 - protein, 267 aa, Zea mays
  unsure (1)..(267): unsure at all Xaa locations
  Clone ID: MRT4577_92305C.1.pep
YRLWPPSTSASTASREESPARRPAPAPAKPPGDPRQPARAASRCSRRDLLIAVKKMETKFSELLDSAERTIGLHFSYDINLTLSAQRLHDLGDEYRALPLWRQAEPRFLWNGYLLEPLIENKLNQYLLPVIQGSFQNIQAEVGSEMVNVTLIARRCTRRIGTRMWRRGADAEGYAANFVESEQIMQSKGFTASYVQVRGSMPFLWEQIVDLTYKPSFDIVRQEEAPRVLERHFHDLQKXYGAVLAVDLSYQXGGEGRLRERCAKSIE

SEQ ID NO: 360883 - protein, 239 aa, Zea mays
  Clone ID: MRT4577_92306C.1.pep
MDETTDASTSLKLHTRLRLWEFPDCYIFEPIDGLADLYLSVSRASGTMNLVQDLPPRGPTTKHKVQTVYGVIGVLKLAVGSYFVVITDRDCVGSYFGHAIFKVTGLKVLPCNSAHNTTSAEQKKMETEFSELLDAAERTIGLHFSYDINLTLSAQRLHDLGDEYRALPLWRQAEPRFLWNAYLLEPLIENKLNQYLLPVIQGSFQNIQAEVGSEKVNVILIARRCTRRIGTRMWRRELD

SEQ ID NO: 360884 - protein, 139 aa, Zea mays
  Clone ID: MRT4577_92307C.1.pep
SGTPALKGDFVRYGKRTTQGILNDLRNALARYYLNNFVDGTKQDAMDLLQGHNMTSVSRDMAVPSKSGLLESYASFRLAFALVMGALVFMMMPLRQARNDARHLMLSFLWAGLCIGISHFVRANGRTFTNRPRFHKSRH

SEQ ID NO: 360885 - protein, 130 aa, Zea mays
  Clone ID: MRT4577_92308C.1.pep
LSQPSPPLSLPSLFSLPSPLLPSLASLLSVPTEQQRLSPGRAALPRCACTDPSATATPGSGSMPRGFYAARGGSSHSPICKRVRSGGRAGPREGAAGVRSGEAGTRAMHNAPAVTSSPLWHQLLASHLPC

SEQ ID NO: 360886 - protein, 334 aa, Zea mays
  unsure (1)..(334): unsure at all Xaa locations
  Clone ID: MRT4577_92309C.1.pep
MAETNDASPSSKLHTRLRLWEFPDCYVFEPIDGLADLYLSVSRTSGTMNLVQDLPSRGSTTKHKVQTVYGVIGVLKLAVGSYFVVITDRDCVGSYFGHAIFKVTGLKILPCNNAHNTTSTDQKKMETKFSELLDSAERTIGLHFSYDINLTLSAQRLHDLGDEYRALPLWRQAEPRFLWNGYLLEPLIENKLNQYLLPVIQGSFQNIQAEVGSEMVNVTLIARRCTRRIGTRMWRRGADAEGYAANFVESEQIMQSKGFTASYVQVRGSMPFLWEQIVDLTYKPSFDIVRQEEAPRVLERHFHDLQKKYGAVLAVDLVIQVXGEGRLRERYANL

SEQ ID NO: 360887 - protein, 172 aa, Zea mays
  unsure (1)..(172): unsure at all Xaa locations
  Clone ID: MRT4577_9230C.1.pep
KLDAMATLVRPPALHVRAVSGGGNKDRVAPQRPWWGGNKPISPPQSGGSGARGGAAGGGVPLDQVLGVLRRDGEFVQAAVGAPLRDVFWLRFLEKKQRKQQQPKPKHKPFRQQQEEEEVVXGGTKSPPAFPPPSYPXGLSCVELMAADFQALKVYAGSARHSLARRFLGSNS

SEQ ID NO: 360888 - protein, 539 aa, Zea mays
  Clone ID: MRT4577_92310C.1.pep
MEEAAPAAVMERERLTAEMAFRGADGARRDGGDPAPSIVIKIRRRLPDFARNIKLKYVKLGIRHGGSPTSLLPALCVPAVAAAAYSFVRLDVIYYSVDLLTCVAWLGTALLLLTVYYLKRPRPVYLVEFACYKPEERLKISKEGFLYMTESTGCFNAEALEFQTKITKRSGLGDRTYLPPGIQARPPRLSMEEARAEAEAVMFGCLDSLFSATGIDPRRDVRVLIVNCSLFNPTPSLASMVVHRYKMREDVKSFNLGGMGCSAGLIAVDLARDMLQANPGCYAVVVSTENITLNWYFGNDRSMLLSNCIFRMGGAAALLSNRRADAGRAKYRLLHTVRTHKGAADECYGCVYQREDGTGRVGVSLARELMAVAGDALKTNITTLGPLVLPISEQLKFLKSLVLRRALRSRGVRPYIPDFRRAFEHFCVHAGGRAVLEEVQRSLGLRDADMEPSRCTLHRFGNTSSSSLWYELAYAEAKGRVRRGHRVWQIGFGSGFKCNSAVWRALRDVPPVHADGAGGGSNCNPWVDSIQSYPPKEYI

SEQ ID NO: 360889 - protein, 94 aa, Zea mays
  unsure (1)..(94): unsure at all Xaa locations
  Clone ID: MRT4577_92311C.1.pep
MVRRPNYPEHSRFASLVLLLVALFYCLLVYADVSTLLNPTVNPQDSSFESLESEAGIDFGEKNXAXCCRGIENLELWGAAVKWRSDFKFNSSVE

SEQ ID NO: 360890 - protein, 60 aa, Zea mays
  Clone ID: MRT4577_92312C.1.pep
RSASDLFTHGATGSYLEEVDVALAGGTSQRGLLRCPRAPSEDVHVHPSWATHSDMLPHGD

SEQ ID NO: 360891 - protein, 96 aa, Zea mays
  unsure (1)..(96): unsure at all Xaa locations
  Clone ID: MRT4577_92313C.1.pep
MGKIKIGINGFGRIGRLVARVALQSEDVELVAVNDPFITTDYMTYMFKYDTEHXQWKHSYIAFKDFKTLLFGEKPVTRFVHYGTPKEFPWCEGCAV

SEQ ID NO: 360892 - protein, 598 aa, Zea mays
  Clone ID: MRT4577_92314C.1.pep
MAETNDASPSSKLHTRLRLWEFPDCYVFEPIDGLADLYLSVSRTSGTMNLVQDLPSRGSTTKHKVQTVYGVIGVLKLAVGSYFVVITDRDCVGSYFGHAIFKVTGLKILPCNNAHNTTSTDQKKMETKFSELLDSAERTIGLHFSYDINLTLSAQRLHDLGDEYRALPLWRQAEPRFLWNAYLLEPLIENKLNQYLLPVIQGSFQNIQAEVGSEKVNVILIARRCTRRIGTRMWRRGADAEGFAANFVESEQIMQSKGFTASYVQVRGSMPFLWEQIVDLTYKPSFDIVRQEDAPSVLERHFHDLQKKYGAVLAVDLVNTGGGEGRLRERYAKSIEPILSEDLRYVHFDFHRICGHIHFERLSQLYDQIKDYLQKHKYFLINDKGEKIEEQTGTTRTNCIDCLDRTNVTQSMIGRKILESQLQRIGVLSAGDTISKHPAFDTNYKILWANHGDAISIQYSGTPALKGDFVRYGKRTTQGILNDLRNALARYYLNNFVDGTKQDAMDLLQGHNMTSVSRDMAVPSKSGLLESYASFRLAFALVMGALVFMMMSLRQARNDARHLMLSLLWAGLCIGISHFVRANGRTFTNQPRFHKSRH

SEQ ID NO: 360893 - protein, 548 aa, Zea mays
  Clone ID: MRT4577_92315C.1.pep
MEEAAPAAVMERERLTAEMAFRGADGARRDGGDPAPSIVIKIRRRLPDFARNIKLKYVKLGIRHGGSPTSLLPALCVPAVAAAAYSFVRLDVIYYSVDLLTCVAWLGTALLLLTVYYLKRPRPVYLVEFACYKPEERLKISKSAFLEMTESTGSFNEAALDFQTKITSRSALGDETYLPPGVQARPPRLNMAEARMEAEAVMFGCLDALFESTGIDPRRDVRILIVNCSLFNPTPSLASMIINHYRMREDVKSFNLGGMGCSAGLIAVDLAKDMLQANPGSYAVVLSTENITLNWYFGNDRSMLLSNCIFRMGGAAALLSNRRADAGRAKYRLLHTVRTHKGATDECFNCVYQREDEAGKAGVSLARELMAVAGDALKTNITTLGPLVLPLSEQLKFLRSLMMRRVFRVGGVRPYIPDFRRAFEHFCVHAGGRAVLEEVQRSLSLQDTDMEPSKCSLHRFGNTSSSSLWYELAYAEAKGRVRRGHRVWQIGFGSGFKCNSAVWRALRDVPPLSSSTGAAAGPPGRKGAQSCCNPWVDDVDRYPPKAYV

SEQ ID NO: 360894 - protein, 91 aa, Zea mays
  unsure (1)..(91): unsure at all Xaa locations
  Clone ID: MRT4577_92316C.1.pep
PNXHLCLNVKNLTVKDLKREYVASNSKDDTAKDAASYTSQVIIMNHPGQIGNSYAPVLDWHTSHIAVKYAELVTKIDRRSGNELEKEPHFS

SEQ ID NO: 360895 - protein, 26 aa, Zea mays
  Clone ID: MRT4577_92317C.1.pep
EAVCSLAKLESTGNSQAHCLKTSRIG

SEQ ID NO: 360896 - protein, 59 aa, Zea mays
  Clone ID: MRT4577_92318C.1.pep
RDVVTLKIILYRQTRTVRGFDFITLLTNDDIRNAIEGMNGIELDGRIINANQVQFLRGR

SEQ ID NO: 360897 - protein, 79 aa, Zea mays
  Clone ID: MRT4577_92319C.1.pep
MTPEEILKKFVSGCMMVKEARYVDDALNGPLPIYEPQPIALKATSSKEALPSKEQEKYGKREKKKVYKKAKGEAHLGKE

SEQ ID NO: 360898 - protein, 236 aa, Zea mays
  Clone ID: MRT4577_9231C.1.pep
MCGGAILSGFIPPSGVAAAAAAAKKQQQQQQRCRVTADLLWPGPGSKGAPPKDVQGDRAVKKRGRKNQYRGIRQRPWGKWAAEIRDPNKGVRVWLGTYNTAEEAARAYDAEARKIRGKKAKVNFPDDATGTRHRPTTDEIFNNLKNDDNNNNDDLFAMFAFGDNKKKVPAAKPAAAEGGSGSGSFLVPAPAVAVVPGNKRRSSATNTMLSVSDDQRSNSYGSGSSDLVGSWSWDDD

SEQ ID NO: 360899 - protein, 203 aa, Zea mays
  unsure (1)..(203): unsure at all Xaa locations
  Clone ID: MRT4577_92320C.1.pep
AFKKWAPSFLNLATLPGYCVSGTIGHKLMCGKPTRVDYEDTHIDVRCEIHQLAFSPHTDSKGIMDLTEYLSPKHVMXLVHGEKPQMAFLKERIESELGMPCYYPGNNESVSIPTTQNLKMSATERFFXTCLSEEIGSDEAAGEGVLLMQKHKSPKILCEDELLEVLGMGRHLVQFEPMVSRIVAAVESELQRAKAADLDNDGK

SEQ ID NO: 360900 - protein, 284 aa, Zea mays
  Clone ID: MRT4577_92321C.1.pep
EPHKTWEPSVEEIEGEYWRIVIGPADEVEVDYGADLDTATFGSGFVKLSSSDGNKQDPYGVSCWNLNNLPRLPGSVISFEEDDISGVVVPWLYVGMCFSSFCWHVEDHFLYSLNYMHFGEPKVWYGVPGGEAVKLEESMRKNLPKLFEEQPDLLHELVTQLSPSVLKAEGVSVYRAVQKSGEFVLTLPRAYHSGFNCGFNCAEAVNVAPVDWLPHGQCAVELYRDQHRKTSISHDKLLLKAAKEAIRQLWMNVLNCRSGKGEYRWLNTCGKDGVLTSAIKVVAH

SEQ ID NO: 360901 - protein, 400 aa, Zea mays
  Clone ID: MRT4577_92322C.1.pep
MAIECLVLGAGQEVGKSCVVVTIGGKRVMFDCGMHMGYHDDRHYPDFARALAAWGAPDFTTAISCVVITHFHMDHIGALPYFTEVCGYHGPIYMTYPAKALAPFMLEDYRKVTMGQRGEEKQYSYEDILRCMKKVTPMDLKQTVQVDKDLVIRAYYAGHVIGAAMIYAKVGDAAMVYTGDYNMTPDRHLGAAQIDRLKLDVLITESTYAKSIRDSKPAREREFLKAVHKCVSGGGKVLIPTFALGRAQELCMLLDDYWERMGLKVPIYFSAGLTIQANVYYKMLIGWTSQKIKDSHTVHNPFDFKHVCHFERSFINNPGPCVLFATPGMITGGFSLEAFKKWAPSEKNLVTLPGYCVSGTIGHKLMCGKPTRVDYEDTHIDVRCQVDFHVISYLAKNVQL

SEQ ID NO: 360902 - protein, 151 aa, Zea mays
  unsure (1)..(151): unsure at all Xaa locations
  Clone ID: MRT4577_92323C.1.pep
SACEGIIIEVDRLPRPPRYQLSSFRLSPKXSTIXLTHSTVGXGRSGVVTREKWGKNIHPAGLRWSTGDAYDRGRRLVMSRESEAAPCTGRIARAGAGDTDAAPLSRRVGGWAKVGKPLAARLSSPHPHTRAGGVLAGRRVLIRDPRGSKAE

SEQ ID NO: 360903 - protein, 84 aa, Zea mays
  Clone ID: MRT4577_92324C.1.pep
CCLKSTDSRPWAQRGSPCDFPVLLELGVTRQRLQMPVYSIIWFTLGIGDTSKLWEILHLQWLGLVARIPLRTSLEYVPDVPTTG

SEQ ID NO: 360904 - protein, 64 aa, Zea mays
  Clone ID: MRT4577_92325C.1.pep
EEKYTWKLYSERLMTLTGVYGFWKYVSNLERRETRRYLEMLYALKYRTMASTVPLAVEGEPSSK

SEQ ID NO: 360905 - protein, 245 aa, Zea mays
  unsure (1)..(245): unsure at all Xaa locations
  Clone ID: MRT4577_92326C.1.pep
MFRAASLMKRQSVEAALMEINRILGFKLVLECLELRFCCYLDPSTSATVVXVVEDALRCPSDRLRKGQALNNLGSVYVDCGKLDLAAECYINALKIGHTRAHQGLARVHFLRNNRAGAYDEMTKLIEKARNNAXSAYEKRSEYCDRELTKTDLQMVTKLDPLRVYPYRYRAAVLMDNHKEKEAIAELTKAIAFKADLNLLHLRAAFHEHVGDVSSALQDCRAALSVDPNHQEMLELHHRVNSQEP

SEQ ID NO: 360906 - protein, 52 aa, Zea mays
  Clone ID: MRT4577_92327C.1.pep
MGEQRMVEAFVKKKKKKKKKKKKKKKKKKKKKKKKKKKKKKKKKKKGGAVFR

SEQ ID NO: 360907 - protein, 632 aa, Zea mays
  Clone ID: MRT4577_92328C.1.pep
MLDFANKFCCKGLKDACERKLASFISSRQDAIYFMECALELGCSILAASCLQVLLNELPECLNDEQVVRIFSSANKAQRLTMVGNASFSLYCLLSEVSVSTNPTSDVTVSFLEKLVESASDSRQKQLALHQLACTRFLRKDYPESECLFNAAFSAGHLYSLVGLARLASLRGNKHFALKLLDSVMSSRWPLGWMYQERALYLDGDNKLENLNKATELDPTLTYPYMFRAASLMKRQSVEAALMEINRILGFKLVLECLELRFCCYLALEDYRAALCDVQAILTLAPDYRMIGGRVAGKQLRMLVLENVEQWTAADCWMQLYDRWSSVDDIGSLSVIYQMLESDTAKGVLYFRQSLLLLRLNCPEAAMRSLQLAREHAASDHERLVYEGWILYDTGHCEEGLQKAEASIAIQRSFEAFFLKAYALADSSLDPSTSATVVSLLEDALRCPSDRLRKGQALNNLGSVYVDCGKLDLAAECYINALKIGHTRAHQGLARVHFLRNNRAGAYDEMTKLIEKARNNASAYEKRSEYCERELTKTDLQMVTKLDPLRVYPYRYRAAVLMDNHKEKEAIAELTRAIAFKADLNLLHLRAAFHEHIGDISSALRDCRAALLVDPNHQEMLELHHRVNSQEP

SEQ ID NO: 360908 - protein, 76 aa, Zea mays
  unsure (1)..(76): unsure at all Xaa locations
  Clone ID: MRT4577_92329C.1.pep
VFPHYGFVKGDFLXFKGSCVGPKKRVFALRRSLFKHTSRLALGXIRFRFLAPLSNFGAGCFRTPVXKQGFFGKFKG

SEQ ID NO: 360909 - protein, 64 aa, Zea mays
  Clone ID: MRT4577_9232C.1.pep
YERRFHRCPRLTSASIKIYPMNLKPRPLPVSLLATMAHAVCLLRGLLALKFPAPPVAPPRRPRE

SEQ ID NO: 360910 - protein, 71 aa, Zea mays
  Clone ID: MRT4577_92330C.1.pep
AECFYVHKRLADIQVGNACWELYCLEHCMHPAGQLPVDKTVRHKDYASRTFFSQTGAEKHFPRAIIADHGR

SEQ ID NO: 360911 - protein, 230 aa, Zea mays
  unsure (1)..(230): unsure at all Xaa locations
  Clone ID: MRT4577_92331C.1.pep
PAGTFRKLASSARGSSFPVTTNKSTHRGHHKYIATDGGGTTRTPMTIAAAVTAPTSAPVHVAPRHASPAVQPRAAPRREPSPLNPNAPAQALRSASPGGGGSSAATDGARAHIANLDKVLGKPPQVPRPANRQGQGQGQDGEQEPLNVRHGLLNALNLSFFVPMPGMRARTAADEHMSPRSLMHMQQLLSADSPGAFPRCTNPPCWRILHGEGGWEGLLXPVDSYLRGSS

SEQ ID NO: 360912 - protein, 49 aa, Zea mays
  Clone ID: MRT4577_92332C.1.pep
CHFKQKSFSISVTHSVNKNSYIGKIHSKKTWQITLWPVIGISFSTFPSH

SEQ ID NO: 360913 - protein, 170 aa, Zea mays
  unsure (1)..(170): unsure at all Xaa locations
  Clone ID: MRT4577_92333C.1.pep
MEGVEEKKKEVPAVPETLKKKRRNFAELKIKRLRKKFAQKMLRKARRKLIYEKAKHYHKEYRQMYRTEIRMARMARKAGNFYVPAEPKLAFVIRIRGINGVSPKVRKVLQLLRLRQIFNGTFVKLNKASINMLRIVEPYIAWGYPXLKSVNGLIYKRGYGTINEKRIALT

SEQ ID NO: 360914 - protein, 155 aa, Zea mays
  unsure (1)..(155): unsure at all Xaa locations
  Clone ID: MRT4577_92334C.1.pep
PAGLRGKGKRIKARSTSLPSTDYRAEQGRETAGDGDEPRPGGGGAGGHVRAAPVAGGAPPAPAGRGRGVLLVPRHRAVPRRRRRGRQEVALLISIILLVVQVEEEEGGAEGGGGAGGXGLWRKEIMMAERCQPLDFSGVFYYDPQCRPPRAGVRR

SEQ ID NO: 360915 - protein, 78 aa, Zea mays
  Clone ID: MRT4577_92335C.1.pep
LLGEKCSCTGKIRCKELVHGGRHEKKTTNHNAGSHTNRERLHDGMRSWRNQLHKRSWKSNGKKESTSLIQVKVPTPGP

SEQ ID NO: 360916 - protein, 41 aa, Zea mays
  unsure (1)..(41): unsure at all Xaa locations
  Clone ID: MRT4577_92336C.1.pep
CIIHXKKKKKKKKKKKKKKKKKKKKKKKKKKKKKKKKKKKG

SEQ ID NO: 360917 - protein, 245 aa, Zea mays
  Clone ID: MRT4577_92337C.1.pep
VDQGERGPRLRSVPLRGRKEGERGAMASGYRAEEEYDYLFKVVLIGDSGVGKSNLLSRFARDEFSLETRSTIGVEFATKTVQVDDKLVKAQIWDTAGQERYRAITSAYYRGAVGALVVYDVSRRTTFDNAERWLRELRDHTDANIVVMLVGNKADLRHLRAVSPEDAAAFAERHGTFSMETSALDATNVERAFAEVLRQIYHVVSRNALDIGDDPAAPPRGKTIDVSAAKDEVSPVNAGGCCSSA

SEQ ID NO: 360918 - protein, 202 aa, Zea mays
  Clone ID: MRT4577_92338C.1.pep
HSIAIAITKKRARFSDCCLRITFYSTPANFTCVSLACHSVSSTLSAIAADCLCAGLRYRAITSAYYRGAVGALVVYDVSRRTTFDNAERWLRELRDHTDANIVVMLVGNKADLRHLRAVSPEDAAAFAERHGTFSMETSALDATNVERAFAEVLRQIYHVVSRNALDIGDDPAAPPRGKTIDVSAAKDEVSPVNAGGCCSSA

SEQ ID NO: 360919 - protein, 79 aa, Zea mays
  Clone ID: MRT4577_92339C.1.pep
FFGRLLPLPVSPVQLSFGGSADLGFVPGLVWFLSSQASGSNSFAGEEIGAQGKRERIFSPGGTLSPKSPRGPVNTGYRA

SEQ ID NO: 360920 - protein, 113 aa, Zea mays; identical to SEQ ID NO: 244359
  Clone ID: MRT4577_9233C.1.pep

SEQ ID NO: 360921 - protein, 249 aa, Zea mays
  Clone ID: MRT4577_92340C.1.pep
MELTSSSRSVLSSCNRPVARALCRTAYPGARRKEKGIVCILSEEKEVVQRTIRRRAAFSLLLASPVLSVAFSAYGKSKTMNPYDERRLLQQNKKIQEANRAPEDFPNFIREGFQVKVVTPDNYITRASGLMYEDIKVGTGDSPKDGQQIIFHYVGYNEAGRRIDSTYIQGSPAKIRLGNGTLVPGFEEGIRDMKPGGKRRIIIPPELGPPVGPSTFFSAKQFEVFDVELLAVQDCQRRTIAFYSDVVCS

SEQ ID NO: 360922 - protein, 121 aa, Zea mays
  Clone ID: MRT4577_92341C.1.pep
KPRTPHAPRCSIRENGQAGRRHAWQAGRPRSAQKVNHYEMAVRPGGTRYRLYTLGGGQSEGKKKVRGEHTPPRKQTQSAEARPGGKFTIGFRFLVLFFFFFFFFFFFFFFFFLVGSLDGDI

SEQ ID NO: 360923 - protein, 71 aa, Zea mays
  Clone ID: MRT4577_92342C.1.pep
EYIELARKIGKFDEDRLALQMRLLGKSGIWDQSYMPRCVFEPNARCATMNEGRAEAFTDMFAVLDELFYKS

SEQ ID NO: 360924 - protein, 74 aa, Zea mays
  Clone ID: MRT4577_92343C.1.pep
MAMGSLAFATALVFVFVFAIAVPAVAAAAQAPAPAPTSDGTSIDQGIAYLLMIMALVLTYLIHPLDASAPYKLF

SEQ ID NO: 360925 - protein, 64 aa, Zea mays
  Clone ID: MRT4577_92344C.1.pep
RAAKALTFCKLWRSQKPECSYKKMIDFTRIRAYSVPSQRQVWRHDASEVEQKQDAKGSVRFIIC

SEQ ID NO: 360926 - protein, 91 aa, Zea mays
  unsure (1)..(91): unsure at all Xaa locations
  Clone ID: MRT4577_92345C.1.pep
STRSPSTRGSRWHRYRGSGTSSMDTTGGXRPRRXKENSKKGTRESRKKQNXSSPSXASGTFQDLSRVPKKYGRRNNNVSSEGSGSPTAKDT

SEQ ID NO: 360927 - protein, 141 aa, Zea mays
  Clone ID: MRT4577_92346C.1.pep
YSFTGPSSGGGGIAMRRAEEAAGPRDATQGWHRGAMRWCDALLVGVSWSAKTTPTWWESKHRGRVRSLQLQPKRATEQAGLLWAKARSHARSQQQRGRGRGSGGSSRSSERGRQKQNRTQLSFLAIQLGFLVPPHALPLSL

SEQ ID NO: 360928 - protein, 180 aa, Zea mays
  Clone ID: MRT4577_92347C.1.pep
MAMPPKPGDPPQRSPARSPNLNLPCPLPPVPGGAPPPPQQQPGAGLPPPRVGHHRRARSEVAFRFPDDLPGGGGGGFDEIGSEDDLFSTFMDMDKIAGADRDRAAETSSPPRPAKHRHSVSFDGFGMGAAAGGPGGQQDGGGGVFGEVMEAKKAMSSEQLSELAAIDPKRAKRIIANRQS

SEQ ID NO: 360929 - protein, 93 aa, Zea mays
  unsure (1)..(93): unsure at all Xaa locations
  Clone ID: MRT4577_92348C.1.pep
MFKSRWRGGXGQGRXKLQFHATQVPELGWEAMMXVVTPQDAGRPTARSEPAEVTEGACRWAAPVMEATKLPTGKDKIYQFLVYETGSSKRRCW

SEQ ID NO: 360930 - protein, 161 aa, Zea mays
  Clone ID: MRT4577_92349C.1.pep
ASSRRRPLPPAGSQATLRRLGDSDPVVDAPCHAAPPPSAWALVTCVQECSSPTPAYQVPTAGTPLRPPSSAHHQQQEAPHARTLDPWPRRAAPRPLLCAMDVDDICDIDNNVSHEDEIHGTGEDANGNNSEHMVEEDHVPAPIGSEVNVLCQQVIRGKTSP

SEQ ID NO: 360931 - protein, 128 aa, Zea mays
  Clone ID: MRT4577_9234C.1.pep
TFPLPPKFDTFTTLTHFLAWVSTQFRRPVRALQCDNCRVFDNHASHSFFLTHRVQLCLSCPYTSPQNDRVERMIGTTTNMIRCILFQASLPASYWAEALHIATHLVNHLPSKAVSHCTPHFALYGSTP

SEQ ID NO: 360932 - protein, 141 aa, Zea mays
  unsure (1)..(141): unsure at all Xaa locations
  Clone ID: MRT4577_92350C.1.pep
MAMPPKPGDPPQRSPARSPNLNLPCPLPPVPGGPPAPSAAGLPPPRASHHRRARSEVAFRFSDDLAGGVGGGFDEIGSEDDLFSTFMDMDKIAGADRDRTXETSSPXRPAKHRHSAFFDGFGMGGCRRWPGPAAGRRRRHV

SEQ ID NO: 360933 - protein, 75 aa, Zea mays
  Clone ID: MRT4577_92351C.1.pep
CLQAKGQPTTGWGEPRGTKNKSMSVCLVPRGPTGAPDRNLFGILKTHAGKPGTQHYQPIPPLGGACDKAASRPNP

SEQ ID NO: 360934 - protein, 485 aa, Zea mays
  Clone ID: MRT4577_92352C.1.pep
MAGSSAEQLLSRIAAGDGHGENSSYFDGWKAYDMNPFDLRHNRDGVIQMGLAENQLSLDLIEQWSVDHPEASICTAQGAPQFRRIANFQDYHGLPEFREAMAKFMGQVRGGKVTFDPDRVVMCGGATGAQDTLAFCLADPGDAYLVPTPYYPAFDRDCCWRSGVKLLPIECHSSNNFTLTREALVSAYDGARRQGVRVRGILITNPSNPLGTTMDRGTLAMLAAFATERRVHLICDEIYAGSVFARPGFVSIAEVIERDAPGCNRDLVHIAYSLSKDFGLPGFRVGIVYSYNDDVVACARKMSSFGLVSSQTQHFLAMMLADAEFMARFLAESARRLAARHDRFVAGLREVGIACLPGNAGLFSWMDLRGMLRERTHDAELELWRVIVHRVKLNVSPGTSFHCNEPGWFRVCYANMDDDTMEVALDRIRRFVRQHQHSKAKAERWAATRPLRLSLPRRGATTASHLAISSPLALLSPQSPMVHAS

SEQ ID NO: 360935 - protein, 89 aa, Zea mays
  Clone ID: MRT4577_92353C.1.pep
MAEEGKSDDLALIVYYNAAERANVEKIIKEIMVGISDDSDVNEDFDFREDVGDAEDRPLKPGHVVFVKSTMEKGHIKATKSNHFNDISI

SEQ ID NO: 360936 - protein, 48 aa, Zea mays
  unsure (1)..(48): unsure at all Xaa locations
  Clone ID: MRT4577_92354C.1.pep
FYLSKTPKXGFFSAPPQVKAWWEAISAPPGFQKTVSPIPLPPRPSSWG

SEQ ID NO: 360937 - protein, 91 aa, Zea mays
  unsure (1)..(91): unsure at all Xaa locations
  Clone ID: MRT4577_92355C.1.pep
PDKLYIYKVLHQVLPHIGISSKPMAIMNSFIEDIFEQLADESDKLAHYNHDPAVTSHEIQTWVSLVLMYKLAEHAVSXGTKAVTKFTSFLG

SEQ ID NO: 360938 - protein, 139 aa, Zea mays
  Clone ID: MRT4577_92356C.1.pep
PGEAREIRSSRSPTDPAAGRPPSPRRCLSIFVQFLFPIIKMSRGGSAGGGQSSLGYLFGSGEPPKPAVAPAASAPPVEKPSAAKTDATKQVAAGVTSQTNNYHRADGQNTGNFLTDRPSTKVHAAPGGGSSLGYLFGGN

SEQ ID NO: 360939 - protein, 91 aa, Zea mays
  unsure (1)..(91): unsure at all Xaa locations
  Clone ID: MRT4577_92357C.1.pep
GLNDQKGDGGGVKRGDRFSYKFFRRFLYMFGNVVMDIPHALVEEKLGSMKKGKGVKKRNDLTGTGLKEVGRQDQGLYLGAXGEAFPLEPKK

SEQ ID NO: 360940 - protein, 139 aa, Zea mays
  Clone ID: MRT4577_92358C.1.pep
GLVLGGSRSSRSPTDPRRSRRRSPSSPRRCLSFLFSIIKMSRGGSAGGGQSSLGYLFGSGEPPKPAVAPPAACAPPAEKPSAAKPDATKQVAAGVTSQTNNYHRADGQNTGNFLTDRPSTKVHAAPGGGSSLGYLFGGN

SEQ ID NO: 360941 - protein, 92 aa, Zea mays
  Clone ID: MRT4577_92359C.1.pep
LHLARGMPMHHNKKSNYLDPLELDSLLLSAMTGGHPNNLLNQHYASQSVETLSHPRKELLQDHKVLAGLHQRTLNEAKMKDYESYDSSATHV

SEQ ID NO: 360942 - protein, 83 aa, Zea mays
  Clone ID: MRT4577_9235C.1.pep
RIHDNVVICTVQQARPVPKGQGKPAASVVGICQASGISHGDGPSAWARVLCRPAHASRSNWLPVHPDAMACRSHRSVALKSLE

SEQ ID NO: 360943 - protein, 141 aa, Zea mays
  unsure (1)..(141): unsure at all Xaa locations
  Clone ID: MRT4577_92360C.1.pep
DPRPFLASERPLLVGRRGSVEFCDSPSSIRRIFVQFLFSIIKMSRGGSAGGGQSSLGYLFGSGEPPKPAVAPAASAPPVEKPSAAKTDAAKQVXAGVTSQTNNYHRADGQNTGNFLTDQCSSKFHAAVCDMYLLRYLSGYN

SEQ ID NO: 360944 - protein, 87 aa, Zea mays
  Clone ID: MRT4577_92361C.1.pep
QVKIDDTWDIKRLQDTILNTSGASASKCDLYCDNVRISTSNKHQSLTSMGITNDSEITVRSKLDGGFGAGCNLCGLHLGGGGRCTVL

SEQ ID NO: 360945 - protein, 44 aa, Zea mays
  Clone ID: MRT4577_92362C.1.pep
APQTNNYHRADGQNTGNFLTDRPSTKVHAAPGGGSSLGYLFGGN

SEQ ID NO: 360946 - protein, 192 aa, Zea mays
  unsure (1)..(192): unsure at all Xaa locations
  Clone ID: MRT4577_92363C.1.pep
MSAEPDHTKPKPDLSKDPSGAEPRGDDEIATAILKKKKKPNSLIVTDAVNDDNSIIALSNNTMETLQLFRGDTVLVKGKKRKDTVLIVLADDDLDDGSARINXXVVRXXLRVKXXDVITIHPCPDIKYAKRXXXLPIADTXVEGITGVVIRTFFLAPYFREAYRPVRQGDTFTARXXGMRQVEFKVVRGSIP

SEQ ID NO: 360947 - protein, 36 aa, Zea mays
  Clone ID: MRT4577_92364C.1.pep
LLQRFCRSIFRVAYYQTCCPDNMLIRSLAAQHAIRN

SEQ ID NO: 360948 - protein, 138 aa, Zea mays
  Clone ID: MRT4577_92365C.1.pep
PAGSGEAREIRSSRSPTDPAAGRPPSPRRCLSFLFPIIKMSRGGSAGGGQSSLGYLFGSGEPPKPAVAPAASAPPVEKPSAAKTDATKQVAAGVTSQTNNYHRADGQNTGNFLTDRPSTKVHAAPGGGSSLGYLFGGN

SEQ ID NO: 360949 - protein, 245 aa, Zea mays
  unsure (1)..(245): unsure at all Xaa locations
  Clone ID: MRT4577_92366C.1.pep
MDSTPAPEAAPGASSSATAAAEDLAGGVAAMTLDERFALLRGIGEECIQEDELRRLLENKPVPICYDGFEPSGRMHIAQGIVKTIXKMGGDLKKIXTVGRYMIEIWKAAGMNLDGVEFLWSSEEINRRAHEYWPIVMDIARKNNVKRITRCCQIMGRSDQDDLTAAQIFYPCMQCADIFFLKADICQLGMDQRKVNVLAREYCDYIKRKNXPIILXHHMLPGFKEGRRNVKSDHPRYLYGDDEAQ

SEQ ID NO: 360950 - protein, 157 aa, Zea mays
  Clone ID: MRT4577_92367C.1.pep
PAGPDPSSYKTSRSSPFSSAEAREIRSSRSPTDPAAGRPPSPRRCLSIFVQFLFSIIKMSRGGSAGGGQSSLGYLFGSGEPPKPAVAPAASAPPVEKPSAAKTDAAKQVAAGVTSQTNNYHRADGQNTGNFLTDRPSTKVHAAPGGGSSLGYLFGGN

SEQ ID NO: 360951 - protein, 92 aa, Zea mays
  Clone ID: MRT4577_92368C.1.pep
GNPCLEYIKYIVFPWFGRFEVIRKESNGGNKTFTCMNELISDYETGALHPADVKPALAKAINEILQPVRDHFNNNNEAKVFLNTVKKYRVTN

SEQ ID NO: 360952 - protein, 175 aa, Zea mays
  Clone ID: MRT4577_92369C.1.pep
APGSDGLLEVLGPSVPGYWDHPIPLQYKTSRSSPFSSAEAREIRSSRSPTDPAAGRPPSPRRCLSIFVQFLFSIIKMSRGGSAGGGQSSLGYLFGSGEPPKPAVAPAASAPPVEKPSAAKTDAAKQVAAGVTSQTNNYHRADGQNTGNFLTDRPSTKVHAAPGGGSSLGYLFGGN

SEQ ID NO: 360953 - protein, 110 aa, Zea mays
  Clone ID: MRT4577_9236C.1.pep
MTSDYTSSVFAPASYSYMQGGAPKRMRSSYGGAPPSLAHDAAMPGFGLDKVSYHHYQALPPYYVGSSNASVGNLGLLQQADDAPAPQDGASAGDIWSLDELLMLAAAGAY

SEQ ID NO: 360954 - protein, 73 aa, Zea mays
  Clone ID: MRT4577_92371C.1.pep
RRSSFRLRGARTRARGRVSQGDPPAKVSTRTSDGGYSDTLVSSAGTKPIDTNRDEWEGGCGLAAMMASKPRRG

SEQ ID NO: 360955 - protein, 83 aa, Zea mays
  Clone ID: MRT4577_92372C.1.pep
KDEAPPPSSKPAKSGGGKQKKKKWSKGKLEEKVNNAVLFEQATYDKLVCEVPKYKQVTPSILSERVRVGGSLARRAIRELVAR

SEQ ID NO: 360956 - protein, 174 aa, Zea mays
  Clone ID: MRT4577_92373C.1.pep
IGSLEAGRGLLEVLGPSVPGYWDHPIPLQYKTSRSSPFSSAEAREIRSSRSPTDPAAGRPPSPRRCLSFLFSIIKMSRGGSAGGGQSSLGYLFGSGEPPKPAVAPAASAPPVEKPSAAKTDAAKQVAAGVTSQTNNYHRADGQNTGNFLTDRPSTKVHAAPGGGSSLGYLFGGN

SEQ ID NO: 360957 - protein, 56 aa, Zea mays
  Clone ID: MRT4577_92374C.1.pep
VMTADCAELMSRDHLFVNHAGKTGWEHITFGRLDLHCIAVESCTRQPDSVNTADSV

SEQ ID NO: 360958 - protein, 70 aa, Zea mays
  Clone ID: MRT4577_92375C.1.pep
SGSPVAAYQIYGMRYGSIGAQGLRPGSTARHPATTSPQSRRTDGPILGSRNSGSCPTSRRPPPCWNSCPS

SEQ ID NO: 360959 - protein, 228 aa, Zea mays
  unsure (1)..(228): unsure at all Xaa locations
  Clone ID: MRT4577_92376C.1.pep
MSGSGGPSGRGSAGGTRSFDFGTDDVLCSYDDFAAPSEPKRPDPVDKDFHESRFGRPSVKVYEQESYAKEDVLSAVEKCMKKYADNLLRSLEGITSRLSQLEIYCYKLERSIGELRADVLRDETDLRLKSLEKHLHEVHRSIQILRDKQELADTQKELAKFQLTHDESKKKDVLTPSFPEPKKPEEKRDAASQQLALALPHQVNSSTLVPRASGPVQQXHGSSVQQTA

SEQ ID NO: 360960 - protein, 76 aa, Zea mays
  unsure (1)..(76): unsure at all Xaa locations
  Clone ID: MRT4577_92377C.1.pep
MAAPKLSTLALAVLLAATVVAPPAAVRAAMXCSTVYSTLMPCLPFVQMGGAMPXACXLXILSLLQQANNTPDRRTI

SEQ ID NO: 360961 - protein, 71 aa, Zea mays
  Clone ID: MRT4577_92378C.1.pep
IARQIITLHHHNQSSHNHTHSLTLLHHCTEDTMAKYTAMFVAALSLKVVMETSSTSSGMGASNMRSQALVG

SEQ ID NO: 360962 - protein, 59 aa, Zea mays
  Clone ID: MRT4577_92379C.1.pep
HPHLLRPVEHLSCRGTVESTRRSTRATLPTWPLAQRKSLMLLRAPPPLTNASRSSLAWA

SEQ ID NO: 360963 - protein, 85 aa, Zea mays
  Clone ID: MRT4577_9237C.1.pep
GAPKFFHVPGGHFFWGSRREHGVTFFGGGRNFQGFPWFSGLKIGLLQTTFVFPLGAIQLKGQRIFLEGGGGFDPQEKLAGAPLRS

SEQ ID NO: 360964 - protein, 40 aa, Zea mays
  Clone ID: MRT4577_92380C.1.pep
GGECHYHNNPFFYISQLLPNKSHITPKFSLKNSHQYHIEK

SEQ ID NO: 360965 - protein, 78 aa, Zea mays
  Clone ID: MRT4577_92381C.1.pep
IFRKDLGQGEKYIVDNGHLVAWNTSYVMERVASGGIISGLSSGEGLVCKFTGPGTVFMQTRNPQEFAAFVGGINPQDI

SEQ ID NO: 360966 - protein, 89 aa, Zea mays
  Clone ID: MRT4577_92382C.1.pep
YLPSLPHKSSTSSALTTETNGSLHKPTLAEPISPARNYLKGDYCHCATHKTNRHCKRQSQACLLKGLTYIKSVVLTVRNTAGKTGCPTI

SEQ ID NO: 360967 - protein, 65 aa, Zea mays
  Clone ID: MRT4577_92383C.1.pep
RFSNKPAIIIGSHGSQHQLSNLSCIKDVLTAFTTLSPCAGSIPRHRLLLAAAVLLQSLSYTLHAA

SEQ ID NO: 360968 - protein, 55 aa, Zea mays
  Clone ID: MRT4577_92384C.1.pep
VLGLIATKAHVPPSLPIFEELKKEETKQKFIPTTPDTMLLDQILPRSPSWELLLN

SEQ ID NO: 360969 - protein, 118 aa, Zea mays
  Clone ID: MRT4577_92385C.1.pep
DRDNTIYFYAGQGIKHEGSIGKDTFVYKGPGDEVIAEHNTLTYALYTTKGQSEGGTWPKPPNAQVHCPTVAKYSTSSLSLRLKTASVSILWAAHREESSVFRLPPLMIPGVVCPVRHS

SEQ ID NO: 360970 - protein, 111 aa, Zea mays
  Clone ID: MRT4577_92386C.1.pep
SFILKNSRWYITRSNTSGPLTTRYECRKVFPCSVRPSASYSTQASDQKGKQEGKDLSNVEHPFDDITYNIPEKPVTFTEGASYSLVILAGLGIAGLAGYAVFKELIFEPKE

SEQ ID NO: 360971 - protein, 263 aa, Zea mays
  Clone ID: MRT4577_92387C.1.pep
MASRVTRLLLHRRLTTAAEASARRAPQAPCAGAAVSKDVVKAEASSLKNSRWYITRSNTSGPLTTRYECRKVFPCSVRPSASYSTQASDQKGKQEGKDLSNVEHPFDDITYNIPEKPVTFTEGASYSLVILAGLGIAGLAGYAVFKELIFEPKEYKIFGKALARIQSDSQVTSRIGHPITGYGQETRNRAARQRIPNKIWTDEDGVEHVEVNFLIRGPHGAGKVYSEMFKDTDRTWKFTYLVVDIVSPPHAKTQLMLESYLPA

SEQ ID NO: 360972 - protein, 83 aa, Zea mays
  Clone ID: MRT4577_92388C.1.pep
NLFGCIYSGKGFNWEKFQMPTVKSKNGWLLAGGLLAALRLVPASARKPYAPAVSRAICFPDGLRKDPKRMCSFMSSVKTLNLL

SEQ ID NO: 360973 - protein, 87 aa, Zea mays
  unsure (1)..(87): unsure at all Xaa locations
  Clone ID: MRT4577_92389C.1.pep
KFPHPTEEAEAKIPRSXSKKMKFNPDVPLKXFARPTHXFNGAQLKAVXAKTGKHAXPQNAPQVTHKNFNNGITQEQAKKKTSMNYNA

SEQ ID NO: 360974 - protein, 456 aa, Zea mays
  unsure (1)..(456): unsure at all Xaa locations
  Clone ID: MRT4577_9238C.1.pep
MCGGAILSGFIPPSGVAAAAAAAAKKQQQQQQQRCRVTADLLWPGPGSKGAPQDQEEDFEADFREFERGLGEDDVDSAGEGGDPEVQELPPPXAXRFAFATAAKAAVDGVMTTTPKDVKGDRAVKKRGRKNQYRGIRQRPWGKWAAEIRDPNKGVRVWLGTYNTAXEEAARAYDAEARKIRGKKAKVNFPDDDATGTRHRPTNAANAARLVAPPPPPKACADEMFNNLKNDDGDNNNNNDDLFAMFAFGDNKKEAVPAAKPAAAEGGSGSGSGSFLVPAPAMAAAVPGNKRRSSATNIMVSVSDDQSSNSYGSGSSADLVGSWSWDDDDAAAAAAAAAMTSDYTSSVFAPDNAVLPAASYSYMQGGAPKRMRSSYGGAPPSLAHDAAMPGFGLDKVSYHHYQALPPYYVGSSNASVGNLGLLQQADDAPAPQDGASGRGXIWSLDELLMLAAAGAY

SEQ ID NO: 360975 - protein, 526 aa, Zea mays
  unsure (1)..(526): unsure at all Xaa locations
  Clone ID: MRT4577_92390C.1.pep
MVVAVQLAALLALLLALWRLVWRPHAVARSFARQGIRGPHYTFLAGSLPEAIGLLEAGRRGTAPLDAGCHDIMPVLLPQFHRWVADYGRTLLFWIGPIPAVLSTDLQLIKQVLTDRTGLYQKDFMIPVLKFLFGNGVILINGDDWKRHRKVVLPAFNHETIKSMSAVTAEVTEQMMQQWRGQIHGSEEESAEIDMIHAFNDLTSKVNGRVAFGTSHREVEEVIVLMREMQKLATAATLDAPILWYLPTRRNLHVRRLNKQLRSKIMSIMQARLAADGADRRGGRGGAVSGGGDLLGLLLEAXRRSRSNGNGGETLTTDEVIDECKTFFAAGQETTATLLVWAMFLLAVHPEWQDKVREEVVREFCTSDDGEVPHADVLAKLKLLYMVLLETSRLYPPIVYIQRRAAWDAVLGGIKVPQGTVISIPIAMLHRDKQVWGPDADEFNPMRFEHGLTKAAKDPKALLSFSLGPRVCTGQSFGIVEVQVVMAMILRRFSFSLSPKYVHKPKYLLSLTPKLGMPLIVRNVDG

SEQ ID NO: 360976 - protein, 105 aa, Zea mays
  Clone ID: MRT4577_92391C.1.pep
ISFPIAMRPRDKQVWGPDADEFNPMRFEHGLTKAAKDPKALLSLSLGPRVCTGQSFGIVEVQVVMAMILRRFSFSLSPKYVHKPKYLLSLTPKLGMPLIVRNVDG

SEQ ID NO: 360977 - protein, 122 aa, Zea mays
  Clone ID: MRT4577_92392C.1.pep
PRSNIVGSMHYRGVMRRLELAAYDVDATAAMERAWCGATAAPVAPARHREAHHAGGVARRAVLRGAHGDLDADPPLGAVPSERRGHGSRAGRSARVARRPTARAVRGPRRCAVRTRQLHRCA

SEQ ID NO: 360978 - protein, 169 aa, Zea mays
  unsure (1)..(169): unsure at all Xaa locations
  Clone ID: MRT4577_92393C.1.pep
MNQCRQDIIFKILIKRNLKYTYILLGIRAGRTLLFWIGPIPAVLSTDLQLIKQVLTDRTGLYQKDFMIPVLKFLFGNGVILINGDDWKRHRKVVLPAFNHETIKSMSAVTAEVTEQMMQQWRGQIHGSEEESAEIDMIHAFNDLTSKVNXRVAFGTSHXESRRSHCTDA

SEQ ID NO: 360979 - protein, 111 aa, Zea mays
  Clone ID: MRT4577_92394C.1.pep
MNQCRQDIIFKILIKRNLKYTYILLGIRAKKKKKNGTGAIPAVLSTDLQLIKQVLTDRTGLYQKDFMIPVLKFLFGNGVILINGDDWKRHRKVVLPAFNHETIKSMSAVTA

SEQ ID NO: 360980 - protein, 106 aa, Zea mays
  Clone ID: MRT4577_92395C.1.pep
IKRSGVICDDFPRTDQKSSSILNTHSNILMHTAEDHWANTSSGYPTSKEHNLLMFGTHNMPTDINMWHPDNACEPMVLHILNVIWLYRNPSAGRLDMNFWRISWFS

SEQ ID NO: 360981 - protein, 87 aa, Zea mays
  Clone ID: MRT4577_92396C.1.pep
MATKASCLLMLRGLSARVANATTCPYCSHASIVPLITPYLTSMIATGCDIPDLSRYRLQHAIAISLVPLSTLCHLTAAPFLAHGGAQ

SEQ ID NO: 360982 - protein, 74 aa, Zea mays
  Clone ID: MRT4577_92397C.1.pep
SAWSRSSANGSERGSCNGIGLQWGRDHGGFGSSGSVMHMTSSAAATVLQLSLPEDVFLGEIDVSGCGAVGDGGS

SEQ ID NO: 360983 - protein, 103 aa, Zea mays
  Clone ID: MRT4577_92398C.1.pep
ESGHLCLRRYERGKAEGSASRGIQQDSRWMYALRMSLRIVSVASIMHMRTTSGHDVFFWMLLVAAASPHDGTNHARSEDDVFRYEVNNVMKHARGRVAPRGNS

SEQ ID NO: 360984 - protein, 88 aa, Zea mays
  Clone ID: MRT4577_92399C.1.pep
MSPAAGAAMTTAEAAAAAPPYQPFEVCEGCRCCASSSSNNGSSSSCVDTSCCYAIDCDLPGKPFGTCAFTPQTCGCGAASNNCSQPAP

SEQ ID NO: 360985 - protein, 176 aa, Zea mays
  Clone ID: MRT4577_9239C.1.pep
SRFVFARGPAVAVLILLESNGETYAVLTEQVRVAVGKLLLELPAGMLDDEKGDFVGTAVREVEEETGIKLNIGDMVDLTALLDPATGGRMLPSPGGCDEEIGLFLYRGRVDEETIRSLQGKETGLRDHGELIKLRVVPYSELWRSTGDAKALSAIALYEMAKREGLLPQPTPSANL

SEQ ID NO: 360986 - protein, 54 aa, Zea mays
  Clone ID: MRT4577_923C.1.pep
VLDELARIIHHGAGFTQGIRHLRAGDFFRSEVGWSNYNETTSSYQVGENVVLSI

SEQ ID NO: 360987 - protein, 53 aa, Zea mays
  unsure (1)..(53): unsure at all Xaa locations
  Clone ID: MRT4577_92400C.1.pep
NSPCKDCNGKXVILEIYKVKVLLFVNVASKFGFTETNYAQRTXELYQKYSDKD

SEQ ID NO: 360988 - protein, 58 aa, Zea mays
  Clone ID: MRT4577_92401C.1.pep
RIGGRNLSSNLSYLLFCVFPNLAYVHVIVYGHGFESGYRIWVSSGCGVKKKKKKKKGG

SEQ ID NO: 360989 - protein, 149 aa, Zea mays
  unsure (1)..(149): unsure at all Xaa locations
  Clone ID: MRT4577_92402C.1.pep
PQNPPPKGKKVPPPKNPKKPTXGPGPQKGGAKAQGNGGAPVAGKSPPPENAKKTGIFFXEPPGNXRGPPPGGGGAPKEPRKEPTSNCRGKVPGAGSKKRGQKKVCPGGKRGXPGARGRGPQPPPPPPFLCLVWVGPGSFGQPIPRQGSL

SEQ ID NO: 360990 - protein, 295 aa, Zea mays
  Clone ID: MRT4577_92403C.1.pep
MSSPAPSPPAGAPSEPLLLPLPPPEFYCYQCEATVSLPEPAAPSSARLLCPLCHSDFIEENPSTPSPPPPPPPPPPPLFLSDSSSSSLSDDPDDDFDLVMDPDVVRAYLSRFAHRHHLQQIGHGPGPHGRGEPPATAASIAALPTVEVAEPTAVCAICKDDLPLASEARKLPCAHLYHSFCIVTWLGMHNSCPVCRFRIPPADDPDQAAPSQQDPPPTRITIRFSTTTRRRVRIGSDAPLASHISASPTQLAQAITGDGAGGPANSGETVSSEWPPHPESDTVMSEAREGGGFFD

SEQ ID NO: 360991 - protein, 91 aa, Zea mays
  Clone ID: MRT4577_92404C.1.pep
RAVVFHRRDGKTPAFPQLNGLETHPLFPSWQNTQKALTNRPSHRLPSLKGKGAPPCSGPLSRGGGGFPPSGTVPFGRVLGPVPLVFFPSFL

SEQ ID NO: 360992 - protein, 60 aa, Zea mays
  Clone ID: MRT4577_92405C.1.pep
SLKKAANCMSSANKTLCNSIYCSKTALVVQVVVSPEAINVRSFSVSVRISCSGFLEPPIF

SEQ ID NO: 360993 - protein, 45 aa, Zea mays
  Clone ID: MRT4577_92406C.1.pep
GFFRLAFCSIPACEILFGSTLRACSLRTPVSVSIAIVWCTLSAFS

SEQ ID NO: 360994 - protein, 182 aa, Zea mays
  Clone ID: MRT4577_92407C.1.pep
MIIPKKNRNEICKYLFKEGVLYAKKDYNLAKHPQIDVPNLQVIKLMQSFKSKEYVRETFSWQYYYWYLTNDGIEHLRNYLNLPSEIVPATLKKSARPLGRPFGSGPPGDRPRGPGRFEDRPRFGDRDEYRGGPRGAPGDFGGDKSGAPAEFQPSFRSSGARPGFGRGGGSGFGAGPTSSSME

SEQ ID NO: 360995 - protein, 49 aa, Zea mays
  Clone ID: MRT4577_92408C.1.pep
LSFRPGRFSGVGVISRHKVIVAIWHILCYLSGVFACFFSICKQLKPGLS

SEQ ID NO: 360996 - protein, 114 aa, Zea mays
  unsure (1)..(114): unsure at all Xaa locations
  Clone ID: MRT4577_92409C.1.pep
FRQKEDVSFTLGLVEFELPIPAEFIDXPLXVRLCLFHEPAMVSSGHQHEAGTKLPPLIRRCHWVDVGVVEAELSAADEFSSGIEHCEVAGISGIRAKWLLPLEISVHEEDDADH

SEQ ID NO: 360997 - protein, 35 aa, Zea mays
  Clone ID: MRT4577_9240C.1.pep
LLSVCRQMHIITHRMLHAPDASSRMIVGCSGSGSQ

SEQ ID NO: 360998 - protein, 182 aa, Zea mays
  Clone ID: MRT4577_92410C.1.pep
MIIPKKNRNEICKYLFKEGVLYAKKDYNLAKHPQIDVPNLQVIKLMQSFKSKEYVRETFSWQYYYWYLTNDGIEHLRNYLNLPSEIVPATLKKSARPLGRPFGSGPPGDRPRGPGRFEDRPRFGDRDEYRGGPRGASGDFGGDKSGAPAEFQPSFRSSGARPGFGRGGGSGFGAGPTSSSME

SEQ ID NO: 360999 - protein, 65 aa, Zea mays
  unsure (1)..(65): unsure at all Xaa locations
  Clone ID: MRT4577_92411C.1.pep
GHITKHLLSGDAWRMVSIGYLLHAPVAYFFFFLQQRLKCSHEYSNHAQGQQYMHVSLIQNKAGXR

SEQ ID NO: 361000 - protein, 68 aa, Zea mays
  unsure (1)..(68): unsure at all Xaa locations
  Clone ID: MRT4577_92412C.1.pep
KRAKKWVNIKEFFKPVKEKRYYGALALERALGDLGGXRGIRRGNQWGPTFFSPPXIEDQAQFPTPGGK

SEQ ID NO: 361001 - protein, 74 aa, Zea mays
  unsure (1)..(74): unsure at all Xaa locations
  Clone ID: MRT4577_92413C.1.pep
VSHFLKXGGPFFFSFKXKCSDAPPPXEPLFPPEVEKLKGDQFNPPEQVTLDPSEGAPPFFLGGYRVPKKQKPPF

SEQ ID NO: 361002 - protein, 140 aa, Zea mays
  Clone ID: MRT4577_92414C.1.pep
GGERREAPWRTFVPSLPHRGGHARLLALFLPSRRASGARLLPGAGAGTPPGAARLRSVRWPGRPLSRPYMQQERKLTKAQGAHQDKVGRRCPSTATWPGGDLPSPARGSSPGPRLALRDHPLPAPASAARRTQSTTQHRP

SEQ ID NO: 361003 - protein, 73 aa, Zea mays
  unsure (1)..(73): unsure at all Xaa locations
  Clone ID: MRT4577_92415C.1.pep
GKFPPSXRCXRRXFLSXSPXAAKKKRWRRSPREKGKTRWAPXPCPSFVCLGQFLGGFRPPPAYPPXGNFNFFL

SEQ ID NO: 361004 - protein, 89 aa, Zea mays
  Clone ID: MRT4577_92416C.1.pep
DPTGPGSTCARAPPSSSLTRPVGGCMVSSIPSQSNGGHVPPRRVLHLTAKLEGLGGIPRRPRVGVVRRRGHVGASDPLRDMNVCVSSSS

SEQ ID NO: 361005 - protein, 73 aa, Zea mays
  unsure (1)..(73): unsure at all Xaa locations
  Clone ID: MRT4577_92417C.1.pep
IFYRLYIFPFDKGMLHSRVGVIKLSQPFPCFPFCSICLIVLPGSSFNLKVLHFMLLVKFCSXFNNSSHCIFPS

SEQ ID NO: 361006 - protein, 104 aa, Zea mays
  Clone ID: MRT4577_92418C.1.pep
IPKLHSRTTGTVVSVKLLVAGDIIVVFLRAAVDFQILGVIVFYSLQHVYGPGSTCAPHMWQAVVLGVFYLKGLTVVLVSRSCHVLQLIWFGYICVSRVVLIVLV

SEQ ID NO: 361007 - protein, 117 aa, Zea mays
  Clone ID: MRT4577_92419C.1.pep
TPPAKALTLREPPPLPPPPLPPSFPPPPPRDLQHSAQQPRGHQGRLRPPLGAGLRRPQQMWGQPSRSPRSPGLAPGRPQTRPPQGSTPGQAARCSAPRSRPPARHAPPEPSQSRPAP

SEQ ID NO: 361008 - protein, 174 aa, Zea mays
  Clone ID: MRT4577_9241C.1.pep
IVFARGPAVAVLILLESNGETYAVLTEQVRVPIGKFLLELPAGMLDDEKGDFVGTAVREVEEETGIKLNIEDMVDLTALLDPATGGRMLPSPGGCDEEIGLFLYRGRVDEETIRSLQGKETGLRDHGELIKLRVVPYSELWRSTGDAKALSAIALYEMAKREGLLPQPTPSANL

SEQ ID NO: 361009 - protein, 102 aa, Zea mays
  Clone ID: MRT4577_92420C.1.pep
TCEGPAAAGASAVGSAAASATTAAGSSALGTAAAGASGAPSATFGGRSSPAAVDVEAPGASSAVSGVGPRATPVAASAGLGSGSGSALFSAPKSSTRSPRSA

SEQ ID NO: 361010 - protein, 106 aa, Zea mays
  Clone ID: MRT4577_92421C.1.pep
TCEGPDAAGASAVGSAATSAIVSTASAAGSSTLGAAAAGASGAPSATFGGRSSPAAADAGAAVAIAAVSGVGSRAAPVAASAGVGSGSGNALFNAPKSSTRSPRAA

SEQ ID NO: 361011 - protein, 115 aa, Zea mays
  Clone ID: MRT4577_92422C.1.pep
HLGNVISFLATPIIMSHIGLSGTFAFFASLGYLWLSVWMMNVESDPIDSHTISKSELQLILDGRIGSKVQGSKFPSLRELFSKTQFLAVTLANVVNNWVRMVYYQNDNLTILCTV

SEQ ID NO: 361012 - protein, 728 aa, Zea mays
  Clone ID: MRT4577_92423C.1.pep
MPSSSSSSDTTPPAAASSEETLSSVMVEELRAGDSVDFGVSRMTSARVEDMQRLGYFGGGVARAPGTEEVPEPEGELVVFEAFFAAGLRLPAHRFVGEVLRRFNVQIHQLTPNAMVALAKYVWATTSYGGQPSVEVFAKNYCLHWQKRMVGDGVAQFGSCTFTPKTGKTTMPVVELVPCARNKWGNWNEFWFYVAEGTVEGHKGLPVSEMCSHYYSAYPPFEVAEEDADEGALRCAAGQSSGRDLVEEFVAYGVWPLAHGWVLGEVCPRQMPFHGGRVVRSPAFALNLRNCDPAAFVRLVGRYVPRTEGQRSFDIRGSNDRLNRVFELNQLPYDGYPGQDEADRRGKKPAVETGDDPAPAATPPSKKRKLGTAMGGIGVSDSFARDLMRTCAAPGERMSSPELRESSARMLRVTGGCWPRNVPIPCAAEEDCFTSRMVHRWRVFPYGRNIGAVVWTVMDKDRQGAAQKRQATVRIHEARPKRPRGTAKAVASGGGKPPLAAKAGASAPSRAPEATAGAGGSKSAKVVPPASGVAEASKAARALPLAGKRVADFGTDITVDDYLGGSDEGQLAIVAPAAAIATAAQAPKARGESLGAGGEVSALALVRDEAGTATRRLKGVTEALSQATEALSQVADFTSRTASGALTAALSAEVERLRTQHADAVREKSASDSKCRNLTDKVAALEREKVDLRRQLAAERREANEACHVGSDDGLLEVAAATSWRRES

SEQ ID NO: 361013 - protein, 88 aa, Zea mays
  Clone ID: MRT4577_92424C.1.pep
PLGAPPPPWLLGRGLYPMAPFGNQRRNGVCKVLVNANWAARFFTPLKKKKKKKKKKKKKKKKKKKKKKKKTAAPASRGSHSLGRGACD

SEQ ID NO: 361014 - protein, 84 aa, Zea mays
  Clone ID: MRT4577_92425C.1.pep
FLHLLLIRDCPLPLYLWHLTQFTKKGSDPLSFKFVEHHKTQAFTFISSHDESVWNLDGEMFQACEVSVQACRGLVNFFASGPEL

SEQ ID NO: 361015 - protein, 44 aa, Zea mays
  Clone ID: MRT4577_92426C.1.pep
NKLHITCTLSFNIYPAPKDQDIFISYSPRFICIDLLTQQFSLNA

SEQ ID NO: 361016 - protein, 154 aa, Zea mays
  unsure (1)..(154): unsure at all Xaa locations
  Clone ID: MRT4577_92427C.1.pep
YRCRSRQRACPTTATLGPPSKPPPLRWPAAPPSLTWSLQRPPLPPAPXGAEAPAFAASGGLPPPXPQPSQPPAASSAXFMQPDSRXVFAPRLGDPCPSPPARGPPPXPGARATPPPKXPTAAYLQRGLTSSXDTPKSTESPXATPPPSSYSTSP

SEQ ID NO: 361017 - protein, 205 aa, Zea mays
  unsure (1)..(205): unsure at all Xaa locations
  Clone ID: MRT4577_92428C.1.pep
MQYGWRSQPPGSAPPSPDSAPPSLPSAGGSPRPPRPXXPTRGPTPRLRRQAPRPSPSAPXTVAIAAPGAAIASWPSPGPPXSRPQXSVPKSATRLPDNGNAXPPSKPPPLRWPAAPPSLTWRLRRPPSPPAPXGAXRRPPSPPAXGLPPPXGRSLRSPPRPLRPSXHAAGQSPGVFAPHLGDPCPSPPARGLPPXPGARATPPPK

SEQ ID NO: 361018 - protein, 154 aa, Zea mays
  Clone ID: MRT4577_92429C.1.pep
DNTHKNSASTHTEHIQQTPNKQQRYLSPNRLGPFPDHLTTVQTPHSYATCEGPDAAGASAVGSAAASAVVSAATAAGSSALGTAAAGASGAPLATFEGRSSPATADVGAAVAIAAVSGVGSRATPDTASAGVGSGSGSALFNAPKSSTRSPRAA

SEQ ID NO: 361019 - protein, 24 aa, Zea mays
  Clone ID: MRT4577_9242C.1.pep
CESTQTCTMKIKGVAPKARCVVLF

SEQ ID NO: 361020 - protein, 106 aa, Zea mays
  Clone ID: MRT4577_92430C.1.pep
TCEGPDAAGASAVGSAAASAVVSAATAVGSSALGAAAAGASGAPSATFGGRSSPAAADVGASGASSAVSGVGSRATPDTASAGVGSGSGSALFNAPRSSTRSPRAA

SEQ ID NO: 361021 - protein, 250 aa, Zea mays
  Clone ID: MRT4577_92431C.1.pep
MPGLAAAEQDAVSLVRRVARALNRRFTDIVALLFSHKGAGSLGAVAGFAIAVVFAWKFLRPRRRAPKRPPPTPAAAPAATVPDAAEPIGDSGKVVTREIVVKRLKGCRKVTCQLLGVVFEEKIPEELQKHATVRPSVVELLLEISRYCDLYLMETVIDDKSEENALMALETSGLFRTGGLMKEKVLFCSSEVGRTSFVRQLESDFHIDTSLDIVSQLSRFIRCQLFISTVEGEQLAGNVFNSPSLEQFFS

SEQ ID NO: 361022 - protein, 114 aa, Zea mays
  Clone ID: MRT4577_92432C.1.pep
TCEGPAAAGASAEASAAATAPTSVGSSALGTAAAGASGAPSATFGGRSSPTAADAGAPGASSAVSGVGPGATPVAASAGVVSGSGSALFSAPKSSTRSPRSAASSKRRANDNVT

SEQ ID NO: 361023 - protein, 145 aa, Zea mays
  Clone ID: MRT4577_92433C.1.pep
PRPDSRIVIGSRSTRGGRCPCQARANGRSESYAHSQCAPGRAPCPRIVRRPCRSLEDRSSVRGAAPRPLARRSSFLYGTTWWYWPIGSRVALVAAAEPSLGPSNGGTIARVPSVGQTRWGTIRPIADGRGESVLLVRSQQRIGGG

SEQ ID NO: 361024 - protein, 135 aa, Zea mays
  Clone ID: MRT4577_92434C.1.pep
MADTKASPAVTLRTRKFMTNRLLSRKQFVLEVLHPGRANVSKAELKERLAKMYEVKDPNCIFVFKFRTHFGGGKSTGFGLIYDNVDSAKKFEPKYRLIRNGLATKVEKSRKQMKERKNRAKKIRGVKKVCTLALI

SEQ ID NO: 361025 - protein, 78 aa, Zea mays
  Clone ID: MRT4577_92435C.1.pep
RCAVGGRSPIRRQVRRMAVVETTAVFGGAPTPFVCVEVALAAICQGREGNDRTSSWCRSGSSCALEWVEIRCVVPSGG

SEQ ID NO: 361026 - protein, 137 aa, Zea mays
  Clone ID: MRT4577_92436C.1.pep
MADTKASPAVTLRTRKFMTNRLLSRKQFVLEVLHPGRANVSKAELKERLAKMYEVKDPNCIFVFKFRTHFGGGKSTGFGLIYDNVDSAKKFEPKYRLIRNGLATKVEKSRKQMKERKNRAKKIRGVKKTKAGDAKKK

SEQ ID NO: 361027 - protein, 118 aa, Zea mays
  Clone ID: MRT4577_92437C.1.pep
MKRVSGPGALKELWELPLPAPKDKGVAFYTKGPDPCLGPFSRKDGPLQYFPKGGGSKAWKEVFPPNKDKPRFFFGGEGFMPPQLNQARGPFFFLEVLGNKRARWGSSPPPPPPYFVGE

SEQ ID NO: 361028 - protein, 135 aa, Zea mays
  Clone ID: MRT4577_92438C.1.pep
GNGRIFFFFFPLIPFFFFIFLREKKPKKKKSRPLGEPQGKPRKFQPGPLGAPTFPKKKLKKKRANKRQKPSPGKKFFPSKIPKKKNPEKKRENPGGPKKGPHPTKYAGGSHPPLYNGKTPLPQILKKKKRPPPPE

SEQ ID NO: 361029 - protein, 282 aa, Zea mays
  Clone ID: MRT4577_92439C.1.pep
RRRAGSIKETEKSSCAATERTLPFLRLPFPKFSPHASRSPRLTATTTPEASRSFLGLPPRPPLPRSPPLAAARLHREGGGGWRSRATGSTKARLGFGFGVELHRSAPCEGEGCYMMRRLKSIASGRSSVSDPGGDSGSKRPKFEQDGAGDIVIEPHLTEAKPVRIDQESSSSSNRDAEASTSTSMKPVKTEEPVADLLPKELNDMTISDDKADDHNDKEGEGVTLDGNGAETGQIIVTTIGGHNGKPKQKVSYMAERGVGTGSFGIVFQAKCLETGETVAIK

SEQ ID NO: 361030 - protein, 51 aa, Zea mays
  Clone ID: MRT4577_9243C.1.pep
CVLSSCIITYIDRERCDRGDFSNVVKSVVGWDGTRDTPQGLVRIDGQNGYP

SEQ ID NO: 361031 - protein, 132 aa, Zea mays
  Clone ID: MRT4577_92440C.1.pep
KGKRVQDQVPNSRSAHSFLSMRETKIGREKGRTPSLGPPSTKYRGEQRNNPTRQEPPPTKYKNWRGERGFTPCKKKASRGQFFFFARGPFFFWARSFFLFAPLFFSLFYFGRAGVGGTFFILISFFILLYSS

SEQ ID NO: 361032 - protein, 71 aa, Zea mays
  Clone ID: MRT4577_92441C.1.pep
MTVAKAARYCVDAFKAFLDECEKCKDRGGEDGSHIPTVKPTTTGKEKDKSKSSFASKSLSCLPCCVRPSSS

SEQ ID NO: 361033 - protein, 141 aa, Zea mays
  Clone ID: MRT4577_92442C.1.pep
PTNRSPPSRWFPPIFTVPIVKKRTRHFSRHQADRFMRLDKGTWRKPKGIDSRVRRRFRGTIAMPSIGYGSNKKTRYMMPSGHKAFLVSNTGDVELLLMHNRTHAAEIAHNVSSRKRVEIIARAKQLGVKVTNPKAKGTTEV

SEQ ID NO: 361034 - protein, 94 aa, Zea mays
  unsure (1)..(94): unsure at all Xaa locations
  Clone ID: MRT4577_92443C.1.pep
IPSGGVGGFYKNTXTGGTXGSFPLGSVVFFLPPFLSFFLNLNWSFMFFSHSFXCGGEXXSXPLHTKKGXXHSXXFYHQXLXXQDPSMIGSFSPF

SEQ ID NO: 361035 - protein, 71 aa, Zea mays
  Clone ID: MRT4577_92444C.1.pep
MADWGPVVVAVVLFVLLSPGLLLQLPAKGAGRFVEFGNFQTSGASIFVHAIIFFALAAVFLIAIGVHITTY

SEQ ID NO: 361036 - protein, 167 aa, Zea mays
  Clone ID: MRT4577_92445C.1.pep
QIPRCSGLDSHNEQTPILRVPLQMGLRFHSRGYEQPPHQRACGTTNSRWLADDHCTSSDNDLRLGRLNNSNDDIRANTVVRRPSPTSPHEGRGQAVKAREPGVRLQVAPTVSSAKKPSLAATTSAPTTAATCAPALRQRMAAAPARTGRSPLKSSRTGRHRPPRGGV

SEQ ID NO: 361037 - protein, 85 aa, Zea mays
  Clone ID: MRT4577_92446C.1.pep
SPGPIPKTCDNPSAPPYNVASTFLKNYSANPIYQPQPRQRFYPFPFMQHFVALHSPRPLQNVGENHYPFLVCSITNNLPGLISHA

SEQ ID NO: 361038 - protein, 49 aa, Zea mays
  Clone ID: MRT4577_92447C.1.pep
YDESVDVVKSYYPSSSGYQDELLWAALWLHRATGRRDYLAYALDNASAL

SEQ ID NO: 361039 - protein, 101 aa, Zea mays
  Clone ID: MRT4577_92448C.1.pep
FFFYNVLFFLFDIIKVFVRVYNATSHGMRNEGGGTATTPRRKNNARDAHKKGSTKTTNRQKGEPRGHKKETEKRPGLRKKKNSPKKNKNQKCPAGKKEAAP

SEQ ID NO: 361040 - protein, 105 aa, Zea mays
  Clone ID: MRT4577_92449C.1.pep
YATCEGPDAAGASAAASAAASAVVSAAGSSALSTAAAGASGAPSATFGGRSSPAAVDEEAAVAITAVSGVGSRATPVTASARVGSGSGSALFRAPKSSTRSPRSA

SEQ ID NO: 361041 - protein, 65 aa, Zea mays
  Clone ID: MRT4577_9244C.1.pep
KPQKNPFIKPKGSNGWDKKLLTGGRENIEKSARPFLTGQSHLIGGKRNYGQEAPLCVSKRGIVKL

SEQ ID NO: 361042 - protein, 70 aa, Zea mays
  Clone ID: MRT4577_92450C.1.pep
NTRSNTKNKLGTPYISAFIRWGGIPRKRSWMLLLHGMRRVMGNTAPYSSMTPHTATCGTSSPTTTTGEGR

SEQ ID NO: 361043 - protein, 93 aa, Zea mays
  unsure (1)..(93): unsure at all Xaa locations
  Clone ID: MRT4577_92451C.1.pep
APPRPPPQFPPPPXEPSALGAXLRGASAPPSPXQRAGGQPSRSLRSPGLAPGRPQSQPPRGSTPGLAARCPEPRSRPPARRAPPEPSQPRRAP

SEQ ID NO: 361044 - protein, 120 aa, Zea mays
  unsure (1)..(120): unsure at all Xaa locations
  Clone ID: MRT4577_92452C.1.pep
RLRAQAQTPAPAKALTXAGVSAVGSAVGSAAASAVASAATAAGSSTLNTAAAGASGAPSATFGGKSSPATADVGAAVAIAAVSGVGSRATPVTASARVGSGSGSALFRAPKSSTRSPRSA

SEQ ID NO: 361045 - protein, 102 aa, Zea mays
  Clone ID: MRT4577_92453C.1.pep
TCEGPAAAGASAVSSAAVSATTAAESSALGAAAAGASGAPSATFGGRSSPATAEVGTLGASSAGSGVVSRATPVAASTGVGSGPGSALFSAPKSSTRSPRSA

SEQ ID NO: 361046 - protein, 132 aa, Zea mays
  unsure (1)..(132): unsure at all Xaa locations
  Clone ID: MRT4577_92454C.1.pep
LSWRLPREVLKQVWDLSDQDNDGMLSLREFCIALYLMERHRAGIPLPLALPDSLRHDETLLRATGLPSTAYNSPSWQHNQGGLPQRGPGAPXVPAGGVRPPLPSHLHSQTDGASRPGQPRSHMPGMDNHVVI

SEQ ID NO: 361047 - protein, 72 aa, Zea mays
  Clone ID: MRT4577_92455C.1.pep
LMKRDHILPFLHHGSSLTVPRRDERGRHPGDPAVQLAGHSSCMGKTTVLTKHKRRRGMIAPTALACPETRPH

SEQ ID NO: 361048 - protein, 148 aa, Zea mays
  unsure (1)..(148): unsure at all Xaa locations
  Clone ID: MRT4577_92456C.1.pep
YLLAPYLTSMIASLXENPALQRLXLQQAISLCNIPLSPLLFQQSPALYLVQPLLLTIMAHKLHQLXLPVINQVALANLSSYSQQQQSISFNQLSTLNPADYXQQQLLPFRQLATAYSQQQQLLSFNQLASLNPAAYLQQHILLPFSQL

SEQ ID NO: 361049 - protein, 106 aa, Zea mays
  Clone ID: MRT4577_92457C.1.pep
TCEGPNAAGASAIGSAATSAVVSTASAMRSSTLGAAATGASGAPSATFGGRSSPAAADAGAAVAIAAVSGVGSRAAPVTASAGVGSGSGSALFNAPKSSTRLPRAA

SEQ ID NO: 361050 - protein, 108 aa, Zea mays
  Clone ID: MRT4577_92458C.1.pep
YATCEGPNAAGASAVGSAAASAVVSAATAAGSSALDTAAAGASGAPSATFGGRSSPAAADVGASGASSAVSGVGSRATPDTASAGVGSGSGSTLFNAPKSSTRSPRAA

SEQ ID NO: 361051 - protein, 121 aa, Zea mays
  unsure (1)..(121): unsure at all Xaa locations
  Clone ID: MRT4577_92459C.1.pep
LEIQAKLPAKAQEASYIVLVVPRSADAYKLPWRRIQAGCRTKRHNHRTLMTSFPNPCHSHNCRQYPRIADARNQPYSLTTEKFHLATIQPXPDTRSIFRLRQRLGPQDSRYLHAAECLLGL

SEQ ID NO: 361052 - protein, 96 aa, Zea mays
  Clone ID: MRT4577_9245C.1.pep
GRPFFFFFFVSYTHCIPRDKFIPPFRRIFDSLFCHHNYIVRSIRVPQLHVSQVPALVANFVAEPKPRHRPRRRRSTSSADLPPRLHLHDVHARDGR

SEQ ID NO: 361053 - protein, 104 aa, Zea mays
  Clone ID: MRT4577_92460C.1.pep
YATCEGPAAAGASAVGSAAASATTAAGPSALGTAAAGASGAPSATFGGRSSPAAADVGAPGASSAVSGVGSRATPVAASAGVGSGSGSALFSAPKSSTRSPRSA

SEQ ID NO: 361054 - protein, 103 aa, Zea mays
  Clone ID: MRT4577_92461C.1.pep
MCTVTRAHLDQRLAAAKRCSREAAIAGAKAAAVATVATAVPTLASVRMLPWARAHLNPTGQALIISTVAGMAYFIVADKTIVSMARKHSYEDAPEHLKNTSFH

SEQ ID NO: 361055 - protein, 109 aa, Zea mays
  Clone ID: MRT4577_92462C.1.pep
MAGSRDSSDISPSNIIEPTWDTLPADEQLQFEEHKEQMIQEAKARFLANFKVDRNNKVVRHRATDPASLRPTPDIPNVSNTNELQSLKNYVDEQREQMQNIIGDMQKRL

SEQ ID NO: 361056 - protein, 120 aa, Zea mays
  Clone ID: MRT4577_92463C.1.pep
MLLLRRPITRYAFVEAGDRTDVDLGSTPDDWLGALTQLIQKALAGTYYPALVVGAVVEIILNLVVLNSGILRIFLNLLRGKLLMPLKREAPKFRFMIRMIAGEDGAEADASQRRTRGPAA

SEQ ID NO: 361057 - protein, 226 aa, Zea mays
  unsure (1)..(226): unsure at all Xaa locations
  Clone ID: MRT4577_92464C.1.pep
AALADVRRAPWQDCPPPAPAWPPPAQPAPWRRPRWLPSSPPPVGXPEVSLFPXNAMPPAKALPLREPPPRPPPLPPPPPPLDLQRSARQLRGHRARLRPPLGEGXPAAAGAGAPGXLPQSPGSVPGRLQSRPPQGSSPAQAAHCSAPRSRPPARRAPPEPSQPRPAPGPPHDRMNPTSGHRGPRRTPSPRGLRPQRYLAQNPHPPGRGPQSAGSLRERARSSLPRR

SEQ ID NO: 361058 - protein, 74 aa, Zea mays
  Clone ID: MRT4577_92465C.1.pep
MSSTNFAAGGGGPKTLWLKVVGLSVKDPKKVILKDKPDADMVVLPVGSVVPADYRPTGVRILVEMVAQTPPTAS

SEQ ID NO: 361059 - protein, 106 aa, Zea mays; identical to SEQ ID NO: 270884
  Clone ID: MRT4577_92466C.1.pep

SEQ ID NO: 361060 - protein, 75 aa, Zea mays
  Clone ID: MRT4577_92467C.1.pep
LSTFIHVTTLNQTVTHVLRILTVYINNSFYFNCLQNFFGPSNEFHASRSQDSRRPKIGKLAVISFVLSVVAYYLF

SEQ ID NO: 361061 - protein, 458 aa, Zea mays
  Clone ID: MRT4577_92468C.1.pep
MNHEVDTLTRSNNGEGRENSEGAFEEENTRENMVFKKKHASFKGDRQSHRVRPRKKLKSMNHEPANGADNEEGRDTCRAHIQNNNMDTLTRADNEEERDTCRAHIQNNYMDTYTSADNEERRDSCRAHIQNNNMDAAKTADITEEKRGRGKNKCKNLAKLKPGQKIKVMFYNNRALGTSFARHIGRIVRDPTITPVRVKKWTDISETSMKHIFAAVKDKFENKDENIKIDVYENDIMEHARDLWNNWRGDLCRHYVKPAKNMQQAIKNCPEDFPQADWEWLVKEHFYSKDFIARSKRNSKNRSNLTILHHSGSKPFRKVIYDNGGKDNNPPSLDALFFMTHTKGGSFLDSESSSKHAQLEEQISLDPSLSNAELMDKCFPSKRQDHIVGYGGGVKARHLRSPCISKAELIEKLKQSEDEKRAMQEENRELREENKATNSRMSRMEQEWEELKNRLSSS

SEQ ID NO: 361062 - protein, 116 aa, Zea mays
  Clone ID: MRT4577_92469C.1.pep
GGGCVSSFSAPPGVVFFNFFPPPRRGVGGPGLPPPPGPCNPIVRGPAVLCFFVFFGLFSCSFFFFFFFDIPRAKPDPLYLFIYCPASPSRDMHSLLLCLLFSHGLVPSSSQHAYSY

SEQ ID NO: 361063 - protein, 70 aa, Zea mays
  Clone ID: MRT4577_9246C.1.pep
IYYRTQATGGGPATEARATEPFTDHGHLNHLLHLSLFIASGGLSVHFSSPEPYLQEARTRLHGWGPNPQN

SEQ ID NO: 361064 - protein, 136 aa, Zea mays
  Clone ID: MRT4577_92470C.1.pep
GLVGPHTRGGSPSPGQEQVCPPPWEVLGPLVFTNGLAPKKPFVGTMLGPRRSGGQQTSSGVTARPRRGGCPSLKLGIPSCPKGEGPTGLKIEGGFSPLPPGAGLGPLKRGRVVFPLRPCPVPINSPPGSFFVQAPG

SEQ ID NO: 361065 - protein, 51 aa, Zea mays
  Clone ID: MRT4577_92471C.1.pep
LSLSHYSAFIYPLIYHNAEAAFLETSPYSYLLSFITLLTDSNILLLCNTSL

SEQ ID NO: 361066 - protein, 137 aa, Zea mays
  Clone ID: MRT4577_92472C.1.pep
VAKDKHGGVPNPGFVLLIKGGLPWSPPSSGGGLRLSAAAVKTGPTILFEPSDVVSKGTIVVSWSLTFNELLSRSGSKAGFLDLVDIRVMVCPKSQWLAVRPWSPSRPSGIVLFFGSNIYYSKKTKKKKKKKKKKNRK

SEQ ID NO: 361067 - protein, 67 aa, Zea mays
  Clone ID: MRT4577_92473C.1.pep
RHRLLPYNRHVFLLRHSLHLLVSLSLPTSSPRPPPPSSACSCASPSTAGRIACMVVCATHLLPRSRG

SEQ ID NO: 361068 - protein, 160 aa, Zea mays
  Clone ID: MRT4577_92474C.1.pep
MAGMGDMPMRPARPGPPMQHRGPPPMARLRPEPIDREKTCPLLLRVFTRVAGHHQNEEFAVRGKEPKDEVQIYTWKDATLRELTDLVKEVALPARKRNARLSFAFVYPDKNGRFVVRQHVLVGRQKVGSTFAYGHGRGDDAKTLAELGFQIGDYLSVAIM

SEQ ID NO: 361069 - protein, 60 aa, Zea mays
  Clone ID: MRT4577_92475C.1.pep
MYTPLGKLGTKHLPVFNTKILQSCWPGGHRMPISTMCGSNVQLTVVCAPPNACISSLLKP

SEQ ID NO: 361070 - protein, 107 aa, Zea mays
  Clone ID: MRT4577_92476C.1.pep
AFELPVSCVIHTVGPIYDMDRKPEVSLKNAYENSLKVAKENGIQYVAFPAISCGIFRYPPKEASNIAISAAQQFSGDIKEVHFVLFSDELYNVWRGTAQEMLTQFEK

SEQ ID NO: 361071 - protein, 67 aa, Zea mays
  Clone ID: MRT4577_92477C.1.pep
SFFFKKAWGERKTRFCLPPLVFTQICWLKWGPSVFLRGRGGGMAPSPNHLPYILEKKFLPPPFGIGP

SEQ ID NO: 361072 - protein, 101 aa, Zea mays
  Clone ID: MRT4577_92478C.1.pep
SKQARACLGRVIPSSFPQNTAAFTERNEGVGYSRNSLFGFSSLGPRVSGLKETFLSPRSRHRYSPDSTNPVAAEHSSWIQMTVVCGPSKETPGERYRVQAC

SEQ ID NO: 361073 - protein, 889 aa, Zea mays
  Clone ID: MRT4577_92479C.1.pep
MPSSSSSATATPPAAASSEETLSNAMVEELRAGDSVEFGVSRMTSGRIEDMQRLGYFGGGVARAPGTEEVPEPEGELVVFEAFFAAGLRLPAHRFVSEVLRRFSVQIHQLTPNAIVALAKYVWATTSYGGQPSVEVFAKNYCLHWQKRVVEGGVAQFGSCTFTPKTGKTTMPVVELVPCARNKWGSWNEFWFYVSEATVEGHQGLPVSLMCSHYYSAYPPFEVAEEDTDEEALRYAAGQSSGRDLVEEFAAYGVWPLAHGWALGEVCPRQMPFHGGREVRSPAFALSLRNRDPAAFVRDAEDLAVRLVGRYVPKTEGQRSFDIRGSNDRLNRVFELNQLPYDGYPGQDEADRRGKKPAVEAGGDPALAAATSSKKRKLVMDKDRQAAARKRQATVRVHEARPKRQRGASTAEASGGGKPPLPAKAGASAPGKAPEATVGAGGPKLSKVVPSASGVAEAAKAARSLPPPGKRVADFGTEIDVEDYLGGLDEGPLALVVPGAAVATAVPAPKAGVEILGAGGEVTALALVRDEADAATRRLKEAMEALSQVADFTSRTASGALTATLSAEVERLRTQHADAVREKSASDSKCRKLAEKVAALEKEKADLRRQLMEERREANEAIAKEQSAQAEARLARAEGNVAKELAGELQRRLAAFESRAEGAEAAARAEAERTRTQLMTSYRELGVRTSDFEVPEREAGLRCLEWVQEELQELPTVLAGLMSFTSLVTCEAAMNALSREGCRHFEALDQVDEDFGRDIFEVEDPVVRESAGALYDRMWGSYGREVVRARAEAARAQAERGERVDDFGALNSAPPEPETTPAEAATGVAPVTAEDAPGALVPAAAGEGLLPRVAEGASDAPAAAVPGAEDPAETTAEAAAEAPAAAGPS

SEQ ID NO: 361074 - protein, 128 aa, Zea mays
  unsure (1)..(128): unsure at all Xaa locations
  Clone ID: MRT4577_9247C.1.pep
GVNRGPTGDLGPRQTNKQTTNPPGGLFFRPKRXPFPPGTGKPTFRGRGPKLLVNMPGGPRSNINRGGGHXEPARPGPPTPLSYGGAPWPPAPPGGXLKWAPPPQGKLFPPPPXRGGILPRPSQGEPFG

SEQ ID NO: 361075 - protein, 212 aa, Zea mays
  Clone ID: MRT4577_92480C.1.pep
MQDGGEVLFLDGVGEVAVTIGRNGLSARPLHPELISSCWSSITLQPKLDSKINFSDVYAIEMLDKGPICGPWNTKTAIQGKKNIEMHRFVVHGITRRRKHPSPWVPCEYIFGHKDLKICKDWFQRLILRINNESGRPKNLMVFVHPLCGKGRRVSNWETVYPLFARAKIKTKVIVTERAGHAYDTLSSLSWQRKMQTKGPFGAPPVRAVGVI

SEQ ID NO: 361076 - protein, 588 aa, Zea mays
  unsure (1)..(588): unsure at all Xaa locations
  Clone ID: MRT4577_92481C.1.pep
MQDGGEVLFLDGVGEVAVTIGRNGLSARPLHPGWIFVALGARSKRLEDDRKASRYLYNLPEEAALGACDMSAXCWLKDILLQEKKTCKXVKYSKLETESSSVSEDVYAIEMLDKGRICGPWNTKTAIQGKKNIEMHRFVVHGITRRRKHPSPWVPCEYIFGHKDLKICKDWFQHLISCINNESGRPKNLMVFVHPLCGKGRGVSNWETVYPLFARAKIKTKVIVTERAGHAYDTLSSLSDIELKAFDGVVAVGGDGLFNEILNGILSSRHKVSYPPTPEGFGYVGSSDNCEEQTRNWVNFSKPTPDSGNAVFLGNPSKCDDQEPLLSTSHPSELEIPSNSTKEPCIGDQDNPVSFPNDWFRLGIIPSGSTDAIVLSTTGERDPVTSALLIILGRKVSLDIAQVVRWKTSPAAEVLPTVRYAASFAGYGFYGEVIRESEKYRWMGPARYDFSGTMVFLKHRSYGAKVAFLDTPYTHSLTASAQDDITGAQPLQSRWKKPRKIICRTNCFVCKEASTSGQNPDDVADNSRTICENQKWVWSEGHFLSVGAAVISCRNERAPDGLVADAHLSDGFLHLLLIRDCPLPLYLW

SEQ ID NO: 361077 - protein, 75 aa, Zea mays
  Clone ID: MRT4577_92482C.1.pep
VLEHAEELGVEFILDGQPAIDVREPILGGVPKALLDTLLEGNLRDDHVVDGPVLGQLGRNHRSRACASAALCRRR

SEQ ID NO: 361078 - protein, 109 aa, Zea mays
  Clone ID: MRT4577_92483C.1.pep
KNLRLWELENCSREPGKFSPKIKKFKRTVLKNSYMLTFGFFWGGAIITYFFFGRKKNKSFALLQQGHFSIGGKPKNSPKRFQEGPNSFCWEGAFFGFVKPPFFWGLGEK

SEQ ID NO: 361079 - protein, 74 aa, Zea mays
  Clone ID: MRT4577_92484C.1.pep
TAATTTTTATRGAQPQRGYNSKRKTPPPQLEVHKDCTGRRLDPQPFTFKVLTHFWRWFPQARTIGPERWDSGTV

SEQ ID NO: 361080 - protein, 115 aa, Zea mays
  Clone ID: MRT4577_92485C.1.pep
FLYIVFQISRGRHALCVCMDASASSPLLIPCCRRLAPGNRLPIFCSGSKSDAFTPTALLICGHPPFAGLHYSFPGVPSFLCSIIPMVLVPPCSARLTASCRGCFFFRAAKCFFNK

SEQ ID NO: 361081 - protein, 97 aa, Zea mays
  Clone ID: MRT4577_92486C.1.pep
GPTKGKEFSSSRKINVCFDKPLNTEPPPTRILFIMASHKEASMGAQKRRIHYIFHCNDLYQNACRGDRRNPSKAPHFYPRTRKPPEGKMGTRPKGFG

SEQ ID NO: 361082 - protein, 119 aa, Zea mays
  Clone ID: MRT4577_92487C.1.pep
FLSHAGPRRRGETDKHREAPHPTPRSNDAGAKNSTRQRATGGGSRYQDPAATTADTEPAAAKPAAGKQPDTPTEHKGDHTRAGRLPNTHKAKKEQQQRTAHGTSAPNQHVKQRAQRGRP

SEQ ID NO: 361083 - protein, 94 aa, Zea mays
  Clone ID: MRT4577_92488C.1.pep
MTGRGNPGGRKTLLAPIHFIFKLLQQRSTVSIWLYEQLSFRIEGKIRGFDEFMNLVVDDAVEVRLATKSEEEKRRNLGQILLKGDNVSLIQAVQ

SEQ ID NO: 361084 - protein, 187 aa, Zea mays
  Clone ID: MRT4577_92489C.1.pep
MAAQREKSAAVAVGPAHGAAVSGSPSPSSSSGGPAAASSSGERWSAAIGNLGELGANVDALQKMLGRKAVFVDDDIFSKASLAADQARTIKVLDQRVQSLERELDAAISAAARARTDKRQAEAAQRAAELRTQEVTKELENTARVFQLHMEELRLKQEEIAKKDSDIKVLEAIIRTLGSKDDDGSSE

SEQ ID NO: 361085 - protein, 141 aa, Zea mays
  Clone ID: MRT4577_9248C.1.pep
VKPTGPNEPCADPRSHPPSASVEDPFPGDPFGLSVKDLATRILHTRCDSSEALYTLRLLASNSPTSTLHALTAATSSITWCHRLGHPRPDVMSKLSSSSVISCSRGSFEHLCRAFQLGRHVRLPFPSSSRATSNFDLVHCD

SEQ ID NO: 361086 - protein, 79 aa, Zea mays
  Clone ID: MRT4577_92490C.1.pep
NSARGSNWFGAVVFELRLVLQIDADRDQLRPALIGTSRSLRVGQSCFAIGNPYGYEHTLTTGVTSEILKSPTVRCEYIV

SEQ ID NO: 361087 - protein, 224 aa, Zea mays
  unsure (1)..(224): unsure at all Xaa locations
  Clone ID: MRT4577_92491C.1.pep
MAAQREKSADVAVAPAHGAAVSGSPSPSSSSGGPAVSASSSGDRWCAAIGNLGELGANVDALQKLLGRKAVFVDDDIFSKASLAADQARTIKVLDQRVQSLERELDAAISAAARARVEKRQAEAAQRAAELRTREVTEELENTASMHCPVSTLAFAGIAFDYLAFFKKXVFDQWSQLHLAGVFELHMEELRLKQEDIAKKDSDIKVIEAIIRTLSSKDDDGSSE

SEQ ID NO: 361088 - protein, 57 aa, Zea mays
  unsure (1)..(57): unsure at all Xaa locations
  Clone ID: MRT4577_92492C.1.pep
VQSPPSEDPLQSKWQGDFWKLTDCMDYATGHAXLPSSTCCGDSGDTEKARYYIFIFI

SEQ ID NO: 361089 - protein, 79 aa, Zea mays
  unsure (1)..(79): unsure at all Xaa locations
  Clone ID: MRT4577_92493C.1.pep
TCGFSRRTGAIAAPTKEGTNNKTNNDVKFTKNGYVPYLLRIEVPRQVRLSTNPSFGLGXDKIVVKEDKEYVSRKPXRPG

SEQ ID NO: 361090 - protein, 77 aa, Zea mays
  Clone ID: MRT4577_92494C.1.pep
RKDRQGGHEAKGPVGERNNSDDPIPEQPRPRKHGKEVRRKPRTSTKKKDHSQGSYKGRSGQERGHPHPNLARHLPLQ

SEQ ID NO: 361091 - protein, 104 aa, Zea mays
  Clone ID: MRT4577_92495C.1.pep
RCQASLWMFAVGGRKRSRPSIDQRLNERCRRCDARRDGARGRCPPHVGDPGGVWTGSPPMGRARYPTTASRAPASPLLVLCAAGQQKQRRPPRPPPSRGHLGLG

SEQ ID NO: 361092 - protein, 105 aa, Zea mays
  Clone ID: MRT4577_92496C.1.pep
HSRRELHGDAHGGPRSDALRGGSPRPQRRRRRSLLLRQVARRRRSRGRRHLLASTERAVELLRALLEFIAIRAEPMIPFLVLFLPLIHIPFGIRVMLTLEWLLRV

SEQ ID NO: 361093 - protein, 38 aa, Zea mays
  Clone ID: MRT4577_92497C.1.pep
KSSRCAKKKKKKKKKKKKKKKKKKKKKKKKKKKKKKFF

SEQ ID NO: 361094 - protein, 40 aa, Zea mays
  Clone ID: MRT4577_92498C.1.pep
CSPLILPTMLLCLCACLQAVYLFLTLLDCFTCVCYDHYNI

SEQ ID NO: 361095 - protein, 78 aa, Zea mays
  Clone ID: MRT4577_92499C.1.pep
LVICVLSIFCSVSINCSSYFVDLSKLGNLYLLLFYLKFSSISYFSQNRLFTPPLAGVLDPTPSPLKYYKFIIIGRMDL

SEQ ID NO: 361096 - protein, 95 aa, Zea mays
  Clone ID: MRT4577_9249C.1.pep
AGKEAQLGRQQGSKVVPTVNLDEYVTRDLPQIIRARGSANKIGNIKFSLNGKLPYLNRTQICSKISNLRLRRDSGRLSIGERLRISEAGQILQLA

SEQ ID NO: 361097 - protein, 46 aa, Zea mays
  Clone ID: MRT4577_924C.1.pep
KQREHKYQTTEKAPHRATMGPAHMCTPPGAPSEPFGSKIWIQKGAR

SEQ ID NO: 361098 - protein, 63 aa, Zea mays
  Clone ID: MRT4577_92500C.1.pep
LLVKGSNLKAINHLPTSWTMWRDMPLVRVSQYHVSYIWLIMTKDINAYNKIKKQKKQKKKNNN

SEQ ID NO: 361099 - protein, 92 aa, Zea mays
  Clone ID: MRT4577_92501C.1.pep
LYNKDHGARARAPLGARRNLLNCGRCRARLVLRACPYRSDAGSSWIDEVLAENARVRDITSGVAGRTLGRQEMLDLSSNSLTGAIPAVSGNA

SEQ ID NO: 361100 - protein, 721 aa, Zea mays
  Clone ID: MRT4577_92502C.1.pep
MTVKKEVFLALKQGTMFVSEYKDMLLQLPRYAPEDINTDVKRAIMIERKHKEMEDWKRKMSGPQSGSSNRPCSSSNLSQHCKHDHPHRYNDRVNVNPNSSFRDSNYSNNISSTVKTTRMEVFRKQIEAIKTIRLRKLRKALLGLKLGILQTSMNKNIKGRLIVSLMKNQRLLGAIKGPPGRHGVIHSLYQATNHPKRWILKSRGRDEYNKVSGLDNTKEIWDTLKIAHEGNDIIMITKMELVEGELGRSFTVIDPHLVNLIRENPRYTKMSHEDILGKFVSRRMMVKEARYIDDIAKGSLPHYKPQPITLKATTNKEALLDKVVQVEVTELNENEMALLIKCLKTTLKGHKDYPNKNKSRGKCPCFKCDYIDLFKGLDRYKVDKEKVRFARDAYTIGRHSSIMDGLGFQKGTKDTKTQKVYASRGSRWIIDSIYTNHMTGEKKMFASYLKNKDSYDTIIFGDGNQGKDKYETQETLKHFLRRAQNEFELKVKKIRSDNRSEFKNLQAGEYLEEEGIKHEFFAPYTPQQNGVVDRKNQTLIDMARTMLGEYKTPERFWSEAVNMACNGIKRLYIHRLLKKTLYELLTGSNGRNEDYGDRRCATAGTPSIRSTFFLNDGAIPNSIQGACTSKRRPPEGISGKRRPPEGISGRQQSPKGISGRQRPPEGLPQDDARSRESRVPEGMDQGGAREQEEMEEEEVPHAPPTQVHQYSKESSSGSNPW

SEQ ID NO: 361101 - protein, 86 aa, Zea mays
  unsure (1)..(86): unsure at all Xaa locations
  Clone ID: MRT4577_92503C.1.pep
VYLFRVSSVCDRIVHAVLYHDVFKNVVMPVLSHGWLNIQGTIPRDMSPLALXFNGIGRASHFRPTSIPRHCIQSAIVGSRVCSICC

SEQ ID NO: 361102 - protein, 241 aa, Zea mays
  unsure (1)..(241): unsure at all Xaa locations
  Clone ID: MRT4577_92504C.1.pep
LFRPRHRHAAAAVASKXYVFGGLSNEGIYSCMNVLDTKXMQWSVLAASGEWPCARHSHSMVSYGTNLFMFGGHDGQRALKDFYSFDTTKLRWNKENTNGGTPSPRFSHCMFIYKNYLGILGGCPITENNQEVTLLNINHRVWFCVSVPLLSQSLCVRSSSVVIKDDLVILGGGASCYAFGTKFSQPIVLYSCLSSWSLCLNMIGTKMAQFKGVMQYLLLNCQEMNKMASLIMTQNYRCLFG

SEQ ID NO: 361103 - protein, 96 aa, Zea mays
  unsure (1)..(96): unsure at all Xaa locations
  Clone ID: MRT4577_92505C.1.pep
YKRPFPSIYRAVLQEVLALQHLVTYKKTYQYDAEFDLGFNTGYDQLMEWLPSNEDRNSIFKVYMTELDEDADQYRVDALMMEEWARSXTASPLGDF

SEQ ID NO: 361104 - protein, 75 aa, Zea mays
  Clone ID: MRT4577_92506C.1.pep
HVTRCTMFRINVLRATASVTHWKRGNSTADRVICTPIRKTWHFGPESHRICHRAQLYSDAFSYSYILLWSDFVIS

SEQ ID NO: 361105 - protein, 76 aa, Zea mays
  Clone ID: MRT4577_92507C.1.pep
LSVNRPRCVHAIHAVVSFAEYMLLLLLLLFAHMLNSAIQLRPSYRHKLICLAFSLRCCKVTARANDYYKISVKWPP

SEQ ID NO: 361106 - protein, 134 aa, Zea mays
  unsure (1)..(134): unsure at all Xaa locations
  Clone ID: MRT4577_92508C.1.pep
XPLAGLGAWPXPPGCSXSXXGSVXPRSPPAXGSGPRWRPPXGXXGXXCFLVXXXXLAAAFCXXVCPVAXXVWSCLPXXSSGALVVGAXXXXXXPFFXSLXLLPXGGLPSSXCRLPXLXLXXPPSLLVLPXPPPP

SEQ ID NO: 361107 - protein, 80 aa, Zea mays
  Clone ID: MRT4577_92509C.1.pep
DGVPLASRSSSSSTSCDGGSEGSRCRRTVRSAAPAVGTPHHVRGRRGGVLVGLTGHARRLGVEACRGVGDSADDGCATRP

SEQ ID NO: 361108 - protein, 226 aa, Zea mays
  unsure (1)..(226): unsure at all Xaa locations
  Clone ID: MRT4577_9250C.1.pep
MEAKPHITIGSIAPSDSAQSTTTGLLSYXLAGIDKXVIERSEKEAAXEMIKRSFXYACVLDXLEAERDRGITIDIALWKCDTTXKYYCTVIDAPGHRDFINNMIFXGASQADCAALMIDSTTGEFEDGISLDGQTREHALLACHPLXLNHMICCCNDMDATTPEYSKERYDEIEKEVSSYLKKVXYNPDKIVFSPISGFEGDYLIERTTMLDCYKGPTLLEALDQI

SEQ ID NO: 361109 - protein, 85 aa, Zea mays
  unsure (1)..(85): unsure at all Xaa locations
  Clone ID: MRT4577_92510C.1.pep
RXRGFXNRMISIYKCLRVFWSLFTTIYKCLHSSIFRKELLLRTNMVQVRWSLFAAFRSQMVSIYKCFGLYLQLFTSLCIYKCLDS

SEQ ID NO: 361110 - protein, 228 aa, Zea mays
  Clone ID: MRT4577_92511C.1.pep
RAGLFLDEADELLAGGSKDQIYKIIVHLPDKIQVGLFSATYSTEAIESSRRLMDKPVAVIVPRDEELKNVKQYYLAVENEGLKLRKLLALFKTTGTEQLVIFANTRDNGRVGAEDVGKRYAVSASHDGMDQRARDAAVQKFRSGSSSILIATDHGGTTNAMPQVPIIINYDLPTESMRYVRRLQQQNRQFRRSVSVAISFVTPADRRTLSAITSFCKCYMGELPTDLK

SEQ ID NO: 361111 - protein, 40 aa, Zea mays
  Clone ID: MRT4577_92512C.1.pep
GTTVCTSLMLLLIYIIFIMLQNIKLHEQPCVNSMIINPLC

SEQ ID NO: 361112 - protein, 42 aa, Zea mays
  unsure (1)..(42): unsure at all Xaa locations
  Clone ID: MRT4577_92513C.1.pep
GRSFWQQFCQQLTQVQPQHLFXSIFHSILQYILQKQPQSGQV

SEQ ID NO: 361113 - protein, 56 aa, Zea mays
  Clone ID: MRT4577_92514C.1.pep
FKVPDWFLDRNDYKDNRFSQIISNALGMKLRDNLNKLKKISPLLDFISSLPDGESK

SEQ ID NO: 361114 - protein, 113 aa, Zea mays
  unsure (1)..(113): unsure at all Xaa locations
  Clone ID: MRT4577_92515C.1.pep
RLIDKHVLVLESYNKKVSFAQIHLHFVLKLIFGNAKAREGEKAERIVGLNSQVSTSSKVECLVIWWEKPGEYVLYEQQQQKRLLLQQHQQDLYXHQLHSPPQDQSLPSMEPIQ

SEQ ID NO: 361115 - protein, 80 aa, Zea mays
  Clone ID: MRT4577_92516C.1.pep
CISLNLLKKNNRQNKKEKVEQWYPNYQTFNFAAGTDLRVETNNPLCLFPFRFFCIPKYELQNKMEMYLSERNWEWQCMYR

SEQ ID NO: 361116 - protein, 35 aa, Zea mays
  Clone ID: MRT4577_92517C.1.pep
MKGHLSSCCLKFMQLNKQQQGVVIMQFCCVQLLYI

SEQ ID NO: 361117 - protein, 58 aa, Zea mays
  Clone ID: MRT4577_92518C.1.pep
PLSRLQHVISTAREIRGSEIRGRIYRSLEGEEHSLFLIFFCSCSLHPSPWTKMRRTCQ

SEQ ID NO: 361118 - protein, 36 aa, Zea mays
  Clone ID: MRT4577_92519C.1.pep
DAPSNWALRPALLVVTHSVTGTLDSHLDPDTFDLFT

SEQ ID NO: 361119 - protein, 83 aa, Zea mays
  Clone ID: MRT4577_9251C.1.pep
LFPASGQYVARRCSHRESAHQTSSHLIRRGHPAHHARECSSRPSSLRVSPVLRSGGIWKYHAPPTPCNSGNSFHRSAEASGEA

SEQ ID NO: 361120 - protein, 109 aa, Zea mays
  unsure (1)..(109): unsure at all Xaa locations
  Clone ID: MRT4577_92520C.1.pep
KLPGDRTGLAGGRAAAARSSSATAPKXKQXRLPPTAPGKIPISGPGHLIGSHRHGALRDHHATVGPQRGRRLVQGXRPRPTAGGRPRPQSPSERGRTPRTSLLGGPGPA

SEQ ID NO: 361121 - protein, 108 aa, Zea mays
  unsure (1)..(108): unsure at all Xaa locations
  Clone ID: MRT4577_92521C.1.pep
KEPAAQKPXKHPKNKDKQXGRNTKQENTRKPNKGEQKQXGPXNKTPGHKENPTKGKRRPTQHGRKTTGLSPITNRTAQATLNLSSWEPPQKPKKQMTPKQTPWETAAT

SEQ ID NO: 361122 - protein, 98 aa, Zea mays
  unsure (1)..(98): unsure at all Xaa locations
  Clone ID: MRT4577_92523C.1.pep
KVGVDVSEILELVEDREAFGMLVDTKFRQLDSDGDCLLSLGDLLPHLADIFFALGLLAXGAVFNSDHVFSYVVSELTHGTFHGEVSNVDFQYALFDIL

SEQ ID NO: 361123 - protein, 187 aa, Zea mays
  unsure (1)..(187): unsure at all Xaa locations
  Clone ID: MRT4577_92524C.1.pep
NSARGRRREAKRGGTVGRRLITPSVGFRRSHGQAPPAPFLLPRRDHPPPPLHHLLPPHHLLGDYDDYRYPSRLPPGHPXDIFQESPPPHLRHFVGHGHNGTDVPXTLPPQPHVVASLEERLGAEMDEAHVLLAQDQRLTHMALVQEVAAARRDLGCTAHELTSAHEESDQCLHESRGVVTPPHELTG

SEQ ID NO: 361124 - protein, 179 aa, Zea mays
  unsure (1)..(179): unsure at all Xaa locations
  Clone ID: MRT4577_92525C.1.pep
ALGAFFFFFFLFFFFFFFFFFFVSLFLKLFPFCLLVLFLFLGAGDPLKNNSGPSGRQARNPQQAGSQGXPTQGPPQPNPXQGXPPPXAPKLGPTKKPLPPPPSKSPPRGPKXPPAQNRKGPPPSSNPKTCLLPEQPPKRPGAPHLYDPGAHPSPQAIKKAPPHPPPPEIXPPPPPPMGP

SEQ ID NO: 361125 - protein, 83 aa, Zea mays
  unsure (1)..(83): unsure at all Xaa locations
  Clone ID: MRT4577_92526C.1.pep
EATVYRGPHPHESSAARRVTVTTLRGKHRRGEPITVVTVYYYPLAVHVHSVGIDFCLVXDSVVMFVHCHDTTLPITLDIMLQH

SEQ ID NO: 361126 - protein, 97 aa, Zea mays
  Clone ID: MRT4577_92527C.1.pep
FSPFPMGAPFLVLKHPLSPPPQFFCVHFARIFFFYNPQIFFWHRLFPSKGPPPFLRKKQRGVLSWFFSSQNSFFFLEAFYGLGFPPPFPFGALLFFF

SEQ ID NO: 361127 - protein, 62 aa, Zea mays
  Clone ID: MRT4577_92528C.1.pep
STDLTCTVCSDKFRADLMNIAMTTLSSKILSQDKEYFAELAVDAVLRLKGSTNLEAIQILKK

SEQ ID NO: 361128 - protein, 93 aa, Zea mays
  Clone ID: MRT4577_92529C.1.pep
MASSLGSDDGAGSAAAAVCCMCGDHGLPRELYRCDLCRIRTQHRYCSDLYPAAAAGPYRSCNWCLRQGGAVGGGDHSSSPVNNKVSAAAGTGS

SEQ ID NO: 361129 - protein, 90 aa, Zea mays
  unsure (1)..(90): unsure at all Xaa locations
  Clone ID: MRT4577_9252C.1.pep
FLLSLPXVSFPGLLPLCSLPGALXFFFFFFXGGFFLCLFFSPWAXPVFFSKKKKGGPPPLPIWGNITPISCPITYVFVWHSLFNVKESKN

SEQ ID NO: 361130 - protein, 207 aa, Zea mays
  Clone ID: MRT4577_92530C.1.pep
RPGRAFRCRFRDRNSHWRAPAGEARSRGENKAAPCSPWLEKASPCGRLPALRRWKPDTEVCTVLSSDTLPQTPHSAGSLRHWVRPTGAQQCGKCALVYTPELAVNKIMIGNLIHCHDKVKHEAGINGNIKIFTEDEIKRITNNFNTLIGKGGFGEVYRGTLDDDNEPVAVKKYINEDLREVFMEEVRIHSKISHKNVVKLIRYCIGK

SEQ ID NO: 361131 - protein, 141 aa, Zea mays
  unsure (1)..(141): unsure at all Xaa locations
  Clone ID: MRT4577_92531C.1.pep
SLYVEEIDVREXAPRTVVSGLVKYIPLEEIQNRKVCVLCNLKPVVMRGIKSDAMVLAASNEDHTRVELVEPPADAAVGERVTFAGHSGETEASLSGKSKVWEKLAADLRSNGDLVACYQDVPFMTSAGVCKVQTIANGEIR

SEQ ID NO: 361132 - protein, 65 aa, Zea mays
  Clone ID: MRT4577_92532C.1.pep
VCFSTRNLLRCLESDYCPYNAFLNKLYQWRVSHFVELVEILMEQSSIWDLMSMTTNPLYPWLYIL

SEQ ID NO: 361133 - protein, 40 aa, Zea mays
  unsure (1)..(40): unsure at all Xaa locations
  Clone ID: MRT4577_92533C.1.pep
ELAXSVLQQPIGKLQQQCLANVTIQTMGTEQQEQFIPGVS

SEQ ID NO: 361134 - protein, 132 aa, Zea mays
  unsure (1)..(132): unsure at all Xaa locations
  Clone ID: MRT4577_92534C.1.pep
MGGGGRKKPRVGKCPCRDPPPPHRSPNPRARDPAPPSSVTTPEIHRRAIKPPGLRSPSMHAPSGPGGQPTYPSRSIEQQPDQPKKGGFFFPSPGGXTPPPPRGPPPGVWPPSCRGARGTRSPPCPGAAPAAR

SEQ ID NO: 361135 - protein, 71 aa, Zea mays
  Clone ID: MRT4577_92535C.1.pep
DPPNEAWIPPELLYSRTARTPEREKEFFLFPPHTPPKFYNEEKGFMALKEKEKNVQIRKEIGHRGEKRHAC

SEQ ID NO: 361136 - protein, 109 aa, Zea mays
  Clone ID: MRT4577_92536C.1.pep
KKFKMFKYSLLLLISSLALASAGYSQWMSANVTNLSSKPVMLSAETKWGKLHPYGNPEKELEFVRHVLEPHQSTTVNAIGRKNTPTGTSGEIRLSRFTNNQVYQFAIVY

SEQ ID NO: 361137 - protein, 190 aa, Zea mays
  unsure (1)..(190): unsure at all Xaa locations
  Clone ID: MRT4577_92537C.1.pep
PRPNRARAPGARASEGEARGTGXEGKEADGRPGANRXPGRQPTGTAAQGAAADGDDREPPPARLXEPGEPRXGPFYRAGIAERGATFLFLSVAILPAVGVCMPTSKCATGGLQGIACAFGGLIFALAYXCSAGVSGGPVTPAATFGLPLAGGLPLARALFSVLSPCLGAFRGAGVAMGFPVGLXVSFGGG

SEQ ID NO: 361138 - protein, 177 aa, Zea mays
  Clone ID: MRT4577_92538C.1.pep
MASWVAAARAESGVLSAAAGHHHALALSMSSGSLSSCVTAHPAAPEYGAAAAALDGGRKRGGAAGQKQPVHHRKSIDTFGQRTSQYRGVTRHRWTGRYEAHLWDNSCKKEGQTRKGRQVYLGGYDVEEKAARAYDLAALKYWGPSTHINFPLEDYQEELEEMKNMTRQEYVAHLRRK

SEQ ID NO: 361139 - protein, 463 aa, Zea mays
  Clone ID: MRT4577_92539C.1.pep
DFFVTLHGILAEKEEVAELQPVPDAHVPVLKFKFRGISIDLLYASISLSVIPADFDISQGSVLCDVDEATVRSLNGCRVADQILRLVPNVENFRTTLRCLKYWAKRRGVYSNITGFLGGVNWALLVARVCQLYPNAVPSMLVSRFFRVFTQWQWPNPVMLCAIENNDLGFSIWDPRKNPRDRNHLMPIITPAYPCMNSSYNVSTSTLRVIMEQFQFGNKVCQEIELNKANWNALFEPFHFFEAYRKFLVVDIVAEDDDDLRLWKGWIESRLRQLTLKIERDTKGILQCHPYPCEYSDPTIECAHCAFYMGLSRKEGLKKRGQQFDIRGTVDEFMREIGMYSLWKPGMDLAVTHVHREQVPSYVFEQGYKKPCPTMHANQQEQSDGDGTFSPYLESQLKRKYISDGDGHVDLCKSVKRASVSPPGVGTPPHLGNSVSNVVCDSPVKFVSSVKNSGERLPHHMMI

SEQ ID NO: 361140 - protein, 129 aa, Zea mays
  unsure (1)..(129): unsure at all Xaa locations
  Clone ID: MRT4577_9253C.1.pep
MTQWSIAYISIIGIIVCIPPAXIFKGPKITHPGFSDAIAXVGLTXFVRYLFLVGLPYHLXHQIATNTLELVAHVSHADGNVVKRVIHIGXLIICCRSKCCTQPVLXTSIGIAGVDMHSYINAKIEHEKR

SEQ ID NO: 361141 - protein, 171 aa, Zea mays
  unsure (1)..(171): unsure at all Xaa locations
  Clone ID: MRT4577_92540C.1.pep
ILSYNLXVHGPGADIDTLCVGPSYVNREEDFFVTLHGILAEKEEVAELQPVPDAXVPVLKFKFRGISIDLLYASISLSVIPADFDISQGSVLCDVDEATVRGLNGCRVADQILRLVPKFEXYETFPSTLSCMVWSYCVNIPESVLXNFRTTLRCLKYWAKEGGVYSNITGF

SEQ ID NO: 361142 - protein, 259 aa, Zea mays
  Clone ID: MRT4577_92541C.1.pep
MIMWIEALVRSVSVSAGPLNFGLILKVLRDASGLHVLLYVVTQKECCIVQARYGLFQYDAANGEITQKKKKKKKKIKTPDSNAVVWSGPALLFLLFLIGIWQVYVKKKDSLGWTPEETFNTSVTAPTGSLLNHPTSDRAFADSTARSSDRGYVDGTSRASDRSYVDATTRTTDRGYSDATRAVDLRGGALRSAPRRYVSPTRYAGTSGIQYRPASAEPGLRGTPEIKYRGPGMEPPGFPKKREPLFSNNQAVVVDDHVD

SEQ ID NO: 361143 - protein, 373 aa, Zea mays
  Clone ID: MRT4577_92542C.1.pep
MASTTSPLLLLAAMAVVAATLAVAPVSSADLPSGVASITSKIPNPWSAFQNLTGCHLGEQQQGLAKVKDYLSRFGYLPPESSGSFNDVFDADLEEAIKVYQRNFGLGITGVMDASTVAQMMAPRCGVADIINGTSTMGGGSASASAAHARGRNLFTYFPGSPSWPRSRKSLTYAVTQTSLTSIDRATLSQVLARAFARWSAATTLSFTETASERDADITIGFYAGDHGDGEAFDGPLGTLAHAFSPTDGRFHLDAAEAWDASGDVARAASDVAVDLESVAVHEIGHLLGLGHSAEPSAIMFPTITSRTSKVDLAQDDVAGIQNLYGGNPNFKGVAPPATSSRDMDSGATTSSRGPWTALAAAVAVAAGLLVAL

SEQ ID NO: 361144 - protein, 70 aa, Zea mays
  Clone ID: MRT4577_92543C.1.pep
SKNSNRPQPHWTENFNFYTLIHLIFLPPKPNSCWMYKTTMNAPTAFYRQITPYNPPKNLTPSLGSGGLFT

SEQ ID NO: 361145 - protein, 45 aa, Zea mays
  unsure (1)..(45): unsure at all Xaa locations
  Clone ID: MRT4577_92544C.1.pep
NPPPQGGGRGPXGTPPAPPPPGGAGXGCQCPPPPGGAARPPPPSP

SEQ ID NO: 361146 - protein, 57 aa, Zea mays
  Clone ID: MRT4577_92545C.1.pep
KFQNLIKPHPNPINTSKHLFPNTILKHPLKPLLYQSIIFTFKLLTIPLTTYQITLYI

SEQ ID NO: 361147 - protein, 93 aa, Zea mays
  Clone ID: MRT4577_92546C.1.pep
FGSSLVREPDFLRFHVCSREAVLVGVLTFKPRAGQQTLYSSCHAWPLLCCEEPGCLTRSRRSLGTYSLQHTVGFRRPHDVQASGVSVTMDLRG

SEQ ID NO: 361148 - protein, 39 aa, Zea mays
  Clone ID: MRT4577_92547C.1.pep
KRLFLYAIKKRIFFIFNLHKYTASNICSPLVHFLLKYDK

SEQ ID NO: 361149 - protein, 200 aa, Zea mays
  unsure (1)..(200): unsure at all Xaa locations
  Clone ID: MRT4577_92548C.1.pep
YLKNSIVXMPIHGWAGSAHCHCRRQLVGRGESCTYINADPLFRACSFCSQSMWIRWDWMGFNPKQVKIFYNFFQSHPIHHGIGITEQALRGARKLPELLRPWEFGPGSSSPSKISGSASRSFSVLAVTDARCLSVHGRRPPRWICSHPHSPSRRFHERSLPPSLFHCFELPGFISCFPGNFLCVCVSVEGFGSRVATWRQ

SEQ ID NO: 361150 - protein, 57 aa, Zea mays
  Clone ID: MRT4577_92549C.1.pep
FCCMVRKIFIYPKEEVRKMNPGPLSCRSEEKAVVGEGSDAKDAKSASNPSLSSAGNS

SEQ ID NO: 361151 - protein, 170 aa, Zea mays
  unsure (1)..(170): unsure at all Xaa locations
  Clone ID: MRT4577_9254C.1.pep
SCERGTPYSHISLVADETFLTSDEIMMNKAILTEKKHLTMDDPVATNSNVKYXVGGGACTNSITVVQRMLHARVATSYMXDLXKYDLGEEMEVDVEGAESTAPQYKDETAPTETCAVCAVAWERSLNSILAIYKXYKSDLLQRSXNWALVXEHATFIYVAGFFLTVSPDS

SEQ ID NO: 361152 - protein, 117 aa, Zea mays
  Clone ID: MRT4577_92550C.1.pep
MPPPPSSPSLARIVNMAAALRVVIAVLAVVSVSLRRATAATVPTVDEACKQYTKYPELCVKSLSSAAPEAKAKAERGGLAGLAGLALAQAAQCGAETVAFVKGLEKMPGGGSTATRA

SEQ ID NO: 361153 - protein, 90 aa, Zea mays
  unsure (1)..(90): unsure at all Xaa locations
  Clone ID: MRT4577_92551C.1.pep
ATCRRRPRPWPSAPPPWTAAGRPARPGTWPRTRSGTRAACPPAFSPXPLXRTPPSRRRTAPPAPAPARPAPPARPAPPSPSPPAPRTTGT

SEQ ID NO: 361154 - protein, 52 aa, Zea mays
  Clone ID: MRT4577_92552C.1.pep
FSPHVALRMCAYQTPSRHSVARTLVPQTDPAFVLEWGGALALTCYGCVGRWL

SEQ ID NO: 361155 - protein, 97 aa, Zea mays
  Clone ID: MRT4577_92553C.1.pep
GSSPSREIPPKARARGGISPGLVRMSVGYNGPLEQPWAQFKGALALMQTPTPPPLFKAPPPAPEGPETANNPPPKHLRAWASERAWPVWTCVCRVRV

SEQ ID NO: 361156 - protein, 95 aa, Zea mays
  Clone ID: MRT4577_92554C.1.pep
FPPFLCCFCFFWVFFLYGGCLTHTREKKHRHCPYGKAARTGCVQPTCSPKEIAGAGESQGIFGARTIMGKGGRDHGLYEHIIRPGLWGQEPGPAG

SEQ ID NO: 361157 - protein, 67 aa, Zea mays
  Clone ID: MRT4577_92555C.1.pep
KNLTHTIPLSEYQTPLVNTVPNFTTNRPLNIASYWVDWLAGKSYHIASQTLNLNTCSSIFNEGHIQG

SEQ ID NO: 361158 - protein, 64 aa, Zea mays
  Clone ID: MRT4577_92556C.1.pep
FSWLWGAQKGIPCFYYSPPFKKMVGLSINTQGISVLRINYGEERSKNVLNGDVCEVKCKATINK

SEQ ID NO: 361159 - protein, 48 aa, Zea mays
  Clone ID: MRT4577_92557C.1.pep
HLRYQIYTIRFSIKYIFILYLFHVINLYDSYYNFGQTLKTFDSPRNLE

SEQ ID NO: 361160 - protein, 100 aa, Zea mays
  unsure (1)..(100): unsure at all Xaa locations
  Clone ID: MRT4577_92558C.1.pep
GKQLEDGRTLAAFKIQKESPLPHGAPSPWWQVSHGSFKLHMRLRRLVPPLHMEVVKVSAVRVMSRVSVGLIMNRLCCVCVLSQNVCQIMNTFDACLXICF

SEQ ID NO: 361161 - protein, 49 aa, Zea mays
  Clone ID: MRT4577_92559C.1.pep
PRGATGLCYVDAQVTGSQQEPCAAWSSQIPCQRPRAEFRAYVRARPDLL

SEQ ID NO: 361162 - protein, 78 aa, Zea mays
  Clone ID: MRT4577_9255C.1.pep
NSGYQKKPFPDTSLVTKELRAPLPQTQIAISYQVYWTCLFRPLPNPTCLCIHPASDHYLLIEHFPSDNSYIPLKTQNI

SEQ ID NO: 361163 - protein, 42 aa, Zea mays
  Clone ID: MRT4577_92560C.1.pep
RIGRASPYRRLWFRRYSLKLRGWFGAPRGGETLVPPATPALG

SEQ ID NO: 361164 - protein, 52 aa, Zea mays
  Clone ID: MRT4577_92561C.1.pep
VCDIRRGCQAQQLVWMNGHWVRALRSAGVETEKSGLAGHVRGPSQGRVTGDG

SEQ ID NO: 361165 - protein, 344 aa, Zea mays
  unsure (1)..(344): unsure at all Xaa locations
  Clone ID: MRT4577_92562C.1.pep
HIFHNQPQYDEHHDSSPVLVSKYHRWDCSRCLDSVEVSGXGQHSENVSMQQNGMNDGCSISIVRILPNSVDSRRLFSCTQQSSQGNDRLTLSKTAQECNSKCSSPGNKAITAMNVPVAEENVPEALVDTRVPSIEVLQASPNSIDLSANILNAVXECPRFTXDVEENGTQNPHSLKPCVAPNEDENNIANDDLNEPNVCKPVSGHKSKQVCNMGPRRASSKRNVESDGKRKRNKSTKLPGISDLKFCQRKPKKXRLLSELIGSEQVGVSADAVQVDHTNSVDLCEGGKRKMHLEVGKGNDTTNQQVDEIQSRAVKNKAKYTGVDKLEDGSSLMNWLKSTNKKVR

SEQ ID NO: 361166 - protein, 34 aa, Zea mays
  Clone ID: MRT4577_92563C.1.pep
CVDKTTLVVRLNRIEIDGNAAKSILNLTSARPCG

SEQ ID NO: 361167 - protein, 231 aa, Zea mays
  unsure (1)..(231): unsure at all Xaa locations
  Clone ID: MRT4577_92564C.1.pep
TLIIWYKKKKKKKKKKKKKKKKKKKKKKKKKKKKKKKKKKKKFLGQSFGGKISPPXARRAPPPGFKFWGNFFFNPFFGGPRPPSLGGGFDGNFFFPFQKRVLFWKGSLPGGPPRDLSGLNPFGPKGGGFRGFPFPKSLFFGGGLALPLNRDFGSPGGLQKNGPLWKGGSREKAPGGFFLVAKRAPFPGVLGGIGIFFGVYLLEQMPQIFNFFSKVGGNLIFYVSPIFFFWG

SEQ ID NO: 361168 - protein, 77 aa, Zea mays
  Clone ID: MRT4577_92565C.1.pep
VVVLGVDRGQHEGVVAKAQRVVLVGATEDLAQVVAAIRRGSGLAVVVVTDSRDGCFFCSLTLGGKAPPVLPPVHRIA

SEQ ID NO: 361169 - protein, 103 aa, Zea mays
  Clone ID: MRT4577_92566C.1.pep
LPAGWPGDRGRIVSCTCIVATAIPGTERIPCSQHTLKRISHQSCSWRWRTRSFTSLSLSSSGSLLDFQDSCCDLLHMSKILHMLAEDEHILKSQCWMATTTVR

SEQ ID NO: 361170 - protein, 67 aa, Zea mays
  unsure (1)..(67): unsure at all Xaa locations
  Clone ID: MRT4577_92567C.1.pep
RTPGPTHTHASGTSSRLXTSPNAQSGLREGEPRRNPRQNTHRPDNRHQQGYGTKDASANSAKRKTGP

SEQ ID NO: 361171 - protein, 48 aa, Zea mays
  Clone ID: MRT4577_92568C.1.pep
LFFPLVNKKPQSKKMHFGFFNQFESFRKKFVCFVFPKRFPVKIRKPPP

SEQ ID NO: 361172 - protein, 65 aa, Zea mays
  Clone ID: MRT4577_92569C.1.pep
LKLTNAGHKHTAWAKLTYACITACMEGMDQKHWVLRVYIPATRPRADGHHRHTYHTMLSCDATRT

SEQ ID NO: 361173 - protein, 38 aa, Zea mays
  Clone ID: MRT4577_9256C.1.pep
AWRCWDAPVVGYGPWKRPSIFMFLSLVGVRICFPFRFF

SEQ ID NO: 361174 - protein, 123 aa, Zea mays
  unsure (1)..(123): unsure at all Xaa locations
  Clone ID: MRT4577_92570C.1.pep
MNEKASVSKELNAKHKKILEGLLRHPENRECADCKSKGPRWASVNLGXRSATLDTWLPEQVAFIQSMGNEKANSYWEAELPPNYDRVGIENFIRAKYXDKRWVPRNGTXKSSSRXREEKSQES

SEQ ID NO: 361175 - protein, 473 aa, Zea mays
  Clone ID: MRT4577_92571C.1.pep
MNEKASVSKELNAKHKKILEGLLRLPENRECADCKSKGPRWASVNLGIFICMTCSGIHRSLGVHISKVRSATLDTWLPEQVAFIQSMGNEKANSHWEAELPPNYDRVGIENFIRAKYEDKRWVPRNGTLRPSSGVRDDKSQESPASANRSGHHRSSFEQNRASPALPSKVAPVASRIPSQASPQPPKVEPPVPKVVSPPQPQKSPAKVEATPPKVEKPSVAPPPKVDYATDLFNMLSMDGTTEKESESSPNDDNAWDGFQSAQPVPSSEEKDSAKPAESMTQSTPGIEDLFKDSPVVSLSSAPAVSQVNAKNDIMSLFEKSNMASPFAVQQQQLAFMSQQQALLMAALKAGNSPQIVPGNANQLNTNVSNPPLGTLPFQNWTNLGYQNPGLTLAAAQNGATKVSNNNQDLSSGTFGFGTPGMHNITPAVPANGATAAGASNNGTASTASSTLPSQSGKDYDFSSLTQGFFTKR

SEQ ID NO: 361176 - protein, 473 aa, Zea mays
  Clone ID: MRT4577_92572C.1.pep
MNEKASVSKELNAKHKKILEGLLRHPENRECADCKSKGPRWASVNLGIFICMTCSGIHRSLGVHISKVRSATLDTWLPEQVAFIQSMGNEKANSHWEAELPPNYDRVGIENFIRAKYEDKRWVPRNGTLRPSSGVRDEKSQESPASANRSGHHRSSFEQNRASPALPSKVAHVASRIPSQASPQAPKVEPPVPKVVSPPQPQKSLAKVEATPPKVEKPSVAPPPKVDYATDLFNMLSMDGTTEKESESSPNDDNAWDGFQSAQPVPSSEEKDSAKPAESMTQSTSGIEDLFKDSPVVSLSSAPAVSQVNAKNDIMSLFEKSNMASPFAVQQQQLAFMSQQQALLMAALKAGNSPQIVPGNANQLNTNVSNPPLGTLPFQNWTNLGYQNPGLTLAAAQNGATKVSNNNQDLSSGTFGLGTPGMHNITPAVPANGATAAGASNNDTASTASSTLPSQSGKDYDFSSLTQGFFTKR

SEQ ID NO: 361177 - protein, 468 aa, Zea mays
  Clone ID: MRT4577_92573C.1.pep
MNEKASVSKELNAKHKKILEGLLRHPENRECADCKSKGPRWASVNLGIFICMTCSGIHRSLGVHISKVRSATLDTWLPEQVAFIQSMGNEKANSYWEAELPPNYDRVGIENFIRAKYEDKRWVPRNGTSKSSSSVRDEKSQESPASANRSGHGHRSSFEQNRASPALPSKVAHAASRISSQASPQPPKVETPVPKVVLPPQSQKSPAKVDATPPKVEKPSVTPPPKVDYATDLFNMLSMDGTTEKESASSSNDDNGWDGFQSAQPVPSSEKKDSAKPAESKTQSTSGMEDLFKDSPAVPLSSAPAVSQVNAKNDIMSLFEKSNMVSPFAAHQQQLALMSQQQALLMAALKAGNAPQMMIPGTANQLNANGTLPFQNWTNLYQNPGSTPAAAQNGATKVANNNQDFSSGTFGFGTPGVYNISPTVPANGATTAGAINNGTASTASSTLPSQSGKDYDFSSLTQGFFTKR

SEQ ID NO: 361178 - protein, 121 aa, Zea mays
  Clone ID: MRT4577_92574C.1.pep
CYETASSVLTDQSDLCCGTLVILVCGSGVTPCNATFNLITGGHFVVLFASITLPARVGPNGPIGDVPDTVLIGLLNVCYAHSHALYSACFHLLPCVNITRALSLLVAIAILFSYSVCDVVR

SEQ ID NO: 361179 - protein, 136 aa, Zea mays
  Clone ID: MRT4577_92575C.1.pep
WPPNSSAQHDPEGGQLIQTTPAACAYSKKEGEPSPYVLASTRNGPAESRARRRCAHPGRGGGPRGGGSCQGEERRGCGRPDLGERAPSQGDERACVGRPGSAGCGREHGPVLKRRRALARRLRLRLTCISPRTGAL

SEQ ID NO: 361180 - protein, 131 aa, Zea mays
  unsure (1)..(131): unsure at all Xaa locations
  Clone ID: MRT4577_92576C.1.pep
LILEGLLRLPENRECADCKSKGPRWASVNLGIFICMTCSGIHRSLGVHISKVRSATLDTWLPEQVAFIQSMGNEKANSHWEAELPPNYDRVGIENFIRAKYEDKRWVPRNXTLRXPXVFEMRRAKSLQLVL

SEQ ID NO: 361181 - protein, 193 aa, Zea mays
  unsure (1)..(193): unsure at all Xaa locations
  Clone ID: MRT4577_92577C.1.pep
SFYSFFNYDYIFLFQILEGLLRHPENRECADCKSKGPRWASVNLGIFICMTCSGIHRSLGVHISKVRSATLDTWLPEQVAFIQXGLLAAMGNEKANSYWEAELPPNYDRVGIENFIRAKYEDKRWVPRNGTSKSSSSVRDEKSQESPASANRSGHGHRSSFEQNRASPALPSKVAHAASRISSQVTPSLPKLS

SEQ ID NO: 361182 - protein, 59 aa, Zea mays
  Clone ID: MRT4577_92578C.1.pep
SRGGRSRRTGGPTTPTVLIAAGVAHAFPLFVAETEGANISGGHVNPAETLCAFRSGTSP

SEQ ID NO: 361183 - protein, 92 aa, Zea mays
  Clone ID: MRT4577_92579C.1.pep
RPGGCFVVNLKNEKPFLPLSPILKNKQTWTPINGQFFRGEKLSTKPSTKVSIKLLCFLGDVLPKPTFFFFDGGGKFSKTTYFWASRIGNHPS

SEQ ID NO: 361184 - protein, 91 aa, Zea mays
  Clone ID: MRT4577_9257C.1.pep
MVDVEETVNKLQWNMRLHAEPEDDAADLPLPALFDRASRLHALASILHLDQDGIRTGVDLLRRYDDMMSKLELFYQIQTKEDFSTANIKDL

SEQ ID NO: 361185 - protein, 67 aa, Zea mays
  Clone ID: MRT4577_92580C.1.pep
KKKKKNQKKSGEKKKKKKNNKKKKKKKKKKKKKKKKKKKKKGGPFLGVLFFFFRPCNAFFFFLCPLI

SEQ ID NO: 361186 - protein, 199 aa, Zea mays
  Clone ID: MRT4577_92581C.1.pep
VGTLPGCPQEGCATKLSVEGSRVFLSPRPVEIMVQRMREGQIPPSQKVYCPYPRCSALMSLGEVIHPMQESSSRHTAADAATLRKCVKCRGSFCLSCKVPWHDGMGCFEYKMWYPLAHPGDAKLQNLARQRLWRQCVKCKHMIELAEGCYHMICVCGYEFCYTCGKEWKNKKASCSCPLWDERNIIRDEDDDDDEDDLY

SEQ ID NO: 361187 - protein, 72 aa, Zea mays
  Clone ID: MRT4577_92582C.1.pep
TCYNYIGGLLKFLGWQFYFIYLSFFFHTLEPPPNIQPPPQKNFFLSPKNQSTLKRNWIDQTPYTPGFCNQPP

SEQ ID NO: 361188 - protein, 161 aa, Zea mays
  unsure (1)..(161): unsure at all Xaa locations
  Clone ID: MRT4577_92583C.1.pep
MSQQRTARRLPSLLVDPAQETVRRRCRDPINVENLLPSKIRINLEENVQYVSMRKALKVKRPRFDVSLVYLTRKFMDLVRSAPGGILDLNKVATKLGVRKRRVYDITNVLDGIELVEKKSKNHIRWIGSDLNXFGAAPQQKKLQAELSDLSAMEDALDELI

SEQ ID NO: 361189 - protein, 150 aa, Zea mays
  unsure (1)..(150): unsure at all Xaa locations
  Clone ID: MRT4577_92584C.1.pep
CLLFXGILLELGAYGLILVNIELLPNAHYLFFPWXVIVXGAMQIIYAGTTSFVQRNFKKXIAYYLVDHMSFIIIGIDSIINIALHGAILQIXSDGFIXAKLFFLDETGRDRKXLIILQELAKXISIPTPXKIFTMVKELVHGIIYGLPAM

SEQ ID NO: 361190 - protein, 55 aa, Zea mays
  Clone ID: MRT4577_92585C.1.pep
MTLELIQFDAMFDPYVKCRSPPKILVILNPRSGHGRSSKVFHGKVEPIFKVCLAE

SEQ ID NO: 361191 - protein, 92 aa, Zea mays
  Clone ID: MRT4577_92586C.1.pep
MAKQDKAASGGNGGGDGAAAPAGEQLVIRAPVHCDGCGRKLRRSLQRLEGKKEQASKRPAACAQLYFVPSYLLVSELCYCTERVSNGKVWRG

SEQ ID NO: 361192 - protein, 194 aa, Zea mays
  unsure (1)..(194): unsure at all Xaa locations
  Clone ID: MRT4577_92587C.1.pep
MSSSSLSPTAGRTSGSDGDSAADTHRREKRRLSNRESARRSRLRKQQHLDELVQEVARLQADNARVAARAAXTSRPSTPASSRRTPCSGPAPPSSAXASAPSTRCSASSRSSAASPWTSRRRCRRTTRCCVPGSCPTRLPPCPSAPRTCSTTDDCLHQPHHHTSEAVSWGWLATRQEELAASQQHSHLLPTWLL

SEQ ID NO: 361193 - protein, 61 aa, Zea mays
  Clone ID: MRT4577_92588C.1.pep
PTGLITGVNHGGSAKKPNKRLDSVTTVLGDPRRSPPRDQGLINPALLPFSTWNLVSPLPSE

SEQ ID NO: 361194 - protein, 79 aa, Zea mays
  Clone ID: MRT4577_92589C.1.pep
PPPTRRAVHVQPLQLPLPWSRSRHSRPRPRPPTPVPLSEIPPLPVYASFAPARIPQPRQLARQISQKPSMQYDNAQYSW

SEQ ID NO: 361195 - protein, 78 aa, Zea mays
  Clone ID: MRT4577_9258C.1.pep
LTREHIYQGQDYVARPLHSLCGLFRWEELLCSGLLSRALTSPVQSYKYISNSMFKPPFQPEQLHLKALTRRQPDILKK

SEQ ID NO: 361196 - protein, 68 aa, Zea mays
  unsure (1)..(68): unsure at all Xaa locations
  Clone ID: MRT4577_92590C.1.pep
CQVVERVKEKKKDGRTDRNREGDEREGGQKEGRRCGLXGRPDLGVRQAGLEEARREEERPWLTSYKRS

SEQ ID NO: 361197 - protein, 55 aa, Zea mays
  Clone ID: MRT4577_92591C.1.pep
RKKKKKKKKKKKKKKKGRTLKRDKNLHTLACNVKSSSGGSPKRISLTFALKHLHW

SEQ ID NO: 361198 - protein, 62 aa, Zea mays
  Clone ID: MRT4577_92592C.1.pep
DGVVLFSSQVVDQRVSEFVLAPLIDQDLCRRSALVTQDQAYRQPFFFFFFFFLFRTRERTRG

SEQ ID NO: 361199 - protein, 275 aa, Zea mays
  Clone ID: MRT4577_92593C.1.pep
MGFMDAEELVVTLAPVAVYWAYAGMYEALLARTTALDKYRLHSRRDEETKNIASRKDVVRGVLLQQCIQVAISVAVLKLEGHGHGHGHGHGAAADGLAAAPAEAEPFLVSAARFGVAMLVLDAWQYFMHRLMHSVPYMYRRFHSWHHRVAAPYAYAAQYGHPVDAVLTETMSGAAAYLASGMSPRVAAAFFVFATVKGVDDHCGVAAPWNPFHAAFRNNTAYHDVHHQRGGGRRNFSQPFFVVWDRLLGTHAPYALRQRDGGGLEVKAFKGRQMQ

SEQ ID NO: 361200 - protein, 65 aa, Zea mays
  Clone ID: MRT4577_92594C.1.pep
HINRIQNYQPQLYYLLTPSHRSAIAGPRVPAGGRTGNGPLGGPLSPREQLADAGSTGIRTVLQAY

SEQ ID NO: 361201 - protein, 51 aa, Zea mays
  Clone ID: MRT4577_92595C.1.pep
NKSHSHLLNYAIFSTHEYHVVGLLYCHVCSIHCPLLNNISTVITLAIPNLI

SEQ ID NO: 361202 - protein, 108 aa, Zea mays
  unsure (1)..(108): unsure at all Xaa locations
  Clone ID: MRT4577_92596C.1.pep
GRHVKVQPKPXDKCANVKYVSRDKYKELMXKPNAGESGVKIFHWFRLVVESFLMGWWGHVXKGTLGQAVHMGTIHQLKERWAFGRPAPMASPPVDVAHTGALHVHQAL

SEQ ID NO: 361203 - protein, 77 aa, Zea mays
  Clone ID: MRT4577_92597C.1.pep
CSAAFFFLSWTIKPLLSGPGYPGHWWGILYRGPQKKIGQAESFSTRIWTFIKMRGYKTNPKQKNGTFNNEGGILRGY

SEQ ID NO: 361204 - protein, 83 aa, Zea mays
  Clone ID: MRT4577_92598C.1.pep
KPLYSPSPSPFKRPFPLPLFIISPSLTNICTFSPFRTISKSLAVFLKDPFLPFLACYPTPLLYFTQIYIHCPSFYYFMSIKTP

SEQ ID NO: 361205 - protein, 158 aa, Zea mays
  unsure (1)..(158): unsure at all Xaa locations
  Clone ID: MRT4577_92599C.1.pep
FGTRGVTTPPPSPSPSPANLTADXSPPRRSHSPXPTAVPPSPPTRDRALPPYSAISQRCPPHPRGSPCHLQPPSIPRDLFMPSPPRSCGSPCRLPRPCSRPVPRPPSPPDRARPMSTQSSSPPPXPREMPAPPPPFVSDPFIYLHHHLQSASASPPKP

SEQ ID NO: 361206 - protein, 51 aa, Zea mays
  Clone ID: MRT4577_9259C.1.pep
NLLCGALKYMQMTKFMLFDLIGVIGYLNQEAINALLAHALIRTKFVYSRPY

SEQ ID NO: 361207 - protein, 89 aa, Zea mays
  Clone ID: MRT4577_925C.1.pep
RDGRETHVSMGTIVAAQLAYLTWSPRCRNKWTHLSWDEYYGHWDLLKLSAAYAVMLGRRTRGYKVPDPSIRLHPNPILAPNSLSVGMTV

SEQ ID NO: 361208 - protein, 109 aa, Zea mays
  Clone ID: MRT4577_92600C.1.pep
APPQPTTLDAGGVRLRTPNGGVEERANDGKTTARTSPTASRSATSPGDTRPRHSPPTSSPTAATARPCRRPPRWGGRRESSSASGGGEDRRRWFRSAWGTRRFAACMLA

SEQ ID NO: 361209 - protein, 87 aa, Zea mays
  Clone ID: MRT4577_92601C.1.pep
TANSDNVIYLGRSFTNGALVGRRNDRDILSDAAIDDVDKVVWYHCAFYRLQLHPDVQRSGGTTTRAGTFSATSTEFFAVAIASSSDH

SEQ ID NO: 361210 - protein, 71 aa, Zea mays
  unsure (1)..(71): unsure at all Xaa locations
  Clone ID: MRT4577_92602C.1.pep
LSVVLRIGTLYVFFGVGGTLLTSLFMVSNISXSVGTSGALFRLLGSMLSELIINWTIYENKVNSKIYAVLQ

SEQ ID NO: 361211 - protein, 62 aa, Zea mays
  Clone ID: MRT4577_92603C.1.pep
DCKENDSGAAMLGMNKVSLEHVRRMYHRRSFMQYMYFINSGHSRRVRLHLISNLRSMTRTCP

SEQ ID NO: 361212 - protein, 64 aa, Zea mays
  Clone ID: MRT4577_92604C.1.pep
LRVEHHHLVIVRSCRRECSARRRCRPPPARSCGQPRTISTTFPGLDWVPRLCYDVALRERNCRR

SEQ ID NO: 361213 - protein, 50 aa, Zea mays
  unsure (1)..(50): unsure at all Xaa locations
  Clone ID: MRT4577_92605C.1.pep
NTDVFGCGNMIXERVLXQRAFDLAGLANDDNVMLFDWLKGLLKEKKALIG

SEQ ID NO: 361214 - protein, 80 aa, Zea mays
  Clone ID: MRT4577_92606C.1.pep
LSSLYRVSSRVFSRCLMPPSTLLYLIIDMAVSRHETGVQHGELDDHRGVLPAPPLPPPPGFRGDRRCLRFPLAVWRGPIL

SEQ ID NO: 361215 - protein, 57 aa, Zea mays
  Clone ID: MRT4577_92607C.1.pep
RGTLPNYWGSTMEFRAFFCKRSPSTVQKNSEIIKAWPPRGDALTRRLAITRRNTIKI

SEQ ID NO: 361216 - protein, 126 aa, Zea mays
  Clone ID: MRT4577_92608C.1.pep
CFPARPSAAPSSFSGRPSAAPRLPSCSAASNSCRSSSYDPLRQLARPTAPYMSLSRIVVEPDEPRSSLLDLVDHESRTLDKNKRGLCASLIKYSIEDFNRRLSSFRASSRNPKDRMKTKLAARYVN

SEQ ID NO: 361217 - protein, 106 aa, Zea mays
  Clone ID: MRT4577_92609C.1.pep
TVDALLPYTAVSVTCVSSPDLQLHTCHSPVSSSSPANLVLLCSISSNHESRTLDKNKRGPYASLIKYSVEDFNRRSSSFRASSRNPKDRMKTKLAARYSPSARQIA

SEQ ID NO: 361218 - protein, 110 aa, Zea mays
  Clone ID: MRT4577_9260C.1.pep
PPLFCPPAPFFFFGARPAFSGLKVFFWGGGALFSLPSGNTGGIYNPWSSGPFSIGFFKGPFLDPSMGFKGTPPPLLGCLFCKPLIKRGPRAPFGVFSPLFFFFTRGFGIC

SEQ ID NO: 361219 - protein, 102 aa, Zea mays
  Clone ID: MRT4577_92610C.1.pep
HESMRSVAIFPIQAICRALGEYRAASFVFIRSLGFLDDARNDDDLRLKSSTEYLIRDAQGPHLFLSKVRDSWSTRSSREERGSPGSTTIRESDIYGAVGLAS

SEQ ID NO: 361220 - protein, 42 aa, Zea mays
  Clone ID: MRT4577_92611C.1.pep
HASGTMVYLLLLPLIITIVGINIDGFTFSLKPPNSYKNAPGS

SEQ ID NO: 361221 - protein, 93 aa, Zea mays
  Clone ID: MRT4577_92612C.1.pep
FQQQRLPLGHLLAQNIRGQQLQQLVLANLVAYFQQQQFLPFNHLGALNSAAYLQQQQLFPFSQLGAAYPRQFFPLFFVKSSFLQLKFSIFCEV

SEQ ID NO: 361222 - protein, 56 aa, Zea mays
  Clone ID: MRT4577_92613C.1.pep
FTPPFALLLFHTFIYALGVNSSTGRHITCFSRWKGFLLFTKHNQMIYLIYSLESII

SEQ ID NO: 361223 - protein, 34 aa, Zea mays
  Clone ID: MRT4577_92614C.1.pep
VAEFQSSVYRRQGRRIAVSRASVRFVATIICTCH

SEQ ID NO: 361224 - protein, 178 aa, Zea mays
  Clone ID: MRT4577_92615C.1.pep
KAHYTEQEKSTVPGWGRISVVSSRAPPPVLSPFLPFLSPSHKSLRPSPPSNVEEEENGCSSGSCESITRSRQRRWIVRWRRLRSSLCSRVEKSWVESRGGESRHDRRVEGSDERRRRREAGWSFERLSPSQRRRGQICGGGGWLPLPAPDELVKWRQEEVPPVSGPDADADADAAWGR

SEQ ID NO: 361225 - protein, 132 aa, Zea mays
  unsure (1)..(132): unsure at all Xaa locations
  Clone ID: MRT4577_92616C.1.pep
VDHHEWNPMVDVHLPSDGXTNYLLETLEAGKRQSTEALLXQLFLEVHDDVRLLHFMKRLDGQNVVYIMRDAMXWIVXQDVQMMMLGTXRADMERMLQHSEREHTNTCRXXIGFSEPMVHRITAAADVLMIPT

SEQ ID NO: 361226 - protein, 93 aa, Zea mays
  Clone ID: MRT4577_92617C.1.pep
MRHNGSEDTWLHQTDAQGIQSRRTRGADLGTSGSPNLDRRFLEAQEHTAILAITWTSGMGARGLLGTIIARLRWVGIAEHARGCLGLLGQEYI

SEQ ID NO: 361227 - protein, 42 aa, Zea mays
  Clone ID: MRT4577_92618C.1.pep
YKFWRPANAQKHTNGPLGLKSWNFKPLFLPTKIPSSEFYRLA

SEQ ID NO: 361228 - protein, 132 aa, Zea mays
  Clone ID: MRT4577_92619C.1.pep
LTRALRKFSGKDSLVAKLFAKHMKVEEQVTLLKNKKIGVGVGTPARLMELIDNGSLSLGKLQRLVVDASHIDQKKRGVMDMKDTVMPLARFLARKEFKDRYNDEKKPLDLLFPSGDATAKLAFICITPYFCT

SEQ ID NO: 361229 - protein, 34 aa, Zea mays
  Clone ID: MRT4577_9261C.1.pep
PPNYVVSASSPSHSLSTPNLICVNVCPVGIRSEF

SEQ ID NO: 361230 - protein, 63 aa, Zea mays
  Clone ID: MRT4577_92620C.1.pep
KSLSLSPFPTQHHYSISNPSSHTSIYYSKNPTFPIPFLAATSHLLLLLPKKRLLHLPPNTLST

SEQ ID NO: 361231 - protein, 64 aa, Zea mays
  Clone ID: MRT4577_92621C.1.pep
RHGVGIQHRSGRLDAPHEQHQVNEPTDESIQRVIKACKDSCVFFPEVLPRINFSSIIVYNLYMV

SEQ ID NO: 361232 - protein, 79 aa, Zea mays
  Clone ID: MRT4577_92622C.1.pep
LGIRLEQKKCLPMYWETFPFFCGVFLKSGQGFNTLQKSMPTTAMIPMIHWGKGKCPGGRAKASHPPQLAQHKCTTSTPN

SEQ ID NO: 361233 - protein, 88 aa, Zea mays
  unsure (1)..(88): unsure at all Xaa locations
  Clone ID: MRT4577_92623C.1.pep
GVPPGAAYLSLTSRXLFTAENPNKVGIRYGATAFDVMYHGVPLGVAAVPGFEQPAHSTRLLQTRVIVDRRRSCSPVEMIRVGGSVRRF

SEQ ID NO: 361234 - protein, 102 aa, Zea mays
  Clone ID: MRT4577_92624C.1.pep
APRDPGRRLHLPQHHAALHRLLQTRVIVDRFNVLQADAQDLIRDAAINDRVELRITGDVGAKILVLGFSSPKVQVSVDCAIAISPRSQSLKYKQCGVDGISV

SEQ ID NO: 361235 - protein, 143 aa, Zea mays
  Clone ID: MRT4577_92625C.1.pep
PAGVPPGAAYLSLNITLLFTAENPNKVGIRYGATAFDVMYHGVPLGVAAVPGFEQPAHSTRLLQTRVIVDRFNVLQTDAQDLIRDAAINDRVELRITGDVSAKILVLGFSSPRVQVSVDCTIAISPRSQSLKYKQCGVDGLSV

SEQ ID NO: 361236 - protein, 31 aa, Zea mays
  Clone ID: MRT4577_92626C.1.pep
FFFFFFFFFFFFFFFFFFFFFFFFFFWNKLF

SEQ ID NO: 361237 - protein, 107 aa, Zea mays
  Clone ID: MRT4577_92627C.1.pep
DVMYPGVPLGVPAVPGFEQPAHSTRAGQTRLIVDRFNVLQTDAQDLIRDAAINDRVELRITGDVGAKILVLGFSSPRVQVSVDCTIAISPRSQSLKYKQCGVDGLSV

SEQ ID NO: 361238 - protein, 240 aa, Zea mays
  Clone ID: MRT4577_92628C.1.pep
MAAGTVTARSNGEGHGHGGAGSWYPQRRPHYGYGGGSASFRGCCCCLFLLLTFLALLALAIALVVVLVVKPRKPQFDLDQVSVQYLLVASPTTSPAGLPPATPGAAYISLNITLLFTAQNPNKVGIRYGATKFDVMYHGVPLGVAAVPGFEQPAHSTRLLQTRVIVDRFNVLQADAQDLIRDAAINDRVELRITGDVGAKILVLGFSSPKVQVSVDCAIAISPRSQSLKYKQCGVDGISV

SEQ ID NO: 361239 - protein, 76 aa, Zea mays
  Clone ID: MRT4577_92629C.1.pep
RHGGSARHVRKWSNDAVRRVHVVRALRARPAEVHIDTNFPLPSIRPTDTYIVPDHFSGPPPGIKYSLVGTKGHLTL

SEQ ID NO: 361240 - protein, 196 aa, Zea mays
  unsure (1)..(196): unsure at all Xaa locations
  Clone ID: MRT4577_9262C.1.pep
MAQAMASMTGLSQGVLPSRRADSRTRTAVVVVRASAEGDAVAQAGRRAVIGLVATGIVGGALSQAARAETVKTIKIGAPPPPSGGLPGTLNSDQARXRVKTSAQDIINLKPLIDKKAWPYVQNDLRLRASYLRYDLKTVIASKPKEEKKSLKELTGKLFSTIDDLDHAAKIKSTPEAEKYFAATKDALGDVLAKLG

SEQ ID NO: 361241 - protein, 114 aa, Zea mays
  unsure (1)..(114): unsure at all Xaa locations
  Clone ID: MRT4577_92630C.1.pep
DPGGTTLGLFGAPPARTFLGTRLADPAPQNXGPLVPRSGSGLAGRANPAPKKVAKTXTSFNRPLGFPAPWRPNSLTGSLVGNSGLNPFVLGRPGKSLNSELNSLXQNLAKNEGR

SEQ ID NO: 361242 - protein, 78 aa, Zea mays
  Clone ID: MRT4577_92631C.1.pep
FVDAVTASEKFISNGLEAERRDMTHLHGKLLVEVNRSFLEEHSAALMHPAADAEMMYLLQPNEQIEALNSIEYSTTIT

SEQ ID NO: 361243 - protein, 149 aa, Zea mays
  Clone ID: MRT4577_92632C.1.pep
NLQISSTAHGGKSPQIPSYQMPCHSCRLIIGRTNLKDTPLNRGPKNLPRANEDNNGRGEHERDGSQTNEYWQRFASKSLQIDPTLAGKNNKKKSSKNNRSRDAVKSIKSNRPNHDDTNKGRRRTCVPEPRSSSTPRDSRRLVSSRLVPN

SEQ ID NO: 361244 - protein, 107 aa, Zea mays
  Clone ID: MRT4577_92633C.1.pep
RHTHTFIYIMSSNDYLSVQQDFEYENDYFNDYDQVMVDAVNEADYQDNEEQQDEYIMNDRLLKLIVDVQSYLSEAPTSDSPLLALQYKMYTYLKQRALEMEMNDIAA

SEQ ID NO: 361245 - protein, 225 aa, Zea mays
  Clone ID: MRT4577_92634C.1.pep
MDSEHWISRLAAAKRFYAAQLGHSDRAGMEELDMDEEVRPEFACPYCYEDHDVGSLCAHLEEEHPFEPQAAACPVCSEMVTKDMVNHITMQHGYLFKNRRRLRRFIIPGSQALSLLSRDLREAHLQVLLGGGHRSSNNNSTTNISADPLLSSFGLSFPTSDAEQTSKSTLSIPDDATMIKETPAQARKLSIDSSLTSEEREQKRKQASVRATFVQDLLLSTLFGD

SEQ ID NO: 361246 - protein, 59 aa, Zea mays
  Clone ID: MRT4577_92635C.1.pep
HQHLIAATFWCILIYLTPTVHLAHSLTYIHQNHPLIAIKCLKSSVFTFYSHNLFQKNHI

SEQ ID NO: 361247 - protein, 131 aa, Zea mays
  Clone ID: MRT4577_92636C.1.pep
MPALYAYGDDGCLVSAPAELAGLFCRGAVQQRKRTLVAASAVAAAAAECVRAAKKQRQLPSLDALPDECLFEILRRVPGRRGAAACVSRRWLALLGSIRVSEFGQAAAAADTPSLPDLNEEFVMEEDKEEV

SEQ ID NO: 361248 - protein, 110 aa, Zea mays
  Clone ID: MRT4577_92637C.1.pep
PRDDALLRQSSYRHRTGCALNNGPICHSEPPLLISLLPIQELAARFALVEILNRPTCALNARRTCPAVHCRGSISNRTDGFICSNTRKFDCALLTTYFCPPFLLAVRMIP

SEQ ID NO: 361249 - protein, 55 aa, Zea mays
  unsure (1)..(55): unsure at all Xaa locations
  Clone ID: MRT4577_92638C.1.pep
LDKLIRLXQTPAFADLRXQRLDPGKHTWLLKTLYGILRLWPKQRAALKTLRTRRK

SEQ ID NO: 361250 - protein, 53 aa, Zea mays
  Clone ID: MRT4577_92639C.1.pep
RREPRSRRGTEMLRREPKHPQGTMEQTFKTSTRNRKKNERIRDQEDKQNDNRE

SEQ ID NO: 361251 - protein, 161 aa, Zea mays
  Clone ID: MRT4577_9263C.1.pep
VQIYELRSKTPYVCSFAHTQKKTSDICYGTAGTLNSDQARDFDLPLKERFYLQPLPPAEAAARVKTSAQDIINLKPLIDKKAWPYVQNDLRLRASYLRYDLKTVIASKPKEEKKSLKELTGKLFSPIDDLDHAAKIKSTPEAKKYFAATKNALGDVLAKLA

SEQ ID NO: 361252 - protein, 163 aa, Zea mays
  unsure (1)..(163): unsure at all Xaa locations
  Clone ID: MRT4577_92640C.1.pep
GPSSAXSVAXXXXXLLGPPVLSFFFPXXXXPWGLXFXSCXXLXXXPSLFXXSXXXXXSLSXXXWVXXFRFRLXXVFFCVFSXXGXXCCRRXGCXGCXFLXXACGFXRPPPPSXXPXPXXXGRXXXXXWAXPXWXXPLVGARCRXXAXWXPGVGRLWRRXPRRR

SEQ ID NO: 361253 - protein, 113 aa, Zea mays
  Clone ID: MRT4577_92641C.1.pep
QKRGPRPPPFFFRGAAPPPEKKGGPPPGGKNPPPARFPFKPRKRKLRGAHKLTKGPPRSRWGPSPGGGGKIYSGSKRATSAAPHPKKKAPFLFSPPERKTKKKKKGRGKTPPP

SEQ ID NO: 361254 - protein, 62 aa, Zea mays
  Clone ID: MRT4577_92642C.1.pep
LLPLQRGAIHLDHISKKPTSLLDNFFSKLAPTSNGNQNHQGSSDQETTVEEEPAVMGVISMG

SEQ ID NO: 361255 - protein, 112 aa, Zea mays
  unsure (1)..(112): unsure at all Xaa locations
  Clone ID: MRT4577_92643C.1.pep
MFIKPAFILLVLALAHTGLATPLPHSGDGYSSGGGAVAPTPARRLRPQPQPQPQPQPQPQPQPQPQPQTQQEPERQPPRQQERRRARPRKRPRPRTPQPPPPPPPQXRHGHR

SEQ ID NO: 361256 - protein, 93 aa, Zea mays
  Clone ID: MRT4577_92644C.1.pep
PDSTKYILDMLSLTIMDSRYVTLCIFLVLALHGDTTLAETCRQYVEGQPFCFKAMCKANCFMEGKFSDGSYVKGYRCESGGFHSVCVCLLCKN

SEQ ID NO: 361257 - protein, 254 aa, Zea mays
  Clone ID: MRT4577_92645C.1.pep
PAGITPNYGVAIFTLLGSQLFGYGLAGLTRSFTVFPTYIVYPNLVPTVNLFDALHRDKDEGMQKKRLKFFWIVFIAIFCWEWIPEFVAPTLTGISIFCLARRDSAWFTRIFGGSNGNEGLGMFSICLDWAYVGSGGGSLGALFTPFTTQVSQYIGVGLCCIIFCGMYATNAWNAAQFPFLSQDLFYANGSQYDQNTILNADWSLNETALEEQGLPSYAGSNAVYYLGCNLAIGATLTHVGIWYWRPIVQAFKSY

SEQ ID NO: 361258 - protein, 50 aa, Zea mays
  Clone ID: MRT4577_92646C.1.pep
WKLPVCPIGSPQSVKTPHNQQFRKLEHVQCIKMWVHGSFMFSTLMGIDMP

SEQ ID NO: 361259 - protein, 313 aa, Zea mays
  unsure (1)..(313): unsure at all Xaa locations
  Clone ID: MRT4577_92647C.1.pep
MDGGEHEAEESSYKRRERLLALRSAANASPAGAPPPTAAGSILPDPDLPGDEAASVCPTPPQRFDYYTNPAAAFTSSSGGATNPTWSHKRKSPPACYAPPPPPPAYGNYGSDYHRPHQQPTSWQVHSTSPMPQDAARSSPWQSPMQFQDPMSGYQGGPPSAPRPWGSHSGPGGRGSYSNPPNFGFRHPNPSRGGSPMNYGPRGGPYSSYGRGRGPNYFGSPGSRGRGGRGGWQGQSYMNKSMLDDPWVDLQPXCWQHTNTXRGEYDSNKSWLPESLRKKKETPPAHGQIKPAPGLSLSEYLDLSFNEVSDKEK

SEQ ID NO: 361260 - protein, 180 aa, Zea mays
  unsure (1)..(180): unsure at all Xaa locations
  Clone ID: MRT4577_92648C.1.pep
MGGVGVSLALLAAVVLSAAAAAPQLAGAAKAEHSLGIIQKDIIQTVNKHPNAGWTAGHNPYFANYTIEQFKHILGVKPTPPGLLAGVPIQTHPESVDLPKEFDARTQWSSCSTIGNILDQGHCGACWAFAAVEALQDRFCIHLNMSVTLSVNDLLACCGFLCGSXCNGGYPISAWRYFRR

SEQ ID NO: 361261 - protein, 182 aa, Zea mays
  Clone ID: MRT4577_92649C.1.pep
MPQDAARSSPWQSPMQFQDPMSGYQGGPPSAPRPLGSHSGPGGRGSYSNNTNLGLRHPNLSRGGSPMNYGPRGGPYSSYGRGRGPNYFGSPGSRGRGGRVGCHGRSYFNKSMLDDPWLDLQPGVGNILIPRGEYDSNKSWLPESLRKKKETPPAQGQIKPTPGLSLAEYLDMSFNEVSDKEK

SEQ ID NO: 361262 - protein, 256 aa, Zea mays
  unsure (1)..(256): unsure at all Xaa locations
  Clone ID: MRT4577_9264C.1.pep
MAQAMASMTGLSQGVLPSRRADSRTRTAVVVVRSSAEGDAVAQAGRRAVIGLVATGIVGGALSQAARAETVKTIKIGAPPPPSGGLXCPPARASYTVALFLVYIRLFCLEFQRAAALHTHAFAMAPGTLNSDQARDFDLPLKERFYLQPLPPAEAAARVKTSAQDIINLKPLIDKKAWPYVQNDLRLRASYLRYDLKTVIASKPKEEKKSLKELTGKLFSTIDDLDHAAKIKSTPEAEKYFAATKDALGDVLAKLG

SEQ ID NO: 361263 - protein, 92 aa, Zea mays
  unsure (1)..(92): unsure at all Xaa locations
  Clone ID: MRT4577_92650C.1.pep
XIXGTRASTHSIKAPMLLGPLPTRREAIPRLMLSMESRVSDFLNLRPGPRLLLAHARSTRGPQSLLLPNRRAASRISIVHAQPTPPKSPPTP

SEQ ID NO: 361264 - protein, 341 aa, Zea mays
  unsure (1)..(341): unsure at all Xaa locations
  Clone ID: MRT4577_92651C.1.pep
RKWPLTCNPSKSTHKEGSKSHSSNILHKNNSSVCTINTGEHNTLEDFFNLEIADKDGFETCEQVACCTHMFQDSSGLVQREVALLRSSQNKLYLLLLDMVFDGQETMPRILGSYSLQSLEKVSIGLGLQALRVHMSDDTTHLFITRTSKEAQDVLWLLSVTNFPKLNHKIHFQSWENIQVKLFEKCIIRRTANTGIFLYSMLMFWRNDVEEDSLFIRSIYXVIEGSILVCIEDLDQFGGIPYDSNPPYFSLDASCSISNIREVVMDQRNNKCLTLILDNGRPGEFHNSIQNPQNKQSEEIGTVHTWKLKWFSEEASLKFISVIKALYSTAATSSLHVKCIS

SEQ ID NO: 361265 - protein, 100 aa, Zea mays
  Clone ID: MRT4577_92652C.1.pep
SNSSPILLVGRRRRLTASPVTPPGARCIRPGGQRPRLALAACSLVVSTSPHSSLQPAPTRAPQAAPLPGSQPQSARRSTPLPAAHATHRHPASHCFTVLQ

SEQ ID NO: 361266 - protein, 70 aa, Zea mays
  Clone ID: MRT4577_92653C.1.pep
LDCYKNTSADRPTDLVVFDMLCYMLCYATWWCSQLVQRTRTRLIRQIICTQGSSSSLFDFLPLHTMELDR

SEQ ID NO: 361267 - protein, 70 aa, Zea mays
  Clone ID: MRT4577_92654C.1.pep
FYPAPGGGAIIPLEGTLNFFGSGGNKGSHFATLQPAGFIHLRFAAPLAPGQAVSFLKFFLPCPSKKKSIV

SEQ ID NO: 361268 - protein, 25 aa, Zea mays
  Clone ID: MRT4577_92655C.1.pep
IIIRRILLQAELTIKFPLTFYIIFN

SEQ ID NO: 361269 - protein, 52 aa, Zea mays
  Clone ID: MRT4577_92656C.1.pep
ASSGSSHAVLEMPCHLMKTSTQLDSRVRNSGGGEVMRELSQSSLDSYFLNMY

SEQ ID NO: 361270 - protein, 93 aa, Zea mays
  Clone ID: MRT4577_92657C.1.pep
GGLFPSDSPSACPPIPARSANVSTIQDIKPTDTYCVRPARCASHVGHSTNKINRLSLPRISMQHRSISMLYCSPLYYVCVAFSPSWFDTTYLF

SEQ ID NO: 361271 - protein, 87 aa, Zea mays
  Clone ID: MRT4577_92658C.1.pep
QGFQQLHRSLPQVHENSLILNFCTAKREISLPSHAADALSALGKDMIECDGLTKRPQVGLPSWIRCAHSSYQALPSFSGHASECSAV

SEQ ID NO: 361272 - protein, 203 aa, Zea mays
  unsure (1)..(203): unsure at all Xaa locations
  Clone ID: MRT4577_92659C.1.pep
MAYRADDDYDYLFKVVLIGDSGVGKSNLLTRFTRNEFSLESKSTIGVEFATRSIRVDDKVVKAQIWDTAGQERYRAITSAYYRGAVGALVVYDVTRHVTFENVERWLKELKDHTDANIVIMLVGNKADLRHLRAVSVEDAKAFAEREYTFFMETSALESMNVEDAFTEVLTQIYRVVSKKALDIXDDPAAXTRGQTHHVGSKD

SEQ ID NO: 361273 - protein, 82 aa, Zea mays
  Clone ID: MRT4577_9265C.1.pep
LLAELGAPGMDGTRCQPCQGVKIQNTSSIHTFYGGKQLPDLQSNGAGGPGGSSPNLFNLSFFANNCNSSGFSHQHANHGLMN

SEQ ID NO: 361274 - protein, 51 aa, Zea mays
  Clone ID: MRT4577_92660C.1.pep
AKVITIIDGGVKKFRLHKKANRVGPKYCSSNFNHQRPKGGFSSLKYHPPIA

SEQ ID NO: 361275 - protein, 67 aa, Zea mays
  Clone ID: MRT4577_92661C.1.pep
RWSPPRRSSTRGAPPPRPPRRSGSAPPPPSPWRPPPAQSPWPPPPPPPPPWPRAPSPEPGSPGPPSP

SEQ ID NO: 361276 - protein, 256 aa, Zea mays
  Clone ID: MRT4577_92662C.1.pep
MLRPAVNVGTQVPEFNVSQPSTTLRGSSDVFRRSLISAGISHSRSSSIPLQHRGNSSTSHEIRNHQPGSSSRAHQQHPLRPGHSSVDRQSSGYLDLQSFMQTIASREGGRPMSEIRNVFDQIRQGRNARLEDLLLIDRSLIMRRANLIDRHRDMRLDVDNMSYEELLALGERIGYVNTGLTEEKILSNLKQWKCVLKSLDDPPTSVEPCCICQEDYVEGEDLGRLDCGHDFHTACIKQWLVIKNLCPICKKTALDT

SEQ ID NO: 361277 - protein, 73 aa, Zea mays
  Clone ID: MRT4577_92663C.1.pep
MQSVLLVQQAKTVIMQPLRESILMDVMQSLLLTEAHAIVTRIIVLCYLLRPPVKVLLYPPQQILVFRTILWSS

SEQ ID NO: 361278 - protein, 149 aa, Zea mays
  unsure (1)..(149): unsure at all Xaa locations
  Clone ID: MRT4577_92664C.1.pep
PGKKRAQPRPNGKRGGEPRLGPPPNGIKTCPKTNPPRPRTPKNPXKQRKGGPPHKTPRENWGGGPKQGPPXFPPPGKYLNTGPKRGPTGGPTDPLAPPPEWPNPRRRPPGAGGAPPQSPFEGQRKRGWFPRPCPVPWGGPATPVGGETH

SEQ ID NO: 361279 - protein, 71 aa, Zea mays
  unsure (1)..(71): unsure at all Xaa locations
  Clone ID: MRT4577_92665C.1.pep
MGGYMKSMVEFKGKXVYIKLRFESGLHRVPLTEPMXMGRIYASTATLATMVEVGHFDIHVESRGLCVVTTA

SEQ ID NO: 361280 - protein, 56 aa, Zea mays
  unsure (1)..(56): unsure at all Xaa locations
  Clone ID: MRT4577_92666C.1.pep
IRASLLSQHQLIPLFQQFPASPXTLLQLQKLLPFVQLALANPAASNQQHIIGGALF

SEQ ID NO: 361281 - protein, 106 aa, Zea mays
  Clone ID: MRT4577_92667C.1.pep
GSLKKGLGPINPYQLPGGLSGKHRTPTPGPGRGFQNPSAGNQAKGHWALPNRGAKKPGQPLVPSDTPRSWSGISNLWGVNQNWKGLGRILTCFEIKTTQYPPNHIF

SEQ ID NO: 361282 - protein, 95 aa, Zea mays
  Clone ID: MRT4577_92668C.1.pep
TPSVELFFFGGPFWNSPLQIRLRSLVSSLKLFWATQKTAFLCGMRVILKFGCQKGPSRLNFGKVGPPNEKSTPPFFFLPKNPPPPPCIGKTNFIN

SEQ ID NO: 361283 - protein, 146 aa, Zea mays
  unsure (1)..(146): unsure at all Xaa locations
  Clone ID: MRT4577_92669C.1.pep
PGDLLPAWASYGGPGSPYCXGRTXALGWLARPDPPGGACAGGADXXYITWAVSGAXXTRATGRXAVTGDGEQPKVXLTNPXXLDYPGXSKGAWNQYLGANXIRVAPSEPXRAXSELGKNRAGRKGXGACVRRSXXERXXLREXCAS

SEQ ID NO: 361284 - protein, 217 aa, Zea mays
  unsure (1)..(217): unsure at all Xaa locations
  Clone ID: MRT4577_9266C.1.pep
MAQAMASMTGLSQGVLPSRRAASRARTAAVVVRASAEAXAVAQAGRRAVLGLVATGIVGGALSQAVHAETVKTIKIGAPPPPSGGLPGTLNSDQARDFDLPLKERFYLQPLPPAEAVARVKTSAQDIINLKPLIDKKAWPYVQNDLRLRASYLRYDLKTVIASKPKEEKQSLKELTGKLFSTIDDLDHAAKIKSTPEAEKYFAATKDALGDVLAKLA

SEQ ID NO: 361285 - protein, 198 aa, Zea mays
  unsure (1)..(198): unsure at all Xaa locations
  Clone ID: MRT4577_92670C.1.pep
MADGEXXPXKKIRRIEELLAEXMAVDGGCGDTGDWEGRWNHVKKFLERSGPFTHPDFEPSTESLQFLLDTCKVLVIGAGGLGCELLKNLALSGFRQIHVIDMDTIDVSNLNRQFLFRPKDVGRPKAEVAAEFLNDRVPNCNVVPHFNKIQDFNDTFYRQFHIIVCGLDSIIARRWINGMLISLLNYEDGVLDPSSIVP

SEQ ID NO: 361286 - protein, 80 aa, Zea mays
  unsure (1)..(80): unsure at all Xaa locations
  Clone ID: MRT4577_92671C.1.pep
RTADPAGAXESDPVPLKSNAVTVGGCYSADLEMIKEAITALKERTGCSSQAIGKYVGDKHCACMTVNLKXMLCMQLRGFP

SEQ ID NO: 361287 - protein, 187 aa, Zea mays
  Clone ID: MRT4577_92672C.1.pep
MVRLPPPPPALPRPSLPCPLRTCAILETVHAAIGLVPTAPLLAFLQWGGRIHFILAVVRQIPEVQSSPSVFITFIAWSISEVIRYSHYALTTLKVCPAWLTYLRYTAFIPLYPIGVGPGEMWTMYQALPFVKKRDLYSGFFEKFSMSYRSFLVSVLVLYPFLWLKLYQHVFKQRKSKLGKGSRKKRA

SEQ ID NO: 361288 - protein, 218 aa, Zea mays
  Clone ID: MRT4577_92673C.1.pep
MVRLAKFYLVCYNSLQSLGWFVSLLRLLPCLVPPFPVHSAYVVAGDLICFLQTCAILETVHAAIGLVPTAPLLAFLQWGGRIHFILAVVRQIPEVQSSPSVFITFIAWSISEVIRYSHYALTTLKVCPAWLTYLRYTAFIPLYPIGVGPGEMWTMYQALPFVKKRDLYSGFFEKFSMSYRSFLVGVLVLYPFLWLKLYQHVFKQRKSKLGKGSRKKRA

SEQ ID NO: 361289 - protein, 129 aa, Zea mays
  Clone ID: MRT4577_92674C.1.pep
GPFLGVVWCFGGAGLLPGRGIPRGVVGDCFLVPVKFLGLLGTRSSFGCWFLVQIWASVLFGFVSDGGGVCPPLSLFWLVLVVVPSPCLFFFGAGACALPGGCPAAWACWGKPIKKKKNPKKKKKKKKKK

SEQ ID NO: 361290 - protein, 40 aa, Zea mays
  unsure (1)..(40): unsure at all Xaa locations
  Clone ID: MRT4577_92675C.1.pep
DDFACKYGDKCQFAHSIHVVRSLSRHPKYXTELCRTFQST

SEQ ID NO: 361291 - protein, 154 aa, Zea mays
  Clone ID: MRT4577_92676C.1.pep
GAAAATPRRLRLLPCPSYSSSSPAASTARQRQLATCLLLAPQSKRWITKVRTRRRHTIRLRLPRPYRPSVPETGGKAASAGADGAGGLVLQEGGTGNNGDELSSNTTLLETTTTTMGAEACEEGNDKDECLLTRRLLVDAHLDYIYTQHKGNKP

SEQ ID NO: 361292 - protein, 48 aa, Zea mays
  unsure (1)..(48): unsure at all Xaa locations
  Clone ID: MRT4577_92677C.1.pep
WQAVRQQCLQQVKEVEAEQPYQANFGLVLQVILEEQXPKRGQFPGLLA

SEQ ID NO: 361293 - protein, 69 aa, Zea mays
  Clone ID: MRT4577_92678C.1.pep
LLCRTCPMNFLVHNIPTAIKGDGTGPYLDDFNPGLPIIRYAKGCHQLWPRLQHHCQRYRRPVRRSHEEL

SEQ ID NO: 361294 - protein, 127 aa, Zea mays
  unsure (1)..(127): unsure at all Xaa locations
  Clone ID: MRT4577_92679C.1.pep
CLVRSQERPSTTPSTSNGIINDGISHGIRLSSSLIRSHWLRCRIPCIRNSICKSGDIIGAYVPADVPFLGTASVNMRGQDTCDGAATAGASKPVYYHGLPVPRXPAVARTGVGXXSREISGPGTSRG

SEQ ID NO: 361295 - protein, 89 aa, Zea mays
  Clone ID: MRT4577_9267C.1.pep
ILVTKEELKYGKPFTRSSYFRHSVMGRPWRIIPTLCLAASVVSVRGQGNAADAQNEQKPIASQEHTAGGNPLTSEFSEFVLKRLDEWKV

SEQ ID NO: 361296 - protein, 70 aa, Zea mays
  Clone ID: MRT4577_92680C.1.pep
RRRTFNFHDKQTTYLWRTAPVTGWTTVQEFNLGFFLNIILPYPPQYGIRSHARNSEIRFFITDSGQSHVS

SEQ ID NO: 361297 - protein, 237 aa, Zea mays
  Clone ID: MRT4577_92681C.1.pep
LKWYLVLLCYFFAPVVAFCNSYGMGLTNLNLAPTYGKIALFALASLVGSDGGGVIAGLAACGIVMSVACSTADLMQDLKSGYLTLSSPRSMFTAQLIGIALGCVIAPLTLWLFWTAFDIGDPDGEYKAPFAIMFREMAILGMEGFSALPLHCLDICYAAFFLALATSLLKDVAPANVSRFIPIPIAMAAPFYVGAYFGVDMFIGTAILYAWQKLNREQADGYAVAVASGLICGDGIW

SEQ ID NO: 361298 - protein, 133 aa, Zea mays
  Clone ID: MRT4577_92682C.1.pep
PLLQITHPFSIQTAISAWGAGECPWSLPQPKALLQQIPMVHLLAQNIKEHQLQQLVLRNLAAYSQKQQFLPFNQLAALNYADYLQQQLPFSQLAVVYPHHFLSFNQMATLNSCSYLQHQQLPPFKQLSYVSPI

SEQ ID NO: 361299 - protein, 95 aa, Zea mays
  unsure (1)..(95): unsure at all Xaa locations
  Clone ID: MRT4577_92683C.1.pep
PPSPFSGWXXXCVXXXXPPPPGXGXXXVPXXLLPXGPXVAXXXRXPXSAVXXLVXXXXRXCXPALXRVFASSPLPPAAXXVGKGXXXGXXXGFFF

SEQ ID NO: 361300 - protein, 73 aa, Zea mays
  Clone ID: MRT4577_92684C.1.pep
LPSPQQNPPPSPLPSPQPMPLPSPLRKRLPSPQMAKPATRPPPMPRPSLLPQAATICELLALASFSLSLPSCI

SEQ ID NO: 361301 - protein, 78 aa, Zea mays
  Clone ID: MRT4577_92685C.1.pep
PNGDTGSPPFIKPCAHCAALEEEQLTGASAFQRAGLPLFDGAQNVQPGVPGLHGHRVFGWRSPLAHVRAGAPWGHGLR

SEQ ID NO: 361302 - protein, 590 aa, Zea mays
  unsure (1)..(590): unsure at all Xaa locations
  Clone ID: MRT4577_92686C.1.pep
MSATIDRLATPSHEGRAHSDEKRECNSDEENSEGERKPKKDSFKKRAVTTGYRFRHSLRRKSKTKNDNHIASIEDIRDVQELEIVERFRQCLLDDGLLPEHHDDYHTMLRFLKARKFNIDKAKHMWSEMLRWRKEFGADNIEEFDYTELDEVVKYYPQFYHGVDKDGRPVYIELIGKVDTNKLVQITTIDRYLKYHVKEFERCLQMRFPACSIAAKRHIDSSTTILDVKGVSLKNFTKDARELIMRLQKINNDNYPETLYQLYIINAGQGFKILWGTIKSFLDPETASKIHVLGNKYQTKLLEIIDGSELPEFLGGKCRCEEYGGCPKSDKGPWKDPEIFKRVINGEANYGRQVLAVSSINQKEVGCTEHTTVEDVSSSTALVDPIISPNLTHVDELKFQGHASSSDAPPIIGDSIPAAGKVMDACSNPRNSSTPSSSGSFSLRNIPATLGGLKTRIVAWSTFVILTLSAFLCSVLSIVTKRLSXTRPSHVTTIVLTSIXGYMGNGTLTSVLTRLGELEEKVQALEAKPPQVPFEKEELLHTAVYRVDVLEAELISMKKALYETLIRQDELLAYIDQQQTAKFCRQKFCF

SEQ ID NO: 361303 - protein, 244 aa, Zea mays
  Clone ID: MRT4577_92687C.1.pep
STIQGFAMVWTKEFERCLQMRFPACSIAAKRHIDSSTAILDVKGVGLKNFTKVARELIMRLQNINNNNYPETLQQLCIINAGQGFKMLWGTIKSFLDPETASKIHVLGNKYQTKLLEIIDDSELPEFLGGKCRCEEYGGCLKSNKGPWKDPEIVKKVINGEANYVRQVIAVSNINQKEVSCTEHSTEEKVNDASVESISEVEDVSSSTALMDHIISPNLTFVDESKFRGHASSDAPIRGSPVAS

SEQ ID NO: 361304 - protein, 153 aa, Zea mays
  Clone ID: MRT4577_92688C.1.pep
MMLRFLKARKFNIDKAKQMWSEMLRWRKEFGADDIEEFDYTELDEVVKYYPQLYHGVDKGGRPIYIELIGKVDTYKLVQITTIDRYIKYHVKEFERCLQMRFPACSIAAKRHIDSSTAILDVKGVGLKNFTKVARELIMRLQNINNNNYPETL

SEQ ID NO: 361305 - protein, 164 aa, Zea mays
  unsure (1)..(164): unsure at all Xaa locations
  Clone ID: MRT4577_92689C.1.pep
MPVAASAIYFLNLRGDVLINRLYRDDVGGNMVDAFRMHIMQTKELGTCPVRQIGGCSFLYMRISNVYIVIVVSSNANVSCAFKFVVEAVALFKSYFGGTFDEDAIRNNFVLIYELLDEIMDFGCPQNLSPXXILKLYIXTQEGVRSPFSSKPSDKPVPNATLQF

SEQ ID NO: 361306 - protein, 325 aa, Zea mays
  unsure (1)..(325): unsure at all Xaa locations
  Clone ID: MRT4577_9268C.1.pep
SSCMCIVCSKFDSASNTCSWVGCDVCLHWCHTDCGLRHSLIRKGQSASRAYGTTEMQFHCSACGYPSEMFGFVKEVFRTCAQQWRIDMLVRELQYVERIFSASEDVRGKRVRDFVKQMLIKSENKAYHAEVVRCVIAFFSDDGANLGSDPSVPLKGIPCSISEAVDGIPSSXEGMDTIYPRGTSSFRQNNSSYHKHREPICAXKSGEAEFQTIDNKPATDELDSLIRLKQAEAYMYQERANDARNEVDNLRHIVMVKNARIEEDYGTHIADLDINELQERRKRRIEELQVIERTHHEFLSMKTRMVASIGELLSKMEALKQNRST

SEQ ID NO: 361307 - protein, 344 aa, Zea mays
  unsure (1)..(344): unsure at all Xaa locations
  Clone ID: MRT4577_92690C.1.pep
LLPINVLYRNLVLSGAAFGAHRWLAALQRACERFASLATLGVPHHDVAGVTPEGKRSMMRLSQRMVSSFCASLSSSPLQRWTLLSGTTDVSVRVSTHRSTDSGQPNGVVLSAATSIWLPVPGDHVFAFVRDENARSQWDVLSHGNQVQEVSRIPNGSNPGNCISLLRVSNRPSNLAPPSSIKRALCCWIMTVLTMTTTXRRATSQGLNANQNSMLILQESCADASGALVVYSPIDIPAANVVMSGEDPSGIPLLPSGFAILPDGRPGSSGAGASSSAXARGGAAASGXVVTVAFQILVSNLPSSRLNAESVATVNSLIGTTVQQIKGGAQLRRPFDRSPRHPSQ

SEQ ID NO: 361308 - protein, 120 aa, Zea mays
  unsure (1)..(120): unsure at all Xaa locations
  Clone ID: MRT4577_92691C.1.pep
KTPRALAHKLSKSVPSKYTCVNNKTSVDQDAIRYYYHVLIQFQDNNSNLKTADLIEAASHNWTPIAHNWGTTXNLNNRTKLKTPVELRLTSDSRRKLVPNNAIQNIXKPSKNYRSLGNYP

SEQ ID NO: 361309 - protein, 60 aa, Zea mays
  unsure (1)..(60): unsure at all Xaa locations
  Clone ID: MRT4577_92692C.1.pep
ARVRQPLPVLLLAGVSPATVLTQPHYAPYXQIAHPNAGTLLQLQQVLPLNQLASTDPGAI

SEQ ID NO: 361310 - protein, 87 aa, Zea mays
  Clone ID: MRT4577_92693C.1.pep
DLSNPRCPGRVPVGSLPLAGCSSQFLSSLMCRGTFAWPIVRWPAGGSSVRTISPVDACRMSPGKEENQPVGVDTVDPRPASRNPIAL

SEQ ID NO: 361311 - protein, 125 aa, Zea mays
  Clone ID: MRT4577_92694C.1.pep
LSSHFLNSPLLSRLPSSPPQTPTPTPRSTLPIYSFLSGPAPQGTAPPETVGAGAMRVRGGSLCNVRYDEEERTPLLLHCGHGFCRACLSRMLAAAPGATLPCPRCRHPTGGGGSVSALRLYFPIL

SEQ ID NO: 361312 - protein, 220 aa, Zea mays; identical to SEQ ID NO: 270902
  Clone ID: MRT4577_92695C.1.pep

SEQ ID NO: 361313 - protein, 65 aa, Zea mays
  Clone ID: MRT4577_92696C.1.pep
IYIVAGQMFECSIARMCLGGACMKSCVRTACVCEGTEDYIFILQDKILFAIVWSCLVLLELIVSL

SEQ ID NO: 361314 - protein, 257 aa, Zea mays
  Clone ID: MRT4577_92697C.1.pep
CSVLHQFNDLYLFALNNFITAVHCYYAVDKIELYVSETLLGPARCYRQIKNKPYPKSRYCRGVPDPKIRIYDVGMKRKGVDEFPYCVHLVSWEKENVSSEALEAARIACNKYMTKSAGKDAFHLRVRVHPFHVLRINKMLSCAGADRLQTGMRGAFGKPQGTCARVDIGQVLLSVRCKDNNAAHASEALRRAKFKFPGRQKIIESRKWGFTKFSRADYLKYKSEGRIVPDGVNAKPLGNHGRLEKRAPGKAFLDAVA

SEQ ID NO: 361315 - protein, 241 aa, Zea mays
  Clone ID: MRT4577_92698C.1.pep
MASTAAAAAAPVVMVTNDDGIDAPGLRFLVDQLVAQGRYRVLVCAPDTDRSGVSHCITWRSALRCKRVNINGATAFGVSGTPADCASLGISGKLFDGLVPDLVLSGINIGNNCGLHVVYSGTVAGAREAFIYGIPALSMSYNWVAGQSSVNDLKVAAEVCIPLINAVMVEIKSGTYPKGSFLNIDVPSDAAHHKGYKITKQGKYMARIGWEQTVYQKPSVESYQTASMDIDGEKDRDIDTS

SEQ ID NO: 361316 - protein, 220 aa, Zea mays
  unsure (1)..(220): unsure at all Xaa locations
  Clone ID: MRT4577_92699C.1.pep
MASWAALLALLLSAFSAAAQLDERFYGQSCPSVEDVVRKEMVRALSVAPSLAGPLLRMHFHDCFVRGCDGSVLLDSTANNTAEKDAKPNLTLRGFGFIERVKAAVEKACPDTVSCADVLALMARDAVWLSKGPXFWAVPLGAXRNGRVSISNETDQLPPPTGNFTELXQLFGAKGLDTXTVAXLVGXHTIGTSHCFSFSDAXLHFTXLDDAXDTXPELDR

SEQ ID NO: 361317 - protein, 133 aa, Zea mays
  Clone ID: MRT4577_9269C.1.pep
DLCEHIYLPRIGMNSEVPTITRVRDMHVLRESRGGQLITIWPSVSRISSQRRAGVARLSRRTAPDASSPTVRMRQRRDYNRMPQRESAHRATTEAIQRLDRTTRRDRRAVAIATTRRGPYVEEGVPAGLEVPN

SEQ ID NO: 361318 - protein, 116 aa, Zea mays
  Clone ID: MRT4577_926C.1.pep
IINDTTIATHPTVWDKPKQFIPHRFIRDGWDKSNSYSGQDFRYLPLRSGRRICPGANFALATMEIMLANLMYHFDWEVPNEKEDGGVVRQQQGPRWVQPQRSFMDDRTRGRPGVRT

SEQ ID NO: 361319 - protein, 200 aa, Zea mays
  Clone ID: MRT4577_92700C.1.pep
MEAPAAKRVLRVAAISGSIRKASWHSGLIRAAAEVCEDCIPGLRVDHLDVADLPMLNTDLETNGGTGFPPAVEAFRAKVRHADCFLFASPEYNYSITSPLKNALDWASRGVNCWADKPAAIVSAGGNFGGGRSSYHLRQVGVFLDIHFINKPELFVFAFFEPAKFFDSDGNLIDADTRERLKQVLLSLEAFTRRLQNNKD

SEQ ID NO: 361320 - protein, 62 aa, Zea mays
  unsure (1)..(62): unsure at all Xaa locations
  Clone ID: MRT4577_92701C.1.pep
RAPPRVFFFFFSQGTKNLFRALNNLVRVYLPTRXAAAAYPXSGVASMEPTSRYPRXSQQGFM

SEQ ID NO: 361321 - protein, 174 aa, Zea mays
  Clone ID: MRT4577_92702C.1.pep
LGNYPAAEVCEDCIPGLRVDHLDVADLPMLNTDLETNGGTGFPPAVEAFRAKVRHADCFLFASPEYNYSITSPLKNALDWASRGVNCWADKPAAIVSAGGNFGGGRSSYHLRQVGVFLDIHFINKPELFVFAFFEPAKFFDSDGNLIDADTRERLKQVLLSLEAFTRRLQNNKD

SEQ ID NO: 361322 - protein, 230 aa, Zea mays
  unsure (1)..(230): unsure at all Xaa locations
  Clone ID: MRT4577_92703C.1.pep
ADLSSGTTYETAPNPKGRWLTKYPGTMLXVCLAQSQIRGHYDSGKARXINEHTGGGWGSSLLPDDRLIASASTKVTLALNYRCTHXKLSHDDMTGAEGTEIYSIVXSNDEQRNYQAATGXKRSIHVVDPKIDGGSTATDGPIPAADPEVNHIXRSVSDIRAVLTNVCMWGAXAITLHVVEQXSVAYGHEKNTASYDDLDGGXYRWQFNPLIGGEMPQMESYSVVKPSDQR

SEQ ID NO: 361323 - protein, 223 aa, Zea mays
  unsure (1)..(223): unsure at all Xaa locations
  Clone ID: MRT4577_92704C.1.pep
HGLIATPXAKILNXVVDGXSYGGXNXXFNPSXXNXXXLXDXXANXXKFXFKKKXSXWGKYXXEEDXSQDTWGKYXXWWVDDHFLKAXLEMGXAVEXPXIVWXKIXXINRYXXIKNQYXTGEIXXIKHLNQRXQEADPEQXXXDPSTNXDLEVQEXKMSLLXEWFANEYKXXFGCSLEXVTNKSQEGSQFCRGFGGIGGMLRYQLDIRSFDEXSDDDDVYEDSD

SEQ ID NO: 361324 - protein, 108 aa, Zea mays
  Clone ID: MRT4577_92705C.1.pep
RLAEGESTPEGTATLTNEAYRDKPYKAPTLDYPSHLLRPSAIPTHGRIHNTERTTNVYVSRDLRTARHTLNNMLTDTNLENFTTDESCIYVSVDKNDQLATDSPTSST

SEQ ID NO: 361325 - protein, 78 aa, Zea mays
  Clone ID: MRT4577_92706C.1.pep
TGRSASLDGVSVRMTGPVRSRYMAVKVSFIDLLQSRCAAYGRSYARSRVSALFCVSVSRASARLLCLGMGYVGVVVNH

SEQ ID NO: 361326 - protein, 84 aa, Zea mays
  Clone ID: MRT4577_92707C.1.pep
PACRRHRAHVFPTNRLTSTHTTGHRAIEKVKPGSVSLEVCWKDLNHKIYRLWADVKQALARAALELQIMLRSIRDSCPLGVLWT

SEQ ID NO: 361327 - protein, 319 aa, Zea mays
  Clone ID: MRT4577_92708C.1.pep
CRTTATAAAPGYLEAGPASSPSEPHAALLLALTYMRLRELLSCARTCRGLREAVAGDPLLWLRLVVEPPLSHRITDEALLALTDRAQGRLRSLHLLGCPRVSDAGLLRIVERNHDVTELFVPRCTGLTADGLVKIIHFLHGQHKGNLSRVRLHGICKVNNHHLDIIKSLMCRGSQQQDAQALHYNHRVHEVLNTDDGRPIDVDLCPLCRNVRLVFDCTRKNCREVKDGRSRCRGCFFCVARCETCGGCIDLEELGESGLACSDFLCMDCWLKLPKCCTCNRPYCERHSNLKENLSASGQFTCQECAAFATSLRSRGEGY

SEQ ID NO: 361328 - protein, 59 aa, Zea mays
  Clone ID: MRT4577_92709C.1.pep
VTQHATLHVASSHINRASMTANLSPLGMLRALSLTVANATIFADRSHASIANLVAAYLS

SEQ ID NO: 361329 - protein, 125 aa, Zea mays
  Clone ID: MRT4577_9270C.1.pep
ALHLQARGPGAVRRERERGRDALALALPLPAGRREQRGALRLKPPPLPFHRVSLAGEVAVVVVVVVVGGWRVRTAWQRVVSERTGLGLAGMLRVAKKDLSLSIESSVVRGHDSGWSMRMERSTCL

SEQ ID NO: 361330 - protein, 44 aa, Zea mays
  unsure (1)..(44): unsure at all Xaa locations
  Clone ID: MRT4577_92710C.1.pep
SWXRFLLQVRNKTVLDILVKEGIRRGYLISRRCEKPPGISSRSR

SEQ ID NO: 361331 - protein, 55 aa, Zea mays
  Clone ID: MRT4577_92711C.1.pep
LPSRSLVLDLLHCHDRSGLTPLHIRRAHGTEPRPQPGLPHQRRRRLRQRAAPRRT

SEQ ID NO: 361332 - protein, 358 aa, Zea mays
  Clone ID: MRT4577_92712C.1.pep
MLEVGGGRRSLVIVSSCCLALPRQHQHAARSHHTTRHVTTAPSFVLSCLTSHASRSAKHQQRTTTPTLGLRGRRGEGGAAQRQPMVSMSSTPHPLDPSVPAVVGGGKEEEEAVESCAAAAPLPPVGIDDDEEGPRRVRKPYTITKSRESWTDPEHDKFLEALQLFDRDWKKIEAYVGSKTVIQIRSHAQKYFLKVQKNGTGEHLPPPRPKRKAAHPYPHKSSKKALQVVLPQQVSHIMEQGCGTPMDVATVATDSSVNNAFPVQHFSPRHTQAMPDFARVYNFLGSIFDPETNGHLQKLKEMDPIDAETVLLLMKNLSINLTSPNFEEHRRLLSSDASSMDQKSGSSRVHLPFMITSK

SEQ ID NO: 361333 - protein, 43 aa, Zea mays
  Clone ID: MRT4577_92713C.1.pep
VRSRIHGLEHASGRTRRPRRSSATRRSRINVPPKSLAGATATA

SEQ ID NO: 361334 - protein, 56 aa, Zea mays
  Clone ID: MRT4577_92714C.1.pep
PSAAPPSPHLTSSTPSLDRVEVPRHEREPWTRSPAARWALGQRPETRPSTDTGHGA

SEQ ID NO: 361335 - protein, 39 aa, Zea mays
  Clone ID: MRT4577_92715C.1.pep
ETPTQGLKCLVTHIHVGRKLVLEWRNKNQEHKLLESRRC

SEQ ID NO: 361336 - protein, 346 aa, Zea mays
  unsure (1)..(346): unsure at all Xaa locations
  Clone ID: MRT4577_92716C.1.pep
MAFAPKTSSSSSLSSALQAAQSPPLLLRRMSSTATPRRRYDAAVVVTTTTTARAAAAAVTVPAAPPQAXRRRRCRQSKRRHPXRRSRPVSDTMAALMAKGKTAFIPYITAGDPDLATTAEALRLLDGCGADVIELGVPCSDPYIDGPIIQASVARALASGTTMDAVLEMLREVTPELSCPVVLLSYYKPIMSRSLAEMKEAGVHGLIVPDLPYVAAHSLWSEAKNNNLELVLLTTPAIPEDRMKEITKASEGFVYLVSVNGVTGPRANVNPRVESLIQEVKKVTNKPVAVGFGISKPEHVKQIAQWGADGVIIGSAMVRQLGEAASPKQGLRRLEEYARGMKNALP

SEQ ID NO: 361337 - protein, 62 aa, Zea mays
  Clone ID: MRT4577_92717C.1.pep
KSCSIFLEMKYDVFACFSETVLSIRLKICLFSIYLKDNLVISRAHTIPEFQSCTDPTDTNSP

SEQ ID NO: 361338 - protein, 84 aa, Zea mays
  unsure (1)..(84): unsure at all Xaa locations
  Clone ID: MRT4577_92718C.1.pep
IQCQRFEVPDXRFPHHMTKGKRIGXMGGLHKELSFGSTKSLXRLVXHFMCQCFALFHPSDDCTHLIFXTARXKKKKTXXPRAPH

SEQ ID NO: 361339 - protein, 128 aa, Zea mays
  unsure (1)..(128): unsure at all Xaa locations
  Clone ID: MRT4577_92719C.1.pep
FLGQCVEXLRPRCSPSFGVXGSPQCQALQQQCCLQVSXVGPMHRYQAAFGVVLQSFLQPQPQGGLGALMAAQVAQQLPPMCGLQLHLSGPCPCNSVSAAPLVLRVPLCCSPKCNGSAGKETIAFLLYS

SEQ ID NO: 361340 - protein, 51 aa, Zea mays
  Clone ID: MRT4577_9271C.1.pep
GGKECVRPIEGSAGRCQERRNGCCCGTEASTPSIVVAVSTAASAIYETTTV

SEQ ID NO: 361341 - protein, 94 aa, Zea mays
  Clone ID: MRT4577_92720C.1.pep
YCIIPTGSGHCRSMAGVSRRRTSQGSADRTSVCCSRWSLTLMCTPRPGEASRCRTGALASVSVRSFGTSIPLPRSRSALCMILIQIRWQGSLSI

SEQ ID NO: 361342 - protein, 143 aa, Zea mays
  unsure (1)..(143): unsure at all Xaa locations
  Clone ID: MRT4577_92721C.1.pep
PPVVKEAPTXXRSXXXEXRQAGLVXXATALXKSPIARAXPKXRELXTRYXPVARRXXAEAWVALXRLPXXPSVTXGXVXPLAAQLXXARYNFGRSRDGAXXGXAVATXLPAXSPTAXRPPAVFXYPVXXXAAAPEMQPXXPSQ

SEQ ID NO: 361343 - protein, 104 aa, Zea mays
  unsure (1)..(104): unsure at all Xaa locations
  Clone ID: MRT4577_92722C.1.pep
QLSRRANERQPEATHRRTRGERSSPTQEEKRPATRGKRGKTPERXKAGAHARTPXQQKGRGGXGKDNTTKNHHKXTENGXXATPTXTPXEGTHQNARGXKEQEK

SEQ ID NO: 361344 - protein, 106 aa, Zea mays
  Clone ID: MRT4577_92723C.1.pep
MPPKTKAQIAAGGQAGSRAGKKKKWSKGKVKDKANNAVMVDKPTYDKILKEVPTYKMISQSVLIERMKINGSLARKAMRTLEDMGLIKKVVHHHGQWVYTRATGSD

SEQ ID NO: 361345 - protein, 70 aa, Zea mays
  Clone ID: MRT4577_92724C.1.pep
VYRPGSTLDKPMQSFTFLFFLIPIFRLGFCFSLLGLLVQDRQIIMILFVRSVCVHNCQLCERMSIICSKH

SEQ ID NO: 361346 - protein, 150 aa, Zea mays
  unsure (1)..(150): unsure at all Xaa locations
  Clone ID: MRT4577_92725C.1.pep
MAGRGKAIGSGAAKKATSRSSKAGLQFPVGRIARFLKAGKYAERVGAGAPVYLAAVLEYLAAEDSDSIIGALSVFVRXVLELAGNAARDNKKTRIVPRHIQLAVRNDEELSRLLGTVTIASGGVMPNIHNLLLPKKAGGGSAKAAAGDED

SEQ ID NO: 361347 - protein, 64 aa, Zea mays
  Clone ID: MRT4577_92726C.1.pep
EPTTPMTHHCHSSIEMTTMRCAIAHKIDLIHLPIAALSCGANSCAALHPAFIRPALTHIWTSAT

SEQ ID NO: 361348 - protein, 218 aa, Zea mays
  unsure (1)..(218): unsure at all Xaa locations
  Clone ID: MRT4577_92727C.1.pep
MAGRGKAIGSGAAKKATSRSSKAGLQFPVGRIARFLKAGKYAERVGAGAPVYLAAVLEYLAAEVKKASNFVANSFIFVLSIENLAAGVSFFFLYKMGVNCXLPELKXTIGGFWLKIXLWLVDLLFSFEPVRILIQXWGPSPCSFVQVLELAGNAARDNKKTRIVPRHIQLAVRNDEELSRLLGTVTIASGGVMPNIHNLLLPKKAGGGSAKAAAGDED

SEQ ID NO: 361349 - protein, 179 aa, Zea mays
  Clone ID: MRT4577_92728C.1.pep
SRWDWGCGDLANPRRRCRRSRLLHRLVWAKVAAALLVKETATGVGDVACWRVDRARSSCDVCRHQASIWNRRSLGWILGRCFSHGVIPASVLGVYCGFLQSFDAMGSFGSGVAMVSLSTTTAGDGGGWWRRLAISGSTGFLDLIVISLFLRGLCARWLRQLSLYPRAYLYSYLYLYAFS

SEQ ID NO: 361350 - protein, 84 aa, Zea mays
  Clone ID: MRT4577_92729C.1.pep
RGYADPLQEQGCQSGTHVFKLKNNPETVNGSRTKNFVGARINKALYIVQSKLFVFLNAGEFATASKVFRGQGRLSCLFSWGGLF

SEQ ID NO: 361351 - protein, 152 aa, Zea mays
  Clone ID: MRT4577_9272C.1.pep
MPDFPILQYADDTLIIMKASQRDLFCLKGILHPFSLATGFRINFHKSCLLSINLDTVKTDHLAAMFGCQVGAFSFTYMSLQMGLTKPKIKDYLPLISKIERRLNAINTWLSIAERLTLVNSTFLVMPIFTMCTLKMPIVMINIIDRIRRDCL

SEQ ID NO: 361352 - protein, 56 aa, Zea mays
  Clone ID: MRT4577_92730C.1.pep
AEARRQVHQLPGVRVLHVRVVSNGHFRHLDRAENQQPRTTLNVGTIGRGNVCIRQD

SEQ ID NO: 361353 - protein, 101 aa, Zea mays
  Clone ID: MRT4577_92731C.1.pep
NTCTGAKRSGCPEKSGPPGFVGPGRAGWLYNSPSPQNSLGPRKKQRLLVPHLNSFYFPKSPVKLSLPFGGGYGRQFRKKPFLFCFKLLFTGDYYLGDSSRA

SEQ ID NO: 361354 - protein, 71 aa, Zea mays
  unsure (1)..(71): unsure at all Xaa locations
  Clone ID: MRT4577_92732C.1.pep
GALXXFSPLAALXSXVXXLXFLLFRFCSLLAXALAAPVXVSSASVRRPRXXGEGAAAPVPPWXVVXGXGGA

SEQ ID NO: 361355 - protein, 76 aa, Zea mays
  Clone ID: MRT4577_92733C.1.pep
KLEWRRATSSIRLRCRRARITTDHGGGGDHRGLEEPHRTPAHASGFGREKAQRRADRHHQKPESRLTNNKKAPSSS

SEQ ID NO: 361356 - protein, 36 aa, Zea mays
  Clone ID: MRT4577_92734C.1.pep
KKKKKKKKKKKKKKKKRKKKKKKKKKKDEKRKKKNK

SEQ ID NO: 361357 - protein, 43 aa, Zea mays
  Clone ID: MRT4577_92735C.1.pep
AVHRRGHRPGLAFLHQVAHTRHLNVCSENVFLDSRYNSLLSEV

SEQ ID NO: 361358 - protein, 175 aa, Zea mays
  unsure (1)..(175): unsure at all Xaa locations
  Clone ID: MRT4577_92736C.1.pep
MAQGANFPGFIGAVGGHDGGVNFGGNFCDMAFYQKLGEGSNMSVDSLNSMQTSMHGGSITMSVDNNSSVGSNSDSRTGMLGHPGLKGPVIVGSYSVGHSIFRPGRVSHALSEDALAHALMDNKFPTETLKDYEEWTIDLGKLHLGMPFAQGAFGKLYRGXYNGGMDGAIKLLERP

SEQ ID NO: 361359 - protein, 107 aa, Zea mays
  Clone ID: MRT4577_92737C.1.pep
DRSALDQSHDLVPREHLPKSRVPPDNVGASHGQHFGYPGAQVEEQPARAVGAALVRLSAPFRAVREHEGRGEAMLSGGPRDCPPLVAGSVRTVPGITVTVASPRRVV

SEQ ID NO: 361360 - protein, 107 aa, Zea mays
  Clone ID: MRT4577_92738C.1.pep
MAQGANFPGFIGAVGGHDGGVNFGGNFCDMAFYQKLGEGSNMSVDSLNSMQTSMHGGSITMSVDNNSSVGSNSDSRTGMLGHPGLKGPVIVGSYSVGHSIFRSAFCL

SEQ ID NO: 361361 - protein, 149 aa, Zea mays
  unsure (1)..(149): unsure at all Xaa locations
  Clone ID: MRT4577_92739C.1.pep
MAQGANFPGFIGAVGGHDGGVNFGGNFCDMAFYQKLGEGSNMSVDSLNSMQTSMHGGSITMSVDNNSSVGSNSDSRTGMLGHPGLKGPVIVGSYSVGHSIFRXGRVSHALSEDALAHALMDXKFPTETLKDYEEWTIDLGELHLGMPFA

SEQ ID NO: 361362 - protein, 807 aa, Zea mays
  Clone ID: MRT4577_9273C.1.pep
MLGVEPESGGAASSSAAENFDAGQYAFFGKEPLEGFELGGLEEAGSDGNGGGFSGPDEGLYRLNSVGDEIDDQSNLSDIDDLASTFAKLNRSISGIRNPGVIGDRRSISRGSSLTLDWPEDVEFSNWVDQDVFENEEFQESKRWWSSNSSVQQGDSNSRPLSRTSSYPQQPLQHRSSEPIVLPKTSSFTSFPPPVAGGGRAPYPAQGLTRHGSIPSIGAGLQMGSPSMSLSASPYHMVGPSHGLPYTGGMPYGALNLPVNNSVQNDWSNHVNPFTGEHLNLLPNLLHKQLSLPNSPMSSLLFSQHQQRLAQVQSSHQNYLNIMPHVLYPHHSAEITSRFGSVGSSHSSRDKRSRSGKGKHNIRFSQLPSDTGSQNGDSGGIKFRSKYMSSEEIESILRMQHSASHSSDPYIVDYYHQACMAKRGATSKQKTNFSPTSMKDVPSKSRSSSDQHTYLQVDALGRVSFSSIRRPRSLLEVDHPSSADGSHDQKSTVRPLEKEPMLAARVTVEDALCLVLEVDDTDRLLQSSQSQDNIFELKRRRQVLLEGLAASLQFVDPLGPSKSGHSSGSALKDDVIFLRIVSLPKGRKFLARYLRLLVPGSELTRIVCMAIFRHLRFLFGGLPSDSSAAETTVALAKTVSSCVHHMELGALSACLAAVVCSSEQPPLRPLGSSAGDGASLVIKSVLDRATELLTDRHAAASYTVPNRALWQASFDAFFGLLTKYCVSKFESIQQMFVTQTPSSGIGPEASKATSKEMPVELLRASLPHTNEQQRQRLLDFAQRSMPVTGFNPSGARGGHITSESVPG

SEQ ID NO: 361363 - protein, 127 aa, Zea mays
  Clone ID: MRT4577_92740C.1.pep
KKFYFGWHRFSSRLVRGKFRGWAPKNFFSFQQSVRVSFFTYFPLSWNSKGGLQEAGKRPFNCLFSPPHNRRVTPAPSFKSPSPLSVFLSPPFKRQGYFAAVPFFLDNKTFTTLKHTCLMKKKKNLQF

SEQ ID NO: 361364 - protein, 673 aa, Zea mays
  Clone ID: MRT4577_92741C.1.pep
MATARLPSRSLLSPAQQSYPRLPASVRLCLSHHEQPPTGPKRHRRAATSHPAFSAAARGRAKKIPIADTDEPAAGVRVTDHGISYRLDGAPFEFQYSYTEAPRARPVALREAPFMPFGPEATPRPWTGRKPLPKSRKELPEFDSFVLPPPGKKGVKPVQSPGPFLAGMEPRYQSVSREDILGEPLTKEEVSELVKGSLKSKRQLNMGRDGLTHNMLENIHSHWKRKRVCKIKCKGVCTIDMDNICHQLEEKVGGKVIHRQGGVIFLFRGRNYNYRTRPCFPLMLWKPVAPVYPRLVTKVPGGLTPDEATKMRTRGHQLPPICKLGKNGVYANLVKQVREAFEACDLVRVDCSGLNKSDCRKIGAKLKDLVPCILLSFEFEHILMWRGSDWKSSLPPLENSYEVTKVQESFSGKESNEKVTHSGNVLTQIELVSVATSHKNWNLDEGQEKFKDSIDSDMVLSSAKDVPALFHSTGISRTEPSADIPLEYSPLNPVCDIMDPSLNCRSIPTNNCENRTLVEKSEHCPDDYNLEMKRKRNDGTKGTVVLNSGSKVEGLLCLLEQAIHSGRALVLSEDELADSDLVYEKSVAFTKSIPRRLVFENTRRKSSARRNVPDNHARTKTHLVENKMLSSSVENKFIVNGGSAMQTDHGQEFLSDVVHQGTLRVDELAKLLA

SEQ ID NO: 361365 - protein, 90 aa, Zea mays
  Clone ID: MRT4577_92742C.1.pep
MALVSAYSSSTTDVTGLPSNGQRASSSFLSGKTLLRQAEAARPSFAVRAAADPNRPIWFPGSTPTSWLDGSLPCYFGFDPWGLGSDPESL

SEQ ID NO: 361366 - protein, 180 aa, Zea mays
  unsure (1)..(180): unsure at all Xaa locations
  Clone ID: MRT4577_92743C.1.pep
PFXMXPXXDPXRHGXXMAXRLNVXGDVVPXKDVNCXAVXTIXTKAPIQXVACXXTGLKCGINYXPXXXVXGGAPXTSVKXAGVNXLPPPPXXXAVXSGMXNKFXLXLRXGSLXXWYVGXEGMEEGEXFXXAPEDLXPLXKXYEEVXXXFXXGEDGEXXDRRIRRSMALRQPLPLLPCPAE

SEQ ID NO: 361367 - protein, 120 aa, Zea mays
  Clone ID: MRT4577_92744C.1.pep
ACIPFGIGKNRPPAWARPEMNSGWPSTVHAGSQWRPTMRVLFSLRGAVSKFCSTRTRIIAHGNSIHNHATRMYTCRRPAQHSTCQAWPVYRESRIAANSHSRRYPARTAPTRGTPRRPTS

SEQ ID NO: 361368 - protein, 46 aa, Zea mays
  Clone ID: MRT4577_92745C.1.pep
HAYDQVNLTINFLLSMATKTLAGACLIALHGSATIAFIFPQCSTSS

SEQ ID NO: 361369 - protein, 58 aa, Zea mays
  unsure (1)..(58): unsure at all Xaa locations
  Clone ID: MRT4577_92746C.1.pep
MGRKFFVGGNXWKCNGTTDQVEKIVKTLNEGQGPPVDVVEEVXISPAYVLLPLVKSTE

SEQ ID NO: 361370 - protein, 132 aa, Zea mays
  unsure (1)..(132): unsure at all Xaa locations
  Clone ID: MRT4577_92747C.1.pep
LPPKPRHAGQGTRDAKQKKNTKKNGNPPKPGKPHGPXTTPTRNKTGPGPTRGPGPPCGGARRXEPPPPPGGPXHVEAPPGRGAPEGAQEIERPQEVEGPPKGTPHRDRARGTGPETPTGPPQRNRVPNRGGP

SEQ ID NO: 361371 - protein, 79 aa, Zea mays
  Clone ID: MRT4577_92748C.1.pep
SMFLNSNFFNSKPKTRRPLLKNRPEHTKQGKKINFKKTPPLCSTQGRAILAPQKKEGEVKTRWGAPFHFFSKGGPTKFV

SEQ ID NO: 361372 - protein, 110 aa, Zea mays
  unsure (1)..(110): unsure at all Xaa locations
  Clone ID: MRT4577_92749C.1.pep
CVRALGSVAVLLVALVLCRGGAAWPCPSARRGLAGGCCRSWRPPGVRCARLGRGGAVGLGPCGGGCRPCSWLPGPLRGGRLXRPCLAPPAVWRRGARGLXGCALXGFPAG

SEQ ID NO: 361373 - protein, 235 aa, Zea mays
  Clone ID: MRT4577_9274C.1.pep
PRVRLIDTYGKAGHLEKVSDTFNQMLSEGVAPSVVTFNSMIHAWGKHHRMEKVASLVRMMEEFQCFPDTRTYNILIALYRESDDIDIAEYYYWKMKTENLVPDVVSCRTLLYGYSIRGMVTKAEALLKEMDERGFMVDEYTQSALTRMYVNVGMLEQAWRWFDRFHHHMNSECFSANIDAFGEKGYIVLAEKAFVCCLKKKMISVSACNVMIKAYGLVGMLDEACEIANGMERMG

SEQ ID NO: 361374 - protein, 85 aa, Zea mays
  Clone ID: MRT4577_92750C.1.pep
VGHADFCTLLASRGTATAFLKAGCTHGKIVNRPNFILSPADLVDIPSLARSIGNRFMTQIWVNGGRKIAGDEARSHLKPDDETEE

SEQ ID NO: 361375 - protein, 73 aa, Zea mays
  Clone ID: MRT4577_92751C.1.pep
SASTAGGRGGPRTGRLSRRPSTSMNATGARHQIGDPDKPDISTPADYRLLVGTKGRCRSRRCGGKPGRLEVPI

SEQ ID NO: 361376 - protein, 188 aa, Zea mays
  unsure (1)..(188): unsure at all Xaa locations
  Clone ID: MRT4577_92752C.1.pep
MYMPPSIPSIKEKVRAASFALPHPACRTLKGIRSFKAEGPIPRTGGPTVAPPPPMPXKGRVVSTXPHLSGGLTTVPANALRASTPXSSDNPGPPFILDATMPSVTTTTPNAVNLWHEAVTLQYPSKGAKDQQELLSRNKLEEGTQGPFFGFLPKNQISNTKXPCFVFAVSMLTTXATGXDFVQQMEDP

SEQ ID NO: 361377 - protein, 103 aa, Zea mays
  unsure (1)..(103): unsure at all Xaa locations
  Clone ID: MRT4577_92753C.1.pep
SEHTKRSALSTTLTSRAPKISSLLALLALFAXSASKASIMPHCXLAPSSIIPKFLPPVTTMGFEHPDVQAYRLQQAIAGSVXQQPIAKLRQQSLAHLTIQTIE

SEQ ID NO: 361378 - protein, 120 aa, Zea mays
  Clone ID: MRT4577_92754C.1.pep
GVPVFSLAPGWPPFWPSWPLFFFLPGVHAGASPFLFSFVALLLLWSSVQHVAFPPFTVPILGSLLSVRFLPPVASVPVALCASCIWPFVFRFVIPFLSMVWASGFNCTHIILKLFWVIIK

SEQ ID NO: 361379 - protein, 517 aa, Zea mays
  unsure (1)..(517): unsure at all Xaa locations
  Clone ID: MRT4577_92755C.1.pep
MDAAERRLARVAAHLVPSFPAPHATGPPLAPSPAAASSSSSSPAGDSYRRVHGDVPSEPPEWRTATDESGKEFVDIIYEKAVGEGIAKITINRPDRRNAFRPLTVKELMRAFNDARDDSSIGVIILTGKGTKAFCSGGDQALRDSDGYVDFDSFGRLNVLDLQVQMCFYLRSVYTQCRLSLHFQMVSLVRFELTYIVQISEHDGDIYFXRTPVYXIFLIFADIPLSKFAGADVPCRWHFXLVCKKTKNDXFKALVVILVLRTSDEPFFLQVQIRRLPKPVIAMVAGYAVGGGHVLHMVCDITIAAENAIFGQTGPKVGSFDAGYGSSIMSRLVXSYYQSSEVVENAALFLTHFEKKHLQYSKDYILNNTLPPSSMLTCTLFHFILSTCSRYINSMLLLLQXIFLMDXGPKRAREMWFLSRFYTADEADKMGLVNTVVPLAELEQETVKWCRQILRNSPVAIRVLKSALNAADDGHAGLQELGGNATLIFYGTEEAKEGKNAYMERRRPDFSKFPRKP

SEQ ID NO: 361380 - protein, 97 aa, Zea mays
  unsure (1)..(97): unsure at all Xaa locations
  Clone ID: MRT4577_92756C.1.pep
PLHPAPPPVPWPPLASSRPGCPSAPRAARRSPSPSPHASSPCPSLSRPPRPRLCGLPPPELRLATTGPCVAARSVFAVAHLGRRRALSCFEQKKXXX

SEQ ID NO: 361381 - protein, 88 aa, Zea mays
  Clone ID: MRT4577_92757C.1.pep
LRAGWISKGLDVSIGGSGSDALPYAGVYTEASTVLLTACLSSPKATTDEPRMPHTPTLTHTLADNYSTNSSPPNNCLNNWVCHSRMHA

SEQ ID NO: 361382 - protein, 61 aa, Zea mays
  Clone ID: MRT4577_92758C.1.pep
ILDSIYLRWGSPSVRFITYNWGSSILKIYMLNCLLRNLVSIFVESTLALYSLFLVSTAPKS

SEQ ID NO: 361383 - protein, 107 aa, Zea mays
  Clone ID: MRT4577_92759C.1.pep
MPGVITKFAVTSMVMWMAPVAIVYGFYYQAFPGVSRMSSSAQTLASGFLAVISVNLVIGLYIFMAMKETRHQEPQPDPTFLANAKASINQPTSSQPSDDSKGKGKVE

SEQ ID NO: 361384 - protein, 53 aa, Zea mays
  Clone ID: MRT4577_92760C.1.pep
AQTHSPATTEIQTCCCGRGARYLELSVSATREDVNCNQLASEGSKPCECWCLS

SEQ ID NO: 361385 - protein, 64 aa, Zea mays
  Clone ID: MRT4577_92761C.1.pep
APCPYCRGVKESPSLCAPRVRSLGKEHRQSEGEQRVRRERKPMGQELSGSRPQRGLVRCPGRTS

SEQ ID NO: 361386 - protein, 130 aa, Zea mays
  Clone ID: MRT4577_92762C.1.pep
DKPEPPPEGRLPDATQGSDHLRQVFSTQMGLSDQDIVALSGGHTLGRCHKDRSGFEGAWTSNPLIFDNSYFTELLSGEKEGLLQLPSDKALLSDPSFRPLVDKYAADEDAFFADYAEAHLKLSELGFAEA

SEQ ID NO: 361387 - protein, 140 aa, Zea mays
  unsure (1)..(140): unsure at all Xaa locations
  Clone ID: MRT4577_92763C.1.pep
ELVSELCAXETGANQDDALARIEKLSKVNPMLGFRGGRLGILNPGLAXFQPRPXFEACLTMTNHXFGNTLTPWLXGVAKNMVPFGGTPXQNLGHKGILFIQVMKKGSAMVGKIFGTKVGQWMQIPRPVLEVKKIGNKANF

SEQ ID NO: 361388 - protein, 109 aa, Zea mays
  unsure (1)..(109): unsure at all Xaa locations
  Clone ID: MRT4577_92764C.1.pep
QLQQQSLVYLTIQTIATGQXQQFLPALIHLAMVNPAAYLQQQLLASNPLALANVVXANQSQQQLHXFLPSLIQLAMVNPAAYLQXXHLFLSIPLAVAIAPTYLEQHLLQ

SEQ ID NO: 361389 - protein, 354 aa, Zea mays
  Clone ID: MRT4577_92765C.1.pep
MAAAAEHGNCDAWAARDPSGVLSPYKFNRRAVQSSDVSLKIIYCGVCYGDVMWIQNKHNDSVYPLVPGHEIAGVVTEVGADVKAFKVGDHAGVGTYVNSCRHCENCNSSLENYCPETVFTYNTTDADGTITKGGYSTHIVVHERYCFKIPDGYPLAQAAPLLCAGITVYTPMARHNMKQPGKSLGVIGLGGLGHMAVKFGKAFGLKVTVFSTSESKREEAINLLGADNFVISSDTQQMEALKNSLHFIVDTASGDHPFDPYLSLLKVGGVMTIVCFPSEIKMHPASLNRGGRTLSGSIVGGTKDIQEMVNFCAENKIYPEIEIIKMDYINEALARLVNRDVKYRFVIDIKNSFE

SEQ ID NO: 361390 - protein, 101 aa, Zea mays
  Clone ID: MRT4577_92766C.1.pep
KSVHLTNHLGLFIDMCFNAFDEEADLDVLVAPFFYVTYLRCSSGALLQRSCYSVYPWTASSLLSFLEGVILGCIMSFECAVDLQVFVLIFLSFLMQETLIQ

SEQ ID NO: 361391 - protein, 63 aa, Zea mays
  Clone ID: MRT4577_92767C.1.pep
FSVTTYKYILTAFVLLLFSSKTTSEIYQGLEIKLYNALGSFVRRSISSKAYRNRISFGQKDMC

SEQ ID NO: 361392 - protein, 115 aa, Zea mays
  unsure (1)..(115): unsure at all Xaa locations
  Clone ID: MRT4577_92768C.1.pep
HWGXSFEIADGAFDDVYSRNMDLDRVALSARQHHKLDETQQSWLLGPPEAKKKDKYVDLGXVLAKLXLLWWTLWCGVIFFFLIDLPIMIAXPSMDKKPGPPTPDQYTQELHNGVL

SEQ ID NO: 361393 - protein, 56 aa, Zea mays
  Clone ID: MRT4577_92769C.1.pep
FIGKLFYTRGKPRIILKNFHPPPRGGDAKGGLFVGGKKKCPGEVINPGGPGELFLV

SEQ ID NO: 361394 - protein, 41 aa, Zea mays
  Clone ID: MRT4577_9276C.1.pep
MLSRQGRPSVSIKDRNIDWPDVVQTLQLAIYPGMGQGYESL

SEQ ID NO: 361395 - protein, 423 aa, Zea mays
  Clone ID: MRT4577_92770C.1.pep
MLLVKSSRHDSESDTDSGYGKKKMEHIKNERDERKKVLVKNSRHDSAFDTDTGDGKKKMEHAKNERDERRKVPVKSSRYDSESDTDSGYGKKKIEQTKNVRDERRKVPLKSSHHDSESDADIDYRKKKIEHTEGIRDERKKIPARSSRHDSDSGADNNGKNKRPVQSSCHDLEDEKPRLRNYNYGSRASEHEKHSKYKESFRHDSDSDGYSRGKERQLNVAVLKKDVQEKRKVATSSDSSDYSSSLSSSDNDTSADSYEEQKRSQAGGRRNELNTQRQKEEERKELEKQQKREVEKKELDKQKQREEERMEMEKEKKRQREREEERQREREQYERKGGNDVERDNKRKLIDDRYDPNSSRDREEGYRDSQNRDDNRRQEEHGQHNRYMDSHDSKRSRHDSHYHSRRDYEQRYSRDEHRDRRRH

SEQ ID NO: 361396 - protein, 79 aa, Zea mays
  Clone ID: MRT4577_92771C.1.pep
KESEYHRARDTARRARAQEHRGIKETRPPHKGGPSQDTKQKKTRQGQSAMPRTQPRLGHRRHQTGSGQPTGRRKKKKTT

SEQ ID NO: 361397 - protein, 75 aa, Zea mays
  Clone ID: MRT4577_92772C.1.pep
METLSRLLINMCIVLLLLLTLGLAANFNYADAVAKSIISFEDPRSGKLSPGNRMAGLPSSASPASATTPSTTMTT

SEQ ID NO: 361398 - protein, 184 aa, Zea mays
  unsure (1)..(184): unsure at all Xaa locations
  Clone ID: MRT4577_92773C.1.pep
MDGNARSAATNQKKPVVADDDLVELLWHNGSVVAQPQAHQRPAPTYDPDRPGTSGLTGEETAAWFPDTLDDALEKDLYTQLWYSTIADAXPAARGHAPGPYLEXPSPSPPVGSSGVESSWAGDICSTFCGSNQVLRTPARIRGKDAALQSELPSNTGAHDGTSSSGGSGKHYGGSRLPSDSVHV

SEQ ID NO: 361399 - protein, 85 aa, Zea mays
  Clone ID: MRT4577_92774C.1.pep
MMGGRTARPVVLALVTIIAIAAAEGDQVKCGGCSPCGGADCPVLYPLPSSPTYYYYSPTPPATYPGESSLYYQSPPAGAYIQIGS

SEQ ID NO: 361400 - protein, 423 aa, Zea mays
  Clone ID: MRT4577_92775C.1.pep
MDGNARSAATNQKKPVVADDDLVELLWHNGSVVAQPQAHQRPAPTYDPDRPGTSGLTGEETAAWFPDTLDDALEKDLYTQLWYSTIADAAPQHEGTLPGPTSQPSPSPPVGSSGVESSWAGDICSTFCGSNQVLRTPARIRGKDAALQSELPSNTGAHDGTSSSGGSGSNYGGSGLPSDSVHVQKRKGRCRDDSDSPSEDAECEEASEETKPSRRYGTKRRTRAAEVHNLSERRRRDRINEKMRALQELIPHCNKTDKASILDETIEYLKSLQMQVQIMWMTSGMAPMMFPGVHQFIPQMALGMNPGCIPAAQGLSQMPRLPYMNHTLPNHIPLNSSPAMNLMNPLNAANQVQIGHLRDAGSHVLHLDGGRAAVVPQVPGPGPHVVHGHQIAQAEEHNKILEVAASTVIPTSKAGQPPTFHGV

SEQ ID NO: 361401 - protein, 267 aa, Zea mays
  Clone ID: MRT4577_92776C.1.pep
IAADITGTNLNASQRHQEHRHDEERTLHTIAKDVQHHQHHGHLPASFAEQPSNSKYGVEQMKPQPQQPKMVRMYSAASQQPMDYALKETSPFLGGGQIVGGRVIGGEKHASTYDLVERMQYLFVRVVKARDLPNMDITGSLDPFVEVRVGNYRGITKHFEKQRNPEWNAVFAFSRERMQASVIEVLVKDKDLVRDDFVGMVRFDLNDVPVRVPPDSPLAPEWYRLVHKDGDKSRGELMLAVWIGTQADEAFPDAWHSDAATLEDPSA

SEQ ID NO: 361402 - protein, 191 aa, Zea mays
  Clone ID: MRT4577_92777C.1.pep
MIDRERAEEMQVNNEAPLGCLKPNISQYNSPEQIGGVEGFPENNEKRNDIVAAEKIWEATPNQGLSRPIYRQEFYAWPYIYSDYQIVRQPLPYGFDNQFYQINRDHGFPIENRVQYLPFKMLPQGHPHDAQLQEFQYFVVIDFEATCDKVNNPFPQEIIEFPSVLVNSATGKLEECFQTYVRPTYHQFLTD

SEQ ID NO: 361403 - protein, 108 aa, Zea mays
  unsure (1)..(108): unsure at all Xaa locations
  Clone ID: MRT4577_92778C.1.pep
VHFLNHSVPLTQEYWPHWTLWPCLQCTLRALTLHSLQACHPSYRSDREHVPHTVFLQTASLWQYLVRHRTXXXSVLQYLEQAEHVLSQHLVQQYHQCQLCRWFSERXA

SEQ ID NO: 361404 - protein, 229 aa, Zea mays
  unsure (1)..(229): unsure at all Xaa locations
  Clone ID: MRT4577_92779C.1.pep
SGVVXAVXFPAARXPXXPLAXXFSLVXXCXWVFXXXPFHSAVXSSXRXLXXXXXXFHLXXXVLVVXXXXWXXPRXXLXXVXXXXFXXRCSXWXXXXCLXLAXVXLXXAXXWSXXXXCVXXXASXXCCXAXXXXXCLXAXXXGSXXLXCWXRXXGXXXXXRXXXARXXSWXXXXGPXPVXXXLALXVXXXAGXXXXXPYKKQRKKLKKPKNLEGERERERHRSAARGRRL

SEQ ID NO: 361405 - protein, 143 aa, Zea mays
  Clone ID: MRT4577_9277C.1.pep
MAEEAPAPVVAPAEAPTPVLGEPMDLMTALQLVMKKSSAHDGLVKGLREAAKSIEKHAAQLCVLAEDCDQPDYVKLVKALCAEHNVHLVTVPSAKTLGEWAGLCKIDSEGKARKVVGCSCVVVKDYGEESEGLNIVQEYVKSH

SEQ ID NO: 361406 - protein, 184 aa, Zea mays
  Clone ID: MRT4577_92780C.1.pep
MIDRERAEKIWEATPNQGLSRPIYRQEFYAWPYIYSDYQIVRQPLPYGFDNQFYQINRDHGFPIENRVQYLPFKMLPQGHPHDAQLQEFQYFVVIDFEATCDKVNNPFPQEIIEFPSVLVNSATGKLEECFQTYVRPTYHQFLTDFCKELTGIQQIQVDRGVPLGEALLMHDKWLEDKGIKNTN

SEQ ID NO: 361407 - protein, 136 aa, Zea mays
  Clone ID: MRT4577_92781C.1.pep
SGWCSAAGSPTAMIDRERAADYPGPSAFHCVMLQEMQVNNEAPLGCLKPNISQYNSPEQIGGVEGFPENNEKRNDIVAAEKIWEATPNQGLSRPIYRQEFYAWPYIYSDYQIVRQPLPYGFDNQFYQINRDHGFPI

SEQ ID NO: 361408 - protein, 65 aa, Zea mays
  unsure (1)..(65): unsure at all Xaa locations
  Clone ID: MRT4577_92782C.1.pep
CLMCLNCSYSHKAQTILSIWXYIIFSGFCFWDLCSDDAXXFIXYVAPAQDFLHNQLFFEFFMLFD

SEQ ID NO: 361409 - protein, 50 aa, Zea mays
  Clone ID: MRT4577_92783C.1.pep
CRVLDGCADADPARLSGSSAMNAYAYISSGNITHTRCSLLDSDDATLHYT

SEQ ID NO: 361410 - protein, 436 aa, Zea mays
  Clone ID: MRT4577_92784C.1.pep
MIDRERAEEMQVNNEAPLGCLKPNISQYNSPEQIGGVEGFPENNEKRNDIVAAEKIWEATPNQGLSRPIYRQEFYAWPYIYSDYQIVRQPLPYGFDNQFYQINRDHGFPIENRVQYLPFKMLPQGHPHDAQLQEFQYFVVIDFEATCDKVNNPFPQEIIEFPSVLVNSATGKLEECFQTYVRPTYHQFLTDFCKELTGIQQIQVDRGVPLGEALLMHDKWLEDKGIKNTNFAIVTWSNWDCRIMLESECRFKRIRKPPYFNRWINLRVPFQEVYGDVRCNLKEAVQLAGLTWEGRAHCGLDDARNTARLLALLMHRGFKFSITNSLVWQPAAAPQSTAATCHFSPDRSPDPVVVQLQHQQQQHKPKEALGSPASQVNPSYATPAGGKDRAMYCYCGVLSRWSVVRKPGPMQGRYFFGCGNWTATRRAICPYFAWAS

SEQ ID NO: 361411 - protein, 71 aa, Zea mays
  unsure (1)..(71): unsure at all Xaa locations
  Clone ID: MRT4577_92785C.1.pep
GAGRLFRQTADRAASHLYXRERKHVRVVKFKLEEAPLPDRWLPMLFFPSGSCWAAPCICPFLVRLQVKLPS

SEQ ID NO: 361412 - protein, 97 aa, Zea mays
  Clone ID: MRT4577_92786C.1.pep
VRLSLYTLDCVFKPPQLHILKKKKKKKKKKKKKKKKKKKKKKKKKKKKKKKKKTRSNTPFKEPQRAPGLPRAPSSSCFCKHPCGPVGGVPGGKKPPP

SEQ ID NO: 361413 - protein, 243 aa, Zea mays
  unsure (1)..(243): unsure at all Xaa locations
  Clone ID: MRT4577_92787C.1.pep
MNAGSDPVVIVSAARTAIGSFNGALSTVPVHEMGTTVIKEVLQRAKVAPEEVSEVIFGHVLTAGCGQNPTRQASVGAGIPYSVPAWSCQMICGSGLKAVCLAAQSIAMGDSTIVVAGGMENMSKAPHLTHLRTGVRMGEVPLADSILCDGLTDAFHNYHMGITAENVAKKWQVSREAQDKVAVLSQNRAEHAQKAGHFDKEIVPVXLVSSRXGLXTEXXIDEFPRHGSNLEXXGKLKPYFLTD

SEQ ID NO: 361414 - protein, 87 aa, Zea mays
  Clone ID: MRT4577_92788C.1.pep
IKTGKGTFLFRGGPFPHPKTFFLGFHLIANQKGGPPNDVLLVGGPPACQSRWAKGHQLLYLKKGGGVTPNPLVKRPTCCLVKKKPRF

SEQ ID NO: 361415 - protein, 176 aa, Zea mays
  unsure (1)..(176): unsure at all Xaa locations
  Clone ID: MRT4577_92789C.1.pep
MDAAMQKVLEALSQMEERFTATMEGRCSAIEQRVDAVAQQAEARFISLEMGHSEVDQWRPEVEKRLENLFLETKRATKFMERETLTADQSKSGLFAPSGSASXQPSATKQAVDGPFGNHSEPYHRARGFGHGPAQTQVPVKGTYHDPLRFDSLDDPVCHTXMDGGRDGYRCGHGSL

SEQ ID NO: 361416 - protein, 58 aa, Zea mays
  Clone ID: MRT4577_9278C.1.pep
DDFRVVALVNCTWHSLPNCSQEGVVLPHTCQSDPWNGCHFPRRRRGAAASPRSVPGLR

SEQ ID NO: 361417 - protein, 44 aa, Zea mays
  Clone ID: MRT4577_92790C.1.pep
DVGYSIEHTDPWTSNYQLLNIQHTSNNLLYIRSIIFIYILSYYK

SEQ ID NO: 361418 - protein, 45 aa, Zea mays
  Clone ID: MRT4577_92791C.1.pep
KVQKRSTAKQNCHLCRQCCSAGYSFLTLRWFATPTMSILMYCILL

SEQ ID NO: 361419 - protein, 80 aa, Zea mays
  Clone ID: MRT4577_92792C.1.pep
MDGNVEDVLLCANRYSERQSICTAAQGTEENDYKEPPPAPLFDAEELTSWSFYRAGIAEFVATFLFLYISILTVMGVTSR

SEQ ID NO: 361420 - protein, 74 aa, Zea mays
  unsure (1)..(74): unsure at all Xaa locations
  Clone ID: MRT4577_92793C.1.pep
LRKVAFPRLVCEIAQNFKTPLWVQSSPVPPLQKAPQGDLGGLFXDPHLWALPAQRGPLMPQDIQLGGRIKGERA

SEQ ID NO: 361421 - protein, 100 aa, Zea mays
  Clone ID: MRT4577_92794C.1.pep
QGHVRNGGDDGGGGRWCWAGLSGAGQPAGPRDDPAPLRAPRGLYPFGEYISYTNQSFTIHEIKHLWRKHRWTRTYGRDLNIRVDIFENPTETNVLCSDWN

SEQ ID NO: 361422 - protein, 46 aa, Zea mays
  Clone ID: MRT4577_92795C.1.pep
TFFRTNPDFIGASTINHIVNGLYQPDDSQACNTIDASSLNSYRRSS

SEQ ID NO: 361423 - protein, 77 aa, Zea mays
  Clone ID: MRT4577_92796C.1.pep
MSSSSSCLLLLCLSCPGDKYVNGEIIPCTYPTYQPKERRTSKYESRRYERRRDGPPAASRKPRQQAPAQTQTESASS

SEQ ID NO: 361424 - protein, 109 aa, Zea mays
  unsure (1)..(109): unsure at all Xaa locations
  Clone ID: MRT4577_92797C.1.pep
VREQAILLNLGSLRAIAMYARVLIFNYNXNVHLILISHFLFMILQNVLXLINYLFNLCSPGGKAFLGLLLSRLNPRNINGGPAMPFQLEVTNISSNTYSWYGSSCELVN

SEQ ID NO: 361425 - protein, 223 aa, Zea mays
  Clone ID: MRT4577_92798C.1.pep
MAASLPTTAARLAAPAFAYRSPKAPSATALPRAAAFPAIAVAAAPLRPRRAPRPVAARAGGEERETILLPGCDYNHWLIVMEFPKDPAPTREQMIDTYLNTLATVLGSMEEAKKNMYAFSTTTYTGFQCTVDEETSEKFKGLPGVLWVLPDSYIDVKNKDYGGDKYVNGEIIPCTYPTYQPKERRTSKYESRRYERRRDGPPAASRKPRQQAPAQTQTESASS

SEQ ID NO: 361426 - protein, 258 aa, Zea mays
  Clone ID: MRT4577_92799C.1.pep
MAALASLLRRRSRRRADVLLRTLCATTTAPPLTSSAAKTRLRREYDADRAVSLLEAIDTASLSAGSTRHALSLAARRLTRAGRHADAEALLSSHIPASPTEPHLSAILCSYASAGLPEKALEAFRSAAPSLPSPISPMPFNALLSAFVRCRRHRRVPVLFEELSKEFSITPNATSYAILVKAHCMVRHDAKAHEVIARMREEGISPTTTIYTTMIDSMYKQKKVEEAQTLWKQMLESGCKPDHATYNVEAMHHGLMAS

SEQ ID NO: 361427 - protein, 93 aa, Zea mays
  unsure (1)..(93): unsure at all Xaa locations
  Clone ID: MRT4577_9279C.1.pep
THYSDMLSTFDNLLNHLNRFGYFINDIDLNNLVFDLLVRYIPQLAPFRFDLYMSCPLHFSSFDLYTHQLANTLINNYHHAXSGNDLAHKLVPA

SEQ ID NO: 361428 - protein, 65 aa, Zea mays
  Clone ID: MRT4577_927C.1.pep
KQESPHQSHFYLQQKRLGYKNQLKTETQGSQISCPILKPCTIYIKQSIGKGAKAQKKKNPPPKYL

SEQ ID NO: 361429 - protein, 121 aa, Zea mays
  Clone ID: MRT4577_92800C.1.pep
HQGCAHAHPAPGGLHCAAAATNRNATQGCRGGGSLASSTANPRHLPNLAGSPVAPSDHCPVAAGVIHCCSCGLRRTTRPVALLEVDGGVMETRTFSLGGPPSPMAPSDLPSCSYYLLTHLQ

SEQ ID NO: 361430 - protein, 128 aa, Zea mays
  Clone ID: MRT4577_92801C.1.pep
KFGAPPLLEVFFKISFFWPKIKKPFSPLYWGGGNFCPTQKGGTQGGESKNSPPFFPPPKRPPEILGHLKVKTNGGNLGVEKRPKNFLRARFQFRGGVLGGFFTPILKPKSLTKFFKGAFFRKKKSPFF

SEQ ID NO: 361431 - protein, 41 aa, Zea mays
  Clone ID: MRT4577_92802C.1.pep
LLQISHSPLPAGRWSYRHAREQARPRHRWPTLRSYRAGCVP

SEQ ID NO: 361432 - protein, 249 aa, Zea mays
  unsure (1)..(249): unsure at all Xaa locations
  Clone ID: MRT4577_92803C.1.pep
MPAVPVPGGGGSSDAEELFRTKRIPEIRAVEGATRREISAKEEELRQLVGRSYRDLLDSADSILLIKQSSDAIFYNLARISDSLSSLSPPPEPSLAVSAVSPSPSAGGRARLYALAARAKYLVDTPEHIWGXLDEGLLLEAAGRYLAAQVVHGRLSRDATAAARFPLLAHQAQLVEAFRPQISQRARERLADRRLPVAAHADALAAVAAIDSPSLAPAQALLLFLTSRRAWISQALAGLASDLSSYTSV

SEQ ID NO: 361433 - protein, 73 aa, Zea mays
  Clone ID: MRT4577_92804C.1.pep
GVHLHIEHRHRVQHIVRVGVLHRRHGAQVGVRSLHADLGQGRGSTASKTRPARPGPRRQRRKSMSSAQAPAIA

SEQ ID NO: 361434 - protein, 67 aa, Zea mays
  Clone ID: MRT4577_92805C.1.pep
LEPAGKPVPHEICDVILRHLESPPCCFMTASLAKAFYHLMNGCYDRYTTVTQNCKVDLIEHDENPWR

SEQ ID NO: 361435 - protein, 161 aa, Zea mays
  Clone ID: MRT4577_92806C.1.pep
FHNLEQSRGGGPSMAQYCLGNTLGRPTNRIEIRVRHGVPHSRTASVPHSCLLGRRPLLPVLQPPGLQPLGASDSSRSSRQLRCSADLLVRLTGCLVPPAAGCGLLAAWSRRGADPHGRTAAACRCFLLGRTSACLVVCLADCLMLSASSCLLASCFYASSC

SEQ ID NO: 361436 - protein, 51 aa, Zea mays
  Clone ID: MRT4577_92807C.1.pep
TAEIFLIFTYTHESLTEQGFTPRITLKTEKIKESCTHKRRALLQNKEKSND

SEQ ID NO: 361437 - protein, 67 aa, Zea mays
  Clone ID: MRT4577_92808C.1.pep
CEHFDCFKKKMQEQCGNPIEPNHLLVSLNPMYVSAFNPRCYFPNLFQFHSSEKKGERLVSLVGSFSL

SEQ ID NO: 361438 - protein, 38 aa, Zea mays
  unsure (1)..(38): unsure at all Xaa locations
  Clone ID: MRT4577_92809C.1.pep
AGVSISEXRANRLLAAASQQESILRSHXTGTGTRRPRG

SEQ ID NO: 361439 - protein, 192 aa, Zea mays
  Clone ID: MRT4577_9280C.1.pep
MGKYMRKVKVSSEVAIMDVAAAPLGVRTRARALALQRLEKQQVQQEEGCGGEYLELRSRRLEKLPPQVASVRRCGGRKVAATAPAAMEEAEASYGENMLESEAMGRNTRETTPCSLINSEMISTPGSTTRSSHSSHRRVKAPPVHAIPSSTEMNEYFAAEQRRQQQAFIDKYNFDPVNDCPLPGRFEWVKLD

SEQ ID NO: 361440 - protein, 79 aa, Zea mays
  unsure (1)..(79): unsure at all Xaa locations
  Clone ID: MRT4577_92810C.1.pep
KGSLHQLSPSLLKKNLILMWTRLXRKTPFSTAELRRSHHIPPSINVKLGYKTSLTSGFGARQIATWSILQTPGLFFWHI

SEQ ID NO: 361441 - protein, 135 aa, Zea mays
  unsure (1)..(135): unsure at all Xaa locations
  Clone ID: MRT4577_92811C.1.pep
PSPSRDPRPPHXPAPRDPXRPRPSPPPSANLAADPRPVLTPPPSSAPPLRPPSSAPPSPAPLARLRGPCGRQAPPSRRHLPLQHRPPCPRSAAPMLTMATRRRTAPRAPPRSTAATPTQLRVASPCDFPNVSLPL

SEQ ID NO: 361442 - protein, 182 aa, Zea mays
  unsure (1)..(182): unsure at all Xaa locations
  Clone ID: MRT4577_92812C.1.pep
ETSTVPPPAPASPQYVPPPPSVSASDPLRSRESRPRSPPIRSXAPCPSPSRDPRPPHPGAAGSTPPPSXPSPPPPANLAVDPRPVLTPPPSSAPPLRPPSSAPPSPAPLARIRGPCGRQAPPSRRHLPLQHRPPCPRSAAPMLTMATRRRTAPRAPPRSTAATPTQLRVASPCDFPNVSLPL

SEQ ID NO: 361443 - protein, 95 aa, Zea mays
  Clone ID: MRT4577_92813C.1.pep
GLCVWRWSAYTRRIRVLLPAVCVSIASGVRVGVQLLELHDRSQVGASSVPALRLRAWGRASSLRRRCQLTESGSRLGLWPVACCSVQRSSLGAAA

SEQ ID NO: 361444 - protein, 54 aa, Zea mays
  Clone ID: MRT4577_92815C.1.pep
RRWQSSLQAAATLEHAGKIGGRAPFASLPSRPSSQLACRAFGGDAGTTRITCSL

SEQ ID NO: 361445 - protein, 92 aa, Zea mays
  Clone ID: MRT4577_92816C.1.pep
NEHGSFSLRAGCGPLLKLSGTRSPGFLVVQLAGGALAKAAAAPRFPSASHARLPSFTLFPITPSSTSTSAAQHGRPRRKLAPVSGSRGARLL

SEQ ID NO: 361446 - protein, 191 aa, Zea mays
  Clone ID: MRT4577_92817C.1.pep
DETRAHRASSRRARALLAPSSFCSYLLHTIEWTLTLAAASQEKTGQVMGAAQEKGREAKHKASDASDRAMGMGHDAREATREKARAAADRTMGMGHDAGEAAKDRAYRAKDAASGAAGRARDTASDAAGAAGDRARDGAQQTGSYVAQTAEAARQKAAGAALYAKDTVVAGKDKTGALLQQVRCTVMPSHC

SEQ ID NO: 361447 - protein, 166 aa, Zea mays
  Clone ID: MRT4577_92818C.1.pep
GGRLADEFSGLRLAEEHTTPPPLSPLPAAPVMPKSISVRSPGYLKMIQNGKHRASKPTKGSQRVLVGMEGGVKEEEKLNGGLQFEVYNQGMLKTELCNKWEETGTCPYGNQCQFAHGIAELRPVIRHPRYKTEVCRMVLAGVVCPYGHRCHFRHSITPADLFLPRP

SEQ ID NO: 361448 - protein, 103 aa, Zea mays
  Clone ID: MRT4577_92819C.1.pep
CSISWDGSRVHYFCQPSICFEKKVYSVQCVESPRGLRLKNHISGSKDIGRILDVWSCQAVIAQVKALLPMDIQPKIEQHGSSLYYFKQFLHSLVPGRRGSKPG

SEQ ID NO: 361449 - protein, 69 aa, Zea mays
  unsure (1)..(69): unsure at all Xaa locations
  Clone ID: MRT4577_9281C.1.pep
GLSALAGRWRLLCXVHSLGVRYGESNGKLFMLASMKDAVLQMAYCLVLCAGDGAASVGGDKIVAREYGS

SEQ ID NO: 361450 - protein, 328 aa, Zea mays
  Clone ID: MRT4577_92820C.1.pep
MATTQSRGGGGVVPVEVDEEHGRRRQGGAAPQEEEEEEAAEKPELRRGPWTVDEDHTLVNYIADNGEGRWNSLARAAGLKRTGKSCRLRWLNYLRPDVKRGNFTADEQLLILDLHTRWGNRWSKIAQHLPGRTDNEIKNYWRTRVQKHAKQLNCDASSKRFKDAMRYLWMPHLVDATATTADDEYHHHQHQHQAAAAGNIDGLLAGGDVDDVQNALAAGVAAAMASSSSDSLASEPYSYEDGGLLASVRAGEDMQLVMSGGGWAMAQEANDQGLWPSSSGHGLSSSVQAAAGGAGQFEDPELSGWVQGFSDSIITGNLWALEEIWKMQ

SEQ ID NO: 361451 - protein, 201 aa, Zea mays
  Clone ID: MRT4577_92821C.1.pep
MYPDRSGEKTSKRETRMAHSGMLEYADMQKKKATSRLPQNGTNNVIVSRMQKSISTSDNEERSRNNSLIETKTGRKRRDSSSDDDNLFFSKYDKDAPELKGPIKDFSQFEDYVQEYNEKYGVYSYLSSQIDKTKSDFLRVQDDLNVAKERDKEQYYNTVERLRDMYHESGARHKLMKKVFLLLHEELQIIKQRIKDFSEAY

SEQ ID NO: 361452 - protein, 90 aa, Zea mays
  unsure (1)..(90): unsure at all Xaa locations
  Clone ID: MRT4577_92822C.1.pep
DRLTMRKLATKAESAASSASQWYGPGHVLWXGALSGAPHINITYKLAGIYRSNITGLSKDPVLFANIRERKVIHTPIGLLGRWWSPILVG

SEQ ID NO: 361453 - protein, 163 aa, Zea mays
  Clone ID: MRT4577_92823C.1.pep
PSRDHYTCMVDLLGRAGHLKEAEELIKDMPTEPDSVLWASLLGACRLHKNVELGERTAGRLFELDPENSGPYVLLSNMYAEMGKWADVFRVRRSMKDRGVSKQPGCSWIEIGSKMNVFLARDNRHPCRNEIYSTLRIIQMEMGRTSIDEIDDDLMNYCSEACG

SEQ ID NO: 361454 - protein, 126 aa, Zea mays
  Clone ID: MRT4577_92824C.1.pep
MAACVDKWHPTHAGRLTGAIYRYLPDGATDRAVAAAAAAPASASGGDDDDVWDELRAEAQADADAEPLLRKYYADLVLSRPSLEAALAAHLSGQALRPRRAAAGRAPGPTGRRAGRAPGVRPRRAR

SEQ ID NO: 361455 - protein, 78 aa, Zea mays
  Clone ID: MRT4577_92825C.1.pep
ITHLMTFIRDTQRASPCIRLPKQAFIRCARGTIQVIGLIYERPDDAKLCVKDLILLSSTIQMTDSRRKLTKISGCTQE

SEQ ID NO: 361456 - protein, 43 aa, Zea mays
  Clone ID: MRT4577_92826C.1.pep
DLWEHVLGCEHYKTNCKLDAECCNRLCTCICCHDKVSDHTMYR

SEQ ID NO: 361457 - protein, 94 aa, Zea mays
  Clone ID: MRT4577_92827C.1.pep
TYGEVRKEILGGGRGQKTPGGGGVYEELRGGGEKWGKRMIFRGGPPPPGGWRLTQGGAPPRGEIQGYPRGTRPGAACWGQRKGSWAYLGDGSGG

SEQ ID NO: 361458 - protein, 70 aa, Zea mays
  Clone ID: MRT4577_92828C.1.pep
NEVVQFIFPKIKKFERHPQFFDKAPRRGWEISSEAHPFFSESLSIFKGVNSAHPPTCKIFPPPISFGHTK

SEQ ID NO: 361459 - protein, 60 aa, Zea mays
  Clone ID: MRT4577_92829C.1.pep
GELDSYQIQISALDLQFSYFFGCLDLTTLYQFFQNELSTYKHVLDSHIILNLHTQNSQDF

SEQ ID NO: 361460 - protein, 79 aa, Zea mays
  Clone ID: MRT4577_9282C.1.pep
AAVPRPDRPTIQDRERYTGRRVHGCRRCQTVWRGDCLCLQCAIELMQRCLTARDDYERSGSVPLILLHEEGSGYNDNII

SEQ ID NO: 361461 - protein, 41 aa, Zea mays
  Clone ID: MRT4577_92830C.1.pep
HLNHDVPCYYTSRQTGWSLLMDMDWNLKQQRHPALLDTGRK

SEQ ID NO: 361462 - protein, 47 aa, Zea mays
  Clone ID: MRT4577_92831C.1.pep
MDDDYYAVGSDDKAIWDDGQGLENPEVRFYGGGFSESFAGFDWPPSP

SEQ ID NO: 361463 - protein, 119 aa, Zea mays
  unsure (1)..(119): unsure at all Xaa locations
  Clone ID: MRT4577_92832C.1.pep
PTRTNKVPTIFFFILSLLILAGFXSSAATPTIFSQCSQASISFLFSPYLSPSFSFISXNPILXPYIIQHSISSFILPLSPFFLQQSLPLLQQLPFFHLFSQNIXSQQLQQLVLANLVYY

SEQ ID NO: 361464 - protein, 496 aa, Zea mays
  unsure (1)..(496): unsure at all Xaa locations
  Clone ID: MRT4577_92833C.1.pep
MDASAGGGGNSLPTTGADGSKRRVCYFYDAEVGNYYYGQGHPMKPHRIRMTHALLGRYGLLDQMQVFRPHPARDRDLCRFHADDYVSFLRSVTPETQQDQIRALKRFNVGEDCPVFDGLYSFCQTYAGGSVGGAVKLNHGHDIAINWAGGLHHAKKCEASGFCYVNDIVLAILELLKYHQRVLYVDIDIHHGDGVEEAFYTTDRVMTVSFHKFGDYFPGTGDIRDVGHSKGKYYSLNVPLDDGIDDESYQSLFKPIMGKVMEVFNPGAVVLQCGADSLSGDRLGCFNLSIKGHAECVRFMRSFNVPLLLLGGGGYTIRNVARCWCYETGVALGHELTDKMPPNEYYEYFGPDYTLHVAPSNMENKNTRHQLDDIKSKLLDNLSKLRHAPSVQFQERPPEAELPEQDEDKENPDERHDADSDVEMNDAKPLQDSGRMSIXVAAEHSRGTGPVADGVGSSKQTFPNATSRMAIDEPNXLRVEQEGSNKLQDQPSMHLK

SEQ ID NO: 361465 - protein, 172 aa, Zea mays
  Clone ID: MRT4577_92834C.1.pep
IHQLQNLSVVTDAIACVHVLGDVFVSKKTDKQKKRKIKKVEDKMLGWGGHDDKKLMIPATVILRHMFTPAELRADEELLPELEADVREECIKFGPVDNVKVCENHPQGVILVRFKDRKDGAKCIEKMNGRWFAGRQIHASEDDGSVNHALIRDYDAEVSRLDRFGQELEEST

SEQ ID NO: 361466 - protein, 55 aa, Zea mays
  Clone ID: MRT4577_92836C.1.pep
PTSSTKGLGLNAKARGVYFKTKTFFFPPIFSPYPVLLKPAMGLGTWGAPNPPTSP

SEQ ID NO: 361467 - protein, 152 aa, Zea mays
  unsure (1)..(152): unsure at all Xaa locations
  Clone ID: MRT4577_92837C.1.pep
NFVVYGWPDKFFVRKSWLGLNAGVFLIRNCQWSLDFMDEWARMGPAYPEDHARWGRXLRATLSDKDSDVACDQSALVYLLLNNWERLGKKTFVETEYFFQGYWKEVVDRLDGVAARYEAVERRSPGLRRRHAEQEHLRYAGARNAALGASYR

SEQ ID NO: 361468 - protein, 62 aa, Zea mays
  unsure (1)..(62): unsure at all Xaa locations
  Clone ID: MRT4577_92838C.1.pep
FLSNSLFXQGGTVIFFILPKEPLAAPLVAASTLFHWKELHLTPSLHTWDYLSYLQSLADEPT

SEQ ID NO: 361469 - protein, 123 aa, Zea mays
  Clone ID: MRT4577_92839C.1.pep
MLVSYLLLSSSSCPVCVPPLGLALWPWIANAPLRVQSTSVLSCFPVFKNAVGRSKQASSNPMEVESALRCHATQLHVHQVQESGGYLPIRDQPLPERQGTMAACLMSTRHEQQQPPAGQRPGF

SEQ ID NO: 361470 - protein, 115 aa, Zea mays
  Clone ID: MRT4577_9283C.1.pep
QYGGRRRACLGRPRQLQHPIPWPSTCVPSTTCTCRTRRPDSMDRWLQFSPCWITPAKIQTHPHQQQEITSRCNFVVRSRQNRSMRRRSIDQFLPTPGFLPFTVKKSAQQAVPILW

SEQ ID NO: 361471 - protein, 80 aa, Zea mays
  Clone ID: MRT4577_92840C.1.pep
LRLTSSNKLNTLHSGVGCYAPAARTTLNSCVFLSSWVICQHFFRLSPLFILGLGRVHSATRPEISLSDSIPQCNQRQDKN

SEQ ID NO: 361472 - protein, 170 aa, Zea mays
  unsure (1)..(170): unsure at all Xaa locations
  Clone ID: MRT4577_92841C.1.pep
STSGYDIFLDDSLVSWSSKRXWVFSFSSAEAQYCVMPNCVALSPALXELHSPLTRSTLVYCDNVSAVYLSTNPIQHHHTKHVEIGIHFTRECVAIGDVRVLHVPTTSQFDDVFTKGLPTMVFEEFQSNLNMATVSTAGAVEMYCVCCVGILFRSMLYWALAHLTLLLMPL

SEQ ID NO: 361473 - protein, 101 aa, Zea mays
  unsure (1)..(101): unsure at all Xaa locations
  Clone ID: MRT4577_92842C.1.pep
VYALLALSESATNASIIPQCSLAPSAIISQFLPPVTSMGFAHPAEPDYLLQQALVVCVLLHPIGHIQQQLWAQLNIPTVVSHHGQQRLPXLTQLAVVNPCS

SEQ ID NO: 361474 - protein, 87 aa, Zea mays
  unsure (1)..(87): unsure at all Xaa locations
  Clone ID: MRT4577_92843C.1.pep
MSHRKFSAPRHGSLGFLPRKRTXRHRGKVKSFPKDDPSKPVHLTAFLGYKAGMTHIVREVDRPGSKVNKKEVVEAVTIVETPPMVVV

SEQ ID NO: 361475 - protein, 178 aa, Zea mays
  unsure (1)..(178): unsure at all Xaa locations
  Clone ID: MRT4577_92844C.1.pep
MASVGVAPSGHKNSSGTSMGAEKLPDQMNDLKIRDDKEVEATIINGKGTETGHIIVTTTGGKNGQPKQTASYMAERIVGQGSFGIVFQAKCLETGETVAIKKVLQDKRYKNRELQTMRLLDHPNVVALKHCFFSTTEKDELYXNLVLEYVPETVHRVGKHYNKMNQRMPLIYVKLYTY

SEQ ID NO: 361476 - protein, 105 aa, Zea mays
  Clone ID: MRT4577_92845C.1.pep
TIDLMSDSSFSTPLVLGDFIEQDGGIERVQLHQEVERLDLFRRQLAGLPREAPRNLSDGRGIRRHARLARRRARPDLTVPRQRAHTCFSGSFLTVVYGIPWMQGE

SEQ ID NO: 361477 - protein, 34 aa, Zea mays
  Clone ID: MRT4577_92846C.1.pep
GLVALQRSYVVEGQPNLMKASCIVSLTKKTKQKI

SEQ ID NO: 361478 - protein, 201 aa, Zea mays
  unsure (1)..(201): unsure at all Xaa locations
  Clone ID: MRT4577_92847C.1.pep
MASVGVAPSGHKNSSGTSMGAEKLPDQMNDLKIRDDKEVEATIINGKGTETGHIIVTTTGGKNGQPKQTVSYMAERIVGQGSFGIVFQAKCLETGETVAIKKVLQDKRYKNRELQTMRLLDHPNVVALKHCFFSTTEKDELYLNLVLEYVPETVHRVVKHYNKMNQRMPLIYVKLYTYXQICRXALAYIXAAIGVCPRDIQ

SEQ ID NO: 361479 - protein, 177 aa, Zea mays
  Clone ID: MRT4577_92848C.1.pep
MASVGVAPSGHKNSSGTSMVAEKLPDQMNDLKIRDDKEVEATIINGKGTETGHIIVTTTGGKNGQPKQTVSYMAERIVGQGSFGIVFQAKCLETGETVAIKKVLQDKRYKNRELQTMRLLDHPNVVALKHCFFSTTEKDELYLNLVLEYVPETVHRVVQHLQQMNQRMPLIYGKLYT

SEQ ID NO: 361480 - protein, 106 aa, Zea mays
  unsure (1)..(106): unsure at all Xaa locations
  Clone ID: MRT4577_92849C.1.pep
TLVIKRVLLCYLLESDINLLLRGIINQLVNEDFPFTTLACTERCINEYRSGYRMNTSEPSVHGSICTXSCSHEPLSTDVVTNKASNARQCATTVPPPRSSTTLLRM

SEQ ID NO: 361481 - protein, 80 aa, Zea mays
  Clone ID: MRT4577_9284C.1.pep
KICLRHGGAQTGGKTSSNKWAKWAWKTKTQRGKSKTAANQKKPLGLGKKKRAEKGNYGRGGPPGKLLQVPEEGSKTPARG

SEQ ID NO: 361482 - protein, 94 aa, Zea mays
  unsure (1)..(94): unsure at all Xaa locations
  Clone ID: MRT4577_92850C.1.pep
TKPTPYCFDDRINSTAALAKXHPMKHCSQFTADTQNSIPYLVHXRNDLCSPAAIQVQNIEEFTWLNSSYSPVLRQADTQVMIDHYFTSEHARLD

SEQ ID NO: 361483 - protein, 246 aa, Zea mays
  unsure (1)..(246): unsure at all Xaa locations
  Clone ID: MRT4577_92851C.1.pep
MPRKPKRKAPASPARHDPSPEPYPSHASPCSAQCLVVRDALLAFHGFPEEFAAFRVLRLGGLSPNRDPRPSSPTVLDGLVTTLLSQNTTDAISRRAFASLKAAFPSWDQVVDEEGKRLEDAIRCGGLAATKAARIRSMLRDVRERRGKICLEYLRELSVDEVKKELSRFKGIGPKTVACVLMFYLQKDDFPVDTHVLRITKAMGWVPATASREKAYIHLNNKIPDDLKFXIEIVFCTHGKLCQSCT

SEQ ID NO: 361484 - protein, 130 aa, Zea mays
  unsure (1)..(130): unsure at all Xaa locations
  Clone ID: MRT4577_92852C.1.pep
LLLRLECACRRYNQYVAAGENHXTGVLHVVTFQVLAFSAEVAVVPWRTVLRVRGPCSIISQSEQCCPRIRRSESWRGFHLKRAILRSLRIPRLPGCGIGNMQDRVSPLSASIAGGDESSALKITADLVFE

SEQ ID NO: 361485 - protein, 62 aa, Zea mays
  unsure (1)..(62): unsure at all Xaa locations
  Clone ID: MRT4577_92853C.1.pep
KKIFTLQARGSKLWFFKTAPPFFFFFFFFFFFFFFFFFFLKKFFFFFFFFFXRKGVVQPGNS

SEQ ID NO: 361486 - protein, 121 aa, Zea mays
  unsure (1)..(121): unsure at all Xaa locations
  Clone ID: MRT4577_92854C.1.pep
NQNKNNGNVPKYTLPFQFTNNDITPQIISTNITPDIVLASSYSHXLPLYNLEIHLTNYTPSYYTLLLFSLHILKTHSLYNEYYFNYNTTFXDFSSYPSYYNNPYPTLFNFNLITTTTFNPI

SEQ ID NO: 361487 - protein, 34 aa, Zea mays
  Clone ID: MRT4577_92855C.1.pep
QCQILYAQDALRRLLTPNQVWPHALNVFPRPSGS

SEQ ID NO: 361488 - protein, 68 aa, Zea mays
  Clone ID: MRT4577_92856C.1.pep
ASPPLGRASEPNVRGAESGVALGPVRLQRPRSAWCHLPPPCSATATRTPPSGCSSAPRLSGARAMGSL

SEQ ID NO: 361489 - protein, 89 aa, Zea mays
  Clone ID: MRT4577_92857C.1.pep
ECISFESFSFHLFLWMCFPFLLWSVIVIIPVGLGSSSSSPSCTTYFVHPLLHPLNQGRKKLMVCSKTYGRIHSFRGYDRYPWVAGYLRR

SEQ ID NO: 361490 - protein, 1100 aa, Zea mays
  unsure (1)..(1100): unsure at all Xaa locations
  Clone ID: MRT4577_92858C.1.pep
ERGGGGDEVDSAATATPRRLSPRAAASPTEGDARWGDTSSYGAKKKHRVLCQLPNGDWALCTRQLLPLVHESVVKVSEGKVLRLKTECLQPAXNPEILDGVDDLMQLSYLSEPSVLYNLQYRYSKDMIYTKAGPVLVAVNPFKKVSLYGNEYIDAYRNKSMDSPHVYAIADAALCEMKRDEVNQSIIISGESGAGKTETAKIAMQYLASLGGGSGIEYEILQTNPILEAFGNAKTLRNDNSSRFGKLIEIHFSTTGRICGAMIQTFLLEKSRVVQCAVGERSYHIFYQLCAGAPASLKEKLNLKKVDGYKYLKQSCCYSIAGVDDAQMFRTVTQAMNIVHISKEDQESVFAMVSAVLWLGDVSFTVIDNENHVEIIVDEASKTVSELLGCSIEDLNLALSKRHMKVNNENIVQKLTLAQATDTRDALAKSVYASLFEWLVEQINKSLSVGKRRTGRSISILDIYGFESFDKNSFEQFCINYANERLQQHFNRHLFKLEQEEYVEDGIDWAKVDFEDNQDCLSLFEKKPLGLLSLLDEESTFPNATDLTFANKLKQHLDSNSCFRGERGKAFAVRHYAGEVAYDTSGFLEKNRDLLHMDSIQLLAKCKTSLPKMFASKMLVQSDNSMSVPYRSSAADSQKLSVAMKFKGQLFQLMQRLESTTPHFIRCIKPNNLQLPAIYEQGLVLQQLKCCGVLEVVRISRSGYPTRMTHQKFARRYGFLLLEDVASQDPLSVSVAILHQFNILPEMYQVGYTKLFFRTGQIGNLEDTRNRTLHGILRVQSCFRGHQARHHARERTRGVLTLQSFIRGENARQIYSSLLRKHRAAVVLQRNVRCWLARRYFINVRKASVIIQSGIRGSLVRRCNGNIDLINVLREFESKQEAHGDQILIKASVLAELQRRILKAEATVREKDEENEMLHQRLQQYENRWLEYEQKMKAMEEMWQKQMRSLQSSLSVAKKSLVLDETPRMSDSSVDQSWESNGNHHVSSGSQLVPHTGGREMNAGLSVISRLAEEFEQRSQVFADDAKFLVEVKSGQADASLNPDMELRRLKQNFDSWKKDFSGRMRETKVILNKLGNGNESSPNSVKRKWWGRLNTSKFS

SEQ ID NO: 361491 - protein, 122 aa, Zea mays
  Clone ID: MRT4577_92859C.1.pep
AKGPPRASPFKKKPKISNLGGVFTNKKGVIGFWAFKKHRGGYFLNLSTTKNQTWTFTKPMRRFLFFKTPSNPGDRLPKKKKKTQRGQKANFWGGGGPPPLPQILETGPEEPNKIFVLLGPLG

SEQ ID NO: 361492 - protein, 133 aa, Zea mays
  unsure (1)..(133): unsure at all Xaa locations
  Clone ID: MRT4577_9285C.1.pep
PGRDSPRTHQCYPPSALRRTNPTHPQRHDEHLADTNVKHRNGGRDKHGRDQEWDIRCSNXAKCCPKDKAINRLWQRERGEQHAVRQQHEEXVHDRYVVPTSHARHHPCDSCALLVYFAPPPPHENKRHRDAPL

SEQ ID NO: 361493 - protein, 72 aa, Zea mays
  Clone ID: MRT4577_92860C.1.pep
SLSEVPASDHVHPSLHLKLRELTSSWCINCGTFLQCPPPVCTIWLAFPITRPPRKASSPILPSTTTHMTDTL

SEQ ID NO: 361494 - protein, 92 aa, Zea mays
  unsure (1)..(92): unsure at all Xaa locations
  Clone ID: MRT4577_92861C.1.pep
IATDHYHRXQEDIELKESLGVSAYRLSISWPLIFPDGLGGKVNDRGGGIYNDLINFMNAKGXLEPYXALYHCNLSHXSFTKSLYRWISDKNG

SEQ ID NO: 361495 - protein, 236 aa, Zea mays
  unsure (1)..(236): unsure at all Xaa locations
  Clone ID: MRT4577_92862C.1.pep
LRLSSLFHPRSLSNSSTRQSLWDQIKIRIKGCXRIGRLVGHVPLSSRMPXLVPNNDPFITTDXMIYMFDYDTAHRHCKDTDITLEDSKTLLFGDKPATXFVMKNPEEIPRXEVVAKHVEESTGVFTDKDNAAAHLKDGDKNVVISAXSIDAPMFDRGACEDXYTSDGSIVSNAMCTTNWLAPLDIVIHDNFGIGEGLMTAVHAITATQKTGDGSSAKDWRGGMTANCNIIPSSTGA

SEQ ID NO: 361496 - protein, 61 aa, Zea mays
  Clone ID: MRT4577_92863C.1.pep
IKHGILLCRTYPFPIASLAHGIRYPAPYCHLIDRINENSCLPFTCHYSSQCAVYSFPRLSS

SEQ ID NO: 361497 - protein, 131 aa, Zea mays
  unsure (1)..(131): unsure at all Xaa locations
  Clone ID: MRT4577_92864C.1.pep
THASLTLVAGWRNKTTKRTARESGDVYLELGSKLYRFSXMMTKSNXYNAVILNRRTMXSKTNPPPIYMLRXLVKYMERKEKNISSIVXTNTHDNRIHDSSAMNVTVLRFTETERAMIDNSASXCLTFDQIC

SEQ ID NO: 361498 - protein, 51 aa, Zea mays
  Clone ID: MRT4577_92865C.1.pep
RRVTKRIRGYEAGQWGLRILICRESAHPHHRNSGSIVIYHSAKASMAHRNI

SEQ ID NO: 361499 - protein, 86 aa, Zea mays
  Clone ID: MRT4577_92866C.1.pep
TYSQGWRPVKQKIYLFPRPPRVSRDFQMSRVCRQVRAGKYFNPIPFGVRGVIALSAGFPPVLKDGLTNVQVRLKGTLFLLALKVLI

SEQ ID NO: 361500 - protein, 88 aa, Zea mays
  Clone ID: MRT4577_92867C.1.pep
AVSDLGPSALTSPATKCSRRPTTRPQRPPLEYIPASRYPRRQAPCTLPAGAFESPSRRKQLRDSDLGRRNTTGTGTRFGCFSSRANTG

SEQ ID NO: 361501 - protein, 206 aa, Zea mays
  unsure (1)..(206): unsure at all Xaa locations
  Clone ID: MRT4577_92868C.1.pep
HWVPRGRPXGPLKFPNRKEDAVPLDVAGVWRAMEECQRLGLARAIGVSNFTTRHLDKVLAVAAVPPAVNQVELNPAWQQRTLRAYCADRGVHVAAYSPLGGQNWDGRGNAVLDSEVLAEIARARGKTVAQVALRWIHEQGVTCIVKSYNRERLKQNLEIFDWELTDDDRLKISHIPQRKVVEASGLFSQEGEFTSVDPAELNIVEE

SEQ ID NO: 361502 - protein, 87 aa, Zea mays
  Clone ID: MRT4577_92869C.1.pep
PPPPHNPRAVLAPPPPFFFYKKGRGENLPWAALFFCFARGGPPPKIPPKLNHKKGCLKQGGGFAKPRKKRVFLKTIVIRKGGHQDCF

SEQ ID NO: 361503 - protein, 109 aa, Zea mays
  Clone ID: MRT4577_9286C.1.pep
NSNPTLGWACILITELGLAHYKYRGTILTKHKTFSIQVQIYFSISVRIPELGMLRSGSHGKQWPILVQVCVCSLLCVSLTNFKWAARSEWGTEINMETRTEGQEQIKTR

SEQ ID NO: 361504 - protein, 59 aa, Zea mays
  Clone ID: MRT4577_92870C.1.pep
SYIAGSTSSFVGGRPLWSFVGARVLQRRIGVDHLDAHALLLTKMSMLMPFSPGRVSLVH

SEQ ID NO: 361505 - protein, 71 aa, Zea mays
  Clone ID: MRT4577_92871C.1.pep
NLVQTPKKLGPVLLQGKRQKKTMWGEKKKHHLFQAIQFGLGWQMPKTKPHFFSKRAGMIKGGLCIETPQQI

SEQ ID NO: 361506 - protein, 142 aa, Zea mays
  unsure (1)..(142): unsure at all Xaa locations
  Clone ID: MRT4577_92872C.1.pep
IFFFFFLFKKEPRPPPRQGQKPPXPGPRPGGTRPGPKPGGKRGPPATPEKKGNPXKTQKTRAPKEKGKTRGAQRANQPPXMGGPPGPPSKRKTPPPRGRKETAKARGEAVWEIGAFPRPPAVERGARSFGGGKTVHHKKRGE

SEQ ID NO: 361507 - protein, 87 aa, Zea mays
  Clone ID: MRT4577_92873C.1.pep
MRFTVHHINLHLKLYMITFCCAHFPGYYSLFTFLFVPGGGLIMVGDGINDAPALAAATVGMVLAQRASATAVAVADVLLLQDNICGV

SEQ ID NO: 361508 - protein, 137 aa, Zea mays
  Clone ID: MRT4577_92874C.1.pep
MPCLPYIERTQFTQLSLYEEQWSWIRILDVMSLVNRCFQFVRIILHLLWPTLLISGINKLMEFPSVRPTKKSLRMNQLLLLLLLLQFLLLLLLLLLLQFLLLLLPLQTWAPTSLVILVVVMVPMVGGDLIFFFILVA

SEQ ID NO: 361509 - protein, 116 aa, Zea mays
  Clone ID: MRT4577_92875C.1.pep
VIAVPSVSAACSFSYSSVLVDCILSNPTANLEPNSNLVLRVWIHKSSCGFDSNPRSGLQSHLSPGTARRPPRSRRRYMCSIHNGSVDNSGRRVNKVLHSSSDAGFAPTAAHVSADT

SEQ ID NO: 361510 - protein, 51 aa, Zea mays
  Clone ID: MRT4577_92876C.1.pep
GRERLPERSPAAASFRPLPFPWITTADVLPYLRHGVCSRVTLSLAEALRRH

SEQ ID NO: 361511 - protein, 163 aa, Zea mays
  Clone ID: MRT4577_92877C.1.pep
ERFREDGRKTTLRLVDMESAYLTVEFFRKLPQEVDKTGTANPRTANPPAPGNPRTANPPPPSDDRYTDAHFRRIASNVSSYIGMVSETLKNTIPKSVVHCQVREAKRSLLNDFYTQVGGKDAKQLAVLLDEDPALMERRLQCFKRLELYKSARDEIDSVSWTR

SEQ ID NO: 361512 - protein, 45 aa, Zea mays
  Clone ID: MRT4577_92878C.1.pep
WSDVEVVNSYVLEGNEDDRWAGVKAMKDCEVEHECVICVRRQADG

SEQ ID NO: 361513 - protein, 622 aa, Zea mays
  unsure (1)..(622): unsure at all Xaa locations
  Clone ID: MRT4577_92879C.1.pep
MTTMENVIVLVNRIQRACTVLGDHGGGDAAASLPTLWEALPTVAVVGGQSSGKSSVLESIVGRDFLPRGSGIVTRRPLVLQLHKTEAGVQEYAEFLHMPKRRFTDFSIVRKEIQDETDRLTGKTKQISPVPIHLSIYSPHVVNLTLIDLPGLTKVAVEGQPESIVQDIESMVRSYVDKPNCIILAISPANQDIATSDAIKLAREVDPTGERTFGVLTKLDLMDKGTNALDVLEGRAYRLQHPWAFLACWTCKTRLPSILVQFVXRYCLTFSTSGMNDAXLRELHGSKQASQLPHEXVQSADTYLPSSRSSLVSXRSVDVTLLVRPXSSPAGHGFTLSXRTCVARRAPFHEXPHRTGRLPGTERRSAWRAVLILTSPCIFSRLDWSPSVQEMKLVVSQADGYQPHLIAPEQGYRRLIESSLNYFRGPAEASVDAVHSVLKELVRISIGETQELKRFPSLQTELAAACYKALERFREDGRKTTLRLVDMESAYLTVEFFRKLPQEVDKTGTGNPRNANPPAPSDDRYTDAHFRRIASNVSSYIGMVSETLKNTIPKSVVHCQVREAKRSLLNDFYTQVGXKDAKQLAVLLDEDPALMERRLQCFKRLELYKSARDEIDAVSWTR

SEQ ID NO: 361514 - protein, 52 aa, Zea mays
  Clone ID: MRT4577_9287C.1.pep
LPGLGPHPDGLSSLRWCSSRGAHPDVGAARARRFWREHCSLGLGREEGRVGA

SEQ ID NO: 361515 - protein, 48 aa, Zea mays
  Clone ID: MRT4577_92880C.1.pep
RFLSLDFGGFVSDVGVDLFLICLCCVVVYCLRYNVCIFFFVGCVGVAG

SEQ ID NO: 361516 - protein, 202 aa, Zea mays
  unsure (1)..(202): unsure at all Xaa locations
  Clone ID: MRT4577_92881C.1.pep
MLARLIXNVSQSLIAFYVTRDLRMNEYSKAIIPAIIFCATFFCSIVLQEIKWTSRRLKSLLTVGATLWVISGVAVFVLPSQMNSLMYPLAMVIGAANALVMVTTIGLEGALVGEDLNGCAFVYGSLSFLDKISCGIALFALESYEDTMVSYGETRGLNTVSRYGTGLIPSCFAVLSLVVTSTLRLQDDTPRAAXALDAPLLV

SEQ ID NO: 361517 - protein, 97 aa, Zea mays
  unsure (1)..(97): unsure at all Xaa locations
  Clone ID: MRT4577_92882C.1.pep
VQATFFTTYVLTSGWASLSSELMQLFGLTWNFLRRYLLRIKEDSDFLYSFPYHTEMPKVLLFGLLGFTCSVLAPLILPFLLLYFFXGYVVYRNQVRV

SEQ ID NO: 361518 - protein, 198 aa, Zea mays
  Clone ID: MRT4577_92883C.1.pep
GFVPTRSLKKKKKKKKKKKKKKKKKKKKKKKKKKKKKKKKKKKKKKKKKKKKKGGAVFRGSIFTSPCLQVLGFFLGPPNLISWAAFLNRRVGKTLGFPHFIPFGTIPFFAGWVFTKRALPVPFSKFLPSLLGNGTPPFCGSLRPGGGGFPPGFSFTFAGRFWAPSFGFFPFFFSPVLGVFFPVNFFYLGGFSFGGSRF

SEQ ID NO: 361519 - protein, 71 aa, Zea mays
  Clone ID: MRT4577_92884C.1.pep
AIQGKPLHHPGGRGGLVRNKKQGVAPQGNGAAPAFFGLVGGANQKPKTRAPPANGTGQKVFPVTGNPVGAP

SEQ ID NO: 361520 - protein, 102 aa, Zea mays
  Clone ID: MRT4577_92885C.1.pep
GAARHCFHIRSGMEKWGPDAGLRTHWAPPPPTMWTQRSGAGPRKKDDGSVRCELRCSGLAAGAQASASRWRVLTKACVVMTMAAAILGRTARIERVNSNPSV

SEQ ID NO: 361521 - protein, 69 aa, Zea mays
  Clone ID: MRT4577_92886C.1.pep
YTLTCCKQWGQILRLTHIGHYVTTAMGRYQPLIKGGNAKTPGCESPPPHWQMGSLSEPRVHGSRMHRRS

SEQ ID NO: 361522 - protein, 83 aa, Zea mays
  unsure (1)..(83): unsure at all Xaa locations
  Clone ID: MRT4577_92887C.1.pep
SETLFRLHSYIALSLSDVXFFERPGQDGCLLDFRIWPPEINSQSQLEICAGTTLGSLRGGEIRKKKTSLGCTSSLCLHHSELP

SEQ ID NO: 361523 - protein, 105 aa, Zea mays
  Clone ID: MRT4577_92888C.1.pep
LVTSRRDGDVADPVHGAERNYDTVTTTVRNRRRDSGHHLCPRSALDSLLLGGPSGAVTRSKTLARRPNGGERIPPRFGLPCPHSHRSRGTQRRRMRGGKTHAMVL

SEQ ID NO: 361524 - protein, 120 aa, Zea mays
  Clone ID: MRT4577_92889C.1.pep
MAAAAGSKGRAIAGSFVSRVLAGKAASPRRAVHASAYDKNLEEQVRPAFVPDDVIGSAGSPDKYWSPHPKTGVFGPAAVDPKLAAGGAPDAGADAAGGTVLDQKVWFRPLEDVEKPPPAA

SEQ ID NO: 361525 - protein, 160 aa, Zea mays
  unsure (1)..(160): unsure at all Xaa locations
  Clone ID: MRT4577_9288C.1.pep
MAFPRLSLAVLSCLALLAATAAHRAPITGPSPSAPRGLTTLAERLEGAETQQCWEALVEIKSCTGEIIILFIRGEAFLGPGCCRAIRVIEQSCWAADSMMSIIGFTPQEGDMLKGYCDAGDDNATGGQSGSPPPRGADDAVGAVRGSFAAVXGKEGLHAP

SEQ ID NO: 361526 - protein, 120 aa, Zea mays
  Clone ID: MRT4577_92890C.1.pep
MAAAAGSKGRAIAGSFVSRVLAGKAASPRRAVHASAYDKNLEDQVRPAFVPDDVIGSAGSPDKYWSPHPKTGVFGPAAVDPKLAAGGAPDAGADAAGGTVLDQKVWFRPLEDVEKPPPAA

SEQ ID NO: 361527 - protein, 70 aa, Zea mays
  Clone ID: MRT4577_92891C.1.pep
IYLNRIVCINSPYHDMLEMLWCKCCSRFCLASCSVLSVRNKISIILGSFEYRKPCSCSWGSITYIKKNER

SEQ ID NO: 361528 - protein, 120 aa, Zea mays
  unsure (1)..(120): unsure at all Xaa locations
  Clone ID: MRT4577_92892C.1.pep
MAAAAGSKGRAIAGSFVSRVLAGKAASPRRAVHASAYDKNLEDQVRPAFVPDDVIXAPGAPDKYWSPHPKTGVFGPAAVDPKLAAGGAPDAGADAAGGTVLDQKVWFRPLEDVEKPPPAA

SEQ ID NO: 361529 - protein, 102 aa, Zea mays
  Clone ID: MRT4577_92893C.1.pep
IEGSKSQTLTDEGVEPHETGAKTAEEREETKKLQEKHAALKPNGGNGTTKGCTGTKNDKEVRNGHTKPDPMENQKETQNKKKGSKDPKPPKKRGNTHDDTQK

SEQ ID NO: 361530 - protein, 168 aa, Zea mays
  Clone ID: MRT4577_92894C.1.pep
MAAAAGSKGRAIAGSFVSRVLAGKAASPRRAVHASAYDKNLEDQVRPAFVPDDVIGSAGSPDKYWSPHPKTGVFGPAAVDPKLAAGGAPDAGADAAGGTVLDQKVWFRPLEDVEKPPPRRVSRAALLGQPTLLLAHKKGGGRAWQWQALCSCSAGAGLPAYITAILYY

SEQ ID NO: 361531 - protein, 63 aa, Zea mays
  Clone ID: MRT4577_92895C.1.pep
TALERCRYCSTLATKRFVDTTAGSVGDVDACCCYYCPRFSLAAPAPPMSAGLKMETACLNTNR

SEQ ID NO: 361532 - protein, 122 aa, Zea mays
  Clone ID: MRT4577_92896C.1.pep
MAGACVVLSVLAAAVAVQVARPRSARGGAARVARHRMNTLSPDLCTRTAENHVSRYNVVDAVTVLEMQVDAYKIRVKAVRMLANDEVNTAATPDVLMEQKLCSTYYLDVADKLGTCKRSISF

SEQ ID NO: 361533 - protein, 77 aa, Zea mays
  Clone ID: MRT4577_92897C.1.pep
MLTLNWWGPQKETPNQGKKKIIPWGPAQQNQCLRVSRQFTEGAKREATQQLDRSPKRLGKVTKNRHKTQVDFFAKEG

SEQ ID NO: 361534 - protein, 93 aa, Zea mays
  Clone ID: MRT4577_92898C.1.pep
PAFVFFLGPPGTQAFGVVAPLMYWGEPGLVAPLAGFVPPPQLRVWSLWKASGPPRKFFKPPPSEGKLIPHGSGSAPGDDGKPKEPPAPLSPFG

SEQ ID NO: 361535 - protein, 82 aa, Zea mays
  unsure (1)..(82): unsure at all Xaa locations
  Clone ID: MRT4577_92899C.1.pep
SSKKTXDPFSKKDMLYHEAPTPFSVRNIGKTLGGGEQGTIIASDGLKXHRXFEGCLADLHGDEDHAYRKITLRAEKVQGRNV

SEQ ID NO: 361536 - protein, 98 aa, Zea mays
  Clone ID: MRT4577_9289C.1.pep
VYPGPPSGPGAYPSSGQPSALGAYPATGPYGAPTGSLIVPYNLPLPGGVVPRMLITILGTVKLNANRIALDFQRGNDVAFHFNPRFNENNRRVIVCNT

SEQ ID NO: 361537 - protein, 322 aa, Zea mays
  Clone ID: MRT4577_928C.1.pep
MGAGVLLGDAAGLGAHLAVRRRRTRLYLRNWASKPLRPSVWLGVAACVSQNRDRRGHVTRFSASASSGSDEPGELSEDEAQREWEAELNRRLKEAEEMEELERTAEQLQSQAAAEAPEESEEEKRERVRRELQKVAKEQAERRETAKQMFELGQKAYGKGMYGRSIEFLEAALTIIRPSSLLGGEIQIWLAMAYEANRRHKDCIALYKELESSHPMINIRRQAAELRYILEAPKLKISNDEVVTIPQIGSSWDWYAGTWSDKIKEQEDKKRKMSAASNQVQPSPNIFGDLSFLRPPNEWKKSAWVVVTLWILLIGTAIYLQS

SEQ ID NO: 361538 - protein, 64 aa, Zea mays
  Clone ID: MRT4577_92900C.1.pep
LSGKRGHTKGRGIKGFLRGHKNWKGFEFSIPQWHCHLTYLVHCPFLTAVGFGPPGSLVLGHPGL

SEQ ID NO: 361539 - protein, 62 aa, Zea mays
  Clone ID: MRT4577_92901C.1.pep
IARLFKQSIASIMEVHQAMDLVSRSASAPRVPSPDDLRCRPLYLSTSAGSLPPPADRLVSAS

SEQ ID NO: 361540 - protein, 78 aa, Zea mays
  Clone ID: MRT4577_92902C.1.pep
RNPGADQPFLQPFRLGTNFNNLNLPPAVWSNVQPLFLKTNPSSLILVKNFNRYLPGGNEKTAPPRTSPFLALMNGFSS

SEQ ID NO: 361541 - protein, 41 aa, Zea mays
  Clone ID: MRT4577_92903C.1.pep
QLKQFIENLLIMPVNNRGGILNFIIQQLVRKDITCTTINIY

SEQ ID NO: 361542 - protein, 113 aa, Zea mays
  Clone ID: MRT4577_92904C.1.pep
SSITMCAYNICCQGIDYSPKKKKKICLLNSPGPCNHQSPCVRIISAAKGSIIPQKKKKKICLLNFPGPCNHKSPCVRIISAAKGSIIPQKKKKKKFVSLISPPPVIINHHGGV

SEQ ID NO: 361543 - protein, 105 aa, Zea mays
  Clone ID: MRT4577_92905C.1.pep
VGRYPRWVREVVGPVEQEVPGIREGVSEAERPVEADAPSSRVRSRRCQIQHQIVPQRAEPPMAEMPWRNDGPRRSGAEGEFHTREKRTGTETARWPLTWGGGAGR

SEQ ID NO: 361544 - protein, 136 aa, Zea mays
  unsure (1)..(136): unsure at all Xaa locations
  Clone ID: MRT4577_92906C.1.pep
MAAKKCRLRVPLGLSKICAPVTLLALWAGAPRGPFFPQGPKPPVFPVCPHPFLQPWWIQGETPFGIPPGSPGVLQRASSLLPPWPLENLLAQNIRALRGHXRAQTNGAAYSQQLGLQTLDQLSEKNSASHLHQQRL

SEQ ID NO: 361545 - protein, 140 aa, Zea mays
  Clone ID: MRT4577_92907C.1.pep
HSHIPIPALKLPPPQPLTAQLSTLSPPARLASHICHSWRHHMPLLCPLPYRAISANCHPYRLLEQTPEHEKTSPDYIIADGLHILYVLTDTKVFLLDNNFGAMTWDKVHLNYPKRSLLISRHDTSPSTHGYHDRRLAMCT

SEQ ID NO: 361546 - protein, 197 aa, Zea mays
  unsure (1)..(197): unsure at all Xaa locations
  Clone ID: MRT4577_92908C.1.pep
QEEVKFTFKVGKCDKILNELLKSDNVKIDHIIPSADERKHRAYYKWHNSFSHATNDCNVFXRQVQLAINEGQLRFQEMQVDTEPFPINMIKFDDKKVLVWPNMTDXGKGKEIVIDNPQEADENIKISCRTVVAEKTPDGGEILKITITASNSRGQALAHDQEQPLFLQTLDGPARKRRRSGSPPNSPGGSGGRSDST

SEQ ID NO: 361547 - protein, 156 aa, Zea mays
  unsure (1)..(156): unsure at all Xaa locations
  Clone ID: MRT4577_92909C.1.pep
VPVAVQDVWGRQVRPKLLLPAALLPXSCEPXRKHTLDPPAGFTQYAWEAKIQVHKEDNPFLETGCSLRMXDYLNNLFKILNPKIYNYNPYTYIPSLTTLISXRVHCLITPDVKWTYRPPINGTLTKLHTTTLLFKPIVHINSNVSMDAVTQVKEPH

SEQ ID NO: 361548 - protein, 76 aa, Zea mays
  Clone ID: MRT4577_9290C.1.pep
LLVFFFLGFFFFFLFFFLRQEHLFLLQESIGPLAWSILLAGASILKKILGNHFMPGTGSHQIDRLVKLYWLWEEIL

SEQ ID NO: 361549 - protein, 157 aa, Zea mays
  unsure (1)..(157): unsure at all Xaa locations
  Clone ID: MRT4577_92910C.1.pep
VSRFGRQVGRGAAAQISDPGTGTGMGSFGMDMDWNQKASVLLWDWENLPPAAANGSESHRTTAAAPQFAGLEATGHEPARSSVSASIHSLPNAKGKKNKNNMELISFAPAKGPDKDTGFGDQQRRAGARPEAWQENVFRRWLWTXAERQEFAGVRHC

SEQ ID NO: 361550 - protein, 163 aa, Zea mays
  Clone ID: MRT4577_92911C.1.pep
CSSTKRERQGNITYRPRHEYASQGAAAKGKAKVLTRKKGNGQGNLRLGQSASARRLDSRGPWLRRRRRIGELGVGAACKKLSLARRGTGSPSWSFLRSVYPVPPLVSLETTASPSRQQQLRASGGWSWTLHACIVAAGNWQPPPLPRSARPPNLSARISPRCG

SEQ ID NO: 361551 - protein, 81 aa, Zea mays
  Clone ID: MRT4577_92912C.1.pep
VFLNSFIRPHRAEHEHSSPMRLDHPILVRIEPLPVLVQFAIIGLLDLATGKATHERLVLDIRYWHVYQFTHATDHSSTSTF

SEQ ID NO: 361552 - protein, 84 aa, Zea mays
  Clone ID: MRT4577_92913C.1.pep
HSTKSGGFPVLTMDDSRLSTTTPLLMPCTTAPRYFFEPVVICSPPPLIPEISKWLRTTRQMDGSAVWLVAFGWMATPKKKRDHI

SEQ ID NO: 361553 - protein, 157 aa, Zea mays
  Clone ID: MRT4577_92914C.1.pep
MVISAEPRPPPPPDPPVADAAAVEAAAAVTSNARQAAAVTSFPSLKTWGSHGALRCAHVNRAGDATARRSPGKLAVVKEKALSHLHEVEAGSSDDADAGRVAAAEAAPALPPWKLRTRRRPKEAAPSGSMAAPPERRPSRACAEALDRARFSVTLTS

SEQ ID NO: 361554 - protein, 36 aa, Zea mays
  Clone ID: MRT4577_92915C.1.pep
APARRLQGAGCTRSRASADSLTSRRSAGQGHRTHGP

SEQ ID NO: 361555 - protein, 85 aa, Zea mays
  Clone ID: MRT4577_92916C.1.pep
MLAVAVKCYHQRVGEFGWSSSSAGAQEQPADDDDEPPQPPLKHRAQDESSSPRQEFGAPPRHRRAPVSGEFARERLRARGGIQPR

SEQ ID NO: 361556 - protein, 169 aa, Zea mays
  unsure (1)..(169): unsure at all Xaa locations
  Clone ID: MRT4577_92917C.1.pep
MMVDLEDILSPARYNDAGTGHGGLVEDDAPRXMIPRILERPRHTTTMRGMDXNDNNERDNDKHQIRILTLKDHMDTRIKNDXDDMEKIMNXLIYNELQXAPEKNSSLMTKKPLNTQGKIETMITTMFNIFNAPLMKXXMPSGHSLDGIGHTTRTALESRDGETHTACVY

SEQ ID NO: 361557 - protein, 48 aa, Zea mays
  Clone ID: MRT4577_92918C.1.pep
SSEGPLAEDRHAYIERILPQRRKHHGAANVAIRAHDQTDTSWYDQLTH

SEQ ID NO: 361558 - protein, 82 aa, Zea mays
  Clone ID: MRT4577_92919C.1.pep
SSQGVACSWPTGFMFGTLGIQPCGGVVNGGPMYLMKICSAATDDVSGTAGRRVVFVVGDDGSWSISSGEASNAFSIVCASHR

SEQ ID NO: 361559 - protein, 45 aa, Zea mays
  Clone ID: MRT4577_9291C.1.pep
LTTAKLSGRDQNELENSRFIRYHISFFLRPISQLQAQNGNMADTI

SEQ ID NO: 361560 - protein, 53 aa, Zea mays
  Clone ID: MRT4577_92920C.1.pep
TKSTDNLHVAFSLGLQRKWSILYCYKSAWSCFCIVSFRLGQPLRCRLVHIFET

SEQ ID NO: 361561 - protein, 103 aa, Zea mays
  Clone ID: MRT4577_92921C.1.pep
MLTDKVSMMQDTSNNIIEEKQTKTSMQTKMSTINEGNNDLATDNRGCCLVNEEPDLQVKVQSLESGLVEVLEKNSMYMTQVKSPTTEQQAWSRNGEGDNDDKI

SEQ ID NO: 361562 - protein, 190 aa, Zea mays
  unsure (1)..(190): unsure at all Xaa locations
  Clone ID: MRT4577_92922C.1.pep
APLSRRRTTGTPRPPAAQTTATRPIISXSPPPDPAPAPAPPKXSPATSACASSSARRRWAGTRTRTSGSAARPSAPPPRRRPRRRTGTTTSTRRSGWPWPACRSRRTPPXGARRAAGQPGKCDHPKGRRQPGARRRGAEGCRCRGPQRHEHGPQVPRRRRRQRRRXPRGRRRCSTRSRSRSARRGRGASA

SEQ ID NO: 361563 - protein, 140 aa, Zea mays
  Clone ID: MRT4577_92923C.1.pep
MTSPMVATPVQFHTTGRLSFCSFSFPSASGRRRFAAVRASAETMATEKLGIKVERNPPESRLSELGVRQWPKWGCEKSKFPWTYSAKETCYLLQGKVKVYPEGHGEEFVEIGAGDLVVFPKGMSCTWDVAEAVDKHYNFE

SEQ ID NO: 361564 - protein, 133 aa, Zea mays
  Clone ID: MRT4577_92924C.1.pep
EKKNAPKLGILISEDTVYKFLLPNAEHVVCLISEHKRRPELTNIIAGSSGGMKADDVAKKALDGIKSVKFIVPCNFEGAMLAVATAGLSPQSSPLMAFLEVVGAGLMRFAAICFQWNWFSTIESYYAKKKKSE

SEQ ID NO: 361565 - protein, 88 aa, Zea mays
  Clone ID: MRT4577_92925C.1.pep
LVPRSGSNQPYQRDPWPLHRATPPPICRPRKRLKRRPRLRPPPCLRRVHPPPSPRRRSQLPWRAPSQVTTMSPWRPPGQCMHRLPTSL

SEQ ID NO: 361566 - protein, 184 aa, Zea mays
  unsure (1)..(184): unsure at all Xaa locations
  Clone ID: MRT4577_92926C.1.pep
MSESELAVIKPEALKTYIWLQCFDGSIQQVEEEVAMFCPMICREIVKNGTGSSKNHAIALPERVNPASLSLILDYCRFHQVTGRSNKERKSFDEKFVRIETERLCELTSAADSLQLKPXLVDLTSRALARIIEGKTPEEIRDIFHLPDDLXXEEKVEPXKNXNDDPRDRYLNRXYAKERKELQE

SEQ ID NO: 361567 - protein, 66 aa, Zea mays
  unsure (1)..(66): unsure at all Xaa locations
  Clone ID: MRT4577_92927C.1.pep
MASEGENKRMITLRSSDLEEFEVXEXVXMGGXTLXHMIEDDCADNGIPLPNVNSRILSKVIEYCNS

SEQ ID NO: 361568 - protein, 183 aa, Zea mays
  unsure (1)..(183): unsure at all Xaa locations
  Clone ID: MRT4577_92928C.1.pep
MSESELAVIKPEVLKTYIWLQCFDGSIQQVEEEVAMFCPMICQEIVKNGTGSSKNHAIALPERVNPANLSLILDYCRFHQITGRSNMERKSFDEKFVRIETERLCELTSAADSLQLKPLVDLTGRALARIIEGKTPEEIRDIFHLPDDLTEEEKLEPXKNINDGPARIRLLNRLYAKSGRAQE

SEQ ID NO: 361569 - protein, 95 aa, Zea mays
  unsure (1)..(95): unsure at all Xaa locations
  Clone ID: MRT4577_92929C.1.pep
PPRLPCFLGRPPLRLPXFCGXPRXXSPLLWCLXVCSXPPPSKILFXSXRGVLWWARSFLRXLGWWXXWLCRSCCXGCXCAPSFWLCAXLASLXXX

SEQ ID NO: 361570 - protein, 102 aa, Zea mays
  unsure (1)..(102): unsure at all Xaa locations
  Clone ID: MRT4577_9292C.1.pep
MERARRHASRALLRRLLAAAAASPAASPATSSRGISTLSPPPPAAGKQQRRCCPPPRGAHQHAQARAVSVSALQPSDTFPRRHNSATPAEQEAMAXAXGFGG

SEQ ID NO: 361571 - protein, 166 aa, Zea mays
  unsure (1)..(166): unsure at all Xaa locations
  Clone ID: MRT4577_92930C.1.pep
MSESELAVIKPEVXPLQPPSPALKTYIWLQCFDGSIQQVEEEVAMFCPMICREIVKNGTGSSKNHAIALPERVNPASLSLILDYCRFHQVTGRSNKERKSFDEKFVRIETERLCELTSAADSLQLKPLVDLTSRALARIIEGKTPEEIRDIFHLPDDLTEEEKLEP

SEQ ID NO: 361572 - protein, 85 aa, Zea mays
  Clone ID: MRT4577_92932C.1.pep
PPLGLGPSAKPPPLMFPTITLGPNKVGLAQENVSGLQNLFGGNPNFKGVGPPPPNNRDMDNGAAPSSPGPWAPPVSLAPGLFVTF

SEQ ID NO: 361573 - protein, 60 aa, Zea mays
  Clone ID: MRT4577_92933C.1.pep
FDLTVRGFTSFGLLKPLLSPTLILGKHPLYSSGVYSNRPKLFCFFQLLPTFIGVWGGPFF

SEQ ID NO: 361574 - protein, 55 aa, Zea mays
  Clone ID: MRT4577_92934C.1.pep
AGRLFFFFFYIRPTRSFQQLRVVTNREKFETNGGSMLSGQTNVYRTLITARTMNA

SEQ ID NO: 361575 - protein, 217 aa, Zea mays
  Clone ID: MRT4577_92935C.1.pep
MEAIVLVQFVAAAALISSLIGGAAGEAVAQELRQGLSVAHDQSYSQFQPVLADPTGVFALGFLRVNSTMLDLAVVHLPSAFPLWRAIPDRPAPWSTAASLSFDGGLVLTDRAADKVLWSTAATSASAGDRAVLLNTSNLQIQSTGGSSSPDVVVWQSFDYPSETIVQGQNFTSAATLYSFDRRFAMRLGSDYFGLYIEPPPSSGGVAAAMYFKHTAM

SEQ ID NO: 361576 - protein, 170 aa, Zea mays
  Clone ID: MRT4577_92936C.1.pep
MSAAASTTLALGSHHLLLSMGRGSANLTSSSDHPMVTSEALGSRLQLHTFQELNKVTGDMCAGTRTTKRMKTPMEGNGGTPDLHLSLSPNDDDMGGAADKQMKKMKIQGIGLSEQQEVDNDKMLPLSLSLSLRGGEDARRLEAATGGSSGNKSALVRCTLDLTMSIKATE

SEQ ID NO: 361577 - protein, 108 aa, Zea mays
  Clone ID: MRT4577_92937C.1.pep
IDYDGLGRGPLRWERTIPIAGKSSPMGGCLSHGFYTACSVTGREPGGVLYDLIAQDAIPCLLNRFYVEERTEELLIADREGGLIVHRLPFIMRKLVPLLEQVSPWVSP

SEQ ID NO: 361578 - protein, 60 aa, Zea mays
  Clone ID: MRT4577_92938C.1.pep
LWTLSKLPASVCLSCHIFHWPQYLCAYDYAHISHPIPVMWIKRNDAYKSFSRSRFPVGTQ

SEQ ID NO: 361579 - protein, 162 aa, Zea mays
  Clone ID: MRT4577_92939C.1.pep
MGKGKKGRGSPRRSRDKRKRDPSPPSEDFGDSEYSREVSSESEGSPVYASSPVSSDDSDDFQGLATEMWTYIRSVEHAGLEGLDESEVSSDEENSSDPSKGESGDNRDDEGNDSGDDSGDGDDDGGKGGGEGSGGKGNNGDDDGGGEDGSGSSKASGKAPLV

SEQ ID NO: 361580 - protein, 89 aa, Zea mays
  Clone ID: MRT4577_9293C.1.pep
SSGNKAEYFFFFFFFFFYFFFFFFFFFFFFFLGGRILRIPLFISYKKGGTLPHIRGFSGGEMYNMGLKTGNAIPFSHPTFTFLLVWAPN

SEQ ID NO: 361581 - protein, 118 aa, Zea mays
  unsure (1)..(118): unsure at all Xaa locations
  Clone ID: MRT4577_92940C.1.pep
IDATNRKVEEVPDQQAESCQRDNVGSNWGYNQNGFIDERCSWRPKGPRDKEHRLYVYXKLDKLYQNQRRYEPSGSHERGDHPKEANSAXRTESPQXTEHGSAVEPCGLVAWSLINDTY

SEQ ID NO: 361582 - protein, 57 aa, Zea mays
  Clone ID: MRT4577_92941C.1.pep
STLQLRSGTRGSRQARAAGLALRAYQVVGGSLCLIPASTVLGLRMRLSTASWHFYRS

SEQ ID NO: 361583 - protein, 144 aa, Zea mays
  unsure (1)..(144): unsure at all Xaa locations
  Clone ID: MRT4577_92942C.1.pep
MTRLCRRAANRXNRKPHRPREQRLSSAQAVTHPDQYGGVPDSPPGNAXGHLYGPAPQEHSYXSSKLSSSPHXIPTGSSPVGAVPKSTSPMXHLTLHLLEKKXLQPQRYNKFKHHCLMERKRLGTGQNEQMNLLYRFXWPYYLRV

SEQ ID NO: 361584 - protein, 78 aa, Zea mays
  Clone ID: MRT4577_92943C.1.pep
FDGAPPSTQGQPNPQHPICAPKNKTVAALPPRPKQGDTQNIQNGGRGTNTSPKRQKEHERRGYFSLKKIPSFFCSGLI

SEQ ID NO: 361585 - protein, 165 aa, Zea mays
  unsure (1)..(165): unsure at all Xaa locations
  Clone ID: MRT4577_92944C.1.pep
KRKRGNPKKKARKKRKKAGGTGLKKRPTPRGKTPKTGXKSEKGGGKRGENRPGKRKERRAGRPKRESPQPEKGGRPARLNKAGNGGNPPGKTEKTPGKGEEGPPKGGGKRAQGPPPPAARRGEGGPRKKAQRVPTGDEQIGLSFFFFFFFLFFFFCLFLLFFFFF

SEQ ID NO: 361586 - protein, 57 aa, Zea mays
  Clone ID: MRT4577_92945C.1.pep
TRVRTVVKTTYAEPSQLGLSCTNKRNLIKPFILLYYLYAVILIAAMVADEPSNDQEK

SEQ ID NO: 361587 - protein, 46 aa, Zea mays
  Clone ID: MRT4577_92946C.1.pep
KKGPGGFSSKKPGRPLIIGVCANPISPGQFNMGVERLGNFLIEQGF

SEQ ID NO: 361588 - protein, 46 aa, Zea mays
  Clone ID: MRT4577_92947C.1.pep
RSSNVMQQSEGTQSLASQYLPVTIEQGKNSTTASKELFLCTQQKSG

SEQ ID NO: 361589 - protein, 245 aa, Zea mays
  Clone ID: MRT4577_92948C.1.pep
MKEVVLHVYDVTNSDSEKTNNTILQINRIFKDRIGLGGIFHSAVQVYGEDEWSFGFCESGSGVFSCPIGKNPMYTYRERIVLGETECGIAAVNRILRELSREWPGHSYDLLSRNCNHFCDVLCERLGVPKLPGWVNRFANAGDTAVVVAENTAVKFRQAKTEIVNASRVAYRFMAGLTSKNQASPESPGNNQNRGSPSFQGAWFKNIVSAGAKPSSSGSTRTHFQDADDGTPLQHQSSTEQSTQL

SEQ ID NO: 361590 - protein, 77 aa, Zea mays
  Clone ID: MRT4577_92949C.1.pep
PRFWTRWGPPGFPYRVFFPPPFYPQGPPPGVPSKGFPPRFSFLGFGAPSPPRSGASQLGPQLANLAPRVTGKKPAGP

SEQ ID NO: 361591 - protein, 71 aa, Zea mays
  Clone ID: MRT4577_9294C.1.pep
SPHISTRHHTPTPTKTSFPLYYKSTKTSSHHHRHTTHTSSSHNCIANCHNSYILTHPTSNQTSNNETNPNI

SEQ ID NO: 361592 - protein, 85 aa, Zea mays
  Clone ID: MRT4577_92950C.1.pep
MASTSATSTTESITNTISDAANYVKESVVGASAESKKEANKEVAKGNTNASVGDRVSAGFSAIGNKADESKANAKADGYKESAKN

SEQ ID NO: 361593 - protein, 37 aa, Zea mays
  Clone ID: MRT4577_92951C.1.pep
LRVLNCLLDLICGSIAFPVVDGEDHAAHLGEVSIRLG

SEQ ID NO: 361594 - protein, 68 aa, Zea mays
  Clone ID: MRT4577_92952C.1.pep
YINKTNKQCARISSRVPYSPFYSSSTLTLLRRPVTINNFADAKQFILKTPVCSAHRLKYPPPKINKKC

SEQ ID NO: 361595 - protein, 40 aa, Zea mays
  Clone ID: MRT4577_92953C.1.pep
KWQYYLSMDLYCFCLVGLRRVAEQSDGKCRGDPTHVQMCK

SEQ ID NO: 361596 - protein, 59 aa, Zea mays
  Clone ID: MRT4577_92954C.1.pep
PNLINLQNIPLSPAGLVTKRTVPIPSSTLQQPLSKLKRNLQWRIIYNACLGYPPHNLIT

SEQ ID NO: 361597 - protein, 98 aa, Zea mays
  Clone ID: MRT4577_92955C.1.pep
TSRRALATVPLPFFPKENGVTIQLMAKVYALNPSIHAGAIRSPCRGCYSSYRKRPAIHKSHEPCWDYYEERRQLQTLGATVRSGHNRESLLQQAPCPF

SEQ ID NO: 361598 - protein, 47 aa, Zea mays
  unsure (1)..(47): unsure at all Xaa locations
  Clone ID: MRT4577_92956C.1.pep
GGRTPPRADXRGASNQWNRRIQACAESYAGNRDQASRCCVRXGKGRA

SEQ ID NO: 361599 - protein, 88 aa, Zea mays
  Clone ID: MRT4577_92957C.1.pep
TGLRRGSLFNYTWSRGGWVWPLFPAWGLVKGNSFWGLFCKKLFCGRAFLIRTLMLLVPWAPKWLFSQRFFFRGFFVPGILCFFCNFCF

SEQ ID NO: 361600 - protein, 48 aa, Zea mays
  Clone ID: MRT4577_92958C.1.pep
KRQAGGTLTKTGSRLGPCPKHVTCWILLLKSTQGPPRVKSPGCIKQFY

SEQ ID NO: 361601 - protein, 68 aa, Zea mays
  unsure (1)..(68): unsure at all Xaa locations
  Clone ID: MRT4577_92959C.1.pep
GIQVTLPEENVVIPSPYGPINCLAMAPAPDGVNPVLNVFASMHQQNPRVXFDVPPGRVGFAPEPCPPP

SEQ ID NO: 361602 - protein, 91 aa, Zea mays
  Clone ID: MRT4577_9295C.1.pep
VASKPQAELMMNNLVLEVLLANLHVTQSSRVKEICLGILGNLACHESLVNVISLHNGLTATVMDQLFLDDSACLSEVFRFLAAVLRTSVSV

SEQ ID NO: 361603 - protein, 512 aa, Zea mays
  Clone ID: MRT4577_92960C.1.pep
MEAAAASSLWGGLNSGIMLSLLAVVWAMLWQALQGLQLQQYFGRHSRRLSRRLASILDPDLTVTVAEYDGGRMRRSDAFKEAKAYLERATREARGGVRHLKAEPDKDPDRLLLSMDDDEEITDEFRGATVTWRACTAPPREDSAPAYFWGRAPRADRRFYRLFFAERHRDLVLGDYLTHVRREGRAVMVKNRQRKLFTNISGDGSWDSDGLWSDSVWSHVVFEHPKTFATLAMDPDKKKEVMDDLDAFRNGKDYYARVGKAWKRGYLLYGPPGTGKSTMIAAMANHLDYDVYDIELTSVRTNTDLRKLFIETTSKSIIVVEDIDCSLDLTGKRKKKNKKEEDGENKKDGTTTKQQEEDKEKEDEKAGGSKVTLSGVLNFIDGLWSACGGERIIVFTTNHVEKLDPALIRRGRMDKHIEMSYCCVQAFKFLAKVYLDVDDHPRFDAVAALLREVDMTPADVAENLTPKAPGEDADSCLAALVEALEKAKEDALAKKAKGKEEAGSADELDDEE

SEQ ID NO: 361604 - protein, 52 aa, Zea mays
  Clone ID: MRT4577_92961C.1.pep
FPQKCSRYRVKCVCSKILCGLQHLLLSKLLILVQCSRVIDNNHGCFSVLIVK

SEQ ID NO: 361605 - protein, 147 aa, Zea mays
  unsure (1)..(147): unsure at all Xaa locations
  Clone ID: MRT4577_92962C.1.pep
TLEAGRDSHPSKFPSRHSLPPSPSRSSSLLSSPTTAARQHAXPPMAAKLPQRQRPPLLPTAAAGRSSPAFPGRAPLLPLLLPPASRRPEIPAGAPWPSSPRPXASARSQLCRLSPPXPPSSPXAEAPQPWRPSPSSSSAQHPSSPLR

SEQ ID NO: 361606 - protein, 89 aa, Zea mays
  Clone ID: MRT4577_92963C.1.pep
LGIASRGLRRILYPGMELLELCEQVFSTADLYQVLGVRREASDGEVRRGYHKVSLQVHPDRVKDDQNEDATRRFQILGIVYAVLSHKEQ

SEQ ID NO: 361607 - protein, 128 aa, Zea mays
  unsure (1)..(128): unsure at all Xaa locations
  Clone ID: MRT4577_92964C.1.pep
PPKKPPTTGGGGGRPWEGESGTPPDKKPGAPEEKPGPRGPKRPQGXNPTPAQFGGGRWEPGEPPNPSNGFENLPPESXNPPGGPQAGPXEKVGTPPPAXPAGSPPMGRAVGRKIWDPLLFRKKICFPG

SEQ ID NO: 361608 - protein, 173 aa, Zea mays
  Clone ID: MRT4577_92965C.1.pep
GRSLFSTSTMKIINRCLRARMGMLISHHSLVYSQFQALANWTGNQVMVSVRSVREAASYKGGFSSVYYCRSAESVIGFAFLKCTGISQKLMWQVIRTQVQGLRNSAGYSAQELLAWVVSCLQKIAQDVTYIDASRKQTKEQDRQLQQDSCASGHNEVPLLSKSVRASWHSETR

SEQ ID NO: 361609 - protein, 226 aa, Zea mays
  unsure (1)..(226): unsure at all Xaa locations
  Clone ID: MRT4577_92966C.1.pep
LPAHIGDRSIHVRLIDQGGASDIMPCLAQEFHPKLPAANHYCKSLSSLIRETYAHCHVPCVGIAGWSSGGDSDDDSVLDEARDTKQVILSEMRSRQMKRRSRCSVDSPTPLPLPSSSSAFAWSYSYAPLGPRTVLDELSSPKTCVVVEGAAVADDDDGDVYCDADDESEAFFSVKSCFTRSTSPSPSRAATAASSPRMMTGPSPPMLRRSPEAXERFRDCDXWPFG

SEQ ID NO: 361610 - protein, 176 aa, Zea mays
  unsure (1)..(176): unsure at all Xaa locations
  Clone ID: MRT4577_92967C.1.pep
MPSRHYRNGPYFMENETKTVDSDVAHCXERNLLXSAAYXNILAARLAXWRMHAAYXDQHSMTVLGNEDTVTLINDYRGKTDTELTKICHGMLKLVESHLCXPSSTAPESTVLYLKMKGDYYRYLAEFKTGSDRKDADDNTMVXAYTAAHDIALAELAPTHPIRLALALNFXTFYYE

SEQ ID NO: 361611 - protein, 473 aa, Zea mays
  Clone ID: MRT4577_92968C.1.pep
PCTNNFNEATFGKLKLPENFNSGNIDSNNVLLTNQHSHYSHGLWSLLHIAHRLSGSLASYHPRALIQYLYSGEWKRADAALHHLVRSMKVSETSKGMSNYSTCHSIPELPLSEYFAATVSNNISTKGFMWGENRSNTTFNLLSPSTSFLYEDGNLGINTTTSASEKPDIVELLDKSFSKYGISDSEKNQILAISDLMAGITDQSHSSPYKNLDEAGRRFWVAVQFEQFHALRRSADSSSNEGCRVDSASIAWAFQSDCQDDLLNSVLPAEPTWPEMRKLGIGLWYTNVSQLRTRMEKLARLQYLKSKDPKDCALLYIALNRIKVLVGLFKISRDEKDKRLYEFLSRNFQEERHKAAALKNAYVLMGRHQWELAIAFFLLGDDTSSAVNVCAKNLQDEQLAIVICRLIEGSGGPLERNLISNVLLPDAVERGDNWLSSLLEVCHIRGFCLIAFLFFYVENQYKLSCFQSYNPST

SEQ ID NO: 361612 - protein, 83 aa, Zea mays
  Clone ID: MRT4577_92969C.1.pep
SFKSKRGGGAPNMEKLLNLRGRFMNGEEAKTTGNGEWGAFPPDSLPYAHAQGGVPPRGVKMFWRLLPGARGTFNFDRGLCFIP

SEQ ID NO: 361613 - protein, 54 aa, Zea mays
  Clone ID: MRT4577_9296C.1.pep
LLGVLNAYLLQWPFFEKLHQLIAAWQYMRLAVDKCIMVHLGFLKLVFFPTFPVN

SEQ ID NO: 361614 - protein, 190 aa, Zea mays
  unsure (1)..(190): unsure at all Xaa locations
  Clone ID: MRT4577_92970C.1.pep
MAEQQRIAEAADGANPHRLLATVSVSKPSYPTVVTTPMSAXTAPTRPPSXSYSTFPSLATGNGGAGAGAGAGGGGAAAGSGGGGGTWCVASQSASPTALQVALDYACGYGADCSAIQQGGSCFNPDTVHDHASYAFNSYYQKNPAPTSCDFGGTATITNTDPSSGSCQYPSSSGGGXSDMVPXPSPRRPC

SEQ ID NO: 361615 - protein, 150 aa, Zea mays
  Clone ID: MRT4577_92971C.1.pep
MAEKEETKGRCPACRTRYDKDMIVKMAATCDRVIQRNLVYIIGLPAHLCNESVLERKEYFGQYGEVLKVLVSRLTGPPSQQASANSSISVFSLKDRPGAVVRGLSTEPKGLGLTQPLRKNVGLRIASVITSPDPTHAGAVSTGSVLLLIC

SEQ ID NO: 361616 - protein, 96 aa, Zea mays
  Clone ID: MRT4577_92972C.1.pep
CHLERASLEGVLMAPVPECFEETRCGSPPRDLCYQCCWVPLGPDRIDPEYLLMQLSTSWVSHLRNPTVVEHTDLKFLLTELVTKRTRGSPKIRTVQ

SEQ ID NO: 361617 - protein, 95 aa, Zea mays
  Clone ID: MRT4577_92973C.1.pep
STLSTTRSLTTGTSTKRWGVTIARAVSTSIHRTAASYNTCSTRFYKRLDQAHDAQHHGHHLAQEVPTGAHQLPLRNDMIHHRLCDHLPPEDHGHR

SEQ ID NO: 361618 - protein, 181 aa, Zea mays
  Clone ID: MRT4577_92974C.1.pep
QICVSYWHHIIYMAEKEETKGRCPACHTRYDKDMIVKMAATCDRTVADKNAEKKQKAQRVKPKAAPTATTTSTVESKKHLATIRVIQRNLVYIIGLPAHLCNESVLERREYFGHYGKVLKVLVSRPTGPPSQQASANSSIIVYVSLNYTVYMHDLFILHMNLDLYFQYWSISLMEYQITIY

SEQ ID NO: 361619 - protein, 58 aa, Zea mays
  Clone ID: MRT4577_92975C.1.pep
SPPLYCKLNSIYYPNSYNFPTVKTLATPKSMALPNIIVSQDILISKSPVPINIPNTFA

SEQ ID NO: 361620 - protein, 69 aa, Zea mays
  Clone ID: MRT4577_92976C.1.pep
KGPSGAPLCRGGGVIKPGGGPFWGFLGQQTLGPSRQKGFPHGKGPQIFPPLKGERGLAPPPPLFFSGKF

SEQ ID NO: 361621 - protein, 118 aa, Zea mays
  Clone ID: MRT4577_92977C.1.pep
CSYAATSGRGAHSRSNKGNDSTQIVRRSQLGAATTTCSRSRTWPRTCIPPPRGCPTASCAPPFARALPLLAAGHRHAGGTSPGRTDRVTTHTYVQNIVVCVICIVRAIDVRDTHVYYT

SEQ ID NO: 361622 - protein, 159 aa, Zea mays
  Clone ID: MRT4577_92978C.1.pep
MRTYDDSFSGQKIYPGKGKLYIRGDSKIFRFQNGKSESLFLQRKNPRKIHWTTLYRRAHKKGISEEVAKKRTRRTVKHQRAIVGASLDVIKERRSQRPEARAAARSAAVKEGKEKKAAAESAKKAEKAKNAAASARGNAAKVSKQGTKGAAPKVQARTR

SEQ ID NO: 361623 - protein, 49 aa, Zea mays
  Clone ID: MRT4577_92979C.1.pep
GGGHHKTTLKFSQALGPAYCNALSNITRPPQNFLRCTGAIGELCCLQAF

SEQ ID NO: 361624 - protein, 117 aa, Zea mays
  Clone ID: MRT4577_9297C.1.pep
RSQLGTMSQSFTKRRNAILALNNLAIHGYGLAEPPAVKASIARNLGLDRIKELKIEEGGSFGRRAIDPFDSGRRGRSFGDSGFGDRRSRGRSSYGRSDHGESRSSNRGGGLYGARPR

SEQ ID NO: 361625 - protein, 285 aa, Zea mays
  Clone ID: MRT4577_92980C.1.pep
MAGQPPPSGASEDDFLEHFFAFPSAASAGAAGGHAGAGVGGDHPFPLALSLDAAAEAKPDRDPVQLAGLFPPVFAGAGGVHQPHLRGPPPPQMFQAQPKPGEGGMAPQPPAPRPKVRARRGQATDPHSIAERLRRERIAERMRALQELVPNTNKTDRAAMLDEILDYVKFLRLQVKVLSMSRLGGAGAVAQLVADIPLSVKGEAGDGGGAPQQQQQQHVWEKWSTDGTEKQVAKLMEEDIGAAMQFLQSKALCMMPVSLAMAIYDTQHPLDGHGHSLKPEPNASS

SEQ ID NO: 361626 - protein, 431 aa, Zea mays
  Clone ID: MRT4577_92981C.1.pep
AEISGDTRAWNSFYMRQDTVVENIARKNGISKSELLDREADDLAVRIALGETHVIAETKKFLSRSGVNVAALEEHASKRNEKFKRSNYVILVKNLPFNSTEEELATLFQKHGSLDKIILPPTRVFALVVFVEATEAQYAFKKLLYTRYKDTPLYLEWAPENILSPTSAPVDEEVKNEVGERILTKANIDQTVEGVSAEEIDPDRVESRSVFVKNLNFKTTDESLKQHFSTKLKSGSLKSATVKKHVKKGKNVSMGFGFVEFDSVETATGVCKDLQGTVLDGHALILQLCHVKKDGQAAKKNGKDKSSTKLLVRNVAFEATEKDLRQLFSPFGQIKSLRLPMKFGSHRGFAFVEYVTKQEAQNALQALASTHLYGRHLVIERAKEGETLEELRERTAAQFVDESSGFQSLSSKRKRSSLVDEGSVKVSRIAE

SEQ ID NO: 361627 - protein, 67 aa, Zea mays
  Clone ID: MRT4577_92982C.1.pep
TTDLLTPPPPFKNFFGFPLKPNIPFEPREPPRSLVKNGGIHAHYKVWEKHKCLGKQNPRESLASSIF

SEQ ID NO: 361628 - protein, 86 aa, Zea mays
  unsure (1)..(86): unsure at all Xaa locations
  Clone ID: MRT4577_92983C.1.pep
MFFQANVSVEEACKKIWLVDSKXTYVGGFGIGSVLLIVKKSVNVXGLIEASREETLHPFKKRIAHEXEPVKDFLGAVKAIRPTALI

SEQ ID NO: 361629 - protein, 91 aa, Zea mays
  unsure (1)..(91): unsure at all Xaa locations
  Clone ID: MRT4577_92984C.1.pep
MYHHSLQSRSVFVKNLNFKTTDESLKQHFSTKLKSGSLKSATVKKHVKKGKNVSMGFGXVEFDSVETATGVCKDLQGTVLDGHXLILQLCH

SEQ ID NO: 361630 - protein, 109 aa, Zea mays
  Clone ID: MRT4577_92985C.1.pep
SGQASGMQREHKPKLRKQTPRKRHKVCTSPLTRTKTRGKRTCIKATEQYQRKWKNKAGALRDLKDKLQPLHHTIWTEKRLSHPQIQAKTGIYDLPTLDLTKRPAANDRR

SEQ ID NO: 361631 - protein, 145 aa, Zea mays
  unsure (1)..(145): unsure at all Xaa locations
  Clone ID: MRT4577_92986C.1.pep
RRRKXXRGGNXSQDQTXXNXEXEKKGEXXRXGPTDXEKPRKRXPKRAAGXGKPXNXNKXXXERKXXNTXRRTGXTKNGKKXSKAPKSQRXETPXTXQRKRARSXDKKKRXTKKKPEXXEXQKXRAQRXKEQRDRRSESXAKRRPK

SEQ ID NO: 361632 - protein, 52 aa, Zea mays
  unsure (1)..(52): unsure at all Xaa locations
  Clone ID: MRT4577_92987C.1.pep
PRVXXXXLIILXKXPKRAGPQIIFVGTXTXTETLIKITAPPNSPRQQNNYLI

SEQ ID NO: 361633 - protein, 73 aa, Zea mays
  Clone ID: MRT4577_92988C.1.pep
CALSRWATAFDRLLLMEVVWFSALPRACSRPVVSSPFSWNSVFPVVHALFVGSVVYAVALLSSRVDIIRVCII

SEQ ID NO: 361634 - protein, 118 aa, Zea mays
  unsure (1)..(118): unsure at all Xaa locations
  Clone ID: MRT4577_92989C.1.pep
IGGCARTDISTAYFMPVYFHLTSKFLGYTDYRLLLRLVFQDKDNSNTSTYRFVDRFTNMVITALIIYDRIPXDMHLTSDYSHQLPRYALEVGLTNYSAVYWTDLLLAGHVLTNRNLYY

SEQ ID NO: 361635 - protein, 289 aa, Zea mays
  Clone ID: MRT4577_9298C.1.pep
MRGIGAAAAARRHTPFLSSRALAFSSSSRSGGGDGGFGHGRGRGLPTAGQPRAPGRPISNDDDADPFSATAPVGRGRGPGRGRRPGRGDRSDDVEDVWQASYLGDKADGDRLEQQLGEDKMKILEQAFMEAADNALPHQWEDAYLEACHTNNMIEFEPEYHVNFGNPDIDEKPPMSLEEMLQKVKPFVVAYEGIQNQEEWEEAVKDVMARAPHMKELIDMYSGPDVVTAKQQEEELQRVANTLPESIPSSVKRFTDKTLLSLKNNPGWGFDKKCQFMDKYARIVSEQYK

SEQ ID NO: 361636 - protein, 121 aa, Zea mays
  unsure (1)..(121): unsure at all Xaa locations
  Clone ID: MRT4577_92990C.1.pep
DSREVRLKGGLDDLQKRHQARYLGYNELVTQVPASTRPFIRQIEALHETTAQTAEARADAERTLDCSLHEAQAEAAASEEXEQTVDQRVSQRLLRITVLETEIATLRTEHTQLNRSLEKER

SEQ ID NO: 361637 - protein, 161 aa, Zea mays
  unsure (1)..(161): unsure at all Xaa locations
  Clone ID: MRT4577_92991C.1.pep
PPKTAPPPPLVSLPPKGAPPPPKKPSSPPGLPKPGYFAGPPKVPKPGGGGVPKNPNRGQGNGVPPKQALGMAARPPXVAGFPPPPXGKPXQFLTGSPNFLPPGVPPSGWFKPPKPXFPKGGKPXGWPPGGVGEPGAQETPPGLAVPLKGFKKKGVNLGLFS

SEQ ID NO: 361638 - protein, 159 aa, Zea mays
  Clone ID: MRT4577_92992C.1.pep
MGQASRLVLLAVPAQVAGICSRTPFPEVCTSTAGRHASKYPVIDNLAVLNMQVDAFAKRTAQARKHVAKSARTIPPQQTQALTFCDTMYMNTQDTIGAAQRAITFKDTGTAKIMLQLAVQDFDSCDRPFTQAGVPNPMGKFDKELNQMANNCMALANMI

SEQ ID NO: 361639 - protein, 62 aa, Zea mays
  Clone ID: MRT4577_92993C.1.pep
QNQACTIIFIKVRSFFLAFDYLCKCTAEFYKLNCSPSILVIKLCACNFSDWGTPGSHSFTIE

SEQ ID NO: 361640 - protein, 112 aa, Zea mays
  Clone ID: MRT4577_92994C.1.pep
VLNMQVDAFAKRTAQARKHVAKSARTIPPQQTQALTFCDTMYMNTQDTIGAAQRAITFKDTGTAKIMLQLAVQDFDSCDRPFTQAGVPNPMGKFDKELNQMANNCMALANMI

SEQ ID NO: 361641 - protein, 187 aa, Zea mays
  unsure (1)..(187): unsure at all Xaa locations
  Clone ID: MRT4577_92995C.1.pep
MGQASRLVLLAVVALLSAGLLPQALGNGKGKVHHGGAVNPQVAGICSRTPFPEVCTSTAGRHASKYPVIDNLAVLNMQVDAFAKRTAQARKHVARSARTIPPQQTQALTFCDTMYMNTQDTIGAAQRAITFKDTGTAKIMLXLAVQDFDSCDRPFTPAGSRXPNPMGKFDKELNQMANNCMALANMI

SEQ ID NO: 361642 - protein, 185 aa, Zea mays
  Clone ID: MRT4577_92996C.1.pep
MGQASRLVLLAVVALLSAGLLPQALGKGRGGRGHGGAVNPQVAGICSRTPFPEVCTSTAGRHASKYPVIDNLAVLNMQVDAFAKRTAQARKHVAKSARTIPPQQTQALTFCDTMYMNTQDTIGAAQRAITFKDTGTAKIMLQLAVQDFDSCDRPFTQAGVPNPMGKFDKELNQMANNCMALANMI

SEQ ID NO: 361643 - protein, 358 aa, Zea mays
  Clone ID: MRT4577_92997C.1.pep
PPPVATVPLGTGNNLPYSFGWGKKNPGTDYDSVISFLQLVRESREMNIDSWHIVMRMESPKDSPCDPIAPPDLPHSLHAFRRMPKTDPQDMEYSYTYRGGFWNYFSMGMDAQVSYAFHSQRKLHPEKFKNQLSNQKTYLKLACTQGWFCASLFHPMSRNIACLAKVKIMKKSGKWETMEIPQSIRSIVCLNLPSFSGGLNPWGTPSKRKQRKRDLVMPPLVDDGLLEVVGFKDAWHGLVLLSPKGHGTRLAQAHRVRFEFLRGATDHAYMRMDGEPWKQPLPTDDGKVVVEISHAGQVKMLATKDCIAKGVHDHESCPAISTVHPESIYNDMNDDFEEERRNFGAALSFRYLSDVNKQ

SEQ ID NO: 361644 - protein, 135 aa, Zea mays
  Clone ID: MRT4577_92998C.1.pep
PASRQCTKPTWLPHISSSTYQAPWALSISMQAGRTPSRKPWRGCFKASDAVRHGKYGGASAGAMSVGHVERVGADAAISGRRQGEAAGRVAPMVASPTAPRSTMGAESLGAMAAGRPWGSVCNSVGRQWGKHSSL

SEQ ID NO: 361645 - protein, 123 aa, Zea mays
  Clone ID: MRT4577_92999C.1.pep
PAKKLLKQPFFKQARSTDFIARKLLEGLPGLGFRYQALKEKDQDLMAQKKMSDGKKEEISQDEYKRGISSWNFDIDDLRSQASLGTECEDNISCKDSDVSFYDSDSLQDQAPEVPHLSKDFST

SEQ ID NO: 361646 - protein, 76 aa, Zea mays
  Clone ID: MRT4577_9299C.1.pep
IRFSPGADDHHADRYDPTALPSISNDLVIAVVGVHLQRAPMLKSAPGAVYEGMCFWDVSFIGIRRQQDIRWLCESV

SEQ ID NO: 361647 - protein, 35 aa, Zea mays
  Clone ID: MRT4577_929C.1.pep
VYACRLFELAAMAYENVHINIGDVGYLRYDTYTTL

SEQ ID NO: 361648 - protein, 215 aa, Zea mays
  Clone ID: MRT4577_92C.1.pep
MAAPPARARADYDYLIKLLLIGDSGVGKSCLLLRFSDGSFTTSFITTIGIDFKIRTIELDGKRIKLQIWDTAGQERFRTITTAYYRGAMGILLVYDVTDESSFNNIRNWIRNIEQHASDNVNKILVGNKADMDESKRAVPTAKGQALADEYGIKFFETSAKTNLNVEQVFFSIARDIKQRLAETDSKPEDKAIKINKPDQGSEAPAAQRSACCGS

SEQ ID NO: 361649 - protein, 115 aa, Zea mays
  unsure (1)..(115): unsure at all Xaa locations
  Clone ID: MRT4577_93000C.1.pep
MGPWQIPNSTFVTPVRACRVGAGILLCQVREPKEWEDDALDLPHQRIGFWEYXRSDGTFXYFFSLDTVRELFHAAGLIEMELEYCCVKFVNRXNGKTMRRVWVHGKFQKPPWDTC

SEQ ID NO: 361650 - protein, 126 aa, Zea mays
  Clone ID: MRT4577_93001C.1.pep
SRSAAKEQTDPRQSTDGVPTSHDHRRVSLLRPKPDPGATRAVTASTKQTAAAGQSDDLPKGNRQIGAPAPNSPNGSPRPAGISEEPAARWAEKLGRRTARRRDAAALSGRSRLRKTDGCRWLAVGT

SEQ ID NO: 361651 - protein, 238 aa, Zea mays
  unsure (1)..(238): unsure at all Xaa locations
  Clone ID: MRT4577_93002C.1.pep
MGRELQKKKNKSSIPKKRQKGPSKKKILQNPIIAKHWNQKETLSQNYRRLGLTARLNHATGGTEKTIALLGLNDEKSSRADTAAGSTANALNIVSKAKKPENIPTEEIEVERDPETGAILRVVGTLENKNNPLNDPLVEIEDGEEMQWNGFAMVPEHKADEPENPVIKQLEEAAMNGARKAPRGQSQREQEWVERLVNKYGDDYAKMARDLKLNPMQQTAADIKXKRVVKWQKSQAKA

SEQ ID NO: 361652 - protein, 55 aa, Zea mays
  Clone ID: MRT4577_93003C.1.pep
SSRVSRIDHTSGIHTHCCLNGPVTRARSLVSHRNPLWRSSDRADDLLKGIFFRRK

SEQ ID NO: 361653 - protein, 61 aa, Zea mays
  Clone ID: MRT4577_93004C.1.pep
QALLIDQLIRWSAAPPPSSCMGWLLPCPRWFSRLCFFGSGAPGLALRSAPGVRGAPFFAVG

SEQ ID NO: 361654 - protein, 48 aa, Zea mays
  Clone ID: MRT4577_93005C.1.pep
HGEIEIEIIRGLPAMEARPSRIECSEPNEQPEPKDPGRVFHTTYEHAK

SEQ ID NO: 361655 - protein, 219 aa, Zea mays
  unsure (1)..(219): unsure at all Xaa locations
  Clone ID: MRT4577_93006C.1.pep
MANTPHGGVLKDLIARDAPRRKELFDEAEKLPAVVLTERQLCDLELILNGGFSPLEGFMNQKDYDGVVANNRLADGNLFSIPICLDVSKETIDEVGLKQGARIALRDFRDDRNLAILTVDDVYQPDKEKXEAREVFDKDNDVAHPAIKYLYETVKEYYXXGGKVEAIDRLEHYDYVGLRYTPAELRLHFDKLGWXKVVAFQTXNPMHRAHRELTVRAAR

SEQ ID NO: 361656 - protein, 116 aa, Zea mays
  Clone ID: MRT4577_93007C.1.pep
HRLSQISAPSTVLSPCIARSRLHRRLLHLLPRHIDPMPSSCLHGPSSHHECEGLFAIEASVFKKEKVSLALRRMEETEASSSSTTSGRLGPSSLVALLETTPSSTSHSRTWGARRG

SEQ ID NO: 361657 - protein, 45 aa, Zea mays
  Clone ID: MRT4577_93008C.1.pep
RERAPIRSSGFTPIYATRLLRRAHTTCGEVNRKREERRGENVRRQ

SEQ ID NO: 361658 - protein, 109 aa, Zea mays
  Clone ID: MRT4577_93009C.1.pep
LQTEQTTKVMFKRWTPAAESSSSKPIRSFFIFKGGYIAQGVAGSSQRRERNMLMISHEIQLVELWQQLCKNKCVSAPFFSASSLLLISYSHKTEGMRTPPIKHNHLKVR

SEQ ID NO: 361659 - protein, 122 aa, Zea mays
  unsure (1)..(122): unsure at all Xaa locations
  Clone ID: MRT4577_9300C.1.pep
MGCTQSALTGAPVAPGLFFLAARTTSEAAITFGQVRFVIAPFLFYARGXQGFGPSSSCCKGGRNLKSAASTPADRRAACNCLXNTTRGVRGLNTGNSDSIPSNCGVSMPYTISTFTHCSWVS

SEQ ID NO: 361660 - protein, 111 aa, Zea mays
  Clone ID: MRT4577_93010C.1.pep
RMVQIHICFCIIAALAPPIVFHGKSLTHKQHLDPLLDQMTTVSRRTVATHLAGVSSSSSVSNATFALLLQSLLTRMISTDFHKECRHLRSHPLLRRTHGYGVPQTGILFIH

SEQ ID NO: 361661 - protein, 100 aa, Zea mays
  Clone ID: MRT4577_93011C.1.pep
GWNAPSGGEKGIDIARRSSEVLEEIEPTFTTGNVLVVSHKSTIRIMLCSLLGIDIGRFRDRIGMPVAAVSIVTMSEHGPLIEVMGDRSHLNQDLRDRYGT

SEQ ID NO: 361662 - protein, 137 aa, Zea mays
  Clone ID: MRT4577_93012C.1.pep
KHLSKCLKLSADDAPRGGGWRRRPVLARSSYRCPLSFSLPSAVAAGEVGSGGLAGRRGSARQLKTAGKGRSATRAALAHGSHRGSGGRAGWQSGTRWLGGAADSGGRVVHGDDDERWGRWRLWIWMDQSERFRNLRC

SEQ ID NO: 361663 - protein, 71 aa, Zea mays
  Clone ID: MRT4577_93013C.1.pep
KRAILSQTRFFKLSGGPNKKWSQPTTKLEVKLLCKSVLELRSQRPPRANFNPKPILQNLLPWLVGRVGPPR

SEQ ID NO: 361664 - protein, 101 aa, Zea mays
  Clone ID: MRT4577_93014C.1.pep
QRRVRGGRRPIFRSFRSLRSARRWRPHLSLPPFLRHHSPLDPFCLLNLASPSNPTHAVLKTLPDQSVQFQGCRLCVMSAGSGEGRRIRSAAARALSDMASM

SEQ ID NO: 361665 - protein, 64 aa, Zea mays
  Clone ID: MRT4577_93015C.1.pep
AVLICHPQHLKFRDQKHTIRPSEHPTPKRPVTISPEKQNPNPFGAQHKNPQNPPNFSPKIKAGP

SEQ ID NO: 361666 - protein, 149 aa, Zea mays
  Clone ID: MRT4577_93016C.1.pep
MSKKAAPKVVEKVTLGPQVREGELVFGVAHIFASFNDTFVHVTDLSGRETISRITGGMQVKADRDESSPYAAMLAAQQVAAKCKELGINALHIKLRATGGTGTKTPGPGGQAALRALARAGMRIGRIEDVTPIPTDSTRRKGGRRGRRL

SEQ ID NO: 361667 - protein, 51 aa, Zea mays
  Clone ID: MRT4577_93017C.1.pep
LPFFKTTQKSCFFMYTHQVTKITILIGGIYNLTILTKHVKFSVGALNDNKH

SEQ ID NO: 361668 - protein, 93 aa, Zea mays
  Clone ID: MRT4577_93018C.1.pep
FCPARSADAMTNNNNGGNDTNAAASGWLGFSLSPHMDEHQLQQHQQQQHGLFFPSVTAASAASYGLGGGVATSASPYYTPQLASMPLKSDGSL

SEQ ID NO: 361669 - protein, 67 aa, Zea mays
  Clone ID: MRT4577_93019C.1.pep
LRTTKKLIKTLVLKVMCSTSRFALSYFATFQQRSPGFIGYRSYYLFFSCVIVSHWLTIPSRICCVRP

SEQ ID NO: 361670 - protein, 179 aa, Zea mays
  unsure (1)..(179): unsure at all Xaa locations
  Clone ID: MRT4577_9301C.1.pep
RSGINSRVDELTSRRPPXXFFFFFLSEGRPSSTHLHLFKFEKRPRIKYFVLHNKPQDTSVPLFFFCLTPRLQVIRTLHLYYIKHVVPCHPSPRIKQNFVFLFFFVQLAYHQLLLSLVGEASQDHSTCSTSKSRFSTPHQLHWPFPYLSTVETFREVYDVLYLGIIDIFAIVQYDKENRS

SEQ ID NO: 361671 - protein, 125 aa, Zea mays
  unsure (1)..(125): unsure at all Xaa locations
  Clone ID: MRT4577_93020C.1.pep
GREKRQKQQGGRRRRGGPKGYIHVRARRGQATDSHSLAERVRREKXISERMKXLQALVPXGCDKVTGKALVXNEIINYVQSLQNQXVEFLFMXKIASLSPVLYGFGLDTTDASTDDHTTQKSKGC

SEQ ID NO: 361672 - protein, 146 aa, Zea mays
  unsure (1)..(146): unsure at all Xaa locations
  Clone ID: MRT4577_93021C.1.pep
MDSIEPIRHDWDAXSTRKKAPTGARRRXDTADNAERRAGAEIDTMKKHNADTNNAXASGGHLLNTKRLYDYTKRPTHERXSRDLNKNLMHAWXHKKLTQAQLVHMINDKPQQIHEYESCEGILNQEIISKLNRALXTKLRGKKHLP

SEQ ID NO: 361673 - protein, 493 aa, Zea mays
  Clone ID: MRT4577_93022C.1.pep
MDPKGKGMVVNDKENESVLNEPRDDKPTDSGSSQKKRQGKKKRDEYNKVSGLDNAKQIWDTLKIYHEGNDATMITKMELVEGELGRFAMIGGEEPTQTYNRLKTLVNKIRSYESTRWTNHDVVRLMLRSFTVIDPYLVNLIRENPRYTKMTPEEILGKFVSGRMMVKEARYVDDVLNGPLPVYEPQPVALKATSSREVLPSKVAQIEAARLNEDEMTLIIKRFKTTLKGRKEYPSKNKTRGKRSCFKCEKYGKREKKKVYKKAKGEAHLGKEWDSDCSSSDSDDEGLAASAFNKSSLFPNERHTCLMAKEKKVHIRDSPKYSSSSDEESSDDEVDYSSLFKGLDRAKVEKINELIDALNEKDRLLEKQEDILYEEHDKFVSVQKSLALEIKRNEVLSSELSACHESVSSLRSLNAELNTKLEEVNKSSSCVEHVVICNRCKDFDVDACDEHLISITKLNDEVASLNAQLKTCKSDFDKIKFASVGDLFSNAMS

SEQ ID NO: 361674 - protein, 96 aa, Zea mays
  Clone ID: MRT4577_93023C.1.pep
LGTSRPAGQKHPKSGRKQRSFAPCNPPTSTTLSIVASHPSSQLKPHMVGITLVINFHRRSSTWTATTGGRTASVSPNCYSDFSPPHPETSSWTKMC

SEQ ID NO: 361675 - protein, 128 aa, Zea mays
  Clone ID: MRT4577_93024C.1.pep
TAEHGRAAMTIQRAHKRDHHRSPASRTRRVVVSCVSLCDQEKSGATTERLNEVEPSMASRREGSDSSRTQRRVADDRPPRNRSRAGPILEPHGGHIFCVHRRHPSAAQSNAVPCRYPLCRPDTNPSAT

SEQ ID NO: 361676 - protein, 218 aa, Zea mays
  Clone ID: MRT4577_93025C.1.pep
DGARWREVMEACFARVDGEVAVVEGEVNNAGHTVGSTAVVAVVGPRHIVVANCGDSRAVLSRGGVPVPLSSDHKPDRPDELERVESAGGRVINWKGYRVLGVLATSRSIGDYYMKPFISAEPEVTVTERTHKDEFIILGSDGLWDVMSNEVACKVARNCLCGRAASKYPETVHGSSASDAAAVLVEFAMARGSTDNISVVVVELKRLKWKGGRQNGRT

SEQ ID NO: 361677 - protein, 78 aa, Zea mays
  Clone ID: MRT4577_93026C.1.pep
GASENIQCLPEACPRPVRWRPPQRQIPAAGFAAPIVVLASIYRHTISIRLIAGRFAQVHPACRGMGADPTTIHTIVGG

SEQ ID NO: 361678 - protein, 144 aa, Zea mays
  Clone ID: MRT4577_93027C.1.pep
ALATNHILASNSNQVCSGVTSRTLMEHRTRLITANGQIMLDRARCIGMGGLRSWAHGYRDDHKRHACLSARCSRCCCHGLGDRPLAAGGSSAATRPRRPERRRRCCSGVCACTARGRGTPPPPSPTPRLTAAAGGATTAMSSSS

SEQ ID NO: 361679 - protein, 76 aa, Zea mays
  unsure (1)..(76): unsure at all Xaa locations
  Clone ID: MRT4577_93028C.1.pep
ILIKSFWGGGGLSTPFIXKNNNQSSKWFKPNPQPLYKKKGFQTPFESLTXTPKKNKPLFFPLKIWKKKKNFPWNYF

SEQ ID NO: 361680 - protein, 56 aa, Zea mays
  Clone ID: MRT4577_93029C.1.pep
TGQQSIADLTRLKRSCCLKTWHSMDSYKGHTVGRIGQTGFLVGPKNLRLASYETNL

SEQ ID NO: 361681 - protein, 108 aa, Zea mays
  unsure (1)..(108): unsure at all Xaa locations
  Clone ID: MRT4577_9302C.1.pep
RNGRAGPERRVRSCFCGLGLDKTGAPTIGRVGERIQMTPIDVEYXINIXSLAWGTDDHSLHIAFCTYREVLEAKNILDRXTQRALGFGCATLSTEEAMLDAIHDIDGM

SEQ ID NO: 361682 - protein, 310 aa, Zea mays
  Clone ID: MRT4577_93030C.1.pep
TKRKMNPDTGGANADYCAADPSADDEVHNGDQDKARKGPSYAGGLVLEPKKGLYDKYVLLLDFNSLYPSIIQEFNICFTTVERSSDGSVPNLPASKVTGVLPELLRSLVERRRMVKSWLKTASGLKKQQFDIQQQALKLTANSMYGCLGFSNSRFYAKPLAELITLQGREILQNTVDLVQNNLNLEVIYGDTDSIMIHTGLDDISRAKAIAGKVIQEVNKKYRCLEIDLDGIYKRMLLLKKKKYAAIKVALDGSLRENIERKGLDMVRRDWSLLSKDIGDFCLKQILSGGTCDDVVESIHSSLVQVQGAM

SEQ ID NO: 361683 - protein, 227 aa, Zea mays
  Clone ID: MRT4577_93031C.1.pep
FTGQESCCVTIIVLCKGAHVEASVDFANLTALQKHAEFFDRNKDGIITASELFEGYVAIGCDAEYARVTAASISAGVGPITSPADAPLPHTSIYVEYIHRAMHGSDTGAYDAEGRFVPAKFEEIFTKHAKVRPDALTSEEIEEMILANRDPLDPESWAAPEGEWGLTYKLASDKQGFLHKDSARGIYDGSVFYKLEEQRTSAASEKCDGSSAFSQMQPAYIINTKMC

SEQ ID NO: 361684 - protein, 70 aa, Zea mays
  Clone ID: MRT4577_93032C.1.pep
CLSACLCACGSPHSPYSLPSRESDRPEHRHKRIPVYDRPNSMYNPIDFNPMAETVRNVSSEFEIKSTSTF

SEQ ID NO: 361685 - protein, 513 aa, Zea mays
  Clone ID: MRT4577_93033C.1.pep
MAAKRRARQPRTEDSKELGLNGGNEGSDEEEEESSKSDALKRAEQPSPPSPEDAEAERSGEASPQRSKPRGWVAMKTKTTTSKRVKKPSPASEKEDEAGDSGDLSPASDPLPDNIVDAADNKRPATLKPGKKRSPTPQQEEERPEKRAAGSDGETVATSSPQRKKKSKRSVDKDRRKKNRNQIRKALTQEDEDHDTVMAEQEQSNTSLPQDEHAAREEEQEEKMAQQEHAGDTSHPHDKDMRSAHGEEQQDANQEHADDTSPAEDNHSVDEEEQQVEPIPQQEQPNDTSPPQEKNRAQEDEETGAQVNGKALEGRNAPSTKLRSFESEKKPAVERSWSYDDELKILNALVEHAQSHNGSLPDSSHVLANLTFDKIDANEDKLTDKIRKLRTRYRRWLLQGCTPSVSGSQLFKLSEILWGQADEDEQVEPTSRDFSVVSKLYPHLAKEVKAYAETHSSGDLIMGMVMTICDKKARDLDAKCKKQQIETFKLELGQANLTNELLSALSSQTHVKF

SEQ ID NO: 361686 - protein, 40 aa, Zea mays
  Clone ID: MRT4577_93034C.1.pep
PGPRPCLSCNVKTFPLDPVGAQHHCRKSALSSSQKFVIEE

SEQ ID NO: 361687 - protein, 92 aa, Zea mays
  Clone ID: MRT4577_93035C.1.pep
LWAKKTGFGHGIPHQARFPFTRYHRFEITPNPARDILAFSPQAGKTKWVFTLAPHRVLSRGELAPHPVKRGVGSKKNGVHTHPLLLLGALHF

SEQ ID NO: 361688 - protein, 141 aa, Zea mays
  Clone ID: MRT4577_93036C.1.pep
LAGSVNNPLFTKKSQFLFLPTYPYVQLSHRKKGLPLAGANNSVSSRTWKRMAMFCCWKFPNVLIAPSVWFRMARPHTPDPEIMYLPGGSTLSAPSKGSVMLGSTAGGPNLGAGSANHRSSPGESNPSTVGSVVTSWNFTGG

SEQ ID NO: 361689 - protein, 85 aa, Zea mays
  Clone ID: MRT4577_93037C.1.pep
AFEHLMSIFASSTSSFMGTILGTRVQIRTRTDRERWSNSNTAQFSSILPISPMSRGRSAILRHLRLLAIIPSKPRFAPCRSTVPA

SEQ ID NO: 361690 - protein, 64 aa, Zea mays
  Clone ID: MRT4577_93038C.1.pep
AHILPLARSMVTYLPRIATPMVMSTHASISTRYLLSAACAPGSTTQQLSTEFALSLPSTRLSVP

SEQ ID NO: 361691 - protein, 86 aa, Zea mays
  unsure (1)..(86): unsure at all Xaa locations
  Clone ID: MRT4577_93039C.1.pep
MTLPLARRHRHPRPSTTVPMSRKFEKYXKKSSTALVACFLDPRYKRILIEFYMRKFHGISSQVYVDELLDIIKKLYQYYVVAAPSL

SEQ ID NO: 361692 - protein, 58 aa, Zea mays
  Clone ID: MRT4577_9303C.1.pep
VRANKSVVHVPQFGKRALPSMSPVGSSSHVELKVEADSPPFGVISSPGVGLDGFACGY

SEQ ID NO: 361693 - protein, 131 aa, Zea mays
  Clone ID: MRT4577_93040C.1.pep
IRHEGQSKTGITRHKCLHRQHGVHCVYPVERSKQSLPYSYPTMTVNDAVGLQDQLHRGRGEPSFYALIETVRQELYAQPVGALPRGHSWTGALGDTPRGPKQEDRDLARDEEPYLIDQLSIGTLMDTTNAI

SEQ ID NO: 361694 - protein, 188 aa, Zea mays
  unsure (1)..(188): unsure at all Xaa locations
  Clone ID: MRT4577_93041C.1.pep
MGLLSIIRKIKRKGKEMRILMVGLDNSGKTTIVLKINGEDTSVISPTLGFNIKTIKYHKYSLNIWDVGGQKTIRSYWRNYFEQTDGLVWVVDSSDIRRLDDCRAELHNLLKEERLVGASLLVFANKQDIQGALKPDEXIAKVLKXLEVMDRSRHWXKIVGCSAXTGEGLLEGFDWLVQNXASRXYVLD

SEQ ID NO: 361695 - protein, 103 aa, Zea mays
  unsure (1)..(103): unsure at all Xaa locations
  Clone ID: MRT4577_93042C.1.pep
MGLLSIIRKIKRKEKEMRILMVGLDNSGKTTIVLKINGEDTSVISPTLGFNIKTIKYHKYSLNIWDVGGQXDNLLKEERLVGASLVVFGNKQDIQGALKPDEI

SEQ ID NO: 361696 - protein, 152 aa, Zea mays
  unsure (1)..(152): unsure at all Xaa locations
  Clone ID: MRT4577_93043C.1.pep
PTPSGFVFLSQLTHFEPVSFRSTLLLSWVTCYINXGKXDLSIVSFEXKKSERQVVCILVLGFRYCTRQHCNLFLNLQXSLSLKPSFIIHIIDPGSLTVFKIKNNGILNKVYISAIDNILQKFFLLNIKKGAAPLFFSIFLIFFIFFQKNGRF

SEQ ID NO: 361697 - protein, 185 aa, Zea mays
  Clone ID: MRT4577_93044C.1.pep
MGLLSIIRKIKRKEKEMRILMVGLDNSGKTTIVLKINGEDTSVISPTLGFNIKTIKYHKYSLNIWDVGGQKTIRSYWRNYFEQTDGLVWVVDSSDIRRLDDCRAELHNLLKEERLVGASLLVFANKQDIQGALKPDEIAKVLNLEVMDRSRHWKIVGCSAYTGEGLLEGFDWLVQDVASRIYVLD

SEQ ID NO: 361698 - protein, 59 aa, Zea mays
  Clone ID: MRT4577_93045C.1.pep
GAKSSQGPFQLPAPVLNKNLPQTTTACYSTSRFFNRLSSYNNSSQESRLPKELLFHHEV

SEQ ID NO: 361699 - protein, 64 aa, Zea mays
  Clone ID: MRT4577_93046C.1.pep
GRLARPGPAVFTGRRAHYLVAARAFVFFFEASLLKAHVRLIVCYKKLRGPHFSRGAPMRYKVLP

SEQ ID NO: 361700 - protein, 124 aa, Zea mays
  unsure (1)..(124): unsure at all Xaa locations
  Clone ID: MRT4577_93047C.1.pep
GGFNKWANFGGLGFGSGCPHRAGFGNGFPIKGFKAPPPKFVXCRAXSGGGLGPLFISKVWGGQGQFIFGGLGFALGGGWGNGNMVLXGPQGGPPKFRGFLGGFGGEGFFSGEVFGGGLTPVFHP

SEQ ID NO: 361701 - protein, 65 aa, Zea mays
  Clone ID: MRT4577_93048C.1.pep
NSARGLHKRPCPFEKTTRSPGRSILSLGESCTEALLFPVFMCPVQRIIKSSKSNWKMIFKCENKC

SEQ ID NO: 361702 - protein, 320 aa, Zea mays
  Clone ID: MRT4577_93049C.1.pep
MLEELRCPLRPQRSGHGLQEREKQAFLERGRSPTELYFRHLRPQRRTERSSPSQQLLSTLTSSSSERDWNRLPSPTTSRPCKGKNLPSEKHNDEGTCTEIFGDITRPGSGTQRSPYLGMKFQKLEKPPMSKYTEKGGILANMIADKLKTEIENKPSRAQGTSSTLSDTTDRSSLYHLPHHEEGPTSPGSLSNQKGEGWSIPRIDREVNVIFRGHGSQENRRQQKLNDQQVLVATTSAPAPYRWSEHAITFSRADKWLNFDHPGKYLLLVDSVIRERRVKKVLVDRGSSINVTFPWTLLSLGVALKDLIESDTPFFGIVPT

SEQ ID NO: 361703 - protein, 120 aa, Zea mays
  Clone ID: MRT4577_9304C.1.pep
MESAGRRGGDERALHWSSGQWQPGSGRLVGGGHPLLAVRTEVSDCLMVAYLPLFGARLVSHPILEGLETHVHSDYIIGHHHTMLEINSGKVLTKRYSGKRHEPPRVSPDHQHNQDNSIVS

SEQ ID NO: 361704 - protein, 72 aa, Zea mays
  unsure (1)..(72): unsure at all Xaa locations
  Clone ID: MRT4577_93050C.1.pep
TESCLRKKERKKSSTGSKKXRALDTREGLPKPFKASLHQSIPMGIGGIEGGLVHSPLLNPLGRHSHDLQAWA

SEQ ID NO: 361705 - protein, 241 aa, Zea mays
  Clone ID: MRT4577_93051C.1.pep
MVPSHTKQNNNVPVKKLGFGLIGLGKRTSVPSVFAEEDDENNVDKSIRPLVPIDYNEELQAVQANSSTGANVAAAAEFAKRISVSNSKEEKVDTEKDRNRRSSEGRPSDERREKLHDREKDKSKSENKKILDAKQLIDMIPRTKEELFAYDINWVIYDKNELHERMRPWISKKIIEFLGEEESTLVDYIVSCTKDHVQAEKMLELLQSILDVEAEMFVLKMWRMLIFEIKKVESGLSGRAK

SEQ ID NO: 361706 - protein, 75 aa, Zea mays
  unsure (1)..(75): unsure at all Xaa locations
  Clone ID: MRT4577_93052C.1.pep
MTAAALSSLTEAGDYKDKDGVKGLCVVGAINNCTSQLPTYGRSSPXHNPLHSDKGGNTVDFHWYARKTVLHYICV

SEQ ID NO: 361707 - protein, 933 aa, Zea mays
  unsure (1)..(933): unsure at all Xaa locations
  Clone ID: MRT4577_93053C.1.pep
MAKPGGSDESWEYSLRKYLLLLATLVATVTYGAGFNPPGGVWQTADPAADRIAGDPIIRDTNYARYLSFFYSNATAFASSLVVIVLVLILSVLHDNGGITMLAPLLGVLRAVMVLDLLSLMGAYAAGTFRDTLTAVYSLVLSAGVVAYLVAHLALASRAPAAEDKRGQSAPERLRKVLMLLATFAASVTYVAGLSAPGGFWDHPEDGHRPGDAILKGGPHDARLKAFFVCNTTAFVASLLILVMLLEKKLCFSQKVRSYEIYGFIAVTLISLLGAYAAGSSRQIDTTIYVSALVGAVAVCILIQVVFVLLFQANSTEGQQTRTQGPLTNNGNASDERQQTQGPQTSMDSNDSDEQQQQTHGLQTSDDNVSDHHHQQQQIQSPQTSNGNGNASDEHEKQQNPALEKARSLVLLLATLAAAITYQAGLNPPGGLWQSNGRLYKIGDPILLTTNPRRYKAFYYCNSVAFVASLVAVMLVRKKTLHHHNALEAAMVLDLFGLIGAYAAGSCRDVSTSIYAMALAGAVLVYVVIHVVFLTLDEKDGSSARRNDDASFEEREKKEAGLVEKRRKRLLLFAILAATITYQAGLTPPGGFLVQDDNRTGRHAGDAVLLNNYPRRYTAFFYCNSVSFMLSIALIILLVNPNLYRPAIRSNALSVCTAAGLIGIMGGYAAGCTQHLKTSIYIFVLAAVVLSTVVFLAAVFLVIHLRKKDDXLTAPTEQQQERHLGKNKKPMLVLGCQMPWGASKEVPKEPKXRKEKRAHAKRKYLMLLGILVASVTYQAGLAPPGGAWQSNDGTHTAGDPVMHDYRRARYLAFFYSNSTSFVASVVVVVLLLPESLHKKWWWLGVMNATIVLDLLGLLIAYAAGSSRTWKTSVVVSALVLAVLAYFAIHVLLSSCVRRGKKTAPDSPSPPQDQENREENEAATKEVELQGPAC

SEQ ID NO: 361708 - protein, 68 aa, Zea mays
  Clone ID: MRT4577_93054C.1.pep
NRDICRWNNLRACSVLIALLSPVYLADESFFLKKKKKKKKKKKKKKKKKKKKKKKKKKKKKPFFFLGL

SEQ ID NO: 361709 - protein, 179 aa, Zea mays
  unsure (1)..(179): unsure at all Xaa locations
  Clone ID: MRT4577_93055C.1.pep
LDRPDLVSQCFFINLLTTFHQVLATAVTTKFLDRAGRRILLIISSSGMTLSLLVVAIVFYIKDNISHDSDLYDILSMVSLVGVVAYVIAFSFGMGAIPWIIMSEILPVSIKSLAGSFATLANWLTSFGITMTANLLISWSAGGTFTSYMIVSAFTLVFVIVWVPESXRRTLEEIQWSFR

SEQ ID NO: 361710 - protein, 91 aa, Zea mays
  Clone ID: MRT4577_93056C.1.pep
RDLKLGIFDICLRHGDREQALMQLGLQLLNTGEIREPQATGEQDAVALDAEPHISIELIHAELIADDQQGGALQHEIDLLSVYARDGKLEH

SEQ ID NO: 361711 - protein, 43 aa, Zea mays
  Clone ID: MRT4577_93057C.1.pep
KRTALVNAYNKKKESGKSSVLLDVKPFNDYTVMYKLIQAVRSV

SEQ ID NO: 361712 - protein, 138 aa, Zea mays
  Clone ID: MRT4577_93058C.1.pep
DHYTFFVTQDLSLLVPRNVGQQGEEIFLQPKSVQTWILSSWSETSSTFKYVLQSYLHPFTQVQPVGMKKSSVTPLNTESDLISPAAPSLSSLFNTFYLTNSHDKRPHLLNQIYSLSIALPLWYNTPRLKIHRAIAMMH

SEQ ID NO: 361713 - protein, 133 aa, Zea mays
  unsure (1)..(133): unsure at all Xaa locations
  Clone ID: MRT4577_93059C.1.pep
LNLSGNDIGDEGAKXILVENVGIQKLLLNSINIGDEGAKALSNMLKKNKSIRILQFSNNAIEYSGFASIAEALLENNTIRSLYLNGNYGGPLGACSLAQGILGNKSLRVLLKTLGYILPVFHIVLMFFFFVKF

SEQ ID NO: 361714 - protein, 86 aa, Zea mays
  Clone ID: MRT4577_9305C.1.pep
AAANQMRNFLVRASCRLRLEPGKEYVIMGLDGATYDLEGHPQYLLDSNSWIEEMPSERLCRSTRQRAACAQLNDFLQEYGTQGCQV

SEQ ID NO: 361715 - protein, 75 aa, Zea mays
  unsure (1)..(75): unsure at all Xaa locations
  Clone ID: MRT4577_93060C.1.pep
SRPGPGRGPSGPKGGPDKGRGKTGEKRVPGEKGDPPKKPKNKQPGSKKGKAGGPKKKSQPXKGGSPHGPGARRKT

SEQ ID NO: 361716 - protein, 64 aa, Zea mays
  Clone ID: MRT4577_93061C.1.pep
GADLQGAQEMARRRQQEVLPPAPRTMGALYPPPAAPPRQTSKCRSIYQRVIHRLIDRSTCSLDI

SEQ ID NO: 361717 - protein, 189 aa, Zea mays
  Clone ID: MRT4577_93062C.1.pep
MTNSKRLAGDLCSSRDNDLHLGRLNNSSDDLRTNTAVKRPSPTSPHEGRGQAVKAKESEGADRGFEPTDTAPANSGRPKAYQQVLTPILAEAAPEHEHRPRGVRRAGRHPGATDGTGKGDVVERILLGEGSGPRALLLIRGSKASPSEGFRQPPQSTRTSSPLLIRGSKAGPSEGFDSRPRALGLRAHY

SEQ ID NO: 361718 - protein, 164 aa, Zea mays
  unsure (1)..(164): unsure at all Xaa locations
  Clone ID: MRT4577_93063C.1.pep
APRPPRVRSFIAVFILAGQLTLTGHILTVAGVTVAICASPFVAASNLVALAVWPTWVAVAVXETIRKVTTYVLTRPGRELLFTVVSQDEKYKAKVCIDVIVQRLGDATAAGIYRWLFSSLEKKTSKVTLFALPLCFLWLVIAFHLGRLQTNLARVQAASAPSYS

SEQ ID NO: 361719 - protein, 74 aa, Zea mays
  Clone ID: MRT4577_93064C.1.pep
SHGICGPFIFRVILVERLFTYVVRPRSCLVLWNLKQQPLKAPTLLQDPLSRTRQICPRSAMFGIGATFDLPAPA

SEQ ID NO: 361720 - protein, 39 aa, Zea mays
  Clone ID: MRT4577_93065C.1.pep
YAVTDMFWGSQITMTHKFASVSVATVQSTILQRIFADKS

SEQ ID NO: 361721 - protein, 94 aa, Zea mays
  Clone ID: MRT4577_93066C.1.pep
RRFFFFFFVRKFHLAARQQTPEEADAALPKQTGDTAANSPRNNSNNRIHNFSGKLSRHCKSRHGIATLVASYPGTAKADTGSHLLHTLDDSNSN

SEQ ID NO: 361722 - protein, 85 aa, Zea mays
  Clone ID: MRT4577_93067C.1.pep
PCTETYASPTYPPSSRRAATPCKPPNDVIADEFHYGGLDTCSTVVKRFKISFDSGAHTHVTRAERSGHLRRADGDGSCRRDAAAL

SEQ ID NO: 361723 - protein, 59 aa, Zea mays
  Clone ID: MRT4577_93068C.1.pep
MVSMKLQKRIADSVLKCGKGKVWLDPNEFRQTSMGYYRQNIHTLAKAWFIIRKPQLDQF

SEQ ID NO: 361724 - protein, 89 aa, Zea mays
  Clone ID: MRT4577_93069C.1.pep
QRQAMVVSRNLRLLVKGAPREEKLHRYKPSPRTSMTVTLGQRDALAELPFMTLIGHIPGAVKPRDLFITRTRRMMGIKSKPYGTMPHVM

SEQ ID NO: 361725 - protein, 71 aa, Zea mays
  Clone ID: MRT4577_9306C.1.pep
GARNVFMPSYYHNLFKPGTWTHYFPPLLNPLRVFPPNFKGPLARKVFLRVTLKASFGGVDKPWPARKHYFF

SEQ ID NO: 361726 - protein, 248 aa, Zea mays
  unsure (1)..(248): unsure at all Xaa locations
  Clone ID: MRT4577_93070C.1.pep
MAGVGGSGGGGGDDAEMGGWTGLLHSSTKLLEQAAPTPHFPPLQRNLDQLEALSTKLKAKTIRSEAPSQSLSATRLLAREGINAEQLARDLKSFELKTTFEDVFPSEATTVEEYLQQLHEMAIVSSIQEAQKDNLKSFNNYMMQVLEDDWQKEKRDFLQSLSRLSTLPKRNTNLSTSGLGRPASMPPSTSSLHAPSGLPSAEVMPIPNKTIIEKKSSVYAGVVRDLXDSRGRSLPFNPATAFRAAYES

SEQ ID NO: 361727 - protein, 85 aa, Zea mays
  Clone ID: MRT4577_93071C.1.pep
KIEAVIWHSQSFHGGTPRCAQGRTRVPLYSYDTVTRATRPLQWRVRSTLRTITCMGMLANFLMTTTKGPYFFNALTLKYSTSLKF

SEQ ID NO: 361728 - protein, 509 aa, Zea mays
  Clone ID: MRT4577_93072C.1.pep
DLHPPGNCPLIGVSPVVPCLSCSPLISIFATTTNSTANQSLVYRSLLLVFKSETFFCSRPPPSTVATSLPLPPTPLLAVAAAAQAMDHEEVTEFLGQVPLLQCLPGSSIRRIAEAVQVKNYEPGDYVAREGEPVNGLYIIVDGQAEVSAPANAEEANRPDYVLNKYDYFGYGTNSSVHQVNVVALSKLTCFILPNQYGHLLQPKTIWNAEETPEHSLLEQILHLEPLEVDIFRGFTLPEAPTFRQVFGGQFIGQALAAASKTVDCLKMVHSLHAIFLVAGDNNIPIIYQVHRARDGSSFATRKVEAKQKGLVVFTLIASFQKEEVGFEHQAAIMPDVPPPEQLLNLEEIRERRLTDPRFPSQYRNLAAKKKFIPWPIEMRFCEGSASQHKPSLNYWFRARGELSDDQALHRCVVAYASDLLFSGVSLNPHREKGLKTYCLSLDHSIWFHKPVKADEWMLYVIESPSAHGGRGFVTGRMFNRQGELIMSLTQEALIRREKPRGPNPSPKL

SEQ ID NO: 361729 - protein, 41 aa, Zea mays
  Clone ID: MRT4577_93073C.1.pep
EPHAAHYHLLFGFNNNFDIFSLIHKKSQNWCYLLLISSSCV

SEQ ID NO: 361730 - protein, 57 aa, Zea mays
  Clone ID: MRT4577_93074C.1.pep
PSVSILRIHYYIRVAPPLLMLLRTKTHPNSCQLSGHVRWTSQDNTLKIQKGFFPNNL

SEQ ID NO: 361731 - protein, 84 aa, Zea mays
  Clone ID: MRT4577_93075C.1.pep
VYCAHVQHRRHIRIGMITYSTASWSAAADPSMHCCSATKTQSLLPLYVFRGCEKQQAQPHHQATPFGTHGSLIAGPMDRAPNRL

SEQ ID NO: 361732 - protein, 254 aa, Zea mays
  unsure (1)..(254): unsure at all Xaa locations
  Clone ID: MRT4577_93076C.1.pep
MEAQTCRLQPPTMAPFAPLPHQYNNTCKHLNTTTMAATSGNNNSNGSTATAAGGAAADGMAAYLQHLQQAGAEAAAKSGGGGGAARGEQCPRCASRDTKFCYYNNYNTSQPRHFCRACRRYWTLGGSLXRNVPVGGSTRKRPRXAPPPARQARSSGAARLRPHADDASSLATVVVDIVVAGTGTGTGTERRPPRLTVRARRRGRVAAAARRPRRRVVVRLRPRARTPDGGLTPGRGRTNARPRAHGGRRSSAAG

SEQ ID NO: 361733 - protein, 71 aa, Zea mays
  Clone ID: MRT4577_93077C.1.pep
SPPDTTAYEELRLRGFPRGLLPTNERAYTLNSSSGDFVVDLRSSCRIVLTAASYLTTFSDRLKGRLDDRRI

SEQ ID NO: 361734 - protein, 303 aa, Zea mays
  Clone ID: MRT4577_93078C.1.pep
RNRKLYNQVQDLKGSIRVYCRVKPFPKAQSDQRSTVDHIGENGEILIANPQKQGKDGRKIFTFNKIFGPSTSQSEVFADTQPLIRSVMDGYNVCIFAYGQTGSGKTYTMSGPDVTAEETWGVNYRSLNDLFEISQTRADSITYDVKVQMIEIYNEQVRDLLMTDGANKRLEIRNNSHVNGLNIPDANIVPVKCAQDVLDLMKVGQRNRAVGSTALNERSSRSHSVLTVHVQGKEVISGSTLRGCLHLVDLAGSERVDKSEATGERLTEAKHINKSLSALGDVISALAQKSSHVPYRNSKLTQV

SEQ ID NO: 361735 - protein, 110 aa, Zea mays
  Clone ID: MRT4577_93079C.1.pep
YLRHMNSVRSWIVCGAAEYRCCSVVEFRGTVLLRVLHQYMLYVHGDLVGVELDQRVARDDVEHYQCDSEQDHRVVEQCPHVVGDPPVVVQPCVLGECSRLVECAEVWALV

SEQ ID NO: 361736 - protein, 89 aa, Zea mays
  Clone ID: MRT4577_9307C.1.pep
QDSSLARLLPCRISRFVFRRNIGGLDFISRARPPVILLPASAPAAGERAVAAPLATPPRRGSEWTIGQSPPPHPHLSCYTRTRRMATDS

SEQ ID NO: 361737 - protein, 100 aa, Zea mays
  Clone ID: MRT4577_93080C.1.pep
EKPPPVFTPDGNDLVVTQKIPLAEAPTGDPAPVTTLDGGSLTVPLSSVIPPGYKEVVPGEGIPIPKGPSRKGHLRVKFDIKFPGRLPGGQKSGVKRLLGQ

SEQ ID NO: 361738 - protein, 91 aa, Zea mays
  unsure (1)..(91): unsure at all Xaa locations
  Clone ID: MRT4577_93081C.1.pep
TSASYRIDHSLLTLLRLSGHPSLKRESSRKTLGRGIVIFLSPSKKPSLSFTYIYLFQEVQSTTINGALYSILLPSEDFIGSGLXSFEDKSG

SEQ ID NO: 361739 - protein, 147 aa, Zea mays
  Clone ID: MRT4577_93082C.1.pep
KPQGSSIILLYLKNHQYRTEEKKARNERKWGKKEERKSSGCPATARRRGRPPQQHSRQEEGKRKGSSRCWVGRRRSVRCGGARNVRTNNNRGVRTAHRHGSERQAGREGPMRKRKPGRDDRGPHAGPEKGKLPQSEPRSNERANGRP

SEQ ID NO: 361740 - protein, 97 aa, Zea mays
  Clone ID: MRT4577_93083C.1.pep
LHLNHLFFSFNKLLLSSLNQLGTRILSDLLVSSLGGQTTALASRREIAANPDLLSPISSPRTIPAGWGSCPALSRALAIVSSRRNRCGLVYGGYSAR

SEQ ID NO: 361741 - protein, 285 aa, Zea mays
  unsure (1)..(285): unsure at all Xaa locations
  Clone ID: MRT4577_93084C.1.pep
RPGDLRLASLFYLLRPEAFLTSTGVAESSMVDKKQSSGAAMVVLGSAMLRLASAAVLPRQSPSSDPFTPIDPQNWVNPDNMTWDDYVEPPKTNWADPSRKGRDRNFNIAMITVDYPDSPFVVTLRANSDIFGNPQPLAAGLSRDDVPKFYHDLLNVPSEINQGHTLHEYWMGDSFGKYGVDLTVFGPYRMPSRSYQYGIDDEEGGFNEGACPEGPPCSVDLRTDALGAWRAEVGNETADAFELAFILSAGQDESSTWQEFGEMKFLSQRDVPPRVGPPXNSSLPH

SEQ ID NO: 361742 - protein, 78 aa, Zea mays
  unsure (1)..(78): unsure at all Xaa locations
  Clone ID: MRT4577_93085C.1.pep
GFNNGNSLXTFLLRTRRPAVGAARPGSAPPGRRPLRLRVSPASSYVYAALRACSVRDGRRAQVLLHVRHAALRRFCFI

SEQ ID NO: 361743 - protein, 171 aa, Zea mays
  Clone ID: MRT4577_93086C.1.pep
MASASKEEVIGKLNVRVVRGNNLVIADPLTHTSDPYVVLQYGAQKVKTSVQKKNSNPVWNEVLQLSVTHPTKPVHLEVFDEDKFTADDSMGVAEINITDIYDAAKLDLKHASDGTRIKTIYPVGVNYLGGESHVQWKDGKVVQDLILKLRKVESGLIVVQLEWVHVPGVKL

SEQ ID NO: 361744 - protein, 204 aa, Zea mays
  unsure (1)..(204): unsure at all Xaa locations
  Clone ID: MRT4577_93087C.1.pep
SRHSSLPVLSVPGFGFHLTIKPKHQCHLRFLDIKDSVIKELPDDISVLYNLQTLXRHLYTDGCTRLEGMPPELGQIASLRTITWFVVGSGLSCSSLGELKDLNIGGSLMLKQLENVPVGRRSAGAANLVELRVPSRKNKKELRQLSLEWTSGKEEGLQCHEVLEGLEAHDGLLALGIHYYQGTSFPSWMGMLKNILDRPSVVRL

SEQ ID NO: 361745 - protein, 62 aa, Zea mays
  Clone ID: MRT4577_93088C.1.pep
GSPRHETEVSFLPFKIWVEVKGIPRIWLGFCFEPSVLLAHSINNVGTRCTVPLRFMPADQLP

SEQ ID NO: 361746 - protein, 101 aa, Zea mays
  Clone ID: MRT4577_93089C.1.pep
MVEVSAVPEGIIKSVCCKTTTRTDSQERLVIVDDLEPSPEIDGETAKETATADKRWDDLAWKNAGNGITLGLLIALLMGPNMSRAAVTRPLDLMALDFTDA

SEQ ID NO: 361747 - protein, 79 aa, Zea mays
  unsure (1)..(79): unsure at all Xaa locations
  Clone ID: MRT4577_9308C.1.pep
MNPQQQRMAAIGTDKELSDLLDFSAMFSPPVNSGKTRPTTLGSSQFSXSGMDERGGTTSWGTGGQPSPSYDSXRGCTDS

SEQ ID NO: 361748 - protein, 148 aa, Zea mays
  Clone ID: MRT4577_93090C.1.pep
AKEVRRVGCCRGLGPRRPGRRRRHPTPLRRGRRQHREGRVEAQGRHGARRKSLALRPDSELAPTLGATATRHHGPPHGRPRRPPLSSLDAPHPPWLTRLPSHPTRHTLTFVSIAATDHLTSAVAGSGRGRHCDGPPHQRRCGIGEGGV

SEQ ID NO: 361749 - protein, 148 aa, Zea mays
  Clone ID: MRT4577_93091C.1.pep
LPTSTMNSSLTPRTDSNTKNTDQPQGVDRTTCYKNFTPLSPMTTVYTQASTLIVSTRNKEALEMIIFYILWAPTSAKRSRNMLTPARTKSTSRLSMPSTWNCRPLTQSTYSEMKYRSSLARHHERADWNQPTTEQLNRLIDQPPFNTG

SEQ ID NO: 361750 - protein, 120 aa, Zea mays
  unsure (1)..(120): unsure at all Xaa locations
  Clone ID: MRT4577_93092C.1.pep
RPPPVFRPGFRAFRPFALRFSCLSGASSVRVCLVSWSSSGGSWPCVAPPCGLSASSPSAVGSWGASSAWCCRRRRLSSLPFPLFRLLGRGFACXCGSVAPPPSALCGFSWXLWPFLILDR

SEQ ID NO: 361751 - protein, 42 aa, Zea mays
  Clone ID: MRT4577_93093C.1.pep
VRRGRTLAKKTKNCLLFLQCLILAIVVRFLAGVGDQFGFICI

SEQ ID NO: 361752 - protein, 64 aa, Zea mays
  Clone ID: MRT4577_93094C.1.pep
RFVPQVIIIVEKLPASGDQRRWRTWGNPSRPSWLRLHGECQAEYAAHFIRDGAVSTVCAVTDTA

SEQ ID NO: 361753 - protein, 103 aa, Zea mays
  Clone ID: MRT4577_93095C.1.pep
VTSYGFNIGSYIFYSHGLLSHISSCRIVPRVPPSVVSPATPSVQHLARPAAPPPCLGPIVARTATVPWPQEPSCPCAAVLLVRRRAAVPGSRLPVFANRYGED

SEQ ID NO: 361754 - protein, 175 aa, Zea mays
  Clone ID: MRT4577_93096C.1.pep
HNRISHAELFLLERIPLLPQGASNLRQRPTEMAAVMVSRQGRELQRYSASTGGRVVVGCVPYRVRGGDGEVEVLVISSQKKGPAGGVLIPKGGWELGRWCYRSRSYDATYEGFVLPLRVTAELDRWPEMAARRREWVSAAEAIARCPHPWMREALQRFSDTVAVAAETMHLASAL

SEQ ID NO: 361755 - protein, 67 aa, Zea mays
  Clone ID: MRT4577_93097C.1.pep
TLFLGGSRFEIQNKLVKKKKKKKKKKKKKKKKKKKKKKKKKKKKKKKIQKSRTNNKNIPLARPNYHL

SEQ ID NO: 361756 - protein, 204 aa, Zea mays
  Clone ID: MRT4577_93098C.1.pep
MLLLCKSSVLAVLLLHALSLPASALAVGLGRRHRRDVLPGPKGCDVFSGSWVRDDGSAEAAYTGYKCPVIDAEFNCQLYGRPDSDYLRYRWKPASCELPRFDGADFLTRMKGKTVMFVGDSLGRNQWESLVCLLHAAAPQSPSQLVSADPLYTYRFMEYELVVSFYRAPYLVDIDVVQGKRVLMLDDIARERPVWRGADVDLLS

SEQ ID NO: 361757 - protein, 188 aa, Zea mays
  Clone ID: MRT4577_93099C.1.pep
ENPLLPQGASNLRQRPTQMAAVMVSRQGRELQRYSASTGGRVVVGCVPYRVRGGDGEVEVLVISSQKKGPAGGVLIPKGGWELDESMDEAARREAAEEAGVLGETGPALGRWCYRSRSYDATYEGFVLPLRVTAELDRWPEMAARRREWVSAAEAIARCPHPWMREALQRFSDTVAVAAETMHLASAL

SEQ ID NO: 361758 - protein, 36 aa, Zea mays
  Clone ID: MRT4577_9309C.1.pep
MASDEGKLLVGGLSFDTNDQSLDQVSSKYGQISEVV

SEQ ID NO: 361759 - protein, 129 aa, Zea mays
  unsure (1)..(129): unsure at all Xaa locations
  Clone ID: MRT4577_930C.1.pep
EEPNPSKKQNQVLKASGKKWPAQKGTSNPTKKSQQKRGPPNKTKKNQRAGEKNKTWRGTKRITQFPFHPTVKGGKRDHFSPKNNRKRGPITRANRGKKGGNHWTRGTGPKPLEPGGPGXPPANPGPGPG

SEQ ID NO: 361760 - protein, 103 aa, Zea mays
  Clone ID: MRT4577_93100C.1.pep
ASLLGLAPADAARTFPCCLRFGHRVIPAASAQPSSRARVQCPPQASAPVPYPARACRYAAHRQAGVVAAVPVSGPGVVVVADCWRGVAPLPAGVHCRPVLEPN

SEQ ID NO: 361761 - protein, 58 aa, Zea mays
  Clone ID: MRT4577_93101C.1.pep
IFESQCGSLTQYGMKYMRAFAHICPSGIYEMKMRELCISVCSSYNSGRWSPMARAHSA

SEQ ID NO: 361762 - protein, 100 aa, Zea mays
  Clone ID: MRT4577_93102C.1.pep
WYYTQREGARTCPSDSFCGSREWPTGDNIASQARHASTEDTRLRGSWRPASARGGGRPYASVRACRARGNPRSRGHRVALVHGQTSLQALLTVLNSCGHE

SEQ ID NO: 361763 - protein, 57 aa, Zea mays
  Clone ID: MRT4577_93103C.1.pep
LIHNNICKLNHHMSATDIYEIAIHFDEVTRKYQSRCLTWVACPVVCNCSGSSGGVHS

SEQ ID NO: 361764 - protein, 90 aa, Zea mays
  Clone ID: MRT4577_93104C.1.pep
ISPCWAYCRQSSTSNAGGMVASHSFSCVSISSGASRLASSGGSAGGPVGGVTGMRKGMKKLRCGLVAAGDAERCGGLGGGACLVRVTCCW

SEQ ID NO: 361765 - protein, 48 aa, Zea mays
  Clone ID: MRT4577_93105C.1.pep
ILRKTRFPHVHGAGEKKSPETILDHETMRGLWQQMFGLGFSGWFYDTL

SEQ ID NO: 361766 - protein, 91 aa, Zea mays
  Clone ID: MRT4577_93106C.1.pep
SKLVAMRRRLVTLPKHTRVSFCSSFFRLSARADSFLLLLCAVEWFFLSPADLEKVEAAVSPESSLVAHHGPRIGVRSLVQAHVPSLRGMAC

SEQ ID NO: 361767 - protein, 262 aa, Zea mays
  unsure (1)..(262): unsure at all Xaa locations
  Clone ID: MRT4577_93107C.1.pep
SFYKLILGQELNIYDIQSLDSELAXCLVEFQALACQRKYAESNLTRDCQISDLTYRGCRIEDLAIEFALPGYPEYVLSPGSRSDCLNAENLEEYVRHVVDATVKSGIARQMEAFKSGFNEVFPLKKLQVFSEDELERLLCGEQDTWDFAKLVDHIKFDHGYTSSSPPVINLLEIIQEFGSIQRRAFLQFITGSPRLPPGGLAALNPKFTVVRKNNSNDVDHDLPSVMTCANYLKLPPYSSKEKMREKLLYAITEGQGSFHLS

SEQ ID NO: 361768 - protein, 751 aa, Zea mays
  unsure (1)..(751): unsure at all Xaa locations
  Clone ID: MRT4577_93108C.1.pep
GWPGWPKVSIDVNSQKAESPPSDTALEIKYADDDSQEQDSTPSQKADSPSEGLTCGSQNLPAETCPKQGTSSSGQAERNTTILSDYTIQQKLVFSLNGKELDRSVTLYQSILQDHINAGSEIILDMQFWRSVHDITFKAANPEANRTAVNPEANDSPRHSSTAMSSINENTTGFTWQMLPFFSSMLLGKLPCKLDRSGASYDILFMLHILEGLNRYSFHLVSDERNRSFAHGRITNLDDLKAEVFSIPQQEFVSAKLTDKLEQQMHDPLVSRSCCLPLWCIELMSACPFLFSFEARWKYFQLTAFGSLKNHHGHMMDASVNSVAERGSSHSRKKFKVDRDDILVSAAKMMKSHAKSNALLEVEYKEEVGTGLGPTMEFYTLISHEFQKSGLGMWRGELPCKSGTHDTHVSRFVVASNGLFPRPWSASEDPASFQEVSERFHLLGLVVAKAIKDNRILDIPFSKAFYKLILGQELNIYDIQSLDSELAICLVEFQALACQRKYAESNLTRDCQISDLTYRGCRIEDLAIEFALPGYPEYVLSPGSRSDCLNAENLEEYVRHVVDATVKSGIARQMEAFKSGFNEVFPLKKLQVFSEDELERLLCGEQDXGCMHLSSVGICSCFVIILFWLLISWSEQFAKLVDHIKFDHGYTSSSPPVINLLEIIQEFGSIQRRAFLQFITGSPRLPPGGLAALNPKFTVVRKNNSNDVDHDLPSVMTCANYLKLPPYSSKEKMREKLLYAITEGQGSFHLS

SEQ ID NO: 361769 - protein, 87 aa, Zea mays
  unsure (1)..(87): unsure at all Xaa locations
  Clone ID: MRT4577_93109C.1.pep
RFSKQLPLFVPTMNFKNRKQINPTQRTEIPDHEISNPHAVMHRPFPIPQDASPVLEYMFLFESSVTELRKQEEKFVDKQSEVDLPXQ

SEQ ID NO: 361770 - protein, 82 aa, Zea mays
  Clone ID: MRT4577_9310C.1.pep
VALADYSTVEATPTLLRGLRILNSDPATPTRTIAIILVRSLVIAVVRYTEFEGVSYRKDGDDFDALISDLTADTIRHVQGCS

SEQ ID NO: 361771 - protein, 88 aa, Zea mays
  Clone ID: MRT4577_93110C.1.pep
APLTLTPGWLPKLVWVCISYREYTHGLSSMFMLPAGQSSVPQILLHGAWGVLKMCHFSIPLLVLQPPCDNRFLCLVPRQQRILFRFLS

SEQ ID NO: 361772 - protein, 43 aa, Zea mays
  Clone ID: MRT4577_93111C.1.pep
LLNLPFQRGKKTPVEQAIRGALGSPISRDHLPLPCGPIYLLAI

SEQ ID NO: 361773 - protein, 96 aa, Zea mays
  Clone ID: MRT4577_93112C.1.pep
DMQLMSGPSQNRPSTPCCCIRFTRHSCHMSPCSLTMSWVSHRLSMVSLCTVVWTYSSFSASMFLAPFARLISSNRRRSMSLRSTPRVRGRVGVRVG

SEQ ID NO: 361774 - protein, 63 aa, Zea mays
  Clone ID: MRT4577_93113C.1.pep
VLRRIALLLCPHREFFGRVLIYFPLRLIFSELGVDEGDDRRLVQTFVEHLVNITLLTLSSPDS

SEQ ID NO: 361775 - protein, 213 aa, Zea mays
  unsure (1)..(213): unsure at all Xaa locations
  Clone ID: MRT4577_93114C.1.pep
MEGGMSSLEAAMKASSSMASSMARNADPNQQTLRPNLVEQFYFPRPGQSLPGIPPFFGPPSSLYLPNDNEAKFGNNFESNPSQNTDWNPQAIVSNLTFLEQKIKQVKDIVQSMSNRENQVAGGSCEVAAKQQLITADLTSIIIQLISTAGSLLPSMKNPLLSSNPAVRQLGNTLGSPMGFGMNANQRPSVDSKTDIPXDTXKTSDYEELMNTL

SEQ ID NO: 361776 - protein, 227 aa, Zea mays
  unsure (1)..(227): unsure at all Xaa locations
  Clone ID: MRT4577_93115C.1.pep
MEGGMSSLEAAMKASSSMASSISRNADPNQQTLRPNLVEQFYFPRPGQSLPGIPPFFGPPSSLYLPNDNEAKFGNQFESNPSQNTDWNPQAIVSNLTFLEQKIKQVKDIVQSMSNRENQVAGGSCEVAAKQQLVTADLTSIIIQLISTAGSLLPSMKNPLLSSNPAVRQLGNTLGSPTGFGMNANQRPSVDSKTDIPDTGKTSDYDELMNTLXPAQAERDELINAQS

SEQ ID NO: 361777 - protein, 223 aa, Zea mays
  Clone ID: MRT4577_93116C.1.pep
MEGRMTSLEATMKVSSLMASSMSRNADPDQQTLRPNSVEQFYFPRPGQSLPGIPPFFGPPSSSLYLPNDNEAKFGNQFESNPSQNTDWDPQAIVSNLTFLEQKIKQVKDIVQSMSNRENQVAGGSSELAAKQHLVTADLTSIIIQLISTAGSLLPSMKNPLLSSNPAVRQLGNTLGSPMGLGMNANQRPSVDSKTDIPDTGKTSDYDELMNSLNPTQDERDEM

SEQ ID NO: 361778 - protein, 518 aa, Zea mays
  Clone ID: MRT4577_93117C.1.pep
MEGGMSSLEAAMKASSSMASSMARNADPNQQTLRPNLVEQFYFPRPGQSLPGIPPFFGPPSSLYLPNDNEAKFGNNFESNPSQNTDWNPQAIVSNLTFLEQKIKQVKDIVQSMSNRENQVAGGSCEVAAKQQLITADLTSIIIQLISTAGSLLPSMKNPLLSSNPAVRQLGNTLGSPTGFGMNANQRPSVDSKTDIPDTGKTSDYDELMNSLNPTQAERDEMIKCPNPCGGEGSEPTPMEDHDVKESDDGGEGENLPPGSYVVLQLEKEEILAPHTHFCLICGKGFKRDANLRMHMRGHGDEYKTPAALAKPTKDSGADHAPVTRYSCPFVGCKRNKEHKKFQPLKTILCVKNHYKRSHCDKSYTCSRCNTKKFSVIADLKTHEKHCGRDKWLCSCGTTFSRKDKLFGHVALFQGHTPALPMEDVKVSEASEQPQDSEPMNEMARSNVYSFPCSSSDGISNLDMKMADDVRGYFSPLNFDPCFGALDDFTRPGFDISENPFSFLPSGSCSYGQQNGDS

SEQ ID NO: 361779 - protein, 150 aa, Zea mays
  Clone ID: MRT4577_93118C.1.pep
RPGFHVHKYSAAVLHNLLAFEKHFYWAHGACVTAHVARMKGLIRCPQDAAMLRKRGVLASTRRTDTELVALFRELGEETVGARLPDDYGEMLDAVAGHRGRLVNGWCGGFVLHFFPSPWVAVSLAVAAALIFVPSMLQTVYTMFGYFKSN

SEQ ID NO: 361780 - protein, 278 aa, Zea mays
  unsure (1)..(278): unsure at all Xaa locations
  Clone ID: MRT4577_93119C.1.pep
MGDGAATLLSTAGYDGEDRISALHDDLLRHIISRLPVTDAARTASLGPRWRHLWRSTPLVLDDAHLPEPSRAASVLRVLADHPGPFRAVLLTDCRPASLNRELAHWPRLLAAKGTQELALFNRHVYPHLPADILRCSSLQRLSLSWWKFPVALSRSADVFLPHLRKLDMISISMTEHDLDYLLAASPVLQTLTLARNSPKRVHLRSQSLRCVLLGLPXMEKFAVMDAPLLERLILLEPSIAGCDRVRIKIACAPSLRVLGYWXPRXHKLQIGTMSSSL

SEQ ID NO: 361781 - protein, 336 aa, Zea mays
  Clone ID: MRT4577_9311C.1.pep
MKHLRTSPQHWRPPLVNSFDHLRQALTFVMPPKKASATGAAALQPLDPNQETLSLREARSQKRKATSSTLQEEELDQEIRDMEIIHQQVQRKKEKMARLADLQRKIDEATEKVHHLIQDEQDRRPQHRELHQEGLFNEDGWYDDFNHDTFIFDDASPLAAELQATPWPPSYKPPQLPMYDGHSDLKQFLMSYEATISSYGGNTAVMAKSFVMAVRNVAQTWYSSLRPGTITLWQKLKDMLAYVRRFLRLRAQAPTVPNEIVIQAMIKGLRPGPTAQYFARKPPQTLEKLLQKMDEYIRADNDFRQRREEAYRFSEMTRGFGGRIHPRHVRSIHNST

SEQ ID NO: 361782 - protein, 81 aa, Zea mays
  Clone ID: MRT4577_93120C.1.pep
APSIEATPPGACAGSPLVHQLGDAPLDRPQCRLDRCRSKQIIFFFGTDCLPVWQLGYTNQNAILFEAWSRGGGFNYLLIHR

SEQ ID NO: 361783 - protein, 168 aa, Zea mays
  Clone ID: MRT4577_93121C.1.pep
MGMNLSFAVAPMVSMDTESSMTEWIEERQKHSEILKEKLAVAQNRMKLQADKNISEREFQVGEMVLLKLQPYVQTSVLKPFIPSYHPVYADFSQVADLSSVEVYPIKIVERRLVQKESYPVVQVKVAWANLSEAALTWEDFEVLKKRFPNALDWGQSSLGPGEDVSTM

SEQ ID NO: 361784 - protein, 88 aa, Zea mays
  unsure (1)..(88): unsure at all Xaa locations
  Clone ID: MRT4577_93122C.1.pep
EVVDVGPLQPVPDIMRSRRGRSVLKSESGGVXTRPYRSADSTRPTRQRPNRRSRHLHGRPRRRSPEGGRPRTRGDRWRVRSVDRPRRL

SEQ ID NO: 361785 - protein, 87 aa, Zea mays
  Clone ID: MRT4577_93123C.1.pep
PTRPGSRMAAPRPLLAIAAGRRASGGRGCRQRRPRQAPDARRARGTPQPRQVHSRAEETRPRDLLQRAGRVRHHGGRVRGQGHARAG

SEQ ID NO: 361786 - protein, 103 aa, Zea mays
  unsure (1)..(103): unsure at all Xaa locations
  Clone ID: MRT4577_93124C.1.pep
GVSSVQAQLQSLEPKPVPHXSNQSGQNAAPAPGMQVYGSGNGDATSNYSLNFAPSTSAPSSYVAGLLEGSMNCIQDHPTSTRAGLDNGGNSGPVAKDNSTHCM

SEQ ID NO: 361787 - protein, 62 aa, Zea mays
  Clone ID: MRT4577_93125C.1.pep
QGCQINVELEWYTFFQDKFNMKHRKPRRKIIHNVQISAILISLPYKIPFQNLDHKYVNLLFC

SEQ ID NO: 361788 - protein, 75 aa, Zea mays
  Clone ID: MRT4577_93126C.1.pep
TMTFSTPGGWMRGSSLASALRRGVRRRGCGCAGGRHSSMVNAYEMFSRDIRNAVACEAAYRFERHEIFTWWLHAC

SEQ ID NO: 361789 - protein, 66 aa, Zea mays
  Clone ID: MRT4577_93127C.1.pep
GAASRVLLSIRSTLTWAGHPSFSCRILPPLFNQLRLGYINTNPENPRVTTHNRLVGHPPLASWSYI

SEQ ID NO: 361790 - protein, 134 aa, Zea mays
  Clone ID: MRT4577_93128C.1.pep
QLRQAYLANARTTLIAPVTGYVAKRTVQLGQRVQPGTALMAVIPLDQLWIDANFKETQLRDMRIGQPVDIEADLYGSSVKFSGTIDSLGAGTGSAFALLPAQNATGNWIKIVQRVPVRIHINAEELAKHPLRVG

SEQ ID NO: 361791 - protein, 55 aa, Zea mays
  Clone ID: MRT4577_93129C.1.pep
VPSPFSTKPGNPGLDLRGPGAKGPSPLYNAPGGFKAPQKNIAPPPSERGSQSTPP

SEQ ID NO: 361792 - protein, 336 aa, Zea mays
  unsure (1)..(336): unsure at all Xaa locations
  Clone ID: MRT4577_9312C.1.pep
MPPKKASVTGATALQPLDPNQETLSLREARSQKRKATSPTLQEEELDQEIRDMEIIHQQVQRKEEKMARLADLQRKIDEATEEFLMSYEATISSYGGNTAVMAKSFVMAVRNVAQTWYSSLPPGTITSWQKLKDMLVTNFQGFQTKPVTAQALFQCTQDHEEYLQAYVRRFLRLRAQAPTVPNEIVIEAMIKGLRQGPTTQYFARKPPQTLEKLLQKMDEYIRADNDFRQRREEAYRFSEMTXGFGGRIHPRHVRSINNSTQSDDKGSXSXRSQYTSQSLGQQQSSFRPPAPRGRGARGFGGRFGDQPRVYCLFCGEDKGHTTRMCHVTIQKQKEI

SEQ ID NO: 361793 - protein, 380 aa, Zea mays
  Clone ID: MRT4577_93130C.1.pep
MKKEEVASPAAATVVLLLLSSSLAAVSGQPQPQPQPGGSKQTAANNPRLQKAYVALQALKRAVTEDPKNLTRSWCGPDVCGYFGVYCAAAPDEPRAQTVAGVDLNHGDLAGTLPEELGLLADLALLHLNSNRFAGTLPESLPKMRLLHELDVSNNRLSGGFPQHILCLPNVKYVDLRFNELRGPVPPALFDKPLDAVFLNDNAFDFELPDSLGNSPASVLVLANLRLRGCIPRSVGRMAGTLAELVALNSGLRSCLPQELGWLRELTVLDLSSNQLQGMLPESMAGMHSLQQLHVERNQLWGHVPEGVCALPALRNFTYSYNYFCSEPSRCLDVRHVDDRQNCIAARPDQRPADQCLAFLHRPPVRCDDSGCFAPPPPHY

SEQ ID NO: 361794 - protein, 67 aa, Zea mays
  Clone ID: MRT4577_93132C.1.pep
TIGEFDKTSLIIQLKNKNLKTCTQPSSVFWLVLLLQRCTTKITCTKDECKIHIFIKLMTSLTIYTNA

SEQ ID NO: 361795 - protein, 54 aa, Zea mays
  Clone ID: MRT4577_93133C.1.pep
VMLLQRIDAWRLPYHFFGEWKRIKKQALAPVHHPGNRLSCHASQYNCRDQDTLR

SEQ ID NO: 361796 - protein, 79 aa, Zea mays
  unsure (1)..(79): unsure at all Xaa locations
  Clone ID: MRT4577_93134C.1.pep
MFHQPTSFNYDXEYHXSFVHXRLPXYDNITXPTLVLKHILKNLRIRQLIFPNGDLVHAVRALKRLGLADCFEGTTCFQT

SEQ ID NO: 361797 - protein, 44 aa, Zea mays
  Clone ID: MRT4577_93135C.1.pep
MFVCSLTMPITGGRLNTGGWQGIWLCEHLDHASPCKIVITLNGG

SEQ ID NO: 361798 - protein, 54 aa, Zea mays
  Clone ID: MRT4577_93136C.1.pep
KVCSWIPIIFGAQSLANIKNFENDLNHLSMAFMFLFMGLLTNYFGPPCPASPKP

SEQ ID NO: 361799 - protein, 80 aa, Zea mays
  unsure (1)..(80): unsure at all Xaa locations
  Clone ID: MRT4577_93137C.1.pep
CCSRGLRAGASXNXRRXXAEAGXATRAADGDPAGSLADTLACXRXXHPRRRHRARAQEHRXPRPDHRLDPYVAVVKIRLS

SEQ ID NO: 361800 - protein, 80 aa, Zea mays
  Clone ID: MRT4577_93138C.1.pep
LKHYHKLQHIPSLLLQKMCLFIVYIYQQTYTGTLLSFHQVSLKLMYLGELEKEYCRPCCCWLMRLQHQPDTHLESTLGGQ

SEQ ID NO: 361801 - protein, 376 aa, Zea mays
  Clone ID: MRT4577_93139C.1.pep
CERRKRAVVASVARANRGKIDAALEDLSVESAVDLQKVLKTSTFTSRKDAFNTLLANIHLFQSRLGAMLFLISALLSRGLEDIQADRDDPSQPLVTAPFGHASQEIVNLLLCGEAVPNVFDGKMDLGGGMSLKGIPNNVEVGFLTLLESLNLCKVGQYLKCPKWPIWVVGSESHYTVLFALNPNVQEENELEERESKIRRAFDAQDQSGGGGFISVEGFQQVLRDTDINFPSDKLEDLCNAGIIVWSEFWQALLQLDKRAGGMKDPTGLMGKKQFTIFHFNGIAKSVLNGNASAGGSCPIQRPRLCKLNVTVPPRWTQDEYLADVVSASTSSSKDDSILSLAPPGQTNQHAPLVDCIRTRWPRAVCSWVGDVPSIV

SEQ ID NO: 361802 - protein, 302 aa, Zea mays
  Clone ID: MRT4577_9313C.1.pep
MEIIHQQGQRKKENMARLADLQRKIDEATEEVRHLAQDEQDRRPQHRELRQEGLFNEDGWYDDFNHDTFTFDDASPLAGERQAIPWPQSYKPPQLPMYDGHSDPKQFLMSYEATISSYGGNIAVMAKSFVMAVQNVAQTWYSSLRPGTITSWQKLKDMLAMIKGLQPGPMAQYFTRKPPQTLEKLLQKMDEYIRADNDFRQRREEAYRFSEMTRGFGGRIHPRHVRSIHNSTQSDDKGSQPQRSQYTSQSSGQQQSSFRPPAPRDRGARGFRGRFGDQPRKIYCLFCGEDKGHTTRMCQITI

SEQ ID NO: 361803 - protein, 66 aa, Zea mays
  Clone ID: MRT4577_93140C.1.pep
GVFGLAFGFGFCPLKAKSQPKGWIQEAAFSKSRLSRSAKLKAPLDLLLVAFGWNCENVYRRTFNDF

SEQ ID NO: 361804 - protein, 180 aa, Zea mays
  Clone ID: MRT4577_93141C.1.pep
MMCLAGSVFPLGIPQANTEPARHIISRINPSCASPPAMSVAIRSGELLACPVALRRAPLAVSVVSVRMRARGAVAVRAEATAEGVGKEGKKAAGKKKPASGITKPKPISTELREFVGGAAELPRTEAIKLVWAHIKGNNLQDPNNKKIIICDEKLKKIFGGRDRVGFLEISGLLNPHFQK

SEQ ID NO: 361805 - protein, 99 aa, Zea mays
  Clone ID: MRT4577_93142C.1.pep
IMCSKVLGDGSNVFPCTDHTLVACIQVFHVSKPAIVDHVVQLVQHSYACLWFSTIFPSMYQPSRHVYHVRSIVFKYHSLSVLSPICVVHILVMDISCSH

SEQ ID NO: 361806 - protein, 95 aa, Zea mays
  Clone ID: MRT4577_93143C.1.pep
AQPKHPPFTTNLKTHSRFNCSRDYKTNTHIYNDDSEMPRKRGMSTPKSQSNPGHQAKGKTRDSGPFFSTSLTLTIGVLAIGVLVPLSYGLVWRYK

SEQ ID NO: 361807 - protein, 101 aa, Zea mays
  unsure (1)..(101): unsure at all Xaa locations
  Clone ID: MRT4577_93144C.1.pep
DNTMEGLRVNVQRLKRYKAKLVVFTRRARKGKVGHSTIEELTTATQVQGDYMPITSGEKHFVXAVNVTHEINAVMSYHKLRLERVNTKHLXTHQKKAAVAQ

SEQ ID NO: 361808 - protein, 169 aa, Zea mays
  unsure (1)..(169): unsure at all Xaa locations
  Clone ID: MRT4577_93145C.1.pep
MRRRHRTPPRIAALAPTSVSVKKFAVFLAHSSCLGRTRSPTRRSLNADDNGDCVLDLPSPSYLDWNLXGDNASDPXGLVEXDPDNQTWLVQVXMENCRCTMLXGAGMLILEELTKAELTNVPQIYNAXRSXYFAAPPTMXLXQLILLHDVETRLGLDIKNPPSENASLI

SEQ ID NO: 361809 - protein, 38 aa, Zea mays
  Clone ID: MRT4577_93146C.1.pep
MDELEMDEEVRPEFPWPYCYEDHDVGSLCAHLEEEHPF

SEQ ID NO: 361810 - protein, 129 aa, Zea mays
  Clone ID: MRT4577_93147C.1.pep
MFALRRLIARPVAMPIMRVATCQMHVTPRRFASADQPPNMESMMNDPLIRDTFEKLSRHPPAIAAMQRMGEVIKSKGLDASKPPSKMDLMKLMMDKEFREASTELTTEMQNAGVEINPDVFMKMVQGEK

SEQ ID NO: 361811 - protein, 127 aa, Zea mays
  Clone ID: MRT4577_93148C.1.pep
STVSRMGYAKHQTSDDANRTVHDTAIHLGILSNTIRVRMAWGYRRMSGGEGLLKRGAQPWKERRRGALVSMAGAGASAREERGWEWLLASCRGTQKKSAERERPWRRCSSRRGRSTQGEMADGPMDA

SEQ ID NO: 361812 - protein, 71 aa, Zea mays
  Clone ID: MRT4577_93149C.1.pep
NNWLKLGGVQNINLRSVLNQACTTHKECFSESRSGGARFMVLDHRTHINPLAVRCVAQNALWYNVHCGSHT

SEQ ID NO: 361813 - protein, 86 aa, Zea mays
  Clone ID: MRT4577_9314C.1.pep
RLMRSKTLPESIAYTNKAPTGFHVTSQHEHHVHSSPRAACTRLSRTSTGSQDKNMLRPIILESHIYLGQRHLKHYRSTVNFIAMLK

SEQ ID NO: 361814 - protein, 397 aa, Zea mays
  unsure (1)..(397): unsure at all Xaa locations
  Clone ID: MRT4577_93150C.1.pep
MEIIHQQVQRKKEKMARLTDLQRQIDEATKEVRHLVQDEQDRRPQHRELHQEGLFNNDGWYDDFNHDTFTFDDASPLAAELQAIPWPPSYKPPQLPMYDGHSDPKQFLMSYEAIISSYGGNAAVMAMSFVMAVRNVAQTWYSSLRPGTITSWQKLKDMLCTQDHEEYLQAYVRRFLRLRAQAPTVPNEIFVEAMIKGLRPGPTAQYFARKPPQTLEKLLQKMDEYIRDDNDFRQRREEAYRFSEMTRGFGGRIHPRHVRGSQQQRPQYSSQASGQQQSSFRPPAPRGRGXQGFRGRYGDQPRKIYCLFCGEDKGHNTRTCQITVQKQKEIAEAEAQKNQPKQVLHTASCHSSYIPEYVGNHPAASVASASQPQVSWPQLPPPPPLQPVYSRASFMSK

SEQ ID NO: 361815 - protein, 92 aa, Zea mays
  Clone ID: MRT4577_93151C.1.pep
GGALGPGSKKGKEGGFFLARGRETIELGKGGDHKNAMPWSGLGSRVGVLGGGQGPAPVLGGKKGGSLEGVGLAPALKVKVVVFFLVGKKGQL

SEQ ID NO: 361816 - protein, 414 aa, Zea mays
  Clone ID: MRT4577_93152C.1.pep
MPPKKASTTGATALQPLDPNQETLSLREARSQKRKATSPTFQEEELDQEIRNMEIIHQQVQRKKEKMARLANLQRQIDEATEEVRHLAQDEQDRRPQHRELHQEGLFNDDGWYDDFNHDTFTFDDGSPLAAELQAIPWPPSYKPPQLPMYDGHSDPKQFLMSYEATISSYGGNAAIMAKFLRLRAQAPTVPNEIFIEAMIKGLRLGPTAQYFARKPPQTLEKLLQKMDEYIRADIDLRQRREEAYRFSEMTRGFGGRIHPRHVRSIHNSTQSDDRGSQQQRPQYSSQASGQQQSSFRPPAPRGRGARGFGERFGDQPRKIYCLFCGEDKFHTTRMCHVTIQKQKEIAEAAAQQNQPKHVMHTASYHSPYIPEYVGNHPSASVASANQPQASWPQPPPPPPLHTAYSRGQQPERS

SEQ ID NO: 361817 - protein, 245 aa, Zea mays
  Clone ID: MRT4577_93153C.1.pep
MEMLHQQVQKKKEKIARLADLQRQIYEATEEVRHLAQDEQDRRPQHRELHQEGLFNDDGWQCSCHGQVLHHGSQECGSNMAYVRRFLRLRAQAPTVPNEIVIETMIKGLRPGPTAQYFARKPPQTLEKLLQKMDEYIHADNDFRQRREKAYRFSEMTRGFRGRIHPRHVRSIHSTQSDDRGSQQQMPQYSSQASRQQQSYLRPPAPRGRGSRGFGGRFGDQPRKIYCLFCGEDKGHNTRMCHVTI

SEQ ID NO: 361818 - protein, 99 aa, Zea mays
  Clone ID: MRT4577_93154C.1.pep
IFFSFFFFFLGGFLNPNRVFPPFPKFKTVHPIFPKNQTKHIPPKNISQRKKKFSTKKKIFKPGSPPNKGFPHTYNLEQGATPKLFKKTCLFRPIKPRTF

SEQ ID NO: 361819 - protein, 504 aa, Zea mays
  unsure (1)..(504): unsure at all Xaa locations
  Clone ID: MRT4577_93155C.1.pep
MPPKKVSAPGATVLQPLDPNQETLSLREARSQKRKATSPTPQEDELDQEIRNMEMLHQQVQKKKEKMARLADLQRQIDEATEEVRYLAQDEQDRRPQHRELHQEGLFNNDGWYDDFNHDTFTFDDASPLVAELQAIPWPPSYKPPQLPMYDGHSDPKQFLMSYESTISSYGGNAAVMAKSFVMPVKNVAQTWYSSLRPGTITSWQKLKDMLVTSFQGFQTKPVTAQALFQCTQDHEEYLQAYVRRKPTQTLEKLLQKMDEYIQADNDFRQRREEAYMFSEMTRGFGGRIHPRHVRSIHFTQNDDRVSQQHKPQYSSQVLGQQQSYFRARAPRGRGVRGFGARFGDQPRKIYCLFCGEDKGHTTRMCHVTIQKQKKIAEAAAQQNQPKQVMHTASYHSPYIPDYVGNHPAASVALASQPQASWPQPPPPPPLQPAYSRGQQPEXGSQQTHQQRDFREDSEARTVNSPLSRPVAGQSSSLEGLHHRLHEEQERRRQEQQGSSFSLQ

SEQ ID NO: 361820 - protein, 97 aa, Zea mays
  Clone ID: MRT4577_93156C.1.pep
ATLSSSLHLPCNLCSGPPGKTLGKCSCIFPAPRDGFLRTGSKCMDIRSGTLSIVVPSNVSPSLRDQVVIVMVTLGERSMCFTRDFKCVNEEVSYLRV

SEQ ID NO: 361821 - protein, 67 aa, Zea mays
  unsure (1)..(67): unsure at all Xaa locations
  Clone ID: MRT4577_93157C.1.pep
RDESHRSCVHHRRAXLTARNPRRVTRRXTIALXRVPASVTXSTALTRDVXCDTLXAYQLSHITSIAL

SEQ ID NO: 361822 - protein, 319 aa, Zea mays
  Clone ID: MRT4577_93158C.1.pep
MARLADLQRQIDEATEEVRHLAQDEQERRPQHRELHQEGFFNEDGWYDDFNHDTFTFDDAFPLTTELQAIPWPPSYKPPQLPMYDGHSDPKQFLMSYEATISSYGGNAAVMAKSFVMAVKNVAQTWYSSLRPGTLTSWQKLKDMLVTNHEEYLQAYVRRFLRLRAQAPIVPNEIVIEAMIKGLRPGPTAQYFARKPPQTLEKLLQKMDEYIRADNDFRQRREEAYRFSEMTRGFGGRIHPRHVRSIHSTQSDDRGSQQQRPQYSSQASGQQQSSFQPPAPRGRGARSFGGRFEDQPRKIYCLFCGEDKGHTTRMCHVTI

SEQ ID NO: 361823 - protein, 126 aa, Zea mays
  Clone ID: MRT4577_93159C.1.pep
MANPRVFFDMTVGGAPAGRIVMELYKDAVPRTVENFRALCTGEKGVGKSGKPLHYKGSAFHRVIPDFMCQGGDFTRGNGTDEKFVHKHTKPGILSMANAGPNTNGSQFFICTVPCNWLDGEHVVFG

SEQ ID NO: 361824 - protein, 408 aa, Zea mays
  Clone ID: MRT4577_9315C.1.pep
MLAMGSEEWELYPSSDIGSQVIEYRPVSEDSDDDQNGDVAVSLDVVLPDDLLEKVLSFLPVASIIRSGSVCKRWHEIVHARRHAWSKIVPQKPWYFMFTCSEDAVSGFAYDPSLRKWYGFDFPCIEKSNWSTSSSAGLVCLMDSETRRRIVVCNPITKDWKRLLDAPGGKTAGYSALAFSVDIRSHHYTVAVARSNQVPSEYYHWELTIHLYESVSGSWMTPFTGVLVGWRGGDECVICDGVLYYLLYFTGILVNNNEHRHCLVMYDLTARPNHTSLISMAIPVPCVLTCGRLMNLSKKLVLVGGIGKQDRPGIIKGIGIWELHNKEWREVARMPHKFFQGFGEFDDVFASCGADDLIYIQSYGSPALLTFEVNHKSWKWSVKSPVSKRFPLQLFTGFSFEPRLDVAL

SEQ ID NO: 361825 - protein, 456 aa, Zea mays
  Clone ID: MRT4577_93160C.1.pep
MEMLHQQVQRKKEKMARLADLQRQIDEATEEVRHLAQDEQERRPQHRELHQEGFFNEDGWYEDFHHGTFAFDDASPLAAELQATPWPPSYKPPQLPMYDGHSDPKQFLMSYEATISSYGGNAAVMAKSFVMAVKNVAQTWYSSLRPGTITSWQKLKDMLVTSFQGFQTKPVTAQALFQCTQDHEEYLQAYVRRFLRLRAQAPTVPNEIVIEAMIKGLRPGPTAQYFASKPPQTREKLLQKMDEYIRADNDFRQRREEAYRFSEMTRGFGGRIHPRHVRSIHSTQSDDRGSQQQRPQYSSQASGQQQSYLRPPAPRGRGAKGFGGRFGDQPRKIYCLFCGEDKGHTTRMCHVTIQKQKEIAESAAQQNQPKQVMHTASYHSPYIPQYVGNHPAASVASASQPQASWPQPPPPPLLQPAYSRGQQPEASQQAHQQRDFREESEARTVNSIVPESKHIY

SEQ ID NO: 361826 - protein, 171 aa, Zea mays
  Clone ID: MRT4577_93161C.1.pep
MANPRVFFDMTVGGAPAGRIVMELYKDAVPRTVENFRALCTGEKGVGKSGKPLHYKGSAFHRVIPDFMCQGGDFTRGNGTGGESIYGEKFADEKFVHKHTKPGILSMANAGPNTNGSQFFICTVPCNWLDGKHVVFGEVVEGMDVVKNIEKVGSRSGTCSKQVVIADCGQL

SEQ ID NO: 361827 - protein, 79 aa, Zea mays
  Clone ID: MRT4577_93162C.1.pep
GCPGQVQVDPPPWVFGGQGQSVFVPQQPLRFCWGKNGLKMSGGFFLFFGLKMLFVGPLDCLCSHALGRGKFCLNLLAAG

SEQ ID NO: 361828 - protein, 89 aa, Zea mays
  Clone ID: MRT4577_93163C.1.pep
ASLCVFRVSQPVSCVPWLACSESEMMMMPDGGVWYCSPALPNRALLAASSVLCRVVWLQNINTLAMYHAVECYHPCIIILYVYPKLRKQ

SEQ ID NO: 361829 - protein, 76 aa, Zea mays
  Clone ID: MRT4577_93164C.1.pep
ERSKKQEALSRSELSIEYNDADQVSAAHTGTEDQVGPNNSDSEDVDDEEEEEELEGYDSSSMADDIHEFTLGDSYD

SEQ ID NO: 361830 - protein, 109 aa, Zea mays
  Clone ID: MRT4577_93165C.1.pep
KNTMANTPPAISPGRPERMRVCQHAKRSPHSKNCTPDRVKRHSCSRRTLNPIGHTAVNPNNQTWHQTYELSHAPPPPCARSRVQLFSFLKTITPVICNRNSLAVYCDSI

SEQ ID NO: 361831 - protein, 126 aa, Zea mays
  unsure (1)..(126): unsure at all Xaa locations
  Clone ID: MRT4577_93166C.1.pep
FGMVAGGSGISPMFQVPRAIFXNPKGPPKVPFIYANVPYEDIFFKEKLGGMAKNYPDRFKIYYVLNQPPKIWDGGVGFVLKKMIQILCPGPAPDIQVLRCGPPPMKKTMAGPLGALGYPKEKQFQF

SEQ ID NO: 361832 - protein, 107 aa, Zea mays
  Clone ID: MRT4577_93167C.1.pep
HTFICIYAGTTADDPDHRCNGSCWSQTPTISPSSPVGPPTKPSSVPRTRSCSKLSMMAKIFTPSILFHILTMAHFIDARTWPHDLSIWTLLSYKVLTRNPSGPSLMS

SEQ ID NO: 361833 - protein, 65 aa, Zea mays
  Clone ID: MRT4577_93168C.1.pep
PKHSIRVNEHSTTDGCKGGIKIQCVANKPIQPVKYQMLDIRSLPKEPTTLHKICYLNIKHVTNRH

SEQ ID NO: 361834 - protein, 204 aa, Zea mays
  Clone ID: MRT4577_93169C.1.pep
DAWADAWASAVLDEYVAAVRRMTCTVLQLMAQGLGLDDRDVFSRLVLDRDSDSMLRVNHYPPAAETRRLTGFGEHTDPQIISVLRSNDASGLEITLRDGPWVSVPSDTESFFVNVGDALQVLTNGRFRSVRPRVMVTSARPRVSVIFFGGPPPRERLAPLPGLVDREGGRPPYREFPWREYKNSAYRTKLADNRLCSFETMATS

SEQ ID NO: 361835 - protein, 486 aa, Zea mays
  Clone ID: MRT4577_9316C.1.pep
MAEKGTDLKGKILSSPHRIVYKSIINVKGMNVISHRLRHVPINVLFTLTGIYFCVTLVLLPSIKPKHLRTSPQHWRPPPGNSFNHLRQALTFVMPPKKASAPGTAALQPLDPNQETLSLREAQSQKRKATSPTLQEEELDQEIKDMEIIHQQVQRKKEKMARLADLQRKIDEATEEQNCRLPHGPRHTSHLSFPCMMGIQIKTVSDELQSNYIFVWRQYRSYGEVLRHGSPECSPNMIVIEAMIKGLRPGPTAQYFARKPPQTLEKLLQKMDEYIRADNDFRQRREKAYRFSEMTRGFGGRIHLRHIRSIHNSTQSDDKGSQPQRSQYTSQSSGQQQSSFRPPAPRGRGARGFEGRFGDQSRKIYCLFCGEDKGHTTRMCQITIQKLKEIAEAEARQNQPKQVLHTASCHSPYIPEYVGNHPTTFVASASHSQASWPQLPPPPPLQPTYSRGQPEGRQYPQQQREVRGESEARTVNSTVPESKHIY

SEQ ID NO: 361836 - protein, 125 aa, Zea mays
  Clone ID: MRT4577_93170C.1.pep
TWADPWAIAFLNNYLPAVRPITCTVLHLMAQGLGLDDRDVFSRLVLDRDSDSMLRVNHYPPAAETRRLTGFGEHTDPQIISVLRSNDASGLEITLRDGTWVSVPSDTESFFVNVGDALQVLHSPI

SEQ ID NO: 361837 - protein, 283 aa, Zea mays
  Clone ID: MRT4577_93171C.1.pep
MDNPILMQMTCSHENVIRYFTSWFENEQLYIQMELCDRCVSMNQNQPLKCREALELLYQFFRTEPYAYEPSSIPRYSPCKERDMKMKYEKHKRFNDTLCTYCNYLLAFVHGRLQRVVLFRKSRVNGSVYRHRNRQHTSQNLGSVFSQDSSNKLQANLKTTNKSDAKLPTNVVSDLLVCCGGLKKRSFPADHGVLPGEAEADAEVEVVWQIHAKAGGVGCYTTGQWRRLLADGPGSYPPRCTSKCGDCSPCYPVHVAVPPGVPVTTEYYPEAWRCKCGNRLYMP

SEQ ID NO: 361838 - protein, 147 aa, Zea mays
  unsure (1)..(147): unsure at all Xaa locations
  Clone ID: MRT4577_93172C.1.pep
CVCCHGLFFYFIYLSIISIGEGLIKKKKKKKKKKKKKKKKKKKKKKKKKKKKKKKKKKKKKKKAKKPXFFFFFKKKKFFFHQKGKKFLKLEKKXGGAKRKKGEKKPPTRKKKKTPGNPPFFLGGPQKKKPPPNFQKPGKNPEKPPPV

SEQ ID NO: 361839 - protein, 91 aa, Zea mays
  Clone ID: MRT4577_93173C.1.pep
AENSIEKNLKRSITNTLNRLYGHVQVWAASGLVSASHQARSLSSHPSSIQHALTPRTARARGRAVRIPARGTEKDMQSLSIPAGSRSVCLW

SEQ ID NO: 361840 - protein, 78 aa, Zea mays
  Clone ID: MRT4577_93174C.1.pep
QKDAKPQDISSIGLIDNKADGDQCVLVDRDKSISFGRHATENNAGDLTDGLTHLYAYMRKFVDGSACDSCDRREKLDG

SEQ ID NO: 361841 - protein, 111 aa, Zea mays
  Clone ID: MRT4577_93175C.1.pep
KIHQGPSFGGNSHLKATTGSGKTPGDQKKLTHSSPEPRGTPTRAQTVQKGLKAILLTGTGDTKIPQARSRGLNVIKPKRKGWGALATHPTLDAHTNTNRESVKRTVNIGRG

SEQ ID NO: 361842 - protein, 42 aa, Zea mays
  Clone ID: MRT4577_93176C.1.pep
RIAVRIDSPPPDGSEDMAAQSTLFDTTERSALLDHAPNPDAW

SEQ ID NO: 361843 - protein, 85 aa, Zea mays
  Clone ID: MRT4577_93178C.1.pep
DAVEVPLVVCPQSGRLHHNVLLFAQAWFSGRNVLIPALGLGGVCAALSWACRALCEFVYRSCGVFQKLKICPICVSWLRLHNNKM

SEQ ID NO: 361844 - protein, 82 aa, Zea mays
  Clone ID: MRT4577_93179C.1.pep
GTTPSPVRGHLPGFPFRTPPCRQLWGPGLRCATTETPFPYRHGQGVIRPRPMSPHAPPLSRGWIRAPQNREKRPVNIERDQK

SEQ ID NO: 361845 - protein, 193 aa, Zea mays
  unsure (1)..(193): unsure at all Xaa locations
  Clone ID: MRT4577_9317C.1.pep
TWSGRVQRKKEKMARLADLQKKIDEATEEVRHLVQDEQDRRPQHRELRQEGLFNEDAWYDDFNHDAFTFDDASPLAAELXATPCPPSYKPPQLPMYDGHSDPKQFLMSYEATISSYGGNTAVMAKSFVMAVRNVAQTWYSSLRPGTITSWPKLKDMLVTSFQGFQTKPVTAHALFQCMQDHEEYLQAYVRRFL

SEQ ID NO: 361846 - protein, 64 aa, Zea mays
  Clone ID: MRT4577_93180C.1.pep
KHASAHASAQSYAHSLCCLLVISSKNYLHFCGWTIKRVKDYHTLSFNLRVLLYCHIFSFHWPLF

SEQ ID NO: 361847 - protein, 75 aa, Zea mays
  Clone ID: MRT4577_93181C.1.pep
SYSFSYSYTRFCFMDPSFHLGAASMMLGPVLYLHCVLHPCVTTFYIVPNNITPSCFYFSKILILIIYVLIIGFFF

SEQ ID NO: 361848 - protein, 509 aa, Zea mays
  unsure (1)..(509): unsure at all Xaa locations
  Clone ID: MRT4577_93182C.1.pep
FDENTPPLSDPNYISSLGAATFRGMQSGDNDAIWLMQGWLFTYDPFWEPPQMKALLHSVPVGKMIVLDLYAEVKPVWIKCDQLNGVLYLQKGLFSLSANSMHYYPPFIFLHKKTRXPFFRCMLHNFAADFEMYGVLDALASGPIDARLSDNSTMVGVGMSMEGIEQNPIVYDLMSEMAFHHRQVDLQVWVETYPTRRYGKPVKGLQDAWWILYRTLYNCTDGKNDKNRDVIVAFPDVEPFVIATPGLHVNTRQMYSTVSSKNYIRKDVSSDAYEHPHLWYDTNAVIHALELFLQHGDEVSDSNTFRYDLVDLTRQVLAKYANDVFLKIIESYKSNNMNQVTILCQHFLGLVNDLDTLLSSHEGFLLGPWLESAKGLARNSEQEIQYEWNARTQITMWFDNTETKASLLRDYANKYWSGLLQDYYGPRAAIYFKHLLLSMENNAPFALKEWRREWISLTNNWQSDRKVFSTTATGDPLNISQSLYTKYLSNADLLGLVEGTGSPWKSANL

SEQ ID NO: 361849 - protein, 80 aa, Zea mays
  Clone ID: MRT4577_93183C.1.pep
MALSRRMAAPVLVLMLLLVATELGTTKVAEARHCLSQSHRFKGLCMSSNNCANVCQTENFPGGECKAEGATRKCFCKKIC

SEQ ID NO: 361850 - protein, 106 aa, Zea mays
  Clone ID: MRT4577_93184C.1.pep
FFFFFFPNERTNDQSDPRITGSDRLLLDRRREPTMILRSSIGRPNDPSCCAQSALDRRLASADQPFARRTGREATTSGGVRWVVMASCWPVLGRGARRGARLVPNS

SEQ ID NO: 361851 - protein, 80 aa, Zea mays; identical to SEQ ID NO: 361849
  Clone ID: MRT4577_93185C.1.pep

SEQ ID NO: 361852 - protein, 80 aa, Zea mays; identical to SEQ ID NO: 361849
  Clone ID: MRT4577_93186C.1.pep

SEQ ID NO: 361853 - protein, 44 aa, Zea mays
  Clone ID: MRT4577_93187C.1.pep
GTYLLVPSSMALLTNLISLFPFHGLSEGWKKRKNRGRPVFRIRA

SEQ ID NO: 361854 - protein, 43 aa, Zea mays
  Clone ID: MRT4577_93188C.1.pep
MDEPPSLFIDVTTQLRTGRQMSYAKNVIKEYLYRVHSSSSIDG

SEQ ID NO: 361855 - protein, 100 aa, Zea mays
  Clone ID: MRT4577_93189C.1.pep
LEYNISQAIYCDELKELTVWWKDFQSHIDMRFTRDRLVELHFWMLGVIHEPYYSYSRIMMTKFFIFANFFDDLYDNYGTTEESDVFTAAMERWDEQIAHQ

SEQ ID NO: 361856 - protein, 163 aa, Zea mays
  unsure (1)..(163): unsure at all Xaa locations
  Clone ID: MRT4577_9318C.1.pep
QRRREEVRLANLHRKIDEATEEVRHLAQDEQDRRPHHRELRQEGLFNEDGWYDDFNHDTFTFDDASPLAAXVXATPWPPSYKPPQLPMYDGNSDPKQFLMSYEATISSYGGNTAVMAKSFVMAVRNVAQTWYSSLQPGTITLWQKLKDMLVTSFXVFQTKPVI

SEQ ID NO: 361857 - protein, 57 aa, Zea mays
  Clone ID: MRT4577_93190C.1.pep
QTMCPICGVGSIINHCFGTATRIRCSLEILHFITLTFFNVVPATHSHIDTTYSKITY

SEQ ID NO: 361858 - protein, 140 aa, Zea mays
  Clone ID: MRT4577_93191C.1.pep
AATPKPPALPFRVGHGFDLHRLEPNLPLIIGGIDIPHDRGCEAHSDGDVLLHCVVDAILGALGLPDIGQIFPDSDPRWKGADSSVFMREAVKLMHEAGYELGNLDATLILQKPKISPFKETIRLNLCNLLGADPSVVNLK

SEQ ID NO: 361859 - protein, 69 aa, Zea mays
  Clone ID: MRT4577_93192C.1.pep
SRTRGRTRGRLCSAAPVLMCAAQLLCPAADTYAALLCSTSSSSLIWLNDLLVFMPMLNSWRGRISQQCL

SEQ ID NO: 361860 - protein, 225 aa, Zea mays
  Clone ID: MRT4577_93193C.1.pep
MATAPYASSLFLASSPISTAPRIRAGPCPPSAQPSLRLRPRPSPAAAAAVQAEHQPALTAAPKPPALPFRVGHGFDLHRLEPDLPLIIGGINIPHDRGCEAHSDGDVLLHCVVDAILGALGLPDIGQIFPDSDPRWKGADSSVFMREAVKLMHEAGYELGNLDATLILQKPKISPFKETIRSNLCDLLGADPSVVNLKAKTHEKVDSLGENRSIAAHTVVLLMRK

SEQ ID NO: 361861 - protein, 35 aa, Zea mays
  unsure (1)..(35): unsure at all Xaa locations
  Clone ID: MRT4577_93194C.1.pep
VDXXSVGTPSFWRKSLGHLAFVSFVXEIXXSAFTX

SEQ ID NO: 361862 - protein, 67 aa, Zea mays
  Clone ID: MRT4577_93195C.1.pep
FFFFFFFFFGVGFIFLSFFFFFFLFFFFLTHKTPNPHFKILKAEKEEHSPGHVQNIYYYPPGPPWPP

SEQ ID NO: 361863 - protein, 83 aa, Zea mays
  Clone ID: MRT4577_93196C.1.pep
RDQPAGHGCARRGRFVEPLGGQLLENESPAQPCLAPSHSLVVRKDCAPGGGRSLRSLAEELVVFVNTVSVASPLGRGSVWWGC

SEQ ID NO: 361864 - protein, 70 aa, Zea mays
  Clone ID: MRT4577_93197C.1.pep
VDVRPQSTWIYSTGEMIISIHNRITTRVRPFKSKPYKAQCRFRTTKTQANSHHRRTLTGVVRLTTNGRCS

SEQ ID NO: 361865 - protein, 554 aa, Zea mays
  unsure (1)..(554): unsure at all Xaa locations
  Clone ID: MRT4577_93198C.1.pep
CTEEGWRSVEEAPNPKALSPPAEPAVQEDLWDFKKYIGFEEPVEAKDDSWAGEDDAGSFEHHQNHDSGPLAGENVMNVVVVAAECSPWCKTGGLGDVAGALPKALAKRGHRVMVVVPRYGDYEEAYDVGVRKYYKAAGQDMEVNYFHAYIDGVDFVFIDAPIFRHRQDDIYGGSRQEIMKRMILFCKVAVEVPWHVPCGGVCYGDGNLVFIANDWHTALLPVYLKAYYRDHGLMQYTRSVLVIHNIAHQGRGPVDEFPYMDLPEHYXANIFAAGLKMADRVVTVSRGYLWELKTVEGGWGLHDIIRSNDWKINGIVNGIDHQEWNPKVDVHLRSDGYTNYSLETLDAGKRQCKAALQRELGLEVRDDVPLLGFIGRLDGQKGVDIIGDAMPWIAGQDVQLVMLGTGRADLERMLQHLEREHPNKVRGWVGFSVPMAHRITAGADVLVMPSRFEPCGLNQLYAMAYGTVPVVHAVGGLRDTVAPFDPFGDAGLGWTFDRAEANKLIEALRHCLDTYRKYGESWKSLQARGMSQDLSWDHAAELYEDVLVKAKYQW

SEQ ID NO: 361866 - protein, 261 aa, Zea mays
  Clone ID: MRT4577_93199C.1.pep
AVEGGWGLHDIIRSNDWKINGIVNGIDHQEWNPKVDVHLRSDGYTNYSLETLDAGKRQCKAALQRELGLEVRDDVPLLGFIGRLDGQKGVDIIGDAMPWIAGQDVQLVMLGTGRADLERMLQHLEREHPNKVRGWVGFSVPMAHRITAGADVLVMPSRFEPCGLNQLYAMAYGTVPVVHAVGGLRDTVAPFDPFSDAGLGWTFDRAEANKLIEALRHCLDTYRNYEESWKSLQARGMSQDLSWDHAAELYEDVLVKAKYQW

SEQ ID NO: 361867 - protein, 58 aa, Zea mays
  Clone ID: MRT4577_9319C.1.pep
ALGHVAPPPPLEKRAPKKTANFWAPKKKKKKKKKKKKKKKKKKKKKKKKKKKKKKNPP

SEQ ID NO: 361868 - protein, 84 aa, Zea mays
  Clone ID: MRT4577_931C.1.pep
WLNTWHQVCKSCILVEQLLQVSTCSSNRRYQSRQVGDHVFEWHKTESTDKSLTMDVRLVFRYCVNNNGIIRGIIPSPSYMFLIT

SEQ ID NO: 361869 - protein, 55 aa, Zea mays
  Clone ID: MRT4577_93200C.1.pep
KRIFQRAALERLTVGELRTHVVGKLIHNTNTNYMLEEGPTVKGHVRMRYQTAKKA

SEQ ID NO: 361870 - protein, 77 aa, Zea mays
  unsure (1)..(77): unsure at all Xaa locations
  Clone ID: MRT4577_93201C.1.pep
ADLPVLADAPSSXFRFQXXQHHHQNPRKEQSRPWRKCHGETTGRADPEQRASPRRGRRGRGRRRRGGRDMGWXRGTT

SEQ ID NO: 361871 - protein, 115 aa, Zea mays
  Clone ID: MRT4577_93202C.1.pep
LFHASGFGSASAWCASNKFRPRTVIKGPPPRKESHGLLCYLKEVPPCPVLDSPPLQSVRKFKQGTQKPMRPLPSKNWCWRSVFFLAASIGAGPVIKTECSKKNPKNKGRPPTSRL

SEQ ID NO: 361872 - protein, 118 aa, Zea mays
  Clone ID: MRT4577_93203C.1.pep
SIFYNILVIYLLPMVKYVIKNIFKILYYNFESIFMFIDRLVGSASRLASRADFSSSPDGRAEQSPARCTSEPQRAEPRLVSTPIYRYNSSLVIMEEKFLLPLFCSNTKIWKQGEGRQT

SEQ ID NO: 361873 - protein, 85 aa, Zea mays
  Clone ID: MRT4577_93204C.1.pep
TGKSTGEFTCSFPPGVPIGASKVYKAQATNGLGTKLGLKKNLWGRKPKGGPRFPLQKQKPQHWFGSSKTSLGHPQKARLKSSLLF

SEQ ID NO: 361874 - protein, 141 aa, Zea mays
  unsure (1)..(141): unsure at all Xaa locations
  Clone ID: MRT4577_93205C.1.pep
GRDEXDGTDNNANXSIXKKTTNGGRTEANEDAAPAHTDTKSHHENNKTEDTDNPSGNDTKNSPNKTRTANGADKGTAKDDTAKNNTGTTTTPEAESRHRTAKAPSTGDTKEDGNAAXSGTHNKTKAKSTNAKGQTKGRHKE

SEQ ID NO: 361875 - protein, 247 aa, Zea mays
  Clone ID: MRT4577_93206C.1.pep
MGFSPRSLWSRSKKPDIYSTVVVHDDEDDARGGGAARAEDDDDDDPSALPPLLQRLPKDFGGASFDDDDDPYSSDLDDASLSATVVIKRGAPASTSSSSRSPFLDLRRSSPRAAEADPFSTFVVHGTARSGGASSPRESVSGTFIRHSGGPPSPRESVSGTFIRHTRGSSSPHESFSGTFIHHTSSASSPRDSASGAGAGFGSSFITPSSGQAEEDRQPSLLMQQQQSRRKASMSSLPDSVTRGDPS

SEQ ID NO: 361876 - protein, 87 aa, Zea mays
  unsure (1)..(87): unsure at all Xaa locations
  Clone ID: MRT4577_93207C.1.pep
MKAMSAESFLLTSKSVNDGHPDELCHQLYNAKIDSCLVQDPDGKVSFXTHTITKMXVMVFGEITTNATGHYXKPLRETCRQIDFTFD

SEQ ID NO: 361877 - protein, 41 aa, Zea mays
  Clone ID: MRT4577_93208C.1.pep
GQIKGVGPWSIEHHIFYMLLQVKGYQKNLKTGPFFKPFPGL

SEQ ID NO: 361878 - protein, 74 aa, Zea mays
  Clone ID: MRT4577_93209C.1.pep
SANLPLPYARSRRKIRRHEPAVRQATTFLRPPARPESCPRRDLAACPPQSNHPAGTVPGMPKPLGSARPPKSAR

SEQ ID NO: 361879 - protein, 84 aa, Zea mays
  unsure (1)..(84): unsure at all Xaa locations
  Clone ID: MRT4577_9320C.1.pep
PCWFFGNVTAGANGVANINVPDSQIPLVGPNSIIGKAVVVPPDPYFFXKGGPQLSKSPGNPGGRVACGILGLQGLKPFPDFGGP

SEQ ID NO: 361880 - protein, 122 aa, Zea mays
  unsure (1)..(122): unsure at all Xaa locations
  Clone ID: MRT4577_93210C.1.pep
TGCKKKHEAESIILLASIEXMQYVVTINVLHDAFSSFGFVQNIAIFEKNGFXALIQCPYIQTAYAAKEALXGHTIYEGGYCXPNLTFSLHTELNVXVNNERCRDYSNGNATPSSDQPFFLGA

SEQ ID NO: 361881 - protein, 44 aa, Zea mays
  Clone ID: MRT4577_93211C.1.pep
LEPAETLAAEERQSINQLRPQAVFMGDTRHGRTGTGPRCEYDRS

SEQ ID NO: 361882 - protein, 71 aa, Zea mays
  Clone ID: MRT4577_93212C.1.pep
CCPDACSKALLKTRGRNCWKNSLKTTLRSRKLCAIIAPSETATSTTRSSIMATIVVSIVVRLFAWCVAYCG

SEQ ID NO: 361883 - protein, 110 aa, Zea mays
  Clone ID: MRT4577_93213C.1.pep
ERPPGQVKKKKKKKKKKKKKKKKKKKKKKKKKKKNKKIKFFSKKILILCLLPILSGIFGGGAFPFGGLLDLPFGGPVFPFFGLRFPFPCPVFSISSSWKTPLVSPFFSLS

SEQ ID NO: 361884 - protein, 46 aa, Zea mays
  Clone ID: MRT4577_93214C.1.pep
RGLQHLKPANPKPGGDPPHLGGHGNGPGPGGSLFHFLTGPEGGPRP

SEQ ID NO: 361885 - protein, 183 aa, Zea mays
  Clone ID: MRT4577_93215C.1.pep
MSCAGLVQTWAAVIMGVFAGSVPWFTMMILHKKVALLTRVDDTLGVFHTHAVAGLLGGVLTGLLATPELLEIESPVPGLRGAFYGGGIRQVGKQLAGAAFVVAWNVVVTSLILLAIGLLVPLRMPEDQLMIGDDAAHGEEAYALWGDGEKFDATRHDAVRVAGVMDREGSAEQRLSGGVTIQL

SEQ ID NO: 361886 - protein, 487 aa, Zea mays
  Clone ID: MRT4577_93216C.1.pep
MMAASGAYAAQLPAVPEWLNKGDNAWQLTAATLVGIQSMPGLVVLYGSIVKKKWAVNSAFMALYAYASSLLVWVLAGFRMAFGERLLPFWGKAGVALSQGYLVRRASLSATAHGATPRTEPLYPEATLVLFQFEFAAITLVLLAGSVLGRMNIKAWMAFTPLWLLFSYTVGAFSIWGGGFLYHWGVIDYSGGYVIHLSSGIAGFTAAYWVGPRLKSDRERFSPNNILLMIAGGGLLWMGWAGFNGGAPYAANIAASVAVLNTNVSAATSLLTWTCLDVIFFGKPSVIGAVQGMMTGLVCITPGAGLVQTWAAVIMGVFAGSVPWFTMMILHKKVALLTRVDDTLGVFHTHAVAGLLGGVLTGLLATPELLEIESPVPGLRGAFYGGGIRQLGKQLAGAAFVVAWNVVATSLILLAIGLLVPLRMPEDQLMIGDDAAHGEEAYALWGDGEKFDATRHDAVRVAGGMDREGSAEQRLSGMGARGVTIQL

SEQ ID NO: 361887 - protein, 48 aa, Zea mays
  Clone ID: MRT4577_93217C.1.pep
QGCPGPGAPVSFRAFHGHGPPMKVSAVMSGAAGPSVGPTRWSDCPGPS

SEQ ID NO: 361888 - protein, 929 aa, Zea mays
  unsure (1)..(929): unsure at all Xaa locations
  Clone ID: MRT4577_93218C.1.pep
MAAAFSAAILFHLLLLLFSPSAAQPGFISLDCGGARDHTDAIGIQWTSDASFVSGGQAAQLLVQNGLQQTQQQLTTVRYFPADNRKHCYTMNVRNRTRYLVRATFLYGNFDNSNVYPKFDISLGASPWSTIVVDDATTPVVEEAIILAAAPTLSVCLSNASTGQPFISTLELRQFNGSLYYTTDETRFFLGLSARINFGAGSNDSVRYPDDPFDRIWESDSVRRANYLVDVAPGTERISTTKPIFVGTNEEPPEKVMQTAVVGQDGSLNYRLDLEGFPANAWGVSYFAEIEDLAPNETRKFKLEVPGMPALSKPTVDVEENAQGKYRLYEPGYTNLSLPFVFSFGFRKTNDSSKGPILNALEIYKYVQITMGSQDANIMASMVSRYPQESWAQEGGDPCLPASWSWVQCSSETSPRIFSITLSGKNITGSIPVELTKLSGLVELRLDGNSFSGQIPDFRECGNLQYIHLENNQLTGELPSSLGDLPNLKELYVQNNKLSGQVPKALFKRSIILNFSGNSGLHIVSNGISHTIIIICVVIGAVVLLGVAIGCYFITCRRKNKSHEDTVVIAAAPAKKLGSYFSEVATESAHRFSLSEIENATDKFERRIGSGGFGIVYYGKLADGREIAVKLLTNDSYQGIREFLNEVTLLSRIHHRHLVTFLGYSQQDGKNILVYEFMHNGTLKEHLRGADNEKITSWLKRLEIAEDSAKGIEYLHTGCSPTIIHRDLKSSNILLDKNMRAKVADFGLSKPAVDGSHVSSIVRGTVGYLDPEYYISQQLTEKSDIYSFGVILLELISGHEPISNDNFGLNCRNIVAWARSHIESGNIHAIIDESLDRGCYDLQSVWKIAEVAIMCVKPKGAQRPPISEVLKEIQDAIAMERVXCPIAATGWVQVAWSRMEEHLSTSCSCSRVSDEMRTYSYLESIVCSN

SEQ ID NO: 361889 - protein, 1067 aa, Zea mays
  unsure (1)..(1067): unsure at all Xaa locations
  Clone ID: MRT4577_93219C.1.pep
MAAAFSAAILFHLLLLLFSPSAAQPGFISLDCGGARDHTDAIGIQWTSDASFVSGGQAAQLLVQNGLQQTQQQLTTVRYFPADNRKHCYTMNVRNRTRYLVRATFLYGNFDNSNVYPKFDISLGASPWSTIVVDDATTPVVEEAIILAAAPTLSVCLSNASTGQPFISTLELRQFNGSLYYTTDETRFFLGLSARINFGAGSNDSVRYPDDPFDRIWESDSVRRANYLVDVAPGTERISTTKPIFVGTNEEPPEKVMQTAVVGQDGSLNYRLDLEGFPANAWGVSYFAEIEDLAPNETRKFKLEVPGMPALSKPTVDVEENAQGKYRLYEPGYTNLSLPFVFSFGFRKTNDSSKGPILNALEIYKYVQITMGSQDANIMASMVSRYPQEGWAQEGGDPCLPASWSWVQCSSETSPRIFSITLSGKNITGSIPVELTKLSGLVELXLMVIHFLAKFLISENVGICSICEFPVILIIFYSXDSTNILCFDSEMILLIYGAFIHSSHLENNQLTGELPSSLGDLPNLKELXLNIHVYTLSXLHILEAIVXFLQFIFLPDFFYLYSFLFFSAQETKRQIDVSDLGFFIXYIYVRIFMEKRPLLLXEKICRYVQNNKLSGQVPKALFKRSIILNFSGNSGLHIVSNGISHTIIVICLVIGAVVLLGVAIGCYFITCRRKKKSHEDTVVIAAAPAKKLGSYFSEVATESAHRFSLSEIENATGKFERRIGSGGFGIVYYGKLADGREIAVKLLTNDSYQGIREFLNEVTLLSRIHHRHLVTFLGYSQQDGKNILVYEFMHNGTLKEHLRGADNEKITSWLKRLEIAEDSAKGIEYLHTGCSPTIIHRDLKSSNILLDKNMRAKVADFGLSKPAVDGSHVSSIVRGTVGYLDPEYYISQQLTEKSDIYSFGVILLELISGHEPISNDNFGLNCRNIVAWVRKKSIPVGSAEAKAXINKXKCRPXHIESGNIHAIIDESLDRGCYDLQSVWKIAEVAIMCVKPKGAQRPPISEVLKEIQDAIAMERVXCPIAATGWVQVAWSRMEEHLSTSCSCSRVSDEMRTTYSYLESIVCSN

SEQ ID NO: 361890 - protein, 34 aa, Zea mays
  Clone ID: MRT4577_9321C.1.pep
NEARAVGGAAPKKAAILSGTDRVGFQERRCGEET

SEQ ID NO: 361891 - protein, 48 aa, Zea mays
  Clone ID: MRT4577_93220C.1.pep
MELPEWVDIVKTARFKELPPYDPDWYYIRAASVARKIYLRQGIGVGGF

SEQ ID NO: 361892 - protein, 100 aa, Zea mays
  unsure (1)..(100): unsure at all Xaa locations
  Clone ID: MRT4577_93221C.1.pep
QEMHADLDLHANALIKIHNDITKNHHFLTHYTIXIRYNKLILTDLXLISANSNVYKLIVPLLVNHDLXQATANVIKRISYICSKLKRIHHALKYLQDKHY

SEQ ID NO: 361893 - protein, 29 aa, Zea mays
  Clone ID: MRT4577_93222C.1.pep
MANFNKYPTIDLIILSGLKLAVLLSHSIN

SEQ ID NO: 361894 - protein, 96 aa, Zea mays
  Clone ID: MRT4577_93223C.1.pep
PASPPPSHRLLSARLPFRAASGRNGRAFLFSHAMNVVVGAKEDRHLMTGLHTVADIYCNDCREVLGWKYVRAYEETQKYKEGKFIFEKSKIVKENW

SEQ ID NO: 361895 - protein, 52 aa, Zea mays
  Clone ID: MRT4577_93224C.1.pep
VGRLAQFGYDNGSPLYSFCLMFSFPPSNFYLYFWGLISSTLNWCFAICFFKY

SEQ ID NO: 361896 - protein, 106 aa, Zea mays
  Clone ID: MRT4577_93225C.1.pep
MAELVGPRVYSCCTCRNHVCLHDDIISKAFQGRNGRAFLFSHAMNVVVGAKEDRHLMTGLHTVADIYCNDCREVLGWKYVRAYEETQKYKEGKFIFEKSKIVKENW

SEQ ID NO: 361897 - protein, 79 aa, Zea mays
  Clone ID: MRT4577_93226C.1.pep
VARAVFVVAQAGCRYTCAGAVLPWEKFACVSLVCCSHLLWPMPVGQFNHCKWCRSSFFCFGCICAIPVKKTHDQCFCSV

SEQ ID NO: 361898 - protein, 105 aa, Zea mays
  unsure (1)..(105): unsure at all Xaa locations
  Clone ID: MRT4577_93227C.1.pep
MQLPCFPIACPRAQPSSMADQLTDEQIAEFKEAFSLFDKDGDGCITTKELVTVIGLLGQKSTXAELQDXXNEXDAXGXGTXDXPEXXNXXARKXKDTDXEEEXKE

SEQ ID NO: 361899 - protein, 46 aa, Zea mays
  Clone ID: MRT4577_93228C.1.pep
MPTEGCFAGLSLPVVATLRVCGTFGYSSESQPWANLHEESMGRYLF

SEQ ID NO: 361900 - protein, 57 aa, Zea mays
  Clone ID: MRT4577_93229C.1.pep
PSHGSCRRSSAWTSPEARYTAFLGGLADELDPEADDGDTEPGCGVAQLLPSHRLLLH

SEQ ID NO: 361901 - protein, 81 aa, Zea mays
  unsure (1)..(81): unsure at all Xaa locations
  Clone ID: MRT4577_9322C.1.pep
KLPVGGFVLAGPPEWFKFRGKKLKKFIFQLPGQKKFFFFLFEAPHKTKNQAPIVYAPKQKKKKKKKKKKXXXKKKKKKKKH

SEQ ID NO: 361902 - protein, 130 aa, Zea mays
  Clone ID: MRT4577_93230C.1.pep
MGIPVFMIVVRTLPFLPRMTPSGSPWCRVFFAPASGVSVGATVLGLSQSFMLPRCLPRLCRGEALGPAAHPLSSVADDVGVHIMLSLALALRVLAVVRLLCHPAPPLSLWCQKRIFLLWFASFASVVGRV

SEQ ID NO: 361903 - protein, 86 aa, Zea mays
  unsure (1)..(86): unsure at all Xaa locations
  Clone ID: MRT4577_93231C.1.pep
MVYLLSYRSFKEITXLLTLENFRKNEQLSKYGXARAIMLVEPKKLIEANPLLRDKLQFPSPKNSRWVWIVEMNCYKDIDMKQIASD

SEQ ID NO: 361904 - protein, 69 aa, Zea mays
  Clone ID: MRT4577_93232C.1.pep
KIKKKKKKKKKKKKKKKKKKKKKKKKKKKKKKKKKKNKTLNRVSPWAESPFWGFLLNFLPLGLLGPFFP

SEQ ID NO: 361905 - protein, 90 aa, Zea mays
  unsure (1)..(90): unsure at all Xaa locations
  Clone ID: MRT4577_93233C.1.pep
LFTPPVSHPRRNHQGGTVSGKTSYSPTRQXTQRSKTQRPKATPTAKRRKTQERGTPTAQTQAPQPTKATRDEQEEPRGTAPAKDKAAQEG

SEQ ID NO: 361906 - protein, 86 aa, Zea mays; identical to SEQ ID NO: 361903
  unsure (1)..(86): unsure at all Xaa locations
  Clone ID: MRT4577_93234C.1.pep

SEQ ID NO: 361907 - protein, 103 aa, Zea mays
  unsure (1)..(103): unsure at all Xaa locations
  Clone ID: MRT4577_93235C.1.pep
LTGQADVISGSCVCAKRIVVDARHHMPGRLCXIIANELLNGQKAVAVRWLEIXMRGGHGLDKTKYLRFXLRKRMNTNAAHITMQLPCRVQTLWPTIRGMISHK

SEQ ID NO: 361908 - protein, 50 aa, Zea mays
  Clone ID: MRT4577_93236C.1.pep
LPAPGKIPVVCRWHSHGIRPLFRLCLATCGRQISRAFIRSLAYSNGSCFL

SEQ ID NO: 361909 - protein, 73 aa, Zea mays
  Clone ID: MRT4577_93237C.1.pep
KAVGGQVVKGVLASSKPECCMTCTSRGQSNRLQMWSEFTIEVSEGLRNVKSSLCDHIYFSSYSFSFDVKRTCT

SEQ ID NO: 361910 - protein, 69 aa, Zea mays
  Clone ID: MRT4577_93238C.1.pep
EETIAGREDRTGIGINLGRTYFSNGVWKDEKVRIIVNCERNRTMLWNGSFTYSRCLIAHAYNSHVSDEP

SEQ ID NO: 361911 - protein, 62 aa, Zea mays
  Clone ID: MRT4577_93239C.1.pep
DLTEGQPHHVLAVQNITTPRTKIRIIHHYMNLSTTLFQETPSLVQHAARATSVMCWLETSML

SEQ ID NO: 361912 - protein, 120 aa, Zea mays
  Clone ID: MRT4577_9323C.1.pep
FFFFFFFFLGAFKIFGGFFLFFFFFKKKPPPLFSGKTNPPFSKKIKGISTETTNSIAKKPPPFKKPPEIKATLFKPERPGNNFNTPKSDFPLRTKNFNPPENRYLKPFPFSVPLKKFPLT

SEQ ID NO: 361913 - protein, 80 aa, Zea mays
  Clone ID: MRT4577_93240C.1.pep
PARTHTLASKILPCLSRSELRLTAQLRLVDDGTRSQVEGPCYFDTRIYGKAKPTTKLGLPEGAPESDNRLAPALIVRSGA

SEQ ID NO: 361914 - protein, 67 aa, Zea mays
  Clone ID: MRT4577_93241C.1.pep
TAGDGLAQGTPGGNAHAQGTAEVRALALGSEGTVPPMAEGIEIGPGFPPPIGSMWQTRYLFYDLLVD

SEQ ID NO: 361915 - protein, 45 aa, Zea mays
  Clone ID: MRT4577_93242C.1.pep
MREGTCLPCFKKKKKKKKKKKKKKKKKKKKKKKKKKKEKKKKNPP

SEQ ID NO: 361916 - protein, 138 aa, Zea mays
  unsure (1)..(138): unsure at all Xaa locations
  Clone ID: MRT4577_93243C.1.pep
MVNLVEAQKPLLHFLIKWAGLRQHTVDVDGAGTVLTFWVPKDKVPGNNSTVAPXRSRARRPKPKXRRPSVVLVHGFAAEGIVTWQFQVGALAKHYDVYIPDLLYFGGSTSPSTDRSPAFQAECLAAALGKLGVDECTV

SEQ ID NO: 361917 - protein, 137 aa, Zea mays
  Clone ID: MRT4577_93244C.1.pep
MADAKTAPAVTLRTRKFMTNRLLSRKQFVLEVIHPGRANVSKSDLKERLAKIYEVKDSNCIFVFKFRTHFGGGKSTGFGLIYDNLEAAKKFEPKYRLIRNGLATKVEKSRKQIKERKNRTKKIRGVKKTKAGDAKKK

SEQ ID NO: 361918 - protein, 105 aa, Zea mays
  Clone ID: MRT4577_93245C.1.pep
VCWAHLSSARCSVSCLRICIGSMALAQVSRTVLSSIDAVQQFKPLQTVIVDKVPRACDGIRRLCLAPRLCMSGSDSLVVHWNPSERSRCVPRGAYTEGKRVAGLA

SEQ ID NO: 361919 - protein, 141 aa, Zea mays
  unsure (1)..(141): unsure at all Xaa locations
  Clone ID: MRT4577_93246C.1.pep
GRTQASETNWHHRRHNSVLPWAAKIFGFVRLLGFLEGAVTETIFQQGXQVLMVSFFPQYXLTRGVLSLXENPIFKPSRIQQAMAEGIXTLITLVLPTTXALLQKLLWGHWWDQTIRAHHFQQLGLGNLVAYFKNQRFFPLN

SEQ ID NO: 361920 - protein, 108 aa, Zea mays
  Clone ID: MRT4577_93247C.1.pep
EGWGLPMFKKLQGGQRGISSKVEWSQCSGMLSSLVGQLYEGDVGHASQGVIANDRHLVYRPDLRFSGLGIREPIKWVIQGPFSLSDLWPLKVGGYKKGGRGTRWYNVE

SEQ ID NO: 361921 - protein, 426 aa, Zea mays
  Clone ID: MRT4577_93248C.1.pep
MDSLLASYASSDDDADEAPPAPPPAHSPAVATSSGGGAGGFFSSLPQPKSAPAPLFSSLPAPKSTPTPLFSSLSAPKSSPAPNPTFSSIPPPKSSGGNPKRVVQYRPQPIRQPTGDSSDDDEDDPKKRRASNSEARLPPVSAGSGPVSSFLPPPKHSLGLGAGSGAGARRSAIDTAAPEKPNLGTALPSSSVANTGAPERPDTGATDEDDSEDSGSEGDMPAPELEDEHENQQAFNAATGEQQQSYDAGAGSTSGYETYAWDPNHYAQYDAYGWDPSASANYEDGTQYAAYERGQSAGYVHAHGGEHASGYDHVAAVPYGVDYTAGMDGHGVAATLKPVHEPILEVNQAELMKNSPKQDKSKLTGLAFGPSYQPAPSAKGKPSKLHKRKHQIGSLYFDMKSKEMELAERRSKGILTKAETQAKYGW

SEQ ID NO: 361922 - protein, 53 aa, Zea mays
  Clone ID: MRT4577_93249C.1.pep
VKNEQHSLNMCIGDDKVPCTVEIQFTFNRYKASNFILCYKPFNPTKMSPNNKH

SEQ ID NO: 361923 - protein, 98 aa, Zea mays
  unsure (1)..(98): unsure at all Xaa locations
  Clone ID: MRT4577_9324C.1.pep
LTRREPPNHDTPPPTPASHLLSCFARHTSARSTTSGGGGMERHGGAHVADGMSESLMLKELLSYFYVELWIFLYFSVIVYKTXILHPMMYNCLLPYLV

SEQ ID NO: 361924 - protein, 192 aa, Zea mays
  Clone ID: MRT4577_93250C.1.pep
MKHMRGIQTTMHNMMLMCGILVRSANYEDGTQYAAYERGQSAGYVHAHGGEHASGYDHVAAVPYGVDYTAGGYGHEVAATLPPVHEPILPPEMGRSGGKRGRNDTPVQILEVNQAELMKNRPKQDKSKLTGLAFGPSYQPAPSAKGKPSKLHKRKHQIGSLYFDMKSKEMELAERRSKGILTKAETQAKYGW

SEQ ID NO: 361925 - protein, 225 aa, Zea mays
  unsure (1)..(225): unsure at all Xaa locations
  Clone ID: MRT4577_93251C.1.pep
QCGNRVIQRGITCKLQVFFTREGKGWGVRTVEDLPRGAFVCEYVGEILTSAELHERAIENARNGKHMHQVLLDAGWGSGVVLRDEDACSLDGSFYGNVGRFINHRYVGYLLVFFCCKYLAIVCVLQSFVCYSAMFLVTNICYDXCYNANLVQIPVEVETPDHHYHHLAFFTNKKVEAFEELTWDYGIDFDDMEGPSKPFRCMCGCRYCRDPNNPRRMGRAAAKRK

SEQ ID NO: 361926 - protein, 57 aa, Zea mays
  Clone ID: MRT4577_93252C.1.pep
SDSIINFNSVKSRANYPLYTELGHLHAWKSLFTINVQEHVKIPMQVLFIKKLITSGL

SEQ ID NO: 361927 - protein, 118 aa, Zea mays
  Clone ID: MRT4577_93253C.1.pep
AATPARAVSPRSASRYDITKENPQMLIGTPRYQRLHRVEPSRPWCPICPSDATLVMKLAQGTRELHEHTVERQVPLQHQPRLRHHHVQEHADRVHDQGVSRVRLCHPGDLSHRRDHRR

SEQ ID NO: 361928 - protein, 80 aa, Zea mays
  Clone ID: MRT4577_93254C.1.pep
IVYEAGTSLVMGNVVCASILSHAARTPHDFSIWVVSSDSLIESTEPHCDLISTTLYRRKGDAGFCGSSYTKQHQAPQTSS

SEQ ID NO: 361929 - protein, 152 aa, Zea mays
  unsure (1)..(152): unsure at all Xaa locations
  Clone ID: MRT4577_93255C.1.pep
LFLALFLLGLCFLFVLPWSFLLGLVFLFFRSFGSSWVLSGRLCRXLFRLFLVSLPLVAAFLASSCXALLRCGPLFFCGCLFVVSVVLWPSCGVGLSGVPFFLWLFRFAFVFVFRWFCVVVPLMLXLLPGCLXSAFSSNSPLGLLLLXLXGPV

SEQ ID NO: 361930 - protein, 121 aa, Zea mays
  Clone ID: MRT4577_93256C.1.pep
IKKLIHPSLFNLLEKTREDEAARLLGGRSPLLAARLLGASCSVLDYSAVLGARCSTVGALCSAACCSLLGSPAPYSKDAWWMAKTGPAPGGGGCLQPCTADEQIGIWEGAWPWRLGLKLED

SEQ ID NO: 361931 - protein, 50 aa, Zea mays
  Clone ID: MRT4577_93257C.1.pep
IEIVKNLKLTPFSHPFICSFWTHYYLIPSFFLWGWGLKHMGKIFYKRYLN

SEQ ID NO: 361932 - protein, 64 aa, Zea mays
  Clone ID: MRT4577_93258C.1.pep
DSRYQDDPQVTRHLTAFEAKIAAAHDARRIYGEVLTSESIHSPPASPATANPHSQPMHTPRRFL

SEQ ID NO: 361933 - protein, 216 aa, Zea mays
  Clone ID: MRT4577_93259C.1.pep
MPIGVPKVPYRIPGDEEATWVDLYNVMYRERTLFLGQEIRCEITNHITGLMVYLSIEDGNSDIFLFINSPGGWLISGMAIFDTMQTVTPDIYTICLGIAASMASFILLGGEPTKRIAFPHARIMLHQPASAYYRARTPEFLLEVEELHKVREMITRVYALRTGKPFWVVSEDMERDVFMSADEAKAYGLVDIVGDEMIDEHCDTDPVWFPEMFKDW

SEQ ID NO: 361934 - protein, 191 aa, Zea mays
  Clone ID: MRT4577_9325C.1.pep
PVRPLDEQSSDHKPGFTSNITKTSNVESVLPNSPQNRPLVILGLQLSKLSVKKTGYFSDKTEVQKSSTVLGYAAHAVSLIASYLNVPLRYPLRFGGSRSYVLDPAPSVEPSSITSVGTSVPPSTSMRTTEFPLFLDSQETTRSSYAIFLLNKDIEQLLNYIGAESLGPRHVLANLKQLTTIIQSQGYISDG

SEQ ID NO: 361935 - protein, 88 aa, Zea mays
  Clone ID: MRT4577_93260C.1.pep
SFFFLFIFFFFFSFLKLPEDTRFPPSINSFSVCPYTQLIPVSRDSHTPLSLPTKGTISNRTASLLHHSKSICQKCRQEGGEKALTLGP

SEQ ID NO: 361936 - protein, 81 aa, Zea mays
  Clone ID: MRT4577_93261C.1.pep
PTRTAKRTPMRADHERRGQVHLRRCRPNTRVSRRLHGACRRANVTYHTRRKRGRLCLGITCSLFLFFPWVGARMGRAVVLV

SEQ ID NO: 361937 - protein, 74 aa, Zea mays
  Clone ID: MRT4577_93263C.1.pep
FTTNQDYISNNLLLSVYSSSVNTDVNINDVIKLKLHDRRSRLIRYVKLDFACAESSSTNNDDRYNNNNLHNNDN

SEQ ID NO: 361938 - protein, 73 aa, Zea mays
  Clone ID: MRT4577_93264C.1.pep
HASFQCPKNGIFRNDLQLRLPAHQHWQNNLKMVCGATWKTAGQSKAGHMDPDHFSLTAVAPSPTAFCQQILAR

SEQ ID NO: 361939 - protein, 99 aa, Zea mays
  Clone ID: MRT4577_93265C.1.pep
RGNFLRAEQTASGTFFSCSRGLQININPCLPCHHHHQPVAGASDMDCLRFKKNAEMPLTHQKCRGHVVSFYRKEFQHHPQKNQALFARDRTFRDRGPPL

SEQ ID NO: 361940 - protein, 290 aa, Zea mays
  unsure (1)..(290): unsure at all Xaa locations
  Clone ID: MRT4577_93266C.1.pep
MGTPEFPNLGKHCSVGDCNQIDFLPFTCDRCDHVFCLDHRSYTSHQCPNANMKDVTVLICPLCAKGVRLNPSEDPNITWDTHVNTDCDPSNYQKVMKKKKCPVPGCRETLTFSNTIRCKDCTREHCLKHRFGPDHKCPGPRKVDSGFPFVSMLRRSQKAETRSNSSNNNGSSWWSSSLVNAATNFKSSAEAGMQKLSTVTSQAFQKAKDGIAPNSSSSSGDLVEQCVHCPARFSTVGALIEHVEKSHHXNSQPSHGRVTINVCPKCSKAFRDPVLLVEHVRRXHGGTSRV

SEQ ID NO: 361941 - protein, 37 aa, Zea mays
  Clone ID: MRT4577_93267C.1.pep
MVIENTDRQYNKHPLSILSASYMSFINESNNKNREGN

SEQ ID NO: 361942 - protein, 128 aa, Zea mays
  Clone ID: MRT4577_93268C.1.pep
MLPLLLHPLLLYGHQDAYYIYKEFHCLCLPKKKKKKKKKKKRKKKKKKKKKKKKKKKKKKKKKKKKTHLVFFQKLKTLSPAPPLSFFPPPENRRPGAPFALGLDPWEKKMGLGGAPFWGEIFSNRAQT

SEQ ID NO: 361943 - protein, 148 aa, Zea mays
  unsure (1)..(148): unsure at all Xaa locations
  Clone ID: MRT4577_93269C.1.pep
IERFRPTYRKPPKPQRTRAPPXQLRPSPATPIPPSTRRSPPTPSSRTPNSPPXPRPRPXPPPASPSXXPPPXPPPPPXPAPPPPXPSPPCSLFFFFFLRASSRAAVFVVSPVILRWFALGLCCWFPACAVVVFSFVFLLCACLLPGCS

SEQ ID NO: 361944 - protein, 42 aa, Zea mays
  Clone ID: MRT4577_9326C.1.pep
LILFCEFYRGEQHFSALKGSLPSNGAQQCHMHYPLPSNNNNT

SEQ ID NO: 361945 - protein, 41 aa, Zea mays
  unsure (1)..(41): unsure at all Xaa locations
  Clone ID: MRT4577_93270C.1.pep
RGNTFXLDXRDDLSIRRKANHALYSNKGNGLVAEQKFQGGA

SEQ ID NO: 361946 - protein, 234 aa, Zea mays
  Clone ID: MRT4577_93271C.1.pep
MVSFTTVITAAVAATGALAAPVADASTDFAERSLSVLTARAGTPSSQGTHNGCFYSWWTDGGAQATYTNEAGGKYSVNWKTGGNMVGGKGWNPGAARTITYSGTYSPQGNSYLAIYGWTRNPLVEYYVVENFGTYDPSSAASVKGSVTADGSSYKIAQTQRVNQPSIDGTKTFNQYWSVRQNKRSSGSVNMKTHFDAWASKGMQLGQHNYQIVATEGYFSSGSSSITVTALISA

SEQ ID NO: 361947 - protein, 82 aa, Zea mays
  Clone ID: MRT4577_93272C.1.pep
SRPGREKKKKKKKKKKKKKKKKKKKKKKKKKKKKKKKKKKKKKNPSWPREPWKIKSFGPKMGGVLTRARTGLPKKLGGRVEI

SEQ ID NO: 361948 - protein, 47 aa, Zea mays
  Clone ID: MRT4577_93273C.1.pep
CGITVVQGTYVELFPGIWVGTKWSWEWACLPGFEGKPAASLGGGGWV

SEQ ID NO: 361949 - protein, 139 aa, Zea mays
  Clone ID: MRT4577_93274C.1.pep
GKARPSGRTGGKAGAGGRGERGGPRGGGTGGTTGTGRGGGPGKRGRGARRTRGTRQRATKRTRTRAPPPAGRAAGKARRPERGRTRRGTGAWARTTETADRQGRQTQGTGTADQGAPVAPWARANATSARTETSRPSAG

SEQ ID NO: 361950 - protein, 84 aa, Zea mays
  Clone ID: MRT4577_93275C.1.pep
NEATGASNILLFKYKVKLLHKPQIRSCKRTRVGARSIKDRPNHRPITTERGAQQGSPVNGEQNGFHHALLGNEKGKKKRSLLPR

SEQ ID NO: 361951 - protein, 123 aa, Zea mays
  unsure (1)..(123): unsure at all Xaa locations
  Clone ID: MRT4577_93276C.1.pep
QTMPRRFIIQSKNRACLSFFMLFPAPNSVRGGGXGWXXXXXXLTGLXXLLWFPCSVVLPCLGPWLGARGVSPVAFVGVLPALASAVAASFGPVGWALFRGSSLLSLFCVGPCALSLPGAGPLG

SEQ ID NO: 361952 - protein, 59 aa, Zea mays
  Clone ID: MRT4577_93277C.1.pep
WSSYLQYASCFTSFVPLDTSGKNFARNDSICVTLPFMYSRMCVKVISMIEKNIIQKDHR

SEQ ID NO: 361953 - protein, 122 aa, Zea mays
  Clone ID: MRT4577_93278C.1.pep
LFSGGGGRIIWQKGCFKPRLTGMGSTMGKEFPFFFFTGRGGRTFNTTGGDILGVKKLGERPILGIFGGLCKCKEPFETRGGFSPPKGGSLGEDLLLVPQGSLKGGHSWCNQKAGVATGGTIW

SEQ ID NO: 361954 - protein, 237 aa, Zea mays
  Clone ID: MRT4577_93279C.1.pep
WLHARTVLHLAVFVLSTRPRYPPRVASLEKDVIAPYKHMAKTYANDSAGFDDRPTLLYFRGAIYRKEGGSIRQELYYMLKEEKDVYFSFGSVQDHGASKASQGMHSSKFCLNIAGDTPSSNRLFDAIVTHCVPVIISDDIELPYEDVLDYSKFSIFVRSSDAVKKGYLMRLLSGVSKQQWTKMWDRLKEVDKHFEYQYPSQKDDAVQMIWQALSRKVPSIKLKVHRSSRFSRSNRGK

SEQ ID NO: 361955 - protein, 70 aa, Zea mays
  unsure (1)..(70): unsure at all Xaa locations
  Clone ID: MRT4577_9327C.1.pep
GIGWYEQDKLKAVSXELGHEIRVFXSSKNFALQSSKLPSADHVKDDNFYELQPADYYNLISNRTEVENIV

SEQ ID NO: 361956 - protein, 288 aa, Zea mays
  Clone ID: MRT4577_93280C.1.pep
MATEEVLHKVQSLILRCLQMYMDQKEVVDALSHHSKIEPCITELVWRQLEHQNPLFFKAYYMRLMLKNQIMVFNKLLQDQFEVINKEFSSGIPSMSLPNGSNSNLLKQNPCFLPETAPGSAMPDGIMHNGSSRGIINGTPSGDQLLNASKDLHGLHNGIDASTSLQSDQNAAAVLYGVDNETSATIKTESCYSSNADFAFCGNTFLESCQSIGDASGGGSFSSSELNGQPLNDSILDMESSSFSFLNQMPQSFIFPDLGDDFNQSAEITQFLTPETNFSDSTGGDHTG

SEQ ID NO: 361957 - protein, 184 aa, Zea mays
  Clone ID: MRT4577_93281C.1.pep
MAVDLMSCGGGAYEQLAFQEAAAAGLRSLELLASSLSPCGAGRAESPPLGQIADQAVSRFRRVINLLDRTGHARFRRAPAVAAVEPIETETPASQQAAAEPPHQAQNKAPTLDFAKSVPPAANKKAPPAPAVSATSTSFLSSVTAGGEGSVSKGCSFAAVSSGKPPLPKRTFACPVAAPPGAHH

SEQ ID NO: 361958 - protein, 76 aa, Zea mays
  Clone ID: MRT4577_93282C.1.pep
SWLLTSSWRLTYASILLVQQWLAFVQTDLPKLPFYYQQRSIAGDPLTDRSLVALQSSSFWDAASLLPTTHHWWCPL

SEQ ID NO: 361959 - protein, 155 aa, Zea mays
  unsure (1)..(155): unsure at all Xaa locations
  Clone ID: MRT4577_93283C.1.pep
MGIDLVAGGRNKKTKRTAPKSDDVYLKLLVKLYRFLVRRTKSNFNAVILKRLFMSKTNRPPISMRRLVKFMEGKEKNIAVIVGTVTDDKRIQEVPAMKVTALSFTETARARIVNAGXHFGKAPGVPHSHTKPYVRSKGRKFEKARGRRNSRGFKV

SEQ ID NO: 361960 - protein, 187 aa, Zea mays
  Clone ID: MRT4577_93284C.1.pep
MGIDLVAGGRNKKTKRTAPKSDDVYLKLLVKLYRFLVRRTKSNFNAVILKRLFMSKTNRPPISMRRLVKFMEGKEKNIAVIVGTVTDDKRIQEVPAMKVTALRFTETARARIVNAGGECLTFDQLALRAPLGENTVLLRGPKNAREAVRHFGKAPGVPHSHTKPYVRSKGRKFEKARGRRNSRGFKV

SEQ ID NO: 361961 - protein, 112 aa, Zea mays
  Clone ID: MRT4577_93285C.1.pep
LQLLEFISSGIDYTSSGQEHKIVVGILCLVLHHSSSNFLIEPAKAIILNSSLVSLTDVVVNNACVKGPSLFQHNQETTFGEFLILVLLLVFFSLRRYGAVACMLHFICLGLH

SEQ ID NO: 361962 - protein, 129 aa, Zea mays
  Clone ID: MRT4577_93286C.1.pep
MGTAFSSSSSTPESRAMALAKAKEIVASAPVVVFSKSYCPFCVQVKKLFTQLGASFKAIELDTESDGPEIQSALAEWTGQRTVPNVFINGKHIGGCDDTVALNKGGKLIALLTEAGAISGSPSKTTVTP

SEQ ID NO: 361963 - protein, 41 aa, Zea mays
  Clone ID: MRT4577_93287C.1.pep
ALAPAAAALRSGEGSQRAQSQSPPGRLHVSVPWGGGNCSSR

SEQ ID NO: 361964 - protein, 43 aa, Zea mays
  Clone ID: MRT4577_93288C.1.pep
SCSASRHCILLIHYYLLRLLFYCLHEQHMEHLLHALHICETDN

SEQ ID NO: 361965 - protein, 146 aa, Zea mays
  unsure (1)..(146): unsure at all Xaa locations
  Clone ID: MRT4577_93289C.1.pep
EGGEKKGKKKAKKRVEAFKISFFKVFKKGPPHMGIFSKAMSLMNSFIKGIFXKLAGEAPKLGGFNKKPPLPFRGIQTSGGLVLPGGLAKHPVFEGTKAVPKFPSNWGGWGVPGFFKRVFFWVLFPVPPPTRLGGRLPALLIRGAGL

SEQ ID NO: 361966 - protein, 63 aa, Zea mays
  Clone ID: MRT4577_9328C.1.pep
PPNARTCCWLLVFLALFSLANGSEDLPRGYGGPSEFFKGHRPLWMLIVGPPWPAIIFKTRLVD

SEQ ID NO: 361967 - protein, 150 aa, Zea mays
  Clone ID: MRT4577_93290C.1.pep
DNSAWNQRYFVITRSPFLGGLAAMRDSEVDYTIEAILANAQNESPWRYLKGLYKGENNLLIEDERISGVCFKVLKNDWTCVFALSLLLDLLCTGLQPSDELRSTLETIRSSHPETTDADPAAAVCCILQKCDPLRVNYWSWFKDTLSQIS

SEQ ID NO: 361968 - protein, 49 aa, Zea mays
  Clone ID: MRT4577_93291C.1.pep
VEADVRLYVISCKPDAGERNTYDALEVLVLLETDRKWHVLTGFVHRSIN

SEQ ID NO: 361969 - protein, 107 aa, Zea mays
  Clone ID: MRT4577_93292C.1.pep
QICAARKKGWVKAVKLARAGQIPVLVLRIYVECSSAGLRHYRCVQPLLVLLRCFYSTMYWIDGRQRCSDTFNAFAQVLRICTCTRFCSIATVTKYCLFPRHTVRIEL

SEQ ID NO: 361970 - protein, 436 aa, Zea mays
  Clone ID: MRT4577_93293C.1.pep
MGLRNNPNMKSVDSHLIEGLAVSEGKHGVSVAAFLENKERCAKTSYCSNTETKTTKSAIDNRLETHDLGTGPVKLNSSFNEMHSADRQCSLVFGCLDSADVPASTQALSVSPVLMSDEQQVDDAHSAVKAIEHLGNNLANIKHKSLHMDVLMLEDAQVASMAAVPGHEGESVEAGSNSFDILLGALAEESKAADAPGKDEVGKASLTLITLASNEPSVTEGRVVDVVETDTILGAGKDDKQVDQAHDFHLSDLVSRCIGSSNRSDIICYVRRKHKRKRDYSCFVRSPCERLRPRSKPAVVEESEWSRTAEASFAKRGKRTQAVGSFQCDIDLCGMAFETRAELNAHKRNICTDESCGKRFSSHKYLKRHQCVHSEMRPFKCPWEGCKMTFKWLWAQTEHVRVHTGERPYKCSAPDCGQTFRYVSDYSRHRKKFNHY

SEQ ID NO: 361971 - protein, 40 aa, Zea mays
  Clone ID: MRT4577_93294C.1.pep
MLLWLTSSSLALTPYHQTMYYYNSLALSFYASASLLSAIY

SEQ ID NO: 361972 - protein, 57 aa, Zea mays
  Clone ID: MRT4577_93295C.1.pep
QNLGGWQLPPFALGGAPPFFFFFPIKVVFFFFGVVSLKTFFPFFFFLEVLLGHPLPS

SEQ ID NO: 361973 - protein, 51 aa, Zea mays
  Clone ID: MRT4577_93296C.1.pep
QFQLPLASSAFIMPRVLYYGCANATLGGQRGRRARRSWNGRPVSSPPASSE

SEQ ID NO: 361974 - protein, 172 aa, Zea mays
  Clone ID: MRT4577_93297C.1.pep
MASEAARRRQEMAEEGQRHLEETIAASFQILVSMNDELCNAGLWSSSSVSATAAAGYQHHHSATLPTPHSVDSDAADAGGAPSPGGSLDEARHRYKSAVAALRASISAVSSCAQDIGSTESEADHAEIERLEEHAAALRKEIESKNKQVKLLIDQLRDLIADIAMWQSPCSV

SEQ ID NO: 361975 - protein, 47 aa, Zea mays
  Clone ID: MRT4577_93298C.1.pep
GKQRLEVDDGSCWIFRWPLFFFFFFWHDFWRDLKGDLVSDSPGICCP

SEQ ID NO: 361976 - protein, 76 aa, Zea mays
  unsure (1)..(76): unsure at all Xaa locations
  Clone ID: MRT4577_93299C.1.pep
LNHKLHYQPDTHTTYYEYTXLXHIYWLIAMNSCIYTSIYNTLYTICIEKLYVSPYAALLAYSLIFTINDSSYCNLY

SEQ ID NO: 361977 - protein, 118 aa, Zea mays
  Clone ID: MRT4577_9329C.1.pep
FRILTLNLERAEIECEPCSAEEVDHTDNDPNVVYYWGLIPKRIIHVDTIYLNGDFMVDLTNDVYGTVNCAHSDVTLSVAGLTQLPKSMCRQVYLPAVHAPLYDGLRGLTSTPYRAHDR

SEQ ID NO: 361978 - protein, 149 aa, Zea mays
  Clone ID: MRT4577_932C.1.pep
MALASVSSASAAIYAITVPAVLTPNTTFPLTFNSNLDATNSLDVAVAYGFGAPPPYAGALGFNFKTIYLAGEESGYKMGTNYTVDVVAPAAIAGYNGSVVVTAAVYQIFGYSGTYFLKTFNVTVDVGDASPDDGVVFNGDGDNKATCNL

SEQ ID NO: 361979 - protein, 94 aa, Zea mays
  unsure (1)..(94): unsure at all Xaa locations
  Clone ID: MRT4577_93300C.1.pep
FLNGKLAPITIHVPTEGRGYIFDADMRYKSDGHATIILXGAEHGSEQARDWADEAPMLMXVKVVIAKSSERIHRSNXVGMGIIPLCWKAVGDVD

SEQ ID NO: 361980 - protein, 52 aa, Zea mays
  Clone ID: MRT4577_93301C.1.pep
RMVAYCTVLITIAGGTALNSGRKPGYTGRTAKPDCQKLGQLATGAISVSVPA

SEQ ID NO: 361981 - protein, 40 aa, Zea mays
  Clone ID: MRT4577_93302C.1.pep
DARLSIIMKAYQIQLSSTADMNKPRISPKTIASAHDEHEV

SEQ ID NO: 361982 - protein, 58 aa, Zea mays
  Clone ID: MRT4577_93303C.1.pep
CGVFCRVKGVSISVILRARSSIGGPITVVHERCSLAPSCLPFSVRRRHIFIFGLAICI

SEQ ID NO: 361983 - protein, 82 aa, Zea mays
  Clone ID: MRT4577_93304C.1.pep
SIVIADSTTISFYIYAIKLNCATPFSTTYVRIIRNTSNDICVVQSFNNKQVTIHKNSSCTMRTPHLMKQYNDGMFNNSLHNS

SEQ ID NO: 361984 - protein, 77 aa, Zea mays
  Clone ID: MRT4577_93305C.1.pep
MRAWSAKPATGGRTSWPEGVGLTVKEAKKVFLAARPNAAFGVLPTTTQAGPSDFGFDRVRFFVGPVAQTPNVGWAGA

SEQ ID NO: 361985 - protein, 72 aa, Zea mays
  Clone ID: MRT4577_93306C.1.pep
TRNQGKKEGCQDNHNSQGSPVVSYLSHHMLLPHLLVAKNRAFASAPRLPANYCVWCSPHVKREPLKACRFRY

SEQ ID NO: 361986 - protein, 68 aa, Zea mays
  Clone ID: MRT4577_93307C.1.pep
MRLRSDAVQLLLHQSPSTTMAAKTFSYDQINLQVLGNTYGKIQTSITNAIPNTDDSRDEQVRLCTYLT

SEQ ID NO: 361987 - protein, 199 aa, Zea mays
  Clone ID: MRT4577_93308C.1.pep
MADYRFLVQETLIALCLLLSFPPGIASIHSSTLNRSCILEERAALLSIKASLLDPNNYLSSWQGQDCCSWKGIRCSQKTGNVVKLDLRRINPGNFGGEISYSLVNLRRLRYLDLSYNNFSGVQIPEFLGSMSRLRHLDLSYTYLHGRIPPQLGNLTKLVYLDLRCWDFYNPTYYYPFSANLAWLSQLSSLKHLDMSFVN

SEQ ID NO: 361988 - protein, 191 aa, Zea mays
  Clone ID: MRT4577_93309C.1.pep
MPPKKRAAAAASSKKPQPSQPSQPAKFGILHFFERQTQASQNAKRQKPDPPAPPPPPPPPPEKEPSEVSPEVTKTLAPKRVRFSPGMLIKQSQDDGVAEVVTWKISPVNHRLGTTKSKQFLGMAPHPYSSEKNSSLEAMKKWHSSPLGLSRCTTLGSNSGVLGSAIVGCDGVGDTQSPRTPPSSYGHEQVS

SEQ ID NO: 361989 - protein, 37 aa, Zea mays
  unsure (1)..(37): unsure at all Xaa locations
  Clone ID: MRT4577_9330C.1.pep
EYERTVNRSMTRQKIVGMXCFYGHSLSWSGVWNEAXX

SEQ ID NO: 361990 - protein, 94 aa, Zea mays
  Clone ID: MRT4577_93310C.1.pep
TSYIHRKSTTSKQSYSSYLALPTGIYIYVLIHPNGPVHPAALHYSLPLLHQQLMHDSYMFIRMYMANIVLSIQISDYIISSEISSPLFLSPIAP

SEQ ID NO: 361991 - protein, 84 aa, Zea mays
  unsure (1)..(84): unsure at all Xaa locations
  Clone ID: MRT4577_93311C.1.pep
HVANIVAFLQQQQLLPFXTRFDESYXYCISPPLVVGNINAFLQQQQLLPFYPQDVANIVAFLQQQQLLPFSQLALTNPTTLLHQ

SEQ ID NO: 361992 - protein, 119 aa, Zea mays
  unsure (1)..(119): unsure at all Xaa locations
  Clone ID: MRT4577_93312C.1.pep
ASQAWMEWVMKKQKSFDQRGDMIMASWAKQQQRKMTLRAQRFSRSKIXXDPKEERKLFAKEKKASMEFYGATLKTHTLVIRKRDIMREKAEDEKDIISINSVTLSQILLVRNGRIQYLL

SEQ ID NO: 361993 - protein, 73 aa, Zea mays
  Clone ID: MRT4577_93313C.1.pep
YCLDYSHGTTANTPDANRAKIEFNLLLCIEPKSYAYLNLLTNTTLRALSPINTYLSGLKFKAPSMTLHYENQI

SEQ ID NO: 361994 - protein, 54 aa, Zea mays
  Clone ID: MRT4577_93314C.1.pep
IVPQSHMSDHMLSCNQQSHKGYMKFKVISHVSVPIAIEHNLHDNNVSEPVRLHG

SEQ ID NO: 361995 - protein, 255 aa, Zea mays
  unsure (1)..(255): unsure at all Xaa locations
  Clone ID: MRT4577_93315C.1.pep
PAGSYPAESPEKRRECERAAQVIRTTVEKDLRPRDIMTRASFENALVLTMILGGSTNGVLHFLAMANTADVPLTIDDIQRASDRTPFLADLAPSGKYYMEDLYKVGGTPSVIKMLVARGLLDGSIMTITGKTLAENVADWPSLDPGQDIIRPLENPIKDSGHIRILKGNFAPGGAVAKITGKEGLSFTGKARVFNTEEELNGALNRSEIKQSDGNLVVIVRYEGPKGGPXGMPEQLRASAAIMGAXLFHLALVTD

SEQ ID NO: 361996 - protein, 136 aa, Zea mays
  unsure (1)..(136): unsure at all Xaa locations
  Clone ID: MRT4577_93316C.1.pep
METPQVEMGGFKVNSPQVPNGGLRPTVSSSWNSQGTVERALRSIRIVIFTSKLNLLMPFGPASIILHFTTRRHGLVFLFSMLGIMPLAERLGYATEQLAVYTGPTVGGLLNATFGNALXMIIAXYALENGMIRVVQ

SEQ ID NO: 361997 - protein, 419 aa, Zea mays
  Clone ID: MRT4577_93317C.1.pep
MMMETPQIEMGGFKVNSPQVPNGVLRPTVSSSWNSRGTVERALKSIRIVIFTSKLNLLMPFGPASIILHFTTRRHGLIFLFSMLGITPLAERLGYATEQLAIYTGPTVGGLLNATFGNATEMIIAVYALKNGMIRVVQQSLLGSILSNMLLVMGCAFFAGGVVHRNKDQIFSKATAVVNSGLLLMAVMGLMFPAVLHFTHSEVRQGASEVALSRFSSCIMLVAYASYLYFQLSGRSNIYSPIGSEEAPIEDIAEEDEEAEIGMWEAVTWLAVLTLWVSFLSEYLVNAIEGASDSLNLPVAFISVILLPIVGNAAEHASAIMFAMKDKLDITLGVAIGSSTQISMFVIPFCVVIGWMMGQRMDLNFQLFETATLFITVLVVAFMLQDGTANYLKGLMLILCYLIVAASFFVHVDPQSSDG

SEQ ID NO: 361998 - protein, 126 aa, Zea mays
  unsure (1)..(126): unsure at all Xaa locations
  Clone ID: MRT4577_93318C.1.pep
MMRSDGSTSMSLLVIGRVNLTMNFGDAVLNLNIFLPTLMPIVTDNPTVNLVVLCDDHYYDDDSCDGICDCMXTNXLVHHMHDRINTRINLSSMLYRVLDRFLATSTIAXEXCDNMSIIIALIIKPV

SEQ ID NO: 361999 - protein, 73 aa, Zea mays
  Clone ID: MRT4577_93319C.1.pep
REGSCDARGRFVPEKFEEIFARRARAAPDALTSDEIGRLLRAGGEPGDCSGWAGAEAEWKILCSLGEDGDGLL

SEQ ID NO: 362000 - protein, 81 aa, Zea mays
  Clone ID: MRT4577_9331C.1.pep
APSWVRTPVVVFAQESPSGRKAVKIVVLTARPVRGVPHFWRNPVVCHFATRVGTSVLLKASFFTFPPKYRTPFLLKPRSKY

SEQ ID NO: 362001 - protein, 87 aa, Zea mays
  Clone ID: MRT4577_93320C.1.pep
MQLCIRQSRAVEGSDDNGDIRARIRNAAAFARVHEGNGKQGWVIGTVEQTRHCSPSVNRGNVRKKQASKKNPSDLEHEDGSYLFEVK

SEQ ID NO: 362002 - protein, 131 aa, Zea mays
  Clone ID: MRT4577_93321C.1.pep
MFYSVSSSLSIRKPKKKKKKKKKKKKKKKKKKKKKKKKKKKKKKKKKKKKKKRGGGFKGSKFTSGGLQRISFFLGSLNLNKLAVVLKLRDWKNLGFTKFNGFEENPFFAGWGIRKGALTGWPFQIFAQSDW

SEQ ID NO: 362003 - protein, 151 aa, Zea mays
  Clone ID: MRT4577_93322C.1.pep
MGRLHSKGKGIASSAIPYSRTPPAWLKTTPDQVTDQICKLAKKGATPSQIGVVLRDSHGIAQVRNVTGNKILRILKSNGLAPEIPEDLYFLIKKAVSVRKHLERNRKDKDGKFRLILIESRIHRLSRYYKTVGVLPPTWRYESATASTLVA

SEQ ID NO: 362004 - protein, 165 aa, Zea mays
  Clone ID: MRT4577_93323C.1.pep
RFREGSWSVRDLLALGGACALSSWVRVWFPFGGPRVFLRCFGPPFGFFCSCPVFAWFCSCSRRVFFFGASGPFCGFFSPFGLLCPVFRFCPLCPLFPFFSRSLVAPWSPPPPFVPLLFRVTSCVPLPFGARVCGAFWVPCVAPLVPFSSPVVFFWFFWWLKKEYI

SEQ ID NO: 362005 - protein, 133 aa, Zea mays
  Clone ID: MRT4577_93324C.1.pep
NILCLNFHREHSHKHTTSKLIGETALGPHLGTPALSRGGTMGPTQTLGEGGQKGPFRAQGGPGKSQGLKNMALNQKADALRGGSPGGKPPVTKPNLDENPAPHPKGPRKNRGKKPATNPPWTRAFLRGPRDPL

SEQ ID NO: 362006 - protein, 160 aa, Zea mays
  Clone ID: MRT4577_93325C.1.pep
GRDPHQCAQPAYLPPTPRIVPMAAAIRGSPTRAAAPTQPRAVLRVASSAAPASSSSARPRKGAVAEAAMQPAKEVDVEADSPAVALQMSNVAAFSEHYRPILLVELLTDDIVCEDDIFKYRPARREEEGPLCHRHRPPRHECARWSSRCSPTSTMTSSST

SEQ ID NO: 362007 - protein, 34 aa, Zea mays
  unsure (1)..(34): unsure at all Xaa locations
  Clone ID: MRT4577_93326C.1.pep
PGLLLLLLNFLSSSYPVYSLSRSYPYXHKFQTPQ

SEQ ID NO: 362008 - protein, 66 aa, Zea mays
  Clone ID: MRT4577_93327C.1.pep
MARVSSVESISASVVTGSAVRSAYGRRQKPVGGLAGRCNAVLKEHKTRLYILGRCVSMLLCWHDHA

SEQ ID NO: 362009 - protein, 82 aa, Zea mays
  unsure (1)..(82): unsure at all Xaa locations
  Clone ID: MRT4577_93328C.1.pep
SRXXPGQGISYCNISHRENESISTSGWSPYGTAPKHRVPPTASAGTSWNVQRPPWRRARRTIAVARCVPRHDSSGDSSASPS

SEQ ID NO: 362010 - protein, 133 aa, Zea mays
  Clone ID: MRT4577_93329C.1.pep
MLRAVLLRSASGLRRSPMAAPLSTAAASWLAEGTSPSPPRVRLLIGGDFVESRATEHVDVTNPATQEVVSRIPLTTADEFSAAVDAARTAFPGWRNTPVTARQRIMFKYQELIRANMDKLAHNITTDPRKTLD

SEQ ID NO: 362011 - protein, 109 aa, Zea mays
  Clone ID: MRT4577_9332C.1.pep
HWRPPHSSALSPWRCRRCRCAPAGRCPSNPHTTSIISSPSPFSPWRLRGRLSYSLPLLSLGHQLSAGDSSKRPAWEASTFFVSHCITSSVCRIGCGSDMMKTGIMVPRP

SEQ ID NO: 362012 - protein, 64 aa, Zea mays
  Clone ID: MRT4577_93330C.1.pep
LKEHELLCDICLRLDVSVLSSRSVYTKFLNPVWLSVDACSQPSLGMVTKSSHKNPKKKRRAAAV

SEQ ID NO: 362013 - protein, 480 aa, Zea mays
  unsure (1)..(480): unsure at all Xaa locations
  Clone ID: MRT4577_93331C.1.pep
VEAQMEEGRVRLVQLLQRTMISARKADLKNIPPCIKKITFLDFNEGHAKSYNELVVTIRRNILMADWNDPSHVESLLNPKQWKFRAATLKNVRLSCCVAGHIKVAEAGQDIQETMDELVQQGLDPSSDEYQLIRYSLLNGASCFRCSVWCRLPVITPCRHLLCLDCVALDSEKCTLPGCGYHYEMQSPETRARPENPNPKWPVPKDLIELQPSYKQDDWDPDWQSTSSSKVAYMIEKLRSLREAHMNHGNNITNSVGHSNTLSYQPQAMLDKVIIFSQFLEHIHVIEQQLTIAGIIYSGMYSPMPLASKVTVLVNEHKCASSSRISYGNANQAWVAQKALPLLRNEPCIVQCLXSKRSALTKFQEDPTCMALVMDGTAALGLDLSFVTRVFLMEPIWDRSMEEQVISRAHRMGATRPIHVETLAMRGTIEEQMLKLLQDSNACRKIVDKGTGSTDNEGGRSHRSLHDFAESSYLAQLSSV

SEQ ID NO: 362014 - protein, 147 aa, Zea mays
  unsure (1)..(147): unsure at all Xaa locations
  Clone ID: MRT4577_93332C.1.pep
QLTPAPVRWLHIPRLHIQGRTVDHAQPVLPSHQTHCDYLNVQGLQNPLDKPKLVNTFGKKYHAFWASRXIISPITACLGXTPHPEDFPILVTLQEFLEAEVSDTRATDKLLIKKDLCMMVAVMNLEMEENEIQHNIQMSVDFVVSLL

SEQ ID NO: 362015 - protein, 202 aa, Zea mays
  unsure (1)..(202): unsure at all Xaa locations
  Clone ID: MRT4577_93333C.1.pep
MPPGAAAVAATSQQADCCGHGPGPGPSWRGGGGCDVPGGASCSYLPLRKRLSVDGKFPAPRICIWECDGEAGDITCDIVXRSDPPQLQREGNAAAAGGXLFRRMMTPPPSRPRPPQREVEDAVAARRPGETISKGHRSYGLMLNLQLGVSYSXVGKSSALPFRKLSSSDFDPREKVWTRFPPEGSKLTPPHHLVDFRWKDYC

SEQ ID NO: 362016 - protein, 92 aa, Zea mays
  Clone ID: MRT4577_93334C.1.pep
GWTGPCGCPPRRRAGLCISMWCSDRLLHLKDVPSMPDLLFESRGLRGSRPRRRCYWTPPLSQSVSPGYFGLALEALSVQLLHAFLTRPQIVA

SEQ ID NO: 362017 - protein, 101 aa, Zea mays
  Clone ID: MRT4577_93335C.1.pep
SKGGELCTAFTARQALYKQSTAGFRSHRCQSLPYTQVRRQCACFVAFGMDPLLQLLVSYKQGCKGTPVSLFPSAFEPSTRCRQHSPSVYAPRRPLQPPSRR

SEQ ID NO: 362018 - protein, 48 aa, Zea mays
  Clone ID: MRT4577_93336C.1.pep
GVPVCRLQSFKRLIAALSISTLDDHPSMRTSSMFVTTADSLVMRDATL

SEQ ID NO: 362019 - protein, 93 aa, Zea mays
  Clone ID: MRT4577_93338C.1.pep
MGFIMEFAENLILRLMEDPDKRDQVRREHVYKMKERCERTKAAWNLPLRPYGFWTFERFNSQLSWDPQISQAAGRRDPYDDLITRHSGSPPSS

SEQ ID NO: 362020 - protein, 112 aa, Zea mays
  unsure (1)..(112): unsure at all Xaa locations
  Clone ID: MRT4577_93339C.1.pep
NKDLYWGAFSTREEAXDAYHIAAIKFRGLNAVTNFYMSRFPVESILLNDLPVWGGDTLRAGKFPLDLVQTASAGEMILDRAAAALQATMPPCEKDYWGLVTLHYQQQQEHGP

SEQ ID NO: 362021 - protein, 42 aa, Zea mays
  Clone ID: MRT4577_9333C.1.pep
CSRDGHPSAYSRGHTGNDCSHWCLAGVPDIWNQILDASLLLA

SEQ ID NO: 362022 - protein, 93 aa, Zea mays
  Clone ID: MRT4577_93340C.1.pep
MGFIMEFAENLILRLMEDPDKRDQVRREHAYKMKERCERTKAAWSLPLRPYSFWTFDRFNSQLSWDLQISQAAGRRDPYDDLITRHSGSPPSS

SEQ ID NO: 362023 - protein, 197 aa, Zea mays
  unsure (1)..(197): unsure at all Xaa locations
  Clone ID: MRT4577_93341C.1.pep
MTNLHIRASQGMASPIILQDAQKNRNVTETGELHITLNSYDPHKDXRFRGSGKLPHIPRPKMXKVGMLGDAHHAAEADNVXLDYMYVDVLKNMNNNNSLVKNLAKKYHAFLSSESILKPTPRLLGPALNKGGKLPTLCTRQESLXSRGSDTNDTAQFQLRTVLCMXVAVGNLSMPEKQTQQNIQMSINXLVSRLKKN

SEQ ID NO: 362024 - protein, 47 aa, Zea mays
  Clone ID: MRT4577_93342C.1.pep
FWQQKLLVIAIWDETTSAFIYNSLGIMGDLDNVSRFKPTSLSYPLSV

SEQ ID NO: 362025 - protein, 94 aa, Zea mays
  Clone ID: MRT4577_93343C.1.pep
KKPLPLPLPGNFYNKNMGEEITADKSTHAHGAKKKTPSNRVLRCSKPGQQGAGFCLNYTKLNCLVAGRVGNRGHFFFQLKVVGPHQICHPFVFF

SEQ ID NO: 362026 - protein, 67 aa, Zea mays
  unsure (1)..(67): unsure at all Xaa locations
  Clone ID: MRT4577_93344C.1.pep
FKKVSNFLARFKSLPRIVXLSSFKVFGDVWFGFGISLKGKVPIFPQPGVKFEIPNGDVLXNKDVHGP

SEQ ID NO: 362027 - protein, 66 aa, Zea mays
  Clone ID: MRT4577_93345C.1.pep
KNRSSVLYQSIALRPSPSHDHSHMGYDASMYGWAGVRRVFSAFVEDLFLNIMTRDCLTPQVEFFYK

SEQ ID NO: 362028 - protein, 57 aa, Zea mays
  Clone ID: MRT4577_93346C.1.pep
GSFNKEKKRGEVGNFLEGDLMEFFFAFRGRKMEGVLKGMGVPVEELFKRVEKLTGVP

SEQ ID NO: 362029 - protein, 94 aa, Zea mays
  Clone ID: MRT4577_93347C.1.pep
AAAAPSCIIIPITVTEEVSTTIVIVPANAADTESVVVRVSKAVTVTTITATIDAGTSVVPIAVAAATTTPIASTAVNDPSTAVTAVSAITATPG

SEQ ID NO: 362030 - protein, 94 aa, Zea mays
  unsure (1)..(94): unsure at all Xaa locations
  Clone ID: MRT4577_93348C.1.pep
PQIAVKFVELITKIDRGFGKKFXKEPKFLKNGNVGMVKIIPPKPMVVETFXGNPPLGRFPVRNIRQTVPVGVIKSVEKKDPPGAKVTKAAAKKK

SEQ ID NO: 362031 - protein, 46 aa, Zea mays
  Clone ID: MRT4577_93349C.1.pep
KQLHNIWAKIVIICSNMNHAIYTSILYNCSISRMHRHKYYSSKTHS

SEQ ID NO: 362032 - protein, 303 aa, Zea mays
  Clone ID: MRT4577_9334C.1.pep
MAAASSSQQPPRLLVLVAVSCLLLQSAITSSSAESSMQCHEEDQEALLAVNSALGSPYHFASWTPDTFCCDWYDVDCDNVTGRVVGLTVFGDGNLTGAIPDAIANLTNLRTLVLRHLPGISGGIPVSLAQLANLTQLTISSTGVSGPVPSFLSQLTELTLLDLSFNSLDGPIPETLADLPALSSIDLSRNRLSGPVPPLLLSKYVDDQAAYLVLSHNNLSGSIPAGFASVSFAYLDLSRNAFAGDASGVFGKGKPLQHLDLSRNGFAFSLTAVDLPEQLAYLDLSHNAIHRCLCGPPLADPCK

SEQ ID NO: 362033 - protein, 136 aa, Zea mays
  Clone ID: MRT4577_93350C.1.pep
MAFCNKLSGILRQGVSQSSNGPVTSMLGSLRYMSSKLFVGGLSWGTDDSSLKQAFTSFGEVTEATVIADRETGRSRGFGFVSFSCEDSANNAIKEMDGKELNGRQIRVNLATERSSAPRSSFGGGGGYGGGGGGGY

SEQ ID NO: 362034 - protein, 111 aa, Zea mays
  Clone ID: MRT4577_93351C.1.pep
MAATGLLRRAAASSLPRLPSGISLIQPPLPAPLTESQSLVIPGIGAAAGPAMELMAVPKKKVSKYKKGLRNGPKALKSVPVIIRCRCCGRVKLPHFYCCSGERGNPSESSS

SEQ ID NO: 362035 - protein, 153 aa, Zea mays
  Clone ID: MRT4577_93352C.1.pep
YNPRSLKIRPASRRWAGPRLQIEQRCKRQPFALLFHVVHLSTSPDFSPSGQQARRSMDDYQAYDAGSTHAATGVVARISDGEFVLAAARGYDNIQNPLTAETLAFRDAITEAVKEGWQHVHFETACQIGSGEAKENASNLVPLKGDWYCSFTI

SEQ ID NO: 362036 - protein, 125 aa, Zea mays
  unsure (1)..(125): unsure at all Xaa locations
  Clone ID: MRT4577_93353C.1.pep
TTYGSLRPPFGKHRLKIVEGISVLLTSGNETAEKELKKASAIKRPNGLVFEDSYNNLLPPHGGNIXVAGRRGKKPEVXEHVLHECDNVGKILASKRFSSLSTESNGPTGPSEGKTPPRIGNGGHM

SEQ ID NO: 362037 - protein, 52 aa, Zea mays
  Clone ID: MRT4577_93354C.1.pep
MRLFICSGCSAAYIIGALVSWRCLVVVGLIHCVVLLVGLFFIPESPRWLVRW

SEQ ID NO: 362038 - protein, 85 aa, Zea mays
  Clone ID: MRT4577_93355C.1.pep
HASALTVLLKKRSDRLCPLAPSKTCWPRLTSFYKVVLSRDFIQVQSSSYKKGAKIYDIKLVSFDISKLVADICTFNIRCSAYKTP

SEQ ID NO: 362039 - protein, 61 aa, Zea mays
  unsure (1)..(61): unsure at all Xaa locations
  Clone ID: MRT4577_93356C.1.pep
DHVVLGRWYIRDQLDFRGSSQVAISLSVAVSARRRRVDESAGSEGLGIARPXASSGRXXPP

SEQ ID NO: 362040 - protein, 64 aa, Zea mays
  Clone ID: MRT4577_93357C.1.pep
GVAGVLQYGLLNPVYYVTAFLLVWFYVAPAPGRMGYGAAVERFVKLMTMVWAGSQVTKIFRAGG

SEQ ID NO: 362041 - protein, 48 aa, Zea mays
  unsure (1)..(48): unsure at all Xaa locations
  Clone ID: MRT4577_93358C.1.pep
PAATPFGSPQCQALQQQFFPPIRQVEPLPRFQATFGVVXQSFLQQQPQ

SEQ ID NO: 362042 - protein, 91 aa, Zea mays
  Clone ID: MRT4577_93359C.1.pep
AKGRAPKHQRPGPEHPQEPHRDGAPTPTQEPPRRHRTAGAARAATATARARTATPPPTREQGTATPRRPGKKKTTQARPQERSQPKGGAHR

SEQ ID NO: 362043 - protein, 54 aa, Zea mays
  Clone ID: MRT4577_9335C.1.pep
LNSRVRPLVLQYTHYIYMLLYVRTAHIHEGLARRGGYTYVTYYWSHCHALNTFI

SEQ ID NO: 362044 - protein, 104 aa, Zea mays
  unsure (1)..(104): unsure at all Xaa locations
  Clone ID: MRT4577_93360C.1.pep
MASVTARAPVAALRPSSXSACLGHSSRLGRTATASTTRRSLKAEAKGERMPGLTSPAYLDGSLPTDIGLDPSGLAEDPKNLTWHVQAELENGQRAIACVPVMLT

SEQ ID NO: 362045 - protein, 82 aa, Zea mays
  Clone ID: MRT4577_93361C.1.pep
LTTLSMFRRAAYTLSAQVGRTYNDKRFERHGPVQPAPSTLGCLFDQSTVPPSAPSTTPTHGKRPLANKNQVAIHNNLYPHVR

SEQ ID NO: 362046 - protein, 120 aa, Zea mays
  unsure (1)..(120): unsure at all Xaa locations
  Clone ID: MRT4577_93362C.1.pep
KAHTNIDINAGCTANCLANWADAIDDEISVKDGLMTTVHTITDTQTTADRTSYKDXTNDRTARRNIIPNITGTANAAGKALAVLNGELTGMSTRVPTGDRTVDDSTVKLAESPAYDEIND

SEQ ID NO: 362047 - protein, 445 aa, Zea mays
  Clone ID: MRT4577_93363C.1.pep
MREILHIQGGQCGNQIGAKFWEVICDEHGIDHTGKYAGDSDLQLERINVYYNEAGGGRFVPRAVLMDLEPGTMDSVRSGPYGQIFRPDNFVFGQSGAGNNWAKGHYTEGAELIDSVLDVVRKEAENCDCLQGFQVCHSLGGGTGSGMGTLLISKIREEYPDRMMLTFSVFPSPKVSDTVVEPYNATLSVHQLVENADECMVLDNEALYDICFRTLKLATPTFGDLNHLISATMSGVTCCLRFPGQLNSDLRKLAVNLIPFPRLHFFMVGFAPLTSRGSQQYRALTVPELTQQMWDAKNMMCAADPRHGRYLTASAMFRGKMSTKEVDEQMLNVQNKNSSYFVEWIPNNVKSSVCDIPPTGLAMASTFVGNSTSIQEMFRRVSEQFTAMFRRKAFLHWYTGEGMDEMEFTEAESNMNDLVAEYQQYQDATAEEEEEYEEEGDEVAA

SEQ ID NO: 362048 - protein, 80 aa, Zea mays
  Clone ID: MRT4577_93364C.1.pep
PSTSPRCAFEFHQRYRTLDVATALIIMYRSVRRRTHTSHTTSDAYRAYTDTLHVDAQIRLLQLLNLAALAYGQLEALAQL

SEQ ID NO: 362049 - protein, 108 aa, Zea mays
  unsure (1)..(108): unsure at all Xaa locations
  Clone ID: MRT4577_93365C.1.pep
RLTGCMQIFVKTLTGKTITLEVESSDTIDNVKGKIQDKXGNPPXDQQRXILAGKQLEERRKPSDYNIQKENNLHLVLRLKGSMQIFAKTLTGKTITLQVESSNTIDNV

SEQ ID NO: 362050 - protein, 77 aa, Zea mays
  Clone ID: MRT4577_93366C.1.pep
YTVRNLSNVHKYPQRTEIHVVRIAPFSAPTFHTGIKPKNHKRKAIQLTKLQHIIFHPRKHYKNNFNNVISITLGFPF

SEQ ID NO: 362051 - protein, 94 aa, Zea mays
  Clone ID: MRT4577_93367C.1.pep
RLRVEVLFFFYSGGRATCYFAKDTRKNFFVFQQHTGGNKRGPQREERPPPKGRSRPHRDGHGGQPHKQSGSESLRHRATKKKNLGHNKVTKWPT

SEQ ID NO: 362052 - protein, 663 aa, Zea mays
  Clone ID: MRT4577_93368C.1.pep
MVGSGESPAMVGDDVRLDPETEGVVDGNSLVTPPPALLGPVIDEMSIGEEGEQRVRPPMSNISSREMDTPQILHSHEKNIDPTIVPTVGMTFKDVDDAYRFYKTYAYEVGFPLKKYREKTFSKWINCSREAAKIELVNLEHNHEFITDEAEKQHLRCNKSRDAEFINFVDAMHDSRVPQHCIVDFISEMHDGPENVPVTAQDLKNMRAARRRENCANDVAKLLAFFTECKKQNPQFFCDFQLDNDGKIGEYANYGDAVTFDITHKTNIYDKPLGIFVGANSHLQCTVFGFVLLGDETVQTFEWAFNSFKTCMGCEGPRVMLTDQDPAMPIALRTVFPKTVHRLCLWHVQNRFMPFLNEIYASRKMKESKEVLMSKGPRTIDTLYRFEVRVSRAYTRAVMNRFEESMKYATAYKILKDADGCDKDWIVQHTKRSNKIVWGQHRFKITANIEAGEYTCECKQWEHTGLLCVLLLRAFMHLQVEKIPSKYILQRYTVSSRKDVPFERIDKSFRGKDGVTKSYRQKMLLTKTMKVVCQACMSKAGYDKAMDVLDELDGVICRLEPNIGCNESCDFSDDEEDKEGELNKNNTGDGMEDDNTITCHKMDEHNTMTGCEHALTLITAGNQENNMRIPPEVGDTSSPCHVTQEQMEHIAASSEAKKVSIDK

SEQ ID NO: 362053 - protein, 414 aa, Zea mays
  Clone ID: MRT4577_93369C.1.pep
MEMAGSGQSSAMVGDGGHLGPNTEGVVDGNLMVTPPPALLGSVIDASSMGDEGQQRIRPLMSNISSREMDTPQILHSHIVMIIFHAAKIELVNLEHNHEFITDEAEKQHLRCNKSRDAEFINFVDAMHDSRVPQHCIVDFISDMHDGPENVPLDNDGKIVSIFWSHASMQGEYADYGDAVTFDTTHKTNIYDKLLGMFIGANSHLQCTVFGFVLLGDETVQTFEWAFNSFKTCMGYEGPRVMLTDQDPAMPIALRTVFPKTIHRLCLWHVQNRSMPFLNELYARFADKDFKTTFQSIIHHPLTPHEFECAWEMMLEEFNLHEDMTLRKLYEIRKEWILAFFKNDFCGVMVSTQRSESMNRLVKQPHVDANTPLHEFAKHTMKMLHNRKMKESKEALMSKGPRTTDTLYRFEVSL

SEQ ID NO: 362054 - protein, 131 aa, Zea mays
  Clone ID: MRT4577_9336C.1.pep
NSARGNIWGSRGPGCVRWLAAASLVYWPPYYRLRNLPKRKRVRGTVPKLNHSPVGSNRGNGVFATRAARRRRHIRIIGMSRLQTRTARPVCKRGHRRSFDSSASPRTLFPFTSARWTRALPFNIAQHLTSC

SEQ ID NO: 362055 - protein, 161 aa, Zea mays
  unsure (1)..(161): unsure at all Xaa locations
  Clone ID: MRT4577_93370C.1.pep
MAGSGGSPAMEGDGVRLDPETEGGVGGNSLVTPPPALMGPAIAEMSIGEEGEQRVRPPMSNISSREMDTPQILRSHVSPIAVFDYXDYIVVNIFHGTNNNDNEIAXKNIDPTIVPTVGMTFKDVDDAYKFYKRYAYEVXGFPLKKYREKTFSKWINCSREG

SEQ ID NO: 362056 - protein, 894 aa, Zea mays
  unsure (1)..(894): unsure at all Xaa locations
  Clone ID: MRT4577_93371C.1.pep
MADSGGSPAMEGDGVRLDTETEGGVSGNSLVTPPPALMGPDIAEMSIGEEGEQRVRPPMSNISSREMDTPQILRSHAKNIDPTIVPTVGMTFKDVDDAYKFYKRYAYEVGFPLKKYREKTFSKWINCSREATKIELVNLEHNHEFITDEAEKQHLRCNKIRDAEYINFVGAMHDSRVPQHCIVDFISEMHDGPENVPVTAQDLKNMRAARRRENCSNDVAKLLAFFRECKKQNAQFFCDFQLDDDGKIVSIFWSHASMQGEYTDYGDAVTFDTTHKTNIYDKPLGMFVGANSHLQCTMFGFVLLGDETVQTFEWAFNSFKTCMGGEGPRVMLTDQDPAMPIALRTVFPETVHRLCLWHVQNRFMPFLNEIYARFAVKDFKTTFQSIIHHPLTPHEFECAWVMMLEEFNLHEDITLRKLYEIRKEWIPAFFKNDFCGVMVSTQRSESMNRLVKQSHVDANTPLHEFAKQMMKMLHSRKMKESKEALVSKGPRTTDTLYRFEVRVSRAYTRAVMNRFEESMKYATAYKILKDPDGCDNEWIVQHTKRSNKIVWGQQQFKISADIEAGEYTCECKQWEHTGLLCVHLLRAFMHLQVEKIPSKYILQRYTVSSRKDVPFERIDKSFRGKDGVTKSYRQKMLLTKTMKVVRQACMSKAGYDKAMDVLDELDVVLSRLEPDIGCNESTDVSDNEEDKEEELNKSNASDGMEDDNTVTCYDKDSHNTRTGCEHALTIITTGNQEDNMRFSHEVGDTSSPCHVAHDQMEQIGASSEAKKRLNFNVDVINLRMPDRARPKGRTIKNIEDRIMKLGAKXEKKKNRRCQLCGIADGHNSRTCLSVEENRARLAKLANRKRGRPAGSRLNNKTTAPQWNETSTAKKHRIDEEVENEEAAEHLDLGE

SEQ ID NO: 362057 - protein, 83 aa, Zea mays
  Clone ID: MRT4577_93372C.1.pep
HTLVSSLYSASGPTCRGSVSLYVSPLSYKREDTDCYRTHSLRHSDSHPIHRQWSRVLRSDGMNHSKPLCVLVFISNPSSRQNA

SEQ ID NO: 362058 - protein, 57 aa, Zea mays
  Clone ID: MRT4577_93373C.1.pep
THPIKIIPPKYSLWDWENKMLFRLLWQQQHLTVCPNKSIFNSPKMLNNIPPTIYCWI

SEQ ID NO: 362059 - protein, 46 aa, Zea mays
  Clone ID: MRT4577_93374C.1.pep
RCPGASMDLCRLLMSNEVCEFNYSRALVLSLHGECKTPLWAQNNPN

SEQ ID NO: 362060 - protein, 34 aa, Zea mays
  Clone ID: MRT4577_93375C.1.pep
DRERTPFLFLCYLHARVKKEVSLSLRSWKGVRSF

SEQ ID NO: 362061 - protein, 78 aa, Zea mays
  Clone ID: MRT4577_93376C.1.pep
GNLFFLLSYLLVYSNLVYFVNKGGNIFLSLFDSSKIQKLSMSILIFYGKNYLPKFNKICSLFITGCSWKHWLYILPRL

SEQ ID NO: 362062 - protein, 200 aa, Zea mays
  Clone ID: MRT4577_93377C.1.pep
MDTEAVPALAVVDARFCAAGAATLAVAKALSMSGSDFAVTDAATGAPVLRVDGVLFSLRRRCVLVDADRRPVLTVQESALMLNTRWKVFRGDSTRRRDLMFSVVKPSVIQLRGPTKVSVFLASNDAEQACDFRITGSYHDGACAVSLGDSDTVIAKIDRRFSVVSALLGKNSYSVTVNPGIDYAFVVALVVILDEMHYQR

SEQ ID NO: 362063 - protein, 196 aa, Zea mays
  unsure (1)..(196): unsure at all Xaa locations
  Clone ID: MRT4577_93378C.1.pep
MKEEKDHRPKEKRVTLFTPQGATGGCIGATAEGAKGDDRQDRNRDKKEALSKVVIRRLPPTLTKEQLQEHLQPMPEHDYFEFFSNDTSLYPHMYARAYINFKNQEDILLFRDRFDGYVFLDNKGQEYHAIVEFAPFQKAAKKKIKKRDTEVGTIEDDPEYRKFLESYAHRHEKMTSTPETLLDEIXAKNRALIAKR

SEQ ID NO: 362064 - protein, 122 aa, Zea mays
  unsure (1)..(122): unsure at all Xaa locations
  Clone ID: MRT4577_93379C.1.pep
PGSIQTGVGSKXHIFVKTLTVNTITLDVESSYTIDNVNSKIHYKDCIPPDHHLLIFSVKHLXDCRTLSDYNIQKXSTLHLLLRLPGFSNKLNKNTYTKPKNIKHNHKKVNLFLLHFYILDHS

SEQ ID NO: 362065 - protein, 220 aa, Zea mays
  Clone ID: MRT4577_9337C.1.pep
MKNVAKCDTWCELQNPANHRVFERKLRPRPLGRGHACLGVTQTPDETLACLPGAPSPSAPNRSTRARFGSVFGARDMAEENAPVEVAAPVAAPTPVLGEPMDLMTALQLVMKKSSAHDGLVKGLREAAKAIEKHAAQICVLAEDCDQPDYVKLVKALCAEHNVHLVTVPSAKTLGEWAGLCKIDSEGKARKVVGCSCVVVKDYGEDSEGLHIVQEYVKSH

SEQ ID NO: 362066 - protein, 55 aa, Zea mays
  unsure (1)..(55): unsure at all Xaa locations
  Clone ID: MRT4577_93380C.1.pep
PLDRTSNQTYVHDHLMCYIXPHQLSSSHIDNHDSTDXAQNTEFPQFKPYEITNII

SEQ ID NO: 362067 - protein, 118 aa, Zea mays
  unsure (1)..(118): unsure at all Xaa locations
  Clone ID: MRT4577_93381C.1.pep
FIFSNAQVVFQFCLIQERKSMDNQQIIGTALGLKERRSVGGSVIHYLXVAPHXEVLEERLPVQDLPGPPEXELSRTLYIQSVIGEVIYPQGLLSWLGHFGLSTCFYAEVDNLGPGAYL

SEQ ID NO: 362068 - protein, 152 aa, Zea mays
  Clone ID: MRT4577_93382C.1.pep
MSSSSLSPAGRTSGSDGDSAADTRRREKRRLSNRESARRSRLRKQQHLDELAQEAALLQAENARVAARAADVASQHARVEQENAVLRARAAELGARLRSVNEVLRVVEEFSGVAMDIQEEVPPADDPLLRPWQLPCYPAVAMPIGAPHMLRY

SEQ ID NO: 362069 - protein, 152 aa, Zea mays
  unsure (1)..(152): unsure at all Xaa locations
  Clone ID: MRT4577_93383C.1.pep
MSSSSLSPAGRTSGSDGDSAADTRRREKRRLSNRESARRSRLRKQQHLDELAQEAALLQAENARVAARAXDVASQNARVEQENAVLRARAAELGARLRSVNEVLRVVEEFSGVAMDIQEEVPPADDPLLRPWQLPCYPAAAMPIGAPHMLRY

SEQ ID NO: 362070 - protein, 95 aa, Zea mays
  unsure (1)..(95): unsure at all Xaa locations
  Clone ID: MRT4577_93384C.1.pep
MAAKNICFLMLLGLSASVATATIFPQCSQAPIAALLXPYLSPAVSSMCENPIVQPYRIQQAIATGILPFHPFLNNRSLYRVPLSLWTNIGQNHNW

SEQ ID NO: 362071 - protein, 120 aa, Zea mays
  unsure (1)..(120): unsure at all Xaa locations
  Clone ID: MRT4577_93385C.1.pep
SXFIFTIIITPHVXXXFMRSYRISVASKPTSYLFFQIHLPSVPPSIFFFYLRFFFFSLSPINPPSFFFSLLFFSTQIYFFFYHFFLSPIFFFFHTLFFFLHIIFFFQLYFIIFFTLSFFS

SEQ ID NO: 362072 - protein, 211 aa, Zea mays
  Clone ID: MRT4577_93386C.1.pep
MDSWYAWLSRTGLAPSLAHEYGRLFSRNKLEPRDAPHFDHDLLKSMGIAVAKHRLEILKLARKQDAGASSSAASRLGRRATRCLSRCARRLAGGGAWRAASSSVTVVPRICGGEDAVRVGAVQRKGTGSGTTKKMVLMITDGGVAGGGYGYGLRGRGGARLSSASSQKASLMFHDGYQDEEEEMGDDEDEDGGAGDGDIKWDSMFQDLKPT

SEQ ID NO: 362073 - protein, 1658 aa, Zea mays
  Clone ID: MRT4577_93387C.1.pep
MPPRTRLTARKSTGPIGVPRHQLAPRHESSSSGSNDPIGDLEARVSRLQAALQHRTDAWVADGDRINELRRDIRHLQDQLADRDLALDWAVQSRLLMCAKEARAQARVKELSSTVDNLQVYCNTLHEEVHILYSQLHPSEPAPPAEAEAGPSHVAGRALGGELDLFEPPPSLRTRAQDAAGTSGGRDVTPNPPPVPPTLAEAIAALVNATADNTRFLREMAGQQQLHQQAGRGFQQGPRETTYLDFSETRPPLFIKAEDPLEADEWIRVIEQKFGLLRCSEVQKPLFAAQQLRGPASTWWGNFVAIQPDNHQITWNEFKAAFHEHYIPEGVLHMKQEEFMKLKQGGDTVNQYLNKFNHLSQYAIDQVNTDLKKKNCFMRGLNDRMQRKMAACIDLTYGKAVSTALSVEAKYANSGKTKGFGGERPNQGQAKKPRFVIRPSNQNRPFSRPPSFPFKQPIIIRPNNTPTTPKQPGAPGTRFPALPSSSTGCFNCGKSGHFIKDCPYPRQNQSNASQGSGNSAPGKGSTSGKNTKKTGRVYYTQVATTPEGEPVMMGTFPVASHPAIILFDSGASHTFISKKFVEQHHIAYHESKEGFKIHSPGGHIFTKEVAYGVPVIMAGRNFPANMIVLKGQDIDVILGMNWLTQYKAILNTEFRTVRLSYNQEEILLTLPATNPAKTSGRVYEAIVPEIKNIPVVCEFPDVFPEDLPGLPPERDVEFVIELKPGTAPISRRSYRMPPNELAELKTQLQDLLNKGFIRPSSSPWGCPAIFVKKKDQTLRMCVDYRPLNEVTIKNKYPLPRIDILFDQLTGARVFSKIDLRSGYHQIRIRPEDIPKTAFTTRYGLFEYLVMSFGLTNAPAHFTYLMNSVFMPELDKFVVVFIDDILIYSKNEEDHAQHLRIVLTRLREHQLYAKFSKCAFWLEEIQFLGHVLSAKGIAVDPSKVKDILEWKPPTTVHQVRSFLGLAGYYRRFIPDFSKLVKPITSLLKNDTKFNWSSKCNEAFEQLKTLLTTAPVLAQPDITKPFDVYCDASGSGLGCVLMQEGRVIAYASRQLRRHEEHYPTHDLELAAVVHALKIWRHYLLGNICHIYTDHKSLKYIFTQSELNMRQRRWLELIKDYELEIHYHPGKANVVADALSRKVACHCLMAKTSENTLCQEMEKLNLGIIQQGTLNQLRLESIILQRIIDAQKDNLGMKHIREKIRAGTAKCFKEDDQGVIWFKNRIVVPKNEELRQQILDEAHLSRYSIHPGSTKMYQDLKQHYWWTKMKIEIARYVAKCDTCRRVKAIHMKTAGPLQSLSIPTWKWEDISMDFIVGLPRTAKGYDSIWVIVDRLTKIAHFLPVKTNSPVTVYAQLYIARILSLHGVPKTIVSDRGPQFVAKFWEALHNSLGTKLLHSSAYHPQTSGQTERVNQILEDMLRACVLDFSPKWDECLPLAEFSYNNSYQESIKMAPFEALYGRRCRTPLNWSEPGERYFFRPDMVKEVEEKVQRIIHNMKKAQARQKSYADKRRMPLYFLEGDYVYLKVSPMKGVSRFGVKGKLAPRYIGPFLILERYGPVAYRLQLPETLSAVHNVFHVSQLKKCLRVPDRTVEVTDVVLEPDLTYSEHPLRVLDQKDRVTRRKTLKFYKIQWNQHSEDEATWETQDFLDKNFPGFLASCKL

SEQ ID NO: 362074 - protein, 1696 aa, Zea mays
  Clone ID: MRT4577_93388C.1.pep
MLRILLITFSSLEKMPPRTRLTARKSTGPIGVPRHQLAPRHESSSSGSNDPIGDLEARVSRLQAALQHRTDAWVADGDRINELRRDIRHLQDQLADRDLALDWAVQSRLLMCAKEARAQARVNELSSTVDNLQVYCNTLHEEVHILYSQLHPSEPAPPAEAEAGPSHVAGRALGGELDLFEPPPSLSNVKWKVFSGTLCLLQMILPQMPTRTRGQDAAGTSGGRDVTPNPPPVPPTLAEAIAALVNATADNTRFLREMAGQQQLQQQAGRGFQQGPRETTYLDFSETRPPLFIKAEDPLEADEWIRVIEQKFGLLRCSEVQKPLFAAQQLRGPASTWWGNFVAIQPDNHQITWNEFKAAFREHYIPEGVLHMKQEEFMKLKQGGDTVNQYLNKFNHLSQYAIDQVNTDLKKKNCFMRGLNDRMQRKMAACIDLTYGKAVSTALSVEAKYANSGKTKGFGGERPNQGQAKKPRFVIRPSTQNRPFSRPPSFPFKQPIIIRPNNAPTTPKQPGAPGTRFPALPSSSTGCFNCGKSGHFIKDCPYPRQNQSNASQGSGNSAPGKGSTSGKNTKKTGRVYYTQVATTPEGEPVMMGTFPVASHPAIILFDSGASHTFISKKFVEQHHIAYHESKEGFKIHSPGGHIYTKEVAYGVPVTMVGQNFPANMIVLKGQDIDVILGMNWLTQYKAILNTELRTVRLSYNQEEIFLTLPATNPAKASGRVYEAIVPEIKNIPVVCEFPDVFPEDLPGLPPEREVEFVIELKPGTAPISRRSYRMPPNELAELKIQLQDLLNKGFIRPSSSPWGCPAIFVKKKDQTLRMCVDYRPLNEVTIKNKYPLPRIDILFDQLTGERVFSKIDLRSGYHQIRIRPEDIPKTAFTTRYGLFEYLVMSFGLTNAPAHFTYLMNSVFMPELDKFVVVFIDDILIYSKNEEDHAQHLRIVLTRLREHQLYAKFSKCAFWLEEIQFLGHVLSAKGIAVDPSKVKDILEWKPPTTVHQVRSFLGLAGYYRRFIPDFSKLVKPITSLLKNDIKFNWSSKCNEAFEQLKTLLTTAPVLAQPDITKPFDVYCDASGSGLGCVLMQEGRVIAYASRQLRRHEEHYPTHDLELAAVVHALKIWRHYLLGNICHIYTDHKSLKYIFTQSELNMRQRRWLELIKDYELEIHYHPGKANVVADALSRKTSCHCLMAKIFENTLCQEMEKLNLGIIQQGTLNQLRLESIILQRIIDAQKDNLGMKHIREKIRAGTAKCFKEDDQGVIWFKNRIVVPKNEELRQQILDEAHLSRYSIHPGSTKMYQDLKQHYWWTKMKIEIARYVAKCDTCRRVKAIHMKTAGPLQSLSIPTWKWEDISMDFIVGLPRTAKGYDSIWVIVDRLTKIAHFLPVKTNSPVTVYAQLYIARILSLHGVPKTIVSDRGPQFVSKFWEELHKSLGTKLLHSSAYHPQTSGQTERVNQILEDMLRACVLDFSLKWDECLPLAEFSYNNSYQESIKMAPFEALYGRRCRTPLNWSEPGERYFFRPDMVKEVEEKVQRIIHNMKKAQARQKSYADKRRMPLYFLEGDYVYLKVSPMKGVSRFGVKGKLAPRYIGPFLILERYGLVAYRLQLPETLSAVHNVFHVSQLKKCLRVPDRTVEVTDVVLEPDLTYSEHPIRVLDQKDRVTRRKTLKFYKIQWNQHSEDEATWETQDFLNKNFPGFLASCKL

SEQ ID NO: 362075 - protein, 1610 aa, Zea mays
  Clone ID: MRT4577_93389C.1.pep
MPPRTRLTARKSTGPIGVPRHQLAPQHESSSSGSNDPIGDLEARVSRLQAALQHRTDAWVADGDRINELRRDIRHLQDQLADRDLALDWAVQSRLLMCAKEARAQARVKELSSTVDNLQVYCNTLHEEVHILYSQLHPSEPAPPAEAQAGPSHVAGRALGGELDLFEPPPSLSNVKWKVFSGTLCLFQMFLPQMPTRTRGQDAAGTSGGRDVTPNPPPVPPTLAEAIAALVNATADNTRFLREMAGQQQLQQQAGRGFQQGPRETTYLDFSETRPPLFVKAEDPLEADEWIRVIEQKFGLLRCSEVQKPLFAAQQLRGPASTWWGNFVAIQPDNHQITWNEFKAAFREHYIPEGVLHMKQEEFMKLKQGGDTVNQYLNKFNHLSQYAIDQVNTDLKKRNCFMRGLNDRMQRKMAACIDLTYGKAVSTALSVEAKYANSGKTKGFSGDRPNQGQAKKPRFVIRPSNQNRPFSRPPSFPFKQPIIIRPNNAPTTPKQSGAPGTRFPALPSSSTGCFNCGKSGHFIKDCPYPRQNQTNNQQGSGNSAPGKGSTSGKNTRKTGRVYYTQVATTPEGEPVMMGTFPVASHPAIILFDSGASHTFISKTFVEQHHIACHESKEGFKIHSPGGHIYTKEVAYGVPVTMAGRNFPANMIVLKGQDIDVILGMNWLTQYKAILNTEFRTVRLSYNQEEILLTLPATNPAKASGRVYEAMVPEIKNIPVVCEFPDVFPEDLPGLPPERDVEFVIELKPGTAPISRRSYRMPPNELAELKIQLQDLLNKGFIRPSSSPWGCPAIFVKKKDQTLRMCVDYRPLNEVTIKNKYPLPRIDILFDQLTGARVFSKIDLRSGYHQIRIRPEDIPKTAFTTRYGLFEYLVMSFGLTNAPAHFTYLMNSVFMPELDKFVVVFIDDILIYSKNEEDHAQHLRIVLTRLREHQLYAKFSKCAFWLEEIQFLGHVLSAKGIAVDPSKVKDILEWKPPTTVHQVRSFLGLAGYYRRFISDFSKLVKPITSLLKNDTKFNWSSKCNEAFEQLKTLLTTAPVLAQPDITKPFDVYCDASGSGLGCVLMQEGRVIAYASRQLRRHEEHYPTHDLELAAVVHALKIWRHYLLGNICHIYTDHKSLKYIFTQSELNMRQRRWLELIKDYELEIHYHPGKANVVADALSRKTSCHCLMAKIFENTLCQEMEKLNLGIIQQGTLNQLRLESIILQRIIDAQKDNLGMKHIREKIRAGTAKCFKEDDQGVIWFKNRIVVPKNEELRQQILDEAHLSRYSIHPGSTKMYQDLKQHYWWTKMKIEIARYVAKCDTCRRVKAIHMKTAGPLQSLSIPTWKWEDISMDFIVGLPRTAKGYDSIWVIVDRLTKIAHFLPVKTDHPVVVYAQLYIACILSLHGVPKTIVSVRGPQFVSKFWSELQKFLGTKLLHSSAYHPQTSGQTERVNQILEDMLQACVLEFPQKWDECLPLAEFSYNNSYQESIKMAPFEALYGRRCRTPLNWSEPEERWFFRPNMVKETKEKVQRIIHNLKEAQARQKNYADKRRQPLVFQVNDHVYLKVSPMKGVNRFGVKGKLAPEYIGLFLILERYRLVAYRLQLPETLSTVHNVFHVSQLKKCLRVPD

SEQ ID NO: 362076 - protein, 134 aa, Zea mays
  Clone ID: MRT4577_9338C.1.pep
GKTVTADREHLGIPGAGCVRWLAAASVVYWHHYYRLRNLRERRRVRGAVPKLNHSTVRSNRGSGVSATRAARRRRHIRIIGMSRLQTRTARHVCKRGHRRSSDSSASPRTLSPSTSARWTRALPFNIAQHLTSC

SEQ ID NO: 362077 - protein, 89 aa, Zea mays
  Clone ID: MRT4577_93390C.1.pep
SRPNSGFRSDHPWLATTYVSRDTMHTRQDNVALETRWQEKERCLFWSLTSLHPSVTPSYICTRFRWSGKLLGHVSVVILVMADSHEEAT

SEQ ID NO: 362078 - protein, 99 aa, Zea mays
  Clone ID: MRT4577_93391C.1.pep
TQSEFQFKAELFYRVILLYKLQNYKDTLCKTMTNCMWQFYEIRNASSTSHFTTRTNLSNSLAESSSSEKSPNPAVNSTRQQAVTVRHLTSQRGPYCTAP

SEQ ID NO: 362079 - protein, 1071 aa, Zea mays
  unsure (1)..(1071): unsure at all Xaa locations
  Clone ID: MRT4577_93392C.1.pep
MKAAAVEVMTPIGDLEARVSRLQTALQHRTDAWVADGDRINELRRDIRHLQDQLADRDLALDWVVQSRLLMCAKEARAQARIKELSSTVDNLQMPTRTRGQDAAGTSGGRDVTPNPPPVPPTLAEAIAALVNATADNTRFLREMAGQQQFQQQAGRGYPQGPRETTYLDFSETRPPLFVKAEDPLEADEWIRVIEQKFGLLRCSETQKSLFAAQQLRGPASTWWGNFVAIQPVNHQVTWDEFKAAFREHYIPEGVLHMKQEEFMKLQQGGDTVNQYLNKFNHLSQYAIDQVNTDLKKKNCFMRGLNDRLQRKMATCIDLTYGKAVSTALSVEAKYTNSGKNKGFGGERPSQGQAKKQRFVIRPSNQNRTFSRPPXSLQTTYHYPPXNNNPTXPKSAGCPRHSIXPALPSSSTGCFNCGKSGHFIKDCPYPRQNQSNASQGSGKSAQSKGNAMGKNTKKTGRVYYTQVATTPEGEPVMMGTFPVASHPAIILFDSGASHTFISKKFVEKHHIAYHESKEGFKIHSPGGHIYTREVAYGVPVTMAERNFPTNMIVLKGQDIDVILGMNWLTQHKAILNTELRTVRLSYNQEKILLTLLATNPAKTSGRVYEAIVPEIKNIPVVCEFPDVFPEDLPGLPPERDVEFVIELKPGTAPISRRSYRMPPNELAELKIQYQDLLNKGFIRPSSSPWGCPAIFVKKKDQTLRMCVDYRPLNEVTIKNKYPLPRIDILFDQLTGARVFSKIDLRSGYHQICIRPEDIPKTAFTTRYGLFEYLVMSFGLTNAPAHFTYLMNSVFMPELDKFVVVFIDDILIYSKNEEDHAQHLRIVLTRLREHQLYAKFSKCAFWLEEIQFLGHVLSAKGIAVDPSKVKDILEWKPPTTVHQVRSFLGLAGYYRRFIPDFSKLVKPITSLLKNDIKFNWSSKCNEAFEQLKTLLTTAPVLAQPDITKPFDVYCDASGSGLSCVLMQEGRVIAYASRQLRRHEEHYPTHDLELAAVVHALKIWRHYLLGNICHIYTDHKSLKYIFTQSELNMRQRRWLELIKDYELEIHYHPGKANVVADALSRKTSCHCLM

SEQ ID NO: 362080 - protein, 38 aa, Zea mays
  Clone ID: MRT4577_93393C.1.pep
IFAHIHKFRCYFPFLILPHSFLSHFYRRKVLILFVIIV

SEQ ID NO: 362081 - protein, 239 aa, Zea mays
  Clone ID: MRT4577_93394C.1.pep
MEKLNLGMIQYGTLTQLKLESVLLQRIIDAQRSDKGMKHIHEKIEADKANCFRKDDQGILWFNDRIVVPKDAEVHQQILDEAHPSRYSIHPRSTKMYQDLKQHYWWTKMKIEIARYVARCDTCRRVKAVHMKTAGPLQSLPIPTWKWEDISMDFIVGLPRTVKGYDSIWVIVDRLTKIAHFLPVRAKYTVATYAALYISRILSLHGIPKTIVSDRGPQFVSKFWEELHKSLGTKLLHSS

SEQ ID NO: 362082 - protein, 385 aa, Zea mays
  unsure (1)..(385): unsure at all Xaa locations
  Clone ID: MRT4577_93395C.1.pep
MEPYVFFWWAKMQIEIAHYVARRDTCKHVKATYMKTAGPLQSLPIPAWKGEDIXMDFIMGLPRTTKGQDRSPSXTVYAQLYIARILSLHGVPKTIVSDHGSQFVSKFWEELHKSLGTKLLHSSAYHPQTSGQTERVNQILEDMLRACVLDFSQKWDECLPLAEFSYNNSYQESIKMAPFEALYGQRCRTPLNWSEPGERYFFRPDMVKEVEEKVQKIIHNMKKAQTRQKSYADRRRQPLCFLVGDYVYLKVSPMKGVSRFGVKGKLAPRYIGPFLVIEQCGPVAYRLQLPETLSVVHNVFHVSQLKKCLRVPDRTIVVTDVVLEPDLTYSEHPIRVLDQKDRVNRRKTLKFYKIQWNQHSEDEATWETQDFLNKNFPGFLASCNL

SEQ ID NO: 362083 - protein, 70 aa, Zea mays
  unsure (1)..(70): unsure at all Xaa locations
  Clone ID: MRT4577_93396C.1.pep
PGGKRHFKKIPPPPKQKPSPKEILFPPFKKLMLKQQLNQGDAPFHLPGVPMDNXTPDRRLFLGFFQVCME

SEQ ID NO: 362084 - protein, 135 aa, Zea mays
  Clone ID: MRT4577_93397C.1.pep
MAPEKPRKEQEEELMLEDGGIEESPRRSFEDCGDSEEDRGEGDDEEERDSDRDGVGSTRSFLPQKWPQSYRETTDTYTIAASPSFGYLGSSTSKYSLLDLGRSILGSDLKSPLISAKADSVRNLPTLGSMRDGRV

SEQ ID NO: 362085 - protein, 1353 aa, Zea mays
  Clone ID: MRT4577_93398C.1.pep
STWWGNFVAVQPAGHRITWDEFNLAFSEHYVPEGVLHMKQEEFIRLKQGGDTVMQYLNKFNHLSQYAIDQVNTDLKKKNCFMRGLNDRLQRKMATCLDLTYSRAVSMALVVEAKNTGQGKLKRFGGDRSNQGPEKRTRLVIRPFNQNRSSPRPPSYPFKQPVFIHPTIAPTSTNQPSAPGARFPTLPSSSTGCFNCGKFGHFIKDCPYPRQNQSNNQQRSESSKGNAANSTAGKNTRKTGWIYYTQVATTPEGEPVMMGTFLVANHPAVILFDSGASHTFISKKFVEKHCIPYTESREGFTIHSLGGQIFTKEVAYQVPVTLAERDFPTNMIVLKGQDIDHKAILNTDLRTIWLSYGQEEILLSIPIAIPAGPIGRVYGAIIPEIQDIPVVCEFPDVFPEDLPGLPLKRDVEFVIELKPGMAPISRRSYRMPPNELAELKTQLQDLLEKGFIRPSSSHWGCPAIFVKKKDQTLRMCVDYRPLNEVTIKNKYPLPRIDILFGQLTGARVFSKIDLRSGYHQIRIRPKNIPKTAFTMRYGLFEYLVMSFGLTNAPAHFTYLMKSVFMPELDKFVVVFIDDILIYSKNEEEHAQHLRIVLTRLREHQLYAKFSKCVFWLEEIQFMGHVLSAKGIAVDPSKVKDILEWKPPTTIHQVRNFLGLAGYYHRFIPDFSKLVKPITSLLKSDIKFNWSSKCNEAFEQLKLLLTTAPVLAQPDIEKPFDVYCDASGSGLGCVLMQEGRVIAYASRQLRQHEEHYPTHDLELVAVVHGLKIWRHYLLGNVYHIYTDHKSLKYIFTQSELNMRQRRWLELIKDYELEIHYHPGKANVVADALSRKTSCHCLMAKTSKNTLCQEMEKLNLAIIQQGTLNQLKLESIILQRIIDAQRDNLGMKHIREKIKAGVAKCFKEDDQGVIWFKNRIVVPKTEELRQQILDEAHLSRYSIHPGSTKMYQDLKQHYWWTKMKIEIARYVAKCDTCRRVKAIHMKTAGPLQSLPIPTWKWEDISMDFIVGLPRTAKGFDSIWVIIDRLTKIAHFLPVKVKYPVITYAELYITRILSLHGVPKTIVSDRGPQFVSKFWEELHKFLGTKLLHSSAYHPQTSGQTERVNQILEDMLRACVLDFSLKWDECLPLAEFSYNNSYQESIKMAPFEALYGRRCRTPLNWSEPGERYFFRPDMVKEVEEKVQRIIHNMKKAQARQKSYADKRRMPLYFLEGDYVYLKVSPMKGVSRFGVKGKLAPRYIGPFLILERYGPVAYRLQLPETLSAVHNVFHVSQLKKCLRVPDRTVEITDVVLEPDLTYSEHPIRVLDQKDRVTRRKTLKFYKIQWNQHSEDEATWETQDFLNKNFPGFLASCKL

SEQ ID NO: 362086 - protein, 553 aa, Zea mays
  Clone ID: MRT4577_93399C.1.pep
MPPRTRLTARKSTGPIGVPRHQLAPRHESSSSGSNDPIGDLEARVSRLQAALQHRTDAWVADGDRINELRRDIRHLQDQLADRDLALDWAVQSRLLMCAKEARAQARVKELSSTVDNLQVYCNTLHEEVHILYSQLHPSELAPPAEAEAGPSHVAGRALGGELDLFEPPPSLRTRAQDAAGTSGGRDVTPNPPPVPPTLAEAIAALVNATADNTRFLREMAGQQQLQQQAGRGFQQGPCETTYLDFSETRPPLFIKAEDPLEADEWIRVIEQKFGLLRCSEVQKPLFAAQQLRGPASTWWGNFVAIQPDNHQITWNEFKAAFREHYIPEGVLHMKQEEFMKLKQGGDTVNQYLNKFNHLSQYAIDQVNTDLKKKNCFMRGLNDRMQRKMAACIDLTYGKAVSTALSVEAKYANSGKTKGFGGERPNQGQAKKPRFVIRPSNQNRPFSRPPSFPFKQPIIIRPNNAPTTPKQPGAPGTRFPALPSSSTGCFNCGKSGHFIKDCPYPRQNQSNASQGSGNSAPGKGSTSGKNTKKTGRVYYTQVATTPEGEPVMM

SEQ ID NO: 362087 - protein, 39 aa, Zea mays
  Clone ID: MRT4577_9339C.1.pep
LTSDISCLVIPAACESVYQLRSRAYCGLEDNGERCVILV

SEQ ID NO: 362088 - protein, 43 aa, Zea mays
  Clone ID: MRT4577_933C.1.pep
GGPGRATTYGDVRPQAATTRFLPFQSSCRGCLLLRKLCTVVIM

SEQ ID NO: 362089 - protein, 51 aa, Zea mays
  Clone ID: MRT4577_93400C.1.pep
DTPEFTQFRRCKRTASEFEFRDHHTIFTPPHVFFFLVCFFFFFFFFFGRVG

SEQ ID NO: 362090 - protein, 332 aa, Zea mays
  Clone ID: MRT4577_93401C.1.pep
MKFGKDFRNHLEETLPAWRDKYLAYKALKKLIKNLVPREPAAAPPLPPPAPAAADAEGPGAPAAAHGNVNLANWFASILDAELHKLNEFYIEREEWYVIRLQVLKERIERVKAKKNDAFTSRSEFTEEMLEIRKDFVIIHGEMILLQTYSSLNFAGLVKILKKYDKRTGGVLSLPFTQRVRHQPFFTTEPLTRLVRECEANLELLFPVEAEVLEPSSSSNLEPHDVARCDPTSSRDVETVDVYRSTLAAMKAIQGLRRASSTYNPLSLSRFFHGEDGEPCSGAITSESSLSDSSTDSQIQDAGKDDKEVQSNSRDQNAAQGEQNAQGEPTDE

SEQ ID NO: 362091 - protein, 163 aa, Zea mays
  unsure (1)..(163): unsure at all Xaa locations
  Clone ID: MRT4577_93402C.1.pep
MLFYQDLLSXGDELLSHSFTYXELENGVLXEVTQRGSTQVTVEGPHGCNIVRRGGGXDKTASETLVMVSAIAEMFLLDENLCFTRNRLVSYFRQFFHNVTVVMEPENADDFFNRVQYAIENLLIELSDLRFFDVEYMMDDAXVLFAYHDDGATNPTFLYFSPA

SEQ ID NO: 362092 - protein, 271 aa, Zea mays
  Clone ID: MRT4577_93403C.1.pep
RCCRATSRLSVLLSSSAVCSTSTYQFLKNYEDLAIFILAGEAFCGFEASEFRQKLKTVCLNYMVSFHRQNVYALKMVLENESWTIMSAEASQIISLAGLTGDGAALCSPTSRSPKLPINCYHGTTTSNSGKEKLGFASWLVIENPFSFKLEKGSAESPKSNMLVDSSASNNHGNGNNSSLDEENEDLLADCIDEDSQLPSRTPKAKIVKGNSLHWKDGDISSQTGSSLSLLRMMDKYARLMQKLEIVNVELFKGVSPLFGIFYHYIYETFG

SEQ ID NO: 362093 - protein, 74 aa, Zea mays
  Clone ID: MRT4577_93404C.1.pep
DIAPKKPSVRNEKGEKMILLITLHIGRLLIRFFYVDAENRLFSTHSHCSGAYREGPSSIVIGYIFMMMQESAGP

SEQ ID NO: 362094 - protein, 120 aa, Zea mays
  Clone ID: MRT4577_93405C.1.pep
NSARGDGRTDGDRSKRGGRGPEQRTRPLLQQERPNPSHPPKFRTRDSRCPVPSKHPPAEGLRSRPQPGWRVPAGGGRRRRRRLRESPPSSALAADNSLIPPHPLSSLTARAPPCQYSVWC

SEQ ID NO: 362095 - protein, 46 aa, Zea mays
  Clone ID: MRT4577_93406C.1.pep
IVPVNRLNVLTINHFFTHWCVLAAVPSVHRKPQHPVLGRRRRQLCL

SEQ ID NO: 362096 - protein, 84 aa, Zea mays
  Clone ID: MRT4577_93407C.1.pep
TIKTKKKRGTKGKKTSPPLRKGPPKKKKNNHKKINPHQKKGGAPKGGGPRATGKTKGGNPNHFPKRAKKGGALKKIKKKKKGRE

SEQ ID NO: 362097 - protein, 118 aa, Zea mays
  Clone ID: MRT4577_93408C.1.pep
PTRPIGFKDMTSQRQALTIGKQQKMSAFMSFQQSVQAAGLPGSQPNQTTELDLFQDLQLPQAGAQSTNPFSDESVQGYPQYMNGPNGDNAQPGQDFQQQSLKLPAASPYDNFLRAAGC

SEQ ID NO: 362098 - protein, 75 aa, Zea mays
  Clone ID: MRT4577_93409C.1.pep
RNPKRGEPSPFFFNPGGGGPLWNTGFHSITGEKKPVGPRNRFYLKKPNLFWCQFQKKNLQTFKNQTGNKKWAPWL

SEQ ID NO: 362099 - protein, 72 aa, Zea mays
  Clone ID: MRT4577_9340C.1.pep
VRTLPVQDSTFATPLTIKGKTRRPYLSSENPAGEKKLGGETPAFIGGGLHLAGPFGGNWQGKRAISRGAPKG

SEQ ID NO: 362100 - protein, 52 aa, Zea mays
  Clone ID: MRT4577_93410C.1.pep
WYSIICKGKVGSGKKLTNIICKLVIEANLTTCAQGLGQGTSVTPWAKFPKSP

SEQ ID NO: 362101 - protein, 161 aa, Zea mays
  unsure (1)..(161): unsure at all Xaa locations
  Clone ID: MRT4577_93411C.1.pep
KNKKKKKKKKKKXKXKKKKIKKKXXKKKXKKKKXKRXKKLEKGGRNKKKKTKIKGXEXEIENRKNKKXKTXNEKNNXKDNRVERSXGXKXPKXXXKKKRNNLILLTRKQIIRHRYKHTHRGRRGVMPLIPSPVARRRRRVLAYGSQSKTARCTCSDRPGAR

SEQ ID NO: 362102 - protein, 57 aa, Zea mays
  unsure (1)..(57): unsure at all Xaa locations
  Clone ID: MRT4577_93412C.1.pep
LYLDFIXRLQPKIFELQRQCAXCIHISPGCVVXALYAYFADLPIEEHPDMEMPLPTV

SEQ ID NO: 362103 - protein, 75 aa, Zea mays
  unsure (1)..(75): unsure at all Xaa locations
  Clone ID: MRT4577_93413C.1.pep
LHLHHVFTFPSITFSFVHRLIYNFSSTPTPTPTTFHHNSSTTTIYLSSNYNLHQLLNKLVYLNKHRDLLXLDLIL

SEQ ID NO: 362104 - protein, 131 aa, Zea mays
  Clone ID: MRT4577_93414C.1.pep
EARKHLCCCATARELFSPCPPTTEKKRLSTGTHILASPLLPPFGRSTEYFFYQGGQGRRRQQIPEIARWNQHTDEAAYLESAVQAGLGRPGHCYHYHCGNQAELIRTSASPAPHKPGQESAKQGWRPTVTT

SEQ ID NO: 362105 - protein, 112 aa, Zea mays
  Clone ID: MRT4577_93416C.1.pep
GTIHFLSNFNSLITIGRYAREPSIMRYIKIAAMLPNRTIRDVALRCCWATGKERRKKPDGFYTGKKMRDVKPIQDKMVASVPLANFHMTPTANVIPFSNATQHTNQFSQPPN

SEQ ID NO: 362106 - protein, 123 aa, Zea mays
  unsure (1)..(123): unsure at all Xaa locations
  Clone ID: MRT4577_93417C.1.pep
KKLFRSNFKYRHVGWDPPYPAFGGAGACPGSGGGGGVLPAGVVALGVGGGAPPNAAGAGPRDGYDGDAGLDCVVRAQWLRAAGLGANDGLDYVACLMIXFGAVNATRKAMLVCGMAGLVVGAC

SEQ ID NO: 362107 - protein, 89 aa, Zea mays
  Clone ID: MRT4577_93418C.1.pep
YERVAELTKNLSPCGRQLALTRTVEALMRGTPTPEEDTYLLIDPPSSRSGCAVQFKGPFLDAFVYMIGGGNNPDYRSLMDLAECSHTPS

SEQ ID NO: 362108 - protein, 128 aa, Zea mays
  Clone ID: MRT4577_93419C.1.pep
MQIFVKTLTGKTFTLEVESSDTGDNVKSKIQDKEGIPPDQQRLIFAGKQLEDGRTLSDYNIQKESTLHLVLRLRGGIIEPSLKALASKYNCDKAICRKCYARLPPRATNCRKKKCGHTNQLRPKKKLK

SEQ ID NO: 362109 - protein, 122 aa, Zea mays
  Clone ID: MRT4577_9341C.1.pep
WHGQLYSTLLHNAKGVINEVIRTVSKAVCGLATHGTGCVHSEVYQSSVTLAPNMRVHICLGQRWQRVLAPPFTCHTAIFLALHTSLESFDSISTTPHLHGSPLGWSSKDVRTAASNKKRVET

SEQ ID NO: 362110 - protein, 87 aa, Zea mays
  Clone ID: MRT4577_93420C.1.pep
KQEKSFLKKFSYEKPKQYIGPKKSRGAKKGGKKNNAKTAFFFKWFIGQPPKSKSLLVCYGGNMTPPPPKSHKKNRKTPLNTKHGGHD

SEQ ID NO: 362111 - protein, 171 aa, Zea mays
  unsure (1)..(171): unsure at all Xaa locations
  Clone ID: MRT4577_93421C.1.pep
MEAQNGSCGGAPVVLNVYDLTPMNNYLYWFGLGIFHSGIEVHGMEYGFGAHQFPASGVFEVEPKSCPGFIYRRSVWMGTTDLXRAEFRSFIENLAGKYNGNTYHLISKNCNHFTDDVCKSLTKKSIPGWVNRLARVGSFFNCLLPESIQVSTMMIWIRYLHRFLETVIWES

SEQ ID NO: 362112 - protein, 209 aa, Zea mays
  unsure (1)..(209): unsure at all Xaa locations
  Clone ID: MRT4577_93422C.1.pep
MEAQNGSGVGAPVVLNVYDLTPMNNYLYWFGLGIFHSGIEVHGMEYGYGAHEFPTSGVFEVEPKSCPGFTYRRSVWMGTTDLSRAEFRSFIENLAGKYNGNTYHLISKNCNHFTDDVCKNLTRKSIPGWVNRLARVGSFFNCLLPESIQVSXIRHVPTHPAFSDDDMDSVSSSVIGDSDLEELDQHLLPSSTADVHSIDVPPNLAKDLL

SEQ ID NO: 362113 - protein, 208 aa, Zea mays
  Clone ID: MRT4577_93423C.1.pep
MEAQNGSGVGAPVVLNVYDLTPMNNYLYWFGLGIFHSGIEVHGMEYGYGAHEFPTSGVFEVEPKSCPGFTYRRSVWMGTTDLSRAEFRSFIENLAGKYNGNTYHLISKNCNHFTDDVCKNLTRKSIPGWVNRLARVGSFFNWLLPESIQVSTVRHVPTHPAFSDDDMDSGSSSVIGDSDLEELDQHLLPSTADVHSIDVPPKLAKDLL

SEQ ID NO: 362114 - protein, 140 aa, Zea mays
  Clone ID: MRT4577_93424C.1.pep
HFISPTTHYMEALAARPLGDPTLPSAAEASPLLRASPGGSHRLPTNSHLTARCPSASRGDQSTLPPVPPCAPQAPESGAPRACLRLGIQLLCTGLPNQVPVCVGSAPAPAHVPSPDSVTTMPAWPPDTSSYAPCLLDATW

SEQ ID NO: 362115 - protein, 184 aa, Zea mays
  Clone ID: MRT4577_93425C.1.pep
MEAQNGSCGGAPVVLNVYDLTPMNNYLYWFGLGIFHSGIEVHGMEYGFGAHQFPASGVFEVEPKSCPGFIYRRSVWMGTTDLSRAEFRSFIENLAGKYNGNTYHLISKNCNHFTDDVCKSLTKKSIPGWVNRLARVGSFFNCLLPESIQVSTVRHVPTQSAFSGRIYTRATRSRARGLIHITEP

SEQ ID NO: 362116 - protein, 51 aa, Zea mays
  Clone ID: MRT4577_93426C.1.pep
HNFLVLCGASGPTESCWRGKKVLIGYVRCSEGYGFRLETSQSHDVSESPLD

SEQ ID NO: 362117 - protein, 56 aa, Zea mays
  Clone ID: MRT4577_93427C.1.pep
RCSCFAAVPSMGSRHSACSAEAGCRGSFILLLLVTPLRGVVLCLSNWRNLTGGYDL

SEQ ID NO: 362118 - protein, 53 aa, Zea mays
  Clone ID: MRT4577_93428C.1.pep
VVQPQQQPQASADAGRLKRKRRHQEQLIAFAFFFERLMQRLMEHQESLHRGFL

SEQ ID NO: 362119 - protein, 34 aa, Zea mays
  Clone ID: MRT4577_93429C.1.pep
TLWIGSLFNAGYYWNWTLLNLERWFSFGPILMVS

SEQ ID NO: 362120 - protein, 32 aa, Zea mays
  Clone ID: MRT4577_9342C.1.pep
QTISYLIYYVDKLQIKIITSHMLIGFILSHSI

SEQ ID NO: 362121 - protein, 40 aa, Zea mays
  Clone ID: MRT4577_93430C.1.pep
WWCHLFFLFYLSLYMSFISIFFYFKFIYFIVVFSRFAYYT

SEQ ID NO: 362122 - protein, 92 aa, Zea mays
  Clone ID: MRT4577_93431C.1.pep
ARPKYLSLPVCVLWYFLASCVLRATHSYPPMHQQAAYSVPLLHPIPFHQTVCFKCVNNPHCSHPTVIQQCNRNMDILPIITTCFLQQTVMPY

SEQ ID NO: 362123 - protein, 50 aa, Zea mays
  Clone ID: MRT4577_93432C.1.pep
CSLSTEKFLDNAPLEADSRGLLKNNAPGHFTNITMYYSSFSFSHFRGSNI

SEQ ID NO: 362124 - protein, 201 aa, Zea mays
  Clone ID: MRT4577_93433C.1.pep
PTRPASCCRFHLLGEFDEVKRSCRKRLDGHNRRRRKPQPDPLNPAGLFGNHHGVTRFTSYPQLFAASMEQPKWSVVKTEADVFQDQYYPAVHLNGAGGGAIGSHFHGKERKHFPFLTSHSNGGGGGDVATAAALGCQPFTITTTAASESDSKQSNGNCALSLLSDNPTSAQTVMIPTTAQSLAAVMQHGGRLPGSVSAQRR

SEQ ID NO: 362125 - protein, 53 aa, Zea mays
  Clone ID: MRT4577_93434C.1.pep
TPSLYILYLRAPPPLIQESSHRSDHPLTRIDRQNCILHLTCHLRPPRHMPTTD

SEQ ID NO: 362126 - protein, 122 aa, Zea mays
  Clone ID: MRT4577_93435C.1.pep
TNPAGNAGEGTAQTDRSNMVQIATLGDAKPATDDWISKNTPLFESKELRLYMAMLGQTNCLTYEQLLAKNANNQNNVEADVQNCMKLNAAPRYFDAGLIKMNKTGTLHYMSSRNNIFTNRTQ

SEQ ID NO: 362127 - protein, 79 aa, Zea mays
  unsure (1)..(79): unsure at all Xaa locations
  Clone ID: MRT4577_93436C.1.pep
PHMFLNGAKNGLAGAVETDFSEPHXPQIKQFLKDPSKVSVAAPVGFGNSGAESAPQEEKKSSEPXKESPEEMGFSLFDH

SEQ ID NO: 362128 - protein, 61 aa, Zea mays
  Clone ID: MRT4577_93437C.1.pep
ETQYCSTWVLTQPTRSVNRGLLFLLLIISTTGENLGLLVPSHGVTLFHTILSAGNQLSMLT

SEQ ID NO: 362129 - protein, 139 aa, Zea mays
  unsure (1)..(139): unsure at all Xaa locations
  Clone ID: MRT4577_93438C.1.pep
KKTSVGNDVGYRLIPAIPAHPLLTDDDYPQIRGAFTNFNVWVTPYNRTEKWAGGLYVDHSHGDDTLAVWTKKNRDINNKDIVLWHVVGIHHVPAQEDFPXIMPLXLSNAFELRPAHFFERNPVLKTLSPPHVQWPGCPK

SEQ ID NO: 362130 - protein, 64 aa, Zea mays
  Clone ID: MRT4577_93439C.1.pep
RGCAGLQALTGWGRAGAQGSPLGDGLTAGGARAPEQAGLAARRRWCARAPWGEAAHSSSDGSVD

SEQ ID NO: 362131 - protein, 489 aa, Zea mays
  Clone ID: MRT4577_9343C.1.pep
MAEQDDAAGQSPLDSVPIDETCDAEDMHSPLSFSYRSQPKYVGAGLSNMGNTCFLNATLQCITHTVPLFLKLRSTDHSTPCSYNKDGFCSFCALKEHVDESIQRSGSVIAPAKFRDNLRKLSSDFWPGQQEDAHEFLRCLLDNLHKCTLDPMSKGKGSSFDEESIVNEIFGGQLKSHLSCCECGHSSETFEPFLDLSLEIDQVDHLVDALQSFTKVEQIGDSENKLTCESCNAQVSKNKQLTLHRAPDVIAFHLKRFTTLDNSVEKIDKHVVYPLEVDLKPFHSNPDTVGGLKYDLYGVVEHSGLPNYGHYTCTIRSSPSTWYLMNDSNVDSITDSSALNQEAYILFYVRQGKFPWFSSLLEGKVVLQAENTCGTSPVSVLENIDVNCSTSSGGGSSSSSGDKLEKNEASQLEETKKDETSQYKTSFLPDEPSKSSFGASNSNNAMDEDNPPRVSFQNSVASCSRSVETTNLEKPSTPRSQRLASHDEF

SEQ ID NO: 362132 - protein, 84 aa, Zea mays
  Clone ID: MRT4577_93440C.1.pep
EIETDFWMIFILIAAFRLLGGIVLIRTPQDMGSSTLNGLVSLLSTLVNQFYTKKCMFEELSEIGTKHLHVNQLCKIFQPRYSSS

SEQ ID NO: 362133 - protein, 126 aa, Zea mays
  unsure (1)..(126): unsure at all Xaa locations
  Clone ID: MRT4577_93441C.1.pep
GPPQIPTPICFSNFKDIIPLIFEKGGGGVPLXNSRSHKKILSLFPEGVKXGGGIGPGVFNIPSPRIPWGXEIPPPIHKNLGGVGPHILWGNPGLGPKTPKYPGVKPPLTKMVSPAKFFRPQVARAK

SEQ ID NO: 362134 - protein, 92 aa, Zea mays
  unsure (1)..(92): unsure at all Xaa locations
  Clone ID: MRT4577_93442C.1.pep
VLPVLNRKWSGMCLTVPTLDVSAVDLTGRLEKSATYDETKGGANADAXGSLKGIXLCYDEEDLASTDSHGDRWSSISYAKAGIDLNSNLMKL

SEQ ID NO: 362135 - protein, 152 aa, Zea mays
  Clone ID: MRT4577_93443C.1.pep
MEPSLCTPHATVTAANAAPLSVRAHRGARRARAAVRAHSHHQGAGAGAREPEPEPADPQGAVPAKGSGAPALPNAALRVGAGVALALALGGVSWTARGGSAGAGPGPVTQPAMVCALNAVTDAAVRAFAEQRGSATMKTSVDALSDSLFRRE

SEQ ID NO: 362136 - protein, 330 aa, Zea mays
  unsure (1)..(330): unsure at all Xaa locations
  Clone ID: MRT4577_93444C.1.pep
MGSRYEVEVTVGSARDLKNVNWRNGDLKPYAVVWIDSGSKCSTRVDLDNGESPAWDEKLLVPLPPTSRLDDAVLYVDVVHANAAQGVKPLVGSARLPLRDVLDDAGVGGKASRSLRLKRPSGRPHGRLDVRVAVKEPSXTTTPTPTRPPRPTPTRAAAPVTPTARPLLLPAATTAPEADTXGGGAYGGGGYGAAQPYTAAPPAGYPSTYGAAPPPQPAAAYGAPPAAAYGAPPVAATAAYGTGAVASDGKKKNKMGMGTGLAVGAAAGVLGGLALAGGASYLEDKFEERVSERVEDNLEREESYGGGGGGYGGGYDDYGGNDDYGGDDDY

SEQ ID NO: 362137 - protein, 382 aa, Zea mays
  unsure (1)..(382): unsure at all Xaa locations
  Clone ID: MRT4577_93445C.1.pep
MHAYVSSEFGVESPQNQRKAFPRSSRGHQRWVPATRWRSPSAPPGTSRTSTGATATSSPTPWCGSTPAASARPASTSTTARARRGTRSCSSRSPPNLPTEGWSGLYSGLKPSLIGTAASQGIYYYFYQILKNKVEDIAVARSKKGLGDGTVGMLSWLGIAAVAGSINVLLTNPIWVLVTRMQTHTQAKRKILESKRELLLKEMSRANSLEVAVLKXIGWLNXVRKSSSIWYSSSDPILDMVCNPSIQFMIYETLAKRLQSKRSGKQLPKRHLTAMEVFLLGALAKLGATLVTYPLLVVKSRLQAKQEIGSNVMSRYTGTIDAIIKMVRYEGLHGFYKGMGTKIVQSVFAASVLFMVKEELVKLAVLLVASSRTMLITTSKKQ

SEQ ID NO: 362138 - protein, 72 aa, Zea mays
  Clone ID: MRT4577_93446C.1.pep
NILFLKRSFHLHTGDGLHLIRTRLSYNIFDIVLPLLVDHILEPLRLICYITRITKDGIHWSIHSFGLSILTT

SEQ ID NO: 362139 - protein, 133 aa, Zea mays
  Clone ID: MRT4577_93447C.1.pep
MPMTAVPRTGPGCLGSPPAQALSSSLAGVQGAPKRLGASKPSWIVRTESNVRRERAKRPDPPCTICKGTGRIDCRNCFGRGRTNHADVAMLPNGEWPQWCRICGGSGLDYCLRCHGTGEYREPMGFHFTVQRK

SEQ ID NO: 362140 - protein, 240 aa, Zea mays
  unsure (1)..(240): unsure at all Xaa locations
  Clone ID: MRT4577_93448C.1.pep
TPRGGSHWRNGDLKPYAVVWIDSGSKCSTRVGLDNGESPAWDEKLLVPLPPTSRLDDAVLYVDVAHANAAQGVKPLVGSARLPLRDVLDDAGVGGKASRSLRLKRPSGRPHGXLDVRVAVKEPSRYYDPNPYPAPAAYANTGGGTRDPYGSSAAAAGGYYGSGGGYGSGGGAYGGGAYGAAQPYTAAPPAGYPSTYGAAPPPQPAAAYGAPPAAAYGGGGYGGGYDDYGGNDDYGGDDDY

SEQ ID NO: 362141 - protein, 53 aa, Zea mays
  Clone ID: MRT4577_93449C.1.pep
GRTNHADVAMLPNGEWPQWCRICGGSGLDYCLRCHGTGEYREPMGFHFTVQRK

SEQ ID NO: 362142 - protein, 246 aa, Zea mays
  unsure (1)..(246): unsure at all Xaa locations
  Clone ID: MRT4577_9344C.1.pep
TNSLYFAFYEATXPVPTPXTAVPLLVWLQGGPGCSSLIGNFAEVGPFLLLNSSSSGLSRNRNRWNRRFGVIFIDNPLGSGFSAPASLADIPRDEPTIAAHLLAALQSFMALDAAFRARPLFLAGESYAGKYIPAAARHILDANDKLPAGQRVNLQGIVIGNGMTHPVAQVTVHADQAYFAGLINAKQKATVEGMQTTATGFGRARDPAVPARSRXRIISFXRKPPGXATAXNYAPKQXYPRAPANF

SEQ ID NO: 362143 - protein, 376 aa, Zea mays
  unsure (1)..(376): unsure at all Xaa locations
  Clone ID: MRT4577_93450C.1.pep
KKKFTKKKKKKKLGLEAGRIGYLGGGRDAEAKVFPFYPSSPLIHPIRPPATAMGSRYEVEVTVGSARDLKNVNWRNGELKPYAVVWIDSGAKCSTRVDLDNGENPTWDEKLLVPLPPTSRLDDAVLYIDVVHANAAEGVKPLVGSARLPLRDVLDDAGIGGKASRNLRLKRPSGRPHGHLDVRVAVKEPSRYYDPNPYPXPPRATPTRALVTPTAHPRLLAATTAPEXYGSGGGYGGSGSYGAAQPYTAAPPAGYPSTYGSAPPPQPGYGAPPVAAAYGAPPVAAAYGAPPVDAATAAYGTSAVGADGKKKNKMGMGTGLAVGAAAGVLGGLALAGGASYLEDKFEERVSERVEENLEREDSYGGGYDNYGGDDDY

SEQ ID NO: 362144 - protein, 78 aa, Zea mays
  Clone ID: MRT4577_93451C.1.pep
MLLNYIVIHQRDVYLYSSNFGLGSTGRTNHADVAMLPNGEWPQWCRICGGSGLDYCLRCHGTGEYREPMGFPFTVQRK

SEQ ID NO: 362145 - protein, 364 aa, Zea mays
  unsure (1)..(364): unsure at all Xaa locations
  Clone ID: MRT4577_93452C.1.pep
MSSAAVNGLSGAGGGIIAQIITYPLQTVNTRQQTERSTKKRKARSGASATPASTMYQMLQLIQTEGWSGLYSGLKPSLIGTAASQGIYYYFYQILKNKVEDIAVARSKKGLGDGTVGMLSWLGIAAVAGSINVLLTNPXWVLVTRMQTHTQAKRKILESKRELLLKEMSRANSLEVAILKDRLVKLESEKPRPYGTLQAIQEVYHESGIRGFWKGLIPTLIMVCNPSIQFMIYETLAKRLQSKRSGKQLPKRHLTAMEVFLLGALAKLGATLVTYPLLVVKSRLQAKQEIGSNVMSRYTGTIDAIIKMVRYEGLHGFYKGMGTKIVQSVFAASVLFMVKEELVKLAVLLVASSRTMLITTSKKQ

SEQ ID NO: 362146 - protein, 42 aa, Zea mays
  Clone ID: MRT4577_93453C.1.pep
YHYPRVVIRKQIIRNSTNTNKSNHWHQYIRVAKSQHILFQGK

SEQ ID NO: 362147 - protein, 366 aa, Zea mays
  Clone ID: MRT4577_93454C.1.pep
GRVGVNISFSNNIGAYEFQGDDGGPSWKPRPLIHLSLAKTFSQMDLRGLLLEKTKTELKNKLTVIKSKTSQVASEKASKKIAVKENGGDNEALGPEDPTAIKDSHDSEQTGSNTSTDAENEDDDHLSYNVPDPDFHDFDKNRTEECFQSDQIWATYDDEDGMPRYYAFIQKVLSLKPFKLRISYLTSRANSEFGPLNWVSSGFIKTCGDFRIGKYESCDIVNMFSHQMKWDKGPRGLIKIYPQKGDIWAVYRNWSSDWDEDTPDNVLHAYNVVEVLDAYDEVHGISIIPLVKVTGFRTVFQRHQDPNATMKIPKEEMFRFSHLVPFYRMSGEEAANVPKDSYELDPAAISKELLQGITEAVEPNGT

SEQ ID NO: 362148 - protein, 60 aa, Zea mays
  Clone ID: MRT4577_93455C.1.pep
PQVRVARRGGIEVRRRGSLAVLYDQVERQGTRVRARLYFPWLMQAAGTGRSSVGELPVPA

SEQ ID NO: 362149 - protein, 19 aa, Zea mays
  Clone ID: MRT4577_93456C.1.pep
NDRLPRLILMDQEFLLVLP

SEQ ID NO: 362150 - protein, 56 aa, Zea mays
  unsure (1)..(56): unsure at all Xaa locations
  Clone ID: MRT4577_93457C.1.pep
XLWAXXXCLPLVXXVFWCXCPFXXXXXXXFXXCVCXCXXSPFPPFLVXCXXXXXSY

SEQ ID NO: 362151 - protein, 85 aa, Zea mays
  unsure (1)..(85): unsure at all Xaa locations
  Clone ID: MRT4577_93458C.1.pep
GSLSGAILFNPFSVNSITYDMNTTLLMPYAISLLQHKKHYKYVSTHNIFYWSRYFYSNLQRSCKDHFSLRHXGISFVMSFKVVDL

SEQ ID NO: 362152 - protein, 69 aa, Zea mays
  Clone ID: MRT4577_93459C.1.pep
RTIRPVFPGTRSTVSTSSPAWLKWRAIFPAPVLLFTSNPRSETVCFHRTRADQLEEQNYVPFSLLEGSI

SEQ ID NO: 362153 - protein, 108 aa, Zea mays
  unsure (1)..(108): unsure at all Xaa locations
  Clone ID: MRT4577_9345C.1.pep
MDSPGVLXRKEVKQMCSALLGGSEIRLSDDISESILDNPFSDAHANQDWGINTXHSRNVVSPLISPSSDRALAPYLKYLTPTIPCFVFISQVYVLRPRYTDFAIRMYS

SEQ ID NO: 362154 - protein, 38 aa, Zea mays
  Clone ID: MRT4577_93460C.1.pep
LMPGQIYIQKSGAFLLIATTKITTSRKLETGTSPNVPT

SEQ ID NO: 362155 - protein, 61 aa, Zea mays
  Clone ID: MRT4577_93461C.1.pep
GLQVPASDAQSMSWPGFGSFRCTRGLNCAYLYISSVVPLFGLCPLRPGLGLGSIIFISRNK

SEQ ID NO: 362156 - protein, 52 aa, Zea mays
  Clone ID: MRT4577_93462C.1.pep
IFFFFKFFWGFHSFQNVGEDNIPGDFWFFHLTPNTTHVNFWGDTSFFNLTIT

SEQ ID NO: 362157 - protein, 93 aa, Zea mays
  Clone ID: MRT4577_93463C.1.pep
EQAPQSWGPTEETLNKSGGGTCGPHRSIQVKKGTLPQPGQENNARWWPKSATKVRPAGGCFLSSLDGKKKCKKSCLSEKGTKGILKASNVSFN

SEQ ID NO: 362158 - protein, 45 aa, Zea mays
  unsure (1)..(45): unsure at all Xaa locations
  Clone ID: MRT4577_93464C.1.pep
MQKNKRKGGXNRKRGKNEADHDKRELVFKEDGQGYSQVSWMLESQ

SEQ ID NO: 362159 - protein, 301 aa, Zea mays
  unsure (1)..(301): unsure at all Xaa locations
  Clone ID: MRT4577_93465C.1.pep
GHSARGTSTTKRWQRHLSASLAGSPAPSPPRPWRIPASSPDTLPVVSSLQRDGXGVVRMGAVVGGGKEGEDDEELRQTKEQAAARRRWEALIREQKIKTLTPREAGYTFKLTDKVLLDVRPSNERQKAWVKGSTWIPIFDVDASVDLGGLSKKVSNFVMGGWWSGSSTLSLNKNFVQQVEEKFSKDTDIMLVCQKGLRSLAACEQLYNAGFENLFWVQGGLEAAEEEDFEREGSQPFKLAAIGGISEFFGWTDQQRAQAAKEGLGYRLVFTGRLVGALVLLDALFLGAQRIGPMLQEMQPR

SEQ ID NO: 362160 - protein, 80 aa, Zea mays
  unsure (1)..(80): unsure at all Xaa locations
  Clone ID: MRT4577_93466C.1.pep
PGPASEDGLPGHVDGYLLEARINHPGGCTVVDRGSIYPADAMNLALILINVTGVTTIAGGEISHRXGHVYGPTAEAKFST

SEQ ID NO: 362161 - protein, 126 aa, Zea mays
  Clone ID: MRT4577_93467C.1.pep
IQKPNEVFFSLARVPLFGANNYGFQAHFFTTLGPPKSWGGLPYIYLGDLYNLNKKIVDVGPKKPGWVIFFFSTQIPVIPPKPLNMGGKKGCPQKAFLRRDKIPPGTTACFYLLFAHIGASGGQGKI

SEQ ID NO: 362162 - protein, 50 aa, Zea mays
  Clone ID: MRT4577_93468C.1.pep
GKHGPTHASGYCNMKMTFKISGTNTGRLGLWLFYRHSARLSIGSDTLMKV

SEQ ID NO: 362163 - protein, 64 aa, Zea mays
  Clone ID: MRT4577_93469C.1.pep
PRAMLNHGNPIVDKAMFQIWPITRLLCFTRDVFKALPYELKNGLVCPKNNLLEHTNPLAPQAWA

SEQ ID NO: 362164 - protein, 88 aa, Zea mays
  Clone ID: MRT4577_9346C.1.pep
LDVRHRPCESSLRPPECSDCFFAICIMECLQSTYSLPRYEAMIDELTPDYEMDVSCTTPDDLIMYPLINFHALMTADGPDVDSEAISR

SEQ ID NO: 362165 - protein, 132 aa, Zea mays
  Clone ID: MRT4577_93470C.1.pep
MLSDELESKPELLVQFVQNTSIPLGQGLVESEAKDITCLSLLPVTEASECSRLMLPDDTPSHTNSSKEVPSSAVLRSLQVNVGPDGEETRAQTVQKSPEFLSTPESPSLLQDLQPSDSTSFILLNLTRAGLG

SEQ ID NO: 362166 - protein, 37 aa, Zea mays
  Clone ID: MRT4577_93471C.1.pep
KLSRSHHFRSLQETNGKVKRCSNIQPRKLSSIHSNTI

SEQ ID NO: 362167 - protein, 149 aa, Zea mays
  Clone ID: MRT4577_93472C.1.pep
MGPVLKRPTPGTVQCFGRKKTAVAVAYTKPGRGMIKVNGVPIELLRPEMLRLKAMEPVLLAGRSRFKDIDMRIRVRGGGKTSQIYAIRQAVAKGLVAYYQKYVDEAAKKEIKDIFMRYERTLLVADPRRCEPKKFGGRGARARFQKSYR

SEQ ID NO: 362168 - protein, 150 aa, Zea mays
  unsure (1)..(150): unsure at all Xaa locations
  Clone ID: MRT4577_93473C.1.pep
MGPVLKRPTPGTVQCFGRKKTAVAVAYTKPGRGMIKVNGVPIELLRPEMLRLKAMEPVLLAGRSRFKDIDMRIRVRGGGKTSQIYAIRQAVAKGLVAYYQKYVDEAAKKEIKDIFMRYERTLLVADPRRCEPKKFGGRGARARXFQKSYR

SEQ ID NO: 362169 - protein, 127 aa, Zea mays
  unsure (1)..(127): unsure at all Xaa locations
  Clone ID: MRT4577_93474C.1.pep
MSTKIFSGVMRLALSTXVANATFFPQCSHAPITTLVSPYLTPIIASVCENPALQPYRLHQAISARNIPLSLLLFQHSPALSSEHSLAQTIRAQQLQQLVLPVNNQVSLANLSHYSQQQQFFTYNQLS

SEQ ID NO: 362170 - protein, 149 aa, Zea mays; identical to SEQ ID NO: 362167
  Clone ID: MRT4577_93475C.1.pep

SEQ ID NO: 362171 - protein, 96 aa, Zea mays
  Clone ID: MRT4577_93476C.1.pep
APTPGFWNHAFLLKVRPIHACLPMESCSPPTQKEKSIFGAQSKVKVLPFYKTPASRNMYVVTFSPVVHLASVARPFLNQAAPPKAMTRKDLFLFKP

SEQ ID NO: 362172 - protein, 67 aa, Zea mays
  Clone ID: MRT4577_93477C.1.pep
QRRVRGQAVAKGLVAYYQKYVDEAAKKEIKDIFMRYERTLLVADPRRCEPKKFGGRGARARFQKSYR

SEQ ID NO: 362173 - protein, 135 aa, Zea mays
  unsure (1)..(135): unsure at all Xaa locations
  Clone ID: MRT4577_93478C.1.pep
LLFLLLPREHLVRTRCGSVTVAVYGDEDKPALITYPDVALNYMSCFQGFFFCPEVASLLLHNFCVYHTNPQGHEXLQMGAASMSSDVPVPSVADLADQVADVLHFSLWREEVLLKSPLIVAEIGLCPTKMLERTG

SEQ ID NO: 362174 - protein, 149 aa, Zea mays; identical to SEQ ID NO: 362167
  Clone ID: MRT4577_93479C.1.pep

SEQ ID NO: 362175 - protein, 34 aa, Zea mays
  Clone ID: MRT4577_9347C.1.pep
MEVFGPVTPGQVSFLLGLFPVLIAWVYSEILEYK

SEQ ID NO: 362176 - protein, 133 aa, Zea mays
  Clone ID: MRT4577_93480C.1.pep
MWRLAPAGRVALAAVEIGFRGLREIDDVDALQGKMEVSGGSASSWQGPPPERGCQARHRMRHASEQQFRRFFLYEVDAIRKACASLEEGYLPPVTFIVVQKRHHTRFCPKDHHSHKQTDRRGNILPEWQHDGF

SEQ ID NO: 362177 - protein, 157 aa, Zea mays
  unsure (1)..(157): unsure at all Xaa locations
  Clone ID: MRT4577_93481C.1.pep
HINCPWPAKAIIFSLLAWCEATYIFSVCLHGLPSLLQNGSMMGSNNEFDAVKVRDDQMVLSTKILNLEKKWNEYCVRLHQGCNRINRDPCQLFPHHIGVRVDRERCANPNQSAQTIALQRDIIKPCALSSPYTNITAKSISAPDQINADLVLNLXVR

SEQ ID NO: 362178 - protein, 135 aa, Zea mays
  unsure (1)..(135): unsure at all Xaa locations
  Clone ID: MRT4577_93482C.1.pep
MLKILQKLLIGVLTLCPSMALAGVPNGTWLSQPQIRFYASQNALDQVMKDIQSQGYRLVFLDFRGVADDVQEQISQQARNHNLIPIAWVQSPQYRRLTIEQIINEARHTDGLQVDDHFFANYSXRDFEYLANQYR

SEQ ID NO: 362179 - protein, 95 aa, Zea mays
  unsure (1)..(95): unsure at all Xaa locations
  Clone ID: MRT4577_93483C.1.pep
MASQKSCLLITFSQEIVDGVPLFVSSNCLPVKALKYEPAGYSFHAAAMKLLGXCGHEDIETDDHSVSSDDKSQDFNTASDTFSSKGXKKSSGSQQ

SEQ ID NO: 362180 - protein, 59 aa, Zea mays
  Clone ID: MRT4577_93484C.1.pep
LASFYSIDHSLVSDACIYHYCNVIELVGVDCTWQLGDVEYWLHKVMQMRSFNVKWCSIP

SEQ ID NO: 362181 - protein, 56 aa, Zea mays
  Clone ID: MRT4577_93485C.1.pep
MNVTPPPPLCVNFKKGVGCTGGHPCQCVHSVPGWWVGVLISGIILEFMKGPFFFTP

SEQ ID NO: 362182 - protein, 70 aa, Zea mays
  Clone ID: MRT4577_93486C.1.pep
WPPPLTNSHNRTDPSLALWFLLHYLLRLHRADSILAEGGGCKLLAILWPLQPANEGVLCHRLPLTTKNRA

SEQ ID NO: 362183 - protein, 67 aa, Zea mays
  Clone ID: MRT4577_93487C.1.pep
SDCFGVHTFDCVLYKFCHLENEGIIHQSSLHCYVCSSRRRVHAAHSQYSNKNKDSETNIHQKLHFPR

SEQ ID NO: 362184 - protein, 47 aa, Zea mays
  unsure (1)..(47): unsure at all Xaa locations
  Clone ID: MRT4577_93488C.1.pep
PLGFFFATELGEMAAFNVXYPSFTSGLACSTHDHSLHNALNTYCNVL

SEQ ID NO: 362185 - protein, 125 aa, Zea mays
  Clone ID: MRT4577_93489C.1.pep
LSPLLLVQIDPAASDGKMLLRRCLIFRALSPPLVQIPNFFPKDSTPNFLIPSQICRAGYVLVGTALPLLLQIELAGADDHGAAGWCRLTLKCAAMEQIEHMCRLVMPLFLSLFFYAQVLRSSKLI

SEQ ID NO: 362186 - protein, 173 aa, Zea mays
  Clone ID: MRT4577_9348C.1.pep
EESYQSRDLEKASQQVAKNLYETKVQPTTLIPKQVGNMYTASLYAALASVVHSRHETLAGQRIVMFSYGSGLTSTMFSFKINEGHHPFSLLNIANIMDVSKKLKARHVVPPKKFIEVLKLMEHRYGAKDFVTSQDTSLLSVGTYYLTHVDSKYRRFYDVKGDGVTTTAMSNGH

SEQ ID NO: 362187 - protein, 212 aa, Zea mays
  unsure (1)..(212): unsure at all Xaa locations
  Clone ID: MRT4577_93490C.1.pep
MNSIKSAIFSGHRSHPHVGAAAVPQQQLGSTASFHSTPILQRKHKTQWHNRFNYYTRRRRNRGTKRSMLRNMSEYAESLFQSWRDEDEKNAASAGPSWFRRHRWVRNSSNNGFRTHDFYYGNFKSKXRNSKRARSQKSRKXWSFETDXEDEVSAPSEVSXLARQALGLSTSGPXLXLEDVKSAYRAGALRWHPDRHKSSKSTAGGEISIAVQ

SEQ ID NO: 362188 - protein, 258 aa, Zea mays
  Clone ID: MRT4577_93491C.1.pep
MNSIKSAIFSGHRSHPHVGAAAVPQQQLGSTASFHSTPVLQRKHKTQWHNRFNYYTRRRRNRETKRSMLRNMSEYAESLFQSWRDEDEKNAASAGPSWFRGHRWVRNSSNNGFRTHDFYYGNFKSKGGFEFCTSDEDEPENLFRNVFRDQHTYYWSFSSDNFQRNSKRARSQKSRNWSFETDEEDEVSAPSEVSLARQALGLSTSGPLKLEDVKSAYRACALRWHPDRHNGSSKSTAEEKFKHCSAAYKTLCDSLAAA

SEQ ID NO: 362189 - protein, 240 aa, Zea mays
  Clone ID: MRT4577_93492C.1.pep
MTFVFIFFSFFLWTFHPFIYHSKRFYTILIWRRVLAFLVASQVLRIVTFYSTQLPGPNYHCREGSSMATLPPPNNVLEVLLINFPRGVNLGCGDLIFSSHMIFTLVFVRTYHKYGSKRFIKLLAWMMAIIQSLLIIAARKHYTVDVVVAWYAVNLVVFFVDTKLPEMPDRTNGSPLIPLSNKDKDGRPKDEKDVRLKDEFHKLLNGNHGDATDRRQRVQMNGRHAEEDMSMLSDATPNGT

SEQ ID NO: 362190 - protein, 335 aa, Zea mays
  unsure (1)..(335): unsure at all Xaa locations
  Clone ID: MRT4577_93493C.1.pep
SLAGIITGLPLAITVLAGILRSKFIPMEWDVIFEHLESNGQPKPVRSIWSLAFDDLPHYLKSCFLYLASVSENVILYPDRLVRLWIAEGFVMPKKAETLEDVGFDYLKELVARGLVQVVQKDAGGSIKLVAIHNLLHAFVESEAQDSSFLEIHHHANVVNPNAVRRLAIQNYVDAYVHIPNVFPKLRSLLCDFAEDQQRGSSSXRAATSVVMGQSCRVVFKSLWHFGECXQAHCXGLHFLQGSRYLRVVDLYGLKTRKLPDEIGSIIHXLRYLGIRTSNLVEIPSSIYKLDSLQTLDVRKTNVAKAVDEVWENQELRNVVCEKMILPDWSKIPLI

SEQ ID NO: 362191 - protein, 77 aa, Zea mays
  Clone ID: MRT4577_93494C.1.pep
YEADSSASPLGGKAPRKQLATKAARKSAPTTGGVKKPHRYRPVTVALREIRMYQYSSDLLIRMFYFMLFVRKISLDL

SEQ ID NO: 362192 - protein, 52 aa, Zea mays
  Clone ID: MRT4577_93495C.1.pep
LVLPLLRHCGRRGVLHFQARHVRDFATPSTLPSNGGSRNIDNWPVNSRSWST

SEQ ID NO: 362193 - protein, 109 aa, Zea mays
  unsure (1)..(109): unsure at all Xaa locations
  Clone ID: MRT4577_93496C.1.pep
FSWGGAPPLXKPLGGLGCPILFVFFRRGALRPRGGGLLCPGGFLAGRCXGGGFASDLIRGGPREHFASYVPAPSSSFVFFQLGLGESGEITPKKPHRKKKKKKGYGAKG

SEQ ID NO: 362194 - protein, 71 aa, Zea mays
  Clone ID: MRT4577_93497C.1.pep
KRSSQSAVARLDHSLSVCFAALTARLIGFLPSVRPEASSSEPEITTRTISLAVPHLSMAGQATTRGTAVCS

SEQ ID NO: 362195 - protein, 83 aa, Zea mays
  Clone ID: MRT4577_93498C.1.pep
VYRPYAQVLWVDLEIRVASSLVHSFLMAFPRGGIDDVNHGIVRRASISRVLFISGLVTRCGPCRALALAQCSLVHHQVSHPVV

SEQ ID NO: 362196 - protein, 199 aa, Zea mays
  Clone ID: MRT4577_93499C.1.pep
TGLRDASSIRPTQLNSTDKIAMAADELPHQMAMAADQLPDQIALAPSACSTNSCLQGLAQEDDYAILIPLSHIFALMLQALKLPPAIYHHKTYLANESRVTVTFNSSLQLIDGLLIPTSISGVISKNCDEAEDSAAMAAIRFMEDVCGKEIRDYHYIHVKRLENKVTHLVRLLNAANRTIKKARRGWYYAARYMKSYST

SEQ ID NO: 362197 - protein, 90 aa, Zea mays
  Clone ID: MRT4577_9349C.1.pep
SCGMSSSCSCKDRLRFHRRASGSVSVVSPGSSWPTSSSGSSSSGTPAGGAGVSSRLRFLGRQDGLGLDLGTAMGHDQKVHDYTTEWLATS

SEQ ID NO: 362198 - protein, 33 aa, Zea mays
  Clone ID: MRT4577_934C.1.pep
THALPYIREINTRRIHSNHPYICSDACIHPGIS

SEQ ID NO: 362199 - protein, 99 aa, Zea mays
  unsure (1)..(99): unsure at all Xaa locations
  Clone ID: MRT4577_93500C.1.pep
GTKNPKKKLYPFPPPQNSPSKTKRMPPRGALYPPPLPXLAPPKRAPPKQPPHQWGKKQPPGSSXLLTTQTHKRPQSPPQGPPPXPRPVPGRNPPTPNEG

SEQ ID NO: 362200 - protein, 475 aa, Zea mays
  unsure (1)..(475): unsure at all Xaa locations
  Clone ID: MRT4577_93501C.1.pep
MDAAAKEALILDLHAVEAVKLGTFVLKSGITSPIYLDLRVLVSHPRLLASVASLLGALPATRPYDLLCGVPYTALPFAAALSVAASVPMLLSRYDTKRVEGAFRAAQTVLIVEDLVTSGASVLETVAPLRAEGPPWVADAVVVIDREQGGRDNLVASGVALHSLMTLTEMLEVLARQGKVGEGNLTVVRGHGARKEWGTFSGSLLCSNGVNVHVPRHGADAAQLASCIHASVQSMASRRSXVLDFKTLSWSKLEDKSQAEPSELAGAVSFSASAGHSLLRSLIHKPALGLPCVLMEGHXCLTVKTRPXLNMPSKVIKKKKXIRILDWADIINAHIVPGPGIVDGLKLKGLPKGRGLLLLAEMSSAGNLAYGDYTAAAVKIAEQHPDFVIGFISVNPASWSPAPSSPAFIHATPGVQIAAGGDALGQQYNTPFSVINDRGSDIIIVGRGIIKASNPVETARQYRMEGWQAYQSGFS

SEQ ID NO: 362201 - protein, 46 aa, Zea mays
  unsure (1)..(46): unsure at all Xaa locations
  Clone ID: MRT4577_93502C.1.pep
SQHYDSRVARRPALALIPLCALIFLQSLKSLEPHTEPQXXASTANV

SEQ ID NO: 362202 - protein, 123 aa, Zea mays
  Clone ID: MRT4577_93503C.1.pep
VGFSRAPPEKFGPTQPVIKRAPWSCFRGWWFLFLGRGGPGLSFPLVFVKGSNPFGSRPFYQGGGWGFFFCQSQVRLAPLSLFFFFPPLFHQLENFEICFPTPVGPYSPKGVLETQTMLYTSRV

SEQ ID NO: 362203 - protein, 53 aa, Zea mays
  Clone ID: MRT4577_93504C.1.pep
LMQLIVKPTVPRLLISLAPSRTLRRTTQRPKRSYPPSPRLNHLWIDIPVLHWY

SEQ ID NO: 362204 - protein, 79 aa, Zea mays
  unsure (1)..(79): unsure at all Xaa locations
  Clone ID: MRT4577_93505C.1.pep
KHRRTHTLPWGAAQSRGTMGRAKHTARKSTGGKVHRKHITTKEWRKTAPATGGEKKPHRFRPXTMALREIRMYQKSTEF

SEQ ID NO: 362205 - protein, 90 aa, Zea mays
  Clone ID: MRT4577_93506C.1.pep
MGIPKALLLAILGCGVCLCSAAVLAARELGGDDELAMVARHEQWMVQHGRVYKDETDKAHRFLVFKANVKFIESFNAAAAAGNRKFWLGV

SEQ ID NO: 362206 - protein, 36 aa, Zea mays
  Clone ID: MRT4577_93507C.1.pep
LCRFMSRSHLCTGDSYVPDSAKLASRLIPVACCSAC

SEQ ID NO: 362207 - protein, 55 aa, Zea mays
  Clone ID: MRT4577_93508C.1.pep
WTWWLLKVPAHLLQHWDRLSWKGPASLVLIQCCRAGRLYDSSAAPPHKFGLHLRG

SEQ ID NO: 362208 - protein, 163 aa, Zea mays
  unsure (1)..(163): unsure at all Xaa locations
  Clone ID: MRT4577_93509C.1.pep
ISCLLILLELSASDATETIVPLCSHAPIASILTTYLSPVVTSACDFSILXPYRIHHALAYGILPLSPLVLQQXNXLLQQLPSVHXLAQNIRAQQLGLANLAVYSQQQQLPLVHLLAQNIWAQQLQQLVLGNLAAYSHQQQYLPFNQLAALNFAAYLQHQLALP

SEQ ID NO: 362209 - protein, 85 aa, Zea mays
  Clone ID: MRT4577_9350C.1.pep
MADPGTSIRGTRQRSRVQEAAKGNDKDSSDAQDLFMQKLKMAAEKKIGTTKAEFFCKAFEETHEKLVYKELNLDAAKKFLSAYES

SEQ ID NO: 362210 - protein, 131 aa, Zea mays
  Clone ID: MRT4577_93510C.1.pep
MARSVSYVSAAKLVSMARGNPRLAIIDVRDEERSYQAHIAGSHHFASGSFEARMPELVRAASGKDTLVFHCALSQVRGPTCARMFSDYLSETKEDSGIKNIMVLERGFNGWEVSGQPVCSCTDAHCKGTCS

SEQ ID NO: 362211 - protein, 114 aa, Zea mays
  unsure (1)..(114): unsure at all Xaa locations
  Clone ID: MRT4577_93512C.1.pep
MAPSLISGFTQXMAMTELSEVGDKTFLGDEILAMLHPRKLVLACCMTALIEMTALSAPLCWAVPDLISSRWTHHATTILVLAFGIRTLGEGFEADRHXEESAEAEAELDDRFKS

SEQ ID NO: 362212 - protein, 182 aa, Zea mays
  Clone ID: MRT4577_93513C.1.pep
MPKIKNLSNACKVSFSPEGPISEEVLERVRALLDEIRPLDVGLDNEAQIARNWSSTTRPSNGRRGRNGANQFTAPIKYLHIHECESFSMGIFCMPPSSVIPLHNHPGMTVLSKLLYGRLHAESYDWVDIPDHPIDQLQSGNIHTFRAITPCALFDVLSPPYSAEDGRHCSYFRKSQMNQPPV

SEQ ID NO: 362213 - protein, 46 aa, Zea mays
  Clone ID: MRT4577_93514C.1.pep
ALVFRLVGTAIHEKQMYWVRLPVSTLPEILFVTPCPIMVSFHTDVG

SEQ ID NO: 362214 - protein, 129 aa, Zea mays
  unsure (1)..(129): unsure at all Xaa locations
  Clone ID: MRT4577_93515C.1.pep
MPKIKSLSNACRVSFSPEGPISEEALERVRALLDMIRPLDVGLDNEAQIARNWSSSTRPSNGRRGRNGANQFAAPIKYLHIHECESFSXGIFCMPPSSVIPLHNHPGMTVLSKLLYGRLHAESYDWVDI

SEQ ID NO: 362215 - protein, 199 aa, Zea mays
  Clone ID: MRT4577_93516C.1.pep
MPKIKNLSNACKVSFSPEGPISEEVLERVRALLDEIRPLDVGLDNEAQIARNWSSTTRPSNGRRGPYGANQFTAPIKYLHIHECESFSMGIFCMPPSSVIPLHNHPGMTVLSKLLYGRLHAESYDWVDVPDHPIDQLQPRPAKLVKDCEMTAPETTILYPNAGGNIHTFRAITPCALFDVLFSPYSAEDGRHCSYFRKS

SEQ ID NO: 362216 - protein, 246 aa, Zea mays
  Clone ID: MRT4577_93517C.1.pep
MPKIKSLSNACRVSFSPEGPISEEALERVRALLDMIRPLDVGLDNEAQIARNWSSSTRPSNGRRGRNGANQFAAPIKYLHIHECESFSMGIFCMPPSSVIPLHNHPGMTVLSKLLYGRLHAESYDWVDIPDHPIDQLQTRPAKLVKDCEMTAPETTILYPNAGGNIHTFRAITPCALFDVLSPPYSAEDGRHCSYFRKSQMNQPPVVLPAEIDSSQVVWLEELEDHQPPEGFVVARGLYKGPVIRR

SEQ ID NO: 362217 - protein, 49 aa, Zea mays
  unsure (1)..(49): unsure at all Xaa locations
  Clone ID: MRT4577_93518C.1.pep
QGRVRHVPSRDPGXPGLVPTPQAVDLWXHLVTLGKWXDFXSSXXKHTMS

SEQ ID NO: 362218 - protein, 110 aa, Zea mays
  unsure (1)..(110): unsure at all Xaa locations
  Clone ID: MRT4577_93519C.1.pep
MLGRAPHKIDITKSYEILEVPKSAFQDELNKAYRMAAIKNHHDKGGDPXKFMELAQAYEVSSDPEKREXIYDQYGDDAFKEGMVRXGSHVDXCDIXHHFXGPCFGGGGGS

SEQ ID NO: 362219 - protein, 304 aa, Zea mays
  unsure (1)..(304): unsure at all Xaa locations
  Clone ID: MRT4577_9351C.1.pep
KFRCRCPRTGVCATSPTNKGTRLFPPVKLGAFTPNTVIKQVSCGAVHVMALSEDGLLQAWGYNEYGQLGRGRTSQGLQGARVLNAYARFLDDAPEQVKIVRVSCGEYHTAAISENGEVYTWGLGSMGQLGHCSLQSGDNELIPRRVVALDGIVVGDVSCGGVHSCAVTEGGALYAWGGGHVGQLGVGPQGGFFSCSLNGSDMLLRNIPVLVIPSXCVGEVRRLAAGGGHSAVLTDACSLKELCEFKLAETVNLSNAQLIEDVASRTGADALARLCEKVREHLDKEGECEFLEKQVAEEVNTIGS

SEQ ID NO: 362220 - protein, 94 aa, Zea mays
  Clone ID: MRT4577_93520C.1.pep
AAFFFFFLTPSPFCVTIFFQIRSDTVSNSQSINLLNRQHIRSHQSFTLGISSFPLIMYWNTHSDVLQNMYVFRVNKGSSFYSPAVLSLARMPSH

SEQ ID NO: 362221 - protein, 102 aa, Zea mays
  Clone ID: MRT4577_93521C.1.pep
GVGGVARKNCCRLLAPAVAAVTWDGRKLPFGEVIKRHASEEHFTRFLHYEVDAIRKAFATLEKGNLPQVTSIVVQKRHHTVFCPRIHRTHRHPDRRGNILQG

SEQ ID NO: 362222 - protein, 115 aa, Zea mays
  unsure (1)..(115): unsure at all Xaa locations
  Clone ID: MRT4577_93523C.1.pep
VPQGXRDLYNAETASSXSPISATXSFPQXPPFSHFSXPPPLPPFSNTMTGVDXRADAARLRIQARKRAVGSCTAPSMASPLTPRSPATTPLPATPRRSQHPPHRDCPWQARPPAL

SEQ ID NO: 362223 - protein, 94 aa, Zea mays
  Clone ID: MRT4577_93524C.1.pep
LGRCADASDIVPSHPPRETDNPPATKRWIIRISDLETRSCRMHSATTRSRTERCVRTRERGPPHVLLMRRMRTMHPPRAMKLQSLGTHLSRRPT

SEQ ID NO: 362224 - protein, 51 aa, Zea mays
  unsure (1)..(51): unsure at all Xaa locations
  Clone ID: MRT4577_93525C.1.pep
VKSHQSGDKKKKMKKVVYYETDSSLPSTSGSDAPSVTSKRQXRKKFSKTPL

SEQ ID NO: 362225 - protein, 150 aa, Zea mays
  Clone ID: MRT4577_93526C.1.pep
MSSSSPQLRRLKPAYQYVVNNLLAVLAVLAVPLVVAGIVSAARVGPEELLARLHALRPVHVFLAAFVPAAAGVLYLMMRPRSVYLVDYACFRTKPSHRVPFGTFLEHAKLVTFIEGASIDERSVRFMTRLLERSGLGEETCLPPAHHFIP

SEQ ID NO: 362226 - protein, 558 aa, Zea mays
  unsure (1)..(558): unsure at all Xaa locations
  Clone ID: MRT4577_93527C.1.pep
FKEDEARNIKGEVQEVFPTQEENNDQGGDTHYQDEXDEQVLRPPQSRVHQAIXNAITPVEEALQDSDWVVAMQEELNNFTRNEVWHLVPRPNQNVVGTKWVFRNKQDEHGVVTRNKARLVAKGYSQVEGLHFGETYAPVARLESIRILLSYATYHGFKLYQMDVKSAFLNRPIKEEVYVEQPPGFEDSEYPNYVYKLSKALYGLKQAPRAWYECLRDFLITNGFKVRKADPTLFTKTLDNDLFVCQIYVDDIIFGSTNESTCEEFSRIMTQKFEMSMMGELKYFLGFQVKQLQEGTFISQTKYIQDILNKFGMKDAKPIKTPMGTNGHLDLDMGGKSVDQKVPKVHNKPIKRPKMGSNKESQRHPKGTLVWRTGLSGVPPDSVRCTRALDAELATFEKMGGRSAIIHRTVRCASESTATSHATVDYNAFNARLRAQRTEHAQKAHRTVYRTCPVHHRTAQRPHQSELQRAEPNGRLTWLAHRTVSGGAPDCLVCHATDSLPTTTFGGWGYKYLNHIPFNGIQVFHLQHITRAIAFNSRHNQRDQILSQVRNHSKSNSD

SEQ ID NO: 362227 - protein, 47 aa, Zea mays
  Clone ID: MRT4577_93528C.1.pep
QQRERTLLSHSHSTYLIAFVITFANRTTFFFQHSALTLYFFLGWFFF

SEQ ID NO: 362228 - protein, 80 aa, Zea mays
  Clone ID: MRT4577_93529C.1.pep
QGIVAMYESMGQQAGAAIYLSGASWTLLTVVYGHSHWPLLFLTGLYGYANYRCGYLLSRGLRGSELLECGGVTVSGHRRP

SEQ ID NO: 362229 - protein, 49 aa, Zea mays
  Clone ID: MRT4577_9352C.1.pep
TDPDRLTGFGVVCLKKKKKKKKKKKKKKKKKKKKKKKKKKKKSEGENRY

SEQ ID NO: 362230 - protein, 87 aa, Zea mays
  Clone ID: MRT4577_93530C.1.pep
FCHLRAAASVPRLHHRQKLISPARSHHPSLVVPPSNLREPWRTGVQMRMQQHQWRMMPHSGPLPCLTPPHRAAHLQRRGRGRTQKPM

SEQ ID NO: 362231 - protein, 207 aa, Zea mays
  Clone ID: MRT4577_93531C.1.pep
MGLDNTYGELSGMFYGGLSYDGYADHSSASDYFRFADPLPAVVPQMTAEACSNPSSTVSRANTEADNPEDWEFISDESLNYISRMLMEEDIDEKVSMYQAESAALRAAAKPFYDILGHKFPPSPDRQVMPWPMDSPSESSGSICTQSVASAVTSSSVGGTVDSNRCYDVGHSEQLEAFRGLCGQSSHPLCGASSDASNAVGELEDIL

SEQ ID NO: 362232 - protein, 76 aa, Zea mays
  Clone ID: MRT4577_93532C.1.pep
KNNSQQPELLDSNRWKKDKKHWILGSSLFLGSSILLNIVLISVILFGTYCTITINESPSVQSSNNLGLPLKAFNYT

SEQ ID NO: 362233 - protein, 212 aa, Zea mays
  unsure (1)..(212): unsure at all Xaa locations
  Clone ID: MRT4577_93533C.1.pep
SFPISSPPAPAPPPAPCSASAAASSPTSSPLAPPXPTPLSPAPPXPPPPRPPFPQTLASPSRTTSSPPAXAXPEPRRSRPPRSSPTSSPPPSPTPSSPSSPASASPAPTSPRSSPKTRSSSAPAWRETWAPPSRGSPASASRAXGRAPRLALPRPIPPQERRPQGALLPVPLRVLRGPPLGGQARLVPFLGRPRHCGEAQCRGAAGVRARCS

SEQ ID NO: 362234 - protein, 45 aa, Zea mays
  Clone ID: MRT4577_93534C.1.pep
VHHIQMAFQYLFSFAMGSLAVLDFYSAERTKYKQSGLGVSKEQIR

SEQ ID NO: 362235 - protein, 145 aa, Zea mays
  Clone ID: MRT4577_93535C.1.pep
DKSIKIADFGVARMPGKTEGMTPETGTYRWMAPEMIQHRPYNQKVDVYSFAIVLWELVTGNVPFANMTAVQAAFAVVNKGVRPAIPHDCLPALGEIMTRCWDANPEVRPPFTEIVRMLEQVEMEVLTTVRKARFRCCIAQPMTLD

SEQ ID NO: 362236 - protein, 83 aa, Zea mays
  Clone ID: MRT4577_93536C.1.pep
MRCGATRLEGIPEEDATTGLGGWCRCECDDDGWEVVGDAEEEEEQEVEMETVRWAMEVGVWAVCLGVGLLATARRFRRKRAFW

SEQ ID NO: 362237 - protein, 135 aa, Zea mays
  Clone ID: MRT4577_93537C.1.pep
EISYTCTSPNTLLVLSLVGPGEHRWARHEGLVAVVGSAPHDTIQAGVSVYQAVRAGGVHGHLVESAGLVPFTCVRCHPAPVGARAGVGDGGVHGDGVVEQERKSMCLSPRCLYHLTPTWCLRNRARRCGPPLFFR

SEQ ID NO: 362238 - protein, 599 aa, Zea mays
  unsure (1)..(599): unsure at all Xaa locations
  Clone ID: MRT4577_93538C.1.pep
LGTSRPAGNNSPNPSRRPDEQGPRAHLTMATATAAPVPAGGHPXPRPHSLRPXRLHRLRFPAAAAAASSSLPAPSSMLPPLPDGGGRLVAELVCAFNELTERMGEDLATSSSSSLLFRVLKLALPALRDVEGGRALARALAVAATLADLQMDAEVISAGILREALDAGAVRMRDVKTQIGISTAHLLHDSLRIKHAPSKLDVLDDEGASTLRRFILSYYDIRAVILELGMKLDMMRHLDYLPKYLQQIKSLEVMKIYAPLAHAVGAGNLSLELEDLSFRYLFPHSYDHVDQWLRSQEGDCKAIINLYKEQLLQALQADNELRRIAQDISIQGRYKSRFSTMKKLVKDGRKPEEVKDILGLRVILEPRCGGNSSDWGPRACHRTHEIIQAMWKEIPGRTKDYITHPKRNGYQSLHVAIDVSEPGKVRPLMEVQIRTKEMHRFAVGGEASHSLYKGGLTDPGEAKRLKTIMLAAAELAALRLRDLPGSDHVVGNCKNPAFCQLDKNGDGRISIEELTEVMEDLGAGGEDATELMHLLDANSDGSLSSDEFESFQRQIEVMRNLEDDDNHYRKILKEKLHTIDSAGLIHVYRKELSDKLLVG

SEQ ID NO: 362239 - protein, 69 aa, Zea mays
  Clone ID: MRT4577_93539C.1.pep
GFFLASGPFFNNPQTLTAEKPYHHSPGILRFRAFLQDSTWALLARLPRHIPRRGLQNYFFLTQRALGGL

SEQ ID NO: 362240 - protein, 112 aa, Zea mays
  unsure (1)..(112): unsure at all Xaa locations
  Clone ID: MRT4577_9353C.1.pep
TFANLQHYKQESARLRQQIVNLQNSNRXVLIENYHVRENTERSFDELISFXALIGDSITTMSHKELKHLETRLDKALGKIRAKKNDVLCSEVEYMQRRVDSNKNTFFLSGPY

SEQ ID NO: 362241 - protein, 128 aa, Zea mays
  unsure (1)..(128): unsure at all Xaa locations
  Clone ID: MRT4577_93540C.1.pep
QHAXTRSDRXXLVSYPRXTSNIDSLPGVPXGGAEPVPAPRXRPANRGYGMGPPAKXXLXVVQFRNFCFLLXGSPNPVARIMLEEHSVTSXMLRGXHGCXVMXEAAMVRXXNXVISXDPLNFFVRXLLQ

SEQ ID NO: 362242 - protein, 66 aa, Zea mays
  Clone ID: MRT4577_93541C.1.pep
DTRNFKSPNRSVRDTYIPSMLSACHEFSQVKASTQVQNIPSIASTAFFQLRTIKLLISLVAIFTPP

SEQ ID NO: 362243 - protein, 48 aa, Zea mays
  Clone ID: MRT4577_93542C.1.pep
LTICSAEHTLVTYNITLSLITKTNHGHTCPQSRPFWWLMTTLQTILTL

SEQ ID NO: 362244 - protein, 100 aa, Zea mays
  Clone ID: MRT4577_93543C.1.pep
MHGYEREVEDGVAKDGQRAGVHGAAQMGSTVRRQMEQSGLGCTVRIAVSRWILGRSRAPAVSYLSCGRRVAPSYRLDSEFNPTPQYHSPSLYLSGGGSLA

SEQ ID NO: 362245 - protein, 53 aa, Zea mays
  Clone ID: MRT4577_93544C.1.pep
SSHGGGRPLLCFWQGSLRRGQHAITSDTKQTQYYGRLDTMHWAIAQTLGLTSK

SEQ ID NO: 362246 - protein, 137 aa, Zea mays
  Clone ID: MRT4577_93545C.1.pep
AFQFSAAAAHSRVLTQARTPPRRLGSTAASAAMVNVPKTKKTYCKNKECKKHTLHKVTQYKKGKDSLSAQGKRRYDRKQSGYGGQTKPVFHKKAKTTKKIVLKLQCQSCKHYSQRAIKRCKHFEIGGDKKGKGTSLF

SEQ ID NO: 362247 - protein, 68 aa, Zea mays
  Clone ID: MRT4577_93546C.1.pep
YYVYPFLSTKLRETTRGGQHASCGHHHFSSRGRHEAGVALHRGPRPSVAGSVHCGRARRQEGHVAVAG

SEQ ID NO: 362248 - protein, 70 aa, Zea mays
  unsure (1)..(70): unsure at all Xaa locations
  Clone ID: MRT4577_93547C.1.pep
RQARNILNSSGVEKAELARLVKGVVWIYSQTRFKSSSLRQICINNXMPPIGLIFLEEQSCNGYKYPRQXX

SEQ ID NO: 362249 - protein, 70 aa, Zea mays
  unsure (1)..(70): unsure at all Xaa locations
  Clone ID: MRT4577_93548C.1.pep
LIVHRNKVKVXXSLXISGLFXVVSYNLCXFPQSXGLIFXPXXSPSFXVPILIVVIRWPPYLLSVLSAILF

SEQ ID NO: 362250 - protein, 71 aa, Zea mays
  Clone ID: MRT4577_93549C.1.pep
VRIRTKERPQESPDASYSSPFSALTQEFVISHLFCFLKSKCMKDPLVTYCSCPSILYLVSTVLLKYNNLVQ

SEQ ID NO: 362251 - protein, 308 aa, Zea mays
  unsure (1)..(308): unsure at all Xaa locations
  Clone ID: MRT4577_9354C.1.pep
SVSCGAHCTAAVAEPRENDGTVSKSRLWVWGQNQGSDYPRLFWGAFTPNTVIKQVSCGAVHVMALSEDGLLQAWXYTWGLGSMGQLGHCSLQSGDNELIPRRVVALDGIVVGDVSCGGVHSCAVTEGGALYAWGGGHVGQLGVGPQGGFFSCSLNGSDMLLRNIPVLVIPSGVRLATCGHSHTLVSMKDGRIYGWGYNSYGQATNEKSTYAWFPSPVDWCVGEVRRLAAGGGHSAVLTDACSLKELCEFKLAETVNLSNAQLIEDVASRTGADALARLCEKVREHLDKEGECEFLEKQVAEEVNTIGS

SEQ ID NO: 362252 - protein, 98 aa, Zea mays
  unsure (1)..(98): unsure at all Xaa locations
  Clone ID: MRT4577_93550C.1.pep
MLLRASFMASSDHGCTTXPRTFGGFHRQPFGGGXRERLEFYYXQGQGGXVSLRVERYGFTVVRMNVLAGRCMGREPGGVGVVGAKSFPVLFDVEKVGE

SEQ ID NO: 362253 - protein, 78 aa, Zea mays
  Clone ID: MRT4577_93551C.1.pep
ARHVPHLLGPPLGGLARVPCSVHCWGWVQFRPGWPVASCDFKIGIRSPPLIIIPIKSFAPVCFRPVGSKQKFGGALWL

SEQ ID NO: 362254 - protein, 145 aa, Zea mays
  unsure (1)..(145): unsure at all Xaa locations
  Clone ID: MRT4577_93552C.1.pep
RLLLSPRRCRHGQHSIPVGTTSQVALGSSINSRTCRCSTDEQTVPDVRLTKSRDGTNGVAVFAFERPSVFDSSAELGDITGFYMVDDEGVLQSVDVSAKFVNGKPARIEAKYVMRTPREWDRFMRFIERXPGRYSRANGLQFVRN

SEQ ID NO: 362255 - protein, 180 aa, Zea mays
  Clone ID: MRT4577_93553C.1.pep
MAAVAAMKALAVAASPVSARQPRRYVAGGASRRLQSPFHGVSVQCPGRPRRATPRRGPQVAVVVAAAVRPAIQFIQGTDEQTIPDVRLTKSRDGTNGVAIFTFEQPSVFDSSAELGDITGFYMIDDEGVLQSVDVSAKFVNGKPARIEAKYVMRTPRDWDRFMRFMERYSQANGLQFVKN

SEQ ID NO: 362256 - protein, 182 aa, Zea mays
  Clone ID: MRT4577_93554C.1.pep
MAAVMKALAVASPVSARAAQHPRRYHVAGVPSQQHQQQNLSLHLQSLFHGVSSVQCPGRWRRAQVVAMAARPAIQFIQGTDEQTVPDVRLTKSRDGTNGVAVFAFERPSVFDSSAELGDITGFYMVDDEGVLQSVDVSAKFVNGKPARIEAKYVMRTPREWDRFMRFMERYSRANGLQFVRN

SEQ ID NO: 362257 - protein, 182 aa, Zea mays
  Clone ID: MRT4577_93555C.1.pep
MPRAGVSSSESSRRGAGAFRTLSEDRRITVFCSDGRLYQVDYAWNATKLAGVTSVGVRGTDSVCVVGQRRANTHAPKDKLLDMTSVSRLFPITDRLGLLATGIAGEGRALAHEARNQTAEFRFNWGYEMPPDVLAQWIADRAQIWTQYVSKRPSGVVAMILGIDDEKGTPQLFTCDPAGYFF

SEQ ID NO: 362258 - protein, 146 aa, Zea mays
  unsure (1)..(146): unsure at all Xaa locations
  Clone ID: MRT4577_93556C.1.pep
KTHQRSARGATPRHQETARRAXXAXRGSATNAXTRPQGAXAXSAXXPQXQPPXXXRGEERXGEQANRQQXAXAGSAXQQPXAQXQQQAXAQQTRQTKATQQQQQQTXPAQSHRAEXNXDTDQQQQPGANNPRARANAAGDQQQQQP

SEQ ID NO: 362259 - protein, 78 aa, Zea mays
  Clone ID: MRT4577_93557C.1.pep
KFVPITPKNMVWGGAPPWLFVGVPRQKQAPWLFCPSTKGFVWLFPPKINWECFVRFKKKKKKKTPTPKKKKKKKKKKE

SEQ ID NO: 362260 - protein, 86 aa, Zea mays
  Clone ID: MRT4577_93558C.1.pep
VHLSLAPPLRPLSLARSILPPTMGKEKSHINIVVIGHADFEGDLHLRQLIVHALAAVVKRTHEWKEYDYGTMNIQVMEYAWVHDPL

SEQ ID NO: 362261 - protein, 65 aa, Zea mays
  Clone ID: MRT4577_93559C.1.pep
GGNARYWVIIRGKFGTLRVLAFQTGPQLFVPPPLSGRANFLFVLKPTRCFGVFPRMRGSFIPYSP

SEQ ID NO: 362262 - protein, 54 aa, Zea mays
  Clone ID: MRT4577_9355C.1.pep
GNPEVRVNKAGRAAGVLENHEEGRRYAMHGLRSFVHDKTPEIMPAINKFFTDPK

SEQ ID NO: 362263 - protein, 63 aa, Zea mays
  unsure (1)..(63): unsure at all Xaa locations
  Clone ID: MRT4577_93560C.1.pep
PSTDPALRRRYGRSPPPPAPRRCSRVPPGRRRAAEPRITCHHPVRSQPRPQERRRGXQPPPQR

SEQ ID NO: 362264 - protein, 93 aa, Zea mays
  unsure (1)..(93): unsure at all Xaa locations
  Clone ID: MRT4577_93561C.1.pep
TTPPPHXKAPQKGAFPPPPNAAPXGRPHGPGLFXTPPTGKKRPLLQSHLPPVNTGFSHPHVFKTPDHSPLRRPRDKKKIFPPPPQFLIGPQFY

SEQ ID NO: 362265 - protein, 84 aa, Zea mays
  Clone ID: MRT4577_93562C.1.pep
NNYQGNCFWIKPPNPNKEYPCFFGLGSHGYIKNRRAMQSQFLFFILPRQGTGEALISVFGFWGTRPCKKGTQFTSGELTPYCQG

SEQ ID NO: 362266 - protein, 43 aa, Zea mays
  Clone ID: MRT4577_93563C.1.pep
WTGHGRTFLHVSRLALLLSLWMITVVLMRVEVPIPSSLKGEVL

SEQ ID NO: 362267 - protein, 73 aa, Zea mays
  Clone ID: MRT4577_93564C.1.pep
WLNGCYGYAGVVYTPCMQPVLAWAHRLSSPSSKPDDNAVNVLLVSVHEEHVRGPAIPECFFIMDLPAIMSCSN

SEQ ID NO: 362268 - protein, 57 aa, Zea mays
  Clone ID: MRT4577_93565C.1.pep
ITFNGGGSLCPFQRGKPWGQMYLKKWHNAGRGGFGIWGSFAFSLTDTLCSGVLVWGE

SEQ ID NO: 362269 - protein, 28 aa, Zea mays
  Clone ID: MRT4577_93566C.1.pep
MSMKILREEKNFHPVQRLGSEADRIRAT

SEQ ID NO: 362270 - protein, 55 aa, Zea mays
  unsure (1)..(55): unsure at all Xaa locations
  Clone ID: MRT4577_93567C.1.pep
MQQHQHLLASQGFXPMAFIMAETMPSMGGLSRIQYQLPRSRTSLCGVLRAIPPPA

SEQ ID NO: 362271 - protein, 52 aa, Zea mays
  Clone ID: MRT4577_93568C.1.pep
SCRWRFKQPPFFVLSRALQSWQCTAPDYPIILVGEGLNSYIISWGQPLVWFP

SEQ ID NO: 362272 - protein, 87 aa, Zea mays
  Clone ID: MRT4577_93569C.1.pep
MGDATSPVECPRVSVISFAEYPECLYLSSHHMNMVQELSARQFNRHLARRYIVKCVGMYTQGPVCKYSIVKGRHRALSLYSSITFPS

SEQ ID NO: 362273 - protein, 480 aa, Zea mays
  Clone ID: MRT4577_9356C.1.pep
MDVDDVLSNLRVVGVPTKSAIYIWGYNHSGQTARKGKECHLRIPKSLPPKLFKLGNGKSLRWTDIACGREHTAAVASDGSLFTWGANEFGQLGDGTEDSAKEPKKVKSLETEFVKSVSCGAHCTAAVAEPRENDGTVSKSRLWVWGQNQGSDYPRLFWGAFTPNTVIKQVSCGAVHVMALSEDGLLQAWGYNEYGQLGRGRTSQGLQGARVLNAYARFLDDAPEQVKIVRVSCGEYHTAAISENGEVYTWGLGSMGQLGHCSLQSGDNELIPRRVVALDGIVVGDVSCGGVHSCAVTEGGALYAWGGGHVGQLGVGPQGGFFSCSLNGSDMLLRNIPVLVIPSGVRLATCGHSHTLVSMKDGRIYGWGYNSYGQATNEKSTYAWFPSPVDWCVGEVRRLAAGGGHSAVLTDACSLKELCEFKLAETVNLSNAQLIEDVASRTGADALARLCEKVREHLDKEGECEFLEKQVAEEVNTIGS

SEQ ID NO: 362274 - protein, 151 aa, Zea mays
  Clone ID: MRT4577_93570C.1.pep
MNALSREGCRHYEVFDQADEDFECDIYKVEDPVVKESAGALYDRMWGPHGREVVRERAETARGQVQDFGPAHATATANFLAASTVDDGNKSDESASKFSDFSDSGSSVECTEESSDEDLDYFAALDVAAAEASPHAADAEVVPGPSAGRRR

SEQ ID NO: 362275 - protein, 97 aa, Zea mays
  unsure (1)..(97): unsure at all Xaa locations
  Clone ID: MRT4577_93571C.1.pep
KPPAKTQPSRDPPLSAPPPPSQDPQPXAAVGDGPPPAAVAAGASGTPSAXPGAAPGWPRTHPPSGSAPGQAARCSKPRSHPPSRHAPPDPSPSRPAP

SEQ ID NO: 362276 - protein, 68 aa, Zea mays
  unsure (1)..(68): unsure at all Xaa locations
  Clone ID: MRT4577_93572C.1.pep
TSSTLRXRFDGPRKSNLYDRRRLIVGLRQSLMHARALKQLTDADRPGDRHLDHRCTALRTPGWVGXGF

SEQ ID NO: 362277 - protein, 105 aa, Zea mays
  Clone ID: MRT4577_93573C.1.pep
RKPYKTPDTQIQKNPPQMFSNRVSNTPEQHKGKQNPSKIFLQGPKMKLSNPFGGCPRAPPPPTQILATPGPLVLRIPSKNFGENQKVPPQNQPPFFPRNWNVTNH

SEQ ID NO: 362278 - protein, 90 aa, Zea mays
  Clone ID: MRT4577_93574C.1.pep
LASLLSSASWRRRSVLSASSAATFSASLRHLLSAADFSRTASACCARSLSTSADTTAVRAPDATRSAKSAAAGATAGGTTTSCPSLDPTR

SEQ ID NO: 362279 - protein, 121 aa, Zea mays
  unsure (1)..(121): unsure at all Xaa locations
  Clone ID: MRT4577_93575C.1.pep
MRECXISVHIIASGRHPSTTTRCWELYCLEHVIQPDXGQVPVDKTAGHHDDAFSTFFRHTGAGKHVPRAIFCDVQPTVIDDVRTGHDRQFFHPEQLITGKEDAANNFAAWHYTIDREICDL

SEQ ID NO: 362280 - protein, 79 aa, Zea mays
  Clone ID: MRT4577_93576C.1.pep
YATCGASAVASAVASAATVAGSSALGAAAAGASGVPSAVSGGRSPPAAADAEVSGAPSAVSGGGSRAAPDTASAGVGSG

SEQ ID NO: 362281 - protein, 392 aa, Zea mays
  unsure (1)..(392): unsure at all Xaa locations
  Clone ID: MRT4577_93577C.1.pep
LGTSRPAGIPSQPTKEKESVCSFRGRTHRRHGGDTKPHPDXVTGWAAMNESAGKVEPFVFKRRENGPDDVTIKVQYCGMCHTDLHFINNDWGITTYPLVPGHEITGVVTKAGRNVTGFRVGDRVGVGCIAASCLDCDHCRRSEENYCDRVALTYNGVFWDGSVTYGGYSRALVADKRFVVRVPDALPLDAAAPLLCAGITVYSPMKHHGMLGHPGASLGVVGLGGLGHVAVKLAKAFGLRVTVVSTSPAKEAEARARLGADRFVVSTDDAQMRDAARSLDYVIDTVSAKHSLGPILDLLKVSGKLVLVAAPDQPVELPSFPLIFGKRTVSGSMTGGIRETQEMLDLCARHNITCDIELVSTDGINAALARLARNDVRYRFVIDIAGDSTSKL

SEQ ID NO: 362282 - protein, 60 aa, Zea mays
  Clone ID: MRT4577_93578C.1.pep
HPGCCKQAAYSIAFRFPNTKAMTSYASVRNLGDFKFVFLSFSFFFFFFFFFFFFFFFFFF

SEQ ID NO: 362283 - protein, 83 aa, Zea mays
  Clone ID: MRT4577_93579C.1.pep
LASTDNQNSFYSRYNNRKTNRSRCPTLALKELNHQLTYLRNKSAAFDSCLSDSIEKKGQPSILPDNDKWLSTSLKPYFPREFI

SEQ ID NO: 362284 - protein, 48 aa, Zea mays
  Clone ID: MRT4577_9357C.1.pep
GIFEYGSLIWNPGYEYGNKILSFIMGYKRTFNLACLDHLGTPQRSARS

SEQ ID NO: 362285 - protein, 120 aa, Zea mays
  Clone ID: MRT4577_93580C.1.pep
LASLLSSASWRRRSVISPSSATTFSASLRHLLSATDFSWTTSACCARSLSTSADTTDLAHCDASFSRRDTAPASSLTAVSAGISPPALRALPFAPGTATDTVVATAGGTTTSCPSPDPTR

SEQ ID NO: 362286 - protein, 340 aa, Zea mays
  Clone ID: MRT4577_93581C.1.pep
SAGLLGIISCRENGPDDVTIKVQYCGMCHTDLHFINNDWGITTYPLVPGHEITGVVTKAGRNVTGFRVGDRVGVGCIAASCLDCDHCRRSEENYCDRVALTYNGVFWDGSVTYGGYSRALVADKRFVVRVPDALPLDAAAPLLCAGVTVYSPMKHHGMLGHPGASLGVVGLGGLGHVAVKLAKAFGLRVTVVSTSPAKEAEARARLGADRFVVSTDDAQMRDAARSLDYVIDTVSAKHSLGPILDLLKVSGKLVLVAAPDQPVELPSFPLIFGKRTVSGSMTGGIRETQEMLDLCARHNITCDIELVSTDGINAALARLARNDVRYRFVIDIAGDSTSKL

SEQ ID NO: 362287 - protein, 230 aa, Zea mays
  unsure (1)..(230): unsure at all Xaa locations
  Clone ID: MRT4577_93582C.1.pep
RLRAQAQNLEPAKAQPPWDPPPPAPSSSSGDPQPSAQQXDEPPPDAVAAEAAREPXRFPGAAPGRPQPRPPPGSSQLQAARCSKSRSPPRSRHAPPGPSPXGPLPXPPPDREGPTSGQRGPPWTPSPPGPXPCRSRAQNLHQIGRRPHSGGTLRGTARSWPPPAQTAPWRGPDSPPSSPPPAGAGVQSSRPPACPPSPPVCGTCYRRPTFPVRRQHAAPEASRLRQTPQP

SEQ ID NO: 362288 - protein, 63 aa, Zea mays
  Clone ID: MRT4577_93583C.1.pep
QPVLVKTRLGKGIYLEKGVNRYNPSMVFLKTTVENKVFRVQWMEPPTEIPEPISKTNLIPKIS

SEQ ID NO: 362289 - protein, 62 aa, Zea mays
  Clone ID: MRT4577_93584C.1.pep
HFCHADGEVEGIPPDQQAAHLCWRQMNCHARKLPIHISISAQPDTLSNIAGWASFMSDNLHL

SEQ ID NO: 362290 - protein, 973 aa, Zea mays
  Clone ID: MRT4577_93585C.1.pep
MSSSSSSAAATPPADASSEETLCNVAAEELRAGDTVDFDAPRMSSVRVQDMQQLGYFGGGVARVPGSEEVPEPEGELVVFEAFFAVGLRLPAHRFVGEVLRRFNVQVHQLTPNAVVALSKYVWATTSYGGQPSVEVFAKYYCLHWQKRMIGNKIAQFGSCTFTPKTGKTSMEVVELVPCARNKWGNWWEFWFYVAEGTVEDHPGLPVAEMCSHYYSAYPQFEVAEEDADEGALRCAAGLSSGHDLVEEFVAYGVWPMARGWALGEVCPRQMPSRGGMLVRSPAFALDLHSRDPAAFVREAEDGAVRIVGRYVPKTEGQRSWDIRESNDRLNRVFELNRLPYGGYPGQDDVDRRGKKPAAETGDDPAPAAAPSSKNRKLGTATGGLGVSDSFAMELMGTCAAPGGRMSSPKLWESLARMLKVTGGWWPKNVPIPRAAGEDFFTSRMVRDLRVFPYVRNIAAVVSAVMDKDRQEAAQKRRAVIRLPEARPKRARGTAKAAAPGGSQPTLAAKSAGPGSSKVPDVVKAVGAGGAKSTSAGAAKARELPPPGKRIADFGTDISVDDYLTGSGEGQLVVPPAVATTVSATVPGAKGGAHSAGGEISALAAVKDEAGAVSRRLKEASQRLSQHAEAVREKSAADSKCRKLAEKVAALEGERTELRRQLAEERREANQALAKAQSAQAEANVARVEGGLARQRAEEWEERFNAQQARMERAEASTRSEVERTRKQLMDSYHELGARTADFEVPGRESGLRCLEWLQEELLVLPTIVEGFMSYASLVTCEGAMNALSREGCRHYEVFDRSDEDFEREIYKVEDPVVKESVGALFDRMWGPHGREVVRERSDTARGQAAHDEKVEDFGALNSARPEAESNPVAAGPEVQDFGPAHATATANFLAAWTVDAGNESDESASKFSDFGDSGSSVEWTEESSDEDLDYLRPWMWQRRRLRRVLRMLKLCLVQVLGVGGEGRLRSVE

SEQ ID NO: 362291 - protein, 87 aa, Zea mays
  Clone ID: MRT4577_93586C.1.pep
TCEDPAVAGSSAAGSAAIFTGSSALGAAVGDEPPPAAVAAGASGAPSTVSGGGAGATSDTAAAGFDSESGCTLFKAPKSSTFSFRAA

SEQ ID NO: 362292 - protein, 104 aa, Zea mays
  Clone ID: MRT4577_93587C.1.pep
DINPSTIVGSACNSSCTHSRQRSPGSRSGTSTSAVSLLSPASWRRRSVFSPSSAATLSASLRHLLSAADFSRTASACCVRSLSTSADTTAVSAPDAARSAKAAA

SEQ ID NO: 362293 - protein, 40 aa, Zea mays
  Clone ID: MRT4577_93588C.1.pep
VLSPKLNLASYSESCFFKHVLLATPNSLRALTPMGWLMGF

SEQ ID NO: 362294 - protein, 344 aa, Zea mays
  Clone ID: MRT4577_93589C.1.pep
MASSSPSCRGSGGKSDVDRIKGPWSPEEDEALQRLVARHGARNWSLISRSIPGRSGKSCRLRWCNQLSPQVEHRPFTAEEDDTILRAHARFGNKWATIARLLSGRTDNAIKNHWNSTLKRKYYAASDAVVADADDERPLKRTSSDGHPGLCFSPGSPSGSDLSDSSNHSLPSVMPSAASAAAVTSHQQQQHVYRPVPRAGGVVMLPVAPLVPPPPQPPATSLSLSLSLPGLDGQKPEPSPAVLTPAPAPPQPPLQIQQQQPAPPQMPPPQAQPSLPFQLQAAATNLTSQQPAAAPFSSEFLLLMQEMIRIEVRNYMSGSGLDPRTDGAAVHAVSKRMMGMAKIE

SEQ ID NO: 362295 - protein, 63 aa, Zea mays
  Clone ID: MRT4577_9358C.1.pep
IENYTNLYFFLESYIICGQTMQKIHFKSKSKDKKNSAIYSARSYVQYRSILYLKIEVVSELRQ

SEQ ID NO: 362296 - protein, 79 aa, Zea mays
  Clone ID: MRT4577_93590C.1.pep
EQWRLIRHRLMWLVIGVANSKWSVFLPAKSFPPFGFSYATIFNIKISKFVCELNERRDKPPKKKKKKKKKKYSALLPLL

SEQ ID NO: 362297 - protein, 136 aa, Zea mays
  Clone ID: MRT4577_93591C.1.pep
PYHLVNGLQLGDLPPLKGLSVAFVFLALVGSPPSITGGGWGCQTPRFIFPPPFFLPLRFFLPPNKNPNPWNSPIHPPKLTPAHQSEPWGVGSVGTPSLGQGPGSLRPHGSRGGTPSGSPKGRGLHRRGAPRNRRGA

SEQ ID NO: 362298 - protein, 104 aa, Zea mays
  Clone ID: MRT4577_93592C.1.pep
AVGGCHKSNLLGPGILSLTTFLEREGQINLGKFFGFFRPPPQKKAFPICSPPAALCSSKHLRFKQKNCTSPQGPWTLKKVFPFFKVFFFTFYFTRGSLSFPQKL

SEQ ID NO: 362299 - protein, 86 aa, Zea mays
  unsure (1)..(86): unsure at all Xaa locations
  Clone ID: MRT4577_93593C.1.pep
GDFFAGAAQTPSXTRTKATETELGKQDPGTNYTMPGSCVHHKLPCLLFEMPCKAESKRINRLEIYDGLEPLPTLGINLRVCTILWS

SEQ ID NO: 362300 - protein, 79 aa, Zea mays
  unsure (1)..(79): unsure at all Xaa locations
  Clone ID: MRT4577_93594C.1.pep
RPDRDNEAGPFNENEGRYDASSAVYTSIVGRRRDTGVTVGICHXDDYVDDEAKSRLGILTLRYPIEHXFVKNWDDIENI

SEQ ID NO: 362301 - protein, 34 aa, Zea mays
  Clone ID: MRT4577_93595C.1.pep
SYYLSLSLNSCNPRCKFTCLFGYISPDIPPPLMA

SEQ ID NO: 362302 - protein, 90 aa, Zea mays
  unsure (1)..(90): unsure at all Xaa locations
  Clone ID: MRT4577_93596C.1.pep
QHQQFFPFNQLAAMNPGGYLQQQKLLPFSELAAASCASFLAQQQVVPFYKQCWAIPAALLQXHKMVPGVRLALKNHEALCQQRMIGGALF

SEQ ID NO: 362303 - protein, 103 aa, Zea mays
  unsure (1)..(103): unsure at all Xaa locations
  Clone ID: MRT4577_93597C.1.pep
MILVRSMIQCLDXGIVALLAILLSDAIXLATSWHCALYDNXWRPHSLTVXLMYLILTMALVFFLRYDSSSMMSNARDCWANYTKFLTGASIVRSIDIPSILKH

SEQ ID NO: 362304 - protein, 172 aa, Zea mays
  Clone ID: MRT4577_93598C.1.pep
MAAAGGETMMTREQLLHLFSRFSFVTSLPEVKQRIADAVRDKQEAVAVTTEIQEEILREMGVDPSFGIGCLGKVNVVYKNDKDLMIKFYQFVAKEEMAIDEAELEPRELAEKLHAQQIMQEKQLNMLVEMRKYSRESQSVILGTLHKELEEANFDINASILSPEQMQEIVQK

SEQ ID NO: 362305 - protein, 117 aa, Zea mays
  Clone ID: MRT4577_93599C.1.pep
EKRRKNFTPKFRALQRLGLRSNEGGADGGSTELRCAGAGVRRRARGRLLCTYAERLRAGPKETARRAGNYAQRSGECAHAHVALGGGRWLHRQGSTPGQRRRVKRRASPAAGARPRP

SEQ ID NO: 362306 - protein, 124 aa, Zea mays
  unsure (1)..(124): unsure at all Xaa locations
  Clone ID: MRT4577_9359C.1.pep
MATKRMXSFLRILALFASATNAFIIPQCSLAPXSIITHFPPPVTSMGXFEHPAVQAYLLQQAIAASVLQQPISQFQQQFLXHLTIQTISTHHQQHFLPLLXHLAIVNTCPYLQHLLLIIKPHFL

SEQ ID NO: 362307 - protein, 115 aa, Zea mays
  unsure (1)..(115): unsure at all Xaa locations
  Clone ID: MRT4577_935C.1.pep
SQPSPGLPPPAPGXPLAAXRPAPPXPSSPRPXPPPPPPPPAXPPAPPPRPPPPPPSGAPGAPRPXPAPPPPPPPPPPPPPRGPPXPASPPPRPRPPXAPPPPPPGPPPXRPPPPP

SEQ ID NO: 362308 - protein, 172 aa, Zea mays
  Clone ID: MRT4577_93600C.1.pep
MAAAGGETMMTREQLLHLFSRFSFVTSLPEVKQRIADAVRDKQEAVAVTTEIQEEILREMGVDPSFGIGCLGKVNVVFKNDKELMIKFYQFVAKEEMAIDEAELEPRELAEKLHAQQIMQEQQLNMLVEMRKYSPESQSVILETLHKELEEADFDINASILSPEQIREIVQK

SEQ ID NO: 362309 - protein, 95 aa, Zea mays
  Clone ID: MRT4577_93601C.1.pep
LDAWADAWVKFYQFVAKEEMAIDEAELEPRELAAKLHAQQIIQEQQLNMLVEMRKYSPESQSVILGTLHRELEEANFDINTSILSPEQIQEIVQK

SEQ ID NO: 362310 - protein, 294 aa, Zea mays
  Clone ID: MRT4577_93602C.1.pep
MDFASPDPRARTQPQLRRRRTPPRPTPGLGHSLGLGRQSPPRPTRGSDSTSTSEDGLDLDLGGASASPDLGLGPTTSQGAIITLPLASSGYGEQDRRPIWLAPGPLGVETPTSAFLNGPIKEEVYVEQPPDFEDDKYPSHVFTLKKALYGLKKAPREMYECLRDFLISYAFKVGKADPILFTKTIYKDLFVCQIYVDDIIFGSTNKSSCEEFTWIRIQKFKMSMMVELKYFIGFQIKQLQEGTFICQTKYTQDILKKFAMKGAKPIKTPMGTNGHLDLNTGGNYVDQKVMPDVR

SEQ ID NO: 362311 - protein, 290 aa, Zea mays
  unsure (1)..(290): unsure at all Xaa locations
  Clone ID: MRT4577_93603C.1.pep
MDYSWNDSMYGFDDELPPSLALVVHPSGHPKVGIDWDALQIVERQDEEGRIEIVDDDRMYELIGLRAEDEAAEKAGEAFKMQEGDVNRSYSENEIIDAAIPVDDEIPDERVMLHDPXKPCMDIGTVYPSMRDFRLALRQFAINEEFELEIYKNDPSRFIGNCNGEGCPWHIVGRRQXLGIVLWYRLVITNLXVPLPSMLLLTXLLLQVIVLIEEHTCTSSARRKTTTPTSAWVASKVIHLLKESNMGPKELQKRLEEKYKCEIHYDTVWKGRQLAIKELHGSWEEKASHE

SEQ ID NO: 362312 - protein, 415 aa, Zea mays
  Clone ID: MRT4577_93604C.1.pep
MPMAVSAVTASHLALSFPARSRRRRAAPRAAAGGLTARARRLRCEFVAGGGNGALSGEDDPRLVDRQKVLDAAMNDINNSFGKGSVTRLGSAGGAFVETFPSGCLTLDFALGGGLPKGRVVEVYGPESSGKTTLALHAIAEIQKLGGNAMLVDAEHAFDPAYSKALGVDIENLIVCQPDNGEMALEIADRMCRSGAIDLICIDSVSALTPRAEIEGEIGMQQMGLQARLMSQALRKMSGNASKAGCTLMFLNQIRYKIGVFYGNPEVTSGGIALKFFASVRLEIRLIGKIKSAKGDEDVGVKVRVRVQKSKVSRPYKQAEFEIIFGEGVSKLGCVLDCAELMDVVAKKGSWYSYKDIRLGQGREKALQYLRESPTICDEIEKVVRAMIPEGSRHMSLLAFGQSSSTEDEQAYDEQ

SEQ ID NO: 362313 - protein, 63 aa, Zea mays
  Clone ID: MRT4577_93605C.1.pep
MSEQGGKAKPLKAPKADEKEYHETGLAYLQKKKDDDKALKEVKAKAHKDAIEASSPKERGKKR

SEQ ID NO: 362314 - protein, 101 aa, Zea mays
  Clone ID: MRT4577_93606C.1.pep
GGGRTTGGAPPERLRHAPPLLLTVPRCCEARGGEGGALIFCSPFVRRSTLTRFIPPTTLIETLEAPATEPQRHHIPRMEALRRLARLEATNGELAKSLARE

SEQ ID NO: 362315 - protein, 160 aa, Zea mays
  Clone ID: MRT4577_93607C.1.pep
TRTIKYSRTTFDLSMLTSLTSHNQTTRNTEARSKQTTRSTKQAAKQTTRQADVRPSRKQRQAAAVRCGSTPRRDQAASSLQPAAGRDKTIRQADQRSAGADSWSAERAEAPSGWSAARSGLQPSGRAVGGWRPGGMSAGRSAGRRDAPVRLCGTNPNLYS

SEQ ID NO: 362316 - protein, 98 aa, Zea mays
  Clone ID: MRT4577_93608C.1.pep
RRPSALLDWELMPARVAGPIHAWVTWNLFHISICLLSTRRTIFTACPSAETGIFIARPRWPACTSTYRRCPTRTLSAKRSLTILPGLLNGYAHTKVPD

SEQ ID NO: 362317 - protein, 88 aa, Zea mays
  Clone ID: MRT4577_93609C.1.pep
ARRLHAARPREALRDQQEQQHQLQLQHRLWRGQSLRARRPVTGSPPLAIPRLTRRSGSGPRQWPLVAMRRLMATRRSGAASSSLELRA

SEQ ID NO: 362318 - protein, 65 aa, Zea mays
  Clone ID: MRT4577_9360C.1.pep
HHQSTHWPLHYNDLNDKSLPLPYLLSLHHISLSSSGLIPKRSTPIPLPITCAASITNITLPVSQH

SEQ ID NO: 362319 - protein, 64 aa, Zea mays
  Clone ID: MRT4577_93610C.1.pep
VAARIAEGCEPHGRVSSKRRRCALACSLSRRVFNCTSLKQEWIDRPHPKSTMPLEPKDAVLSNI

SEQ ID NO: 362320 - protein, 415 aa, Zea mays
  Clone ID: MRT4577_93611C.1.pep
TVQSHVDSQFRTASSYLEDGPRSNLDSVRYAECIHYLQDYARPQMLAFMFRHGHYTEACSLFFPFSQPTTEGETSLSSAPWSDPLTTDYGTIDDLCDLCLGYGAMAVLENTIRTITQSPTYHEAHMIQYMNTIITRICNYCETHRHFNYLYNFLVLKDDHVASGLCCIQLFMNSMSQEEALRHLGHAKTHFEEALSVRDRTIEATKLVLRSARNKGAPGKMTRETIMKYSTRVSYQMDVVKALNSIDGSQWKTSLFGNPTDPETLRRRCMVVETLAEKHFDLAFRMLHEFDLPAVDIYAGVAASLAERKKGGQLTEFLKNIRGTIDDDEWDQVIGAAINVYANKHKERPDRLIDMLISNHRKVLACVVCGRLKSAFQIAARSGSVADVQYVAHQALHANALTVLDMCKQWLAQYM

SEQ ID NO: 362321 - protein, 231 aa, Zea mays
  Clone ID: MRT4577_93612C.1.pep
MHSTNLLLEEPIRMVSILEPSKPNFFPAMTKIVGTLGPKSRSVEAISACLKAGMSVARFDFSWGDAAYHQETLENLKLAIKATKKLCAVMLDTVGPELQVVNKSEVTISLEENESVVLTPHQGQEASSKLLPINFAGLAKAVKPGATIFVGQYLFTGSETTSVWLEVSEVQGDDVVCVIKNSATLAGSLFTLHCSQIHIDMPTLSDEDKDVMKKWGAPNKIDFLSLSIQAR

SEQ ID NO: 362322 - protein, 78 aa, Zea mays
  Clone ID: MRT4577_93613C.1.pep
QGRKKIALGPASYEEALIGAVAFKKRKGRLDPGDRVLIRPGAARLAFSGGTPGAGRLRYSTTWPRTTTGARTWTLTGA

SEQ ID NO: 362323 - protein, 95 aa, Zea mays
  Clone ID: MRT4577_93614C.1.pep
NRGSILYTIATNATIIIRSFMLRYFFIVQFMLLVSHLAAAKAAKALSSLGLLKPFLRRNRVRSLKRIKPSAHSFCMDGEPWKQQGRRKEREQKHI

SEQ ID NO: 362324 - protein, 622 aa, Zea mays
  Clone ID: MRT4577_93615C.1.pep
MSSATCRRGFNGKFRRIASAPSPLLHRTGLSPPADCGARAAEQHCLRLLERSSAPAAVLQSLAFLLKSGLHANPLVLTRLFASSAAAAPALLEPLVAALLVPSVPIDAFLANTLIRAHAASPLPSARLRAASFFPLMLRSATLPNKFTFPFLLKACAAFPGCPGVGVQAHAAALKFGFTTDQYVSNTLIHMYSCFGGEFLGDARNVFDRMAKSSAVTWSAMIGGYVRSGLSSDAVGLFREMQASGVRPDEVTMIGVLAAAADLGALELARWVGRFVEKEGIGKSVTLCNALIDALAKCGDLDGAMAVFQGMKERTIVSWTSVIDALAMEGRGKEAVAVFEEMKTAGVRPDDVAFIGVLTACSHAGMVDEGYGYFESMRMAYGIDPKIEHYGCMVDMFGRAGMVERAMEFVHKMPMKPNPIIWRTLVAACRAHGRLELGETITRNLLNEYPAHEANYVMLSNVYALTRRWKEKSEIRREMSKRGIKKVPGCSLVELDGEVHEFIAGDESHPQWKEIYMMVEEMARELRRAGHISATSEVLLDLDEEDKEVALQWHSEKLAIAFVLLRTPPGTQVRVVKNLRVCSDCHAAIKCISLVYNREIIVRDRSRFHRFKNGSCSCNDFW

SEQ ID NO: 362325 - protein, 85 aa, Zea mays
  Clone ID: MRT4577_93616C.1.pep
GLGAHARVLGLPYGGWSPSGRCKGPCWLRVKDECVKSMGESRSFRQTGSKSPSSAALSGRGSSLCHACVGHIDVYAIGPDFMCQQ

SEQ ID NO: 362326 - protein, 68 aa, Zea mays
  Clone ID: MRT4577_93617C.1.pep
FRVDVCMQVSQVISARVEAGIGPPQQPRSRPVPGGWGGQRPRRLWNRSYRAARGATPTAPWLPRLGWP

SEQ ID NO: 362327 - protein, 58 aa, Zea mays
  unsure (1)..(58): unsure at all Xaa locations
  Clone ID: MRT4577_93618C.1.pep
PSDGWLYYVEVRCNXILGNYSKPEAEALQRAFGAQKRRRLNRVFDVIVFFYLDYPIMV

SEQ ID NO: 362328 - protein, 110 aa, Zea mays
  unsure (1)..(110): unsure at all Xaa locations
  Clone ID: MRT4577_93619C.1.pep
MRVLLAALTILALAASATCTHTSGGCRCQPPTTDHIPPTWHMPPAGHLPPAVHFPPPGHLPASGQLPPPWHVPPLCHLPHPPCQYSTQTPRPEADSQTHPCPXQQSHASP

SEQ ID NO: 362329 - protein, 93 aa, Zea mays
  Clone ID: MRT4577_9361C.1.pep
KKKIFFLAPLFFFFYKTQKKKGFFFFLWPPFSKKKIFFFFKKKKKKKKKKKKKKKKKKKKKKKKRKKKKKKKKKKKKKKKKKKNKNKNKRKEK

SEQ ID NO: 362330 - protein, 143 aa, Zea mays
  Clone ID: MRT4577_93620C.1.pep
KNRNDSLIETKTGRKRRGSSSDDDNLFFSKYDKDAPELKDPIKDFSQYKDYVQEYNEKYGVYSYLNSQIDKTMSEFLKVQDDLNVGKERGKEQYYNTLERLRDMYHESGTRHKLMKKVFVLLHEELQIIKERINDFTDAYSNE

SEQ ID NO: 362331 - protein, 161 aa, Zea mays
  Clone ID: MRT4577_93621C.1.pep
FYPISKLAPLRSPPSFFHFPRAPDIPPFFPGPKGGGGRPSLPKPQPRLVFRGGFPVLFFGVPCVPLFILPNFFLNPRFLFFLKRGGQRPLGPSPSGVGSLLDLIPWWFPPPSPPCCVLLIKDPCVPVFLPKKKKKKKKKKKKKKKKKKKKKKKKKKKKKKT

SEQ ID NO: 362332 - protein, 84 aa, Zea mays
  Clone ID: MRT4577_93622C.1.pep
TRPSHRQSCSSAQKPKSTVDGARPSTGGTDAQLRYGSRRGMARSACPCRTSGQPSSTAQPPPPPAVDCRRRDMGTSAHESAHGF

SEQ ID NO: 362333 - protein, 72 aa, Zea mays
  Clone ID: MRT4577_93623C.1.pep
EKKKKKKKKKKKKKKKKKKKKKKKKKKKKKKKKKKKKKKKKKRGRAVFRGTQAFFPLSLATLNTFFLVAPKI

SEQ ID NO: 362334 - protein, 90 aa, Zea mays
  Clone ID: MRT4577_93625C.1.pep
NPVDATPEKDAPSFGPPSTNEWSSPLFWRLALPLKQNALFDLPGAPSPAGVCTPRRSRFPVRRNYEHASRFPPKKKKKNAHKTQHQKTEA

SEQ ID NO: 362335 - protein, 50 aa, Zea mays
  Clone ID: MRT4577_93626C.1.pep
AAFFFFFFNSTALLRTFYLRLQCPQNTSRIKENPLLKYFKRDPYIPQGTL

SEQ ID NO: 362336 - protein, 101 aa, Zea mays
  Clone ID: MRT4577_93627C.1.pep
AEGSRARGKIKGRWPRQTLQLLSGNDRLDDLGRHTCFNVFREGSCAYVHTAAGLRNLQSRTGKIRKMGMCHGDGGPQRYCWPPQIAVSRCFGDVATLNGER

SEQ ID NO: 362337 - protein, 80 aa, Zea mays
  Clone ID: MRT4577_93628C.1.pep
AYSGCKDHGAAHGGQCCANALYICASGKNEAGGCFYRYRPAKKSALNSSDIAWLLACYSLGRFGLLHFLFGTFYNARCGH

SEQ ID NO: 362338 - protein, 47 aa, Zea mays
  Clone ID: MRT4577_93629C.1.pep
PGLDEMLPQKTRKFGKKKSGALAFTDSLSRFYHTLISFVFVYSHAFP

SEQ ID NO: 362339 - protein, 86 aa, Zea mays; identical to SEQ ID NO: 241342
  Clone ID: MRT4577_9362C.1.pep

SEQ ID NO: 362340 - protein, 97 aa, Zea mays
  Clone ID: MRT4577_93630C.1.pep
SPIWRRGCPPAILRRRGQGPPFFFNKVTYINGGKIIGIFFDGKNCVPPELKTKITLERYSYNPGGARGGFFPQFEGGFFIPFFRGENIFLPREKKSL

SEQ ID NO: 362341 - protein, 91 aa, Zea mays
  Clone ID: MRT4577_93631C.1.pep
DHGVLKWWRHLPGGLPCLQPLAGAGSELLLFWGAAHAVNALVGTRALPYGEGRSAESCGPQDHLVSRDSLNKNARQGRYGGLSARCLCCEV

SEQ ID NO: 362342 - protein, 316 aa, Zea mays
  unsure (1)..(316): unsure at all Xaa locations
  Clone ID: MRT4577_93632C.1.pep
MAAASQLLSLFFLLLLPACDAIYCDEDDCYDLLGVKQDANASDIKKAYYKLSLKHHPDKNPDPESRKLFVKIANAYEILKDESTRAQYDFAIEHPEEXIIGDFKSXYRISLDPKHTKLLVFYNTAQYYRAYYGHKTDPRAVLIGLLLIVSAFQYINQLTRYNQAMKSVKQTPAYKNRLKALEYERTGGIASKKKGIKQVDKKVEEELSNEVELQIHGVEKPSVWRLFGVQFILWPYSVGKALTWKICWFWRYRVKKLPYTWEDACYLTWISLQIPANAWKNMDESRKEDLVRRHLWEKSNMERYTSGTRKEPKRRR

SEQ ID NO: 362343 - protein, 156 aa, Zea mays
  Clone ID: MRT4577_93633C.1.pep
FFFFFFFFFFFFFFFFFFFFFFLSKKGLFYFLKKKEKKTGRGFFKNPQQFGAGKKKKQFFKKKKPRGNPFYKNKLGGTPLEDQTGPGPAHWVKQKKGREGDYPSFCFLKSRGGPPPRAKNGGGGGPSFKGNDTLREIWDPFSRGGGLPEGRGVFTN

SEQ ID NO: 362344 - protein, 150 aa, Zea mays
  unsure (1)..(150): unsure at all Xaa locations
  Clone ID: MRT4577_93634C.1.pep
MASSSSKVLALGALIFSFLITYGSCARPVNFTASDFTADPNWEAARATWYGAPTGAGPDDDGXNRRRRRRCIAKAQDRVFCFWDVYTLLSLLHACRAVGLTHGVRRVHXVXGACGFKNVNLPPFSAMTSCGNQPLFKDGKGCGSCYQVRS

SEQ ID NO: 362345 - protein, 116 aa, Zea mays
  Clone ID: MRT4577_93635C.1.pep
GTLGSGRTGLYLQAMRIILVFEFQEAFPLAPTLALIIEKLEHGTKDENEGQASERDEDDFALLSSISKCMEDHKLSPSEFTTFAAKIALLEERVGKARRQACSTGAKRKRPEECVE

SEQ ID NO: 362346 - protein, 119 aa, Zea mays
  Clone ID: MRT4577_93636C.1.pep
GNGEQFHLKQKLGKQPLPRGPGPKGKNGYYPLGGKKKGPPIWHPTQQVIRRPVQQGRTCTPPPKQGQKGGQTPPRGWGPLGAGKKKAVYQKKKPLFPRGECLFFFIHPPWSRKKGRGEK

SEQ ID NO: 362347 - protein, 207 aa, Zea mays
  unsure (1)..(207): unsure at all Xaa locations
  Clone ID: MRT4577_93637C.1.pep
EPAVLRYSFKRADDCVDLGELLHWRVESSGSEAKEGRGRPPSSPPSFFPPPFPPLPFHLLSLPLSPSFLHPFLFPTPPGSPSHPPPPPPSFSFFFFLFFLLQLSRAFPSPPPPPPSPFLPSPPPLSPSPPXPPPPPPPPPPPLSPSPSSPPPPSPXPPPLSPPSPSLPPLPSPHPPPPSSPPPPXPPPPSLSPSPPPPPPPLSLPFS

SEQ ID NO: 362348 - protein, 139 aa, Zea mays
  unsure (1)..(139): unsure at all Xaa locations
  Clone ID: MRT4577_93638C.1.pep
FLKRVQRGANGTGHRGSRGFTKDQGGGGGNNIENNQPESWDSNLGGTKNLRREGIKEVPWGQNSTLKEGSIILPWGKRGPFWSSPGDLIGHAKTTRAGRVPIGRGXHWPXWNGRWLIILVKENWVVMKRTGILVRKNLG

SEQ ID NO: 362349 - protein, 146 aa, Zea mays
  Clone ID: MRT4577_93639C.1.pep
LTRPTTRANELKRDDIRNALLVTNAGCYTTYIQLTLDPLVKAQLIKLTSIIIDAKSGVTGARRGAKEANIYTDIADGIHAYGITSHRYVPDIDQGITDAAESNATISFTPHLMCLKRGMLSNVYDELGSGANCTDLYDQLTATHEN

SEQ ID NO: 362350 - protein, 268 aa, Zea mays
  unsure (1)..(268): unsure at all Xaa locations
  Clone ID: MRT4577_9363C.1.pep
MENDIEXXXEDGEIPTIKLNMEAFAQNLENCIKESNNELQSDDIAKALVAISTEAASIPVPKLKNVLRLRTEHYVYELPDAHPLLQQLGLDQREHDDPTPYLLAIWTPDGIKEITKTPKPCCDPQMGGDLCNNEMCHNCTAEKENQSRYVRGTILVPCRTAMRGSFPLNGTYFQVNEVFADHRSSHNPIHVEREMLWNLQRRMVXXGTSVPTIFKGLRTEEIQQCFWRGFVCVRGFDMETRAPRPLXXXLHIIARPKARKTAATEQVL

SEQ ID NO: 362351 - protein, 48 aa, Zea mays
  Clone ID: MRT4577_93640C.1.pep
SKCLHFIDAYFRQRYAATLDAATLVHLVSFWLAELGLFGFLPKVPQCA

SEQ ID NO: 362352 - protein, 532 aa, Zea mays
  unsure (1)..(532): unsure at all Xaa locations
  Clone ID: MRT4577_93641C.1.pep
MMTEDEKEKARLFLPDLRRSPTSSSRGPAVEEMTSNESVSSNSISFKWGATNRRSRTQFRGQGDTEISAPALIGSSDKGISGLSAGTSEKKGTEETRSAQNTGDLGLISSSSSPVTSAQRPLPSSSVGSNSRESKKRDTALHPLIFKEAGLPDNTLLTYKLKNGEALLQGYKQGAGIVCNCCNQEVSPSEFEKHAGMGKRRQPYQNIYTSQGLTLHDVALQLHHLNLNFKWXSNASVSSFSDYPNLTSSGCGKEPSVSGPIVPLKRTLQERVVQTESCYFCGYGHTELGKIDPNMIVFCNQCERPCHVKCYNSRVVKKKVPLEILKDYLCFHFLCCQECQSLRVRLEGMEKCEEIAFLGRIRSNICWRLLSSADASRDVKLYLSQVIDIFKDAFLESTDAHSDISDMVYGKNREGEKDFRGMYCVVLTASTHVVSAAILKVRVEHAAELVLIATRSECRKKGYFRLLLESIETNLRACNVSLLMAPVDPEMAQIWSDKLGFTILSADEKKSMLESHPLVMFKNLVLVQKPLA

SEQ ID NO: 362353 - protein, 51 aa, Zea mays
  Clone ID: MRT4577_93642C.1.pep
GNSCHTAQVECTVQRHVLLLVPIDVSEFLHIRSSVSSNQGRLDYTAERGTR

SEQ ID NO: 362354 - protein, 83 aa, Zea mays
  unsure (1)..(83): unsure at all Xaa locations
  Clone ID: MRT4577_93643C.1.pep
MLQGEMHAISKNSVVREDDLPQKVLNRXNXKKSIKDDGFLGVVDIFLHGGDKEAPLKPPVRKALTVFSGKRNSNFSRFCRKKK

SEQ ID NO: 362355 - protein, 177 aa, Zea mays
  Clone ID: MRT4577_93644C.1.pep
KLAEQASQPLYLASVPADSTGDDSRTLSCVRHWSALQFEKHVGAESKNQNGNILLTNDKLLYDLFHELRNWPPCAEEFRATAGVLMTVPATEASSAPQGQQAGAPASWEPNGVQVDGVTVDPPSPGTGSHGDADRGGESQLVSAWFEAKQPRLSWTLYAALKGLLRNRSKMKQVVTM

SEQ ID NO: 362356 - protein, 135 aa, Zea mays
  Clone ID: MRT4577_93645C.1.pep
MPEDCTFLSTLTGSVAIAISAPACRTALGNYNTGTVSNCFTNGVGLFTSGTVVTNCLNNALSGTCISALPAACTSLAGQNTVQLALNLGACNSALGPFGEGAAENCLSVAQGSVDAVVSCLNNALFFPTSASLAK

SEQ ID NO: 362357 - protein, 122 aa, Zea mays
  unsure (1)..(122): unsure at all Xaa locations
  Clone ID: MRT4577_93646C.1.pep
FGSREKLHLRFCRAITDXDTREMGLMXTNWRELQLCSCKASAYGVCSLRGWHKLRHVTLEGWARAAVCWEAISALALMSLPNLSPGDLSNEGRESLKGLTKLGALRIGLNQVTDACQRDWQD

SEQ ID NO: 362358 - protein, 44 aa, Zea mays
  unsure (1)..(44): unsure at all Xaa locations
  Clone ID: MRT4577_93647C.1.pep
IQQLRCHVLYTHDGSKLNIITAFSARSQTLXYLYIRRGVELSNI

SEQ ID NO: 362359 - protein, 90 aa, Zea mays
  Clone ID: MRT4577_93648C.1.pep
GSLAWLIDSRHFICIKHACMPCYMHQLNSRSREGGWSSCAASMYDSCFRGMASSTRSKCDVGYSFTIVTGTSRSETSNVFACLFTCSAEW

SEQ ID NO: 362360 - protein, 181 aa, Zea mays
  Clone ID: MRT4577_93649C.1.pep
MGSSGGSSEHFLRQLSSSDGGSAPHHLLQREWECGGVTGSGSRRGSRKKTRARGHRRRGGGFCRAEEAAPGRKRVMVVVDQSSGAKHAMLWALTHVANKGDFLTLLHVLPPESGHSSRGAAEDASALANSLGALCKACKPEVEVEALVIQGPKLPTILSQVKKLEASVLVLSQRSPSPFCW

SEQ ID NO: 362361 - protein, 412 aa, Zea mays
  Clone ID: MRT4577_9364C.1.pep
FGRVQLHLLELYPILETIQKYLWPRLCKLDQQTLYELHYQMITFGKVFCTKRQPNCNACPMRSECKHFASAFASARLALPAPQEESLVKLSNPFAFQNSSMHAMNSTHLPRLEGSIHSREFLPKNSEPIIEEPASPREERPPETMENDIEDFYEDGEIPTIKLNMEAFAQNLENCIKESNNELQSDDIAKALVAISTEAASIPVPKLKNVLRLRTEHYVYELPDAHPLLQQLGLDQREHDDPTPYLLAIWTPDGIKEITKTPKPCCDPQMGGDLCNNEMCHNCTAEKENQSRYVRGTILVPCRTAMRGSFPLNGTYFQVNEVFADHRSSHNPIHVEREMLWNLQRRMVFFGTSVPTIFKGLRTEEIQQCFWRGFVCVRGFDMETRAPRPLCPHLHIIARPKARKTAATEQVL

SEQ ID NO: 362362 - protein, 252 aa, Zea mays
  Clone ID: MRT4577_93650C.1.pep
MARACNHALRLLPNSIATQLACSGGSTRCRNLSVHAQLSTQDDAYTTEPPLKKAQVTQSLRRTRRRAPGGARQSLISVGTSCGGGDQWSSDIALTLRQLRLDDLVEDGQRDADVLVHLLVQQHTQFGMSIKGRVLTSFRKICDSCSLPYCTNIDEHFNLTVLSSTRRDQSGLLDLVSTSKPVIYVRPGDEVDLDSVIQETVRLTASTKSSCSETCEKSTVVWQYGGSQKKKTSSQRWSKLLDLKKTLDKAPK

SEQ ID NO: 362363 - protein, 42 aa, Zea mays
  Clone ID: MRT4577_93651C.1.pep
PTLTLTHELLPKSKAPGGGAFFRFIKNANIPLLVLQCHQINF

SEQ ID NO: 362364 - protein, 314 aa, Zea mays
  unsure (1)..(314): unsure at all Xaa locations
  Clone ID: MRT4577_93652C.1.pep
KGAVSPSASHDVFSKARPSLGRCCGPWTPPGIRPEQAAQPVTPGASVNRLPRAPARPEASTDRLRRSIQRRTTRLGPGRPGSHFRANSASVHTDIATPVLSPPKDGRWVSSTNLEEPQTTRPNGPRDSYTSGIRIPHPSRLTWWQLMLDKAAQIVDRRVLVLEMKKKHGPMPKLLHVQAPTATMNKRPAQKVPIQMEPRFHLRRYEQPHTIGGPAEQQKADWWLAVARSGSSDNDPRSGWLNCSSDGLRADAAATLPSPTPRSKGEDKYKSRRPERGWWXVIPSATGTSRAASTSAPTTGAVSPSADPHSNPPG

SEQ ID NO: 362365 - protein, 58 aa, Zea mays
  Clone ID: MRT4577_93653C.1.pep
TAIIILNNPGAMQGELTTLTTSGVVKPHQYFQEQDTTITRMGEGANSRARSRGIRGQA

SEQ ID NO: 362366 - protein, 148 aa, Zea mays
  Clone ID: MRT4577_93654C.1.pep
MGGKDLTEEQIASMREAFTLFDTDGDGRIAPTELGVLMRSLGGNPTQAQLRDIAAQEKLTAPFDFPRFLGLMRAHLKPEPFDRPLRDAFRVLDKDGSGTVAVADLRHVLTSIGEKLEAHEFDEWIREVDVAPDGTIRYDDFIRRIVAK

SEQ ID NO: 362367 - protein, 148 aa, Zea mays
  Clone ID: MRT4577_93655C.1.pep
MGGKDLTEEQIASMREAFTLFDTDGDGRIAPTELGVLMRSLGGNPTQAQLRDIAAQEKLTAPFDFPRFLGLMRAHLRPEPFDRPLRDAFRVLDKDGSGTVAVADLRHVLTSIGEKLEVHEFDEWIREVDVAPDGTIRYDDFIRRIVAK

SEQ ID NO: 362368 - protein, 148 aa, Zea mays
  Clone ID: MRT4577_93656C.1.pep
MGGKDLTEDQIASMREAFSLFDTDGDGRIAPSELGVLMRSLGGNPTQAQLRDIAAQEKLTAPFDFPRFLDLMRAHLKPEPFDRPLRDAFRVLDKDGSGTVAVADLRHVLTSIGEKLEAHEFDEWIREVDVAPDGTIRYDDFILRIVAK

SEQ ID NO: 362369 - protein, 67 aa, Zea mays
  Clone ID: MRT4577_93657C.1.pep
GKRCDWQDDVIDNRYTGYHGVPLVEDPTGHPEVLEHRDRTGYSDIHRVHHRGSYPETHLLEEPRGYP

SEQ ID NO: 362370 - protein, 121 aa, Zea mays
  Clone ID: MRT4577_93658C.1.pep
LERGGYWGGFSGGAMSDAADHPGLRSHLVGPNNESFSRYHLPSSCPQSSKRRCNLRFTPRSGRVGSLNGGQMLSPSAIPQRDWVPSDFTLGADSSAHQIEGACNENGKGESNWDYFCHNDS

SEQ ID NO: 362371 - protein, 277 aa, Zea mays
  Clone ID: MRT4577_93659C.1.pep
ISAGLSKLSYLIFLDMSKNKLSGQIPDDLGNLVQLQRLLDLSSNSLSGAIPSNLQKLTNLQKLNLSHNDLSGSIPAGFSRMSSLDTVDFSYNRLTGKIPSGNAFQNTSADAYIGNLGLCGNVQGITSCDLGSGGASSGHRKRIVIATVVSVVGVVLLAALAACLILICRRRPREKKVLEANTNDTFESMIWEKEGKFTFFDIVNATDNFNETFCIGKGGFGAVYRAELASGQVVAVKRFHVAETGDISEISKKSFENEIKALTEVRHRNIVKLHGFC

SEQ ID NO: 362372 - protein, 52 aa, Zea mays
  Clone ID: MRT4577_9365C.1.pep
DNVAGTRPKRFFFFCSIFLFTVPAHERHQVAFRFTKTKTLLGTCIFYRSYHT

SEQ ID NO: 362373 - protein, 152 aa, Zea mays
  unsure (1)..(152): unsure at all Xaa locations
  Clone ID: MRT4577_93660C.1.pep
LGSTHPEEGLDEAIXTGRIVLRDEXKERSHILYEEVVGYKVQTKKIWRVGPDTTDPNMVGDIFTGEHNLNELNDSRVSELQRASNDGALADDNMRIICFEDSNVVIDAHAMHRGGDHVIATVKRVIYASQLTANPRLLEPDYLVEIQAPENA

SEQ ID NO: 362374 - protein, 465 aa, Zea mays
  Clone ID: MRT4577_93661C.1.pep
MSMESVAVAVVAVPFPAQGHLNGMLHLSLLLASRGLSVHYAAPGPHVRQARARVHGWGDDAHRRIEFHELEVPAYATPPPDPVAPSPFPTHLIPMSEAFLAGARAPVASLIGRVSARHRRVVVLYDRLSSFAAPEAARIPNGEAFCLQCVAACFDAAWTDAGQRLLRKHGLDAPHPGACMPREFVEYIVRTQEDSRSPAFAGVVANTCRAIESEFIDVVAGDPENRGKRVFAVGPMNPLLNVTAPTAGQSARHECLDWLDKQPPASVLYVSFGTTSSLRAEQIAELAAALRDSKQRFVWVLRDADRGVVHEEEAVESRHARFLSEFTEETQGIGLVITGWAPQLEILAHGATAAFMSHCGWNSTMESLSHGKPMLAWPMHSDQPLVAELVCKCLKAGLLVRPWEQHSAVTPAETIREVIEKVMARDEGLAVRERAKELMEFIRRSVAEGGSSRKDLDDFVAYIAR

SEQ ID NO: 362375 - protein, 112 aa, Zea mays
  unsure (1)..(112): unsure at all Xaa locations
  Clone ID: MRT4577_93662C.1.pep
RKKKPQFRASRMHNHARRGGPNYQSGRATMRKLGAEPGVPKKVXGPEATKTGTSKQAKERIRAAAKPERSPGQPGSRNHAKERVTAPPQMKDGQQLQYTEHTGRDRNRNQTR

SEQ ID NO: 362376 - protein, 128 aa, Zea mays
  unsure (1)..(128): unsure at all Xaa locations
  Clone ID: MRT4577_93663C.1.pep
FLFIINLATMKRLEEMISSTPLMLSDDMPVXHLPPPDADPPSPAPAEAPSMPSPNAATTRRRSSEGASASCGARSAAACGAERSRSRSRSPAAAGRGGGWWRGEGWSLLVGHXFSXXXLTTRPALERP

SEQ ID NO: 362377 - protein, 57 aa, Zea mays
  unsure (1)..(57): unsure at all Xaa locations
  Clone ID: MRT4577_93664C.1.pep
MVDGGVQNGWALXVSLLTPYVQTLRFSHALTSFLWLGGTIAELRVHPMLGLPTDRCT

SEQ ID NO: 362378 - protein, 45 aa, Zea mays
  Clone ID: MRT4577_93665C.1.pep
IVGPTSSIGSRRGALGVFYTHPIPLRRRERGADLSTSFMTMYRWF

SEQ ID NO: 362379 - protein, 131 aa, Zea mays
  Clone ID: MRT4577_93666C.1.pep
RRRCGQQQKHHHALPSSNPSDSAMLAAAKSAPGQDLLVLVRRGTPWSSSSRTCPTLPFPSFLIQGLYVLYWSTLHSNYFLCYIMSLMFLKYVFSIIVQNTCLCSHGSSKYKMNSIISNWFPLLVVPVLMSG

SEQ ID NO: 362380 - protein, 649 aa, Zea mays
  Clone ID: MRT4577_93667C.1.pep
MHVILVLERPGQLEIEKILRSRSFLYPAPAFYSIPLGAPPPVRPAPPRPADSAAMPLHLHLLSSPATAAKLAAGLRAAPLRRCHSLAPAPRHTDRVALASSLSAVARSAGPAVAAAQTKPSVSGKKQVLISLSDKTDLAYLGNGLQGLGYSIVSTGGTASSLEAAGVSVTKVEEITHFPEMLDGRVKTLHPSIHGGILARRDQEHHLKALKDHGIGTFDVVVVNLYPFYDKVTSGNISFEDGIENIDIGGPTMIRAAAKNHKDVLIVVDHNDYPALLEYLKGKRDDQQFPRMLAWKAMQHVASYDSAVSEWLWKQSNKGEMFPPSFTVPLELKSTLRYGENPHQSAAFYADKSLSLVGAGGIATAIQHHGKEMSYNNYLDADAAWNCVSEFDSPTCVVVKHTNPCGVASRKDILEAYRLAVRGDAVSAFGGIVAFNTTIDEDLAKEIREFRSPTDGETRMFYEIVVAPGYTEKGLEVLRGKSKALRILEAKRSGKGMLSLRQVSGGWLAQESDDLTPEEITFTTKSERSPQENELADAKFAWLCAKHVKSNAIVIAKNNCMLGMGSGQPNRRESVRIAFRKAGEEAKGAALASDAFFPFAWNDAVEEACQNGIGIIAQPGGSKKDEDAVACCNKYGVSLVLTGVRHFKH

SEQ ID NO: 362381 - protein, 137 aa, Zea mays
  unsure (1)..(137): unsure at all Xaa locations
  Clone ID: MRT4577_93668C.1.pep
EDGEGCMCAVQLAXASILPMTLQNAIELRLLEVLQNRGPLTKAALSPNEVVARMPGATRELRSCAGIADRMLRLVCSYDGLRCQMADHDSPIERRYXAGPXSKRITRNXDCVCTASPAIMNQDTRLMESWYYKDDAV

SEQ ID NO: 362382 - protein, 186 aa, Zea mays
  unsure (1)..(186): unsure at all Xaa locations
  Clone ID: MRT4577_93669C.1.pep
MPLHLHLLSSPATAAKLAAGLRAALLRRCHSLAPAPRHTDRVALASSLSAVARSAGPAVAAAQTKPSVSGKKQVLISLSDKTDLAYLGNGLQGLGYSIVSTGGTASSLEAAGVSVTKVEEITHFPEMLDGRVKTLHPSIHGGILARRDQEHHLKALKDHGNGTFDVGVXVNLYPFYDQVTSGNISF

SEQ ID NO: 362383 - protein, 382 aa, Zea mays
  Clone ID: MRT4577_9366C.1.pep
MGKPAESSSTSWSALFGFGCFSSSHADRSGDGPGKVASAGSRPPAPPAPLLSPDDLSLSLAGSDVLAFTVEELRVATRDFSMSNFVGEGGFGPVYKGRVDERVRPGLRQPQAVAVKLLDLEGSQGHKEWLAEVIFLGQLRHPHLVKLIGYCYQDEHRLLVYEFMARGSLEKHLFKRHSASLPWSTRMRIAIGAAKGLAFLHDAAKPVIYRDFKTSNILLDSDYTAKLSDFGLAKAGPGEDETHVSTRVMGTQGYAAPEYIMTGHLTTKSDVYSFGVVLLELLTGRKALDKNRPPREQSLVEWARPCLRDARRLERVMDRRLPRPTTPTRAAQKAAGIAHQCLSVSPKSRPQMSHVVQALESLLALDDAAVEPFVYTAPPESR

SEQ ID NO: 362384 - protein, 209 aa, Zea mays
  unsure (1)..(209): unsure at all Xaa locations
  Clone ID: MRT4577_93670C.1.pep
DLAKEIREFRSPTDGETRMFYEIVVAPGYTEKGLEVLRGKSKALRILEAKRSGKGMLSLRQVSGGWLAQESDDLTPEEITFTTKSERSPQENELADAKFAWLCAKHVKSNAIVIAKNNCMLGMGSGQPNRRESVRIAFRKAGEEAKGAALASDAFFPFAWNDAVEEACQNGIGIIAQPGGSKKDEDAVACCNKYGVSLXVLTGVRHFKH

SEQ ID NO: 362385 - protein, 141 aa, Zea mays
  Clone ID: MRT4577_93671C.1.pep
TSSAVLHRPPGTSPAPSSLLPPPPPPKPPLPPATASPVPPPPSYEQAVGFRVWSSASSYCLSPRSPLASKVVRAGRQLLPLPKCICSLLHINKIFEVGISEHLAIKLQHMNIDLIGKANSSITAELDYMSDLVHMACVMQG

SEQ ID NO: 362386 - protein, 102 aa, Zea mays
  unsure (1)..(102): unsure at all Xaa locations
  Clone ID: MRT4577_93672C.1.pep
MHVILVGEMFPPSFTVPLELKSTLRYGENPHQSAAFYADKSLSLVGAGGIATAIQHHGKEMSYNNYLDADAAWNCVSEFDXPTCVVGKHTNPCGVGSRKDIL

SEQ ID NO: 362387 - protein, 50 aa, Zea mays
  Clone ID: MRT4577_93673C.1.pep
VEVVASVISRVLQSFGREKECDYIIEITSLIYSASFRMIYSSEEDENQLS

SEQ ID NO: 362388 - protein, 71 aa, Zea mays
  unsure (1)..(71): unsure at all Xaa locations
  Clone ID: MRT4577_93674C.1.pep
MASEVVRPSDAELLQAQADIWRLSLSYLTPLSLKCAVALGIPAAIYRHGVAVSPRXMITALSLPSAKLTLL

SEQ ID NO: 362389 - protein, 92 aa, Zea mays
  Clone ID: MRT4577_93675C.1.pep
AQKPNGIGIGIVVCKQNLSFGLQFQTYYNFPSVFYLQKNPLFGIINWPRFFWDLRWSVIINQKKTGAQDQNQGVPTGGGPRPKRGGGMLPIP

SEQ ID NO: 362390 - protein, 92 aa, Zea mays
  Clone ID: MRT4577_93676C.1.pep
AASSPVIGRALMRAEVHVFDPHRGRLLCGSCDLGDDKISARDTPHLDRVGQYHTASGSRRERCCSGGQQRSGRKDAARRHKLTCCSGASSGR

SEQ ID NO: 362391 - protein, 64 aa, Zea mays
  Clone ID: MRT4577_93677C.1.pep
KQKPPGFYWIKNSVLGRKLPVQKDYKLNKTGGDKGNRSIGWGGLYKANPSNAFSQNLSQHPRRV

SEQ ID NO: 362392 - protein, 58 aa, Zea mays
  Clone ID: MRT4577_93678C.1.pep
ESWFSFGSRSPNFRGPPGAPHLTGNVPVFFNAQNREAKICIPGFRIKMVFQFSPPFVF

SEQ ID NO: 362393 - protein, 198 aa, Zea mays
  unsure (1)..(198): unsure at all Xaa locations
  Clone ID: MRT4577_93679C.1.pep
QAYRXSEEPDVDKQKEPILEHVTAALVNRXXHLKFTTRDVSSLWFLYDLEGFVLKGYGESINYRMGPPLLKDVVQSMEEAIIAREENRADGTFEKARLRFAHAETVVPFSCLLGLFLEGPEIEKIQREEALDLPPLPPQGRNWKGSVVAPFAGNNMLVLYQCPSKISDGSTISGGRNNSYLVQVLHNEVPVSMPGCGN

SEQ ID NO: 362394 - protein, 40 aa, Zea mays
  Clone ID: MRT4577_93680C.1.pep
CIPPNAVLLPTRQQQSDPDYKQNPNKNTLNPIIRSHRNFS

SEQ ID NO: 362395 - protein, 524 aa, Zea mays
  Clone ID: MRT4577_93681C.1.pep
MGMAAPRAPLPLPQLLLLLVAALLAAAPLPRAARADEFDVRRHLSTVTRYDVARESSSVISMPSIPDGCRVIHLNLVARHGTRAPTKKRIKELDRLAVRLEALLKEANQVLDSDSLKKIPSWIKGWESRWKGRTKGGELISEGEEELYNLATRMRERFQDLFDDEYHPDVYSIRATQVPRASASAVAFGLGLLSGKGKLGQGKNRAFSVLSESRASDICLRFFDSCETYKAYRKRKEPDVDKQKEPILEHVTAALVNRYHLKFTTRDVSSLWFLCKQEASLLNTTNQACGLFNEAEVRFLEWTDDLEGFVLKGYGESINYRMGLPLLKDVVQSMEEAIIAREENRADGTFEKARLRFAHAETVVPFSCLLGLFLEGPEIEKIQREEALDLPPLPPQGRNWKGSVVAPFAGNNMLVLYQCPSKISDGSTISGGRNNSYLVQVLHNEVPVSMPGCGNKDFCPFEEFKEKIVKPHLKHDYNMICKVKSPAASEEPASFASRVSSFFLGLLSQKGYRGVGAEGVKTEL

SEQ ID NO: 362396 - protein, 107 aa, Zea mays
  Clone ID: MRT4577_93682C.1.pep
VFSFFSFFFFFFFFFFCFVFFFFGKTKKLKFFYPWEKRFKTGDGKNGHDNFFAKKTPPFLQETGVFQNGFFKGFKPRDCFFGTLSQFLWLREICPLYSPRLGKAFSQ

SEQ ID NO: 362397 - protein, 143 aa, Zea mays
  unsure (1)..(143): unsure at all Xaa locations
  Clone ID: MRT4577_93683C.1.pep
SRVFFFFFFFIFFFFFFFFFFFFFFPPKGPRTGPKGPKKPSQKGGSPGKXGNPTEGNRGXPEPGPQEKNPQGPFLAKQLKKTPXPQGKTRPGKGVGPKPXPKSGTPPKGPLKSPPRSWGGNGGLFGTGGPGPRKQGPPGGPRG

SEQ ID NO: 362398 - protein, 75 aa, Zea mays
  Clone ID: MRT4577_93684C.1.pep
RRSLNKATKTTGFQRLFHGATGRLPAKLTELAEGVRFSEGSASASISAHGKKKSIRLRSKAYFRSFLPCAAIAKQ

SEQ ID NO: 362399 - protein, 44 aa, Zea mays
  Clone ID: MRT4577_93685C.1.pep
PRGRPGRGRCWCKLQLGSQLLPHMSHGRICANPRTQLILTYSYR

SEQ ID NO: 362400 - protein, 137 aa, Zea mays
  Clone ID: MRT4577_93686C.1.pep
PAFVARREHIYGKKIYSAKAQFCDNGQFHDIAIECDTVGFKDPCLEIRVDKKPVMQVKRLAWKFRGNQAILVDGLPVEVFWDVHSWLFGSTASNAVFMFQTRQAPEKSLPWSYSQNFRESQLQGLGFSLILHAWKVE

SEQ ID NO: 362401 - protein, 107 aa, Zea mays
  Clone ID: MRT4577_93687C.1.pep
HASALSSVISTAITTASTMAVTSTRRVDTLQELLAAASPLLSAAHNDAPKATAAGKAAPGTAAPSHSVACAADADPLTNLNKALNDDQISEFKHAAARHARGHAAQH

SEQ ID NO: 362402 - protein, 90 aa, Zea mays
  Clone ID: MRT4577_93688C.1.pep
LFSAVDLLSGFSHPWSTCLRHGRPRCLHKSLVPCVLPGGLHPFISPVFVCGVGRCLVCSLDASSVGFLPFRVSCSLFCCPGCASYLRYWF

SEQ ID NO: 362403 - protein, 75 aa, Zea mays
  unsure (1)..(75): unsure at all Xaa locations
  Clone ID: MRT4577_93689C.1.pep
FPASARESDAEAGGKLGMSTLGRGSGRSYRGWRRGPERNVEASFVLERQERGPRDGQCGRPRSTFMLFYILEXEY

SEQ ID NO: 362404 - protein, 81 aa, Zea mays
  Clone ID: MRT4577_9368C.1.pep
RAGRYRAPAIDCRPAHIPTGWTYRRLGVTVNNSTARHSYTYLRAHAGERDTPIPLRAPPRETTRVQHISRLLKYLIQRTLY

SEQ ID NO: 362405 - protein, 56 aa, Zea mays
  Clone ID: MRT4577_93690C.1.pep
GLDLPRNGNGPAFPVAFRNQELEEEAFSTGAAAAVSSIFNRLPGPTTDGLTGVRIG

SEQ ID NO: 362406 - protein, 54 aa, Zea mays
  Clone ID: MRT4577_93691C.1.pep
AAAVTLDGSAYLIGGLKSNVQILDTVEVYNASSGWSALGFSSLGKRTFASAVVM

SEQ ID NO: 362407 - protein, 162 aa, Zea mays
  unsure (1)..(162): unsure at all Xaa locations
  Clone ID: MRT4577_93692C.1.pep
GTSPELPRVCGKPVLHTYLIHXASDAGVXTLXPLLLLHSXCLLQHYPLGHLLQLPVLAQQLQXLELAELAVYSHHQXVLRSNLLDQLNSVSYLQHQQLPFRQLPVAYPQQLLPFYHLEALNSPAYLQQKHLLPFSLLADVSPATFFTHXQLLPIYQHAEPNA

SEQ ID NO: 362408 - protein, 64 aa, Zea mays
  Clone ID: MRT4577_93693C.1.pep
QKGGIGHGGLRIECIRIGGVEIPNHKRVEYSLQYIHGIGRSRSRQILLDLNFDNKITKDLSEEE

SEQ ID NO: 362409 - protein, 147 aa, Zea mays
  unsure (1)..(147): unsure at all Xaa locations
  Clone ID: MRT4577_93694C.1.pep
MATLSMVSVPIAPSSLSLSTRGRSSSASFPAKKGGIGHGGLRIECIRIGGVEIPNHKRVEYSLQYIHGIGRSRSXLRKEVGKYMIEGDLKRFNRVAIERLKEIRCYKGIRHKLGLPVRGQRTKNNCRTLKGKRASVAKKKSPASQDE

SEQ ID NO: 362410 - protein, 170 aa, Zea mays
  Clone ID: MRT4577_93695C.1.pep
MATLSMVSVPIAPSSLSLSTRGRSSSASFPAKKGGIGHGGLRIECIRIGGVEIPNHKRVEYSLQYIHGIGRSRSRQILLDLNFDNKITKDLSEEEVITLRKEVGKYMIEGDLKRFNRVAIERLKEIRCYKGIRHKLGLPVRGQRTKNNCRTLKGKRASVAKKKSPASQDE

SEQ ID NO: 362411 - protein, 191 aa, Zea mays
  unsure (1)..(191): unsure at all Xaa locations
  Clone ID: MRT4577_93696C.1.pep
HLWSHYIRGLRTELQSQVMTHMPKTVDKAMKLVKMYQEIAEKNXEASKRNSREQNSGGGRGDNRIGILYPELNKESQLRDYRRANGLCFICGDKSEPGHQAKCPKRVVTQLHNLTVEDISSVLSDQVLQKLEQEKIAGELYHLSXNAIKGTECDGCMRVQSLIQDQVLVMLIDSGSSTTFISQRMVVKLGL

SEQ ID NO: 362412 - protein, 146 aa, Zea mays
  Clone ID: MRT4577_93697C.1.pep
ERNLFFLFFFLLWEGGGQIQNTQTPVRQRGEGAKGGGKRQTQTEMVQRPRRARTTPPRALLKHGGRRKNPHPQPQNLYERQKHSGTHGKGHGDRVPKSKSKPKAHGHGLKLKRKPGAALPFVGPCPLNWSIGMATRPRTPTRGSGG

SEQ ID NO: 362413 - protein, 181 aa, Zea mays
  Clone ID: MRT4577_93698C.1.pep
DVCNGLLGGFAAITAGCSVVDPWAAVICGFVSAWVLIGLNALAARLRFDDPLEAAQLHGGCGAWGVLFTGLFARREYVEQIYGTPGRPYGLFMGGGGRLLAANVVMILVIATWVSVTMAPLFLALNKMGLLRVSAEDEMAGMDQTRHGGFAYAYHDDDLSLSSRPKGMQSTQIADAASGEF

SEQ ID NO: 362414 - protein, 61 aa, Zea mays
  Clone ID: MRT4577_93699C.1.pep
GRFRSTTLTSECIPRHNNGIEDCTCTSVAGLLQRLDYENPVGQQHNTVASNASVVCARYTV

SEQ ID NO: 362415 - protein, 121 aa, Zea mays
  unsure (1)..(121): unsure at all Xaa locations
  Clone ID: MRT4577_9369C.1.pep
SYGRLGSSRAKKKKKPAPXQRGDTGDPYXLPRRAMATELTAAXMRAYDXSDPTKSIYRSVRGKXYARXXGRXXYGPGGAYXASAGREXSRXXGKMSKDEXDXXGDXXGXXDKEXGXXXDWE

SEQ ID NO: 362416 - protein, 568 aa, Zea mays
  Clone ID: MRT4577_936C.1.pep
RGKYLDDDISLDDIPSSGILPTEQVTGEIPFQITEISSEWAYCTEDTKVLVVGCFHENYRHLAGTNLFCVIGDQCVDANIVQTGVYRFIARPHAPGRVNLYLTLDGKTPISEVLSFHYRMVPDSQNLAEDEPQKSKLQMQMRLARLLFTTNKKKIAPKLLVEGSKVSNLLSASTEKEWMDLSKFVTDSKGTYVPATEGLLELVLRNRLQEWLVEKLIEGHKSTGRDDLGQGPIHLCSCLGYTWAIHLFSLSGFSLDFRDSSGWTALHWAAYCGREKMVAALLSAGANPSLVTDPTHDVPGGQTAGDLAAGQGYHGLAAYLSEKGLTAHFEAMSLSKGKRSTSRTESLKRNTKEFENLSEQELCLRESLAAYRNAADAASNIQAALRERTLKLQTKAIQLANPENDASAIVAAMRIQHAYRNYNRKKMMRAAARIQSHFRTWQIRRNFMNMRRQAIKIQAAYRGHQVRRQYRKVLWSVGVVEKAILRWRKKRKGLRGIATGMPVAMATDAEAASTAEEDYYQVGRQQAEDRFNRSVVRVQALFRSHRAQQEYRRMKVAHEEAKVEFGRK

SEQ ID NO: 362417 - protein, 44 aa, Zea mays
  Clone ID: MRT4577_93700C.1.pep
HHNDDDDSGGTPANDGGSCTIPTQPLPTHSLVFLGETTEDVEED

SEQ ID NO: 362418 - protein, 149 aa, Zea mays
  Clone ID: MRT4577_93701C.1.pep
RSELGKTPGVAGGETTGTTGNAHCERAGQHTASKLQQGPRQDAAMEERERKAGARSAMEEREREKSRGTYAHGDGQLHAGASSTRWSTRPRAQRPCRAKEALAPGSRVRQAERGATRIEGLEAWAPAEEAGSGRELHKLGSDARSREKE

SEQ ID NO: 362419 - protein, 67 aa, Zea mays
  Clone ID: MRT4577_93702C.1.pep
FSPNQGQNPISSKFFRLPPQNIKRRLSIPTHNTCVGFQQRNRSPPIAPQNEIWAKSTNLASKLSLNK

SEQ ID NO: 362420 - protein, 64 aa, Zea mays
  Clone ID: MRT4577_93703C.1.pep
PPPHRFPETLYAIYDPGLVLWCSGLVSPTVHVAPALQGRAPGPAIVVSPTSAPILYVTSPLHVL

SEQ ID NO: 362421 - protein, 79 aa, Zea mays
  Clone ID: MRT4577_93704C.1.pep
MGLDTNGEFLMAMQQQLVHEIREVWTTSVENLLYIKEDLIIPHGCVHSLVIYEVLLKLVEPFSDSMFSLLFDNNTSFMN

SEQ ID NO: 362422 - protein, 47 aa, Zea mays
  Clone ID: MRT4577_93705C.1.pep
FKQWPVFFRRLHGITVKKHWTSNILVGFFFFFFFAQVVQLNIKSFCI

SEQ ID NO: 362423 - protein, 92 aa, Zea mays
  Clone ID: MRT4577_93706C.1.pep
LSGRTPWLLQGGHLLCLWGADTNHRRAAAGVHAGLMNSEHVFLISPPLPLRTSRALSLSMGSANMGTKADVLVHKAFTIHSDIIACSAAVTG

SEQ ID NO: 362424 - protein, 41 aa, Zea mays
  Clone ID: MRT4577_93707C.1.pep
ICPGSVRPPPLPLRLSPPSAGACRGDTPPSRWRWRTTAGDP

SEQ ID NO: 362425 - protein, 122 aa, Zea mays
  Clone ID: MRT4577_93708C.1.pep
TPSFLPTNLKRKQVLARRISFVPVRVLPTSCPRSIYVSWATRCNRVRTRDLLRGKKLSTRRVYTLVRVGSWARRASRPTSNTLVSELSNQKVPGSRSCASGVKGRSRPLYMNPPPPPPPPDL

SEQ ID NO: 362426 - protein, 63 aa, Zea mays
  Clone ID: MRT4577_93709C.1.pep
LFERIAWLKKLRARAHTHRLIQRPTPVLNHYNEKETDAHHYTHNLVTAQTVQGVKNTRVLNLL

SEQ ID NO: 362427 - protein, 88 aa, Zea mays
  unsure (1)..(88): unsure at all Xaa locations
  Clone ID: MRT4577_9370C.1.pep
QGTSDLSVNHIKESWQIWTRQVNPLYISFLVMKISTQXPRMDHDADEHDLLVLAASGALPRRPRIAIEQLIXPPAPCPFLDPGHDTIL

SEQ ID NO: 362428 - protein, 47 aa, Zea mays
  unsure (1)..(47): unsure at all Xaa locations
  Clone ID: MRT4577_93710C.1.pep
RCIAPSSAPPXRRRLSRTPFTTCATPAISKSSASTTSCLAILVIDLY

SEQ ID NO: 362429 - protein, 73 aa, Zea mays
  Clone ID: MRT4577_93711C.1.pep
ARLTAGERWPGPAWLYWTSIWVAGLGSAWCGGICPYIYTLTCSSPSACKLYVDLFSSYFIRDCHEPRSKKKPK

SEQ ID NO: 362430 - protein, 730 aa, Zea mays
  Clone ID: MRT4577_93712C.1.pep
MDSQTASHNSSESLCSSGIQYGLNRGPGTIGGLHSSNSLRSLDEIPNNDLPPNTFASLLGSSLSRSASPDPELVRRAPSPSLPPIGVKVGNTDKKNGGSSSFRRSSSAIGGSDDLVAALSGMNLSSRAMSGQTMDQSQLYQDVDNVQKFLFDRQGDQPTGNQQHYMRRPEHGQSKLPDGYSANLANSSTMRNQINAGSFTSFDSLSLGSGFASPRIGSRSPGGTVSSRQNLAGMSNMLNYNGIGSPTASPSLQTSIDPAYIQYLAQLAATCDDPLMDRGHLGNSYMDLLGTHKANIGPLLQSQKQYGYYGNLGFNLGYPGSPLASPVLPSSPIAPGSPLRHGDRNMRFPSGMRNFGNSFGSWNSGMSGKMDANLMPSLLEEFKSNKSKSYELSEIAGHVVEFSADQYGSRFIQQKLETASTEEKDMVFSEIMPQALTLMTDVFGNYVVQKFFEHGSTAQIKELAGQLIGRVLALSLQMYGCRVIQKAIEVVDLDLQTKMVAELEGHVMRCVRDQNGNHVIQKCIECIPQHAIEFIVSTFYGQVVMLSTHPYGCRVIQRVLEHCDDPKTQQIMMDEILQSVCLLAQDQYGNYVVQHVLEHGKPHERSAIIEKLIGQIVQMSQQKFASNVIEKCLVFGNPVERQVLIGEMLGSTSESEPLEVMMKDQFGNYVVQKVLETCDDQQREMILTRIKTHLNTLKKYTYGKHIVARVEKLVAAGEKRLGLQPACTAA

SEQ ID NO: 362431 - protein, 73 aa, Zea mays
  Clone ID: MRT4577_93713C.1.pep
PTYPFTYIIHYPTTFTIQSNLIHTAHHLPFHQRIIITICNSSLHVTHYQLIIYLSKPLFLHYHLFYFNSLYLI

SEQ ID NO: 362432 - protein, 73 aa, Zea mays
  Clone ID: MRT4577_93714C.1.pep
HRVVANVLELHYCLAACDVPIRAKARVVDVATDGTRCDRVGGVPARWPAARSASFLTARDESRGAAAVGKPEA

SEQ ID NO: 362433 - protein, 61 aa, Zea mays
  Clone ID: MRT4577_93715C.1.pep
PPPAVIPAIQKLGIKNKNEPPRMVAPVKNQNTAASAIAPSADTAGAEACSMQRPIMIWGGP

SEQ ID NO: 362434 - protein, 68 aa, Zea mays
  Clone ID: MRT4577_93716C.1.pep
KTTNHHQIRIQYCSHVKEKNKQESIEEPHHICVSSTKQTDRSTSELSEGWRTSFPQTTPKLHSLYSPN

SEQ ID NO: 362435 - protein, 97 aa, Zea mays
  Clone ID: MRT4577_93717C.1.pep
RPGAPREGPGSGCGTPGVTAPAWGTAPPGALPSGKARGLGASPRTCPSGACGGKPWPRRRPRARTGRAPAPGGVPRPAFTTTFSAGALGLRPPGGHE

SEQ ID NO: 362436 - protein, 72 aa, Zea mays
  Clone ID: MRT4577_93718C.1.pep
DCEQADLAVDVYSEPPSAARYCTFPSLQSDSLVTVTGQTPVLCSLIKNKFKHFMVVDRTLSPNMRIQFFKTR

SEQ ID NO: 362437 - protein, 70 aa, Zea mays
  Clone ID: MRT4577_93719C.1.pep
KPRIPPWPPPVAKSFGASLIRFSRNRHSPGTWNWFKLVWPAPHNPLFFPNLRVFPALRCWSQFAAPVKGC

SEQ ID NO: 362438 - protein, 108 aa, Zea mays
  unsure (1)..(108): unsure at all Xaa locations
  Clone ID: MRT4577_9371C.1.pep
MDARAMIQGKHIADMGAYHVPARLNNIXGMILLIELYGRRIQSICCIIKGGRQEPGIGLRXDXHKGYMGLKKRRQYGEEAHACQDRCNIVKLGHCIMLHAYETLNVEL

SEQ ID NO: 362439 - protein, 124 aa, Zea mays
  Clone ID: MRT4577_93720C.1.pep
VSGRVSSLFSVHILLALNVLEVRDGGVALRPSSHRCNSADGEQWMSWVSVPARAAVRTTQSSSSAEFARRATREICSSEQSRAVRCGGSGSTEICVGGGERPDIRRGRMRCTWAVRDRVSRPAS

SEQ ID NO: 362440 - protein, 65 aa, Zea mays
  Clone ID: MRT4577_93721C.1.pep
FGKKLPSFFFIQKRMAFSDDGKMKPTLLGPRGNRGIPITPNGAEKKTKRTTPGQCAKVGAIDQFK

SEQ ID NO: 362441 - protein, 84 aa, Zea mays
  unsure (1)..(84): unsure at all Xaa locations
  Clone ID: MRT4577_93722C.1.pep
RAALFFVLPDGYLKFQNPPLKGIYRKISRAAXGCTRSFCGELKKLHFRMLAPDPRTRISISTIKRGTWYREPIGANAAKSSTAS

SEQ ID NO: 362442 - protein, 195 aa, Zea mays
  Clone ID: MRT4577_93723C.1.pep
PTRPEALSVVSKASSTAEHRLTREQHGDGAAWLNLTLGASESPSPSPSPDAASCSADSESGSGSGSGPAAKPPPHKVFSCNFCLRKFFSSQALGGHQNAHKRERSAAKRSSYHAQRVVVGGLPLHAHAALMRSLRANPAPAPAVRTAARFLEGGVAAAAWATVPCEEAPSSAWPGSFRLRAPHSEYEQACEPIQP

SEQ ID NO: 362443 - protein, 135 aa, Zea mays
  Clone ID: MRT4577_93724C.1.pep
MACIRPPQTLASRIRQSPWRRSGAGLTCRQIYCAASETGSISSGMPARGAPARRGAARSRRRRPRSSWSPTTPAGAPMPPPSPRGGRSSSPPSFREAAASAPATAGSHSPLSSSAVGPFSCSSTPSPPWRSSSHR

SEQ ID NO: 362444 - protein, 229 aa, Zea mays
  Clone ID: MRT4577_93725C.1.pep
MSRSTGFSPFKLLFGDEAITPEEAKAGSIRTVASAEDEADCSVAKDALEGIRLQVVENINKYQAETIKWRDRKVRLKNIRPGHLVLRRVANLDTVGKLQLKWEGPFLLYKSNIPQRCKCKTEFAPSSAKKKEETGRSLKDVPKGMQSMTKLQKVVPKGAQRKFSAQKSFLRECRAYSEKSTLILPKYKAKREKSTRYRQNRRRRSSKDVPKGMQNLQRKVSADTPKNKR

SEQ ID NO: 362445 - protein, 92 aa, Zea mays
  Clone ID: MRT4577_93726C.1.pep
ILCGAVKCKRLSRMCKSLWGPPPLFITPLGNRLWDCHQCFFFWPAPAGFLSGIISGVGGLLFPPNNVLLSLVVWPGPFLCGPTWAGRGTPFF

SEQ ID NO: 362446 - protein, 40 aa, Zea mays
  Clone ID: MRT4577_93727C.1.pep
PQKTMYVCSLCRLLSFAACLVYLPACMGVALNKQTSFLAL

SEQ ID NO: 362447 - protein, 245 aa, Zea mays
  unsure (1)..(245): unsure at all Xaa locations
  Clone ID: MRT4577_93728C.1.pep
MQQQQQQPERYSVTAGGLARSNSGSPVVEPFGSFTMDLFTPHSDLDLSINXSANTDEQYTRKQMISIIKKFSKVLFSYQRSGIFCGVLPIVSARVPILKVIDRGTGVECDISVENKDGMTRSMIIKFVSSLDERFQILSYLVKFWAKVHDLNTPRHLTMSSMSIISLVAFHLQXTRHPPILPAFSDLLKDGLDCESIERNALRFRDFGSRNKESVAELFVSLISKVSNYKVHLLLMFAVEVTCHN

SEQ ID NO: 362448 - protein, 161 aa, Zea mays
  unsure (1)..(161): unsure at all Xaa locations
  Clone ID: MRT4577_93729C.1.pep
FLSQLIVEDGRDYANICFREFGDRVRHWITFNEPWSFSINGYASGILAPGRCSAWXKLRGGGXGDSGREPYIVAHNQLLAHAAAVQVYKGKYQEKQKGSIGITLVSNWMIPYTNSKGDKDAAKRALEFMYGWFMDPLTKGDYPLGMRTLGGXRLPRFTNEQ

SEQ ID NO: 362449 - protein, 43 aa, Zea mays
  Clone ID: MRT4577_9372C.1.pep
ILCVTTRGKRDTVGGGSFNGGLLFLDSILKAHQKKKKKKKKGG

SEQ ID NO: 362450 - protein, 192 aa, Zea mays
  unsure (1)..(192): unsure at all Xaa locations
  Clone ID: MRT4577_93730C.1.pep
MILLFPCCRCSEASTWDSQVLSRHAECLELEELTAISVNPSLLPALNQLLLEAYAILRPKPLDYDQRNTLVDVFRKMVNQRFGSNSGSPVVEPFGSFTMDLFTPHSDLDLSINFSANTYEQYTRKQMISIIKKFSKVLFSYQRSGXFFCGVLPIVSARVPILKVIDRATGCRCDISVENKDGMTWSMIINIV

SEQ ID NO: 362451 - protein, 330 aa, Zea mays
  Clone ID: MRT4577_93731C.1.pep
EDKHQCAVQTRHPPILPAFSDLLKDGLDCESIERNALRFRDFGSRNKESVAELFVSLISKLLSAESLWEHGLCASNFEASWISKTWKKGVGNLSVEDFLDRSQNFARSVGKVQMQKICKCLRECALNLLDFMRGKMDTTKLKTLLFGRLSPDELVSKPRLKHLAVRRNWERTPQGGRCVLQKSAKHAGSATGSDSLPTPNKVLHHALHYRVAGHQSSIHQFVPIIRWPRIIPSGFGYGLSLGIPSVAPHLGKGILGKPPIIPSGFGYGLSLEIPSVAPHLGNGILGKPPSNITPLDQRSSTQLVHVRNPHQHTCQQSCGGAMEPSSSGVA

SEQ ID NO: 362452 - protein, 118 aa, Zea mays
  Clone ID: MRT4577_93732C.1.pep
MQQQQQQPERYSVTAGGLARGTYSPVCSNSGSPVVEPFGSFTMDLFTPHSDLDLSINFSANTDEQYTRKQMISIIKKFSKVLFSYQRSGIFCGVLPIVSARVPILKVIDRGTGVECDI

SEQ ID NO: 362453 - protein, 90 aa, Zea mays
  Clone ID: MRT4577_93733C.1.pep
RHTPAYVMLGIRLELSMPLLTQNPLQSRGGLLKTHGRNPQHPLQSHQDSTAPRRIECHSRSHISRNCQSNKHTDHTHSVTGFRLHKDIGL

SEQ ID NO: 362454 - protein, 94 aa, Zea mays
  unsure (1)..(94): unsure at all Xaa locations
  Clone ID: MRT4577_93734C.1.pep
MQQQQQQPERYSVTAGGLARSNSGSPVVEPFGSFTMDLFTPHSDLDLSINFSANTDEQYTRKQMISIIKKFSKVLFSYQRSGXFCGVLPIVSAR

SEQ ID NO: 362455 - protein, 107 aa, Zea mays
  unsure (1)..(107): unsure at all Xaa locations
  Clone ID: MRT4577_93735C.1.pep
SSEFGSRRIATVDVLGKLYPVVGGTSXTDRVDQVSGGQPRTNPGWIEEPVVGKPAIAEGLCXGIFTGECPETIEGKKVLPLDMGLLVAGTKYRGEFQKRIKNLVGEK

SEQ ID NO: 362456 - protein, 65 aa, Zea mays
  Clone ID: MRT4577_93736C.1.pep
QRGKKKKTPKQTPKKRKKKKKKKEKKKKKKKKKKKKKKKKKKKKKKKKKNPKKKKKKKKPHRAGV

SEQ ID NO: 362457 - protein, 68 aa, Zea mays
  Clone ID: MRT4577_93737C.1.pep
LGSSREPALLFLELRPETRRRTLFPNSVATQSLLYSWSPLLPDRNPYPLRLSNNLPYLGINSKARDAQ

SEQ ID NO: 362458 - protein, 168 aa, Zea mays
  Clone ID: MRT4577_93738C.1.pep
MESDAGDGNWEKSSTLDTTKNNDPSENTWDKRKGDGGDGAWGNRSDDGHGNWEHPSNWNGQSLDVDQDTWGNARGKKKADGNYCQWEEQPSNYKQKKTNADHDSSYNNVMPSSEIAWNAGEGTGRPNAKSNAESSWGEEDKMESDTRSKVPKESDTWNTGRSNESPWG

SEQ ID NO: 362459 - protein, 74 aa, Zea mays
  Clone ID: MRT4577_93739C.1.pep
NYPTLGKILFFFAFHSKTQPENPEPIKKHNLFTFEQTLVNASKLVNQGARGGPLAKIHMANNHNVEMGLFFTHD

SEQ ID NO: 362460 - protein, 87 aa, Zea mays
  unsure (1)..(87): unsure at all Xaa locations
  Clone ID: MRT4577_9373C.1.pep
PPGPMLETPPPMALGLMPLPKGRPKDXKKWGGLFPQTGVRENKFPKEFGARVALEVYPGECPRANPKNFPPKMYGGGAPAGPGGKIS

SEQ ID NO: 362461 - protein, 48 aa, Zea mays
  Clone ID: MRT4577_93740C.1.pep
IRLEVICAFISHRVCCCIPGACKSYTGPKNQGTCDSTPRTTGLADLNG

SEQ ID NO: 362462 - protein, 60 aa, Zea mays
  Clone ID: MRT4577_93741C.1.pep
RSNSCSRSTCTLNLMLAPSYGWAFAAIQPTCFDKPISVLPTSHHWWCPSFRLLHCSIDQI

SEQ ID NO: 362463 - protein, 84 aa, Zea mays
  Clone ID: MRT4577_93742C.1.pep
MHIPGPAREHEVSFLHEHRDLAASAATATIFPQCSQAPIASLLPPYLSPAVTSVCENPMPQPYRSHQAITGGILPLLPSFLQHY

SEQ ID NO: 362464 - protein, 178 aa, Zea mays
  Clone ID: MRT4577_93743C.1.pep
MASESSGAHALFKSENLKWLLADHEIDSLIRFKSFFPSGDEGLPLLVKYQKQDEKVLDVPYLLTDGTIAPLRTILNDGLSIDREMQLMREIRKVVLSKYPEDDGEGEDYEIEEIDLEVTATEVNSPEPHVCSAESHMSQPCPLGQVETGSGFLRKDKIQFGSTLPAEDEPILVKDKGP

SEQ ID NO: 362465 - protein, 80 aa, Zea mays
  Clone ID: MRT4577_93744C.1.pep
KKFFHPLGFGIPPRPLRDFKRGGSAFYSKVFQNFFFCQKGGISKALFFKTPGAPLFSGKIKNFHPGVFLTQKTQRFGKTL

SEQ ID NO: 362466 - protein, 78 aa, Zea mays
  unsure (1)..(78): unsure at all Xaa locations
  Clone ID: MRT4577_93745C.1.pep
KQIGVDASDRPMLVITLVCTVVCSSKRKSSLSCAKSGPTDASNELGGXASIQHLAHCPVRLHCSPCGRFNKIALGYNR

SEQ ID NO: 362467 - protein, 98 aa, Zea mays
  unsure (1)..(98): unsure at all Xaa locations
  Clone ID: MRT4577_93746C.1.pep
ARVRPRVRRKFIPIYLAHGILQHGAFXDLDQRGVVXLFKLATERGRKVRPNLKVDICGEHGGQPSSDAXLANTEMDYVXSCSAFRXPIVMLAAANVLD

SEQ ID NO: 362468 - protein, 65 aa, Zea mays
  Clone ID: MRT4577_93747C.1.pep
HRMSIEDTLSRCHRWPRCSWVGGHWENCSMPPSTRTSMPHPSRHVAASTTHMDRGTRQTRVAVLE

SEQ ID NO: 362469 - protein, 59 aa, Zea mays
  Clone ID: MRT4577_93748C.1.pep
KLYTWVPLGRVCLHLIMALDPLALAFKESMKRTFGTTVHQSNSYYADAVALIIPSTVGS

SEQ ID NO: 362470 - protein, 103 aa, Zea mays
  Clone ID: MRT4577_93749C.1.pep
MASAAQKKMTIVCLMLLAVVGQILADADVTVEHPSRICAETVIDPRVPNNVCICSKNCACAGKCILESPDAVQTCFVDCVLKNDCICSSKIIPGADDPKANAK

SEQ ID NO: 362471 - protein, 233 aa, Zea mays
  Clone ID: MRT4577_9374C.1.pep
IIGIANTMDLPEKLLPRISSRMGIQRLCFGPYNYRQLQEIITSRLKGINAFEDQAIEFASRKVAAMSGDARRALEICRRAAEFADYRVKQFQQVEQTPSSANTGNGFVCMGDIEDAIQEVFQAPHIQVMKNCPKFGKVILAAMVHELYRSGLGEVLFDKLAATVFSWCHVNRELLPGYDTLLKICCKLGESKIVLCEEGTKHKLQKLQLNYPSDDVTFALKESPDLPWLSKYL

SEQ ID NO: 362472 - protein, 39 aa, Zea mays
  Clone ID: MRT4577_93750C.1.pep
SHDHEGSRRNLLTRRVGTTVSMTSSIPLCTVLALTGRSS

SEQ ID NO: 362473 - protein, 35 aa, Zea mays
  unsure (1)..(35): unsure at all Xaa locations
  Clone ID: MRT4577_93751C.1.pep
MVLWVFGYXSLIWNPGFNYFYNILGYINGYKRTFN

SEQ ID NO: 362474 - protein, 103 aa, Zea mays
  Clone ID: MRT4577_93752C.1.pep
MASAAQKKMAIVCLMLLAVVGQIVADADVTVEHPSRICTETVIDPRVPNNECICSKNCACAGKCILESPDAVQTCFVDCVLKNDCICSSKIIPGADDPKANAK

SEQ ID NO: 362475 - protein, 159 aa, Zea mays
  Clone ID: MRT4577_93753C.1.pep
KSTDLILKAAYNVGGHSVNSQTIQNSILGCQSHRPSLWVRTLFTPTKKSGSSIHPYALQYAEPIAHFALSTGAFSDPPVRLYTAKKLYHQLEQARAEFIQANVMVRRQTIFLPKVLHFYAKDASLELPDLVDIVCESMPELQRKEIRQYLRRRIDKCVQ

SEQ ID NO: 362476 - protein, 103 aa, Zea mays
  Clone ID: MRT4577_93754C.1.pep
MASAAQKKMTIVCLMLLAVVGQIVADDDVTVEHPSRICTETVIDPRVPNNVCICSKNCACAGKCILESADAVQTCFVDCVLKNDCICSNKIIPGADDPKANAK

SEQ ID NO: 362477 - protein, 89 aa, Zea mays
  Clone ID: MRT4577_93755C.1.pep
MSVRRVLFVIINPLFCTCKNKPKKTRLTRKKKKKKKKKKKKKKKKKKKIKKKKKKKKKKKKKKKKKIKKKKKKKKGGGCFKRKKFFRGG

SEQ ID NO: 362478 - protein, 103 aa, Zea mays
  Clone ID: MRT4577_93756C.1.pep
MASRAQRKMTIVCLMLLAVVGQIIVGMAVEHPNPSNICTETVIDPRVPNNECICSKNCACAGKCILESADAVQTCFVDCVLKNDCICSSKIIPGADDPKANAK

SEQ ID NO: 362479 - protein, 109 aa, Zea mays
  unsure (1)..(109): unsure at all Xaa locations
  Clone ID: MRT4577_93757C.1.pep
GKDRIKFCSDFTARDGKQHALLDNLNQELAQKSVLLGDGFKLAAADNDVFATGHPFGNPGRDRGVQKYSHGPGGVDHIQNTGGAGTTLQKIKGTQSXFXPPSYSKEGCK

SEQ ID NO: 362480 - protein, 145 aa, Zea mays
  unsure (1)..(145): unsure at all Xaa locations
  Clone ID: MRT4577_93758C.1.pep
PDMLGKQKGLLPGVVFDSPPPWVEFGNVSSKVPPRSTFRKGRVVNPTFFLGGPRKDLFSDGTFALFXKMDGTNNWVSALKDDEWSLRFKWLKPLKISPKNFLTLERTVSGNPPSGVYRFRHFGAPQPLIGALQHFSGAFRGFPRG

SEQ ID NO: 362481 - protein, 106 aa, Zea mays
  Clone ID: MRT4577_93759C.1.pep
LCSLPPPPRPRRLRDERLRLTLSRWCIKPIPDYVLSAWGSSPRVVDGYTVDNGTASLYWHCRRLRCRKRCRRMRSLHPGLLLTRVPDPDCRTDRPRTPHRPRGRIR

SEQ ID NO: 362482 - protein, 200 aa, Zea mays
  unsure (1)..(200): unsure at all Xaa locations
  Clone ID: MRT4577_9375C.1.pep
ALGHGGQHRTGSSTDGGMAASSSCTPTITFAFQQPSPAPTATATSSLALVHPYHHGVLGYGSTCLLLDHHHPTTVTXGLSLARRSIQRPPXCTLHHHFHGHAKLSAARLPVLYHEGVDCSWYSSIDNGSGLLRTAGTGSRASPTSMPXGRPSRGKGAVVSQGSAAALAVDTMQMNKAGRGRGCKAHRKVHEPRICFKTMS

SEQ ID NO: 362483 - protein, 93 aa, Zea mays
  unsure (1)..(93): unsure at all Xaa locations
  Clone ID: MRT4577_93760C.1.pep
GRANAALASHQEWRMYRDXAPAIEXRARAXQTGKATDAAVFARHVARRVMXXRPPREIVYGNMRLLFAALAVSPAWVRDAFFANRFGLNKKQR

SEQ ID NO: 362484 - protein, 57 aa, Zea mays
  Clone ID: MRT4577_93761C.1.pep
GGAEAEELDGGFDGVEVGVEGALAPAVDIVVQHVLEHGPGDDALRAVLRDDATSPGE

SEQ ID NO: 362485 - protein, 96 aa, Zea mays
  unsure (1)..(96): unsure at all Xaa locations
  Clone ID: MRT4577_93762C.1.pep
GFNIQKESPLHLVLRLRGGMQIFVKTLTGKTITLEVXSSGPLANVKAKIQGKEGIPPGQQGLIFAGKQLEDGRPLADFNIPKEAPLPLVVRFRGGQ

SEQ ID NO: 362486 - protein, 39 aa, Zea mays
  Clone ID: MRT4577_93763C.1.pep
LDLGPPIRKQTPRKPGDVSLEPKKRPPAIQNQSDAWGRP

SEQ ID NO: 362487 - protein, 71 aa, Zea mays
  Clone ID: MRT4577_93764C.1.pep
TLPGKTITLEVESSDTIVNVKAKIQDKEGIPPDHQRLIFAGKQLEDGRTLADSNIQKESTLPLVLRIRGGQ

SEQ ID NO: 362488 - protein, 178 aa, Zea mays
  Clone ID: MRT4577_93765C.1.pep
PPSKSSSAITNPRRSSNYGPHAAVVIFSEAGRRRCCRSGLGASRQLVVVLGVWQSPPSSNHRRGPVAPRNREPVAVSASGCNRGPQFRIRVLRQDSGRCGRGSSKLGDQAGCRQLLAVDALRRDPPSSVDRGAHAITFEEPVAEDPGEQQVEVAEQELIEGEEQVVQEEPQGEEYDLI

SEQ ID NO: 362489 - protein, 234 aa, Zea mays
  unsure (1)..(234): unsure at all Xaa locations
  Clone ID: MRT4577_93766C.1.pep
TSTSENALDATGALFLVGDDDNGNEFERARADLDKAGRRTGLRSRFVFESKTRGKADTIAAELSTQLGASAGHHLGRPVELTRLQYSARVNRWLSLTLVPFGARCTNFLHSSSMIQNLRAQASLDGPPSTFEHHDCGAGLRIQGSKLTASLAGLILGSGGLDSGGGGGGTTXRVTTFGQVTCRPANDVKLSLSGLWQVHSPSSSSSRLNHVGIVAIPRGSLRPEHPTGGGTTEG

SEQ ID NO: 362490 - protein, 236 aa, Zea mays
  Clone ID: MRT4577_93767C.1.pep
MGLGLGVRAAPFTYAAHALAVAAAAMVLVWAIYFRGGLAIEATNKNLIFNVHPVLMLIGYIIIGGEAIMVYRVLPTSNHETNKLIHLVLHGIALVLGAVGIYFAFKNHNESGIANLYSLHSWIGIGTITLYGIQWIVGFVTFFFPGAAPNVKKGVLPWHILFGLFVYILALANAELGFLEKLTFLESSGLDKYGTEAFLVNFTALVVVLFGASVVVAAIAPVRLEEPQGYVPIPEN

SEQ ID NO: 362491 - protein, 51 aa, Zea mays
  Clone ID: MRT4577_93768C.1.pep
TYDASSFDYNLSLNTVSFQSLLHFYLFESGIERKLSKYQKLLVLVDQQSFC

SEQ ID NO: 362492 - protein, 125 aa, Zea mays
  Clone ID: MRT4577_93769C.1.pep
KIQDKEGFPPDQQGLIFAGKQLEDGRTLADSNIQKESTLHLVLRLRGGMQIFVKTLTGKTITLEVESSDTIDNVKAKIQDKEGIPPDQQRLIFAGKQLEDGRTLADYNIQKESPLPLVLRLRGGQ

SEQ ID NO: 362493 - protein, 63 aa, Zea mays
  Clone ID: MRT4577_9376C.1.pep
KENSSFLFGCGQGPQSASSLLLNPSYCHNIWYRRLPGSNEGGKQSKVPTPAAVACIYACLESW

SEQ ID NO: 362494 - protein, 236 aa, Zea mays
  Clone ID: MRT4577_93770C.1.pep
MGLGLGVRAAPFTYAAHALAVAAAAMVLVWSIQFRGGLAIESTNKNLIFNVHPVLMLIGYVIIGGEAIMVYRVLPTSNHDTTKLIHLILHGIALVLGAVGIYFAFKNHNESGIANLYSLHSWIGIGTITLYGIQWIIGFVTFFFPGAAPNVKKGVLPWHVLFGLFVYILALANAELGFLEKLTFLESSGLDKYGTEAFLVNFTALVVVLFGASVVVAAIAPVRLEEPQGYDPIPEN

SEQ ID NO: 362495 - protein, 132 aa, Zea mays
  Clone ID: MRT4577_93771C.1.pep
PLANVKAKIQDKEGIPPDQQGLIFSGKQLEDGRPLPGFNIQKESPLPLVFRLRGGMQIFVKTLPGKTITLEVESSGPLANVKAKIQAKEGIPPGQQGLFFAGKQLEDGRPLAGFNIQKESPPPLVLRFRGGQ

SEQ ID NO: 362496 - protein, 111 aa, Zea mays
  Clone ID: MRT4577_93772C.1.pep
LGTSRPAGNLVFVRSAHTHNQISPKSTRRHLRFKMQIFVKTLTGKTITLEVESSDTIDNVKAKIQDKEGIPPDQQRLIFAGKQLEDGRTLADYNIQKESTLHLVLRLRGGQ

SEQ ID NO: 362497 - protein, 30 aa, Zea mays
  Clone ID: MRT4577_93773C.1.pep
RMMVIQCSNDFRNQLHQISILIALMSELCV

SEQ ID NO: 362498 - protein, 126 aa, Zea mays
  Clone ID: MRT4577_93774C.1.pep
AKIQDKEGIPPDQQCLIFSGKQLEDGRPLAGFNIQKESPLPLVFPLRGGMQIFVKTLAGKTITLEVERSGPLANVKAKIQAKEGIPPGQQGLIFAGKQVEDGRPLAGFNIQKESPPPLVLRFRGGQ

SEQ ID NO: 362499 - protein, 71 aa, Zea mays
  Clone ID: MRT4577_93775C.1.pep
LFIAGMIILRVYVRPLPLTIYTSPGLIFFLNTELDFLAGAYRTQAYWRRHATSELFYRVGLNHYTGLFSPT

SEQ ID NO: 362500 - protein, 80 aa, Zea mays
  Clone ID: MRT4577_93776C.1.pep
RGGIQISVKTLPGKPIPLEVESSGSIDNVKSKIQDKKGIPPDQQRVIFAGKQLENGRTLADFNIQKESTLPLVLRLRGGQ

SEQ ID NO: 362501 - protein, 66 aa, Zea mays
  Clone ID: MRT4577_93777C.1.pep
TPVHVNAREKFTNTELGVTGLRVQGSVTSRWGPFSQKFLVVVQQTFGVRDYLLYGVHWQEGLCPRR

SEQ ID NO: 362502 - protein, 89 aa, Zea mays
  Clone ID: MRT4577_93778C.1.pep
SPLHLVFRLKGGMQIFVKTLTGKTKTLEVESSDPIDNVKAKIQDKEGIPPDQQGLIFAGKQLEDGRPLAGYNIQKESPPPLGLRFRGGQ

SEQ ID NO: 362503 - protein, 57 aa, Zea mays
  unsure (1)..(57): unsure at all Xaa locations
  Clone ID: MRT4577_93779C.1.pep
IVNVKAKIQYKEGIPPDQQRXMFFPGEQLEDGRTLXADCNIQKESTLHLVLRLRGGQ

SEQ ID NO: 362504 - protein, 121 aa, Zea mays
  unsure (1)..(121): unsure at all Xaa locations
  Clone ID: MRT4577_9377C.1.pep
ATAGTWLASGAFYXYDAFMXASAGEPGLGATGDXAPLAQRKLAGFFGHTYYVTTGGWSSAPDGPEDWGYCRMKEQKADGPXYYGRQPMQLTVDNSGSTXHALKLNLVGEPDLVYRDRVVAL

SEQ ID NO: 362505 - protein, 168 aa, Zea mays
  unsure (1)..(168): unsure at all Xaa locations
  Clone ID: MRT4577_93780C.1.pep
PTRGDITPETTIKTFIEQFDTAMKLRSDREAYDDFRSFQQRPQVLSGLLFEEQFANVYTINMFQKFQDQLKQLMNVNCTEVSRNGSIVTYTVTVIGKERKFDYRVMYNSAEKEVWCICRSFQFKGILCSHALAVLKQELVMLIPPKYILDRXWLKDYKCPQEPIETPI

SEQ ID NO: 362506 - protein, 91 aa, Zea mays
  Clone ID: MRT4577_93781C.1.pep
MGNTKNGGYLFTPPGYKEMAIFHKANIFMNLALQPFNMGTGVGEMQNAMSVRMVFQRQSRAQQIRPYYYIIYNKLTDWMLQFPAGHIEMGY

SEQ ID NO: 362507 - protein, 78 aa, Zea mays
  Clone ID: MRT4577_93782C.1.pep
GIRIFVKTLTGKTITLEVESSDTIANVKAKIPDKEGIPPDQQGLIFAGKQLEDGRPLTDFNIPKESPPPPVLRLRGGQ

SEQ ID NO: 362508 - protein, 46 aa, Zea mays
  Clone ID: MRT4577_93783C.1.pep
LLDIKMGCLQNPPLRKLLPLLVIKPPNWAPHGPQRPVLPESRSFGC

SEQ ID NO: 362509 - protein, 84 aa, Zea mays
  unsure (1)..(84): unsure at all Xaa locations
  Clone ID: MRT4577_93784C.1.pep
APVVEAVVSPGDEEGSGGMRGAVYLLGDVSPPGRLGSTALVPPPPAAQGRESRARGSPRHLGGPPHTREGGAERARXVSALFET

SEQ ID NO: 362510 - protein, 125 aa, Zea mays
  Clone ID: MRT4577_93785C.1.pep
DSNGMACAHAVRQVPADRPVDHHSPVPDVRWIGHFRRRRDAGAELAHDGARGLVFVDEPRERPTSSSLRNYGRRRRARRGSGRRGRRASMYVSAGVGTPPPRPDSFTAIMRNSRPASRNPIALRS

SEQ ID NO: 362511 - protein, 69 aa, Zea mays
  unsure (1)..(69): unsure at all Xaa locations
  Clone ID: MRT4577_93786C.1.pep
KRVFFFLKKAIWKNPFEPFSLNEIENCCHCPENIXMFSKIIQEMVFKEKAFLKKGSWGFLXSVKVYLGE

SEQ ID NO: 362512 - protein, 131 aa, Zea mays
  Clone ID: MRT4577_93787C.1.pep
ACSLPSLVRLDVHRHCGNVAIARRRGSGSRLLPLLAFSLPFGLLTSPPASAAVGDVEEVVALLLPDPITHRAYSCTDRSRPPAIAPPPRLAPPGQCLGLGAGGRMRDASVGGNGDLGSCSFVRLSFHRFRR

SEQ ID NO: 362513 - protein, 265 aa, Zea mays
  unsure (1)..(265): unsure at all Xaa locations
  Clone ID: MRT4577_93788C.1.pep
NQLTHFVLTHPIKKNTESAGFFWCPFLVKLETKDERIKLRXLCCSGLDDLIFNTGHWAHRQTQAVCTLAPKCQVSLATAHSXSSVGSWGHLEWDGKVAQTAGEKTFDGALMSWARWIDSRLQXNQVSHLNKCTFRTIIIEKTHPTKLSLTTSLLVVLCSANWCYNQIVSIXKRTIAPSFPISLVIIIEKNIERTETTTIHMNIXLYKLRINAHPSIYRVTQXGKPLTKSSXQPPLTYCDCSHWCLXGLPGTWNVLLFNFLIRPQE

SEQ ID NO: 362514 - protein, 158 aa, Zea mays
  unsure (1)..(158): unsure at all Xaa locations
  Clone ID: MRT4577_93789C.1.pep
VKVGLQSPPPLGYTRRPTARCGNVAIGKASWSHGSRRNSAAAAGSSPXPRLLATIWPLKLAACLRRRGRRGGGGGLAAPRSHHAPANTPRAAPTVARIGPDRPPLLRLHASLPRASAWVRVAACATPRWAGTGTSAAVASFVFPSTASDASVVWLHTR

SEQ ID NO: 362515 - protein, 165 aa, Zea mays
  Clone ID: MRT4577_9378C.1.pep
MTSVSARPVGVGYCFGGARCQPRSRVRVSAAASAVTAPAPAMAATMYELLAVEETAGPDEIKAAYRRAARRWHPDACPGGADRFMAAREAYEVLSDPERRRGYDIQLRCGAHFGDAGYRAARRAGFADWEAQLTGLQWRAAGRRGRAGGETWGSRMRQAAAQPSL

SEQ ID NO: 362516 - protein, 53 aa, Zea mays
  Clone ID: MRT4577_93790C.1.pep
AEDNNVRRVGPARRIYKRRKHRMRSSLDRCFSCTSSGFSSIGNGDHGLNACLA

SEQ ID NO: 362517 - protein, 110 aa, Zea mays
  unsure (1)..(110): unsure at all Xaa locations
  Clone ID: MRT4577_93791C.1.pep
SGSEQPKERAKRGSTLEAEGRSINTAAPTGLRTVHWAVRASRLTDWTPLSGRHGINVSYPPHTARGACXKKKRLVCCVTLRSERMFGQPAAMAMXXECCLAWXXXXTLAR

SEQ ID NO: 362518 - protein, 81 aa, Zea mays
  Clone ID: MRT4577_93792C.1.pep
HGLEPVAPAVCASPSIVVDDCREVSVLAKSQLFEGRRYRRRVTRRYRLDGESGRLGGLERWRMRFGFLRLPLRSTIDVRRS

SEQ ID NO: 362519 - protein, 45 aa, Zea mays
  Clone ID: MRT4577_93793C.1.pep
VHSFFFFGPNTKYKRAWIQLKKTTPPLFIPWYTCALYLSFCIDCQ

SEQ ID NO: 362520 - protein, 105 aa, Zea mays
  Clone ID: MRT4577_93794C.1.pep
ILGRTITKSIHHANQGQHKHSAESTAEIRKRFGLKMNKIQVRIHYVKTNATKGGNFLNTCYTTKHETTYRTSFFLSFSFMIFFWVGCGGAQLRLCSFIRLYPHQL

SEQ ID NO: 362521 - protein, 88 aa, Zea mays
  Clone ID: MRT4577_93795C.1.pep
PGRTSINQFCISQRETVHLFMSTFHTAGPVIIDFITCRQRRIVIDAHMTLYAYPEVKLREYQPRSRRDVVSFPHRVRIVCSSLAPPLE

SEQ ID NO: 362522 - protein, 66 aa, Zea mays
  unsure (1)..(66): unsure at all Xaa locations
  Clone ID: MRT4577_93796C.1.pep
AHIYSFFXASSLFAPYVYSGAAFIYYSLKNFLHITLSFQTHLKLVYLTLCAALAYYFCRRLPSHIL

SEQ ID NO: 362523 - protein, 48 aa, Zea mays
  unsure (1)..(48): unsure at all Xaa locations
  Clone ID: MRT4577_93797C.1.pep
IPCIDDIYSSNNRITXRSLSCPSGTNIHPSKACHELEGHPLGLLXQLA

SEQ ID NO: 362524 - protein, 146 aa, Zea mays; identical to SEQ ID NO: 309754
  Clone ID: MRT4577_93798C.1.pep

SEQ ID NO: 362525 - protein, 92 aa, Zea mays
  Clone ID: MRT4577_93799C.1.pep
KIPVWNGSSRSLLKIRSWSCAKRALSCIIYPPMEELILASTYSYITGMGLMNHEEYPFVWPVLHPNRTNHPFDLNEQSKTRGTSDEEMSWWS

SEQ ID NO: 362526 - protein, 41 aa, Zea mays
  Clone ID: MRT4577_9379C.1.pep
RHVRAFAPRRARAIASACLKNATRRAASKLHKKRSECRTSG

SEQ ID NO: 362527 - protein, 78 aa, Zea mays
  Clone ID: MRT4577_937C.1.pep
MKLGTNHPMGPLQLADFIGLDVCLSVLRVLHSGLGDNKYSPCPLLVQYVDAGRLGKKRGVGVYSYGQKSSSVRPKSSM

SEQ ID NO: 362528 - protein, 43 aa, Zea mays
  unsure (1)..(43): unsure at all Xaa locations
  Clone ID: MRT4577_93800C.1.pep
GIPLDQQRLIFAGKQLXDGRTLADYNILKGGALHLVLRLRGGQ

SEQ ID NO: 362529 - protein, 130 aa, Zea mays
  unsure (1)..(130): unsure at all Xaa locations
  Clone ID: MRT4577_93801C.1.pep
ELSSXIYNYIEGILQPKKMLIILENLQLLKDLVSELSLIRRGPCLNLLGGDSIVVVGPFPLSSSIASCFMFPSLIPSFSASVISILAGLYKLWRRTQCTRSEDARPLVSGVAVALAGARPFERTPLWGQR

SEQ ID NO: 362530 - protein, 62 aa, Zea mays
  unsure (1)..(62): unsure at all Xaa locations
  Clone ID: MRT4577_93802C.1.pep
GVESSSTIDNVKPKIQVMXGIPPASKGLIFAGKHLEDGRTLPDYNIQKESPLPLVLRLRGGQ

SEQ ID NO: 362531 - protein, 48 aa, Zea mays
  Clone ID: MRT4577_93803C.1.pep
LPPNSELISVRYKVRGTDLYEPQRGIDGLTRSRGCRDVLRDMGHRGRL

SEQ ID NO: 362532 - protein, 87 aa, Zea mays
  Clone ID: MRT4577_93804C.1.pep
LPLVLRLKGGIQIFVNTLTGKPITLEVESSDTIDNVKGKIQDKEGIPPDQQGLIFAGKQLEDGRPLADYNIQKESPPPLVLRPRGGQ

SEQ ID NO: 362533 - protein, 145 aa, Zea mays
  unsure (1)..(145): unsure at all Xaa locations
  Clone ID: MRT4577_93805C.1.pep
FGTRITLEXESSYTIDNVKAKIQDKEGIPPDQQRLIFSGKQLEDGRTLAGFNIQKESPLPLVFRLRGGMQIFVKTLTGKTITLEVESSDPLANVKAKIQDKEGIPPDQQRLIFAGKQLEDGRPLADFNIQKESPLPLVLRFRGGQ

SEQ ID NO: 362534 - protein, 30 aa, Zea mays
  Clone ID: MRT4577_93806C.1.pep
KQLEDGRTLSGYNIQKESTLHHVLRLRGGQ

SEQ ID NO: 362535 - protein, 42 aa, Zea mays
  Clone ID: MRT4577_93807C.1.pep
IPPDQQRLIFADKQLEDGRTLAGSNIQKESTLHLVLRLRGGQ

SEQ ID NO: 362536 - protein, 225 aa, Zea mays
  unsure (1)..(225): unsure at all Xaa locations
  Clone ID: MRT4577_93808C.1.pep
PRRPTRXGMPXPDQQRLXIFAGXAXLRDGRTXLADYXXIRRESTLHXLVLRLRXGGMQIFXXKTLTGKTITLEVESSDTIDNVKAKIQDKEGIPPEAQRLIFAGKQLEDGRTLADYNIQKESTLHLVLRLRGGMQIFVKTLTGKTITFEVESSDTIDNVKAKIQDKEGIPPDQQRLIFAGKQLEDGRTLADYNIQKESTLHLVLRLRGGMQIFVKTLTGKTITLE

SEQ ID NO: 362537 - protein, 81 aa, Zea mays
  unsure (1)..(81): unsure at all Xaa locations
  Clone ID: MRT4577_93809C.1.pep
LRGGMQIFXKPLTGKTIPLEVDSSAAIHNVKAKIQGKEGIPPDQQRMIFAGKHLEDGRTLADSNIQKESTLHLVLRLRGGQ

SEQ ID NO: 362538 - protein, 48 aa, Zea mays
  Clone ID: MRT4577_9380C.1.pep
PINKTLVVHLLGCVRIVPLRLWSSPWNFYVACLGLGPLGVCKFRVPFL

SEQ ID NO: 362539 - protein, 250 aa, Zea mays
  unsure (1)..(250): unsure at all Xaa locations
  Clone ID: MRT4577_93810C.1.pep
MKIFVKILSGKTITLEVESSDTIDNVMARXITDTGGAXPADQARRPHAFACQNMVARQVAPSCTDYTQSQRERSXRPPLGSVLRARHXRSLVITSVRXTTITLEVESXSDTIDNVKGXIQDKEAIPPDQDGFIFAAKQLEDGRTLGDYNIQKESTLHLVLRLRRGMQIFMKTLTGKTITLEVESSDTIDNVKAKIQDXEGIPPDQQRLIFAGKQLEDGRTLADYNIQKESTLHLVLRPQGGMQIFVKTLT

SEQ ID NO: 362540 - protein, 45 aa, Zea mays
  Clone ID: MRT4577_93811C.1.pep
KEGIPPHQQRLIFAGKQLEYGRPLAHFNIQKESTLHLVLRLRGGQ

SEQ ID NO: 362541 - protein, 124 aa, Zea mays
  unsure (1)..(124): unsure at all Xaa locations
  Clone ID: MRT4577_93812C.1.pep
MPINRMAQGSHQKVYLLDALKAAFAEFISSLIFVFXASQRSVMVFXQLTVGVPTTTAGLIASGVTHAYLLFVAASQTATIFVGHGNPFASFGALTAPDCCLIPRLVYCLTQXLLRARVACVLLG

SEQ ID NO: 362542 - protein, 75 aa, Zea mays
  Clone ID: MRT4577_93813C.1.pep
QTGEHPKTGAITLTAHRAQERRDTTRHFGTMDSHDRGLPHSLREEALSIAELELPDLVGSAERIKALGSPTGELP

SEQ ID NO: 362543 - protein, 116 aa, Zea mays
  Clone ID: MRT4577_93814C.1.pep
RPRGRRGLPNWLENDPLCPKICLPPPIKRRVFFFFFRRAGPENLAPPLSPLIGGGGGDWGPPIQKSKGGKFFPVCEGGDNFFERSKSEAASHVTNRVSLAKRGSFPVKSEKKKGCL

SEQ ID NO: 362544 - protein, 63 aa, Zea mays
  unsure (1)..(63): unsure at all Xaa locations
  Clone ID: MRT4577_93815C.1.pep
GIKPVTFELGGRSALIIFTDCDMNNAVKWALMAXFLTQGQVCWNGTRVFVQNEILDRXTEEVV

SEQ ID NO: 362545 - protein, 67 aa, Zea mays
  unsure (1)..(67): unsure at all Xaa locations
  Clone ID: MRT4577_93816C.1.pep
RLKKPPSGLQGCPQAAKNKIKAAVKKMHTTQAKKGATWTRQDGPKEAXVKLTPHYDALEGAGQMGII

SEQ ID NO: 362546 - protein, 186 aa, Zea mays
  Clone ID: MRT4577_93817C.1.pep
MGQAYPRLVLLALVALLSAGLFPQALGNGKGKVHGGGAVNPLVAGICSRAPFPEVCTATAGRHASKYPVIDNLAVLNMQVAAFAKRTAQARKHVAVAARTIPPPQAQALRTCDTMYMNTQDAIGAAQRAIAFKDTGTAKIMLQLAVQDFDSCDRPFTHAGVPNPMGKFDKELSQMANNCMTLANMI

SEQ ID NO: 362547 - protein, 126 aa, Zea mays
  Clone ID: MRT4577_93818C.1.pep
SRYRRRIPCRVGDETINDAMHSRETWKLVPSCRLLRIARQRGAGLTTSLVSAHCGPGVHEGYVSHQHDDAVMVLLTLVLWSTPVISTTALTPIYVVHTRYNLLVGGATPEMKPKLRRQPRTNTMGD

SEQ ID NO: 362548 - protein, 92 aa, Zea mays
  Clone ID: MRT4577_93819C.1.pep
RITAQNPRDGPTLNPLLPRMGWSASPSSCALRETPSRLRLLPVSADRFTRLDMKTTPTTGDYHIRRVCQVRGGELQGVQRGHGLRGAPAQSL

SEQ ID NO: 362549 - protein, 61 aa, Zea mays
  Clone ID: MRT4577_9381C.1.pep
FEPHGRFQENAAFSGSVGDPSNAGFSSPLKKKGSDPLGFLDVDGGAPPQNKRRGLNLAEAP

SEQ ID NO: 362550 - protein, 158 aa, Zea mays
  unsure (1)..(158): unsure at all Xaa locations
  Clone ID: MRT4577_93820C.1.pep
MSWSMISHXRVDCWCQGVFYTYYALVRAGLTCPDSCTTGDWQTRRRELACFFGHTCHETKGGWATGPDGPLDWGYCLVREQNLTDPPYXGRGPLLLXLITTDTGWPAKQLAPDTLLARPVTLTXETAWYXLKTPSCXWMTSLLPKPLFHAVMTCYWRP

SEQ ID NO: 362551 - protein, 82 aa, Zea mays
  Clone ID: MRT4577_93821C.1.pep
VANNTYAVSPKGNCLLVNNNILKGIAEPWSKAACKAQKLSPRRPHHPRHPPPLRPLLPRSCAPLASAARSRRPAPPQPAPSS

SEQ ID NO: 362552 - protein, 44 aa, Zea mays
  Clone ID: MRT4577_93822C.1.pep
TPLYSAYSQHSSFTSILKIEIQPLIFHQLFIVESETDHFKEANA

SEQ ID NO: 362553 - protein, 56 aa, Zea mays
  Clone ID: MRT4577_93823C.1.pep
STLFMSYWHAAVNMSLPEDYTCNSVGIMSVVCITSLSQYYAGNKMKTRDHNVSLHR

SEQ ID NO: 362554 - protein, 77 aa, Zea mays
  Clone ID: MRT4577_93824C.1.pep
VRTPRVLSHKALIRHATACPCCIKTGLNQTAVVSDSPLNEEAYSGNHIPGGLVTSCLRVLKAVSYSHVQIKCTPFVP

SEQ ID NO: 362555 - protein, 88 aa, Zea mays
  Clone ID: MRT4577_93825C.1.pep
SWAEPSIKSLAREAHRKHPTHSGKGGKRCKSIQSHHRQRVIMMVAVVHEPAKVRGGVACHPVQPAEAQRLDGAPHQQDVGLLAALEPN

SEQ ID NO: 362556 - protein, 88 aa, Zea mays
  Clone ID: MRT4577_93826C.1.pep
DDHDFIFWFLNLYSHSNCPFAYLYHSVILSAIQLCTELSKASKDALEYLRKVRASISYHKAQTNISIMFSSIGLCKPVYVYFLMQSNS

SEQ ID NO: 362557 - protein, 63 aa, Zea mays
  Clone ID: MRT4577_93827C.1.pep
IYDSTSIFLKKLVVHHHNTRRGGPPLFLVIKILQSQLKKTVPSLIRHPRAFNGPPLKIGWGAK

SEQ ID NO: 362558 - protein, 114 aa, Zea mays
  Clone ID: MRT4577_93828C.1.pep
RCQGVIPQVRPQKKGRDLGGFQGPPFNGGWILGAFGLGNFFFLAVGTGPFFPKFKGFLDPKGGLGFRGPFKILRKGVDWGQKGAGFPKPLFPGIFLYFGGWIMEGGGDLNDFAF

SEQ ID NO: 362559 - protein, 52 aa, Zea mays
  unsure (1)..(52): unsure at all Xaa locations
  Clone ID: MRT4577_93829C.1.pep
RELCPAPFPVAARDGISITALREAMHGGVAVCXRRPVQSCTPGTGGQIFESG

SEQ ID NO: 362560 - protein, 153 aa, Zea mays
  Clone ID: MRT4577_9382C.1.pep
PWLAGWLTSRSRALILHYCAYRCRLPYLRMQSAHGRRLFERRRHSETGPTRALDPPVARVDTKEPTTTSRLGHDHRRKSIHITRRLGLRNLIPVEAHRTLDTLRQTGCRGTDRTAPRRISAMQETEHLDLSGTEDQRHRLTPVRPTRFGTPSG

SEQ ID NO: 362561 - protein, 116 aa, Zea mays
  Clone ID: MRT4577_93830C.1.pep
MGAASRRAAPAPAWRSSCLALCLLPVALPLLLLCLPLLCVVVAFARFRRRRRRLLVTAAKSRSCCPGERSLHEAEGHRAALLHKYLEDQMELVAGDAVAVDPTPSSQRSHPHQKQQ

SEQ ID NO: 362562 - protein, 96 aa, Zea mays
  Clone ID: MRT4577_93831C.1.pep
HYISLSFFCFPMHTILSLNSFSSLHTLTSVVKDAMQLSMELEMPQYHISRNDRGPDDQEVSGHESRADNKINNVVASRKHRLLMSPVSNKKHSGRP

SEQ ID NO: 362563 - protein, 66 aa, Zea mays
  Clone ID: MRT4577_93832C.1.pep
KKKKKKKKKKKKKKKKKKKKKKKKKKKKKKKKKKKKKKGRAGFKRNHKLHVPRASQRNNLFFIGPP

SEQ ID NO: 362564 - protein, 123 aa, Zea mays
  Clone ID: MRT4577_93833C.1.pep
FSPTLDVFSAPRRRSRPASNSSRFRLRRGPSSLLFLFFFEDGSASLASRLGCMGRGVVAGAGVAGGSSVEAFRRNGLSAEKRERMDAAGESPLAASEAGSLCFFAIGGCGSPDAAAARGGGAR

SEQ ID NO: 362565 - protein, 43 aa, Zea mays
  unsure (1)..(43): unsure at all Xaa locations
  Clone ID: MRT4577_93834C.1.pep
GIPRHKKRMILAGKQLENGRTLXEYNFQKESTLHLVLRLRGGQ

SEQ ID NO: 362566 - protein, 214 aa, Zea mays
  unsure (1)..(214): unsure at all Xaa locations
  Clone ID: MRT4577_93835C.1.pep
SARVRPSSSCLPAKIQDKEGIPPDQQRLIFAGKQLEDGRTLADYXIQKESTLHLVLRLRGGMQIFVKTLTGKTITLEVESSDTIDNVKAKIQDKEGIPPDQQRLIFAGKQLEDGRTLADYNIQKESTLHLVLRLRGGMQIFVKTLTGKTITLEVESSDTIDNVKAKIQDKEGIPPDQQRLIFAGKQLEDGRTLADYNIQKESTLHLVLRLRGGQ

SEQ ID NO: 362567 - protein, 103 aa, Zea mays
  unsure (1)..(103): unsure at all Xaa locations
  Clone ID: MRT4577_93836C.1.pep
PDPVSVYPAGLCGPRILPSPPRFFDLPPRPKCAPLCPVSLLSPLSMPKVRVARWVFHVARFRCSHVNCGPLCAHFALSILAGLVXLWXTTHKQYVPPLSXGTI

SEQ ID NO: 362568 - protein, 533 aa, Zea mays; identical to SEQ ID NO: 246026
  Clone ID: MRT4577_93837C.1.pep

SEQ ID NO: 362569 - protein, 533 aa, Zea mays; identical to SEQ ID NO: 246026
  Clone ID: MRT4577_93838C.1.pep

SEQ ID NO: 362570 - protein, 124 aa, Zea mays
  Clone ID: MRT4577_93839C.1.pep
FVGGYPPFFFSPFFLAFPTTVGFLGSLLKPPGLLKTFFPKIRFSPPFFPNNFSPLFSQKFPFCGLFCFPLFSPPLNQHSFFFFPPFLGPPFQWLFAFFPRKFVFCFSRPSPLLTFFLWTPAPCH

SEQ ID NO: 362571 - protein, 98 aa, Zea mays
  unsure (1)..(98): unsure at all Xaa locations
  Clone ID: MRT4577_9383C.1.pep
QIPTGXGAAIMREGPNLLXRASKEQXIAVGTRVRSKGKIAHQFNRVFPKGKVQYPHPKNGVAQNKVNPARQGDGQNLHKIVKNDNPIAGGFPRQATYD

SEQ ID NO: 362572 - protein, 533 aa, Zea mays; identical to SEQ ID NO: 246026
  Clone ID: MRT4577_93840C.1.pep

SEQ ID NO: 362573 - protein, 163 aa, Zea mays
  Clone ID: MRT4577_93841C.1.pep
PPILVQLVSPRLGGSPPPLSPRCLPRACLWCRCPLPVLPPPRCFLEILLWAPFSFANPGGSPCSPSKFVRNGFPCPSSKAQAGGFVCSNPPLVPNFSFKPLVGASLTPSPSPCPLWAHFPRFHPPLAFPESPPLPGGLGVRPPNPCSPSVFPLFYRGLKKKCV

SEQ ID NO: 362574 - protein, 558 aa, Zea mays
  Clone ID: MRT4577_93842C.1.pep
HRGRCIAHTQHLISSSLALLHLRFKMQIFVKTLTGKTITLEVESSDTIDNVKAKIQDKEGIPPDQQRLIFAGKQLEDGRTLADYNIQKESTLHLVLRLRGGMQIFVKTLTGKTITLEVESSDTIDNVKAKIQDKEGIPPDQQRLIFAGKQLEDGRTLADYNIQKESTLHLVLRLRGGMQIFVKTLTGKTITLEVESSDTIDNVKAKIQDKEGIPPDQQRLIFAGKQLEDGRTLADYNIQKESTLHLVLRLRGGMQIFVKTLTGKTITLEVESSDTIDNVKAKIQDKEGIPPDQQRLIFAGKQLEDGRTLADYNIQKESTLHLVLRLRGGMQIFVKTLTGKTITLEVESSDTIDNVKAKIQDKEGIPPDQQRLIFAGKQLEDGRTLADYNIQKESTLHLVLRLRGGMQIFVKTLTGKTITLEVESSDTIDNVKAKIQDKEGIPPDQQRLIFAGKQLEDGRTLADYNIQKESTLHLVLRLRGGMQIFVKTLTGKTITLEVESSDTIDNVKAKIQDKEGIPPDQQRLIFAGKQLEDGRTLADYNIQKESTLHLVLRLRGGQ

SEQ ID NO: 362575 - protein, 60 aa, Zea mays
  Clone ID: MRT4577_93843C.1.pep
MPLYCTLQLEKKEKKSFVHKQKKKKKKKKKKKKKKKKKKKKKKKKKKKKKKKKKKGGGPF

SEQ ID NO: 362576 - protein, 75 aa, Zea mays
  Clone ID: MRT4577_93844C.1.pep
ATEPMRVLVTGAAGQIGYAPVPKIARGVMPGAGQPVTLHMLDTPRAAEAPNGVKMELVDAAIPRLNGVVATTEVV

SEQ ID NO: 362577 - protein, 229 aa, Zea mays
  Clone ID: MRT4577_93845C.1.pep
MGSAASAASDAAPPPPSPAQPHGAPPPYGAGLAGILPQKPDGDDKKEEKVDYLNLPCPVPYEEIQREALMSLKPELFEGLRFDFTKMLTQKFALSHSVLMGSLEVPSQSADVIKVPTSQYEFGANFLDPKLMLIGRLMTDGRLNARVKCDLTENLALKINAQLTSEPHYSQGMFNFDYKGTDYRAQFQIGNNAFYGANYIQSVTPNLSMGTEIFWLGQQRKSGIGFNSR

SEQ ID NO: 362578 - protein, 214 aa, Zea mays
  Clone ID: MRT4577_93846C.1.pep
DIATFTRKKQNHKYGSYVKADKVELHAPDNHGWVLYKATVSSSAGHTLTGINIVCTLKFTGEISPESEDVDGTSLYQASLGHLSIRNTDKNTEFPPAESWITEGDYISWSKCSNGSELVNLKISWKLKNPDQPQPPFSKYNIYVEKLTADSDLKVPSPKSYLGVASVDAFYVSGLEVSNEVTGLKFFIQAFAHDGSWQELEECPKFFLFPVHSE

SEQ ID NO: 362579 - protein, 329 aa, Zea mays
  Clone ID: MRT4577_93847C.1.pep
SRPAPTGLRPVPPPASPKGSTAEPPLAFPAARPDRTAGEAAAPPDLASASPPRPDQRPPSEDAGRRLRIPERALGISYQDTITNFRLWKIFPSVFAFQSTPELMFGLYLLYYFRVFERQIGSNKYSVFCLFTITASSLLEILSLVILKDTNYISTLASGPYGLIFASFVPFFLDIPITSRFRIFGLNFSDKSFIYLAGFQLLLSSWKRSLIPGIFGLVAGSLYRLNVLGIRKMKLPQVISSFFARYFAPSPGSTSRPSRSLVGNTPSHRGRAVQNQPSTGFAPIMEPPESSVAMLVSMGFDGNNARQALVRARNDINVATNILLEAQSH

SEQ ID NO: 362580 - protein, 168 aa, Zea mays
  unsure (1)..(168): unsure at all Xaa locations
  Clone ID: MRT4577_93848C.1.pep
MAAQVVVAGGGGSWPQQWRLTLVLAALVPLLSLCLLLARTTRRARSWSSSSKGGRLDVHRLPPGPPRLPLLGNLHQLGSLPHRSLRELARRHGPVMLLRLGSVPTLVXVSSXXXXXXXXXARDADCCXRPDTPGARRLSYGHKDVAFAPYNDYWSQMRNLFVDKLLGA

SEQ ID NO: 362581 - protein, 292 aa, Zea mays
  unsure (1)..(292): unsure at all Xaa locations
  Clone ID: MRT4577_93849C.1.pep
MQGGVSGFQNAPVTRAVVVASGLLSVVFSAQRRARALGISYQDTITNFRLWKIFPSVFAFQSTPELMFGLYLLYYFRVFERQIGSNKYSVFXLFTITASSLLEILSLVILKDTNYISTLASGPYGLIFASFVPFFLDIPITSRFRIFGLNFSDKSFIYLAGFQLLLSSWKRSLIPGIFGLVAGSLYRLNVLGIRKMKLPQVISSFFARYFAPSPGSTSRPSRSLVGNTPSHRGRAVQNQPSTGFAPIVEPPESSVAMLVSMGFDGNNARQALVRARNDINVATNILLEAQSH

SEQ ID NO: 362582 - protein, 171 aa, Zea mays
  Clone ID: MRT4577_9384C.1.pep
ETQLEELGNGLYSSGKPFIWVVRSNEEHKLSDELRDKCKERGLVVSWCPQLEVLAHKATGCFYTHCGWNSTLEAIVNGVPMVAVPHWADQPTISKYMESVWGLGVKVRKDEKGLVTRDEVARCIKDVMDGDRKDEYRMNANVWMKKAKEAAQYGGSSDKNIAEFVAKYSSS

SEQ ID NO: 362583 - protein, 48 aa, Zea mays
  Clone ID: MRT4577_93850C.1.pep
KRIIFYLDLKALLLQTGRTRIYKTRCTKFKTYIARTPILYVHTNKSYR

SEQ ID NO: 362584 - protein, 90 aa, Zea mays
  Clone ID: MRT4577_93851C.1.pep
KKIGKHSSGVPGAWVGDPKCVYFHQKCVRVRVGQNILLVAAPANYCSSVDNELQPLNEWAYVMVWDFKDRFFFFSKPLLPGVRGVPRPDQ

SEQ ID NO: 362585 - protein, 139 aa, Zea mays
  unsure (1)..(139): unsure at all Xaa locations
  Clone ID: MRT4577_93852C.1.pep
GVGISASPDPRARTQPRLRKMVSASPDPXARTRPRLRKTVSASPDPRARTRPRXRTTVSASPDPRARTQPRPRTTISASPNPRARTQPRLRKTVSASPDPRARTRPRLRKTXLRLARPPGSDSASTSEEPPPRPTLGSD

SEQ ID NO: 362586 - protein, 263 aa, Zea mays
  Clone ID: MRT4577_93853C.1.pep
MSTPYHGIPLRALLLAVPLISIFIVFHLLYRPAPLPSTFRTYADGAASHRAEELSCPPLSSNLPPPAPKPEETLEPTSLRHVVFGIASSRRTLPLRLPLLRLWLRAPARAFLFLDAPAPAPDARDLPPGLALRVSADASRFPYTHPRGLSSAVRVARIAGELVSGLKQGEGEDVRWLVLADDDTAFVLPNLLHTLRRYDHREHWYLGARSESAAQNAWHAFAMAYGGGGIAVRWPLARRLARVVDSCVLRYPHLYGSDARIYA

SEQ ID NO: 362587 - protein, 74 aa, Zea mays
  unsure (1)..(74): unsure at all Xaa locations
  Clone ID: MRT4577_93854C.1.pep
IGRGKQENVSNDAHDAGXLACWMYMTRSAGKDAFHLQGLVQSLRFHRLQGHAXCAGVDXLQSGMMGAFGKPQGI

SEQ ID NO: 362588 - protein, 145 aa, Zea mays
  unsure (1)..(145): unsure at all Xaa locations
  Clone ID: MRT4577_93855C.1.pep
SASAFLLLHFALCPLLFQSQLQPCSKENSHXINIVXVCGHAYFDNATIPGQLNYQLGLIDXPVIEXRFXKEADKMNKRHYNHTRQSXTIKAERNTSITIDIAVWNVDTTRHYWTRIHANVHRXLINNMITGXSPCDCAAPTMGST

SEQ ID NO: 362589 - protein, 201 aa, Zea mays
  Clone ID: MRT4577_93856C.1.pep
MGSEADCDRIRGPWSPEEDDALRRLVERHGARNWTAIGREIPGRSGKSCRLRWCNQLSPQVERRPFTPEEDAAILAAHARLGNRWAAIARLLPGRTDNAVKNHDSARSHFQELSPSSSPSPQSTPPAFPPQAAPSQSSYAFSGELVAAMQEMIRAEVRKYMSGAGLRAGCGPGAVGEVCMPQLVEGVMRAAAERVGVVTRP

SEQ ID NO: 362590 - protein, 177 aa, Zea mays
  Clone ID: MRT4577_93857C.1.pep
RGRGAPRRTRRCGGSWSAGGFDAISCTADVRPPPPPPAAAAEDYEDPLTSLSLSLPGLDHQSASSGFHHDSARSHFQELSPSRSPSPQSTPPPAALLSPPAAAAPSQSSSSSSSYPFSGELVAAMQEMIRAEVRKYMSGAGLRAGCGPGAVGEAGMPQLVEGVMRAAAERVGVVTRP

SEQ ID NO: 362591 - protein, 304 aa, Zea mays
  Clone ID: MRT4577_93859C.1.pep
MGVESECDRIKGPWSPEEDEALRRLVERHGARNWTAIGRGIPGRSGKSCRLRWCNQLSPQVERRPFTPEEDAAILAAHARLGNRWAAIARLLPGRTDNAVKNHWNSSLKRKLATATATSSGSDAERACKRASPGPGSPTASDRSDLSHGCGAAQVFRPVPRAGGFDAISAADVRPPPPPAVADEDPLTSLSLSLPGLDQSPSGFHHDSARSHFQELSPSSSPSPQSTPPAFPPQAAPSQSSYAFSGELVAAMQEMIRAEVRKYMSGAGLRAGCGPGAVGEVCMPQLVEGVMRAAAERVGVVTRP

SEQ ID NO: 362592 - protein, 174 aa, Zea mays
  unsure (1)..(174): unsure at all Xaa locations
  Clone ID: MRT4577_9385C.1.pep
TXXKEKXHXNXXXMGHXDXGKXTTTGHXXXKXGGXDKXXRERXEKEAXEINKRAXKXAXXXDKRKAEXERAXTXEXXXXKXETTKXHSTKKEAXGHXDXXKNXXXXTXQXDGXXXXXDXTXXXXEXXXXKXGQTXEXXXXAXTXGXKQXKSXXNKXXATXPKXXKAXXEEXXKE

SEQ ID NO: 362593 - protein, 117 aa, Zea mays
  unsure (1)..(117): unsure at all Xaa locations
  Clone ID: MRT4577_93860C.1.pep
KFRLPFELNGYLREQLIQTFLFFDRLTGEKFFSGQFDLMAPEFFRFEHFWATTDRFGLNSAVGRLLDYVRKLMGFSSLGQPPLFFFVALFVFWVPRCFFFFLXGGWFFLFFFFFFFK

SEQ ID NO: 362594 - protein, 80 aa, Zea mays
  unsure (1)..(80): unsure at all Xaa locations
  Clone ID: MRT4577_93861C.1.pep
PRPPGXPPPCGPPRRRRPRRPLGRSAPAGGGEHREAPQPEQAKPYPSGEERGLSDDAGCYLHRSHRRARRRGAAPPSLPF

SEQ ID NO: 362595 - protein, 71 aa, Zea mays
  Clone ID: MRT4577_93862C.1.pep
KTPPFLVFGGSQSRYIFFGPRPPWGGSKRGKLFPGAQKKKKKKKKKKKKKKKKKKKKKKKKKKNSREGRVY

SEQ ID NO: 362596 - protein, 32 aa, Zea mays
  Clone ID: MRT4577_93863C.1.pep
FFIHYQVVDVLSVDQDAVLCINYKKNTPFAFT

SEQ ID NO: 362597 - protein, 125 aa, Zea mays
  Clone ID: MRT4577_93864C.1.pep
RKHRKQILQGPKQLATTQESQLRQTDPGLQDTRGFYRRGGRKKWVQITEKKGAEHWPAPKSDNSPRGGGGTPGTGTQGGFLETIFEPKPGKEEKTSGLFNHPKKQLRPGFLGRKGRPGILGFPGG

SEQ ID NO: 362598 - protein, 93 aa, Zea mays
  Clone ID: MRT4577_93865C.1.pep
FTLKHDNRTGRWLSTFKAIWSWNDSNLFVGSMKRAIDVISVDRRQKSISASYMAFLESEHMTAIPCRFTLHPCKVGHLAGASSSGKVFLWTRA

SEQ ID NO: 362599 - protein, 95 aa, Zea mays
  Clone ID: MRT4577_93866C.1.pep
AWHGLPKQPRRPAYLKFQNILRALRPQCVESVALQDIARVGSSYREVNFPASHLLDGHITPFPLYPSQAHDLDDSIAQAVRTQSCTGYAPFRHSS

SEQ ID NO: 362600 - protein, 73 aa, Zea mays
  unsure (1)..(73): unsure at all Xaa locations
  Clone ID: MRT4577_93867C.1.pep
MRVYSPTMTPPPSLAGSPTRSAMPSHKTLRIXKKLAKQMRHNRPIPFWIRMRRDNTFRYNAKRGHWRCTKLGF

SEQ ID NO: 362601 - protein, 471 aa, Zea mays
  unsure (1)..(471): unsure at all Xaa locations
  Clone ID: MRT4577_93868C.1.pep
MDIDASASVMCQLLSPEGDPLGSALYLPQNVGPPQLQEIVNQLLHNEEKLPYAFYVGDEELSVHLGAYMRQKNANVEVTLRIVCQPQALFRIRPVNRCSATIAGHTEAVIAVSFSPDGKSLASGSGDTTVRFWDLSTQTPLFTCKGHKNWVLCIAWSPDGKHLVSGSKSGELILWXPKTGNQLGTPLMGHRKWITAVSWEPVHLQSPCRRFVSASKDGDARIWDITTRKCVISLTGHTSSVTCVKWGGDGLIYTGSQDCLIKVWETSQGKLVKTLKGHGHWVNSLALSTEYVLRTGAYDHTGKTFSTAEEMKEAALARYKKMRGNAPERLVSGSDDFTMFLWEPTISKQPKARMTGHQKLVNHVYFSPDGQWLASASFDKSVKLWNGITGKFVAAFRGHVADVYQISWSADSRLLLSGSKDSTLKIWDIRTHKLKMDLPGHADEVYTVDWSPDGEKVASGGKDRVLKLWMN

SEQ ID NO: 362602 - protein, 248 aa, Zea mays
  unsure (1)..(248): unsure at all Xaa locations
  Clone ID: MRT4577_93869C.1.pep
MARLPTSSGMAALLLLVAFVVLPSAALSSSSSLLHSPPESDETSGGSEQQAPPEDENKEKERQLAKEKAYAAEKVVQQEMLKYAKEKGLVSPTNGTGWYRGIAREFVDAHNELRALYGVPPMKWDNQLARQARRWSXQCARPAGELVHSGHKYGESLFRSHDDWNATAKEAVFWWGKEESIYDRDTEQCTGGRAYKECGHFALMVGKRSTKVGCARAECFKGGVFITCNYYATDLKKKNKKKKKSTTN

SEQ ID NO: 362603 - protein, 51 aa, Zea mays
  Clone ID: MRT4577_9386C.1.pep
SLRAGGRVGGRGGRRVGKDHRRAGADTFCCTRTLTALVPAPEDCVRVGLKR

SEQ ID NO: 362604 - protein, 42 aa, Zea mays
  Clone ID: MRT4577_93870C.1.pep
RNYLDSLIFIVPFSHKSPGKSAITSISNLLKKKKQKKKIAAA

SEQ ID NO: 362605 - protein, 201 aa, Zea mays
  unsure (1)..(201): unsure at all Xaa locations
  Clone ID: MRT4577_93871C.1.pep
MSRYRGPRLKKIRRLGALPGLTRKTPKSGSNQKKKFHSGKKEQYRIRLQEKQKLRFHYGLTERQLLRYVHIAGKAKRSTGQVLLQLLEMRLDNILFRLGMASTIPGARQLVNHRHILVNGRIVDIPSFRCXPRDIITTKDNQRSKRLVQNYIASSDPGKLPKHLTVDTLQYKGLVKKILDRKWVGLKINELLVVEYYSRQT

SEQ ID NO: 362606 - protein, 115 aa, Zea mays
  Clone ID: MRT4577_93872C.1.pep
LLPPWKWSTPSRAGVAPFPDWAAERRYRRWGPWLQSWVGVKESGVFWMEAKFRPPPLPSVFCYRLLGWPPLSHCHPVIYECRFSVFRTYKKKKKKKKKKKKKKKLAHSFSPSCRI

SEQ ID NO: 362607 - protein, 475 aa, Zea mays
  Clone ID: MRT4577_93873C.1.pep
MDAAGGNGSSSSVMCQLVSAEGEQLGAALYLPHNVGPPQLQDIVNQLLHNEDKLPYAFYVGDEELSLQLGAFMQRNNATAEVTLRIVYQPQAVFRIRPVNRCSATIAGHTEAVLAVSFSPDGRCLASGSGDTTVRFWDLSTQTPLYTCKGHKNWVLCIAWSPDGKHLVSGSKSGELILWDPKTGNQLGTPLMGHRKWITAVSWEPVHLQSPCRRFVSASKDGDARIWDITTRKCVISLTGHTSSVTCVKWGGDGLIYTGSQDCLIKVWETSQGKLVKTLKGHGHWVNSLALSTEYVLRTGAYDHTGKTFSTAEEMKEAALARYKKMRGNAPERLVSGSDDFTMFLWEPTISKQPKARMTGHQKLVNHVYFSPDGQWLASASFDKSVKLWNGITGKFVAAFRGHVADVYQISWSADSRLLLSGSKDSTLKIWDIRTHKLKMDLPGHADEVYTVDWSPDGEKVASGGKDRVLKLWMN

SEQ ID NO: 362608 - protein, 81 aa, Zea mays
  Clone ID: MRT4577_93874C.1.pep
LSESMRLDASLPADDDPSNETASHRPSIILNAVALGNIDAGKSAVWNSLIGHPVLPTEGENHASQTAGNLGAAESCAVVCW

SEQ ID NO: 362609 - protein, 821 aa, Zea mays
  unsure (1)..(821): unsure at all Xaa locations
  Clone ID: MRT4577_93875C.1.pep
MLGVLRTADSSPSRFDMECNRDDAVRSKDIAETKFRENDITGAKKFALKAKALFETLEGIDQMIVALDVHVRAQTKIAGENDWYGILEVPPMADEEAIKKKYKKLAFQTHPDKNSSVCAKAAFNLISDAWNVLSNTAKRTVYDHRRRVHALGVHQNNFKATARKNSNSSMSSVDRFCARRREVAPHLAHEGIETFWTLCWSCLMNFQYSREYFNHHLKCHNCHAVFVAAEVRPPSVQIYPTEPMPMSTNNNIGGNTVPGMVAPGVQAGVSQGNQNCDPTVFKSATCAKSTKHTVQQTHDSIRKDDAAGASIPANEEANCTKVLQHAARKHAHAVSSARRANAATREHEAAKRKHANAGKQGTWQSAASYPDGDGCKPVFPVKRKPRSTSETSGAKKHKVSSGDFNCESSSDVGRTSFGRVLMKLDVRSILIEKGKLQAQKLQELSSKKANVKKKQKMQNGKKSSRKGVCNIENEVNKIEMKXAAVQLIQKKMSWSWLAEGLILKKXRQKSSKQVGLKEKLKSWPVPEVRIVYTRRNRKQHKKELGDEVTGATPGTEHHMPARYGCLNQVCPDAGSDKIPVPDADFYSVPDADFSSFGDHSESSFQNDQVWAMYDEEDGMPRYYALIRKVISTRPFKVRLVHLKANDSNEFGASSWLSCGYSKTCGEFKFDVSKHTDQVNIFSHKVKYDKGPGGIIRIFPKKGDIWALYQNWSPDWDQFTADDMIYKYELVEILDSYSPSRGISVMPIVKVPGFVSVFKPVHNATRSWRIPREEMMCFSHQVPFHVLTGEEAHNAPKGCYELDPGSTPQELLHVVPPSGDAK

SEQ ID NO: 362610 - protein, 57 aa, Zea mays
  Clone ID: MRT4577_93876C.1.pep
PGPKGSLCYSCTVPHIISQGLREFKCDLLGNDKCLSLQCLLNEIMYINHFTIAHCMV

SEQ ID NO: 362611 - protein, 225 aa, Zea mays
  Clone ID: MRT4577_93877C.1.pep
VGTTPRLVVSSPELIREVLLSRSQHFDRYEAHPLIRQFEGLGLSNIHGDEWARRRKILAPAFHAENLKLLAPFVAGTVQRMLEERVLLPGGPGEVELDVAEWYRRLPQEVITVATFGRNNSDEGSAVFRLQAEHASYATEAHSKVFFPGYRFLPTRRNRRVWQLDREIRRLLAKLVAGLQSGGSGDHRHQGRDHGRAGGGMRDFMSFMAPAMAADEIIEESKNFF

SEQ ID NO: 362612 - protein, 53 aa, Zea mays
  unsure (1)..(53): unsure at all Xaa locations
  Clone ID: MRT4577_93878C.1.pep
AYARAHDDDRMVPDAPAYIAYLLXSTREYYELMRRYDSHNNEYLEICRRYKAR

SEQ ID NO: 362613 - protein, 80 aa, Zea mays
  unsure (1)..(80): unsure at all Xaa locations
  Clone ID: MRT4577_93879C.1.pep
GKSRQRTAGETAAERAESKKRGAAPPPRARXRDKKARRTGAARARTGDKLGQGGRAGPTGEGXRRQRHNGEFDGQSVSMR

SEQ ID NO: 362614 - protein, 210 aa, Zea mays
  Clone ID: MRT4577_9387C.1.pep
LAPSSNLTFPARSGMEVSHQKSCANLALLNRRPCEAMEPSFLAPAPQVRPGTSQRLPLCSCARSPVLHLAGVDLPSPLSSGRHPGRRLSPLMDVVAQVLSLLPSTCLTASLYRTPLSIRATDSTRHRHSAEPLPLPHRHSARRWFLLRFPFPAWFLAIRATRPTCQNVLPPSVRCHDGHPRCDRLVTPALPSLLEILPLRSLLVAVPCCS

SEQ ID NO: 362615 - protein, 62 aa, Zea mays
  Clone ID: MRT4577_93880C.1.pep
PPRVRGPGGTRGGTGTCYQDILVVLLRGNLTYMVTTFYGCVYSPVPSISGCLFNIKRGGGEA

SEQ ID NO: 362616 - protein, 214 aa, Zea mays
  unsure (1)..(214): unsure at all Xaa locations
  Clone ID: MRT4577_93881C.1.pep
MSPKVLSSMEVEAGFAGDGVGSNNGPQDMWSLGEIDPKRARXDGAVLDFAGSNLVSVDNFAYGSVARYLQLDRKKCCLPVNLAEHVCKQSYNHSELGAAISWDDALRSSMRRFQHKYYNLFTCNCHSFVANCLNRLAYNGSVEWNVLNVASLVWFHGQWVDKMSFARSFLPFLTVTCIGILMAGWSFLVGMAAFSVLLIGWXCFXVYCVKGLIC

SEQ ID NO: 362617 - protein, 48 aa, Zea mays
  Clone ID: MRT4577_93882C.1.pep
WCSLRIPSLPDHRLLRPVAIHAVTLSWERLFWHRALHFYMLMNTGHLT

SEQ ID NO: 362618 - protein, 219 aa, Zea mays
  Clone ID: MRT4577_93883C.1.pep
YHQVLSSMKLEADFADEDVSSNNGLQDLWSLDEIDPKRARFPCCIVWTPLPVVSWLAPYIGHVGICQEDGAILDFAGSNLCCLPVNLAAHVCKQSYSHSEVGAAISWDDALRSGMRRFQHKYYNLFTCNCHSFVANCLNRLAYNGSVEWNVLNVASLVWFHGRWVDKMSFARSSLPVLTVTCIGILMAGWSFLLGMAAFSAFLIGWFVFTVYCVKGLVC

SEQ ID NO: 362619 - protein, 240 aa, Zea mays
  Clone ID: MRT4577_93884C.1.pep
YHQVLSSMKLEADFADEDVSSNNGLQDLWSLDEIDPKRARFPCCIVWTPLPVVSWLAPYIGHVGICQEDGAILDFAGSNLVSMDNFAYGSVARYLQLDRKKCCLPVNLAAHVCKQSYSHSEVGAAISWDDALRSGMRRFQHKYYNLFTCNCHSFVANCLNRLAYNGSVEWNVLNVASLVWFHGQWVDKMSFARSFLPFLTVTCIGILMAGWSFLVGMAAFSVLLIGWFVLTVYCVKGLIC

SEQ ID NO: 362620 - protein, 181 aa, Zea mays
  Clone ID: MRT4577_93885C.1.pep
MSPKVLSSMEVEAGFAGDGVGSNNGPQDMWSLGEIDPKRARFPCCIVWTPLPVVSWLAPYIGHVGICQEDGAVLDFAGSNLVSVDNFAYGSVARYLQLDRKKCCLPVNLAEHVCKQSYNHSELGAAISWDDALRSSMRRFQHKYYNLFTCNCHSFVASCLNRLAYNGSLEWNVLNVAALVW

SEQ ID NO: 362621 - protein, 58 aa, Zea mays
  Clone ID: MRT4577_93886C.1.pep
VQETHKTRSSYLVSFMGRRPKVVSDFFSERLEPMLIWCVHGFHDLGCVYSILQASAPR

SEQ ID NO: 362622 - protein, 46 aa, Zea mays
  Clone ID: MRT4577_93887C.1.pep
SQNPGFLFKKKKKKKKKKKKKKKKKKKKKKKKKKKKKKKNPTHTHT

SEQ ID NO: 362623 - protein, 89 aa, Zea mays
  unsure (1)..(89): unsure at all Xaa locations
  Clone ID: MRT4577_93888C.1.pep
HLHPRLHPLXLSLFREQQAHLPVPVSSPSLRRRLTPTSHSFSMSAITLHCPLALLLISLLLLTLVFSIHCLYAHHRFLKLLRLKHYIHS

SEQ ID NO: 362624 - protein, 71 aa, Zea mays
  Clone ID: MRT4577_93889C.1.pep
NQYLLAHRKGKKMGDMRREEENAITTTLGKKTRFIVDSKKWVIDLLLNSRRREHVLLVVSKSIVLEELGCS

SEQ ID NO: 362625 - protein, 243 aa, Zea mays
  unsure (1)..(243): unsure at all Xaa locations
  Clone ID: MRT4577_9388C.1.pep
TTILLGAFRNHAANRTSDDQTTVATKILXALLALVVLVGSATDAIILPRCLLATSAIIPQLLPPATSMGXQHSAEQANRLQQALAGSVLQQPIAQLQQHSLPHITLHAITTQQQQQLLPVLSHLAMENPADYLQQQLVAYNPLALANVAAHQQQQQLQQLLPVLRQLAMENPVDYLQQQQLLSSSLVAVGDAPTYLQQQLLQQIAPSMTQLAAAPPVDYXQQLLSFKQLTLNNSAALLQQRQQ

SEQ ID NO: 362626 - protein, 74 aa, Zea mays
  Clone ID: MRT4577_93890C.1.pep
RAGFHKISSYSQLVNCTQLIIRQAVKARLSINEMLVELLMRQLHPKSLFTICGNWTPMALDRPIKFGVALAQKS

SEQ ID NO: 362627 - protein, 82 aa, Zea mays
  Clone ID: MRT4577_93891C.1.pep
RHCHAWINMSFPASPCSTPRRPRRTSTPRWWAYCPDPAYSTGATNYNRTNTRLYPRPPSNGVTAPWLAICQAKTQTCDSPRR

SEQ ID NO: 362628 - protein, 117 aa, Zea mays
  unsure (1)..(117): unsure at all Xaa locations
  Clone ID: MRT4577_93892C.1.pep
PPRQRLVTAKAVFFPGGGSWHRGGVSAXATARPLLGMAEPPASPSAAAAAPGPGVAAQAAEAGGGRPPDRSEAGAEVILAGFAAAVAVVIVCYIRVTRESKNGSGSVGEKRGSLGGF

SEQ ID NO: 362629 - protein, 99 aa, Zea mays
  Clone ID: MRT4577_93893C.1.pep
VMARYVVHGARRTGVNSSCGACHPQVHGFKGACCSRYGSTQGAFPAFHVLGKEGKQQGVLVQKNSPTSGVPIKDVIIYAGGAVILVRTLTTRIFVSHVM

SEQ ID NO: 362630 - protein, 84 aa, Zea mays
  unsure (1)..(84): unsure at all Xaa locations
  Clone ID: MRT4577_93894C.1.pep
FLKLAGNVAKFTNNTXMITRNVLLAIGNXKXLGNLLPGVTIEHVGVLPPFPPVLPSNKKAYFLPRGGIKPPKSPFQGAKSPKKA

SEQ ID NO: 362631 - protein, 60 aa, Zea mays
  Clone ID: MRT4577_93895C.1.pep
PVIQAKPNLQTTGRFRYNSSACARCGQEKQHATAPAHAARQSTMHARAREKLPRSALLPA

SEQ ID NO: 362632 - protein, 34 aa, Zea mays
  Clone ID: MRT4577_93896C.1.pep
ADNFWEITQNDKQENLERDRGEAKSNHKVRPTPH

SEQ ID NO: 362633 - protein, 372 aa, Zea mays
  unsure (1)..(372): unsure at all Xaa locations
  Clone ID: MRT4577_93897C.1.pep
DLSTRRIIISRHVTFDETTFPFAATSDVSSSASLEFLLDDDMVLVPCPTVVAGGTPXRRPWLLHPTRMLSSRPXVAASHDSPSATPGGRGPVPPPGPGVVPFPRVYVRRSRTTSTSEPTAVPAATMTSSPPPPPVARTMTGAIPRVCYEGLAATTSSSPSPLPTNYRSALADANWRAAMMDEYQALVYNNTWELVPRTPGANVVTGKWIFRHKFHADGSLARHKARWVVRGFSQREGVDYDETFSPVVKPATIRSVLSIAGSRAWPIHQLDVKNAFLHGHLEETVYCQQPPGFVDPGAPDHVCHLQKSLYGLKQAPRAWYQCFATFVRHLGFVASISDTSLFVXYXEGTSLAYLLLYVDDIERELGLHLVPI

SEQ ID NO: 362634 - protein, 53 aa, Zea mays
  Clone ID: MRT4577_93898C.1.pep
IADPRIRMSEVTVTMMQIDTNSKATARDKNQGARQERVHKMLSKHAQVAYRIN

SEQ ID NO: 362635 - protein, 60 aa, Zea mays
  Clone ID: MRT4577_93899C.1.pep
PRVLKKKKKKKKKKKKRERVPIRKKPRKKTQTYNNINRAKGPPKSNLMSAPLQLYTFKNP

SEQ ID NO: 362636 - protein, 74 aa, Zea mays
  unsure (1)..(74): unsure at all Xaa locations
  Clone ID: MRT4577_9389C.1.pep
RGLXXPPGPFGPLPAGSPRDTNGFWGVSKPPHHHKLXAPYHQSPIGGHTGEPPTYIKTKQVFTWKGKKTLGQNR

SEQ ID NO: 362637 - protein, 113 aa, Zea mays
  unsure (1)..(113): unsure at all Xaa locations
  Clone ID: MRT4577_938C.1.pep
VLVCASLALXXSCSLRAGXXPPPPGLVXXXSXWEPTMMCLPPSRWLGARVAXGPALLVSGVLFFSRLCPLFPVVLLSLVLVLSAVSRXLXGPPPPPGRPLSKSLVFRSRACVV

SEQ ID NO: 362638 - protein, 105 aa, Zea mays
  unsure (1)..(105): unsure at all Xaa locations
  Clone ID: MRT4577_93900C.1.pep
VKRNGENLSYEHICVSGREALCXFQXFYTHLRAIRQLSASDADXVKVVKPAQFEAINDDEVPIYQKPFMXKGKLYIHLPVEXPDSLAPEQCKXLETVFHQDFIQL

SEQ ID NO: 362639 - protein, 57 aa, Zea mays
  Clone ID: MRT4577_93901C.1.pep
IIIQLLDSLEELKQVFAHMCYENIKCYIDSPTIRFEWSFLFSLQGWDRLVIGFGRVT

SEQ ID NO: 362640 - protein, 108 aa, Zea mays
  unsure (1)..(108): unsure at all Xaa locations
  Clone ID: MRT4577_93902C.1.pep
MQLIQHSPEKSPSSQSSVRSPLPPIKNTITPGLVNYIAPAXMKPPXLPLPAAVSSPSPGGTCAHPQKEEHSLPPPGXYQPPPSYSDIILPPIMGNKYACTPCHQLQGY

SEQ ID NO: 362641 - protein, 58 aa, Zea mays
  Clone ID: MRT4577_93903C.1.pep
DTSAHRMTDSWCRHAEQLTCPRGKACRRHLACALTDAVGSLATADVQRALIRLTLESC

SEQ ID NO: 362642 - protein, 104 aa, Zea mays
  Clone ID: MRT4577_93904C.1.pep
LGSPRPVGFSHANFSCPGSLSLVGAQLESPRAPSAPNGTRRQTPSCFEESTIKHGDKVIELFEFYEIEDPEHLFGEGCQHCNHCSGEDEAVEGDFQEFQDYDEF

SEQ ID NO: 362643 - protein, 93 aa, Zea mays
  unsure (1)..(93): unsure at all Xaa locations
  Clone ID: MRT4577_93905C.1.pep
LRQQEAGGSKFXLVPKADQKRRAASVRPXGKSESAPLFFWAPAMAGTGLFELRRIEAAKEFSPKLARSPNLASLPFGENGKILLGFNATGFGR

SEQ ID NO: 362644 - protein, 69 aa, Zea mays
  Clone ID: MRT4577_93906C.1.pep
ADPRRRCDDGGESTRSQCAMTPAKAMDVPLEVQHCAKAPHRDLNSGAERSSMMASPCAAAAPNESLCLV

SEQ ID NO: 362645 - protein, 122 aa, Zea mays
  Clone ID: MRT4577_93907C.1.pep
PRARLIYQFITLCRGCALYPQAVIPSLARACKTLIHSRGEWPRIHYEAFTKIPRGCSHPLGFLNAPHSSPRGEPKLGRASRIHRAPLTARRLSELHPGSSNYSAKGTPFHPYGCTVFPGGHP

SEQ ID NO: 362646 - protein, 87 aa, Zea mays
  Clone ID: MRT4577_93908C.1.pep
WTCFMWGISQAVAFSWSDYYLLIESQVLALTQVISPMYLFQTERIPLTSTIVITKTNRSHSHLYQSISDQVPLITGAPLAAHNREHG

SEQ ID NO: 362647 - protein, 71 aa, Zea mays
  Clone ID: MRT4577_93909C.1.pep
SHCHISMTYTTFYGYSAPMKNKHQNMLTPPPALSLPCRTPPNIPSFPSSSPSSPIHFFPPFSPPPSPHFSS

SEQ ID NO: 362648 - protein, 37 aa, Zea mays
  Clone ID: MRT4577_9390C.1.pep
MKPPLGSPQKKKKKKKKKKKKKKKKKKKKKKKKKKKK

SEQ ID NO: 362649 - protein, 109 aa, Zea mays
  unsure (1)..(109): unsure at all Xaa locations
  Clone ID: MRT4577_93910C.1.pep
FSVKLKRVDVVLGIRLSMRMTDGRLTSNEEERVSCSDRQCVKVCNTRKAIIMSFRVHFCSLRLSXXNYRLYSLCISYNCSMTLDKSTLIRSCLSESVLGVTFCIHKDGL

SEQ ID NO: 362650 - protein, 146 aa, Zea mays
  Clone ID: MRT4577_93911C.1.pep
IASMFVELLLAVLIPSLGDRAVDEASRSDGVEGVASLVHGPSSSPTMSLCASFIDRHRGAPYNRDPSKLMRTIRLKSPKNSQEKPLSSSRLVEVVNIATTAQEKMKPWKEISRSSKTTTSSRRGLAANPQSAACEGRVYLRFFSAL

SEQ ID NO: 362651 - protein, 50 aa, Zea mays
  Clone ID: MRT4577_93912C.1.pep
PQARVQALSVLHMYNTIPTVIDSKTYESVPIRIRDVIYNDAAARAAHDGD

SEQ ID NO: 362652 - protein, 105 aa, Zea mays
  Clone ID: MRT4577_93913C.1.pep
CIRFNPLRDLSRFFLTITNALSNVILDAYSLYLLSCMVYCSFVLNVDGCMYVCTRIENDPVEEPEEFAGEAPEQQSVGGGKCPLTYLCPIHYLIHLPLYTFMPKD

SEQ ID NO: 362653 - protein, 94 aa, Zea mays
  Clone ID: MRT4577_93914C.1.pep
QAILWKRTIRSKSPRNSQEKPLSSSRLVEVVSIATTAQEKMKLWKETSRSSKTTTSSRCGLAATPSRLPVKAVLSTFRFRTLIYCKDYMDVSDV

SEQ ID NO: 362654 - protein, 101 aa, Zea mays
  Clone ID: MRT4577_93915C.1.pep
PPARPFPFLSIRHECVIECHTWCIFTLFVILYGVLFFCIKYVDVCMYVCARIENDPVEEPEEFAGEAPEQQSFGGGKCPLTYLCPIHSLIHLPHYTFIPKD

SEQ ID NO: 362655 - protein, 110 aa, Zea mays
  Clone ID: MRT4577_93916C.1.pep
AWVSGNPQSAACEGCLTICSWYFWFRAPPHQRTIRSRSPKNSQEKPLSSSRLVEVVSIATTAQEKMKLWKETSRSSKTTTSSRSGLAATPSRLPVKVAFIYVSFPHFDLL

SEQ ID NO: 362656 - protein, 88 aa, Zea mays
  Clone ID: MRT4577_93917C.1.pep
MAARSSEQPALRVGRSPGPDGGGRGPRGAQARDRPGSGGSAHASARGSGHGGVGHGAWSPGARAGPGGTVKHWRLGMTARHAASRRCG

SEQ ID NO: 362657 - protein, 172 aa, Zea mays
  unsure (1)..(172): unsure at all Xaa locations
  Clone ID: MRT4577_93918C.1.pep
FRRLHKAGANSRGPTDLQFPDRSLFQSRSLPKASRAVEERIFFLESIFFHMGGGRVQXGNXXREPXGGGGGIHFVGLVPGHKTVXFFFYAFSTLFFQTGAGKHXTRAIFVVLDPTVFYEXRTGTYRQLXFKKKKIIFFEDATNTPXXGSFTFGIETVEPCLYRFRKLADNCT

SEQ ID NO: 362658 - protein, 113 aa, Zea mays
  Clone ID: MRT4577_93919C.1.pep
MGTLLVRPGLKPAEAVITPILCHNTYVILERFEQPSWVDIDILVRECFRDLHSCYVCYVLALVCVLSLVAIGDVAPINLCAAARDSNIWRSRREESIRKNHGLKLIIGSLEKG

SEQ ID NO: 362659 - protein, 990 aa, Zea mays
  unsure (1)..(990): unsure at all Xaa locations
  Clone ID: MRT4577_9391C.1.pep
MAGGGGGRGMAGGGGGRGESSPAIKPISKAVVHRICSGQVIFDLSSAVKELVENSLDAGATSVEVSLKAYGEEWFKVADNGCGISPSNFRALALKHHTSKISDFSDLGSLVTFGFRGEALSSLCALGKLTVETRSKDELVGTHLEFEHSGVVVSERKTARQVGTTVTVEKLFSTLPVRSKEFSRNIRKEYGKVISLLNAYALIAKGVRLLCTNTVGKNSKMVVLRTQGSSSMKDTIITVFGPNTFKCLEPFSVTTSDGCQIEGFLSKPGPGTGRSSGDRQFFYVNGRPIDMPKVTKLVNELYKSSNAKQYPVVILDFHIPTTSYDVNIAPDKRKVFFSSESMILQSLRETVENLYSPQQCSFSVNHIKDPEKEGDAVTDRHNEDTNAIVMVNVPSYYNNDDNEETDNEDQVSPENQKLPSVARDASPLSGGTTTQADRSAWLPSFAYDQPKRSPKEGRSLVLGRNCFRTGLAAKPTHSSTVQSSLLNFVSLNKRKHEDDCTLISEAAVLRRETCSEHMRRSSLEANFVTPNKQNHEDDCIISESPVLRSGTCSELYKRTSLEVNFPSPNKEKHDDNCTLISETPVLRRRTNSEQARGTSLEANSAPEFNLPLETNSLKQHSSQYFGSVRTDVSPQHSKQPNIVTIGAGVTGPCDVDTTESDMDQXWSMPFSFWCSQQIFRITTXNALADSPLPDAQDYGDGAAVCYASVQYPIXNLRLPSLGEEERIXMISHINKSYCLEKTTRCYKAATLDITVPLADEAKSNSLAAATNELDRLFSKHDFREMEVVGQFNLGFIIGKLGQDLFIVDQHAADEKYNFECLSQSTILNVQPLLEPLRLDLSPEEEVIVSMNMSTIRKNGFILAEDLHASPGNHYLLKAVPFSKNNTFGVQDVKELISMLADSQGDCSIISSYKLDTADSVCPSRVRAMLASRACRMSTMIGDPLTKAEMKKILKNMAGLRSPWNCPHGRPTMRHLADLRTMKAKDIAFKR

SEQ ID NO: 362660 - protein, 123 aa, Zea mays
  Clone ID: MRT4577_93920C.1.pep
VTLPSSSATTATTLLLVVGAAPATAVANLTLPSSSLASASLTRTLKVTLPSSSATMETGNVTLPSSTSFLSSSSTASPTSSVDDAASSSFSSIAAMYGVPSGSSPPLFPLSTPASVVDILTTS

SEQ ID NO: 362661 - protein, 93 aa, Zea mays
  unsure (1)..(93): unsure at all Xaa locations
  Clone ID: MRT4577_93921C.1.pep
SFMVASPNSNYTETEIHIDHNYKSTELLHEIHNGTYQXVDNPNTVKYEYNTNTHVPKLXLILMAWRGNNVSTLTVDVIANRDDISWASNVKIQ

SEQ ID NO: 362662 - protein, 58 aa, Zea mays
  Clone ID: MRT4577_93922C.1.pep
TVIEDLLCRLSEKTEHKVSVGYLYKPFIFSLARLDLANNWPGLRLLYGRNEPLAELVN

SEQ ID NO: 362663 - protein, 123 aa, Zea mays
  unsure (1)..(123): unsure at all Xaa locations
  Clone ID: MRT4577_93923C.1.pep
SHLFFLFTHLDALSFVFFLRNHHVPFSQIYVAYPQKFFLFTQLXALYSLVFFHQSHLFPFIQIEGVRPVAFXLTHXQLCPFYQSTVPIAGALFXVRQLWPFKHLVFSNPAVFYPHPPIVGVPF

SEQ ID NO: 362664 - protein, 336 aa, Zea mays
  Clone ID: MRT4577_93924C.1.pep
MAKQAYATSSLVVGYALCSSLLAIINKYAITKFSYPGLLTALQYLTSVVGVWVLGKLGFLCHDAFNLQTAKKFAPAAVVFYLAIFTNTHLLKHANVDTFIVFRSLTPLLVAIADTTFRKQPCPSKLTFLSLVIILGGAVGYVMTDSAFTLTAYSWALAYLVTITTEMVYIKHMVTNLGLNTWGFVLYNNLLSLLMAPVFGFLTGEHLSVFRAFESRGQSWFELDAFVAVALSCVFGLLISFFGFAARKAISATAFTVTGVVNKFLTVAINVMIWDKHASMFGLVCLLFTLAGGVLYQQSVTTKGNPSAAAKQGRGGDDAVEVDEESQMLVSSPKVV

SEQ ID NO: 362665 - protein, 135 aa, Zea mays
  unsure (1)..(135): unsure at all Xaa locations
  Clone ID: MRT4577_93925C.1.pep
GAHTHSTAPKGSRHRPKKQSRAKTPAGKXSTXEGEXPDTRDNXKAKTQDKEGTPPDQQRRSGAGKQXEDGRTXXDXNXQKESTPHXARXRRGRXQSGAKTRTGKTRSXEAAPADTTDTXKATSQDQEXSPPDQQR

SEQ ID NO: 362666 - protein, 48 aa, Zea mays
  Clone ID: MRT4577_93926C.1.pep
NIFQYFNMYVIISDNQSHYLLLFTAYTKIKKIFFCYLTANQHNIGDAI

SEQ ID NO: 362667 - protein, 111 aa, Zea mays
  Clone ID: MRT4577_93927C.1.pep
LIFFMLFTAKTKKRAVVKVSCLEDNGFIKQVFFLRVSRIFHQSFFKGFLHNPLQCPKTYMRTLVEEGNETLTHDSLGHSLNSNGLFRLGARKCLLSPMPSLRTHPADIKPL

SEQ ID NO: 362668 - protein, 109 aa, Zea mays
  Clone ID: MRT4577_93928C.1.pep
LVVWRHLEFVVRNTSNPHAVVTTPRTTSIHRGWGKGQVPPPCCTDHVRESWVVNWGEPGRNHHRSQAPLGVLRGRRPPPLEYRRRTGGPGGALQRGIRAHLGGVSQSAL

SEQ ID NO: 362669 - protein, 96 aa, Zea mays
  Clone ID: MRT4577_93929C.1.pep
MIKTTLNPTDYDSELGSIPAVQRGILEIIPMLRPTVVLSPMWTHLLLELLCYLNGHEGPLQKNNEQTPDHNSQALVDGAKHALVERSNLNGGGTKL

SEQ ID NO: 362670 - protein, 127 aa, Zea mays
  Clone ID: MRT4577_9392C.1.pep
KFPFKRKMRGPKKKATSPKPKRRLGHKEPGRPNQEKGPTQPRKGGPPTEKKKSPPKKKKPRQTPLKAQKKKKKGGGGPFGKNHIRERGGPPPNRKTGKKKKEMPRSPEGRENKQFGKARNKKGPTPK

SEQ ID NO: 362671 - protein, 81 aa, Zea mays
  Clone ID: MRT4577_93930C.1.pep
FIVSLGGRTGSSWPIQSPQQHGNAPPTGKHVLLHYHMRPVGANGGGGGGARVAHPDGERRRPPFSARRNRCPPRPLPGDPP

SEQ ID NO: 362672 - protein, 349 aa, Zea mays
  Clone ID: MRT4577_93931C.1.pep
MDIINGAVLPRCHAAPVTGAAAASVADARVSGHLQLLRRVRCRGSGSASAGLLHATTPRAGVAARRFFSPPLGNGNGNGRTIGWRPARCTHGGSSSDGDGAAAADFDAREEEFVDSSVMEAVELRSVSDGGFVIKMRDGRNLRCVQNNPRVLRLRDSAPHHAIVLKMEDGSDLLLPIIVMETPSIMLLAALRNIRIPRPTIYNVVLEMTTRMGYEVRLVRITEMVHDAYYSRLYLAKVGNDQDTISFDLKPSDAINIAFRCKVPIQVNRRIAYNNGLKVLQPKAAGSYLGSDDIQITRLDRPDDQHCSEAQEFDLVRNMLIAAVEERYKDAAQYRDQLSMLRSKKKNAI

SEQ ID NO: 362673 - protein, 135 aa, Zea mays
  Clone ID: MRT4577_93932C.1.pep
VQQADPAAVRRAGGDVARHALQVGLLAEQAAIVRRRAQCEIAHALVGFGERRIDHHAELGLALREVAHDVAAEQQVTVRNHGVAGQAFGRTGERREFARLRMAFVDHELDARRVDRVGAIAAHHGDVVHAVRLEA

SEQ ID NO: 362674 - protein, 189 aa, Zea mays
  Clone ID: MRT4577_93933C.1.pep
MDIINGAVLPRCHAAPVTGAAAASVADARVSGHLQLLRRVRCRGSGSASAGLLHATTPRAGVAARRFFSPPLGNGNGNGRTIGWRPARCTHGGSSSDGDGAAAADFDAREEEFVDSSVMEAVELRSVSDGGFVIKMRDGRNLRCVQNNPRVLRLRDSAPHHAIVLKMEDGSDLLLPIIGMETPSIMLLA

SEQ ID NO: 362675 - protein, 51 aa, Zea mays
  Clone ID: MRT4577_93934C.1.pep
AFTKDIRGEGGYGDVIRPGKQCRCRIVAEVLGQVKPTNHMAACELPDKGAS

SEQ ID NO: 362676 - protein, 83 aa, Zea mays
  unsure (1)..(83): unsure at all Xaa locations
  Clone ID: MRT4577_93935C.1.pep
XNSPSXTPYWXSSHDVGYRXLGGVGXTRXKTLVRASERXRPQCLEXRAPGPTAWRASSSXPPAPRPXXSXYSPXXXCXXGCXF

SEQ ID NO: 362677 - protein, 213 aa, Zea mays
  Clone ID: MRT4577_93936C.1.pep
MRSVLFFVCICFLFVSTARAEGPYQFFDWEITYGSISPIGSLQQGILINGQFPGPKIECQTNENLIINVRNKLPDPFLLSWNGLQQRKNSWQDGVSGTNCPIPPGHNFTYHMQAKDQIGSFFYFPSLALHKAAGGYGAIRIDSRPMVPVPFPPPAGEYAVLIGDWYTTNHKSLQRMLDSGKESPRPDGVLINGKGGADVVDFAVEQGKTYRLR

SEQ ID NO: 362678 - protein, 94 aa, Zea mays
  Clone ID: MRT4577_93937C.1.pep
MKEKVEASVVDLEVDTGETLYPGISRGESALRWGFVRMVYGILAAQLLLTTVVYGLTRLQLTLNVTLFDSSGLSLELDVLPFILMIPLYYYQLK

SEQ ID NO: 362679 - protein, 110 aa, Zea mays
  Clone ID: MRT4577_93938C.1.pep
SFSAPVQTTCRLLRRLEGGDLGHPKLPAADRDHTSWSSALLPSRPSTEALTWRRRTPLQQVILRDNTRCNLMKIWGIKLAGYHFLSWRTRETIAHPNVINSIVLHNSNNL

SEQ ID NO: 362680 - protein, 32 aa, Zea mays
  Clone ID: MRT4577_93939C.1.pep
MEKADDRQWFLLRHLNPAVAVSPVPPYISVSA

SEQ ID NO: 362681 - protein, 180 aa, Zea mays
  Clone ID: MRT4577_9393C.1.pep
MQYLFDVWKDMEELKKEVREARRIKMLHQPSKAMDLENEIRILRNTFAEKSKDCVSLLKEWETHKRLKENGTIPSFDLEGLQCLGSMLRIVGLSGTHMDLSNISIQWFRIHPKESNKEIISGATRPVYALEPHDVGRYLQAEIDVGGEIAVAKTAGPVDPGLFDWTRSVSVIHMCCVLHD

SEQ ID NO: 362682 - protein, 230 aa, Zea mays
  Clone ID: MRT4577_93940C.1.pep
MYRSAGVAMAWNVFRFCTALRGLGSIMILLVLAIVGVTYYAVVLCNYGPALLTGGGTTLAALAVLLLFHFLLAMLLWSYFSVVLTDPGSVPPNWNLDFDAERGETAPLTSSEFSSQMNSQQSVALGNTANPRARYCRKCNQLKPPRCHHCSVCGRCVLKMDHHCVWVVNCVGALNYKYFLLFLFYTFLETTLVTLSLLPHFIAFFSDIEIPGSPAALATTFLTFVLNLAF

SEQ ID NO: 362683 - protein, 251 aa, Zea mays
  unsure (1)..(251): unsure at all Xaa locations
  Clone ID: MRT4577_93941C.1.pep
MLPVLLLPPQGQTQTPLTGNQHNHDHASSKPKKQMHMGANVILXGYATALXSHNEAYDDAIVDNLXTRALDNQLPLESLTPITSVQKRGRTCKALAANTIQLYIVDICDMKFLAXTVESNNADAAVHFVKQITPXYSMMDRSRAVXYTQHNNVVXTLNVPFAIKEYTEXCHLAKLGTMXGEYVTPNIDIXEGTITITRNATTDTLTYPXQGSSVYHLSKVHDXHNISVTCRACGIRDTDLNQGVNYGVRTG

SEQ ID NO: 362684 - protein, 254 aa, Zea mays
  unsure (1)..(254): unsure at all Xaa locations
  Clone ID: MRT4577_93942C.1.pep
DNLLSVLQLAMLLWSYFSVVLTDPGSVPPNWNLDFDAERGETAPLTSSEFSSQMNSQQSVALGNTANPRARYCRKCNQLKPPRCHHCSVCGRCVLKMDHHCVWVVNCVGALNYKYFLLFLFYTFLETTLVTLSLLPHFIAFFSDIEIPGSPAALATTFLTFVLNLAFSLSVFGFMIMHISLVSANTTTIEAYEKKTTPHWIYDLGRKRNFAQVFGNDRKYWFIPAYSEEDLRRIPALQGLDYPVXRPDFDGQEL

SEQ ID NO: 362685 - protein, 316 aa, Zea mays
  Clone ID: MRT4577_93943C.1.pep
MYRSAGVAMAWNVFRFCTALRGLGSIMILLVLAIVGVTYYAVVLCNYGPALFTGGGTTLAALAVLLSFHFLLAMLLWSYFSVVFTDPGSVPPNWNLDFDVEMGETAPLASSELCSQMNSQQSVALGNMTNPRVRYCRKCNQLKPPRCHHCSVCGRCVLKMDHHCVWVVNCVGALNYKYFLLFLFYTFLETTLVTLSLLPHFIAFFSDAEIPGSPAALATTFLTFVLNLAFSLSVLGFMIMHISLVSANTTTIEAYEKKTTPHWIYDLGRKRNFAQVFGNDRKYWFIPAYSEEDLRRTPALQGLDYPVRPDFDGQEL

SEQ ID NO: 362686 - protein, 141 aa, Zea mays
  Clone ID: MRT4577_93944C.1.pep
MVLWVFGYGSLIWNPGFDFDDKILGFIKGYKRTFNLACIDHRGTPEHPARTCTLETDDEAICWGIAYCVKGGPEKELKAIQYLERRECEYDQKISIDFYKEGDPLKPAVTGVLVFVSTPDPIGNKYYLGPAPLQDMARPRR

SEQ ID NO: 362687 - protein, 127 aa, Zea mays
  Clone ID: MRT4577_93945C.1.pep
SCSCSCSRRYRQLPSPLSMSETGRAGSASGRRRCLCLIRCLPSSHSASTILSISSAAVAAIDRLERDEYSTGDRGWDVRRLCCFRGRILSGVRTDGRTEDGTVAPAGLVPFPKESPNAWAKAGRTRG

SEQ ID NO: 362688 - protein, 62 aa, Zea mays
  Clone ID: MRT4577_93946C.1.pep
ASCRLARRPSFSLIPCSELCFALRPWFACELMDWPSRMPLPFRCSWSPTATDCWIIRQTDET

SEQ ID NO: 362689 - protein, 122 aa, Zea mays
  Clone ID: MRT4577_93947C.1.pep
DLEDLFKLSNLKFIISRRPLLCLNNLYAGTQPNCGANAFDYTVQMSPKEDIELSSICTDLKQRNPAITGRTANSLDQYDLVSCVIGLDTTQNTNPVNYRVACTFNNQADYIEDLDCSNHLEK

SEQ ID NO: 362690 - protein, 141 aa, Zea mays
  Clone ID: MRT4577_93948C.1.pep
ILGFIKGYKRTFNLACIDHRGTPEHPARTCTLETDDEAICWGIAYCVKGGPEKELKAIQYLERRECEYDQKISIDYLFSMEKALASISHEDDSIIELANEVRKVLNRTKETKITGANASLKSHAPLVHLSALPEGTVVDSR

SEQ ID NO: 362691 - protein, 141 aa, Zea mays; identical to SEQ ID NO: 362686
  Clone ID: MRT4577_93949C.1.pep

SEQ ID NO: 362692 - protein, 112 aa, Zea mays
  unsure (1)..(112): unsure at all Xaa locations
  Clone ID: MRT4577_9394C.1.pep
MGTSEPAGVPPSSSDCLLPVDQQRNLNHRAIAAKLTRLHSLPERLGATFSCHPNGLIALFCRYAHQGAGNASPTSHLLAQFDDLXDSDKEKNAPXFEDILSCCXQESALPPW

SEQ ID NO: 362693 - protein, 107 aa, Zea mays
  Clone ID: MRT4577_93950C.1.pep
RTQADCQQFYAKRGLPYDGPVIPPAPQPAPSPSRKKNRNLKYILIGAIGGSLLLIAGVAAIVFCFVCSVRTGRTDGQRESGASPSAPAPSVVSATGTAAATGGTHPS

SEQ ID NO: 362694 - protein, 218 aa, Zea mays
  Clone ID: MRT4577_93951C.1.pep
MVLWVFGYGSLTWNPGFDFDDKILGFIKGYKRTFNLACIDHRGTPEHPARTCTLETDDEATCWGIAYCVKGGPEKELKAIQYLERRECEYDQKISIDFYKEGDPLKPAVTGVLVFVSTPDPIGNKYYLGPAPLQDMARQIATANGPTGYNRDYLFSMEKALASISHEDDSIIELANEVRKVLNRTKETKITGANASMKSHAPLVHLSALPEGTVVDSR

SEQ ID NO: 362695 - protein, 134 aa, Zea mays
  Clone ID: MRT4577_93952C.1.pep
PANSNLWRVSWGTAGAGAAPSRIVRGDLIGSSSLCLGDSVARGGLLVGSRSISVRLVDRFASDGLFVINRISDIRLVVCLLLERRKLVGSSRNISISLSLHTRPRRGQTPRSRRPSARCSCTEALPRSSQSVGV

SEQ ID NO: 362696 - protein, 205 aa, Zea mays
  unsure (1)..(205): unsure at all Xaa locations
  Clone ID: MRT4577_93953C.1.pep
MVLWVFGYGSLIWNLGFDFDDKILGFIKGYNRTFNXRGTAEHPARTCTLETDDEAXEAICWGIAYCVKGGPEKELKAMQYLERRECEYDQKISIDFYKEGDPLKPAVMGVLVFVSTPDPIGNKYYLGPAPLQDMARQIATXANGPTGYNRDYLFSMEKALASISPQTRRAGTRISHQPTGSRWRAPRSRRTRAAPPGPQTIFARV

SEQ ID NO: 362697 - protein, 127 aa, Zea mays
  unsure (1)..(127): unsure at all Xaa locations
  Clone ID: MRT4577_93954C.1.pep
MGLWVFGYGSLMWDPGFDFDDKILGFIEGYKRAFNLACVDHRGAPXEHPARTCGRETDDEAICVGIAYWVKGGAEKELKAIQYLXERGECEYYQKISIEFYKGGDPLKPGGRGVLVCVSTPDPIGNK

SEQ ID NO: 362698 - protein, 103 aa, Zea mays
  Clone ID: MRT4577_93955C.1.pep
RGPQYFYFYVLIFFTRTTVSDASEICNITFRGKPSKGAPNIFIFMFKFFLQRLSELGGCHSTPTRVRRDVTAVVAGESPHHLQGVQIRTHGVRIPAPGKWIFT

SEQ ID NO: 362699 - protein, 141 aa, Zea mays
  Clone ID: MRT4577_93956C.1.pep
MVLWVFGYGSLIWNPGFDFDDKILGFIKGYKRTFNLACIDHRGTPEHPARTCTLETDDEAICWGIAYCVKGGPEKELKAMQYLERRECEYDQKISIDFYKEGDPLKPAVAGVLVFVSTPDPIGNKYYLGPAPLQDMARPRR

SEQ ID NO: 362700 - protein, 116 aa, Zea mays
  unsure (1)..(116): unsure at all Xaa locations
  Clone ID: MRT4577_93957C.1.pep
FFFFXXPXLVSXCRGXXLXLGXXXXXXXXXXXVXWALVAXXXSWXRXCVPPPPSSXXSXSXGXXXRGGPSGXGLXXXXXXXRAXGPGRXXPPLXXSLSPPLPARPRRXCKSLRXLR

SEQ ID NO: 362701 - protein, 218 aa, Zea mays
  Clone ID: MRT4577_93958C.1.pep
MVLWVFGYGSLIWNPGFDFDDKILGFIKGYKRTFNLACIDHRGTPEHPARTCTLETDDEAICWGIAYCVKGGPEKELKAIQYLERRECEYDQKISIDFYKEGDPLKPAVTGVLVFVSTPDPIGNKYYLGPAPLQDMARQIATANGPTGYNRDYLFSMEKALASISHEDDSIIELANEVRKVLNRTKETKITGANASLKSHAPLVHLSALPEGTVVDSR

SEQ ID NO: 362702 - protein, 71 aa, Zea mays
  Clone ID: MRT4577_93959C.1.pep
FHPPFWPKRANLGPIQGPKTIFHPMMVWSTHLVHLNPIMPWFWYGFSGQSQQAEIMFFFLQGVSESRVSPG

SEQ ID NO: 362703 - protein, 66 aa, Zea mays
  unsure (1)..(66): unsure at all Xaa locations
  Clone ID: MRT4577_9395C.1.pep
KKKKKXXNERERPPTEKAISGRLKRPVDGSLVHKQKNTKKKPALAAAECGVGYTMKKKNAAATAPA

SEQ ID NO: 362704 - protein, 75 aa, Zea mays
  Clone ID: MRT4577_93960C.1.pep
SEFGSRINITGPMVYHPNTQHRGGLFLHQEFYMPLDPPTAHSYALTDHSGQNTGDVPDHTSHMLTTICTPPSKYL

SEQ ID NO: 362705 - protein, 306 aa, Zea mays
  unsure (1)..(306): unsure at all Xaa locations
  Clone ID: MRT4577_93961C.1.pep
MIIIRVIPRQAGRRGGQEDRRPSRAGARDGNGTGPQNLRSFLPARPCPSTRRSCRPRPTSALSSSRGIGYATGCAMVLWVFGYGSLIWNPGFDFDDKILGFIKGYKRTFNLACIDHRGTPEHPARTCTLETDDEAICWGIAYCVKGGPEKELKAMQYLERRECEYDQKISIDFYKEGDPLKPAVTGVLVFVSTPDPIGNKYYLGPAPLQDMARQIATANGPTGYNRXPIIASRAIGCNRDYLFSMEKALASISHEDDSIIELANEVRKVLNRTKETKITGANASLKSHAPLVHLSALPEGTVVDSR

SEQ ID NO: 362706 - protein, 70 aa, Zea mays
  Clone ID: MRT4577_93962C.1.pep
FSIDFSVPTICPQTGVDTFPNPCLFVFCFLKRPHLLRYPCQHLANGYPGVLTKGAYLYIYSPDECGFKPN

SEQ ID NO: 362707 - protein, 66 aa, Zea mays
  Clone ID: MRT4577_93963C.1.pep
VRCTLDSPVIFSPGVRKIFPDRMVGSAGVWRTVVLSGAPRAVGCPSKKQKMAVRGRLAVRVLSWFS

SEQ ID NO: 362708 - protein, 85 aa, Zea mays
  Clone ID: MRT4577_93964C.1.pep
FGNSKGFSIMGVLKKGQRIENRGKNRESYKEGARGRKSWDIKIGGPKKYYYISYFFLKIAHFIFFFFFFLNFYFIFYFFLRKALG

SEQ ID NO: 362709 - protein, 237 aa, Zea mays
  Clone ID: MRT4577_93965C.1.pep
MMHRATIVGVVALIGVLLVGGGVRAQPPQRFDYPAARAPTTWANTDAGLPHHVVYTDGSVARVALLRLNPAGYGPSYAFGFFCTGHGAAPCADFLLGVAVVYSNSGALITSTTTGVPQVVWSANRGSPLGEGAAAELTPEGDLVLRSANGSAVWSAGTKGRSVAGVTIGSDGNLVLLDGRNATVWQSFDHPTDALLVGQSLGHGARLTANTSAADWRDGRFYLAVEDDALSAYVNAT

SEQ ID NO: 362710 - protein, 114 aa, Zea mays
  Clone ID: MRT4577_93966C.1.pep
KARGGLLSDVTRVFREHGLSVTHAKVGTRGARAANVFYVVAAFGGRPVQAQAVAAVRAEIGEQLLFVREHQDAAAAAANGTRSTVAGGRRSLGNMIRSRSEKFLYNLGLIRSCS

SEQ ID NO: 362711 - protein, 191 aa, Zea mays
  Clone ID: MRT4577_93967C.1.pep
MYYCSQSQRDRSMAHLYSYGRHSPVQSFASWASNHTPISMSSRGGLQRNSNCPQAEQRNMLISQLTRGCFREDMDLQTRLAVLDSLSEAFRNCEDTHSPDSDDDDYEDQIALGVDSQQRGASDDQINSLPLSVIEGEGRSDEPCNICLDCPAAGDSLRRLPCMHKFHKECIDRWLGMKIWCPVCKSNVFSQ

SEQ ID NO: 362712 - protein, 67 aa, Zea mays
  Clone ID: MRT4577_93968C.1.pep
ACPSSRTNSPCIPHSTREEDKGYYCRRRLLRYCEVQGLQRRLAIRACSTAGTVSVTPATTHSDMATA

SEQ ID NO: 362713 - protein, 141 aa, Zea mays
  Clone ID: MRT4577_93969C.1.pep
MELIYVDGASLIRQYPRTKIPTAQAFRPPHYDMDRHRRRHFPFLLALVLLAALSSSSRGAAAEASADTSTPLKAFTWGSNFSGGSLYQGNRDTVVRRLVSGPATSGGVFFNYSSSGDGPDVVYGVAMCYADSQWDDCQQCL

SEQ ID NO: 362714 - protein, 51 aa, Zea mays
  Clone ID: MRT4577_9396C.1.pep
QRKSIKNSTMHDLCSWLRFTFYSVLLGFVKSVFVLIRPLTPGLLKYCFSRK

SEQ ID NO: 362715 - protein, 34 aa, Zea mays
  Clone ID: MRT4577_93970C.1.pep
ACQFTARKVLDIVNQSRCSSSGCESYKITINTSC

SEQ ID NO: 362716 - protein, 78 aa, Zea mays
  Clone ID: MRT4577_93971C.1.pep
PHGVGSADDSRNPRYGMCTHLVACAGTPNKKKKKKKGGYCYSEQYNSSIMMIVDGFKCDQCLLRLSLEAINNNMDALK

SEQ ID NO: 362717 - protein, 40 aa, Zea mays
  unsure (1)..(40): unsure at all Xaa locations
  Clone ID: MRT4577_93972C.1.pep
VKIKFLNDQNRLIIRKVKGPVCKGKILTLLKFXRKAKRLR

SEQ ID NO: 362718 - protein, 154 aa, Zea mays
  Clone ID: MRT4577_93973C.1.pep
MAEEVTPHNIHILLICYPSQGHINPMLRLAKRIAAKGILVTCSSSSVVRDDLAAASGVSAGGDGVPFGAGRLRFDFLDDPFDGTLLDLEDFLRHLETAGRLALADLLRRQAEAGRPVSCVIGNPFLPWVTDVAADAGIPSAVLWVQSCAVISVY

SEQ ID NO: 362719 - protein, 70 aa, Zea mays
  Clone ID: MRT4577_93974C.1.pep
QSEGQPRHPVPSQCAALGPLDHRRGRDRSRSRGWGWGWGGIHRRGDGDEDGVGVPDETCASARLDSLGSE

SEQ ID NO: 362720 - protein, 170 aa, Zea mays
  unsure (1)..(170): unsure at all Xaa locations
  Clone ID: MRT4577_93975C.1.pep
MATKAGSSLSPXASGSWRNPCSSRRKTPASSQRPSCSSSPTPSSSSRSPSTSLTHSPRTSSPTSXAQRSSSRTTTTTGAASSNHSKELSLLAXSTSATSRANSPPSSSPPSPPPRPTPASASRVRWSWRGSPEAAAFSARLPSPARWSCRSRLYSRRYSYPRGPTLTTRS

SEQ ID NO: 362721 - protein, 74 aa, Zea mays
  unsure (1)..(74): unsure at all Xaa locations
  Clone ID: MRT4577_93976C.1.pep
ITVYVYLVNQVHMDYLEAGANIIITASYQATIQGFESKGFSKEQSENLLTKSVEIALEAREMFLKEHXEKFTPI

SEQ ID NO: 362722 - protein, 88 aa, Zea mays
  Clone ID: MRT4577_93977C.1.pep
NESKRTVYIAYVYSKARLNKGDHHPNAPQPWCRRSSPSSVPTCAYLDLCLIFRRFLLSLRILFFFHLARIASEQVERALELPVPDCGG

SEQ ID NO: 362723 - protein, 116 aa, Zea mays
  Clone ID: MRT4577_93978C.1.pep
PCSTSEFPSHHTPGRRSLDFERPTSSNLNRLVWEVIKFVTAPLRSHGPLIVDVKNSKTNLVPYPRIHFMLSSYAPVISYDRAFHEQFSVVEITIFSFDHVFDNTKIRTTVLKVHGL

SEQ ID NO: 362724 - protein, 96 aa, Zea mays
  Clone ID: MRT4577_93979C.1.pep
TQSQNMLELIKKDGLHRLRLQQSTSKKGRPSSQRGSAMVQEKLAILGPKMRLLRSLPHFPALPLEPTHPLLLPLGPHRVGAGGARARATCPPDCGG

SEQ ID NO: 362725 - protein, 115 aa, Zea mays
  Clone ID: MRT4577_9397C.1.pep
QLCNDTSGNGADKSACRANINQLATALTNNASSSPSLFAAGAAGSAPDVAYALALCRGDTNASSCARCVAASFKTAQQLCAFKRGATLYDDPCILRYADWDFLTNTTDNRGLYIA

SEQ ID NO: 362726 - protein, 72 aa, Zea mays
  Clone ID: MRT4577_93980C.1.pep
LGVTKLAKCIICFYTTLENKLVQFHSFFSQFSLFWLHALYHNLLLCFADVLLRHYLYQVWQPWLCPYSLYSI

SEQ ID NO: 362727 - protein, 85 aa, Zea mays
  unsure (1)..(85): unsure at all Xaa locations
  Clone ID: MRT4577_93981C.1.pep
FCCCQDGNFFGSFLSESVSPQNLFGHPDVERCPFVRNINGATTFSXLTSALPVAAQGGKGPIFEEGSGFESAFKLFYGRDGIVPL

SEQ ID NO: 362728 - protein, 120 aa, Zea mays
  unsure (1)..(120): unsure at all Xaa locations
  Clone ID: MRT4577_93982C.1.pep
SSDRNINKLRASYNYPHRVTGISINLEHHIIILNGLHRLRLQQSTSTKGDNHPNASQPWCRRSSPSSVTKCAYLDLCLIFRRFLLSLRILFFFHLARIASAQVERALELPAPLIAAAEYX

SEQ ID NO: 362729 - protein, 196 aa, Zea mays
  Clone ID: MRT4577_93983C.1.pep
MEMFFGSFLSESVSPQNLFGHPDVERCPFLRNINGATTFSLSSALPVAAQGGKGPIFEEGSGFESAFKLFHGRDGIVPLSERSYVSDENHNESIDVRTEPALPFNPLAARAATISLSAFGPFGFGFFNGKGKRQNKKPNNLDQSHQKPKTPDQSSMKVCPDTAFLHYMSHSICICRYFMTMLFDSFHPNINPSFNV

SEQ ID NO: 362730 - protein, 148 aa, Zea mays
  unsure (1)..(148): unsure at all Xaa locations
  Clone ID: MRT4577_93984C.1.pep
WLHPTAASAASSSLAGIGGKIQRPVDSAPFPAACSSLSIFGSRPQSFQFLPLSSALSLALPLTSAFPPPSVSSFLAGKRTKETGQDGSFKQHRRRAGRGVLATPAGAHRGALLHLRAQAPAAAAXPRPSPTRXRLRPPPPASCSSSFA

SEQ ID NO: 362731 - protein, 46 aa, Zea mays
  Clone ID: MRT4577_93985C.1.pep
CSKLNQKKKKKKKKKKKKKKKKKKKKKKKKKKKKKKKGQKKKKKKK

SEQ ID NO: 362732 - protein, 155 aa, Zea mays
  unsure (1)..(155): unsure at all Xaa locations
  Clone ID: MRT4577_93986C.1.pep
EGPIRPSRPCPRHPQSPQPPSPSSAPPGALHAPARPATARGGGARIRPARRSLRTTTCSRRAPPRPCPKRRRRRGQGERGGPGRRAAPGGTRXELLPLTRSESXPARRGPCSRTPRRRXRQSRRRLXPRLRRADAAAATPLPPPRPRGLLCLRSP

SEQ ID NO: 362733 - protein, 221 aa, Zea mays
  unsure (1)..(221): unsure at all Xaa locations
  Clone ID: MRT4577_93987C.1.pep
MEALREATAELTVYVHPSNAADVRLAVSRQLSTLLFSYEDRFDGVLLSHEVEFEGDNEDGQDRKVDGDGKRVIKAKILDGLVPYFGVPVTANMLLFSPQPEMIXXEGKVEMLGKESIHAXVLGVFSAAIMADDIPEMFKFKRRGHGGKFISQSDKRHVIKKGSMIRFSVKRVDTEMNCHITXGSLMPPHTGCMRWLSVHDAEYAXEISSGKRKPRDLTKSE

SEQ ID NO: 362734 - protein, 43 aa, Zea mays
  Clone ID: MRT4577_93988C.1.pep
FIFCLRIYEVYHIRGLKQGVYFVILKLFCIWTNTKYPSGLFFF

SEQ ID NO: 362735 - protein, 99 aa, Zea mays
  Clone ID: MRT4577_93989C.1.pep
MSQLSGWKCFFGSFLSESVSPQNLFGHPDVERCPFLRNINGATTFSLSSALPVAAQGGKGPIFEEGSGFESAFKLFHGRDGIVPLSERSYVSDKNHNEH

SEQ ID NO: 362736 - protein, 115 aa, Zea mays
  Clone ID: MRT4577_9398C.1.pep
KIHLFFKKTERPKRKNGGLRYTLFFTKKGLALGLNEGPGTSFLGPYHWRGGPHDPPRGNRARTGQIFRGGGKTSPPLVFSWKMAKKKSPSFHPGGPGVTKTTFKKKFFPPAPGFL

SEQ ID NO: 362737 - protein, 225 aa, Zea mays
  unsure (1)..(225): unsure at all Xaa locations
  Clone ID: MRT4577_93990C.1.pep
MGALSSIGVGLAVVSSLLLLALTAELYYIFVHKRRQRRRAAAVSDAASSPSSSSRELLQLFCFKKPPPXRVHLRRPGAGVRRGXVSVGDDDDDDGETVEAQLMRLGSVVGPTRLLFTIKEETREDLESEDGGRGRSRSRSRSLGELLHCAETPPFFTPRASPSPVPTASMDNSYNPLFESPAASPVPTHAPTVSPPPKFQFLRDAEDKLYRRALAQEEAMRARRS

SEQ ID NO: 362738 - protein, 251 aa, Zea mays
  Clone ID: MRT4577_93991C.1.pep
GTLEAGRVKSPPFCSNKNPDAAWYDKMEACITPLPEVSDLKEVAGGSLKKWPERLTAVPPRIASGSIEGVTEEMFVEDTELWKKRVGHYKSVIAQLGQKGRYRNLLDMNAKFGGFAAALVNDPLWVMNMVPTVGNSTTLGVIYERGLIGSYQDWCEGMSTYPRTYDLIHADTLFTLYNGRCEADNILLEMDRILRPEGTVIIRDDVDMLVKIKSITDGMRWNSQIVDHEDGPLVREKLLLAVKTYWTLDDR

SEQ ID NO: 362739 - protein, 93 aa, Zea mays
  Clone ID: MRT4577_93992C.1.pep
MEMFFGSFLSESVSLQNLFGHPDVERCPFLRNINGATTFSLSSALPVAAQGGKGPIFEEGSGFESAFKLFHGRDGIVPLSERSYVSDKNHNEH

SEQ ID NO: 362740 - protein, 68 aa, Zea mays
  Clone ID: MRT4577_93993C.1.pep
NNNNKKNNHFKKNKTNFPFLAESKYLLGGVSNYNLHSIFPYLTNLFLWKTFPFPTLFTFLKFPFLPVS

SEQ ID NO: 362741 - protein, 68 aa, Zea mays
  unsure (1)..(68): unsure at all Xaa locations
  Clone ID: MRT4577_93994C.1.pep
LFLGMQINYAYARDNETLFDIISVKVWSLSGYPGNFLQFMYFGINYQFANQSFSFAFFDKHXLARQMN

SEQ ID NO: 362742 - protein, 88 aa, Zea mays
  unsure (1)..(88): unsure at all Xaa locations
  Clone ID: MRT4577_93995C.1.pep
RRAWQNTGKKNAPKSVETYQIYIFKVLKQVHPDIGISSKGMSIVNSFINDIXFDNLVVEADKLARYNKKPTITSREIQTSVRLVLPVE

SEQ ID NO: 362743 - protein, 91 aa, Zea mays
  Clone ID: MRT4577_93996C.1.pep
YDKIYHADLTTWVIIKREKITGAERKQTLAKRNLPTKLKKRHPPKADYRGPLWRGAKRSRLNRVLQAGGDPPDGEDHRVQHDGGLPARRVH

SEQ ID NO: 362744 - protein, 89 aa, Zea mays
  Clone ID: MRT4577_93997C.1.pep
LLLKIIMDPFVHIPNQDTTVSAQDMLKLLESLELNPSSVPELQALYESAKNGKPVERDSLMNVVSSLLTNDSQHLGELTSSIGNFEIEF

SEQ ID NO: 362745 - protein, 375 aa, Zea mays
  Clone ID: MRT4577_93998C.1.pep
MDSTLNQVKEESHGEGGDLMAGTVEAADGPSAAVAAAPKPMEGLHDPGPPPFLTKTYDMVDDSDTDLIVSWSATNNSFVVWDPHAFATVLLPRHFKHNNFSSFVRQLNTYGFRKVDPDRWEFANEGFLRGQRHLLKNIRRRKPPAQNATNQQSIGPYLEVGHFGYDAEIDMLKRDKQLLMAEVVKLRQEQQNTKANLKAMEDRLQGTEQKQQQMMAFLARVMRNPEFLKHLVSQNEMRKELQDAISKKRRRRIDQGPEADDLGASSSLEQGSPVLFNAQDPVEFLVDGIPADLESPAFDGHGLIGPHDIDIDIDIGSTYEQQQDMPQEDLNDNFWEQLLNEGLGEENDSPVIEDDMNVLSEKMGYLNSDGPTSSN

SEQ ID NO: 362746 - protein, 75 aa, Zea mays
  Clone ID: MRT4577_93999C.1.pep
KVPSSQQFEKESFPTTPDRKYNDSWSTSDPWIRKPIQSSIEQRTVFFRTQSYARRCTESKARSRISRCTSAATTL

SEQ ID NO: 362747 - protein, 137 aa, Zea mays
  unsure (1)..(137): unsure at all Xaa locations
  Clone ID: MRT4577_9399C.1.pep
MAKRRRHELAPVVEELISPMNSLDDGCLMHIFSFLSPIPXWRFLACHPRLWLRVERPIRDAMEPGVYPDLEAAVSAARPGDTILIAAGGSHVACNIQIKKPICIIGGGDLPDDTVLTCSRGFDNALEFLSTCKIANL

SEQ ID NO: 362748 - protein, 76 aa, Zea mays
  Clone ID: MRT4577_939C.1.pep
GSFVLQFEHTFFLGPTCKKVFSKGDDFLLGLEGAPCTRLCVWSPPRFWMDYRTCPPRINGLVPQSSGCCLSFIKTR

SEQ ID NO: 362749 - protein, 245 aa, Zea mays
  unsure (1)..(245): unsure at all Xaa locations
  Clone ID: MRT4577_93C.1.pep
MAAPPARARADYDYLIKLLLIGDSGVGKSCLLLRFSDGSFTTSFITTIGIDFKIRTIELDGKRIKLQIWDTAGQERFRTITTAYYRGAMGILLVYDVTDESSFNSXLLNYILQILTASILNYFTTCLQLVHLKYXIRNWIRNIEQHASDNVNKILVGNKADMDESKRAVPTAKGQALADEYGIKFFETSAKTNLNVEQVFFSIARDIKQRLAETDSKPEDKAIKINKPDQGSEAPAAQRSACCGS

SEQ ID NO: 362750 - protein, 107 aa, Zea mays
  Clone ID: MRT4577_94000C.1.pep
ATHPPRARDGSPTPAVVPGNREEDPALVPPRGPRSSRLPAQISPISGSRRGRSTSCCVRRFRHPAALISSPPLASGVVLWPPVCRLLSTCTCRAVGGGKHGEVVLPG

SEQ ID NO: 362751 - protein, 45 aa, Zea mays
  Clone ID: MRT4577_94001C.1.pep
MANASQFSWKQALPLARNSEGHGNRATAAELPSLADTTQVLVRWK

SEQ ID NO: 362752 - protein, 88 aa, Zea mays
  Clone ID: MRT4577_94002C.1.pep
TYIAYDAGPLHLAPGLFGHGPTYCTIDIRTFDHSLTTISVTSYTPYNFDNLVKSLIFVTNKPTYVPYDLYDATPSYLNVINNDHVDAY

SEQ ID NO: 362753 - protein, 60 aa, Zea mays
  unsure (1)..(60): unsure at all Xaa locations
  Clone ID: MRT4577_94003C.1.pep
MLTHPLQGPGLDLGLHCILSNGLAGAXLLDCFPYSAQSWGGGRRGVGVNPSLFKFQLGLL

SEQ ID NO: 362754 - protein, 146 aa, Zea mays
  unsure (1)..(146): unsure at all Xaa locations
  Clone ID: MRT4577_94004C.1.pep
GAFGXPXGXCARVAFGPGLLSVRAXAPXAAXARXALRRAXFXFPGRXXXXARXXWGFXGFRRAXXLXXXXAGXXVPXGVXXXLLGXXXXLXXRAPGXAFLAAVAVLSVRPPPPPFLSFLLFCGACLVPAFLVLVLPAPSFVLPPPP

SEQ ID NO: 362755 - protein, 143 aa, Zea mays
  unsure (1)..(143): unsure at all Xaa locations
  Clone ID: MRT4577_94005C.1.pep
MPSTEIDTSANKFFSYWDPDKKEYLLQLYFKPRPPEANKPPPAPPGTLPNGTGVPGAPTRPPAQAPPPLPXLPPPPPHAPVSXPMGMPPRIPPPPMGGVQPPPPPPPPVANGPRPMIPPPPNFTPGAPPPRPPMHGFPGQQQQ

SEQ ID NO: 362756 - protein, 85 aa, Zea mays
  Clone ID: MRT4577_94006C.1.pep
GQGTLPGSATDSLSKFNVTISAVSELEGVQGCACLSMPEQKTQSPLSDGPLGVGFPFLPFPLYNFMCLGLLLWAFCRCFLLPPNL

SEQ ID NO: 362757 - protein, 93 aa, Zea mays
  unsure (1)..(93): unsure at all Xaa locations
  Clone ID: MRT4577_94007C.1.pep
FLNLTIAFTLSLLGTFIXXXHLISTLLCLEGIILSLFVITSTSTLNSNSIISXPXPITIXVFAACEEQLGLALLXKISNTYGTDYVQNLNLLQ

SEQ ID NO: 362758 - protein, 85 aa, Zea mays
  Clone ID: MRT4577_94008C.1.pep
KKSSVCPCQITSLKSGLGHNHSHVGYSTAVCGMWMEQGFSGFFGLCDKLSLMQYSRTVLPPTGRVYFRRSINSLHTGIACYYLDN

SEQ ID NO: 362759 - protein, 98 aa, Zea mays
  Clone ID: MRT4577_94009C.1.pep
TLPFLSSCSVQLHHLSSGVRAVLYGASDLGSPSCDAIEEESVCHRLVCLGRHYLPRASCMVLIRRWGLGPQVGTLALSSPLVALYQKKNHMARRSFMS

SEQ ID NO: 362760 - protein, 55 aa, Zea mays
  unsure (1)..(55): unsure at all Xaa locations
  Clone ID: MRT4577_94010C.1.pep
PRVRPRVRLRVRKKKKKKKKKKKKKKIKKKKKKKKKKKKNKNKXNKIKKINKKNK

SEQ ID NO: 362761 - protein, 60 aa, Zea mays
  Clone ID: MRT4577_94011C.1.pep
WLNLTQGGGFLKLHHVLCPYPCHSSKHFHFPTTPNNHINNMVPPRSSTDKGCSVHLITCT

SEQ ID NO: 362762 - protein, 33 aa, Zea mays
  Clone ID: MRT4577_94012C.1.pep
PEVQSNTIQLGEFRIPSLSKLGIVSFRVRKHIS

SEQ ID NO: 362763 - protein, 546 aa, Zea mays
  unsure (1)..(546): unsure at all Xaa locations
  Clone ID: MRT4577_94013C.1.pep
MAYHLISSPLFLLAQLLAVAVPLLLLLLHHRSSIRRRRRSSSSRSAKQGGQLLPPSPPALPIIGHLHLVSDLPHVSLRDLAAKHGGDDGLMLLRLGAVPTLVVSSPRAAEAITRTHDHVFASRPTSTLSDEILYGSSDIAFSPYGEHWRQARKLVTAHLFTVKRVHSYRRARKEEVRLVVAKVREAAVAGTATDMSLAMNTFANDIISRAVSGKFFRAEGRNKLFRELVEANSALFGGFNLEDYFPGLARAXVSLAEGCCFCAXRRVQETHRRWDELLETILSDHEGRRGSVSVDGGGDFTDVLLSVQTEYGMTRDHLKAILVDMFGAGTDTSSLVLELAMAELMRNPQQMAKLQAQVRRHTPEGQETVEEENLSDMPYLRAVVKETLRLHPPAPLLVPHLSLADCVVDGYHVPSGTRVIVNAWALGRDPGSWEKPEEFLPERFMDGGSAAGVDIKGNHFHFLPFGAGRRICPGLNFGMATVEIMLANLVYCFDWQLPMGMEEKDVDMTEVFGLTVHPKEKLMLVPKLPATAAPTATARQLHPPSC

SEQ ID NO: 362764 - protein, 681 aa, Zea mays
  unsure (1)..(681): unsure at all Xaa locations
  Clone ID: MRT4577_94014C.1.pep
MPALHPHRRSFPIPLLLLLSLFASSPLFFSPSPAATAVGDCPLDFSWANFTLAAAACSDPTQRAACCRYINAFVAISIARYANATGRLGVPPAFAEICLSSVSETFKLRGIPTDADVFCGLGPKIRVSYQCAGRDTVLEMMQSPNFNDVIGSCRGPLSLDITCKTCLNYGIVYLHRLIGSDDNVGLSVCRNAVFVTLATQGGILSYEDIVTCFFGVQGITTFPGPASVTSTPASSPNVTVDSPAPRIKSLPQKQHQHYRITVIPGIGIGVILFAVLLQIVLAVLIRRKSRELKNAEFPARNPDNTFHYNQSWRCPEGQSPMFQRFSYKETMKATDNFSTVIGKGGFGTVFKAQFNDGSIAAVKRMDKVSKQAEEEFCREMELLARLHHRHLVTLKGFCIEKKERFLVYEYMANGSLKDHLHSSGRKPLSWQTRLQIATDVANALEYLHFFCNPPLCHRDIKSSNILLDEHFVAKVADFGLAHASRTGAISFEAVNTDIRGTPGYMDPEYVVTQELTEKSDIYSYGVLLLELVTGRRAIQDRTNLVEWAQSHLSSGAVSPELVDPRIRGAVDVDHLHVVVGIVQWCTHREGRQRPSVRQVLRMLSERLDPGNGSFGEGMEDAEGXSIPGAAGXGAHHRNELVPYGGGDMRSLHSSSSTTRSSYCSRSMLLESGQTQSPPETQ

SEQ ID NO: 362765 - protein, 149 aa, Zea mays
  unsure (1)..(149): unsure at all Xaa locations
  Clone ID: MRT4577_94015C.1.pep
IINAWALGRDPGSWEKPEEFLPERFMDGXSAAGVDIKXTTFHLLPFGAGRRICPGLNFGMATVEIMLANLVYCFDWQLPMGMEEKDIDMTEVFGLTVHPKEKLMLVPKVARVLQLLVNNSIVQVADRRDSRSIMHVYGLFGVENCMQRV

SEQ ID NO: 362766 - protein, 195 aa, Zea mays
  unsure (1)..(195): unsure at all Xaa locations
  Clone ID: MRT4577_94016C.1.pep
RAVSGKFFRAEGRNKLFRELVEANSALFGGFNLEDYFPGLARALGFLSRRLLFLRNRRRVQETHRRWDELLETILSDHEGRRGSVSVDGGGDFTDVLLSVQTEYGMTRDHLKAILVVRRXIYKYNPYLMHDMTIMTGIILXDMFGAGTDTSSLVLELAMAELMRNPQQMAKLQAQVRRHTPEGQETVEEENLDMP

SEQ ID NO: 362767 - protein, 99 aa, Zea mays
  Clone ID: MRT4577_94017C.1.pep
FKTPPTQKKAATPSQINKGHARESPPPQGVPAAQQKKSGPPKPKRGPPHARARTPGFLYIARPFFFFFFFFFFFFSPPFDRPHIVSTCINNTILRFQPL

SEQ ID NO: 362768 - protein, 60 aa, Zea mays
  Clone ID: MRT4577_94018C.1.pep
YCLWRHLSLERHRRYGQVLFYGHRSLALYYGSLRANRDMYQSYKLKSPVYVLISGTRART

SEQ ID NO: 362769 - protein, 94 aa, Zea mays
  Clone ID: MRT4577_94019C.1.pep
PWVTKWASSLGSTKLTTVGMCVAKVGHIATTADEKTKSRKETYRSSRTTTSFRCGLADTPNQLAVKVLSYTALNLALTFTCLVGDYADGFDSAM

SEQ ID NO: 362770 - protein, 264 aa, Zea mays
  unsure (1)..(264): unsure at all Xaa locations
  Clone ID: MRT4577_9401C.1.pep
MNSLDDGCLMHIFSFLSPIPDRYNTALVCXRWRFLACHPRLWLRVERPIRDAMEPGVYPDLEAAVSAARSISRPPPLSLSSSHCAQWMLWLISMYLVXPGDTILIAAGGSHVACNIQIKKPICIIGGGDLPDDTVLTCSRGFDNALEFLSTCKIANLTIRAELGCCLLHRGGRLTIQECLLQCEQNPLDHLSFPIISTAIEYDPFSSLKEQGHGVTVVRTRIEGGARAVRTNGTLALRHVRAIYSRSSVFFWFEVGEKVEAPVH

SEQ ID NO: 362771 - protein, 47 aa, Zea mays
  Clone ID: MRT4577_94020C.1.pep
VTESSQIHIVHKLTTLIIEIHVQLEYLDNCLKGKMMRTKSLCSNTTI

SEQ ID NO: 362772 - protein, 269 aa, Zea mays
  Clone ID: MRT4577_94021C.1.pep
MFMQQFCGVNVIAYYSTDIFVSGGFSYSNALLVSLGTGIVNWLFAIPAIYTIDTFGCRNLLLTGFPLMAICLFWGGFSFLIGGGPPTEGDPANPAQLGSIAAAIFCFMAIYSPSEGPVPFTYSAEAFPLYIRDIGMSFATATCWGFNFIIAFSWPALRTAFTPTGAFCWYACWNLFGWVYCYFLLPETKALTLEELDTVFNVGNRDHAKYYTQKLPWYVGKYIMRRDVMPIAPMYEFEDEPETRHNSVSDQKAAPRATPADYQQYNNHL

SEQ ID NO: 362773 - protein, 83 aa, Zea mays
  unsure (1)..(83): unsure at all Xaa locations
  Clone ID: MRT4577_94023C.1.pep
MAAXXRTIVFIQTIGPHIXTXXTPTXPLSYFIKXSILPYIXTFFHNNISKNILQPYSISKHSFHQTSSXSFXTXXPLSXIPXI

SEQ ID NO: 362774 - protein, 62 aa, Zea mays
  Clone ID: MRT4577_94024C.1.pep
MANAGALLRLSYGDNATIFFTPEGDGPTTVTGRVSGLTLGPPGLHVHTLTDTTNGWLSTGPH

SEQ ID NO: 362775 - protein, 65 aa, Zea mays
  Clone ID: MRT4577_94025C.1.pep
LSQPSPCRRQTLCSHHNHATTWPCGRRVTLDLAAAAAQTLPADDDDQRDYTRQTWPPMNTQATKQ

SEQ ID NO: 362776 - protein, 178 aa, Zea mays
  Clone ID: MRT4577_94026C.1.pep
SRPAGPGYLITIRQTQTGNTVWRAGGWLWACSRCRLAALGVRRHSGTDAPWWAGGRWHCGSWAQALRSAAAGRWHCGLRRPGADRSSRALRSSASPPVASESAFSAAGRVVDPYRNRLDPEMVQALICTKDWIRASRKDSVIIHSILTDLKPSETIHMDFEEQDADSDPDVMNDYGEL

SEQ ID NO: 362777 - protein, 242 aa, Zea mays
  unsure (1)..(242): unsure at all Xaa locations
  Clone ID: MRT4577_94027C.1.pep
QSFYDLTELLSGTSYPTANIFYRGFCEIKELLDKWCVDEDLTIRTMAISMSDKFEKYWSCSSLSLALACFLDPRYKKKLAEFYMRKFYGDYYQVRLDELVGAMKNLFLFYASSKPSASNNDMNANQHVSPTXFSYTDKYPILSQIARDVMSIQVSTVASESAFSAAGRVVDPYRNRLDSEMVQALICTKDWIRASRKDSTIIHSILADLKPSEAIPISQPCMDDEEQDVESDPDVMNDYDEL

SEQ ID NO: 362778 - protein, 54 aa, Zea mays
  Clone ID: MRT4577_94029C.1.pep
DVYNVYIIRNVIVFFSFPQVTCTSSTWRTRPWPFCRWQKCPNVLRLINQLASYC

SEQ ID NO: 362779 - protein, 203 aa, Zea mays
  Clone ID: MRT4577_9402C.1.pep
MNPEYDYLFKLLLIGDSGVGKSCLLLRFADDSYLESYISTIGVDFKIRTVEQDGKTIKLQIWDTAGQERFRTITSSYYRGAHGIIVVYDVTDQESFNNVKQWLNEIDRYASENVNKLLVGNKCDLAENRVVSYEAGKALADDIGIPFLETSAKDATNVEKAFMTMAGEIKNRMASQPAASGASRPATVQMRGQPVSQQSSCCS

SEQ ID NO: 362780 - protein, 70 aa, Zea mays
  Clone ID: MRT4577_94030C.1.pep
NKNIRPGNGEEPTDQSLNPYQKHICVVVCGRPKPRSNQLYVLDWSIPSAITFMFNEKATDSTLSIVGKLE

SEQ ID NO: 362781 - protein, 69 aa, Zea mays
  unsure (1)..(69): unsure at all Xaa locations
  Clone ID: MRT4577_94031C.1.pep
MARIKXGINGFGRIXGRMGDRLVLKSDHVXLVPVNDPFISTDYMSYMFKSDTVHGHWTHHESPGKDSKP

SEQ ID NO: 362782 - protein, 377 aa, Zea mays
  Clone ID: MRT4577_94032C.1.pep
MADGEDIQPLVCDNGTGMVKAGFAGDDAPRAVFPSIVGRPRHTGVMVGMGQKDAYVGDEAQSKRGILTLKYPIEHGIVNNWDDMEKIWHHTFYNELRVAPEEHPVLLTEAPLNPKANREKMTQIMFETFNVPAMYVAIQAVLSLYASGRGGGIVLDSGDGVSHTVPIYEGYALPHAILRLDLAGRDLTDSLMKILTERGYSFTTTAEREIVREHKEKLAYVALDYEQELKSAKSSSSVEKSYELPDGQVITIGAERFRCPEVLFQPSFIGMEAPGIHETTYNSIMKCDVDIRKDLYGNIVLSGGTTMFPGIADRMSKEITALAPSSMKIKVVAPPERKYSVWIGGSILASLSTFQQMWISKAEYDESGPAIVHRKCF

SEQ ID NO: 362783 - protein, 84 aa, Zea mays
  Clone ID: MRT4577_94033C.1.pep
AGTEYIGGPTISLVRGRPALNQRQKDGTGNGILEWHMLIQNDSLTCYKETFHPRKNLGLQQDTGFPTESELSEINWKSNGRAQQ

SEQ ID NO: 362784 - protein, 378 aa, Zea mays
  unsure (1)..(378): unsure at all Xaa locations
  Clone ID: MRT4577_94034C.1.pep
MADGEDIQPLVCDNGTGMVKAGFAGDDAPRAVFPSIVGRPRHTGVMVGMGQKDAYVGDEAQSKRGILTLKYPIEHGIVNNWDDMXEKIWHHTFYNELRVAPEEHPVLLTEAPLNPKANREKMTQIMFETFNVPAMYVAIQAVLSLYASGRTTGIVLDSGDGVSHTVPIYEGYALPHAILRLDLAGRDLTDSLMKILTERGYSFTTSAEREIVRDIKEKLAYVALEYDQELENAKSSSSVEKSYELPDGQVITIGAERFRCPEVLFQPSFIGMEAPGIHETTYNSIMKCDVDIRKDLYGNIVLSGGTTMFPGIADRMSKEITALAPSSMKIKVVAPPERKYSVWIGGSILASLSTFQQMWISKAEYDESGPGIVHRKCF

SEQ ID NO: 362785 - protein, 103 aa, Zea mays
  Clone ID: MRT4577_94035C.1.pep
WTFVDFPIHDLDLSKYIGHRCQDVPHNYRLYATSNHYGSLGGGHYTAYVYHEGKKGWYDFDDRHVGPITEDSIKTSAAYVLFYRRIQEDSLDTVTDIDSDIPT

SEQ ID NO: 362786 - protein, 193 aa, Zea mays
  Clone ID: MRT4577_94036C.1.pep
TVQAMAFLSHLAEDKNIWGPFLVVAPASVVNNWAEELIRFCPDLKILPYWGPERMILRKNINPKRLYRRDASFHILITNYQILVNEEKLLRRVKWQYMVLDEAQAIKSSSSQRWKTLLSFSCRNRLLLTGTPIQNNMAELWALLHFIMPTLFDSHEQFNEWFSKGIEGHAEHGGALNEHQLSRLHAILKPFML

SEQ ID NO: 362787 - protein, 214 aa, Zea mays
  unsure (1)..(214): unsure at all Xaa locations
  Clone ID: MRT4577_94037C.1.pep
MSMHPARQAYVEEENGVGDAMEGIDLASVPLDRNHAMPGGGNASASSLMEDFDRKRRAAQLVVPTADRDVKAKLRSRGEPITLFGEGPAERRDRLRALLAEAQEALGEDAADVDMQDAEEGAGDEQEEFYTQGTQALLDARREMAKYSLPRAKERIAYQRREATIPLKTHIEFRNGIKERLKGFELYGSQXADRPVSIVRVSPNGQYVAYGTWG

SEQ ID NO: 362788 - protein, 521 aa, Zea mays
  Clone ID: MRT4577_94038C.1.pep
MAIAALELLYVLGSLVALRLAWQVLEWGWLSPRRLGRALRAEGLRGTAYRFPAGDAKDEERLLAAARAKPMPSLSHAISARVGPLVHNAIHEHGKISVVWIGPTPKVILSDPKLVREVLSKSSKFGDFQKPKLPSHFIKLIAQGLTVHEGEKWAIHRKIIRSAFLVEKLKEMLPAFTACTGELMGRWEESMGCDGAREIDVWPEMQDLTGDAISRAAFGSSLIEGRRIFRIQAEQIKIANEMTNLYIPGYTYLPTKPNRRIKANAREVEALLRGIITKRETAMKNGHADDSDLLGKLMQSNVEEAHGGGGSSKPMMTMEDIIGELKLFYFAGMETTSALLAWTLIVLSMHPEWQDRAREEVLEVFGKNEPNINGTNSLKVVTMVLYEVLRLYPPIIDLERQTWKEMELGGVRYPPGVTLLLPILAIHHDPDLWGEDVDQFRPERFADGISKASRDTPAFFPFGWGPRICVGQNFALLEAKVALAMLLQRFSFGLSPSYTHAPFSVSTVQPEHGAQIVVKKI

SEQ ID NO: 362789 - protein, 99 aa, Zea mays
  unsure (1)..(99): unsure at all Xaa locations
  Clone ID: MRT4577_94039C.1.pep
DPNXLSFVGARFWVFHNKLIKYDPYTLQGMNTLYCILIGGKTTQRRVVDRYTLYVLARWGGRGXSAYVIGGCARDRPRWAWSGLFLGAAFVWDTLVLGP

SEQ ID NO: 362790 - protein, 108 aa, Zea mays
  Clone ID: MRT4577_9403C.1.pep
PTRPPTRPPTRPPTRPRTRGRLGESLVTYYNQPLIAGLLSFVARTLNSYWGTQQWVDLARYTGLQRSEEKPPAEATMPPDSAHLEGCTTEGHDFDDSSNNTNKSTGPS

SEQ ID NO: 362791 - protein, 218 aa, Zea mays
  Clone ID: MRT4577_94040C.1.pep
MNGSLYDFLHLSDDYSKPLTWDTRVRIAVGTACALEYLHDACSPPVIHKNIKASNVLLDADLNPHLTDCGLAYFYEDPSQSLGPGYDPPECTRPSGYVMKSDVYCFGVVMLQLLTGRKPYDSSKPRAEQSLVKFVGPQLHDTNALEALADPGLRGLYPPKALSRFADVLSRCVQSDPELRPSMSEVVQLLLQCVQRTTSNRRLGGHRTVSQRSDDSDW

SEQ ID NO: 362792 - protein, 47 aa, Zea mays
  Clone ID: MRT4577_94041C.1.pep
KPSYFFSPRSRSEIGWNPFFIKLKMACGERAMGMGCFVALVKNCLTH

SEQ ID NO: 362793 - protein, 95 aa, Zea mays
  Clone ID: MRT4577_94042C.1.pep
LKPPGGRKPWCRNNMFTRGNFAPPEGLPLQNTMPPNSTGGANPSWEASQDLNWRGKQKPFFWRFFFGPVRTVFLPHVQDPLLTGLFSRPLALFPI

SEQ ID NO: 362794 - protein, 55 aa, Zea mays
  Clone ID: MRT4577_94043C.1.pep
FWIASGEGEGVPITASIFATNKSCSTRDPIQILWRHPPPSVQPQQSSNPPPVVQA

SEQ ID NO: 362795 - protein, 90 aa, Zea mays
  Clone ID: MRT4577_94044C.1.pep
ARTIHSALLTCLWSPVYWAVCIITRSSIIITIKGCGSRTVTRACSGMDAVALDPLSIDIAELGQLVDTITLVVYMFQCSRRADVHDGIHV

SEQ ID NO: 362796 - protein, 124 aa, Zea mays
  Clone ID: MRT4577_94045C.1.pep
RTRRLTRRDTCRKLHHLLHERDLPKHSLLPADGIAVWVAAYHIIGGRTTPWQMIKSQQLQLRIHDMMSLKGISFISSKVIMHESTAVASSSSSPARAATGQHVAAHRSPSKIAASSWTHYRRLH

SEQ ID NO: 362797 - protein, 120 aa, Zea mays
  unsure (1)..(120): unsure at all Xaa locations
  Clone ID: MRT4577_94046C.1.pep
MSEVKPEEISHPAMEQLQGFEYCIDSNPPWGEAIILGFQHYILALGTAVWIPAVLVPMMGGNDGDRXVRVVQTLLFVTGINTLLQSLFGTRLPTVIGGSYAFVIPVMXIVQDSSLAAISD

SEQ ID NO: 362798 - protein, 92 aa, Zea mays
  Clone ID: MRT4577_94047C.1.pep
THRMYPILPGLMVYSHTRKTFTLINPQIGSPSLSKLYPSLPLEAHSGIPLTHTRKKKLSTCHNLKPYVQNIMQEFKIYMQPKPNTIAYHEFL

SEQ ID NO: 362799 - protein, 66 aa, Zea mays
  unsure (1)..(66): unsure at all Xaa locations
  Clone ID: MRT4577_94048C.1.pep
VLIVALALLALAASVASSTSGGCGCXTPPFHLPPPFYMSSPFYLSLXQQSTLWQYPTRSPHLCPCQ

SEQ ID NO: 362800 - protein, 229 aa, Zea mays
  Clone ID: MRT4577_94049C.1.pep
MATAAQVAATFLSFLSCPRHHTAPSPSISFLATPVLPASLRAAAAGGQTLTFRCRGRRIAVVAQLPTMIPELASGEKKIRWSSRAVRSFAMAELEARKMRYPTTGTEGLLMGILVEGTSDAAKLMRAKGITLLTVRDAAATILGKSEMFYFSPMHPPLTESAQRALDWAVNEKLKSGEDGEVTANHLFLAIWSDKESAGHKVLASLGFDDQKASLLAKTAGEEKAMSPR

SEQ ID NO: 362801 - protein, 97 aa, Zea mays
  unsure (1)..(97): unsure at all Xaa locations
  Clone ID: MRT4577_9404C.1.pep
WLLAAESMGFFTKEVWLQGMTSXKCAAQTRXLSRFDFLRSQLNDISSFKNIYRYAFDCSRDKVQRSLDIRTAKSMLALLLMMTWPLCAVXYQYLESS

SEQ ID NO: 362802 - protein, 39 aa, Zea mays
  Clone ID: MRT4577_94050C.1.pep
PPHHDRPLHLHSTYKSFMYGTRLCVWQIVRSHCILGRVN

SEQ ID NO: 362803 - protein, 79 aa, Zea mays
  Clone ID: MRT4577_94051C.1.pep
VDRVSAYYYGARTTEAETRACMHAGYVDRRRRRLWPGNLASKLARVPGGPIFMYLRESPLSSPHLIPHGDLHFTLFARP

SEQ ID NO: 362804 - protein, 180 aa, Zea mays
  unsure (1)..(180): unsure at all Xaa locations
  Clone ID: MRT4577_94052C.1.pep
PDPPEAGSTYAIRLRLPANTGTHHTRQEKTWATTIGASCTAGHSGCSNSGKNARLNRXLNFRVKADNELYFIKDGPPFRVELQXTGGSKVGYLGAGTLGPKGKNVAWESKSGCSNIDNDGDTVARDVELXDPEENIGAKLDKAAAHKTNDLAGDGTTTSVVLAQELIADGVNVLAAGANP

SEQ ID NO: 362805 - protein, 48 aa, Zea mays
  Clone ID: MRT4577_94053C.1.pep
APSSLRLLRHESEVAEEENAQAEAQEKKDEAEVQVNHLVHPRSLREQK

SEQ ID NO: 362806 - protein, 366 aa, Zea mays
  Clone ID: MRT4577_94054C.1.pep
PLERKLCILKGVFPRQPKKKVEGNHKTYYHTKDIAFLAHDPLIEKFREIKVHRRKVKKAVAKKNRDLADRLLNRPPTYKLDRLVLERYPTFVDALRDLDDCLTMVHLFAALPAVDGERVEVKRIHNCRRLSHECLTFISVKGIYYQAEVQGQKITWLTPHALQQVLTDDVDFNVMLSFLEFYETLLGFVNFKIYHSINVNYPPILDPRLEALAVELYALCRYMSAGSRRMIGNSQTDEVMEDKDEKSKAEEVIEEEKVVKNKASSKADESEFRLAQLQHQLPTNEPGALMNLVEESTADDADDDDTKDCKGLFKNLKFYLSREVPRESLLFIIPAFGGTVSWEVCFAPLEPAEKNLPFQLKTCPTH

SEQ ID NO: 362807 - protein, 174 aa, Zea mays
  unsure (1)..(174): unsure at all Xaa locations
  Clone ID: MRT4577_94055C.1.pep
EGQALLSEPDVVVQPVDPAVARASRRNAPFVVRLTFKHPTEQSGDRELMXVSKQCPYSYLKGTLSGNYGFHPVGLSDPQGTGSHSSEPKXLRYDEVINGRYAMLGAAWAPSYPEIFIKMGIIPPETAXLTWIKMGVIPTARIYNYWDDSYTIFXILXMAIMCFVEYRRTQYWYN

SEQ ID NO: 362808 - protein, 367 aa, Zea mays
  Clone ID: MRT4577_94056C.1.pep
VEVKRIHNCRRLSHECLTFISVKGIYYQAEVQGQKITWLTPHALQQVLTDDVDFNVMLSFLEFYETLLGFVNFKIYHSINVNYPPILDPRLEALAVELYALCRYISAGSRRMIGNSQTDEVMEDKDEKSKAEEVIEEEKVVKNKASSKADESEFRLAQLQHQLPTNEPGALMNLVEESTADDADDDDTKDCKGLFKNLKFYLSREVPRESLLFIIPAFGGTVSWEGEGAPFKEIDEDITHQRLKDVFHSIGASSEKFTLSAENLPNTLEYIEGEVEALDEVIGSHADFCALVASRGTATAFLKAGCTHGKIVNRPNYSLSSSDLIDIPSLARSIGNRFMTQIWVNGGRKMTGDEARSHLKPDDEAEV

SEQ ID NO: 362809 - protein, 85 aa, Zea mays
  Clone ID: MRT4577_94057C.1.pep
AFGRPPPPVASCSRWSSARGWPFSPFCRSTRCGMCAVLSNKALLAPHPPLVVLVEARSCFCHSKEKSIPVLWPPTNKKKKKKKEK

SEQ ID NO: 362810 - protein, 127 aa, Zea mays
  unsure (1)..(127): unsure at all Xaa locations
  Clone ID: MRT4577_94058C.1.pep
ISDFGLAKLMSPEQSGLFTTMRGTRGYLAPEWLMNAPITDKADVYSFGMVLLEIVRGRKNSKKQGEEHQMASGSSASSSSSSSESSGYFPALALELHEQGRYEELVDPRLEGRADAVXVERVVRVAL

SEQ ID NO: 362811 - protein, 156 aa, Zea mays
  Clone ID: MRT4577_94059C.1.pep
RHRIRSRSRSRTAVGKREEAKADPVVVEEEKREAKVAGDGKGKEIKGKDDGGPKEDNSRKVSVRVRAADMPLPLQRRAVRLAYEAIAAMPRLDSKRLALALKKEFDTAYGPAWHCIVGTSFGSYVTHSLGGFLYFSVDKAYILLFRTAVEPLAHPR

SEQ ID NO: 362812 - protein, 137 aa, Zea mays
  unsure (1)..(137): unsure at all Xaa locations
  Clone ID: MRT4577_9405C.1.pep
PRGTEDHPRAAFESFEPGPKPRGHRQGRAAAEPPPNTNIGEDDEHXXAPRGPTAARIPDGRRNSSNRRPSAPDGRGSLQAMDNACRWTEKHEMGVIVEPHTAAEKKNPXKHRVTRDGTQYCGTTDTNISQTVHGKNT

SEQ ID NO: 362813 - protein, 194 aa, Zea mays
  Clone ID: MRT4577_94060C.1.pep
MDPASEELERRSRYLSSLIRRTKLSAVPAPSQPEPEPGVTQPTPEPEPESAVEKRGEAKAEPVVDEEEKREAKQAGDGKGKEIKGKDDGGPKEDNRRKVSVRVRAADMPLPLQRRAVRLAYEAIAAMPRLDSKRLALALKKEFDTAYGPAWHCIVGTSFGSYVTHSLGGFLYFSVDKAYILLFRTAVEPLVRPR

SEQ ID NO: 362814 - protein, 59 aa, Zea mays
  Clone ID: MRT4577_94061C.1.pep
YAISKQEFDTAYGPAWHCIVGTSFGSYVTHSLGGFLYFSVDKAYILLFRTAVEPLAHPR

SEQ ID NO: 362815 - protein, 74 aa, Zea mays
  Clone ID: MRT4577_94062C.1.pep
CLLIASFRSAGTGKIDDLGFTLHGATEGYGYMRTTTHATGCHRGNQGRSWLPEHVRSPSASWIPSIREGGHEEG

SEQ ID NO: 362816 - protein, 59 aa, Zea mays
  Clone ID: MRT4577_94063C.1.pep
ALAKAIRVTVMSIEIDSITKYDVLEPITLSSCILAQCYPDLAIDGLPDPYILYPVLTCV

SEQ ID NO: 362817 - protein, 94 aa, Zea mays
  unsure (1)..(94): unsure at all Xaa locations
  Clone ID: MRT4577_94064C.1.pep
VVFFFVFFFFGVESCSPYIYGESFLSPVYGKTVKRTVGAFAHPIVHSIWCIGVGGGVATLGTRVKLITTLGATVSCCSXXGTILYEFEHGVFTR

SEQ ID NO: 362818 - protein, 62 aa, Zea mays
  unsure (1)..(62): unsure at all Xaa locations
  Clone ID: MRT4577_94065C.1.pep
LLXHTPGYWTPFWLAWFFFFFKLLENGCIQLGEKAHTYYYYLGTPSFCAQGLAGLRRNKTHP

SEQ ID NO: 362819 - protein, 228 aa, Zea mays
  unsure (1)..(228): unsure at all Xaa locations
  Clone ID: MRT4577_94066C.1.pep
QWSSFFSCREVNDFVCFLVLQVHLELLYYPYAKHEGVPNPFANQIQLTSLEKVLKTESNGYDINQRKNVIMRGVLSVTVISAEELPPMDIGGKADPFVVLYLKKGETKKKTRVXSCPISEFCRAIYFFQGSHSSVLLQVVTDTLNPIWNQTFDFMVEDALHDLLMVEVWDHDTFGKDYIGRCILTLTRVILEGEFQDTFVLQGAKSGKLNLHFKWTPQPIYRDRDRDQ

SEQ ID NO: 362820 - protein, 97 aa, Zea mays
  Clone ID: MRT4577_94067C.1.pep
NKVARASLPVRAALRTRRRWSRSWRRRGPGRLRWPQGLRLSDTSFSRIGDDLVADAFEDDLPNLMNIDDRRASFAYFVAGLDFLHGDPYDPGQCAHI

SEQ ID NO: 362821 - protein, 101 aa, Zea mays
  Clone ID: MRT4577_94068C.1.pep
TATVCLLHTISGGPTPSLTTSLPFCLLLTPILFHTEAHLYQPLHITTSASSNASNVTSNKRKLIPLNCTIKYLPALFHSIPHAVHSIHKNIAPNYIAGLYI

SEQ ID NO: 362822 - protein, 34 aa, Zea mays
  unsure (1)..(34): unsure at all Xaa locations
  Clone ID: MRT4577_94069C.1.pep
CNGTNPXAQMNARVGYYKQYCQQLRVDPGPNLPC

SEQ ID NO: 362823 - protein, 119 aa, Zea mays
  unsure (1)..(119): unsure at all Xaa locations
  Clone ID: MRT4577_9406C.1.pep
INFRDPKKKLISCKQGEGNLEPLKRPPPFFFFFFFFFFFFFFFFFFFFFFEKMVQKSFVIPTKKKFWYFNLKTNNHSKEKIFPLRSTHPGGPPKTNRIKLGHQSRRAPEGCGPPRVSXP

SEQ ID NO: 362824 - protein, 66 aa, Zea mays
  Clone ID: MRT4577_94070C.1.pep
LSRILILSSSTPSPRSVVASSFFRRPWTPAHQEPSENAKNGSAVRKAFGPMKKSVTRSFKAVLYFP

SEQ ID NO: 362825 - protein, 62 aa, Zea mays
  Clone ID: MRT4577_94071C.1.pep
IRQSVAQLIDQRQQQMWKSLYALKHAADGHLSSQQKYTARGFWAPPFFYFNLKKRADGWVDF

SEQ ID NO: 362826 - protein, 153 aa, Zea mays
  unsure (1)..(153): unsure at all Xaa locations
  Clone ID: MRT4577_94072C.1.pep
THRHNXRSKXQSXXXRSEGXHSXXSXXTTESXTQRQGPKPGPDKEEAXSQAXEAEEGAAXAXVCEDDXKGXHGXAARXXXEGDGXAXDXLFKYXSTPRXXXRRAPISXXRHPXILAPDAGXXSPEGRXSTXRGXRAAXPIPXRPAAPLFYRRG

SEQ ID NO: 362827 - protein, 298 aa, Zea mays
  unsure (1)..(298): unsure at all Xaa locations
  Clone ID: MRT4577_94073C.1.pep
MPVRRRQPRRPETGAAERYREMGIGAALSRPWDYPTACGELAALLRLGYADLPKAAQALVASDVLLAFRLLPDVQTGYAVSTANVLLQAVEVALPKQKKAQAVSEFKHSIIAHKRRARVQQISGSPHIPQDILVHIFSFLDMHSLVAAGLVCWSWNSAANDNKLWKMNYSIFFGLSHLXATTFLYLVCNTARIQCQIXSFSWKESFHTKYEECASWKFVSNRALCAHCRSVIWLSNLTCASPHHCPKNRHHEVKLRPLLPDTVAKYILRVEDLAASSSESDDTDDSDYENWHPRFWAL

SEQ ID NO: 362828 - protein, 144 aa, Zea mays
  unsure (1)..(144): unsure at all Xaa locations
  Clone ID: MRT4577_94074C.1.pep
MQGATMEKGRTAQCVRFYGRCTIXLGCXSAKTIQHESTXVIMIEVVNTNVDAAWYAGXRMAYIYKXKTKSSETRYRCIXCKVTLPHGYSVVXRAKLKHNLPPEIMGRKVRELMLPNIVYCSDFDGVKAYYQWPCLNLVSELKTP

SEQ ID NO: 362829 - protein, 93 aa, Zea mays
  Clone ID: MRT4577_94075C.1.pep
FPSHQICSRAKWAQDIKFTLNRVTLMQLHHGKGTYHVPEICWTLARLLCAIIECLNSETACAFFCFGRATSTAWRRTLAVLTAYPPAGLEVPN

SEQ ID NO: 362830 - protein, 44 aa, Zea mays
  Clone ID: MRT4577_94076C.1.pep
GQTTSHSFRDAGGKNNPLPYLPRGKGNHCVVVDINDSSAAHGRI

SEQ ID NO: 362831 - protein, 80 aa, Zea mays
  Clone ID: MRT4577_94077C.1.pep
GVFFFLLGRNKNNQHSFDPPKLNSQKRGGPKILDPQTLERPPNPFSQKTKFKKGDRPKLLGKNSKRVVQAFITATTPGDP

SEQ ID NO: 362832 - protein, 68 aa, Zea mays
  unsure (1)..(68): unsure at all Xaa locations
  Clone ID: MRT4577_94078C.1.pep
SVMANSKHGKPDXHCYRINVSNIVLPLXDCMLMLPSDTDNPPYMGRMDRIYSDGHNNLRVPLHLYYLP

SEQ ID NO: 362833 - protein, 89 aa, Zea mays
  Clone ID: MRT4577_94079C.1.pep
KQPPGHGCQTPGFWGGVGLFFPLWTRCSPWAREVLPAPPPPPKKGGVFLKKKKKKKKKKKKKKKKKKKKKKKKKKKKKKKKKKKKKKKK

SEQ ID NO: 362834 - protein, 83 aa, Zea mays
  Clone ID: MRT4577_9407C.1.pep
WYVSLLVLRVEADLVEELGFHLLEANSDGWYSGRRGTIDACWHSGNIVFPSSLLPIVSGTYTSTSLSYFSAEMLIEVCTDAKI

SEQ ID NO: 362835 - protein, 112 aa, Zea mays
  Clone ID: MRT4577_94080C.1.pep
VYLTTIWAGGATLVHGSLGFFLRKRCFRNRSMVNSFRRYYPKKPRHLTGSLVYNAGMTHIVREVEMPGSKLHKKETCEAVTIIETPPLVIGGLGAYVKTPWGLRTLILGWAQ

SEQ ID NO: 362836 - protein, 171 aa, Zea mays
  unsure (1)..(171): unsure at all Xaa locations
  Clone ID: MRT4577_94081C.1.pep
SGSASDTLLFALRQSRSLCHPTAPSAAPTPPXPPPNPXSSPSSTPXPRPPKTRQAPSTRLPPPRPRSXPAPETXPPYWTISSPTPSAPXPLVREATTSXKPPXTLSRTATSPSPSHLPAPPPLAHTSPPRSNPSARATVTATPSPPSSRPSLLGMPPSVAPASAPSLPPRG

SEQ ID NO: 362837 - protein, 43 aa, Zea mays
  Clone ID: MRT4577_94082C.1.pep
SALMGFPAFFRTSCLNQLVCFESTLVFFSCFLLKVHYTKNISQ

SEQ ID NO: 362838 - protein, 109 aa, Zea mays
  unsure (1)..(109): unsure at all Xaa locations
  Clone ID: MRT4577_94083C.1.pep
RTSTASAVPSTTSVAGLRLAPSKGRAGVSYRALPALLSLHHGAAHNFHFVANYHNIHFPANIKVTNDHAXLPVDDQGYILENEALNHALENLKTXLYGKEGLAYGTLNL

SEQ ID NO: 362839 - protein, 171 aa, Zea mays
  Clone ID: MRT4577_94084C.1.pep
PRVRFVEADMRARLGDFGLSRLLAPPDACATGGARDLVCCTAPQGTPGYLDPDYHRSFQLTEKSDVYSFGVVVLELVTGLRPVDVGRERRDVTLADWVVAKIQVGELREVVDAPVLGEGPAVMASVEAVAELAFRCVAPDKDDRPDAREVVAELARIQTMLPELPGRIAQN

SEQ ID NO: 362840 - protein, 57 aa, Zea mays
  Clone ID: MRT4577_94085C.1.pep
IHHLVLKIYTALLRFSDIYCGSFKGFDHFCYEELYMYHIHYIKIALLFFPVCHVGFW

SEQ ID NO: 362841 - protein, 28 aa, Zea mays
  Clone ID: MRT4577_94086C.1.pep
FNIRVSCNPQLESLVSCTVTKTRSIHIC

SEQ ID NO: 362842 - protein, 32 aa, Zea mays
  Clone ID: MRT4577_94087C.1.pep
CAGSNFQNYGVNKDVVFIKRVLATPGDFIEVK

SEQ ID NO: 362843 - protein, 61 aa, Zea mays
  Clone ID: MRT4577_94088C.1.pep
EPACHIVHFDFLCHCYSSTDRFVCQVLIEHNYHIDTLSIQRTDGFILPRHQLLQSPMSLLP

SEQ ID NO: 362844 - protein, 68 aa, Zea mays
  Clone ID: MRT4577_94089C.1.pep
VLLIRRIRHHGLRWWACSSMKQEKSFLMTLPTLTFKFLPVSFLVTLKFNPYHNLIIHYYSYLYFNSLV

SEQ ID NO: 362845 - protein, 67 aa, Zea mays
  Clone ID: MRT4577_9408C.1.pep
DPWAGYLRHYTTSPGRAQTLLVPMLSCAALPDRRQTRTFTRTLRSMRTFSRPMSSPTRLLPINATDY

SEQ ID NO: 362846 - protein, 910 aa, Zea mays
  Clone ID: MRT4577_94090C.1.pep
QRPTIVQDTADGRCLDEVHGNIEFKEVAFSYPSRPDVMIFRDFSLFFPAGKTAAAVVGGSGSGKSTVVALIERFYDPNQGQVLLDNVDIKTLQLKWLRDQIGLVNQEPALFATTILENILYGKPDATMAEVEAAATSANAHSFIALLPNGYNTHVGDRGLQLSGGQKQRIAIARAMLKNPKLLLLDEATSALDAGSESIVQEALDRLMVGRTTVVVAHRLSTIRCVDMIAVIQQGQVVETGTHDELLAKGSSGAYAALIRFQETARNRACPSTRKSRSSRLSNSLSTRSLSLRSGSLRNLSYSYSTGADGRIEMVSNADNDRKYPAPRGYFFKLLKLNAPEWPYTILGAVGSVLSGFIGPTFAIVMSNMIEVFYYRNPSKMESKTREYVFIYIGTGLYAVVAYLVQHYFFSIMGENLTTRVRRMMLAVILRNDVGWFDQEENNSNLVAARLSTDAADVKSAIAERISVILQNMTSLLVSFVVGFIIEWRVALLILVTFPLLVLANFAQQLSMKGFAGDTAKAHAKTSMIAGEGVSNIRTVAAFNAQDKILSLFCSELRVPQMHSLRRSQISGALFGLSQLSLYASEALILWFGAHLVRTHVSTFSKVIKVFVVLVITANSVAETVSLAPEIVRGGESIRSVFSVLNSRTRIDPDDPDAEQVESVRGEIDFRHVDFAYPTRPDVMVFKDLSLRIRAGQSQALVGASGSGKSTVIALVERFYDPLAGKVMIDGKDIRRLNLKSLRLRIGLVQQEPVLFATSILENIAYGRDGATEEEVVEAAKVANVHGFVSALPDGYRTPVGERGVQLSGGQKQRIAIARAVLKDPAVLLLDEATSALDAESECVLQEALERIMKGRTAVLVAHRLSTIRGVDSIAVVQDGRVVEQGSHGDLVSRPDGAYSRLLQLQLHHG

SEQ ID NO: 362847 - protein, 79 aa, Zea mays
  unsure (1)..(79): unsure at all Xaa locations
  Clone ID: MRT4577_94091C.1.pep
NAKIVWCQEDPMNMGGYSYINPRFLTAXKVLARGGIENIKYVGRAPSVAIETGFYSVHVQKQTNLVQKALKRDPINYLF

SEQ ID NO: 362848 - protein, 130 aa, Zea mays
  Clone ID: MRT4577_94092C.1.pep
LFPYFQQQQFFPFNQLFTLNRVGYLQQQLFPFSQVGFAYFQQQQFFPFNQLAALNPPAFLQQQIFLPFNQLVAANRASFFTQQQLLPFYQQFGGNPATLLQIQQLLPFVQLVLTNPAASYQQHIIGGAPF

SEQ ID NO: 362849 - protein, 85 aa, Zea mays
  unsure (1)..(85): unsure at all Xaa locations
  Clone ID: MRT4577_94093C.1.pep
PTRSDHVVRPICPTILSLAAEQLLSQPQILPFVPCFSKTTLSARLSLTLPAAAAVLPSAPVPVGLACHLPRGLRCHLSGRPXPPP

SEQ ID NO: 362850 - protein, 58 aa, Zea mays
  Clone ID: MRT4577_94094C.1.pep
RGHTKSKTHYIGRTGLQSLIVHRSCARRKSSPSSYLGHKTSRKDRCVRTYFWGLMSWT

SEQ ID NO: 362851 - protein, 46 aa, Zea mays
  Clone ID: MRT4577_94095C.1.pep
APSPYAMGHFTEEDEATISSLSCKVTVDAAARSNTGTAPGCLHMEP

SEQ ID NO: 362852 - protein, 85 aa, Zea mays
  Clone ID: MRT4577_94096C.1.pep
GGGVKSGDPLALDLHLENAPRGRRGAAETARVAKEVRRRLERCRRRAKGRDRGAGEITDAMLRSFPGTGSEEMEAVAEGDRARAA

SEQ ID NO: 362853 - protein, 67 aa, Zea mays
  unsure (1)..(67): unsure at all Xaa locations
  Clone ID: MRT4577_94097C.1.pep
TRCFFSLARNANFLIRWRVFFLARGADGAHLSHTVARLFIXIKNEGEEATNNCGLCSKEVSNEEKQE

SEQ ID NO: 362854 - protein, 64 aa, Zea mays
  unsure (1)..(64): unsure at all Xaa locations
  Clone ID: MRT4577_94098C.1.pep
TTRYKTAQTYKXIYLFKVLXAAHPXLDIYHNDLPIMNSFMNDIYDKLELEYAKLSRYHTKHTIT

SEQ ID NO: 362855 - protein, 59 aa, Zea mays
  Clone ID: MRT4577_94099C.1.pep
KKTWGGNLFPDLDPFKNWTRSAKSPPQMSIYFPSYGMAPPPCCRVLIPFFLMGVPPGYL

SEQ ID NO: 362856 - protein, 120 aa, Zea mays
  Clone ID: MRT4577_9409C.1.pep
RHPQNFFCGKVLQIQPPPLGFPNVGFIPRFGSSPNASPRFHVIPVTLQPYPGIFFLGGPRARKKSPWPWPLFFNYFFCYFCKIPNRVLWIKKKKKTGGGVFCLWPCMAFPPPAKILLFFF

SEQ ID NO: 362857 - protein, 104 aa, Zea mays
  Clone ID: MRT4577_940C.1.pep
MANVKEVQRIINGNNVVVFSKTWCPYCKAAKAALNESKANYEVVELDNRNDGDDLQDALLEISGQRSVPNIFFAQQHVGGNSDLQELVKNGTLKSRLEEAGAFA

SEQ ID NO: 362858 - protein, 152 aa, Zea mays
  unsure (1)..(152): unsure at all Xaa locations
  Clone ID: MRT4577_94100C.1.pep
MKPRHLERVQEYNMAVPPGAVRRRGITHMAAPQAGSDGLHFLPGAPPPGXSESSNFLXFRGIRGXKIRTNFIKLTAMNVNLKNATSPPLTKNWSGKTAKKLSSNAAFLRKASTGNFKKSTRKAMILPLTAEKYAKKTTENWAASXKASGLYT

SEQ ID NO: 362859 - protein, 188 aa, Zea mays
  unsure (1)..(188): unsure at all Xaa locations
  Clone ID: MRT4577_94101C.1.pep
IRHEAHGCPRRHPAHHLLPPPRRSPQPQPPPPRRSRLRRGAFAEAAKLRTLEPHHDAIEAPCPLAADCGGCKTQSLAYAAQIRHKHHQVRDLLVNFGKFDPKRLESSEPDDILKPTVQCDEIFRYRNKMEFSFGTKRWVQKELKDKGEEVEVKXETNETDGYALGLHAPGFFDKVLHVQKCFLQSEPA

SEQ ID NO: 362860 - protein, 72 aa, Zea mays
  Clone ID: MRT4577_94102C.1.pep
QISPSWWCYQMIHLKLLKTKCSPGLFFFPGKFVSLWKVVPIFSMGKKIANSQHLCLKNVVFLGGPSFNGTNP

SEQ ID NO: 362861 - protein, 84 aa, Zea mays
  Clone ID: MRT4577_94103C.1.pep
GTSRAPGPPVFYPPTPSLVRSLVLLGDSPGAPVPSRRAHARHPCCKKTKVRLPHSFGIDLVRCWSLYLPKWPSVLVSFPVPNLC

SEQ ID NO: 362862 - protein, 558 aa, Zea mays
  Clone ID: MRT4577_94104C.1.pep
MAAHAVTPLTICCLRRGVPLNHSRRLLAVAAAAPESPAPTPAPSQLPLPPVPPRKGYFPKRGETVELTCEALAFKGKGVCKVAGSTFVLLCDGALPGERLIARVRRLRRGAFAEAAKLRTLEPHHDAIEAPCPLAADCGGCKTQSLAYAAQIRHKHHQVRDLLVNFGKFDPKRLESSEPDDILKPTVQCDEIFRYRNKMEFSFGTKRWVQKELKDKGEEVEVKQETNETDGYALGLHAPGFFDKVLHVQKCFLQSEPADKVLAVVQETWMDPAIGLTPYDVHKHVGFLKHLMIRTGRNISTGTPEVMVNFVTSCYKPDVLMPLVDKITKIPEVVSVINNVNSSVGNSSVGEQEYTLYGKPNITEMLRGLAFQISANSFFQTNTKQADVLYKLIEDSAGLKGDGSEIVLDLFCGTGTFGLTLARRAKHIYGYEVVPEAIEDARKNAKLNGINNATFVQGDLNKINESFGKEFPKPDIIISDPNRPGMHMKLIKWLLEVKAPRIVYVSCNPATCARDLDYLCHGVEEKDLRGFYELKSVIPVDMFPHTPHIECVCLLELR

SEQ ID NO: 362863 - protein, 28 aa, Zea mays
  Clone ID: MRT4577_94105C.1.pep
SGVLEDLLVCGILIKIVSTLNLYYIPKR

SEQ ID NO: 362864 - protein, 61 aa, Zea mays
  Clone ID: MRT4577_94106C.1.pep
SCRARAGPPCPTLGPSTALEVGPCRHGPASSRAVPCLGTVGRAVPRAGPVKAALLAIYKAM

SEQ ID NO: 362865 - protein, 133 aa, Zea mays
  unsure (1)..(133): unsure at all Xaa locations
  Clone ID: MRT4577_94107C.1.pep
MVKRVVLVFFGVVLLTKGVFGFVETQIFKPWGGERALTVGFLPXIKKVLQQLIILIKEVPLGDFLXQKIRXEQLKKLGLENLAAYCKYQKFFPFNKLVDXNFAVNLQQKQQHFSKXTAAYPKQLFSLNQMTEL

SEQ ID NO: 362866 - protein, 75 aa, Zea mays
  Clone ID: MRT4577_94108C.1.pep
REIRKKNKNNPLVRFPYVYLWNRESRIPFFFLGGGLKPGGKYLLSELPKLPRPCRSHTPNNPRAGRGGNETNISF

SEQ ID NO: 362867 - protein, 68 aa, Zea mays
  Clone ID: MRT4577_94109C.1.pep
ERGLFNKLPYHSHNDKLYLILFHPSQPSLITIYPIPILPNLFHLKHTTQIPLIYYIYKISPQLLINSP

SEQ ID NO: 362868 - protein, 40 aa, Zea mays
  Clone ID: MRT4577_9410C.1.pep
NHPLLPKSSQIKCLLLKYEAARGLVESKEDAKELITIFII

SEQ ID NO: 362869 - protein, 116 aa, Zea mays
  unsure (1)..(116): unsure at all Xaa locations
  Clone ID: MRT4577_94110C.1.pep
PPRQGKKEPGGFVCFKPAAPQFPGGKAPPHQLSPQEGRESGPWGRGVXKPPQFRARTVALREIPQFLERPRLFFPLLPLPRLGGEIAPGFQPGLRFLRPPVLGAPETPEAFLLCLF

SEQ ID NO: 362870 - protein, 30 aa, Zea mays
  Clone ID: MRT4577_94111C.1.pep
QRGSPLLTPSLLFVCWLVYSFMSDGNDRMN

SEQ ID NO: 362871 - protein, 112 aa, Zea mays
  Clone ID: MRT4577_94112C.1.pep
LALFSLCINHIVHWDGSSRMMSSTDLRSFLTGRLDVMCCCAYIEMRMTPKTRSSRRSRRPTSGCCPYSPWRPPIIILTVSLIIVIFAILIPRISCKYIKLDAISFPWPRHWK

SEQ ID NO: 362872 - protein, 72 aa, Zea mays
  Clone ID: MRT4577_94113C.1.pep
YIEEENRLYNSGIAIETEYEADADIDNPYEEGAQLNTNTDIIRVDKEGCYILTRLNRGYSRVSTCRWTLRSK

SEQ ID NO: 362873 - protein, 74 aa, Zea mays
  Clone ID: MRT4577_94114C.1.pep
TPSNCCASCTSSGTRSRALCNIVGKPRSTGTTASTLGPHSTMIGWGLGASIPLAYKVGNKINEITKRLNCCVSL

SEQ ID NO: 362874 - protein, 119 aa, Zea mays
  Clone ID: MRT4577_94115C.1.pep
RNDRRVRELLKHIYHLILLFLDKLYNFVFCDNKSGKSFHNHVLTIFHIFLMKNHYELLTIFHDNISALTFLSPYNGEAILILHYHNVFKYYPHYDFLHYINYHSLYTHPIDTALIYLSN

SEQ ID NO: 362875 - protein, 42 aa, Zea mays
  Clone ID: MRT4577_94116C.1.pep
GNLSITDWQRLYVLGELQIHSSATGNSKSYPIEACTINCRGT

SEQ ID NO: 362876 - protein, 97 aa, Zea mays
  Clone ID: MRT4577_94117C.1.pep
VGGDEYLTFSWSRETSSARRPQIRTTGFGSRRSCRVARFTRSTTFPSSPYLRTRGDWGGIAGTVGGGISRARGQIGFGHGPSIRVLHPCMVTFHYQL

SEQ ID NO: 362877 - protein, 35 aa, Zea mays
  Clone ID: MRT4577_94118C.1.pep
TYLGLRFEDLYGPIRNKYVITLPSFKNESIYTDIK

SEQ ID NO: 362878 - protein, 109 aa, Zea mays
  unsure (1)..(109): unsure at all Xaa locations
  Clone ID: MRT4577_94119C.1.pep
RKISQDFLLSMDESETPRRGRRPGGQNLARSASLSLRSSHPKLARPRRILKVIAPARAAVVFXXSSSSXSTEQTRTGLAKPRHAKSVYCTYIVCRACGIVLLYVYIEKN

SEQ ID NO: 362879 - protein, 86 aa, Zea mays
  Clone ID: MRT4577_9411C.1.pep
YRGLFFFLNLMDWRSSLHISKKKKKKKKTRNPSGRGQAGEIPLCQFYPKKGMHLNTNLELVISKYKLQLHACYLDDIIIFFRTLHE

SEQ ID NO: 362880 - protein, 247 aa, Zea mays
  unsure (1)..(247): unsure at all Xaa locations
  Clone ID: MRT4577_94120C.1.pep
LDFIEGLPRSGHANCILVVVDKFSKYGHFLILSHPFTAARVARVFLDHIYKLHGLPTNIISDRDRIFTSTFWQNLFRLTDTKLCMSSAYHPXSDGQTERLNQCLETFLRCFVHTCPSKWSQWISVAEYWYNTSFHSALGRSPFEVLYGYKPKHFGLSAASVTSVPELNEWMQEREVMNKVIQLHLQRACDRMKRQADKKRTERVFAVGDFVYLKLQPYVQSSVAARSNNKLAFRFFGPYKILDKVGS

SEQ ID NO: 362881 - protein, 69 aa, Zea mays
  Clone ID: MRT4577_94121C.1.pep
FGFYSTKLTMFLRKISSWSIQSQTFLYFILHFSVFSVTVGIEDLPPLWKLGSVGGRAPQAWLGLKSVPA

SEQ ID NO: 362882 - protein, 225 aa, Zea mays
  Clone ID: MRT4577_94122C.1.pep
MDALNFEYPDYERLDEGDRGAKKKRVIRGLLKTKNFSETEGFGSQKRKSSILALAKMVQDVPEKTVGTSSSSSASVTEILKGFTLKMKELEGASSEDIELDLRHLGCQELSEEDISELKEFAIAGGYKPGSVLFDGVDEEILGCIPDRAGAKIANTLSRTIGFSKLERDLINYRRQHITGSLFCSNFKLEEAHSNLKEVGIRYEHEVKGLKDKVKAEAEKSSKLS

SEQ ID NO: 362883 - protein, 68 aa, Zea mays
  Clone ID: MRT4577_94123C.1.pep
MGYGVPDGLKVYTGSCKTSLHPVFGSSRYQHICCSMLVAGVYKRAKEKELPSLLCMDEPIDYGTRVLR

SEQ ID NO: 362884 - protein, 71 aa, Zea mays
  Clone ID: MRT4577_94124C.1.pep
IKRGISFFLQLTGQNPLTCFATGAGSPKNKKHYNRLAYPYGDTKQYHRVNPRKSVVTKPPTSHLKIQKGQG

SEQ ID NO: 362885 - protein, 95 aa, Zea mays
  Clone ID: MRT4577_94126C.1.pep
PLWFFFFFPSFFSLRKKNIPLEKKNPGGPFPHLGYNGHPPQNPLFSSPFPPPPPGRRLNAPSHLTPPPSPDQNLWVPSDQPLQRPALYLTSCWAP

SEQ ID NO: 362886 - protein, 210 aa, Zea mays
  unsure (1)..(210): unsure at all Xaa locations
  Clone ID: MRT4577_94127C.1.pep
MSFVFRGSRPVNSNSLAFLLTVLVLFMVLNSHQISPNLLLWLVLGVFLMATSLRMYATCQQLAHAAAANSFLGHTELRVHVPPSITLATRGRLQSLRLQLALLDREFDDLDYDTLRALDADNSPHAPSMSEEEINSLPVFKYKVQAQQRHPPARKSDGPSQLSVSSTXSGNEEKQDGXADGTSKPSEDELTCSVCLEQXTVGDLLRSLPC

SEQ ID NO: 362887 - protein, 260 aa, Zea mays
  Clone ID: MRT4577_94128C.1.pep
MESSSDRSNVSQGNHLGYARSTSMDSTGPQLAGRSSSMLSRRSSRQGSRGSISLSREMGDSILSSMRHSLQSADQLLGDIDSSVLAQLIESGRVLSPEGDVDEDTVRISEHHKVGPVPDDAIKQTSDNFASAPISSAETKDTISNVLADSSTKVEPYKLSLRLDYAAYMIHLAVFGFFGVFTRYGLQKLFGPDCLALTSDQSPLYPDLPSNMLGSFLMGWFGIIFKADIRYISDHLIVGITTGYMGSLTTFSGWNQKMVG

SEQ ID NO: 362888 - protein, 233 aa, Zea mays
  unsure (1)..(233): unsure at all Xaa locations
  Clone ID: MRT4577_94129C.1.pep
MSFVFRGSRTDIEAGGFPGFAPERRAMXLVLFMVLNSHQISPNLLLWLVLGVFLMATSLRMYATCQQLAHAAAANSFLGHTELRVHVPPSITLATRGRLQSLRLQLALLDREFDDLDYDTLRALDADNSPHAPSMSEEEINSLPVFKYKVQAQQRHPPARKSDGPSQLSVSSTGSGNEEKQDGLKADGTSKTSEDELTCSVCLEQVTVGDLLRSLPCLHQATMRVIRDFSRKT

SEQ ID NO: 362889 - protein, 60 aa, Zea mays
  Clone ID: MRT4577_9412C.1.pep
LGIRLEPIITASLLPTSSPTTKEGTLDITRAFCHGIQHLIHLTRQHRTVNSTRSAFVHPA

SEQ ID NO: 362890 - protein, 101 aa, Zea mays
  Clone ID: MRT4577_94130C.1.pep
LTPPIPPPFFFFELPPVPLWCSFIPSFPSPPVHPLCSKFRLPPLPLPHIYLLSSTPPLTPSPPRLFSSSCLPPPLFFLSFFLFPFFFFFFFFFFFFLMGSK

SEQ ID NO: 362891 - protein, 146 aa, Zea mays
  Clone ID: MRT4577_94131C.1.pep
MESSSDRSNVSQGNHLGYARSTSMDSTGPQLAGRSSSMLSRRSSRQGSRGSISLSREMGDSILSSMRHSLQSADQLLGDIDSSVLAQLIESGRVLSPEGDVDEDTVRISEHHKVGPVPDDAIKQTSDNFGSAPISSAETKELFLTS

SEQ ID NO: 362892 - protein, 82 aa, Zea mays
  Clone ID: MRT4577_94133C.1.pep
SEADVDYLCYRRRALPVAITNHHLVKCLRILRRDTRLECHHMSRHTLTSRDFCLVTFSSNYSTIDTIENMNGTQVDRRNITV

SEQ ID NO: 362893 - protein, 73 aa, Zea mays
  Clone ID: MRT4577_94134C.1.pep
LHGQPMQALPSPNVAGALARMCEATVLNRLWQSVTAARIRRCGATSDAMSGVHLLAEAIPTSVIDRPTQLGAS

SEQ ID NO: 362894 - protein, 94 aa, Zea mays
  Clone ID: MRT4577_94135C.1.pep
EASPDLHAELARVSSSRVPHIEYSLGNDACHSDDMYNADRVNSAATHNAFHRHCQVPSKSFSPKSGFNLTVTSNSEDYTTQTLLTRLQLNNCLH

SEQ ID NO: 362895 - protein, 74 aa, Zea mays
  unsure (1)..(74): unsure at all Xaa locations
  Clone ID: MRT4577_94136C.1.pep
RACTIIYGKNRDKYLSLVEFANTNSXQSSLKMAPIEALYEKRCQTPLNRSQPREREIFGPDLVTEAKRKVIGIR

SEQ ID NO: 362896 - protein, 58 aa, Zea mays
  Clone ID: MRT4577_94137C.1.pep
TWRSLALLPKYERQKKKKKIIKKIKKKKKKRPPTLYNPSLHSHAFDLISTTIVTPKSN

SEQ ID NO: 362897 - protein, 117 aa, Zea mays
  unsure (1)..(117): unsure at all Xaa locations
  Clone ID: MRT4577_94138C.1.pep
EEKWGPESRARLTXKDNKITNIEEIYLHWVPCKEHHTVQTLLPGLKDEVMNITPGQNHTPAWQSTQFMGFVSVRDCYCHVGLRVKCSKEASIIITSAIMLAKLYCSPMRRRYWGNTI

SEQ ID NO: 362898 - protein, 89 aa, Zea mays
  Clone ID: MRT4577_94139C.1.pep
GPNFARGEIWQTFSVLLPEKGSRFGYSLSQESRRPGPSSDMPRWDCARARPVVVCRTNSYILYRWSEPSTATPPAAPKAKRIKSAASAP

SEQ ID NO: 362899 - protein, 336 aa, Zea mays
  Clone ID: MRT4577_9413C.1.pep
MDSRRESSETLRNKCAACFRQYNRMEHLVEHMKVSYHSVHEPRCGVCGKHCRSLESLREHLIGPLPKVECARVFGVRGCSICLNVFDSSAAVRYHRAACQYSRAAPMPRGGGMTGRAVALACKMVGGGSDGSMDLCARVCLVGEDEHVIFQTYVKPTLPVTNYRYEVTGIRPEYLRDAMPLKVAQRRIQEILCNGEPLWKLRPRSYGRAKVLVGHGLDHDLERLGLEYPAFMIRDTAKYPPLMKTSKLSNSLKYLTQAYLGYDIHTGIQDPYEDCVAAMRLYIRMRSQAHQRDYNSGSGEAQNNYPAWRQRELDRMSPEELLALSASDYYCWCLDY

SEQ ID NO: 362900 - protein, 35 aa, Zea mays
  Clone ID: MRT4577_94140C.1.pep
KAAPAFGQLQCSVNSDSRSYCLLFLERAMADSVFG

SEQ ID NO: 362901 - protein, 165 aa, Zea mays
  Clone ID: MRT4577_94141C.1.pep
MASPDDEISRLFRIRRTVYEMLRDRGYGVRDEQIKLERHKFIERYGNPVRRDELTFNATKLNGPSDQIYVFFPNEAKPGVKTIRNYVEKMKNENVFAGILVVQQALSAFARSAVQEVSQKYHLELPRIQITDPIARYYGMKRGQVVKITRASETAGRYITYRYVV

SEQ ID NO: 362902 - protein, 71 aa, Zea mays
  Clone ID: MRT4577_94142C.1.pep
SLPVDPAETWCIALSYPWPLGAICVFSDYCMAEHDVNIELSVSGCASAPVLQTGRVDHEPDAQSVRDPRRG

SEQ ID NO: 362903 - protein, 206 aa, Zea mays
  Clone ID: MRT4577_94143C.1.pep
MASPDDEISRLFRIRRTVYEMLRDRGYGVRDEQIKLERHKFIERYGNPVRRDELTFNATKLNGPSDQIYVFFPNEAKPGVKTIRNYVEKMKNENVFAGILVVQQALSAFARSAVQEVSQKYHLEVFQEAELLVNIKDHVLVPEHVLLTPEDKKTLLERYTVKETQLPRIQITDPIARYYGMKRGQVVKITRASETAGRYITYRYVV

SEQ ID NO: 362904 - protein, 214 aa, Zea mays
  Clone ID: MRT4577_94144C.1.pep
MTPPHHPVNFAVLLLFLCLPAVPPAAAAADPTPTPWPPQFHATLVMDYHGNMSVADLWYDWPGGRNLHVIRYQLAADAPYYDNEWNNGTSFFYTPALRTCRSAAVGVGILRPDWLRPGAVYLGRRDAGGFDCHVWAKADFITYYEDVNTKRPVKWVFYTGRTAYVMSFEVGAVLEDAAWQAPEYCFTNNGGLGLADETTTTIAGGSSFVPRSVL

SEQ ID NO: 362905 - protein, 114 aa, Zea mays
  unsure (1)..(114): unsure at all Xaa locations
  Clone ID: MRT4577_94145C.1.pep
NQRGALKFGGFLPQQIPFSXVGGASPQQFFSFYQRGALKFGGFFQKEQFPPFSQVVYLSPFAFFPKQQLFPFFLPGGPKGGPLFQMQQLLPFNQLVFSNPKGFFPQPPIGGAPF

SEQ ID NO: 362906 - protein, 56 aa, Zea mays
  Clone ID: MRT4577_94146C.1.pep
PPARPRGPPNMCGCPCQAACPNTFFLQFPRLPVDYPTPVILKDKPYPAIGVLPAVS

SEQ ID NO: 362907 - protein, 61 aa, Zea mays
  unsure (1)..(61): unsure at all Xaa locations
  Clone ID: MRT4577_94147C.1.pep
EFIXAVIRLFLKIHGETLRCQTKLQEKARRLLEVQSSVWQRIDKMFQSSRCMVTFLSNSQF

SEQ ID NO: 362908 - protein, 92 aa, Zea mays
  Clone ID: MRT4577_94148C.1.pep
VQNMESKVRAACNSSNAKLDDIVRLLDDLLTEYESTAYGPGKWKRLATFLQQCLAGPVLDLFRRQLEHIDAERNALRLKCNSRDVELSEKIF

SEQ ID NO: 362909 - protein, 116 aa, Zea mays
  Clone ID: MRT4577_94149C.1.pep
RPRPASPPAPTAPRNSPGRRSSARSRSNKPRRPRPIPRPPPPTPTAPKPPTTPPPSPDALALPSGHGLCGLVCVPLGYILLGPFKPEYLTPSGPSGSEGSICPGKRLDFWGTWEWP

SEQ ID NO: 362910 - protein, 66 aa, Zea mays
  Clone ID: MRT4577_9414C.1.pep
KCFLKIKSPFCGLVGVLKKKGCGFKIKKVLEVGVLLGIYFEFFNVFWDNGVIFLFKKFLLGCFFWG

SEQ ID NO: 362911 - protein, 59 aa, Zea mays
  Clone ID: MRT4577_94150C.1.pep
LSIHKFLLSPKISHLLTFNSFQILIPYLTLLIFLNLTYFVQLIPNVSFPNTILFLYSFS

SEQ ID NO: 362912 - protein, 58 aa, Zea mays
  unsure (1)..(58): unsure at all Xaa locations
  Clone ID: MRT4577_94151C.1.pep
ERFEVMVNVVLFCLGKIGYXPVMIALVQISAFEGYNMIERSTNLDWHRCPTLLQAINQ

SEQ ID NO: 362913 - protein, 83 aa, Zea mays
  Clone ID: MRT4577_94152C.1.pep
HLKHFFTPLKQLSMADSNDYLQQQQLFTCTQLTVANTPTHLQQQSHHQHIPYHTQLHAANHEYYLQQQLKFHQLTMSNSADYL

SEQ ID NO: 362914 - protein, 57 aa, Zea mays
  Clone ID: MRT4577_94153C.1.pep
YSLGLSFSLFEKTPYTHDLMREAYFQHKINCVNSGTSYHIMCAVLVYWIQFLLMLKE

SEQ ID NO: 362915 - protein, 154 aa, Zea mays
  Clone ID: MRT4577_94154C.1.pep
DFRVGPTRPRLAGEVGGDGYLQRPLWEWLNQLVGFSTVEGLKGLAAPNRAVFLDPALMRPGRLARRMEFPNPSKEAGAGFLQIHSGKLIVIPDVNFEEWARPTDVLMGPQLRAVCVKAALLVLRQDAPEVTHEVFTGGFIQVQAKRKSSLIYYP

SEQ ID NO: 362916 - protein, 119 aa, Zea mays
  unsure (1)..(119): unsure at all Xaa locations
  Clone ID: MRT4577_94155C.1.pep
TRSASSCSCSVAGXLDGSDGASFRVGMQLRNLSGCYQCHMVVVPVSGSVSMRATICPXPDCGDVFVRQESLQLHQSIRHAVSELGTMATNGRAHDVEGKEEYDSVAMLTRVNCRSNFII

SEQ ID NO: 362917 - protein, 69 aa, Zea mays
  Clone ID: MRT4577_94156C.1.pep
NCRQPPNCNGLVFFNSIAHSKPWLGKLQWLSNTPEGTLSSTYSFAKILCNPYLVVLLRELVCTFPPSYP

SEQ ID NO: 362918 - protein, 64 aa, Zea mays
  Clone ID: MRT4577_94157C.1.pep
IGVVHVPLSSGVLVPLFGSNVPYIWRKRRREKYRREEEDAPSSGRGCLPAPFSPRPAWRNPIAL

SEQ ID NO: 362919 - protein, 158 aa, Zea mays
  Clone ID: MRT4577_94158C.1.pep
MDASTGYSGYWQYPCSTNVNVTLQYGGLAYAISNADFNLGPFTRDTSMCTGAFFEMDLGSQSPISWIVGASFLKNVYSVFRYNPLAIGFAQLSGSAQSVSNGTSVGGTATNGGGTTGSGGNGTGSSGGSNSNAASSGSVVYLTPVLLASIVAVMSALM

SEQ ID NO: 362920 - protein, 79 aa, Zea mays
  unsure (1)..(79): unsure at all Xaa locations
  Clone ID: MRT4577_94159C.1.pep
MLSAHGKPSRGIKCTWHMAQPSSFGIRSANIKGSQVDEKXKEACLRKLSNSSTIHTCXVLECNYSKHISKTRRNQSPXR

SEQ ID NO: 362921 - protein, 52 aa, Zea mays
  Clone ID: MRT4577_9415C.1.pep
KLQQLVLVHTGLAIPIIDLYQNVSYFPLPAYGQMASNMFSTVLLSAWLHARV

SEQ ID NO: 362922 - protein, 59 aa, Zea mays
  Clone ID: MRT4577_94160C.1.pep
LWPHPEVSGPMPTSLSPLAEKQTSIAPLPRKRSQPDLQLAALTSQSLLTGMKLGHRGHQ

SEQ ID NO: 362923 - protein, 104 aa, Zea mays
  unsure (1)..(104): unsure at all Xaa locations
  Clone ID: MRT4577_94161C.1.pep
MASPPIPNAGLFPPGKPGPQNPKPFPTPQPGFPPPPAFQNPSPPLKVHLPPPGPXKGPPLYNVPSPFPRVXAFSSPLMPPPPPFNPSLELPHKTLIFTPLFSRR

SEQ ID NO: 362924 - protein, 49 aa, Zea mays
  Clone ID: MRT4577_94162C.1.pep
KAGNSSLHTFRWPKAECPYGTHMTKILIYYVLYKSIEYKFIVTLAFQYN

SEQ ID NO: 362925 - protein, 79 aa, Zea mays
  Clone ID: MRT4577_94163C.1.pep
GNPAKEKKKGGTNPRQGPRGNRKNEEHGKLRAGATSGRGGAPPKTHPGARPKKAAEKGASPGSKEPKSPKKGAKSPKKA

SEQ ID NO: 362926 - protein, 240 aa, Zea mays
  unsure (1)..(240): unsure at all Xaa locations
  Clone ID: MRT4577_94164C.1.pep
CSYAQVSLMXKLRHPNIILFMGAVASPERLCIVTEFLPRGSLFRLLQKNTAKLDPRRRVHMAIDIARGMNYLHHCSPPIVHRDLKSSNLLVDKNWTVKVADFGLSRLKLETFLRTKTGKGTPQWMAPEVLCNEPSDEKSDVYSYGVILWELVTQKIPWDNLNTMQVIGAVGFMDQRLDIPSDTDPKWASMIESCWDSDPQKRPSFLEVLDRLRDLQKQYSLQAQMQRNLSADALLKGAVK

SEQ ID NO: 362927 - protein, 36 aa, Zea mays
  Clone ID: MRT4577_94165C.1.pep
KSDLHFLTPNLKYRYKENHPSITSSLHIPSPQLRKT

SEQ ID NO: 362928 - protein, 76 aa, Zea mays
  unsure (1)..(76): unsure at all Xaa locations
  Clone ID: MRT4577_94166C.1.pep
QVIEAVGXMDQRLDIPSDTDPKWASMIESCWDSDPQKRPSFLEVLDRLRDLQKQYSLQAQMQRNLSADALLKGAVK

SEQ ID NO: 362929 - protein, 61 aa, Zea mays
  Clone ID: MRT4577_94167C.1.pep
IFFIFPLLLGRPTGGFRFFLIEGMASTKIRTHFPTLSHFTDYKCPIFLGSKGNHIKCKNSR

SEQ ID NO: 362930 - protein, 133 aa, Zea mays
  unsure (1)..(133): unsure at all Xaa locations
  Clone ID: MRT4577_94168C.1.pep
ATTCLCSSQLNALSCGAHNHIIRGAYDGWPEASPSPSPCGSWRGVGRDANGRVRSLDLSMSSISSPLFCNFSTLIGLIRLDLSDNSIVDYLAADLDRRVALQRLNLSXYLISGPLGMSSLTKLWRIDLPRNHL

SEQ ID NO: 362931 - protein, 91 aa, Zea mays
  Clone ID: MRT4577_94169C.1.pep
RQCRGGAGGGRGEGRLDAVGRVGRGGGSEERVSRFLWSQAAWRGSTTPGPSPCPPLPQTLVVALPLTASGSRSLCTPALCCRTGRWGEQRR

SEQ ID NO: 362932 - protein, 65 aa, Zea mays
  Clone ID: MRT4577_9416C.1.pep
LFFFFLFFFFLFFFFFFFFFSSEKNTHSPVLQNPVCVNHSSGTSQSRYQTSTKAVSHDMGQNNKL

SEQ ID NO: 362933 - protein, 45 aa, Zea mays
  Clone ID: MRT4577_94170C.1.pep
FLICLVVGRLSSRLSLVVKKACTLCASCTSVTSNSSRNFISTSKS

SEQ ID NO: 362934 - protein, 78 aa, Zea mays
  Clone ID: MRT4577_94171C.1.pep
SEGTTLSLILWIQSDRGHGLISPGQVGLPPAIMQPNGIYVELETNPGEPSIPNKKKMGSFLPFMLCGGFKKPQIVIPV

SEQ ID NO: 362935 - protein, 99 aa, Zea mays
  Clone ID: MRT4577_94172C.1.pep
RAMTKTPTRQLFRFRSRTPPEGDPFLAYKPSLHTGTFLRKLVGLTSRGDPKNHGGERHHGAQHGREWGDQGKTPGLFVAPVSTTTVGGGTVRHPRAVCF

SEQ ID NO: 362936 - protein, 117 aa, Zea mays
  Clone ID: MRT4577_94173C.1.pep
GPVHGQSKWLMDKEGAKFSSKAFGAGFGATLLAGSILRPQASLRSARGPHCGGKFRTHRAYTFISEFYFFLIYFHRFFPSVWAFAGVNGKWECAPGLRPVPPPCSRVVAIRCKITQN

SEQ ID NO: 362937 - protein, 70 aa, Zea mays
  Clone ID: MRT4577_94174C.1.pep
DSSQIFKGIKIHHLGWNISLPYSFLPKPIYDLKASSILQNKVDIHIYTHAFLTTSSTKLHKHIYTLLLFR

SEQ ID NO: 362938 - protein, 44 aa, Zea mays
  Clone ID: MRT4577_94175C.1.pep
IGYQNWTGGFSGPGSCDFLDLMTFIPPQPTFHRTRGCKSQDACA

SEQ ID NO: 362939 - protein, 59 aa, Zea mays
  Clone ID: MRT4577_94176C.1.pep
QVPQGPVTVLQRPFVLAPKWSSNICSPLSRQNSPSLFTDQSVTKKVFCTTTYYKCYNKK

SEQ ID NO: 362940 - protein, 97 aa, Zea mays
  Clone ID: MRT4577_94177C.1.pep
LKTGGRIPSRTWRSAPLPYLSWHLLFLPSAPSSRHTILFRGDMQRDPGIFIFEQSFRCRLHVNKCDGNSELQAMMYLHVKWQRTGVVNEIQKFSPMR

SEQ ID NO: 362941 - protein, 75 aa, Zea mays
  Clone ID: MRT4577_94178C.1.pep
NPIPFFYFWVILVLVTFLNPPFRFHWTSHSYLFAGPPQISFQSPGPHSIPNCAACTVATDSVFCTTLHRVRSPSS

SEQ ID NO: 362942 - protein, 181 aa, Zea mays
  Clone ID: MRT4577_94179C.1.pep
MARCRGTAESLCQGRLDLDDDKFGAMCTTAFGCLQEWPDLGAMCGANLGVPAMAGNGNESSCSGSGGSRKRKPDAYDGLDATGGANDMSKRPRGKRLSGISEIVAPGKGKQERPKAGTKKKAEAASAAAAAAAAGHKTDYIHVRARRGQATDSHSLAERVILTAELLGKHLCARGPWPMLL

SEQ ID NO: 362943 - protein, 45 aa, Zea mays
  Clone ID: MRT4577_9417C.1.pep
KEKKKKKKKKKKKKKKKKKRKKKKEDQGKGTKKRNEKNKRKKSPK

SEQ ID NO: 362944 - protein, 52 aa, Zea mays
  Clone ID: MRT4577_94180C.1.pep
PMGWGPFLCLGAAKPLFFYQQKFAFWTHFRVNFFNHPFKFFGETLKDPIRGC

SEQ ID NO: 362945 - protein, 104 aa, Zea mays
  Clone ID: MRT4577_94181C.1.pep
HAQKKGKLTGRGFTGREYHMNTQKNPPTHINSGEPAPLRYRGGAGKKFFFSAGAFFFFAAVAAPPLCGRGEPSGAGLFFLGGEKKNPDAGANFGVYIKAPTPRG

SEQ ID NO: 362946 - protein, 44 aa, Zea mays
  Clone ID: MRT4577_94182C.1.pep
GRAQNFRVFLNAPSVLPLRSAPLKIYPRLRRIFRGSPPTLFLFS

SEQ ID NO: 362947 - protein, 97 aa, Zea mays
  Clone ID: MRT4577_94183C.1.pep
PSMDGLQATKLIRCFENTGCWDASVKPEDNEMIANSAISSDCVQDKKGKRVPIIAMTANSFAESADECLAAGMDSYISKPMNFQKTKECLQRYLLSQ

SEQ ID NO: 362948 - protein, 141 aa, Zea mays
  Clone ID: MRT4577_94184C.1.pep
FFFFFFFFFFFFFFFFFFFFFFFFFFFWRTKKAFGQLSFFFSLGTRILGNRLIKLAIRWPQPTETTPRGETFNAGKRGPNPVTGKLCQQAYQNPGKTLVSPRYSQFFDGFFLSPSSFPPIYKFSWGGPGFSLLLHDAGGPV

SEQ ID NO: 362949 - protein, 52 aa, Zea mays
  Clone ID: MRT4577_94185C.1.pep
KVLMTPNKVDAQQGFPLQDARLCIEAKPSCVLCCVPNLELYKSLSCPGLFFS

SEQ ID NO: 362950 - protein, 104 aa, Zea mays
  Clone ID: MRT4577_94186C.1.pep
MADGEDMQPIVCHNGTAMAKAGSAVDYAPRARLPMIVVRSRHTGVTVGMGQKDAYVVHKAQTKRGILTLKYPIKHGIVSNWDDMEKTWHNTFYNLLTAGPEEHP

SEQ ID NO: 362951 - protein, 111 aa, Zea mays
  Clone ID: MRT4577_94187C.1.pep
MAQQQKVVVRVPTMTDDKIKQKAIEAVADIYGIDSIAADLKENKMTIIGEMDAVAIAKKLKKIGKIDIVSVGPAKEEKKEEKKEEKKEEKKEEKKEEKKEEKKEEKKEEKK

SEQ ID NO: 362952 - protein, 50 aa, Zea mays
  Clone ID: MRT4577_94188C.1.pep
MPIPEPKPGDLIEIFRPMYSHWAIYVGDGYVIHLAPPSEIPGAGAASIMS

SEQ ID NO: 362953 - protein, 111 aa, Zea mays; identical to SEQ ID NO: 362951
  Clone ID: MRT4577_94189C.1.pep

SEQ ID NO: 362954 - protein, 76 aa, Zea mays
  Clone ID: MRT4577_9418C.1.pep
MSCSCGSSCGCGSSCKCGKKHPDLEETSTVVQATSILGVPPDKKARCLARLGRCGMREAAHSCSCGSSCQCDPCNC

SEQ ID NO: 362955 - protein, 96 aa, Zea mays
  Clone ID: MRT4577_94190C.1.pep
CVFFLCSFFRKKFLERHGGVRTLTLYIIRAPDQRSPKKPLYRFKFQIFSGTERWPRKPGPPQKKSEIPSTKSRKLTWRAQYPAKKKRGAKNPPLNG

SEQ ID NO: 362956 - protein, 308 aa, Zea mays
  unsure (1)..(308): unsure at all Xaa locations
  Clone ID: MRT4577_94191C.1.pep
FXXXGGGGGGVTENGTLYGTAIASSTPLAFGKQRLLFLTEGGAASLDLRSMXVPETPGGXLLNAIGTSXQAYSFDPSERFKAYGFTEAGDLVHVLLLGDVSSLKCRVRSGKKSEMDNPVAIQTIKGYLLVASHDKILVFNTSAQYYGRVGAPRPLFATSIKDIKSVFAGSGGVLPTEPAGKPVIAADREKLVILGLGDGHIAIYRSNFPVYKPESNAVVWSGPALLFLLFLIGIWQVYVKKKDSLGWTPEETFNTSVTAPTGSLLNHPTSDRAFADSTARSSDRGYVDGTSRASDRSYVDATTRTTDR

SEQ ID NO: 362957 - protein, 185 aa, Zea mays
  unsure (1)..(185): unsure at all Xaa locations
  Clone ID: MRT4577_94192C.1.pep
PPPPPPSPHPPPRXPPPPPPPPLSLLSPASRSTGPPXPAXSGSEPPKPLEXRRASARSRPCAPPRGRRRGAPXADVEPGPRPPAGGGGERVGARGVAAAVRDGALGXPRRRSRRGRGARRRPRGPRTPWTPRPRRGAPSARGAPPRRPFGAPPPPRRPGPGGSSSEGSRRRRRGCARWPWPSCRI

SEQ ID NO: 362958 - protein, 123 aa, Zea mays
  Clone ID: MRT4577_94193C.1.pep
GLELAGRPKRLWKICPSSLQGQFSGHHHTPTIILEAVASQDLWIWHAFFGLPGSLNDINVLHRSPLFAKLSNGESPQVNYRINNHDYSMGYYLADGIYPSWATLVKTIPEPRGNKRIYYVKAQ

SEQ ID NO: 362959 - protein, 71 aa, Zea mays
  Clone ID: MRT4577_94194C.1.pep
SRDDTSGLCTHGLTMTGDEETRTLTLKGPDCMLSYTWSNKNRYYDYLQFHYTSCVKATVHPKPVSSRTVKD

SEQ ID NO: 362960 - protein, 1384 aa, Zea mays
  Clone ID: MRT4577_94195C.1.pep
MGRLLLPQRRRRGWEVGDEWGSTWSTGLTKDHFDGSSVSKPVSAERRQGVMDPNTKMILDEMEKKFSAMDLKWEKRFSAFADAKEERLSAVEVAAEDLAVWRVKMDTTMEDVKLDLRKLNKHWDRASLEAATEPGLLQKPVAAIGRALGGPEGEGFGGIREEPILPEQGFGSVTTYVPTSNKGMHHFVPPPVQSSACCPGLAFDVGGSRHRNFESGFHSLGKLPQLPFPTFEGDNPRLWISRCENYFDMYFVDPDSWIRSLLDRYGKNQHQALLRQLFRIRQTNSVSDYIARFSTLMDQLSAYGAVSDPLYFTTRFLDGLRDEVRAVVIMQRPGDLDAACSLALLQEEVADSGRRRAFPRFESGSWSKSEGKGPFPLPSPPSGDRNVSSNSDKRPVSPSKSVDERLGALRAFRRAKGLRDRCAEKWHKGHTCAATVQLQAMQEGYIFHQDLKVLPLQHYDMILGMDWLEVHRPMHVHWRHKWLSITYHGSFVTLYGSDYGASESLLIQISSVYVPEPASESSKFYPEIESLLSQFSSVTSAPTSLPPVRSCDHAIPLLVGAKPVNIRPYRYPPALKDEIEAQVTVMLQQGLIRPSSSPFSSPVLLVRKKDGSYRFCVDYRYLNALTVKGKFPIPVFDQLMDELAGSSWFSTLDLVSGYHQVRLKSGEEFKTAFQTHGGHYEFVVMPFELAGAPGTFQGAMNTTLATLLRKYVLVFFDDILVYSRTFEEHLNHLRDVLLLLQQDHWHIKLSKCQFAQRTISYLGHIISEQGVATDSAKVAAVRDWPSPLNVKELRSFLGLAGYYRKFIRHFAILTKPLTELLRKGVLYVWTSDHEISFTAVKQALCTAPVLALPDFNKTFCIETDACKSGVGAVLLQEGHPLTFISKALGIKTQGLSTYEKEYLAILIVVEQWRPYLLHAEFIIFTDQNSLVHLNDQRLHTPWQQRVFTKLLGLQYKVVYKQGIQNRVTDALSRRTHEEKSIQEFVASCDICQQAKPDRSKYPGSLQPLAVPAGAWQTITLDFVEGLPLSRGKNCVLVVVDKFSKYGHFIPLKHPFTAASVAHVFMQQVYRLHGLPFAIVSDRDRIFTSQLWKSLFSLAGVALNMSSAYHPQSDGQTERVNQCLETFLRCFVNACPHKWVQWIYLAEFWYNAACPAPQLADWLQEKSVMSALVHQHLARAQQRMKIQADKHRSERHFAVGDSVYLKLQPYVQSSLAPRSNQKLAFRFFGPFSVIAKVGSVAYKLTLPASSHIHPVFLVSQLKKAVPSSVTVDQLPVSLAGFQIPELVLQRRLDSKGNTQALIKWSGLPPSLATWENLEVVQQAFPLSPAWGQAGLRRPGNVSKPVSAEVTEVLGQEDKTESVHRLKRSDRIRRKNVRLSGPEWMA

SEQ ID NO: 362961 - protein, 54 aa, Zea mays
  Clone ID: MRT4577_94196C.1.pep
RAAYQVHTRLGHMHGQMTGFPVACDPLNQSFTWFPQFSICLWLSQNGLPRVFFT

SEQ ID NO: 362962 - protein, 79 aa, Zea mays
  Clone ID: MRT4577_94197C.1.pep
LCWVANLTCLSGLAYSLALRFVSVHLFLQSCHSQGFPPSGFLDFPLGNLPCLSLALRFDLVFLAMLAWISFGFKLQPSS

SEQ ID NO: 362963 - protein, 92 aa, Zea mays
  unsure (1)..(92): unsure at all Xaa locations
  Clone ID: MRT4577_94198C.1.pep
QNXXXTILLNLLQNLQLSPPFFFNTKPTSXPTXXLFPIXYNPXXILMXXQLTLKNIXXHNLYXXFSPSSCSCIIXXPHNPQYRYXXHXPXNI

SEQ ID NO: 362964 - protein, 43 aa, Zea mays
  Clone ID: MRT4577_94199C.1.pep
YIIVSVVQSVHFRIVHVGLHSLHGYPNMNNSEVYRLYNSVCCT

SEQ ID NO: 362965 - protein, 68 aa, Zea mays
  Clone ID: MRT4577_9419C.1.pep
IESKWIPVNFKQFKLNNKHFQTDSIHRPLEITDHRFEVTLFVHLITRGHTTRQRLKTWSILKKKGVSF

SEQ ID NO: 362966 - protein, 69 aa, Zea mays
  Clone ID: MRT4577_941C.1.pep
HDDNFPFMNSFLVYQAERNQRWIRIVFINYFFMLYSLIFEYHKFRILPGQDMCNNSKNHNIIFSNLIFS

SEQ ID NO: 362967 - protein, 155 aa, Zea mays
  Clone ID: MRT4577_94200C.1.pep
MQVQDKHRGKDLLDLWVRTHTRFCCATLILLVDVGRIVFTGELEVAKWTGARGNNSEERQNLQGVKEGEAINGEVGEALPPNRDEKRRLQAKQDSKDIDITRVLKVITDKDVGDGVNRHKGKDISTTKDGVGIGPTNGKGEGTSKGQIGKLPLSN

SEQ ID NO: 362968 - protein, 244 aa, Zea mays
  Clone ID: MRT4577_94201C.1.pep
APRRRRAPPPVATFFPLTWAHQGRSSGRSRGFGYVTFASADDAKNVLDCEHVLGSRTLEVKIATPKEEMKSQGTKKATRIFVARIPQSVDESMFRRHFEAFGEILDLYMPKEHGSKGHRGIGFITFQSAESVDSIMQESHELDGTTVVVDRATPKEEDVRYPPSRPSQGGYGAYNAYISAATRYATLGAPTLYDHPGSAYGRGYYGSSQAVGKKIFVGRLPQEANTDDLRHYFGRFGRIVDAYI

SEQ ID NO: 362969 - protein, 40 aa, Zea mays
  Clone ID: MRT4577_94202C.1.pep
HASVRANAQCMRCREGLTSPHTESNASAESKARATVHPFD

SEQ ID NO: 362970 - protein, 206 aa, Zea mays
  unsure (1)..(206): unsure at all Xaa locations
  Clone ID: MRT4577_94203C.1.pep
DCVVMXERTSGRSRGFGYVTFASADDAKNVLDCEHVLGXRTLEVKVATPKEEMKSQGSKKATRIFVARIPQSVDESMFRRHFEAFGEILDLYMPKDEDVRYPPSRPSQGGYGAYNAYISAATRYATLGAPTLYDHPGSAYGRGYYGPSQAVGKKIFVGRLPQEANTDDLRQYFGRFGRIVDAYIPKDPKRSGHRGFGFVTFADDGG

SEQ ID NO: 362971 - protein, 88 aa, Zea mays
  unsure (1)..(88): unsure at all Xaa locations
  Clone ID: MRT4577_94204C.1.pep
CTAPKEEMKSQGTKKATRIFVARIPQSVDESMFRRHFEAFGEILDLYMPXESVDSIMQESHELDGTTVVVDRATPNEEDVRYPPSRPS

SEQ ID NO: 362972 - protein, 360 aa, Zea mays
  Clone ID: MRT4577_94205C.1.pep
MATKLVVLGIPWDVDTEGLREYMAKFGPLDDCVVMKERSSGRSRGFGYVTFASADDAKNVLDCEHVLGSRTLEVKVATPKEEMKSQGSKKATRIFVARIPQSVDESMFRRHFEAFGEILDLYMPKEHGSKGHRGIGFITFQSAESVDNIMQESHELDGTTVVVDRATPKDEDVRYPPSRPSQGGYGAYNAYISAATRYATLGAPTLYDHPGSAYGRGYYGPSQAVGKKIFVGRLPQEANTDDLRQYFGRFGRIVDAYIPKDPKRSGHRGFGFVTFADDGVAERVARRSHEILGHEVAIDTAAPLENDSAAGGYIDPMDLYGAYGSMRSFGRFCGGLDYNYGYGPSSGSSRSRSDWRYRPY

SEQ ID NO: 362973 - protein, 53 aa, Zea mays
  Clone ID: MRT4577_94206C.1.pep
AAELKVKELKNGRLAMFSMYGFGQEAICNVQGSMDILIDYISHSVSHNALYIL

SEQ ID NO: 362974 - protein, 360 aa, Zea mays; identical to SEQ ID NO: 362972
  Clone ID: MRT4577_94207C.1.pep

SEQ ID NO: 362975 - protein, 360 aa, Zea mays
  Clone ID: MRT4577_94208C.1.pep
MATKLVVLGIPWDVDTEGLREYMAKFGPLDDCVVMKERSSGRSRGFGYVTFASADDAKNVLDCEHVLGSRTLEVKIATPKEEMKSQGTKKATRIFVARIPQSVDESMFRRHFEAFGEILDLYMPKEHGSKGHRGIGFITFQSAESVDSIMQESHELDGTTVVVDRATPKEEDVRYPPSRPSQGGYGAYNAYISAATRYATLGAPTLYDHPGSAYGRGYYGSSQAVGKKIFVGRLPQEANTDDLRHYFGRFGRIVDAYIPKDPKRSGHRGFGFVTFADEGVAERVSRRSHEILGHEVAIDTAAPLENDSAGGGYIDPMDLYGAYGSMRSFGRFCGGLDYNYGYGPSSGSSRSRSDWRYRPY

SEQ ID NO: 362976 - protein, 360 aa, Zea mays; identical to SEQ ID NO: 362972
  Clone ID: MRT4577_94209C.1.pep

SEQ ID NO: 362977 - protein, 47 aa, Zea mays
  Clone ID: MRT4577_9420C.1.pep
GLSADLVTYNALILGLCNEGKTWKASQLVQELCAAKLEPNASTFSAL

SEQ ID NO: 362978 - protein, 360 aa, Zea mays; identical to SEQ ID NO: 362975
  Clone ID: MRT4577_94210C.1.pep

SEQ ID NO: 362979 - protein, 259 aa, Zea mays
  Clone ID: MRT4577_94211C.1.pep
MATKLVVLGIPWDVDTEGLREYMAKFGPLDDCVVMKERSSGRSRGFGYVTFASADDAKNVLDCEHVLGSRTLEVKVATPKEEMKSQGSKKATRIFVARIPQSVDESMFRRHFEAFGEILDLYMPKEHGSKGHRGIWFITFQSAESVDNIMQESHELDGTTVVVDRATPKDEDVRYPPSRPSQGGYGAYNAYISAATRYATLGAPTLYDHPGSAYGRGYYGPSQAVGKKIFVGRLPQEANTDDLRQYFGRFGRIVDAYIP

SEQ ID NO: 362980 - protein, 80 aa, Zea mays
  Clone ID: MRT4577_94212C.1.pep
VQAAISCIPSNSMQASKSSPQERQKEGTDVCTHALTGVEEVLAPHERSKWRLIMGLYTVFLTAWCLVRAIAVGASPCSRE

SEQ ID NO: 362981 - protein, 57 aa, Zea mays
  Clone ID: MRT4577_94213C.1.pep
VISTKLFFQMGVFSPVYNSLPNAVFGSYFFCWPPHELFSQELASRHLSSYLQEWGVF

SEQ ID NO: 362982 - protein, 89 aa, Zea mays
  unsure (1)..(89): unsure at all Xaa locations
  Clone ID: MRT4577_94214C.1.pep
MPSVGVKIYSGFLKLLLRHRLQLLASAGGXSDNAVFGVSCRPDEATVLRNTVLSAGAEGVRCKELHIDPNSSLSGRIFRPTSLSVGQKG

SEQ ID NO: 362983 - protein, 81 aa, Zea mays
  Clone ID: MRT4577_94215C.1.pep
PTRPPTRPIDKAEKKKTLQTFVMHFVKAFKDWEPGYIEQSIDHESLSDDTILGCSTGHPSEVILILIQEISQITSSITESS

SEQ ID NO: 362984 - protein, 76 aa, Zea mays
  unsure (1)..(76): unsure at all Xaa locations
  Clone ID: MRT4577_94216C.1.pep
QDKSLKEKLKSSGKPFEVKKYPXLASFNVNXSLKALKRKKGMGFIYENQKAVDLAWSRFFSWMGRSPGLCGKSFGG

SEQ ID NO: 362985 - protein, 84 aa, Zea mays
  Clone ID: MRT4577_94217C.1.pep
IAAGSYVVEVVSPAYRFDRERVDITYEGKMRARYESYIGTSEVVRLPYPLQMKSSGPTSYIIKRESRGWTDFQMNPMVKMMDLP

SEQ ID NO: 362986 - protein, 94 aa, Zea mays
  Clone ID: MRT4577_94218C.1.pep
GETGQANLLTTRQKSLNSFFPHLKSLGLFFYISSSLQIIKTRKGPSRLRILSKGEALEAGNCNSLTAYSNQPSPVVKSLGGFYQRVGGFGLTSS

SEQ ID NO: 362987 - protein, 69 aa, Zea mays
  Clone ID: MRT4577_94219C.1.pep
DPNPFLFLLAWAKGTFFHKGGKGLKNPILGVFAPKKKNNSVILKKKGPGHEFANPTYGPPKVGFGPKRP

SEQ ID NO: 362988 - protein, 114 aa, Zea mays
  Clone ID: MRT4577_9421C.1.pep
SFLGVPLSSWFPWWWCFGALLSCAVFLSLGVFVLVGVGAACSRGGPLLRRPGWPGGSPGGSGPPVGRLLRASPSSWAVPCGVWWSGVSSLVFTPLFSQKFKEKKKKKKKKKNPK

SEQ ID NO: 362989 - protein, 78 aa, Zea mays
  Clone ID: MRT4577_94220C.1.pep
VVGIGDLISWSPINIMRPSTKKRSAGSAVFMDQGEVHIVIRLFIVQSSILPSSPHQQVMCRAATTSCWKVAMSIAVTT

SEQ ID NO: 362990 - protein, 72 aa, Zea mays
  Clone ID: MRT4577_94221C.1.pep
TTFQNNGIVKKNSSIGDKKTYASCLMYRYRILGKGHVLEHSGCICVVLSEYTIHCKFSCSNCGIDNLALIQN

SEQ ID NO: 362991 - protein, 82 aa, Zea mays
  unsure (1)..(82): unsure at all Xaa locations
  Clone ID: MRT4577_94222C.1.pep
NQLAALTPXCFFQRQILLPFGRLVPPNPASFLTHHQLFPFSHRFVVTPAPFFQLHQLLPFVHLVLTNPAAFFQQPIIGGALF

SEQ ID NO: 362992 - protein, 91 aa, Zea mays
  Clone ID: MRT4577_94223C.1.pep
SASSPTTTRSVDLRVGGSVTKVVEADWVSVTMTCCAPTASSRRQEKVHPLRPEASILRMQSPKAHTTSSGANKIAEEAPPSSRIPSLGRCA

SEQ ID NO: 362993 - protein, 133 aa, Zea mays
  unsure (1)..(133): unsure at all Xaa locations
  Clone ID: MRT4577_94224C.1.pep
RNAPNFYPSLGSLRVNDTCERKDMEREXTAKLLESLCSGRHNXLSKQQLNDGLSNVLALLEDNLHDASRATDYLRRLLARLVEESILLFHEVGELTSRKCIXPGYLIQGGIAADILSALLYFIKSDKGHLFLD

SEQ ID NO: 362994 - protein, 39 aa, Zea mays
  Clone ID: MRT4577_94225C.1.pep
SVPPGTRHDDRPACSALLEASAQVSSDAKADTHLHPPRV

SEQ ID NO: 362995 - protein, 1470 aa, Zea mays
  unsure (1)..(1470): unsure at all Xaa locations
  Clone ID: MRT4577_94226C.1.pep
MTSHGSSDDGNALSHTDRLAREGFPRILWEVLQGAGYTTPPQYAVQQFEKHRVPRCRVRMTLEPHPLQPGWRSLDSESFGYRAEDTIEAIALHGLTTFCGFHPLELSTHPIGLFPVEREDDPMWKDRVEHAKDIWAIYPGQTAHLTVRCMNALYRLQVMRGEAMSHLMALLEATKITLDNRKELVVDLSTEMVEKDLQVEQLSNEIQELEELVGTRENTIEVLEDQLINTQQQLAEANEHLDMHRQEIQDMEANEDVDIEGGEEPASSLDTAGSGRPPSPESSMAGRARRGQNERVPPPPPPPPTLQELMAQQNEILRQLAQRQPPPQHYGGGDHQRHPAAATYQEFLSTQPPLFTRAEDPLDADVWLRVVESKFPLLHGVCSEVTKVRFATQQLHGPARTWWDHFLAMQPDDREGNRTVLQYAQAFNDLCQYAGYHADTDEKKRDRFRRGLSTKLCDRLNTVRANSYNELVNMAISQEDCITARQAEKKRKTPVAGPSAQPQRFRIVSDTQSRGPQQQQGRWVIRPEQQQQQAPNRTQFPAQGNNQQQQYRQANDNRCFTCGNTGHYAKNCPRNQQRQGQNVNQNQGKIQKVQVRQGRLNFTTMADIPEGAPVMTGLDSVDIILGADWLTRHQAVLDIAARAIEIHSPAYGETVLYLPDQGCTRSCAFVMIESPVEKIPVRPYRMPPAELAELKKQLQELLDKGFIRPSTSPWGCPALFVKKKDESLRMCVDYRPLNAVTIKNKYPLPRIDVLFDQLVGAKVFSKIDLRSGYHQIKIRASDIPKTAFSTRYGLYEFLVMSFGLTNAPAYFMYLMNSVFMPELDKFVVVFIDDILVYSKNGDEHTEHLHIVLQRLRDHRLYTKLSKCEFWLKEIKFLGHTISQDGISVDPEKVQEVMDWKPPTTVRIAKPMTELLKKGVKYDWSQKCEDAFHTLRQHLTTAPVLAQPDNTKPFEVYCDASGTGLGCVLMQDDKVIAYASRALRPHEQNYPTHDLELAAVVHALKIWRHYLMGAHCNIYTDHKSLKYIFTQADLNMRQRIWLELIKDYDLEVHYHPGKANVVADALSRKAQCNCMSIDARVTTLCDELCKLNLEVVSSGALSYISVEPTLQEQIVRAQIKDKGVQVIKDMIKQKAEKYKCFRQDNKGILWFGDRLVVPKDPELRKKILDEAHLSKFYMHPGSNKMYHDLRSLYWWTRMKREIAKYISECDTCQRIKASHLKAACPLQPLPIPSWKWEDICMDFIVGLPNTSRHHDSIWVIVDNLTKTTHFLPVHTTHRTEKYAEIYIDQIVRLHGIPRTIVSDRGAPFVARFWEQLQESLRTYVIRSSAYHPQTDGQTERVNQILEDMLRACVLHYGKDWDKCLSLAEFSYNNSYQSSLKMALFEALYGRRCRTPLNWSQAGEREIFGPDLVLEAEAKVRVIKKNLEAAQARQKSYHDKRRKPLQFEVGDHVYLKVSPTKGVQRFXIKGKL

SEQ ID NO: 362996 - protein, 105 aa, Zea mays
  unsure (1)..(105): unsure at all Xaa locations
  Clone ID: MRT4577_94227C.1.pep
FLYFPPXXXXXERVRPRAAEQGGAPKXQTPGAKGKKTEAGKQTRRGNXXXXSTGTGSQKTGRXGKKKGGRPAPKPAGRXHRQXRPAPAARRGWENRRLPNGRNPG

SEQ ID NO: 362997 - protein, 1478 aa, Zea mays
  Clone ID: MRT4577_94228C.1.pep
MTSHGSSDDGNALSHTFCGFHPLELSTHPIGLFPAEREDDPMWKDRVEHAKDIWAIYPGQTAHLTVRCMNALYRLQVMRGEAMSHLMALLEATKITLDNREELVVDLSTEMVEKDLQMAGRQRRGQNERVPPPPPPPPTLQELMAQQNEILRQLAQRQPPPQHYGGGDHQRHPTAATYQEFLSTQPPLFTRAEDPLDADVWLRVVESKFPLLHGACSEVTKVRFATQQLRGPARTWWDHFLAMQPEDSEYAGYHADMDEKKRDRFRRGLSTKLHDRLNTVRANSYNELVNMAISQEDCITARQAEKKRKTPVAGPSAQPQRFRIVSDTQNRGPQQQQGRWVIRPQQQQQQAPNRTQFSAQRNNQQQQQYHQANDNSFISTKFRAKCQLPFHHTNGGITISTPGGRVATYQINKNVPIKFGSLIIKTNLLILGLDSVDIILGTDWLTKHQAVMDIAARAIEVHSPTCGETTLYLPDQGCTRSCAFVMIESPVEKIPVVCDYPDVFPDELPRMPPDRDIEFAIELQPGTAPISKRLYRMPPAELAELKKQLQELLDKGFIRPSTSPWGCPALFVKKKDESLRMCVDYRPLNAVTIKNKYPLPRIDVLFDQLVGAKVFSKIDLRSGYHQIKIRTSDIPKTAFSTRYGLYEFLVMSFGLTNAPAYFMYLMNSVFMPELDKFVVVFIDDILVYSKNEVEHTKHLHTVLQRLCDHQLYAKLSKCEFWLKEIKFLGHTISQDGISVDPEKVQEVMDWKPLTTVRQIWSFLGLAGYYRRFIPDFSRIAKPMTELLKKGVKYDWSQKCEDAFYTLRQHLTTAPVLAQPDNTKPFEVYCDASGTGLGCVLMQDNRVIAYASRALRPHEQNYPTHDLELAVVVHALKIWRHYLMGAHCNIYTDHKSLKYIFTQADLNMRQRRWLELIKDYDLEVHYHPGKANVVADALSRKAQCNCMSMDARVTTLCDELCKLNLEVVSSGDLSYILVEPTFQEQIVRAQIEDKGVQIIKEMIKQKAEKYKCFRQDGKGILWHHDSIWVIVDRLTKTAHFLPVHTTHKMEKYAEIYVDQIVRLHGIPKTIVSDRGALFVARFWEQLQESLGTHVIRSSAYHPQTDGQTERVNQILEDMLRACVLHYGKDWDKCLSLAEFSYNNSYQSSLKMAPFEALYGRRCRTPLNWSQVGEREIFGPDLVLEAEEKVSPTKGVQRFGIKGKLAPRYIGPNRIKASCGPVAYQLELPLRMSAVHNVFHVSQLRKCVRLPTEVLPELDLEIEPDLSYQEYPIKVLDRKERSTRARSIRMYKVQWSHHSAEEATWETEDFLRSRFPDFLPKGVGHPLEKVEPETLTFDMPWHGFCREVGRETYLIWRPKISLPRPYLPWRLTDERQPKVPGKGSRRIFAKIRTFATWASCGTRAEEKLHVFDALCARQSTPVRTPRRANGQPTPWPAPAPIKPTQASTTLFRARSNLTRAQLTTVCPCATCPRPPGPLPP

SEQ ID NO: 362998 - protein, 1605 aa, Zea mays
  unsure (1)..(1605): unsure at all Xaa locations
  Clone ID: MRT4577_94229C.1.pep
MTSHGSSDDGNALSHTDVLAREGFPRILWEVLQGAGYTTPPQYVVQQFEKHRVPRCRVRMTLEPHPLQPSWRSLDSESFGYRAEDTIEAIALHGLTTFCGFHPLELSTHPIGLFPTEKEDDPMWKDRVEHAKDIWALYPSQTAHLTVRCMNALYRLQVMRGEAMSHLMALLEATKITLDNREELVVDLSTEMVEKDLQVEQLSNEIQELEELVGTRENTIELLEDQLINTQQQLAEANEHLDMHHQEIQDMEANEDVDIEGGEEPASSLDTAGSGRPPSPESNHQRHPAAATYQEFLGTQPPLFTRAEDPLDADVWLRVVESKFPLLHGVCSEVTKVRFATQQLRGPAKTWWDHFLAMQPNDREVEWREFKAAFRGHHIPTGIMDRKLNEFLALTQGNRTVLQYAQAFNDLCQYARYHADTDEKKRDRFRRGLSTKLCDRLNTVRANSYNELVNMAISQEDCITACQAEKKRKTPVTGPSAQPQHXSGLCLTLRTGGLSSNKGNXIRPQQQQQQAPNRTHNTGHYAKNCPRNQQRQGQNVNQNQGKRQKVQVRQGRLNFTTMADIPEGAPVMTGIFTVLNYPAIILFDSGASHSFISAKFSAKCQLPFHHTNGGITISTPGGRVATYQINKNVPIKFGSLIIKTNLLILGLDSVDIILGTDWLTKHQAVIDIAARAIEVHSPTYGETTLYLPDQGCTRSXLRYDRIPSGXIPVVCGYPDVFPDELPGMPPDRDIEFGIELQPGTAPISKRPYRMPPAELAELKKQLQELLDKGFIRLSTSPWGCPALFVKKKDESLRMCVDYRPLNAVTIKNKYPLPRIDVLFDQLVGAKVFSKIDLRSSYHQIKICASDIPKTAFSTRYGLYEFLVMSFWLTNAPAYFMYLMNSVFMPELDKFVVVFIDDIQVYSKNEAEHTKHLHTVLQRLRDHQLYAKLSKCEFWLKEIKFLGHTISQDGISVDPEKVQEVMDWKPSTTVRQIRSFLGLAGYYRRFIPDFSRIAKPMTELLKKGVKYDWSQKCEDAFHTLRQHLTTAPVLAQPDNTKPFEVYCDASGTGLGCVLMQDNGVIAYASLALRPHEQNYPTHDLELAAVVHALKIWRHYLMGAHCNIYTDHKSLKYIFTQADLNMRQRRWLELIKDYDLEVIKEMIKQKAEKYKCFRQDSKGIVWFGDRMVIPKDPELRRRILDEAHLSKLSMHPGSNKMYHDLRSLYWWTRMKREIAKYISECDTCQRIKASHLKAAGPLQPLPIPSWKWEDICMDFIVGLPNTSRHHDSIWVIVDRLTKTAHFLPVHTTHKTEKYAEIYIDQILRLHGIPKTIVSDRGALFVARFWEQLQDSLGTQVIRSSAYHPQTDGQTERVNQILEDMLRACVLHYGKDWDKCLSLAEFSYNNSYQSSLKMAPFEALYGRRCRTPLNWSQAGEREIFGPDLVLAAEEKVRVITKNLEAAQARQKSYHDKRRKPLQFELGDHVYLKVSPTKGVQRFGIKGKLAPRYIGPYEIKASCGPVAYQLELPPHMSAVHNVFHVSQLRKCVRLPTEVLPKPDLEIEPDLSYQEHPVKVLDQKERSTRARSIRMYKVQWSHHSVEEATWETEDFLRSRFPDFLPKGVST

SEQ ID NO: 362999 - protein, 95 aa, Zea mays
  Clone ID: MRT4577_9422C.1.pep
MTKRTKKARIGVEYGTSYGASWRKHIKKMEGSQHSKYFGELWGKVAVKHKALRIWGSRACLKEMACGALLADAHLLLALGLKLLLLRPPTLAGSL

SEQ ID NO: 363000 - protein, 90 aa, Zea mays
  Clone ID: MRT4577_94230C.1.pep
HYKFWSRCLLRVRWLICMRYTGQRQISCNPFCLEAVSVCNVLVDSVTPVSCDVNVLGSTGVGESLLRSSVPNFFLALAAHPVAMGVYIHK

SEQ ID NO: 363001 - protein, 107 aa, Zea mays
  Clone ID: MRT4577_94231C.1.pep
GKHCQGLLFSGQQPPDEHRLHPVLSISVVCLGVPVPLLRQIKASSFFLGLFYYVRSLLRYVHVHADFVPLGWYSSFILVGVGQPKVYVTSAHVSLYYHNKIYAAFQS

SEQ ID NO: 363002 - protein, 51 aa, Zea mays
  Clone ID: MRT4577_94232C.1.pep
PHIQGKISLSTISPHRKHHCKLMCFMPPDDIVGFTLLGKRVGHSGFPIIYA

SEQ ID NO: 363003 - protein, 204 aa, Zea mays
  Clone ID: MRT4577_94233C.1.pep
AAVVRELGQRLRRNIPWQPGAVVAEIAKAVVASSRRERDGTLGSWLYVKGRDHSATRRAVTVIAETCCGSAGRVVRADPSKHSCAEELCSDVVSRASEMGGEMVVVVVVDGVENAPCDVADCLVAASKSGSLKDAESGQVLRLSGCIVILVASKLPGGASDPISLRLWSEDEASSDGALKRKTESPQGEGRGQAGTARRRAGQA

SEQ ID NO: 363004 - protein, 122 aa, Zea mays
  unsure (1)..(122): unsure at all Xaa locations
  Clone ID: MRT4577_94234C.1.pep
LLEWKKFFSLNPDPYLGEQLLLPFSQLASVYCQXLQALPFNQLAALNPSTYLQQXILLPFCQLATTCTSYFLTQQQLLPFYQLFVANPVTLLQLQQLLSFVQLALTYPAALYXNTLLGRAIF

SEQ ID NO: 363005 - protein, 119 aa, Zea mays
  Clone ID: MRT4577_94235C.1.pep
LSYQVQPRQRGEYVWGKVNVRQLCPWQLTWQQWTVGEGETVTVHPDLIGLKSLTIRLAQATTGNLRQMRKLGLGTEFRELRDYQAGDDLRYLDWKASARRGIHNMRVLEPEREQTVIIL

SEQ ID NO: 363006 - protein, 53 aa, Zea mays
  Clone ID: MRT4577_94236C.1.pep
MAVADLALIPDVDIDSDCVFNYVLIRVHSALRSRAQAAESKEIVRGYKWPEYH

SEQ ID NO: 363007 - protein, 55 aa, Zea mays
  Clone ID: MRT4577_94237C.1.pep
LFFSYYLIQIGGWGFFMYCKNPKHSSQQTKSRLGGRDPTHFDVQMASKPPTEQGG

SEQ ID NO: 363008 - protein, 63 aa, Zea mays
  Clone ID: MRT4577_94238C.1.pep
KGKAWSKNGPYATWCKGCLVKMVRQNSCLFFVYSKKSERGCKNNKKNQPKTISFFSKKKKKKK

SEQ ID NO: 363009 - protein, 44 aa, Zea mays
  Clone ID: MRT4577_94239C.1.pep
TKSIAPRQKEFGSTLIQCTGPSFFSGMQNFPAVHAVNTRVFVVS

SEQ ID NO: 363010 - protein, 66 aa, Zea mays
  Clone ID: MRT4577_9423C.1.pep
MIKANNHIAQSHNTCNRKGVIRYVHVGCNVRSCNACPCALARDMRRPAKWGSRRSGRPSGCKGTTR

SEQ ID NO: 363011 - protein, 47 aa, Zea mays
  unsure (1)..(47): unsure at all Xaa locations
  Clone ID: MRT4577_94240C.1.pep
VIAPPRKEYSVWIGGSIMASTQHFTAEWIXQGKYDKTGPDIVHMKCL

SEQ ID NO: 363012 - protein, 38 aa, Zea mays
  Clone ID: MRT4577_94241C.1.pep
TYSWVGGYICWVVSPIFNTHVGWFTSAAIGKYPVVPQL

SEQ ID NO: 363013 - protein, 287 aa, Zea mays
  Clone ID: MRT4577_94242C.1.pep
MLTDGRLERAGRTKKINPKVEMNSAASNGINDTEGGRMISRAASIIVVGDEILFGTTEDNLGAALCKKLHAIGWRVSHVAVVRNEIDSVAEEVERCKSTDDMVFIFGGLGPLHSDVSLAGVAKAFGVRLAPDEEFEDYLSQLMGNNYTGDRNEMAQLPEGITELLHHKTLPLPLIKCRNVIALAATNMDELDTEWDCLLGTQESGLMPSKPFVSKHLSTTLSDVQIASVLAKLCLEFSDVYIGCHRISRAGPLVVNLTGKDNQRVDAAAEKLTSSFEGQFSQLNSCK

SEQ ID NO: 363014 - protein, 240 aa, Zea mays
  unsure (1)..(240): unsure at all Xaa locations
  Clone ID: MRT4577_94243C.1.pep
MEIDQAVRGCSDRRMRTKYSNAVYVVQRAFALYPFEEVAFSFNGGKDSTVLLHLIRAGYYLYKKDSGDVAQTDAVKNCPLRTIYFESPCAFPEINSFTYEIVSTYGLPLETIHSDFKSGLEGLLKEKPTKAIFIGTRIGDPNAVGQEQFSPSSPGWPPFMRVNPILDWSYRDVWSFLITCKVKYCSLYDQGIXSMGSIHDTVPNALLVIXSSEXKFRPAYMLNXGRLEKXAGRTKKRINP

SEQ ID NO: 363015 - protein, 113 aa, Zea mays
  unsure (1)..(113): unsure at all Xaa locations
  Clone ID: MRT4577_94244C.1.pep
IVKIPLVDGMTRRAPILQVEGQNTAVSVFERTSEIHNXTQTVQFTGEVLKTPVSLDMLARIFNASGTPIDNGPPILAEGYLDISASSINPSERTYPDEKIQTGISTIDVMNSI

SEQ ID NO: 363016 - protein, 60 aa, Zea mays
  Clone ID: MRT4577_94245C.1.pep
PTRPATYKMVLQTFLHYQPHHELAGLMAAYVAHQLTAICGLQLQHSYSYPCNAYAGVVYY

SEQ ID NO: 363017 - protein, 216 aa, Zea mays
  Clone ID: MRT4577_94246C.1.pep
NSARGSSQSPNRPASPNPPLPTEQPPIVFAAPTSPPGVVLLAALEGTRPQEERSCPRPPPRNRRGARRVDVRAGARAGAAPEAAPDAGARRGPRPGAPRDGPIGHLRRRACARPPGAGLAAHLPIQIRRRRRAGLGDQAAAGRAVAGLLRGHARRGGGGGRPEASDPEPRRHSEFRGQGGVRAPRGRHGPAAHMRVSLTSAAARLSSRSSCGARTL

SEQ ID NO: 363018 - protein, 90 aa, Zea mays
  Clone ID: MRT4577_94247C.1.pep
TTPRTLGGGREMLFQIVPCPGPNWVLVPPKCGWLQSSLGGGPGRFIVRIFNHLLFLLGVGFAFFGGLFGCPGCPSWGGRPLWFFWAARGG

SEQ ID NO: 363019 - protein, 100 aa, Zea mays
  Clone ID: MRT4577_94248C.1.pep
SVLTVMVGQLDSPLQRSCTINWNGFLDAGPDYTRLFMLERISDELSKGISECNYFLKNCISDFCNSLLGFKEKKSLLLNLWKLQSFTPVNYGLSDRDLCS

SEQ ID NO: 363020 - protein, 36 aa, Zea mays
  Clone ID: MRT4577_94249C.1.pep
IHHSHQANFMKLLPFNKTLCLTPLLLLVYYPGSNLY

SEQ ID NO: 363021 - protein, 139 aa, Zea mays
  unsure (1)..(139): unsure at all Xaa locations
  Clone ID: MRT4577_9424C.1.pep
YRCFVGGLACATADHSLSNPFRSYGEVLXVEDILDRETRQSRGFRFVTLLHGDAMRNAXIEDMNGKDLDGRNITGNEAQSLGSPGSRGGRYRSGPRDGSRYRGGGGSYRGGGGGFRGGGGYRGANRGGGYCNNDRNWKN

SEQ ID NO: 363022 - protein, 116 aa, Zea mays
  unsure (1)..(116): unsure at all Xaa locations
  Clone ID: MRT4577_94250C.1.pep
NYASNTGKTNLVIVDLCXGTVAVSLXTIYDGNFXVTDTAGDIQQGGEDFNITRSMISXKFKCSHNSDIIGNTHALLRLRTDCEQTKPTLSSTAQTNIDIXSLYEGISFDTSINRAQ

SEQ ID NO: 363023 - protein, 189 aa, Zea mays
  Clone ID: MRT4577_94251C.1.pep
SAMSLARQVELMEADRLVQPAPRAPPRGLLAAPAPRPALPTPQQPLALPVPPRATQQGRGEDNQRRLTPDEMAERRRMGLCFNCNEKYTRGHNRFCRRIFFVEGVEIEDTNDAPPDADGEAPCFSLQALAGVPVADTMQIAVALGAASLVALLDSGSTHNFISEAAARRTGLPLHQRPRLIAMVANGER

SEQ ID NO: 363024 - protein, 245 aa, Zea mays
  Clone ID: MRT4577_94252C.1.pep
LASRAWNPPHRQLSPVVATDLKHGACAALPAHVAAVFCSCREPLREPAGADLLAPKAALTLFPPAGSTPPSAGQLGVLDLNLDLPPPGYAGDENIEAASLPVASPVTPVPSATSPRCSPRIQRAYDGARMSPVERAAKRKAATVPDPSSSSGSSRRSSSSKSRKKAKAKATSIASILELPLLSTPAPLTRAKLKLLAQGRNLNVPAILEQARARTTNPVSDAAPSSSAVSSSSASSMRNIDASNV

SEQ ID NO: 363025 - protein, 99 aa, Zea mays
  Clone ID: MRT4577_94253C.1.pep
AKKKKKGGALFGDPIFPPPLWQIIVFFWGPLNKKHGPGFYHLLGGKTRGAPNLIALEPIPFSSGGLIRKGPPPFLFPKFSPPFLGNGPPPQLGHYCRGG

SEQ ID NO: 363026 - protein, 84 aa, Zea mays
  unsure (1)..(84): unsure at all Xaa locations
  Clone ID: MRT4577_94254C.1.pep
VTGPPCVLFFAINSRRVFARPGLTLSNFGWEMVYSAHTTVHCVWCYVVLVGSRPAPCLECIEMIKRRTTGXXKMGERVGRPCFS

SEQ ID NO: 363027 - protein, 89 aa, Zea mays
  unsure (1)..(89): unsure at all Xaa locations
  Clone ID: MRT4577_94255C.1.pep
DQFSKTHVIKHSLDLNISTRITLYPLLTSIIGSLSPLWSRRHLRSSIAFXGRRRRGKGSGVGVVDPDQGAGGGGGGGADDEEGRRKLEG

SEQ ID NO: 363028 - protein, 48 aa, Zea mays
  Clone ID: MRT4577_94256C.1.pep
DTRLKRVDLLREGDTEPEDGLLGLSPTLLMWVSAALDIIFYRHDMGRI

SEQ ID NO: 363029 - protein, 89 aa, Zea mays
  Clone ID: MRT4577_94257C.1.pep
SSTSPSSSPTATAGLMTALPSMIPAVAAMTSVSMPSMSPLPAASRAPSVNDSTAATAVADSVMAAFTVATSVALFAATFDYATLSTVAA

SEQ ID NO: 363030 - protein, 66 aa, Zea mays
  Clone ID: MRT4577_94258C.1.pep
TFTHPNLSNTISTISPLTTLFNNPIPNHNPNSLILKFNFNTQRHTHYTIQSYKLLHSTSYLYYIFT

SEQ ID NO: 363031 - protein, 74 aa, Zea mays
  Clone ID: MRT4577_94259C.1.pep
LLSGVLQPQVRTRDVAHVGFVPDRARSVNYDSQTSATVDSVPPAPFDPGIIQRAGSARAQSSIQPRPLDEATCH

SEQ ID NO: 363032 - protein, 158 aa, Zea mays
  unsure (1)..(158): unsure at all Xaa locations
  Clone ID: MRT4577_9425C.1.pep
FLNVSCLLLPLRIGFGIERSPGFGIKSERIEMPAAXAEYRCFVGGLIWATDDHSLRNAFSIYVEDLEPXIILDRQTHRPRGFKLLTFSTVDAMQNDIPXMNGKXLKGRDIARSYCRHTSRXGRGGARTARYSGARAGYGYGSGRGSDGRAGYCAARAY

SEQ ID NO: 363033 - protein, 115 aa, Zea mays
  Clone ID: MRT4577_94260C.1.pep
FICVYGIGKSTGSPEACVCRSPHLRPADPVAAQFLFRARHCCRRPCDGRAASSIRAHGTGGAVRGGEGDGGAASTEHGEKSKKQQQRLGAIHERSEQTSGAERSQPGLKLAIAMD

SEQ ID NO: 363034 - protein, 357 aa, Zea mays
  unsure (1)..(357): unsure at all Xaa locations
  Clone ID: MRT4577_94261C.1.pep
MSFVGRVDPSTTYADNIYVHKFGAPNSNFAARRFGSDTQLFRYGPEPFNSEDYGHMGFPEAPSAAFQSSFYNQQASLTPCSDAAKDSPVCSNISQQNSQSISDNQSSGLEVEFDDEIRLKLQELEHALLDDGDDILFEVSQAGCISDEWADPMKDVSLANSPKESESSISCAGSNSGEARTPKQLLFDCATALAEYNVDEAQAIITDLRQMVSIQGDPSHRIAAYLVEGLAARIVASGTGIYKALTCKDPPTLYQLSAMQXILFEICPCXYRFGFMXXANYAILEACKGEERMHIIDFDINQGSQYXXTLMQFMKDDANKTRHLRITGXVDDHETVQRTVGGLKVIGQRLEKLAEDC

SEQ ID NO: 363035 - protein, 199 aa, Zea mays
  Clone ID: MRT4577_94262C.1.pep
MSFVGRVDPSTTYADNIYVHKFGAPNSNFAARRFGSDTQLFRYGPEPFNSEDYGHMGFPEAPSAAFQNSFYNQQASLTPCSDAEKDSPVFSNVSQQNSQSISDNQSSGLEVEFDDEIRLKLQELEHALLDDGDDILFEISQAGCISDEWADPMKDVLLATSSKESESSISCAGSNSGETPDPKQLLFDCATALAEYNVD

SEQ ID NO: 363036 - protein, 72 aa, Zea mays
  Clone ID: MRT4577_94263C.1.pep
RSNNGLQIGELDTTKGLICRRCFLSHAARRVNSSCSCCGCQTPPTNVPSSVCKPTSLYLQDPTGNSDMALHH

SEQ ID NO: 363037 - protein, 48 aa, Zea mays
  Clone ID: MRT4577_94264C.1.pep
HHPQRTSLIAWDSPMLVSLNGDHFVSISLPGPWVIHPLYLHPSASCCD

SEQ ID NO: 363038 - protein, 72 aa, Zea mays
  Clone ID: MRT4577_94265C.1.pep
SSILMVLVHGSRPTISGFPSDGRKLSKHPPVDTHFDDSLIFPVSTPARQNPISHVHKCHLVIQTCTLFPHAS

SEQ ID NO: 363039 - protein, 61 aa, Zea mays
  Clone ID: MRT4577_94266C.1.pep
RKKLRHWGGRTGVGGGGKGRTGGGRWKGPRRRQAQKGGSLRRAPAPRPDPQARPPVGTPRT

SEQ ID NO: 363040 - protein, 40 aa, Zea mays
  Clone ID: MRT4577_94267C.1.pep
VLWCGYVRHACMPTCPLTLNPNTTIPDLHVHGVCNPAKNQ

SEQ ID NO: 363041 - protein, 81 aa, Zea mays
  unsure (1)..(81): unsure at all Xaa locations
  Clone ID: MRT4577_94268C.1.pep
HCSLTPDFCTTTAWARGPCRQLLRRPAADRPRRKRNHGALHRTKSHTLQAEPGPSASQEVLVXRASLSAELCPXQHSMGPF

SEQ ID NO: 363042 - protein, 49 aa, Zea mays
  unsure (1)..(49): unsure at all Xaa locations
  Clone ID: MRT4577_94269C.1.pep
APSSDNLPPQVHLXPPNNLLRPAKRPPTEQLPAPDHMPPPSREKTPCHM

SEQ ID NO: 363043 - protein, 134 aa, Zea mays
  Clone ID: MRT4577_9426C.1.pep
RAAARAGTCKKKKKKKKKKKKKKKKKKKKKKKKKKPKKKKKKKKKKPLWAGPPLRGDFLGFSFPLGGRLTFLLGAPFPLLGGVFKFHWPCFYTLGFGKPLGFPILFLLKKFPFFPVGFLPKRPPPFPFPKFCPP

SEQ ID NO: 363044 - protein, 47 aa, Zea mays
  Clone ID: MRT4577_94270C.1.pep
YPGNREVSERAVVSIAGAIRIEHTCGCICRYARRGVRHFAIEEVLEV

SEQ ID NO: 363045 - protein, 101 aa, Zea mays
  Clone ID: MRT4577_94271C.1.pep
GWVFFYNSHYTLLFLKKKKRTQIPHNPTNRSFFKQKHTPHNLLLLLTRVAVEGKQISQSFYGAGRHHGVSFYVPYIQHTGDAPEIHRILAQPLPSVKKAIS

SEQ ID NO: 363046 - protein, 170 aa, Zea mays
  Clone ID: MRT4577_94272C.1.pep
ARGACKPQNGGYYCSYCKSEAYILRYKLTFMGSDGTATAQMFCFDTVARHVVGKSCETVLKQVTEAAPIPPDLAQIVSLKFTFRVTVSNQTFSQREQRPTVLQINSIVAVHGRQHSLSKEIETIIDQGPSTPNKEATLKLLEESPSTSMERLSTKVLTDVWQKTHIFNTG

SEQ ID NO: 363047 - protein, 233 aa, Zea mays
  Clone ID: MRT4577_94273C.1.pep
MAGRVTVVPPRDPWPFSTVTVDDMEALVADGLLRPLFGDPQPEWMVPPSGANPTPPLGYVLSFVSFHERGFGVPASCFMRALLHYYGVELHNLNPNSIAQAAIFAAELGCYKPSLPPVPEDAVDRAARRVATKKKKEKKDAKKVWARERMRARDALERRRRRQERDGLPREPSPETPDDDDDDDDDEDDDMAARLGLSPDLRLGQGSSSQAPSGLAPSVSEAGTSGSRFEEQG

SEQ ID NO: 363048 - protein, 126 aa, Zea mays
  unsure (1)..(126): unsure at all Xaa locations
  Clone ID: MRT4577_94274C.1.pep
FNIVNPSTGCQKKLEIDDYFKLRAFYXLQISQQVCGDALGEEFKGYVFKIMGGCDKQGFPMKXGVLTSDRXVRLLLARGTPCFRGYGRRNGERRRKSRRGCIESQHLCVINLVIVNKGEIDLPGFK

SEQ ID NO: 363049 - protein, 101 aa, Zea mays
  Clone ID: MRT4577_94275C.1.pep
SATPGATHASGFSPPDSTRRSTRHAGRRRARPPADRLTGGQEDPRNNIRTEPTAPIIRRGGTPLPPKRGSRSTPFAAQYQGLKQLLVHLPNTLKPPIDYHS

SEQ ID NO: 363050 - protein, 131 aa, Zea mays
  unsure (1)..(131): unsure at all Xaa locations
  Clone ID: MRT4577_94276C.1.pep
SDPSLGRCCXDEDGLTKXGIEAMVSRFLAQVKDXTWXGQGWPKVWTDYSVSKLALNAYSRLLARRLQARGARVSVNCFCPGFTRTGMTKGWGKRTAEEAADVAARLALLAPAELPTGTFFKWCTPQLYSKL

SEQ ID NO: 363051 - protein, 185 aa, Zea mays
  unsure (1)..(185): unsure at all Xaa locations
  Clone ID: MRT4577_94277C.1.pep
PKGTPQLKPYRENPPNGPKKKGXNQKNRPQGPGKRKGPPXGTPPPPPLKKPXKGGPIPNKGGQKFGKANRGGPFPKTPTGQKGKCPKANKMGNPXFPQPNGVXKHGQGNGKTPPKRGNGPPKNKPQRPPKGRKIAKIPPKGGPAQGKTLFLFFFHFFGYFFLFFFFFFFFFFFFFFFFFFFFFFF

SEQ ID NO: 363052 - protein, 93 aa, Zea mays
  Clone ID: MRT4577_94278C.1.pep
LSRSGQWSNRTTLRAANFVRPEAIRGHGRGSSQINQRLTCAHLVQSTLHFPLLINLKQQQDRQPSSYTRRRFSNALYAEGSLYSLYSHLLAAS

SEQ ID NO: 363053 - protein, 66 aa, Zea mays
  Clone ID: MRT4577_94279C.1.pep
EQTLLDWGKTQLQMPTGRSEWEQEWVDLDEGAGAFFKRIVIRHQYPCWLLYHNFITCQAALCSLQL

SEQ ID NO: 363054 - protein, 59 aa, Zea mays
  Clone ID: MRT4577_9427C.1.pep
MEHKEFTTRTELKSLTQSIKGPFYSPKAARSRWRPTRKAILAFCRVVHRTVRCVTGQSL

SEQ ID NO: 363055 - protein, 92 aa, Zea mays
  Clone ID: MRT4577_94280C.1.pep
GFYSVWLANVYLAGRAPSFFYFRIIFFFFPPIPMCLPLWAPFNPVSPTIKGFFSLKATGLGPPRLKLGFPFLPAPPLPPLTSVGVVNSPPVR

SEQ ID NO: 363056 - protein, 173 aa, Zea mays
  Clone ID: MRT4577_94281C.1.pep
DLGFPVTQFSNSQLLLLYKRLDRKKIADVLAMMEKEDVKPSLFTYKILVDAKGSVGDIEAMEKVIESMEKDSIEPDLTFNATIARHYIFYGQREKAEALLKAMEGDDIQKNRAACKTLLPLHAFLGNSDAVERIWNACEDNTRVAESVSAIEAFGKLGDVEKAEKVFEDMLVH

SEQ ID NO: 363057 - protein, 408 aa, Zea mays
  Clone ID: MRT4577_94282C.1.pep
AHGRLAGLCLRLGMVEKAKTHFTLAGSANQSDPAEWQKLHEVEIHQGRCMDARKIGDWKSALREADAAIAVGADSSRLLLALRSEALLWLHKLEEADLTITSLLKLDDASLPSTPTRVSGMSADSYVHIVQAKVNVTFGRFDSAVALAEKAKLIDGVSSEVEVILNNVRLVALARARGNDLFKAGKFAEASLAYGEGLKYEPSNPVLYCNRAACWSKLGRWAKAVEDCSEALRVQPNYTKALLRRAASYAKLERWADCVRDYEVLRKDLPGDTEVAESLFHAQVALKTARGEVVSNMKFGGVVEEIISLEQLQDVIRSPGVSVLYFMATMNKQCAQITPSVDSLCSECPALNFLKVNVDERPLVASAENVRVVPSFKIYKDGTRVKEMVCPSLQVLRYSVRHYAVSSS

SEQ ID NO: 363058 - protein, 92 aa, Zea mays
  unsure (1)..(92): unsure at all Xaa locations
  Clone ID: MRT4577_94283C.1.pep
LVCSISGGWLXSTLRFEDEPCRHKILDLIGDFSLFAQNGNQGFPIAHIIAYKAGHALHTDFLRHLSGKITVDQEQLAGQCSDVHGSCSSYVR

SEQ ID NO: 363059 - protein, 36 aa, Zea mays
  unsure (1)..(36): unsure at all Xaa locations
  Clone ID: MRT4577_94284C.1.pep
WGGVFLFGGXQNKSFYSKRTLQSFCLGTAGCRFRLH

SEQ ID NO: 363060 - protein, 83 aa, Zea mays
  unsure (1)..(83): unsure at all Xaa locations
  Clone ID: MRT4577_94285C.1.pep
MLSKENRIPPMFNQHLKEQQPTGAVSLRGPSGNRWQAALASESESEAAWCFDQRWKEFVTPHSLTLXHFLVFTRDGPPQFSAV

SEQ ID NO: 363061 - protein, 98 aa, Zea mays
  Clone ID: MRT4577_94286C.1.pep
QRSPQLFINDRENRNFALRGSSMSNLSKLCRTGTRQWLHCLFTHPGKRKEKNGNRAYRYSPTPDADGQAQPFYLRIEDCAFGDSPPCWTGVGHLVPGG

SEQ ID NO: 363062 - protein, 80 aa, Zea mays
  Clone ID: MRT4577_94287C.1.pep
WVAWGYQSYPFETQEARRGLNFQKILFQGRLVHLAFRKVEHTVALSGWLKEWDPVNCWHFPPCGAFCPVILKIVAITSSF

SEQ ID NO: 363063 - protein, 93 aa, Zea mays
  Clone ID: MRT4577_94288C.1.pep
PLQSNLGVRHPPLEASRPPLPPFGNPSNRSIWCDLGYLEAKGRVPPGGRVWQLPFGSGFKCNSPVWGPVPRVAPPARSPWLGCFAQYPGGMDP

SEQ ID NO: 363064 - protein, 134 aa, Zea mays
  unsure (1)..(134): unsure at all Xaa locations
  Clone ID: MRT4577_94289C.1.pep
FLXXLSKXPHXRTPPPGGDFRRENPGFFPPPKNWGKKKVSPEAPALKGGIHGLSPPNPEFEKNPERENPPPPKLGGGETTKGGSPPGFGGPQKTGPRKIFWKRLFSALGGRNQRPKKNWGPSSGVPPPLNKEQR

SEQ ID NO: 363065 - protein, 104 aa, Zea mays
  Clone ID: MRT4577_9428C.1.pep
PFFHDFQYGKEMFATYSLLSIIQSMVFRPNLRITVYITEKDIGKKRVKKKETNSFSYLLFDLLPHLGLVVLFFHSTPPGACLTGTFTNLGLGYIKGMFFTPSSC

SEQ ID NO: 363066 - protein, 135 aa, Zea mays
  unsure (1)..(135): unsure at all Xaa locations
  Clone ID: MRT4577_94290C.1.pep
NISSQQHPIFQTIKSPTNINPPTNKTNPNTTTTTTMQFTTXSCSLASASSPLPPQPRSSLTTSATSLSTCSPVKATPPPXVXSPFPPTRTTSSPPPSPAPTSSSPPSLSPASPTSAALCRPSTTSAPTPTGPTMT

SEQ ID NO: 363067 - protein, 56 aa, Zea mays
  Clone ID: MRT4577_94291C.1.pep
AFVLRTEASSVLSKGAERITVVMLQSSVRFLYRHGTTIGLLPSYLLNAHVMDPLVG

SEQ ID NO: 363068 - protein, 69 aa, Zea mays
  Clone ID: MRT4577_94292C.1.pep
LGLGFPTPNGEKKTKAPVSIPKKATPVKKAPPQARKLSIISSPPIKKKEFKRNQARVKTTFVQDLLLFT

SEQ ID NO: 363069 - protein, 94 aa, Zea mays
  unsure (1)..(94): unsure at all Xaa locations
  Clone ID: MRT4577_94293C.1.pep
XPFRSGGGLPGXXTPPGKKNRFLPPTGETLVFFFFXLGWPFLLLSNSCTHDLWVHTXAHKRHPRLAXPSPRSPLRTLQFIDMNRHHDGFSIFIS

SEQ ID NO: 363070 - protein, 72 aa, Zea mays
  Clone ID: MRT4577_94294C.1.pep
LSRAQTLPLARARLSFPTLRHLRALAAPLRALVSSPPLGFTSAARGPAPLRAAVFESDREQPEAGVEAGEQG

SEQ ID NO: 363071 - protein, 52 aa, Zea mays
  Clone ID: MRT4577_94295C.1.pep
TAVCRSITERLLARVQATIRVLARFSSWAAAGSLAVTRGILVSFFSSAYLYA

SEQ ID NO: 363072 - protein, 200 aa, Zea mays
  Clone ID: MRT4577_94296C.1.pep
PPEAREVAELKAQLKDALYGTERGLRASSESRAKVLELITQLETRNPTPAPTEALTLLNGKWILAYTSFSQLFPLLGFGNLPQLVKVEEISQTIDSENFTVQNCIKFSGPLATTSVATNAKFEIRSPKRVQIKFDEGIVGTPQLTDSIVLPEKFELFGQNIDLSPLKGIFSSIENAASSGAKTISEQPPLKIPIRTNNAE

SEQ ID NO: 363073 - protein, 314 aa, Zea mays
  Clone ID: MRT4577_94297C.1.pep
MAGSALLNALVLRAPSPSLSSSSKRRSAGAFVSSNPPRFPSLRSERRVALPRAAAGGDPEDEWVPEPEGGSAVTGTAVAEAPEAGEVAELKAQLKDALYGTERGLRASSESRAKVLELITQLETRNPTPAPTEALTLLNGKWILAYTSFSQLFPLLEFGKLPALVKVEEISQTIDSKNFTVQNCIKFSGPLATTSVSTNAKFEIRSPKRVQIKFDEGIVGTPQLTDSVVLPEKFEVFGQNIDLSPLKGIFSSIENAASSVAKTISGQPPLKIPIRANNAESWLLTTYLDEEVRISRGEGGGIFVLFKEGSTLLN

SEQ ID NO: 363074 - protein, 72 aa, Zea mays
  Clone ID: MRT4577_94298C.1.pep
ATCLFVEELALISAFVLILFCWLASGVEPYFFLFVRTNRFILGRVESLPISLETKFCLLWMTCLAIFWLLVI

SEQ ID NO: 363075 - protein, 59 aa, Zea mays
  unsure (1)..(59): unsure at all Xaa locations
  Clone ID: MRT4577_94299C.1.pep
LRHIPRRSXLTVTVLSRQGLYGGRALIPSVEHDESGYSHGGTPSDPLCHASQMAVVLIH

SEQ ID NO: 363076 - protein, 197 aa, Zea mays
  unsure (1)..(197): unsure at all Xaa locations
  Clone ID: MRT4577_9429C.1.pep
METPNEVTSYSSLSKIDSYHSQAAPMSDLAPENTYPVYDYLYEPSLEPDFPSEYGSREDPFPTAQASSTINLKTVLGGLAAIVSRPSKIGDDASRQQSFSTDVSFLGAGKDGDLHSSVCVPSAPPLLEANALQFSAYREVLQADPPEWLPDSSTSVCLQCSCPFTALTRGRHHCRFXCGGIFCKECXSKGRCLMPMK

SEQ ID NO: 363077 - protein, 97 aa, Zea mays
  Clone ID: MRT4577_942C.1.pep
YTSKAVSGYLHRIQLLFCRNALLIMQVDQHSKTPRPPISSGTQKVKPLHGKVAKGNRLKRFHSSKNFGTGKTVRQAGPAPMAMSLQASSLLRRRPTP

SEQ ID NO: 363078 - protein, 88 aa, Zea mays
  Clone ID: MRT4577_94300C.1.pep
PNWVITSQKNSPNPSGFRRSSRGRRQRRLLLLRRRGEEKLHASEVAARREGEEGGAGQDVAEVPPLMHLHGGEVPVSGPWCMRAWCGT

SEQ ID NO: 363079 - protein, 318 aa, Zea mays
  Clone ID: MRT4577_94301C.1.pep
MASSAFLNALVLRSPSPSLSSSSNRRSTGAFAFPNPPRFPCLRSARRLVLARAAAAPAPGDGPEDEWGPEPEGGSAVTGAAVAEAPEAREVAELKAQLKDALYGTERGLRASSESRAKVLELITQLETRNPTPAPTEALTLLNGKWILAYTSFSQLFPLLGFGNLPQLVKVEEISQTIDSENFTVQNCIKFSGPLATTSVATNAKFEIRSPKRVQIKFDEGIVGTPQLTDSIVLPEKFELFGQNIDLSPLKGIFSSIENAASSVAKTISEQPPLKIPIRTNNAESWLLTTYLDEELRISRGDGSSIFVLFKEGSTLLY

SEQ ID NO: 363080 - protein, 40 aa, Zea mays
  Clone ID: MRT4577_94302C.1.pep
MEVHKWWYLSDILARPSLLPLTPRRYLGGVKLLLPSSAQQ

SEQ ID NO: 363081 - protein, 134 aa, Zea mays
  Clone ID: MRT4577_94303C.1.pep
MADDAVAGGAAVRCAGPAPASLSSSRKQQQQPDDAGCGSSDDHYQHDVIMLRRTRSGRAFPPPISVIGKGGRPWLCLRAHREGGRLVLRQMRLPSQELLQPCKEDGRFKLLMHPEARARPCGGGTLQERQGNDS

SEQ ID NO: 363082 - protein, 100 aa, Zea mays
  unsure (1)..(100): unsure at all Xaa locations
  Clone ID: MRT4577_94304C.1.pep
SSLTLSGVLSEGESDIIYYRQHPPFGVPPQQGYPGKDGYPPAWYPPAGYPPPAQGYPPYGYLPQYSLSSPPHDQHSIGPFFMEGCXLASLFCLCLLDSFF

SEQ ID NO: 363083 - protein, 48 aa, Zea mays
  Clone ID: MRT4577_94305C.1.pep
RILIQTIFTGLPIHIFKLYCRNSAMDHTKRCNSILVDHTGVTYRRSSI

SEQ ID NO: 363084 - protein, 111 aa, Zea mays
  unsure (1)..(111): unsure at all Xaa locations
  Clone ID: MRT4577_94306C.1.pep
LSALYTATQFSXLRPQPTITVYIASSSIDVHYKDSKAKICYTAGQGMNRDITMAYYRIALGALVXYYINRSVTFKNLERCLMHISDHTDANLVIMLVGNKAHLRHLMAVST

SEQ ID NO: 363085 - protein, 89 aa, Zea mays
  Clone ID: MRT4577_94307C.1.pep
LAELHSPLSKSTLVYWDNVSAVYLSTNPVQHQRTKHVEIDLHFVRDLVAVGDVRVLHVPTTSQFADIFTKGIPSSTFAEFRSSLNISSG

SEQ ID NO: 363086 - protein, 38 aa, Zea mays
  Clone ID: MRT4577_94308C.1.pep
LDWISESVCYHYITSLIINLYFFVVTLEGYLFCQSIAG

SEQ ID NO: 363087 - protein, 100 aa, Zea mays
  Clone ID: MRT4577_94309C.1.pep
DELKERDISVKGGMDELSEDDKLTVARARKIQRFLSQPFHVAEVFTGAPGKYVELKESVKSFQGVLDGKYDDLPEQSFYMVGGIEEVIAKAEKIAKESAS

SEQ ID NO: 363088 - protein, 65 aa, Zea mays
  Clone ID: MRT4577_9430C.1.pep
RDLSSVMQCHPEQVAAAIKIGFSPCLLVSCIPFVLFIFFPHQLDTTCRLSFRFFLFFILCVTLQM

SEQ ID NO: 363089 - protein, 227 aa, Zea mays
  Clone ID: MRT4577_94310C.1.pep
KKNDPRDRLLVRLKGFPHLEGYAEPYMRQLSVSDVVTGPLQTFNGIEKVGHIVHVLKTTGHNGFPVVDEPPFSDTPTLYGLILRDHLLVLLRKKDFIRSCTASTLNALNHFSHAEFAKRGSGKHDRIEDIELCPEELEMFVDLHPFTNTSPYTVLETMSLAKALILFREVGLRHLLVLPKSSKRAPVVGILTRHDFMPEHILGLHPFLFKSRWKKVRLGKVKVTNIF

SEQ ID NO: 363090 - protein, 305 aa, Zea mays
  unsure (1)..(305): unsure at all Xaa locations
  Clone ID: MRT4577_94311C.1.pep
AILALILEXIGVYCEGEFKLNSGYSXMTVVLHLSXDXALVLLVLFDTVIKDELAHIKPLAKFLTFKSIVFLTWWQGIAIALLFNWGLMRGPIAQELQFKSSIQDFIICIEMGVAAVAHLYXVFPAKPYELIGDRLVGDVSVLGDYASVDCPLDPDEVKDSERPTKFRLPQPDDHVRCSTAIKESVRDVVLGGGEYIVNDLKFTVNHAVEPINEKLHMISENIKKREKGKKKTNDDSCIGSPTSLTRVISGIDDPLLNGSLSDNSGPKKVRRQRRKSGYAGAESGGESSDHGLGGFEIRGNRWITS

SEQ ID NO: 363091 - protein, 135 aa, Zea mays
  Clone ID: MRT4577_94312C.1.pep
MAGSNDLEANNRMSRGSEAVDNGFSEKPLNQGTGSGIHASVYIITWIFFSNTTILFNKWLIDTAGFRYPIILTTWHLVFATIATQLLARTTSLLDSRHSLPITRRLYIRTILPIGVLYSASLVFSNIVYLYLSVA

SEQ ID NO: 363092 - protein, 279 aa, Zea mays
  Clone ID: MRT4577_94313C.1.pep
MAAAAAASAVPAVGGRAGLLGGGSQGGSRSGSRGVVGRRRCRHYGSLLGEEIHEGAAELGEGGAWRSPPRSFSFRVAQTESGQGRADAGRGHAGGGLPAPRQGRAVASSGRAWRWTASTTSVSAPAVPRRVDEGHRRMLRAGLLQTEEALDVVPRRGLGWRLAHGGDGRRRLEVTAGGGWREERRWMMGLQRLTSLQGVRQFMQLWHYINQLNISGAPDTVLWKFNGNGRYSARSAYNIQFHGSVQMDHCRTLWKAKITNRCKMFIWLMIQGRLPTANS

SEQ ID NO: 363093 - protein, 159 aa, Zea mays
  unsure (1)..(159): unsure at all Xaa locations
  Clone ID: MRT4577_94314C.1.pep
MAPNSGGXAPSAPAKXTTHNVTNPLFEKRTNHLMISDALTTEKDLCLIVQRPWVVRILRQRXRILNHRLNVPPELNQLTRTLDKNLPTNLYKMLLEHLPEDHAGKNESLLESTQAENEGXTGESHKPIAVKYGLNHXTYLIEQNKAQLVVIAHDVHPIE

SEQ ID NO: 363094 - protein, 46 aa, Zea mays
  Clone ID: MRT4577_94315C.1.pep
CKCHGYSIYFCLVHLFSLLVKHDFRWEACVSWRNKRPTFSFPAPNF

SEQ ID NO: 363095 - protein, 119 aa, Zea mays
  Clone ID: MRT4577_94316C.1.pep
MAPSAPRLVAGALVILAAVALARPNAEQRSPGRYNVADAIAMGSGQHRHHQGRTPPCHVSPPPVLPPPCPGHQDRRREALVPPPIVLGVQRTAPAPPSPQHAQVEHYRALFPPPPACSF

SEQ ID NO: 363096 - protein, 79 aa, Zea mays
  Clone ID: MRT4577_94317C.1.pep
RSTVVHSVGLEHFAPSFEVTGMLDFWAYVRAGDALLIHILFLPLDWSWWLSRSHNIGRHSHRTRLPCMGRRMLDGHPES

SEQ ID NO: 363097 - protein, 101 aa, Zea mays
  Clone ID: MRT4577_94318C.1.pep
KTILSTLKIKTVKSCKKKNKPYIHNRSTTETNFNTTKKASFTQNNNIVYQVRYALIIMMFANKIGKQKKYVRSSARALNCFKKRIFSPGDIKEGWFLRANA

SEQ ID NO: 363098 - protein, 362 aa, Zea mays
  unsure (1)..(362): unsure at all Xaa locations
  Clone ID: MRT4577_94319C.1.pep
MKTTGTSDEDNDRRWAVAKTLPKNLIADPPSRVSNGKGFGGTCPLASLRAQCFVLPLRAPARRWKASPAVNVAHRPPFDSDAPRTTPPKPSSKSALCKWWHSLAPALLAAALAVTVAALRPTTEHADAKGRPPLWFGPGGVFKVALFADLHYGEDAWTDWGPAQDAASDRVMAAVLDAENPAIDVQTSLLEEDLNKNYQEDKRQYTPLVKNGEVAKDPSGKDINALEQHIKNLLSPSTPFFFNTLYDPYRVGADFVRGYPYSLREGVPTVVSHGLWLNIPDYDAPTQLLKPLERNTRYVDAILTIPKGTLFPMCGMNLAFDRELIGPAMYFGLXGDGQPIGLVLQPFDWIKKTFFEKPQPEA

SEQ ID NO: 363099 - protein, 54 aa, Zea mays
  Clone ID: MRT4577_9431C.1.pep
WGARLLVLNDALHPYPILSSPVSHIADNKQNQQILYCPLLTAKISHLFTGYGQR

SEQ ID NO: 363100 - protein, 132 aa, Zea mays
  Clone ID: MRT4577_94321C.1.pep
MAPSLASTAGLPSCAARRGGRCVARRASAVAAPATATATARTHYEVLGVGAGASRCEIKAAYRRLAREVHPDCGGRGDEGFIRLHAAYATLADPDERARYDRAAAVRSRIRAAPSGSGAGFRPRRWETDQCW

SEQ ID NO: 363101 - protein, 94 aa, Zea mays
  Clone ID: MRT4577_94322C.1.pep
SLLLDQEYLASCTDGNEDIHQESSAKFNRDQMHSVKWKGINVLLSHLCPKCSKKHDDTTSGSQTTGCTCWQWFFTPSTSNDTANVASVNGGNTS

SEQ ID NO: 363102 - protein, 80 aa, Zea mays
  Clone ID: MRT4577_94323C.1.pep
PRPMGPFIREHGFWSELASSSSVVLKKIHIKGCCLFCRSKLKKAPRRRKKVTTAGLISQRWVDPFFPKFIVLGPLEFLIF

SEQ ID NO: 363103 - protein, 112 aa, Zea mays
  unsure (1)..(112): unsure at all Xaa locations
  Clone ID: MRT4577_94324C.1.pep
ATCLAHSNYRFRCLNKPNCWGCLNMMVKEGAVPALETLEYEIISHEMHTAHKSGPADFGITHLYTLRNIVVYVHWDGSRVXEVEAFEAAIQMSGSTLTNYPTLRLHRCLESE

SEQ ID NO: 363104 - protein, 371 aa, Zea mays
  Clone ID: MRT4577_94325C.1.pep
MESGLLDTAAAAGLCPVAAGRRRVGSTGTARCFLSCSCASRDCRVSASYSHSISRMLSGVRSAARKRLFRSDPAELLGVANWSETGGGGAGGHQHWWTALENNFVLEATDDEYGGVVVDADRLPADRAAFARSLAASLSYWKSVGKKGVWLKLPVDRADFVPLAVKEGFKYHHAEEAYLMMTYWIPDEPNMLPANASHQVGVGGFVINDQMEVLVVQEKYRGSSLDGVWKLPTGFILASEEIYTGASREVKEETGVDTEFVDVVAFRHAHNVAFHKSDLFFICMLRPVSSEIKIDETEIQAAKWMALEEFVKQPFIQEDHMFQKIMDICIQRLRKCYCGLTPHHVVSKFDDRTSTLYYNVAEPEDVNCSAA

SEQ ID NO: 363105 - protein, 236 aa, Zea mays
  Clone ID: MRT4577_94326C.1.pep
CWGITSGGSSSSGADAGGGFECNICFELPQEPIVTLCGHLFCWPCLYKWLRIHSHSPECPVCKAVVEEEKLVPLYGRGKDRVDPRSKNVPGAADIPSRPAGQRPATAPQADPNNAHFPNAANPANPWFMGGGGGGIPLANARWGNYTFSAAFGGLFPLLSFQVHGFPDATAYGQPAGFPYGYGHGHAFHGGHAGAHAHAAAAAPRHAQHQQQQADVYLKALLILVGVLVIASLVTF

SEQ ID NO: 363106 - protein, 255 aa, Zea mays
  unsure (1)..(255): unsure at all Xaa locations
  Clone ID: MRT4577_94327C.1.pep
AFARSLAALLSYWKSVGKKGVWLKLPVDLAEFVPLAVKEGFKYHHAEEAYLMMTYWIPDEPNMLPANASHQVGVGGFVINDQMEVLVVQEKYRGSSLDGVWKLPTGFILASEEIYTGASREVKEETGVDTEFVDVVAFRLNLSYVTCVARHAHNVAFHKSDLFFICMLRPVSSEIKIDETEIQAAKXWMALEEFVKQPFIQEDHMFQKIMDICIQRLRKCYCGLTPHHVVSKFDDRTSTLYYNVAEPEDVNCSAT

SEQ ID NO: 363107 - protein, 122 aa, Zea mays
  unsure (1)..(122): unsure at all Xaa locations
  Clone ID: MRT4577_94328C.1.pep
YCHHHRRWRRSRSPPCNRWCSIRRRRRSRSRCSLCSSIXRHRFMPLSSRLPRSRSTTSGSIRRRKLWQYCLPTQQQADRCHLLIRPLPLQLARQTRAVLGRVRDPERLQGELKIKSIGFTIP

SEQ ID NO: 363108 - protein, 54 aa, Zea mays
  unsure (1)..(54): unsure at all Xaa locations
  Clone ID: MRT4577_94329C.1.pep
AVFVGGSESWEDXLANRAIVPXDXSGMVNDAHLGPAISRQAKDPIGKLDQSGVP

SEQ ID NO: 363109 - protein, 49 aa, Zea mays
  Clone ID: MRT4577_9432C.1.pep
YLHFPCKATAHMGKVLFQIKSQLKSPWSIKYHQIHSSEVTNMHHILLPS

SEQ ID NO: 363110 - protein, 119 aa, Zea mays
  unsure (1)..(119): unsure at all Xaa locations
  Clone ID: MRT4577_94330C.1.pep
CISAPSPSWGGGARHLLRNAPLCGIHRSGSLFPTTFLVDLLSHLAAPTLHFPVYHLIGGGEDVLSDRGPWLSFLGLMIPTYPCPPPPLAAGRVRPPILFVXLPSVSSGPLVPFFLECGA

SEQ ID NO: 363111 - protein, 75 aa, Zea mays
  Clone ID: MRT4577_94331C.1.pep
IIYRWFDGTCYSDYHSNGRDNTRNRPRLPGGAHLFDQRLTRSLTLDPMIHDNLTDRTGFVLVTHHLYVCPMNFPW

SEQ ID NO: 363112 - protein, 83 aa, Zea mays
  unsure (1)..(83): unsure at all Xaa locations
  Clone ID: MRT4577_94332C.1.pep
MKGKGKLVPRYVSPFQVLERVEWVTYHLXLLEGACLHNTLHXGLLKPFRREPQMNRPHLSPVQNDRLLYAPXRVLHAQLRLGA

SEQ ID NO: 363113 - protein, 55 aa, Zea mays
  Clone ID: MRT4577_94333C.1.pep
REQASAIGLFSVQKYADKNNQTLIISCRMSKWTISGNITRFLNFGMNKPSTPSSI

SEQ ID NO: 363114 - protein, 29 aa, Zea mays
  Clone ID: MRT4577_94334C.1.pep
NGLSPCQSTVNCVAHSRWKLSFSPSPEVF

SEQ ID NO: 363115 - protein, 63 aa, Zea mays
  Clone ID: MRT4577_94335C.1.pep
MLAVFSGHVVEVPVDLVAEGSRTPSSNTKAWHLVGRFLAVSDPAVFEQIGDHYHLAYSHTNQA

SEQ ID NO: 363116 - protein, 104 aa, Zea mays
  unsure (1)..(104): unsure at all Xaa locations
  Clone ID: MRT4577_94336C.1.pep
GSPPILGQWVEFLRHQCSPRGTPXCSPQSQXIKKXCFHQLRQVEPQPRSQGFLGLVLQSILQQQPQKGQVPGLLAAQIAQQLTAMWGLQQPTPCPYVAAGGVPP

SEQ ID NO: 363117 - protein, 107 aa, Zea mays
  Clone ID: MRT4577_94337C.1.pep
LGLQTISFIYFRAQKNPIDTRRVLLVALDLLALAASATSTHTSGGCGCQPPPPVHLPPAVHMPTAVHLAPAVHVPPPVQLPSPVHLPPPVHVPPSVHLPPSPCHYPT

SEQ ID NO: 363118 - protein, 223 aa, Zea mays
  unsure (1)..(223): unsure at all Xaa locations
  Clone ID: MRT4577_94338C.1.pep
MRVLLVALALLALAASATSTHTSGGCGCQPPPPVHLPPPVHLPPPVHLPPPVHLPPPVHLTPPVHLPPPVHVAPTVHLPPPPCHYPTQPPRPQTHPQPHPCPCQQPHPSPCQLQGTCGVGSTPILGQRVEFLRDQCSPTATPYCSPQCQALRQQSCQQLRHVEPQHRYHAIFSLVLQSILQXQPQRYQVTWLLAAHITQQLTAMSVLQQATPCPYTAAGGVPH

SEQ ID NO: 363119 - protein, 107 aa, Zea mays
  unsure (1)..(107): unsure at all Xaa locations
  Clone ID: MRT4577_94339C.1.pep
MNPIDTMRVSRVALALVALAASATSTHTSGGCGCQPPPPVHLPPPVHLPPPVHLPPTVHLPPPVHLPPPVHLPTTVHVPWNDHLPPISCYXPTEPTRXKTHYQPHPM

SEQ ID NO: 363120 - protein, 106 aa, Zea mays
  Clone ID: MRT4577_9433C.1.pep
HSSCSSPAEVGSHSTVQPGGKVDDQVTPATISSREPLSSSLVRNEDVLFVGEITVSQNPLAFLSFNPGSFPRRRGRSGEGLGEVREVLAVTSRCESSMVMARTGLT

SEQ ID NO: 363121 - protein, 84 aa, Zea mays
  Clone ID: MRT4577_94340C.1.pep
MALGALYNEIRSVKVRDVPSYLKPFLTWHNCKKSAHQRRPPLHREVHRHELGEPSIPGVYGGGDLLLLGQSALGARPPGPPGGD

SEQ ID NO: 363122 - protein, 57 aa, Zea mays
  Clone ID: MRT4577_94341C.1.pep
FSGYFMNEHIKGAVVFNVSKRSLMLSHVKLSETSTSRILFVHNFISLHILIVLIFTY

SEQ ID NO: 363123 - protein, 225 aa, Zea mays
  unsure (1)..(225): unsure at all Xaa locations
  Clone ID: MRT4577_94342C.1.pep
MRALFVALALLALAARATSTHTRGECGCQSPPPVHLPATVHLPPPAHLPPPVHLPPTVHLPPTVHLPPSSHVPTAVHLPPPPXHYPTQPSRTQPHPQAHPWPWQQTHPSPCQLQGTCGAGSTPILGQRVKFXLRHQCSPTWTPYCSPQWQSXMRKDRCQQLMQEEPQHRYQAIFGLVLQSILQQQTQSGQVAGLIPEHIAQQLTEMCGLQQSTPXPYAADGGVPH

SEQ ID NO: 363124 - protein, 90 aa, Zea mays
  unsure (1)..(90): unsure at all Xaa locations
  Clone ID: MRT4577_94343C.1.pep
PFTHIPLTXAGGKKSVADRKTXTRXPMAYPHMNQNTTGNQPINNNPTTNPQAIHHSNTNIPTRNHPNNNGYNQNKIPYHQKAPKNKSPTK

SEQ ID NO: 363125 - protein, 49 aa, Zea mays
  unsure (1)..(49): unsure at all Xaa locations
  Clone ID: MRT4577_94344C.1.pep
STSQIIKQKPQKGQVEGLXPAQIAKKLTAMCGMQQQTPCPNAAAGGVPH

SEQ ID NO: 363126 - protein, 53 aa, Zea mays
  Clone ID: MRT4577_94345C.1.pep
DSLSLCANSPCYTSYRWAMFGFAVGMLTEYATGSDFVQQMKILLSNFGIVDLD

SEQ ID NO: 363127 - protein, 192 aa, Zea mays
  unsure (1)..(192): unsure at all Xaa locations
  Clone ID: MRT4577_94346C.1.pep
MRVLLVALALLALAASATSTHTSGGCGCQPPPPVHLPPPVHLPPPVHLPPPVHLPPSVHLPPPVHLPPPVHVPPTGHLPTSPCHYPTQPSRPQPYSQAHPCPCQQPHASPCQLQGTCGVGSTPILGPCGQVLRHQGSPTATPYCSPQCQTMRQQWCQELKQEEPQHRNHAIFXGLVLQSILQQQPQSGQVAG

SEQ ID NO: 363128 - protein, 143 aa, Zea mays
  unsure (1)..(143): unsure at all Xaa locations
  Clone ID: MRT4577_94347C.1.pep
LGLQTISFIYSRAQKNPIDTGRVLLVALALLALAASATSTHTSGGCCCHPPITAHLPPPVHLTASEHLPAPAHMLPPVHLATPVQLPTAQHEPPSVDHLTIPYHYTTXPXRPQPHSQPHPCPCQQPHSSPSQLQGTCRVGSTP

SEQ ID NO: 363129 - protein, 120 aa, Zea mays
  unsure (1)..(120): unsure at all Xaa locations
  Clone ID: MRT4577_94348C.1.pep
SGLQTISFIYYRAQKNPIDTVRVLLVALALLALAASATCTHTIGGCGCQPPPPVHLPAPVHLPATVHLSPTVHLPPPVHLPATVHLSAPVHVPAAVHMPPPPCHYPTXPSWPETHMQAHT

SEQ ID NO: 363130 - protein, 33 aa, Zea mays
  Clone ID: MRT4577_94349C.1.pep
DRCYKYSAPTKALCNMAFYLSTTMIVNNHFLSL

SEQ ID NO: 363131 - protein, 64 aa, Zea mays
  Clone ID: MRT4577_9434C.1.pep
KKKREKIREPASVLKIPTLLSLTSATTDLTHGDVNKVTCPPIYNITTVKTLATPNLIYYQKISL

SEQ ID NO: 363132 - protein, 43 aa, Zea mays
  Clone ID: MRT4577_94350C.1.pep
PNHPQLIQFSFIFPKQYFYQSSYPFYIYSTYLLKITHFSQSPH

SEQ ID NO: 363133 - protein, 81 aa, Zea mays
  Clone ID: MRT4577_94351C.1.pep
IRLEAGRLFSPPPSRDHECVLGFRRPARAVAAIPMEADTGCRLEADYVLYFSDYLFTVLRPSDHFHANSQMITGAGLLRTS

SEQ ID NO: 363134 - protein, 112 aa, Zea mays
  Clone ID: MRT4577_94352C.1.pep
GPHIHFIPSRLGKGHPMKHAKHQPGASLLGAACPLKARGPDGGARKDPSGGPVGMRLGDLAAPIFGEEKGAPELGGALGRGHGDPIFARGGPLGEEGWESPHPQPAGGLAAH

SEQ ID NO: 363135 - protein, 516 aa, Zea mays
  Clone ID: MRT4577_94353C.1.pep
MAFTSQSLIFRAPASPSCARITPSSGRVTLRDHSAVFPLVAAASTSMASSESEDKRETKLWGGRFEEGVTDAVERFTESISYDWQLYKYDIMGSKAHASMLAGQGLITATDRDIILEGLDQIERLIQEGKFEWRKDREDVHMNIEAALIERVGEPAKKLHTARSRNDQIVTDLRLWCRDAIDKILIRIKQLQVSLVILASKYVDLIVPGYTHLQRAQPVLLPHLLLSYVEQLERDAGRLVNCRERMNFCPLGACALAGTGLPIDRFQTAKDLKFTAPMKNSIDAVSDRDFVLEFLAANSIAAVHLSRIGEEWVLWASEEFGFLIPSDKVSTGSSIMPQKKNPDPMELVRGKSARVVGDLMTVLTLCKGLPQAYNRDLQEDKEPLFDSVKAVLGMLEVCTEFAQNISFNSKRIQSSLPAGYLDATTLADYLVKKGVPFRTSHEIVGRSVALCVSKNCQLAELELADLKSVHPVFEDDVYEYLGVENAVNKFISYGSTGSEQVKKQLEDWRIQLGVSS

SEQ ID NO: 363136 - protein, 106 aa, Zea mays
  Clone ID: MRT4577_94354C.1.pep
MTGQPTHGTAARWPWPLAPAGRGGIGTGLAGSTVRTRPAPRRTRLRQRELGGSSAHGGSIGAEALGRRPLCAQRSDDFPGHRIQSQCPTLLSHCSRTAKGWPALRN

SEQ ID NO: 363137 - protein, 538 aa, Zea mays
  unsure (1)..(538): unsure at all Xaa locations
  Clone ID: MRT4577_94355C.1.pep
MAATSHSLLSPAPTSLPRARLAFPAVSAVAPRRRPSFPAVAAAASSMASSEAEEKKETKLWGGRFEEGVTDAVERFTESISYDWQLYKYDIMGSKAHASMLAAQGLITTGDRDIILEGLDQIEKQIQDGKFEWRKDREDVHMNIEAALIEKVGEPAKKLHTARSRNDQIVTDLRLWCRDAIDKILIRIKQFQAGLVLLASKYVDLIVPGYTHLQRAQPVLLPHLLLSYVEQLERDAGRLVNCRERMNFCPLGACALAGTGLPIDRFQTAKDLKFTAPMKNSIDAVSDRDFVLEFLAANSIAAVHLSRIGEEWVLWASEEFGFLIPSDKVSTGSSIMPQKKNPDPMELVRGKSARVVGDLMTVLTLCKGLPQAYNRDXGEPNSHKYVLSYMSVYSEVFXEQEDKEPLLDSVKAVLGMLEVCTEFAQNISFNSKRIQSSLPAGYLDATTLADYLVKKGVPFRTSHEIVGRSVALCVSKNCQLAELELADLKSVHPVFEDDVYEYLGVENAVNKFISYGSTGSEQVKKQLEDWRIQLGVSS

SEQ ID NO: 363138 - protein, 298 aa, Zea mays
  Clone ID: MRT4577_94356C.1.pep
MAAASSSTAPPVAEMPAPTSSTSEPLPSAAPALSRRRSRIREVSSRYLSTPLPVPSPRLSTSSFHSATPAPAPSPRLSTSSSHSATPLPVPSPRLSTSTFHSSTPSARAHHRSIPAAPTASALADENHPPPPTPGSRERGAARDLFEETHRPRLNPPAPLAAAGAFAATPSPRPRRILCPSSRASSNTTTTAHEHPRGCMRPSTRVRTSFTIYSASHETSAAAIDSRPASSCPRHVPFPELRTSPPWTRTTEGPGRPSNPFCFQALASALPRSSSKNTTTSCSEAGAGACACTERGTG

SEQ ID NO: 363139 - protein, 55 aa, Zea mays
  Clone ID: MRT4577_94357C.1.pep
NSCFKYYNLVVPWFSRYHGIYFCSICYDTPDPIFLPPSLPFGTELGPVRSRAAAD

SEQ ID NO: 363140 - protein, 197 aa, Zea mays
  unsure (1)..(197): unsure at all Xaa locations
  Clone ID: MRT4577_94358C.1.pep
MQLLSRSPLLASSLTMICLASFLQFACAKMASYSLVPRPSFAAAVLLLIFGERSPTPRFKLDNASFTNMAMIWLTAPSLTVGKAPRKRIATKVSRKSAPTTGXVEKTHLYRPXTVCLPEIRWYQNSTELLIKRMPTQSFVMQIAQEIKTDLLFQTHDKLALMEGLEDYLVXLFEDTNLCDDTCHLCSTVCPSTIFWL

SEQ ID NO: 363141 - protein, 66 aa, Zea mays
  unsure (1)..(66): unsure at all Xaa locations
  Clone ID: MRT4577_94359C.1.pep
XXRRXXXXGRXXRXGRLGHLGRRDXXGTXXTGTXATTASSVDXAXHXXXPQPSPEXHDTTXXLGGG

SEQ ID NO: 363142 - protein, 61 aa, Zea mays
  Clone ID: MRT4577_9435C.1.pep
GSLWPNTGVVMAPPEWVPFSEEGPSPGVVPPPGGGQVSNPWNPLVFAPLNGREGGTPTELF

SEQ ID NO: 363143 - protein, 74 aa, Zea mays
  Clone ID: MRT4577_94360C.1.pep
SYLFQVNLDSSHLIIIINKNYEAILTTLAFWNAGSRILITRTGRSRTLAERMPLGRRRGMCQPPRRQISCRYRS

SEQ ID NO: 363144 - protein, 71 aa, Zea mays
  unsure (1)..(71): unsure at all Xaa locations
  Clone ID: MRT4577_94361C.1.pep
RGGKLNPRTSRAAHALPQLEAHIPGTQTIHVKTIGRSHNHSDSEYMSRQLYAXAYAIIEKPERPDMWLINT

SEQ ID NO: 363145 - protein, 79 aa, Zea mays
  Clone ID: MRT4577_94362C.1.pep
SPLYWAPFWMSLPGYEKSFQTVKQRGAFSESKRAPQKKGKKYLRHNQGISWGGALHVPTLIQGAKLKLNLEEHQDRSIH

SEQ ID NO: 363146 - protein, 151 aa, Zea mays
  Clone ID: MRT4577_94363C.1.pep
RVTIFPRPQFCPIFRRAFLGPPIGRAGIPAVSRPDFPGFLPILAPFLPKVRGPFFPQSMGPLASLGWILWGTVWRSFCLGDFFPFLGPVFSPPFGGVSPPFCASQARLGAPVPLVSAILPPLVCSNTPAGPVLVFFSAQTWLSSILERWSL

SEQ ID NO: 363147 - protein, 50 aa, Zea mays
  Clone ID: MRT4577_94364C.1.pep
RTRGRTHGRTRVLTRGLNLRVLHRQHPQVLIADSTLISILSSSTTLMLTP

SEQ ID NO: 363148 - protein, 682 aa, Zea mays
  Clone ID: MRT4577_94365C.1.pep
MDLARRGGAAGADDGGEIERHEPAPEDMESDPAAAREKELELERVQSWREQVTLRGVVAALLIGFMYSVIVMKIALTTGLVPTLNVSAALMAFLALRGWTRVLERLGVAHRPFTRQENCVIETCAVACYTIAFGGGFGSTLLGLDKKTYELAGASPANVPGSYKDPGFGWMAGFVAAISFAGLLSLIPLRKVLVIDYKLTYPSGTATAVLINGFHTKQGDKNARMQVRGFLKYFGLSFVWSFFQWFYTGGEVCGFVQFPTFGLKAWKQTFFFDFSLTYVGAGMICSHLVNISTLLGAILSWGILWPLISKQKGEWYPANIPESSMKSLYGYKAFLCIALIMGDGTYHFFKVFGVTVKSLHQRLSRKRATNRVANGGDEMAALDDLQRDEIFSDGSFPAWAAYAGYAALTVVSAVIIPHMFRQVKWYYVIVAYVLAPLLGFANSYGTGLTDINMAYNYGKIALFIFAAWAGRDNGVIAGLAGGTLVKQLVMASADLMHDFKTGHLTMTSPRSLLVAQFIGTAMGCVVAPLTFLLFYNAFDIGNPTGYWKAPYGLIYRNMAILGVEGFSVLPRHCLALSAGFFAFAFVFSVARDVLPRKYARFVPLPMAMAVPFLVGGSFAIDMCVGSLAVFVWEKVNRKEAVFMVPAVASGLICGDGIWTFPSSILALAKIKPPICMKFTPGS

SEQ ID NO: 363149 - protein, 682 aa, Zea mays
  Clone ID: MRT4577_94366C.1.pep
MDLARSGGAAAADDGGEIERHEPAPEDMESDPAAAREKELELERVQPWREQVTLRGVVAALLIGFMYSVIVMKIALTTGLVPTLNVSAALMAFLALRGWTRVLERLGVAHRPFTRQENCVIETCAVACYTIAFGGGFGSTLLGLDKKTYELAGASPANVPGSYKDPGFGWMAGFVAAISFAGLLSLIPLRKVLVIDYKLTYPSGTATAVLINGFHTKQGDKNARMQVRGFLKYFGLSFVWSFFQWFYTGGEVCGFVQFPTFGLKAWKQTFFFDFSLTYVGAGMICSHLVNISTLLGAILSWGILWPLISKQKGEWYPANIPESSMKSLYGYKAFLCIALIMGDGTYHFFKVFGVTVKSLHQRLSRKRATNRVANGGDEMAALDDLQRDEIFSDGSFPAWAAYAGYAALTVVSAVIIPHMFRQVKWYYVIVAYVLAPLLGFANSYGTGLTDINMAYNYGKIALFIFAAWAGRDNGVIAGLAGGTLVKQLVMASADLMHDFKTGHLTMTSPRSLLVAQFIGTAMGCVVAPLTFLLFYNAFDIGNPTGYWKAPYGLIYRNMAILGVEGFSVLPRHCLALSAGFFAFAFVFSVARDVLPRKYARFVPLPMAMAVPFLVGGSFAIDMCVGSLAVFVWEKVNRKEAVFMVPAVASGLICGDGIWTFPSSILALAKIKPPICMKFTPGS

SEQ ID NO: 363150 - protein, 111 aa, Zea mays
  Clone ID: MRT4577_94367C.1.pep
MPDTGARGRGDEPEPVTPQQQAQETQAVDDRRLLRSQYLAVKGLISDEKDEMASADSDKFCSIINRVESLHQLVQRPREQIADAETLLDLTASLVASVRSQSVLGITPSDF

SEQ ID NO: 363151 - protein, 67 aa, Zea mays
  Clone ID: MRT4577_94368C.1.pep
PLIECFTKYPKTKNQRSPKKNQNPSKKGGTKIIKKFHEGLQGPVTPPPKGPGFLGGGYQAPPTQPAR

SEQ ID NO: 363152 - protein, 75 aa, Zea mays
  Clone ID: MRT4577_94369C.1.pep
MWTAFRVDADQNYVRLHNHQRWLRANGRHRYWNNVVTVDTRNGSLTTMMQWRVEAIPVSPQPLPLPPPPQQPTIH

SEQ ID NO: 363153 - protein, 112 aa, Zea mays
  Clone ID: MRT4577_9436C.1.pep
GGPEKKGRPPVFSGPAGVREGPPRIQLRGQLQGRPPQLLVPSIPPPGYNFYPSTLGGGLTKKKGGRAGSPTKVFFGGCKKKKNKVFPFATPPPMFGARLWAHGRPGVPPPVG

SEQ ID NO: 363154 - protein, 51 aa, Zea mays
  unsure (1)..(51): unsure at all Xaa locations
  Clone ID: MRT4577_94370C.1.pep
FYWLRKGEYVMRGRKWIEWKKXMRAYLKKXKLSREXRRGYSEKRVIKREDS

SEQ ID NO: 363155 - protein, 64 aa, Zea mays
  Clone ID: MRT4577_94371C.1.pep
IPDCRFGRWLGLIFFLVTFVRLCLCVDEKDEMASADSDKFCSIINRVESLHQLGKRDCAFVGLL

SEQ ID NO: 363156 - protein, 68 aa, Zea mays
  Clone ID: MRT4577_94372C.1.pep
YIIEPDSKRLLLAAGFLCKCTVRDRSILTVLDYFTEGLSNGTKCCLKVLSNDVVIVLMTSIHSALNIV

SEQ ID NO: 363157 - protein, 86 aa, Zea mays
  Clone ID: MRT4577_94373C.1.pep
LKKKDYWGSPLALWIGFFAVNCKQFFFFQKKGLLALLVCFFNVEILFFIGPPHFSHFQPERGISLDFCHFSLGLGLVFPPQLLRPL

SEQ ID NO: 363158 - protein, 38 aa, Zea mays
  Clone ID: MRT4577_94374C.1.pep
CWLKEQWIRSIMETQLVDNKVRIIISASRPECKDGLRG

SEQ ID NO: 363159 - protein, 41 aa, Zea mays
  Clone ID: MRT4577_94375C.1.pep
NECFQKKKKKKKKKKKKKKKKKKKKKKKKKKKKKKKKKKKK

SEQ ID NO: 363160 - protein, 99 aa, Zea mays
  unsure (1)..(99): unsure at all Xaa locations
  Clone ID: MRT4577_94376C.1.pep
PHHTRRPLPIHPGSRPPTSTRPHHSLTKQHENNNAPNDPPMTGPTYPPPEPIPPPXPPPPPPPQLPTPPRPIPPPPTPPPPPTPPPVPPPXPPPPHRPA

SEQ ID NO: 363161 - protein, 90 aa, Zea mays
  Clone ID: MRT4577_94377C.1.pep
LDEPTVRVHILLSVDRTFLFATLRKMTWMTTLHPRLVPLPTISTESRAYVAFVRYQGRVESLHMVNQGYVNTPLFPHSPSARLMRKSPPV

SEQ ID NO: 363162 - protein, 296 aa, Zea mays
  Clone ID: MRT4577_94378C.1.pep
LIGVEYMCRREINTRRRTGPHRDSTTSMAHPPGQVGDGGEASMGGETANKTSDISRAELAAVFHRALGERRGYGFGTGMMLQQEGKEETSGLVAWMLEQGAHDAEMHRRHASDAGSGGRHGGEQGRDGGRRWQLDDDGAARRALSRDHHGVGGSPMEINRAQPWRLHRVTTWGRARAGLSVVGKEMGKKTGASALGTGRRAEGQRRAVLGEPTTAQRIRGRGCSHAQGGAEDGRARTFLVAGELKKMKLGRYMESRASTSGVLDMEAKEGRSALGRQKMAAGGNHLREGVAWKDLG

SEQ ID NO: 363163 - protein, 63 aa, Zea mays
  Clone ID: MRT4577_94379C.1.pep
DIVITLEIDQQRQEIRLMDTIFANGNSPLEPQRAESSQQHYVTSMTHVPYHNGHGTWIETRHN

SEQ ID NO: 363164 - protein, 124 aa, Zea mays
  unsure (1)..(124): unsure at all Xaa locations
  Clone ID: MRT4577_9437C.1.pep
PRGWPGKKKKKKKITRCFRTPAAAFPTAPXSAQPTAAISRESARLPAFYRWXPRSRPXAVAPPRPXFRPPGPHGAGPGPRRPSALPAPAPPRTAFLPPPPXARAPMASPASPPGVAPGPPPSAG

SEQ ID NO: 363165 - protein, 50 aa, Zea mays
  unsure (1)..(50): unsure at all Xaa locations
  Clone ID: MRT4577_94380C.1.pep
YFVVENSSVGEESIVLIIVASGLVKNSIVSMVICLKNFNHPPTKFXGMEN

SEQ ID NO: 363166 - protein, 102 aa, Zea mays
  Clone ID: MRT4577_94381C.1.pep
RCIAEYYTYHAAQRKGGNYCQLRHSSLIRHLGWRRRSDQCSHSYRLRYSLVSLRLRRSPQHCSQPVRYLSPVSQRSRLQLSYAYVSSRLLFRTYYFRCYLWQ

SEQ ID NO: 363167 - protein, 101 aa, Zea mays
  Clone ID: MRT4577_94382C.1.pep
TGAPVYLAAFLESLPPEVLELAGNPAKNNKKRGIIPPQVFLAIRKKKELGKFLAGVPIGEGGVLPKIHSVFLPKKAAKKGAKGGKKKPKSPKKGAKSPKKA

SEQ ID NO: 363168 - protein, 78 aa, Zea mays
  unsure (1)..(78): unsure at all Xaa locations
  Clone ID: MRT4577_94383C.1.pep
SRAPCRCMNLTVASRQIEDPDKESSQRRRIIGCSWGRRNDVGDGGAASKGWTARMXEVDLRRQVNMRPPVAAVRSADT

SEQ ID NO: 363169 - protein, 309 aa, Zea mays
  Clone ID: MRT4577_94384C.1.pep
MAATGMSPSPSAAITRHIHARRSCAAASLSLRRSGFLGRVVLAAVPVAVDATRRRRVSVSVRMAWDGPLSSVRLIMQSRNAKLSEKLKEHIEDKVGRAVSKHCHLVREVDVRLSARGGELGRGPKTSRCEITLFTKRHGVLRAEEDAESTYASIDLAAAIVKRKLRKIKEKETEVRRGGDADGVWDEIPPADLLPPAVAEADDLEAAVGAEDEQTVLAKVVRTKVFEMPPLTVEEALEQLENVDHDFYCFRDEATGQVNILYRRKEGGYGLIIPKNDGKVDTVGVVPPPAVAAEPEPSYAVHAADNNNS

SEQ ID NO: 363170 - protein, 74 aa, Zea mays
  Clone ID: MRT4577_94385C.1.pep
YHLLVALGAHVNDRRAAEEATVIDAENGSFEGMHPTIVVLDGYLNSDETAIFAIHSDRRLGETRSRGQRNRAEF

SEQ ID NO: 363171 - protein, 97 aa, Zea mays
  Clone ID: MRT4577_94386C.1.pep
TSLIWHLCILTTISSSTTCVVLLSGALTEDASKRKTCCAGSDRIHACMARQPGDVVMVASLFRLHSQPCQRRLWQRWVLHRPKGFIVMPSEVTEHGV

SEQ ID NO: 363172 - protein, 90 aa, Zea mays
  Clone ID: MRT4577_94387C.1.pep
GLFFARIFGCSFPCLLINTPVQFVKKKKKKKKKKKKKKKKKKKKKKKKKKKKKKKKKKKKKKKKKKKKKKKKKKKRPLLRSQFFPPCFGK

SEQ ID NO: 363173 - protein, 131 aa, Zea mays
  Clone ID: MRT4577_94388C.1.pep
MAAARSLLLRHLRLAAAPSAASVRPTASLHEALWGQRWMSSEDAKGSFLDKSEVTERIIKVVKSFPKIDDPSKVTPDAHFKNDLGLDSLDAVEVVMALEEEFRFEIPDNEADKIDSVKVAVDFIASHPQAK

SEQ ID NO: 363174 - protein, 104 aa, Zea mays
  Clone ID: MRT4577_94389C.1.pep
QNEKTRKTGRVLLASGATTSDAGITCSQVSFAIAHCLSYARGTESGPCEYCCSGVRNLMSADSTVADWRTACNCLKNALRGLSGLNDGNGGSIPFKCMFSIPFT

SEQ ID NO: 363175 - protein, 255 aa, Zea mays
  unsure (1)..(255): unsure at all Xaa locations
  Clone ID: MRT4577_9438C.1.pep
SAAPEPASTDPESESSSAPQPIVIVVGWRFVRVGTLLCCVACSAVCTALLSCRRVAHLTDPLPFTQVHPETYALVVSTENITLNAYLGNHRPMLVTNTLFRMGGAAVLLSNRRADRARARYRLVHTVRTHRGGASDESYACVTQEEDAEGNVGVSLSRGLMSVAGDALRSNITALGPLVLPLSEQLRFLAAALLRRVAAVKPYVPDFKLALEHFCIHAGGXGVLDELERSLGLSAWPWXPSXRMTLYRFGNTSSS

SEQ ID NO: 363176 - protein, 51 aa, Zea mays
  Clone ID: MRT4577_94390C.1.pep
GVRIYSPKKLFKCIHTSQKQSYIFISNMLKDKKYFDFALKTYYLINYSHIP

SEQ ID NO: 363177 - protein, 469 aa, Zea mays
  Clone ID: MRT4577_94391C.1.pep
MMMQLGARSLVRRFSRLAAAGAPAETTSAGVPRMPAFDHVPLPYDGPSAADIARKRAEYLSPSLFHFYSKPLNIVEGKRQYLYDEHGRRYLDAFAGIATVCCGHCHPDVVDAITRQAKRLQHSTVLYLNHVIADFAEALASKLPGDLKVVFFTNSGTEANELAILMARLYTGSHDIISLRNSYHGNAAGTMGATAQKNWKFNVIQSGVHHAVNPDPYRGAFGSDAEKYVRDVQEIIEFGTTGQVAGFISEAIQGVGGIVEVSPGYLPLAYDKVRKAGGLCIADEVQAGFARVGSHFWGFETHGVVPDIVTMAKGIGNGIPLGAVVTTPEVAQVLTRRCYFNTFGGNPLCTAGGLAVLEVLEKERLQENAFVVGSYLKDRLRGLQEKHEIIGDVRGTGFMLGIELVTDRQLKTPAKDEICHAMEHMKDMGVLVGKGGFYGNVFRITPPLCFTKEDADFFVEVMDIALSKL

SEQ ID NO: 363178 - protein, 84 aa, Zea mays
  Clone ID: MRT4577_94392C.1.pep
ALFYAIFVSEKGVELGLSVSASTGLGPPIACVPHLVRVGILLCSPSPGTCLATLCVRAFYVSRPCTCSAECILDTRVVFAAATP

SEQ ID NO: 363179 - protein, 511 aa, Zea mays
  Clone ID: MRT4577_94393C.1.pep
MMMQLGARSLVRRFSRLAAAGAPAETTSAGVPRMPAFDHVPLPYDGPSAADIARKRAEYLSPSLFHFYSKPVRRSVDGSNARRIHIDRCVCERVPRSLRAELNIVEGKRQYLYDEHGRRYLDAFAGIATVCCGHCHPDVVDAITRQAKRLQHSTVLYLNHVIADFAEALASKLPGDLKARCWLIASCTDSVVFFTNSGTEANELAILMARLYTGSHDIISLRNSYHGNAAGTMGATAQKNWKFNVIQSGVHHAVNPDPYRGAFGSDAEKYVRDVQEIIEFGTTGQVAGFISEAIQGVGGIVEVSPGYLPLAYDKVRKAGGLCIADEVQAGFARVGSHFWGFETHGVVPDIVTMAKGIGNGIPLGAVVTTPEVAQVLTRRCYFNTFGGNPLCTAGGLAVLEVLEKERLQENAFVVGSYLKDRLRGLQEKHEIIGDVRGTGFMLGIELVTDRQLKTPAKDEICHAMEHMKDMGVLVGKGGFYGNVFRITPPLCFTKEDADFFVEVMDIALSKL

SEQ ID NO: 363180 - protein, 112 aa, Zea mays
  Clone ID: MRT4577_94394C.1.pep
MATSRRPGRNHHIGRCYPLAAAASKPLPTPRSQNLLEAPRRLLHSRMAKEPMRELATGAAGQIAPALPPMPARRAMLAAHHPATLHMLDIPPAPDTLPSQPPSHPPEASPPP

SEQ ID NO: 363181 - protein, 108 aa, Zea mays
  unsure (1)..(108): unsure at all Xaa locations
  Clone ID: MRT4577_94395C.1.pep
TQGASFVVVVKVMGSXXPQGVQATHVRVNFLDDXXRLHYAGMSXGXSGRVXFXXCRSGQXRGXAXGPXALRVFGCGSCLVFGVFEFVLCLNFCELVLRVVSXGDKIAV

SEQ ID NO: 363182 - protein, 87 aa, Zea mays
  Clone ID: MRT4577_94396C.1.pep
YYVETILHISVPCATHSLCATFDKNPRLERSKATRPAHILHQLLKGAPPKIDSIGIIARTETPNSGQHKILGVDLLPLCNALCVRSY

SEQ ID NO: 363183 - protein, 74 aa, Zea mays
  Clone ID: MRT4577_94397C.1.pep
NASACFVVFLKRVHRCRSHAGRMHHHYMGCCGLTAEELAHALALADVVGCAGNIFGGHVNPDVTFGALLDGQIC

SEQ ID NO: 363184 - protein, 102 aa, Zea mays
  Clone ID: MRT4577_94398C.1.pep
MSRAQGGILKYMLKKAWKVAVLTAVIKHMSPDVDKARRLVRQSKCLQDKMTARGIVTWLAVLRQEEELYLQLNPGARPEPAYSYAAAETKIPACASSGEYDV

SEQ ID NO: 363185 - protein, 181 aa, Zea mays
  Clone ID: MRT4577_94399C.1.pep
PHGVLPLGSLPVAAARSHLKFRGPAPPVPTSRSPDASAARRGSSGRRKKRACSPREREVEVPLAVDYGRTGKITGAPWTGTPWAAGEIRAPSMGSGARAHGAPARREEKAHCCRTSWIRGHSHGGPAPAMVCCCIPGTRGGRRALLLGRSPAEAEVALGKKTPVPAARQEKQGGCRAMAGR

SEQ ID NO: 363186 - protein, 82 aa, Zea mays
  Clone ID: MRT4577_9439C.1.pep
LCPWGWDPRSPMLVEAAASDWIPETIDAYSGLPFVDAIRGEEIGEQGGREDGPYLDSILTRMATYAILRKQRILLNADMKEA

SEQ ID NO: 363187 - protein, 58 aa, Zea mays
  Clone ID: MRT4577_943C.1.pep
GRFFFFFFLFFFFFFFFFFLRFVFFFFFYFYRSSINFSKKEEKDNRYIQTNFRVKRSL

SEQ ID NO: 363188 - protein, 57 aa, Zea mays
  Clone ID: MRT4577_94400C.1.pep
GGVRPRVRPRVRGRMGAWPATNVDDIKWSGTLNKLIDSWLLIHGLETGTTHLYLLSV

SEQ ID NO: 363189 - protein, 36 aa, Zea mays
  Clone ID: MRT4577_94401C.1.pep
NLLPSNININVPALFYMYVSWTLSLCITRNCDKDLI

SEQ ID NO: 363190 - protein, 64 aa, Zea mays
  Clone ID: MRT4577_94402C.1.pep
ICVTVVLCFFLVHVNRYRLTSFSLFFGSASQGSDIPERSSPWVRSHSATGCLDASWYTSKRTWI

SEQ ID NO: 363191 - protein, 70 aa, Zea mays
  Clone ID: MRT4577_94403C.1.pep
LGSRCLLARAHAQSPPLYPSEARKTVPEDGMHRLLPGVLQRFTTAAALEDPMTPVGHVNYTKLLINGNVC

SEQ ID NO: 363192 - protein, 75 aa, Zea mays
  Clone ID: MRT4577_94404C.1.pep
CVRSMAELLQKTASGIPVTIKDSKCVIKIEDCRNTVCWKRLSCSMSCIGGFLQGLNSALESTFNDHRIASPEDRK

SEQ ID NO: 363193 - protein, 216 aa, Zea mays
  Clone ID: MRT4577_94405C.1.pep
MSKLQSDSLRDAIASITNDSREKQRKFVETIELQIGLKNYDPQKDKRFSGSVKLPHIPRPKMKVCMLGDAQHVEEAERMGIDNMDVEALKKMNKNKKLVKKLAKKYHAFLASEAIIKQIPRLLGPGLNKAGKFPTLVTHQESLESKVNETKATVKFQLKKVLCMGVAVGNCGMDEKQIFQNVQMSVNFLVSLLKKNWQNVRCLYLKSTMGKVYRLF

SEQ ID NO: 363194 - protein, 98 aa, Zea mays
  Clone ID: MRT4577_94406C.1.pep
GFFGWPPKKGLGLGGGFWGLFKNFLLWPFTGEKRAKGKRGFIFLEMAGHYRGFQRFLGPVLFKFLELKFFFWLSSKSANLFLGNQTGCIRGPPGDGGK

SEQ ID NO: 363195 - protein, 116 aa, Zea mays
  unsure (1)..(116): unsure at all Xaa locations
  Clone ID: MRT4577_94407C.1.pep
KLTLNFKHLNLNFHLGGAFRKLKVDTLFCTPXTMASIHTVISHVQNLIKGVTKVYRYKMMVFYAHFPINAYITNXSSPAIDIRNFLFENIVSYVFMLLCLYHPPILEGLWLGSSLM

SEQ ID NO: 363196 - protein, 252 aa, Zea mays
  unsure (1)..(252): unsure at all Xaa locations
  Clone ID: MRT4577_94408C.1.pep
MAAFWLLLLFASAALALTWRAHSFPNTARQARPRHPPLQPPLIGHLPQLANRPPPPRLXPRRSPPTRPXAXXRLPPPRPAPXGXXPPNPPNAXXXXPPHPXTTPPPPPPPPPPPPPPPPXXPTPXPPTHAPDQHXXTTQTKSPPPHQPQKPPPTPHPPXPHXPPPPHPPPPPPPPPXPPPPPPPPPPPPPPPTXTHPPPPPXXXXPPPPHTXXPPXPPPPPXXPPTPXXPPPPXPPPPPPPPPXXXHPPXPP

SEQ ID NO: 363197 - protein, 39 aa, Zea mays
  Clone ID: MRT4577_94409C.1.pep
VAWGVCNHAFPFPGNSRWVKTRQGGPLKNSEWGFQKNGP

SEQ ID NO: 363198 - protein, 86 aa, Zea mays
  unsure (1)..(86): unsure at all Xaa locations
  Clone ID: MRT4577_9440C.1.pep
MVSKNPELWDLVPTVVVLMSGKAVPLHIAASVVASTAAGVTKSAATAAPSRYTAGVRVVAVAFVKCVVIGAIDVSLISGXHIRTRR

SEQ ID NO: 363199 - protein, 98 aa, Zea mays
  unsure (1)..(98): unsure at all Xaa locations
  Clone ID: MRT4577_94410C.1.pep
ILAFALVNKATGLAIKHSLGQSHQERLEXVEPIEPGXCVLWTESCDVGKVFRCMRMLNIFRQISDDRQGDGICGGVHYGTTEVLWEYTKDNIHSCNIL

SEQ ID NO: 363200 - protein, 71 aa, Zea mays
  Clone ID: MRT4577_94411C.1.pep
SAPCFSLPSTSSCFPLIVRIHPSHPAGVAEAEEGVVVEGRGGRGGGRGVEGGRHGLGIWSSRGWGGGGRGG

SEQ ID NO: 363201 - protein, 114 aa, Zea mays
  unsure (1)..(114): unsure at all Xaa locations
  Clone ID: MRT4577_94412C.1.pep
RREPLQDISLMKFKDXMGDRNPKLAXGKDNTXDSVVMQTKXKHSMKDIRSLADNSKEFLAXEESQIPIHEVICYRYYHNVTNVKVKHKPNEYXEWIEDVYDEELEKMMDTFEDD

SEQ ID NO: 363202 - protein, 85 aa, Zea mays
  Clone ID: MRT4577_94413C.1.pep
FCADTGTHPIGGGLNVMRVYYMECSRKPKKGFSIIPITGGPIILCSGVQDTNTRVTVPTHYSFQPNGGQLWLIQMFMPRWGPHDT

SEQ ID NO: 363203 - protein, 97 aa, Zea mays
  Clone ID: MRT4577_94414C.1.pep
FLSPFPIPILSSTASPTPYPPSHRRSPSSRPSRRRALTLPGESHFFRVEERIHGTPKAASRDCPTERRRASMQPHPISTEAGETIRATLFPGDGIGM

SEQ ID NO: 363204 - protein, 57 aa, Zea mays
  unsure (1)..(57): unsure at all Xaa locations
  Clone ID: MRT4577_94415C.1.pep
CFCRLFLQERVAFLSGPRVVVRFAVFARHPSVLPRFAGLLVCFCALFLAGXPRVPRF

SEQ ID NO: 363205 - protein, 51 aa, Zea mays
  Clone ID: MRT4577_94416C.1.pep
RDHAEDEDQEQSALVGSRTTRKEAVGYGRKRLAAARAPWGGDAYPSDCRWI

SEQ ID NO: 363206 - protein, 66 aa, Zea mays
  unsure (1)..(66): unsure at all Xaa locations
  Clone ID: MRT4577_94417C.1.pep
XXXEKSSQLPVSPPGLRTAAFGXQRRTSPLAATALXXSQLLXQIRNTQGPPVSGXXFWVVCSCQKX

SEQ ID NO: 363207 - protein, 41 aa, Zea mays
  Clone ID: MRT4577_94418C.1.pep
KKNKNKACLIFDPALKFYSVKLKALPKTASSGKTEPSFVFP

SEQ ID NO: 363208 - protein, 84 aa, Zea mays
  Clone ID: MRT4577_94419C.1.pep
RKPEEHYLVASILDGMDRRAMATSWSAKPADQTDMRTYSYMPRNAKYIGEVSAHYQIDHGMLNVLQENAKLLNQIQVNILTSQE

SEQ ID NO: 363209 - protein, 98 aa, Zea mays
  Clone ID: MRT4577_9441C.1.pep
MLSDHKRPEWGGTCSRRSVGNQSRVFQTWSIAGYVTSKTPLHCPEMAFILVCKEDFKLLDGSAYSLNKNARTKCSHRAHKSPVTRDLPSLMSTQLLKM

SEQ ID NO: 363210 - protein, 156 aa, Zea mays
  Clone ID: MRT4577_94420C.1.pep
MSTFSPWQAPCYRPCPARGIQPHRAGLRRPGPGPRWSILVPLVATRLATAFAIAFSSSSSGLWKQPAVGGAKASPTKAAAASGVTAAGKGAALATGPGKLRRSSSLNVAASFTRVCLCAPISSYNNESPAIGNPCILPSSDFFGSYDLCFLLWETD

SEQ ID NO: 363211 - protein, 107 aa, Zea mays
  Clone ID: MRT4577_94421C.1.pep
STGSLSRALKCLLSLHRPDRATALVQPEASSLAVLVSAGQGQVLGGASWGPLLPPGSPRPSSSRSMSASRLPMHQSSMSSRISPQPPRPGKMCSRGCQWRPPSTLRP

SEQ ID NO: 363212 - protein, 47 aa, Zea mays
  Clone ID: MRT4577_94422C.1.pep
CGCVLCADKRCDVEVRVGNAGCDGGGASWCSGPMTRQRVYSINGARP

SEQ ID NO: 363213 - protein, 57 aa, Zea mays
  Clone ID: MRT4577_94423C.1.pep
AAPRSPLFFFGFTWNKFWPGLQSSSFHISCWLVLGSAGAVGEHTFYICPGATFGFKT

SEQ ID NO: 363214 - protein, 168 aa, Zea mays
  unsure (1)..(168): unsure at all Xaa locations
  Clone ID: MRT4577_94424C.1.pep
MGGWNRSRYGTGHRDRSAGASRTPLSPPAPDYGDKHQQVPLWEREFCRHVGNITWEQFCENKQYVGQFHKLEPWDDSAAFDCFQNAKARFWASYHGQPSDIPLLDDPDLYIDKVDHQCEVDPELVADLDSVGLPFESDDNPASAKGWTNAGADNKXAPRTGLETGTPS

SEQ ID NO: 363215 - protein, 100 aa, Zea mays
  Clone ID: MRT4577_94425C.1.pep
IAWSISAYEHSWSEVATFDIVGPVCESADFLGKDRELPTPDEGAGLVVHDAGAYCMSMASTYNLKLRPPEYWVEEDGSIVKIRHEEKLDDYMKFFDGLPA

SEQ ID NO: 363216 - protein, 488 aa, Zea mays
  Clone ID: MRT4577_94426C.1.pep
MASASMLARSLLRTPDPTQTSHPNRRSAAVVSFPRRHRRLSVRASVSTASPSPPPQPAAAAAGVPKHCFRRGADGYLYCEGVRVEDAMTAAERSPFYLYSKPQILRNFAAYRDALQGLRSIIGYAVKANNNLPVLRVLRELGCGAVLVSGNELRLALQAGFDPARCIFNGNGKTLEDLKLAAESGVFVNVDSEFDLENIVRAARATGKKVPVLLRINPDVDPQVHPYVATGNKTSKFGIRNEKLQWFLNSIKSYSNEIKLVGVHCHLGSTITKVDIFRDAAVLMVNYVDEIRAQGFKLEYLNIGGGLGIDYHHTDAVLPTPMDLINTVRELVLSQDLTLIIEPGRSLIANTCCFVNRVTGVKSNGTKNFIVVDGSMAELIRPSLYGAYQHIELVSPPTPGAEVATFDIVGPVCESADFLGKDRELPTPDEGAGLVVHDAGAYCMSMASTYNLKLRPPEYWVEADGSIVKIRHGEKLDDYMKFFDGLPA

SEQ ID NO: 363217 - protein, 41 aa, Zea mays
  Clone ID: MRT4577_94427C.1.pep
KRSRHQGIWALTAYAAPTKSSSHHACYCGWCRILFSDVHAL

SEQ ID NO: 363218 - protein, 81 aa, Zea mays
  Clone ID: MRT4577_94428C.1.pep
GSAPEGFPTNWRGGLYCTWDLSTPKKGEGHIWAKGFSPKGNQVWGPKAGPHGFKPAPKSKNGDRFSPLNFRAPFVAKEKAG

SEQ ID NO: 363219 - protein, 507 aa, Zea mays
  Clone ID: MRT4577_94429C.1.pep
MAAANLLSRSLLPTPNTIRTSHPTPRSPAVVSFPRRRARLSVCASVSMASPSPPPQPAAAGVPKHCFRRGADGYLYCEGVRVEDAMAAAERSPFYLYSKLQILRNFAAYRDALQGLRSIVGYAVKANNNLPVLRVLRELGCGAVLVSGNELRLALQAGFDPARCIFNGNGKTLEDLKLAAESGVFVNVDSEFDLENIVRAARATGKKVPVLLRINPDVDPQVHPYVATGNKTSKFGIRNEKLQWFLNSIKSYSNEIKLVGVHCHLGSTITKVDIFRDAAVLMVNYVDEIRAQGFKLEYLNIGGGLGIDYHHTDAVLPTPMDLINTVRELVLSQDLTLIIEPGRSLIANTCCFVNRVTGVKSNGTKNFIVVDGSMAELIRPSLYGAYQHIELVSPPTPGAEVATFDIVGPVCESADFLGKDRELPTPDEGAGLVVHDAGAYCMSMASTYNLKLRPPEYWVQTTIHIWCPLGSGASLTKISCCVLRCLFVTARGDVFCCKEVNLTCLLI

SEQ ID NO: 363220 - protein, 379 aa, Zea mays
  unsure (1)..(379): unsure at all Xaa locations
  Clone ID: MRT4577_9442C.1.pep
MSTLLILLSLGPGYHHPLGPEYHNDVTFNPVVKPGTIQTVLTLALSRAXPMHQLDVKNAFLHGTPMETVYCTHSVGFMDXAHPDMVCKLDRSLYSLKQPSRAWYNRFXLSQGFVXAMADTSLFVFRRGLDMAYLLLYVDDIVLTTSSHDLLRRIISSLQQEFAMKDLGELHHFSGITVERRSQGLFLHQRQYTVDILEHAGMADCKPCMTPIXLKARXLSSDGXPVVDPTSYHSLAGALRYLVFTRLDIAYAVXHVCLHMHAQREPHLTAMKRILWYLXGSTDFGLLRHFSTIELVIYTDSGWAGCPESRRXSTSGYVVFLXDNLVSWYSKRXPVVSRSSAEAEYRVVANGVAEADWLRXLLQELHSPQTRSTLVYCDN

SEQ ID NO: 363221 - protein, 166 aa, Zea mays
  Clone ID: MRT4577_94430C.1.pep
GQTQPKGGQNKGRRAGNQPAQNKGKSGAQGKKGGPAQAHKRKKPKKKRGKPGAPKKEKKKQERRRKKGAPPKGKTGRPKGKKKPPNPRKKGPRGRGPATRTHPTKREGRGSAREKGVPPPKRGNYGAAQSQGKKKEKTREQKAKQRPPPQKRPKKGRDQKGGHPAR

SEQ ID NO: 363222 - protein, 65 aa, Zea mays
  Clone ID: MRT4577_94431C.1.pep
AAAAAHSAIQQCLSQANHFHATEKISFLFYLYRYSLGTRASFFLNYSGDLSLIWHSGAPPPCFFT

SEQ ID NO: 363223 - protein, 301 aa, Zea mays
  unsure (1)..(301): unsure at all Xaa locations
  Clone ID: MRT4577_94432C.1.pep
MIGSTKPLAAPLHPPCPSGRRLAPPSCAPDSSPALTPAVERPGQSQSDGAPPPPRPDEVASSLALRASPQLNRWSRSRALRSXAGLGWKARSPRPRXSVTKTSRPEDAAVAVEDGEDDDVCVETDAAGGKAIYIVSDGTGWTAEHSVNAALGQFEHCFVDRGCAVNTHLFSMIDNMDRLLEVIKQAAKEGALVLYTLADPSMAESTKKACDFWGVPSTDVLRPTVEAIASHMGVAPSGIPRSSPSRQXSVNRGYFRRIDAIDFTIKQDDGALPQNPHRADIVLCRVSRTGKTHLSXYLAQR

SEQ ID NO: 363224 - protein, 156 aa, Zea mays
  Clone ID: MRT4577_94433C.1.pep
MSLVSGEKSNFQFILRLLNTNVDGKQKVMYALTKIKGVGRRYSNLVCKKADVDLNKRAGELTSEELERIVTILQNPTQYKIPTWFINRQRDIVDGKDSHILANGVDSKLREDLERLKKIRAHRGLRHYWGLRVRGQHTKTTGRRGRTVGVSKKKGG

SEQ ID NO: 363225 - protein, 52 aa, Zea mays
  Clone ID: MRT4577_94434C.1.pep
MAPALKVYGWAVSPFVARPLLCLEEAGVDYEIIPMKREDGDHLLPDFLDKNP

SEQ ID NO: 363226 - protein, 43 aa, Zea mays
  Clone ID: MRT4577_94435C.1.pep
QLAGYRQGVVGINLLRYRRDCSWVFLHAVPWHKANPKPAATWE

SEQ ID NO: 363227 - protein, 96 aa, Zea mays
  unsure (1)..(96): unsure at all Xaa locations
  Clone ID: MRT4577_94436C.1.pep
RYRCSASYSLGAFLLAPKHLGLHTTLHTTCCYANRCLPTSHATRTCSFLFRPTMLHMKLCFLMLQQTTNYLLQSSYHVALLPSXFSSISTQLGSHL

SEQ ID NO: 363228 - protein, 127 aa, Zea mays
  Clone ID: MRT4577_94437C.1.pep
PLIRYICLSLCAMLLHLSVVVVAGLIVRASFFFQFFFFVFTVVLPPYAYACTFASPRPSVTVSGYFNPINRLHCLCGHVVTRIRRRSDQPSLCLCDGFCQGRKWSPALGNLALRSKRAPGPLPGYST

SEQ ID NO: 363229 - protein, 124 aa, Zea mays
  Clone ID: MRT4577_94438C.1.pep
DSVGKIAGGAPWPADSVAEQGGSPRPAGGDITREATMGERASVICCCGGGAEHHGEEEEPGVRRKKEQGQGPPRPGWLKLELDRACDWAPWRQGNREPREGAPSTGGRGRCSTSAGQPTPEGSW

SEQ ID NO: 363230 - protein, 114 aa, Zea mays
  Clone ID: MRT4577_94439C.1.pep
IRTRLARERHNDGVLLAGEGCPPGLAPGVRGDRNLALTAHVATSLSACARTPATSGPPGRPHTCLLLQWTPYRSQAFLLQPSAEVLCSFICEESLLCYMGDRDLPHSFMGICCR

SEQ ID NO: 363231 - protein, 215 aa, Zea mays
  unsure (1)..(215): unsure at all Xaa locations
  Clone ID: MRT4577_9443C.1.pep
MMRRTARXYRQIMNKPYPKSRYCRGVPDPNIMIYYVGMMRKDVDDFPYCGHLVSCXKENVSTEDLDDARIVCYKYMINSAGKDDFHLLLRLHPFHVLLIINMISCAAADKILTAMMSAFVKTHDTCATMDIVHVLLSARCXDNNAAHASEALLRANFKFPARRKIIVSRKWCFSKFIRGDYLKYNSDDRIVPDDVNAKLLVNHGRFDKSAPAKDF

SEQ ID NO: 363232 - protein, 101 aa, Zea mays
  unsure (1)..(101): unsure at all Xaa locations
  Clone ID: MRT4577_94440C.1.pep
LQGRVSFPGTPGPFLFWSQPWKGSFFLCRGGQKLKTEGGSSLRNQIPGFNFFSQSWFWXPPGRVGVQKITAQASPLGPAPISGEGALYFLNEKGGCVFFPG

SEQ ID NO: 363233 - protein, 1105 aa, Zea mays
  Clone ID: MRT4577_94441C.1.pep
MSIDLNQLPLDGNEDGVPEAGGVFPFVSPHQILHSFDLNIPMDEQQENLHPDNELNVLEDYLNDYGVYADVDIVFDQDELSDSEDNEEEHEIQLGRLDLSHTQRQQIYEALLARSNNGKQRKNNTTIVANQFNVSLRTVQRIWNRAKGCCQRGEPVDVSSRKPKRCGNKKIGKPKKDDEGNLIFNGKIGIWPFVRKEPAQRRSRNRDRGTLVTKCINVDRNTMRSFLIAKVLPAIKASWPRSEAHRTIWIQQDNARTHVRHDDPEFVIAAAQTGLNIRLMNQPPNSPDMNCLDLGFFASLQSLTLNTVSRNLDELIYNVSKEFEDYDPTLLNRVYLTLQGCLIEVMKGGGGNRYKIPHMNKERLEALGILPNRLDCDRQLYETTLHSLSSGKNNCGEMILRTPPQRKRRAGSGAGDDADLGLVKSVGVASATGRSPVSDRRLALYDRPTALALADAPGEPFDDMVCTYHCRQMVKSEFMVALDTAEKQVQEYQTKLVALEDQLSKSEDERMQFLDKLNYVEQELAATKGRESALQERLLKELGEYQERYRGQVQLNKEIDSRISAESSVSSAKALIKDLEGDLHRLSESSEREKKTLKKELSYVKEDLSLSASKNNAELEKTILRAENYESEAKLLNEQLTNLKKQLDECLSEKNEMELKLLNSSALPNQHAPTEEQKLIKLLQEELRNYEKEVHEAKRLKSSHMNVELLKEKLLEEQGRRERAELELSKLQEIGARAHKLELELASCTALLSNIPDVSSYADIPQKIADLQKQALTYLNEVGEVTSRLKELEVALEYADLSKQQAEGEAALAKERAASATREVKRLELMLTAISEERDKLRKEHATESDQSGMEKTIRELESIIHELKELISHKDTELNIMNERLNLETRKVKSLEREGDQLRSQVALLESKLGHGDYSASSTKVLRMMNTLGVDNEAKQTIEVLQAELKKTKERLQAVEELKGQTDPGTVVDANIAEKLAQLKNQIATLEKREERYKAVFAERISVFRKACCSLFGYKIVMNDQQQSNGIPVTRFILQSVYAQSDDEKLEFDYESGSTNIVVNDYTSQQEIARQVDIYIRRTNSIPAFTANLTMESFNKRSIC

SEQ ID NO: 363234 - protein, 91 aa, Zea mays
  Clone ID: MRT4577_94442C.1.pep
MAAVRSYFFIIAAALVAVVLALLPADATGADLNVRFYSKTCPSADSLPHQAPAAAFKNNSGIPAALIRLHFHDCLPTRCHGSPLIDSTPNN

SEQ ID NO: 363235 - protein, 99 aa, Zea mays
  Clone ID: MRT4577_94443C.1.pep
PPAVPQKTDWKTPPFPQLNPLVKNPLPSPLPTTKKPPPQMGPPHLHNHNPHCDAPLHPELILHIPNVYPPNPRLICPPSLGTILLFSPHTLKLGPPFFI

SEQ ID NO: 363236 - protein, 119 aa, Zea mays
  unsure (1)..(119): unsure at all Xaa locations
  Clone ID: MRT4577_94444C.1.pep
TDPGTVVDANXAEKLAQLKNQIATLEKREERYKAVFAERISVFRKACCSLFGYKSVYAQSDDEKLEFDYESGSTNIVVNDYTSQQEIARQVDIYIRRTNSIPAFTAELTMESFNKRSIC

SEQ ID NO: 363237 - protein, 223 aa, Zea mays
  unsure (1)..(223): unsure at all Xaa locations
  Clone ID: MRT4577_94445C.1.pep
MILRTPPQRKRRAGSGAGDDADLGLVKSVGVASATGRSPVSDRRLALYDRPTALALADAPGEPFDDMVCTYHCRQMVKSEFMVALDTAEKQVQEYQTKLVALEDQLSKSEDERMQFLDKLNYVEQELAATKGRESALQERLLKELGEYXERYRGQVMKINELEVQLNKEIDSRISAESSVSSAKALIKDLGGDLHRLSDSSEREKKXLKKELSYVKEDLSLSA

SEQ ID NO: 363238 - protein, 457 aa, Zea mays
  Clone ID: MRT4577_94446C.1.pep
MSIDLNQLPLDGNEDGVPEAGGVFPFVSPHQILHSFDLNIPMDEQQENLHPDNELNVLEDYLNDYGVYADVDIVFDQDELSDSEDNEEEHEIQPGRLDLSHTQRQQIYEALLARSNNGKQRKNNTTIVANQFNVSLRTVQRIWNRAKGCCQRGEPVDVSSRKPKRCGNKKNQSTLLNNPKFIEMDNVIHIDEKWFNATKKTRNFYMLPEEEDPYRTVQNKNSIDKLMFLGAVGKPKKDDEGNLIFNGKIGIWPFVRKEPAQRRSRNRDRGTLVTKCINVDRNTMRSFLIAKVLPAIKASWPRSEAHRTIWIQQDNARTHVRHDDPEFVIAAAQTGLNIRLMNQPPNSPDMNCLDLGFFASLQSLTLNTVSRNLDELIYNVSKEFEDYDPTLLNRVYLTLQGCLIEVMKGGGGNRYKIPHMNKERLEALGILPNRLDCDRQLYETTLHSLSSEHASGS

SEQ ID NO: 363239 - protein, 86 aa, Zea mays
  Clone ID: MRT4577_94447C.1.pep
SSGNNAEYAGNGIPVTRFILQSVYAQSDDEKLEFDYESGSTNIVVNDYTSQQEIARQVDIYIRRTNSIPAFTANLTMESFNKRSIC

SEQ ID NO: 363240 - protein, 328 aa, Zea mays
  Clone ID: MRT4577_94448C.1.pep
MVQQLLVSVGSPSNALVLKIPIQGVVDALHRKTLQGTGLNEEQMRQASVADNGHRQLNKILVDLDQDNITAKNYAIAFYTEKHIQIPCLGGEHEVTFFHEYRDSVERVFVDHPSYHRPGNLYGAKVVLLGFQHYAVMLGTTVIIPTALVPQMGGKYEDKVVVIQTLMFVVGMNTLRQSFLGTRLPAVTGGSYTFVLYTISIILGGRSANEPSSHIKFLGIMRGTHGALIVASALQIIVAFSGLWCNVARYLSSLSATPLVALAVFGLYELEISRTGKIKALSVDAVIVFGSQRIPQVIHSVMWIMFILFRVIWCLQFSWDPGGSNWWK

SEQ ID NO: 363241 - protein, 189 aa, Zea mays
  Clone ID: MRT4577_94449C.1.pep
LASIAVAGLAVDRYGRRSLLMLGSAVLILSQVAMAWIFGAQLGTDGGKSMPRGYAVAVVALVCVYTAGFGVSWGPIKWVVTTEIFPLEVRPAALGLGGAISGVLIFVQSQSFLEMLCSFKYGTFLFYAGWVVVMAAAVAAFLPETRGVPIESMGVVWEKHWYWKRFVKLRPSSAPTTAMAPAKQADGPV

SEQ ID NO: 363242 - protein, 105 aa, Zea mays
  Clone ID: MRT4577_9444C.1.pep
RAERTKTKTTKDAVTKTGTYQAWNGDAEDDAQHKLTGNSVSHKLPLIFPDKPQRSKALIQCHGDSIDLTRDIIALDKIVVSNSPTAKPDLLLDLIGTIYTTSIVP

SEQ ID NO: 363243 - protein, 53 aa, Zea mays
  Clone ID: MRT4577_94450C.1.pep
YQAQYINRKSSIVVAIDRSCHRQIPRNLAAICRCTHAIVKVPSLSTGVSACTV

SEQ ID NO: 363244 - protein, 113 aa, Zea mays
  Clone ID: MRT4577_94451C.1.pep
QVYQGSGLRFGGSLGHKDPPPRGLVLPATISFPECVCFISDWLLPPKKLPEKRFFKGFGNSRCNCNPSHAGLVIGFNLAWPPPPFFCAGLFSFPSLGGQNLSFFLFPPFWLCS

SEQ ID NO: 363245 - protein, 131 aa, Zea mays
  unsure (1)..(131): unsure at all Xaa locations
  Clone ID: MRT4577_94452C.1.pep
PLTTTPLVTFQFFIPLKTLATNHSNDPCAGLVYYSTIFQREAXMITPDLLXDDEGYFNDILALHYNYPHRPPSPRSTAETGRPNNHHHGSRYLSILHRAAENRNAYEGCPRXFRPYHTAEGIALRNNPIVS

SEQ ID NO: 363246 - protein, 66 aa, Zea mays
  Clone ID: MRT4577_94453C.1.pep
VKVVVAPYTSGLSLNEPAVGLFKCQSFWFFGTVWSYECKNDTAVFCSDTLATVISERYNMSKPSIT

SEQ ID NO: 363247 - protein, 52 aa, Zea mays
  Clone ID: MRT4577_94454C.1.pep
HLRPLVIRQELIRCSKSHCLRLPSPQHLVLIRTAAQIRARRVRVNCEYSLFQ

SEQ ID NO: 363248 - protein, 68 aa, Zea mays
  Clone ID: MRT4577_94455C.1.pep
SSILYIKRHALEHCMLHFSFYATHTKKHTTLYGFMQGLQIILLVKHKHSHTFLYSTQQKNLNVSREAS

SEQ ID NO: 363249 - protein, 47 aa, Zea mays
  Clone ID: MRT4577_94456C.1.pep
GACAGGACCPAQNPFRSTSTRGRRSDAIFCGRVIARVIGRVAVRVGA

SEQ ID NO: 363250 - protein, 196 aa, Zea mays
  unsure (1)..(196): unsure at all Xaa locations
  Clone ID: MRT4577_94457C.1.pep
RVGGRVGGRVGGRVGGRVGGRVGEFGTRRAVAHSASRPPVPSRAVRPFSDWPPPASPSSSTKAHRKRASEPPSPPPPPPPXPAPTPTPXPPAWGARAPPPATTPSPPRAPPPPAPFAGVAGAPASAXSKPPPSQQDPKSRPRLLLPPLPELPLLASRTVDLDPLRFRFISSYRLIFLLAYFVYCHFDSFLLPAAGS

SEQ ID NO: 363251 - protein, 115 aa, Zea mays
  Clone ID: MRT4577_94458C.1.pep
GRLSHFIAYGFHPGCERSNPRRRVVVIPFISTHIVGSLKTLMVQFHSECVLSVDVRVTRQFHFFFRVLRRAMRNSQGVCICQVPWRFHRFRLRSADIWFVDVQGVKIGGRWSPAG

SEQ ID NO: 363252 - protein, 77 aa, Zea mays
  Clone ID: MRT4577_94459C.1.pep
DQGPPAPRVSWTGPRLLQGRARPLGQYGPLGGAMGPVGMCPPWVKAPQPLNWLPRCRSVKKRPFLGFTQFFNRKAPL

SEQ ID NO: 363253 - protein, 56 aa, Zea mays
  Clone ID: MRT4577_9445C.1.pep
EACNQSLAFSIEILGLSFFESYTPNLWYRYCVAELTKRISLCMGAGPVKALSLFCL

SEQ ID NO: 363254 - protein, 98 aa, Zea mays
  unsure (1)..(98): unsure at all Xaa locations
  Clone ID: MRT4577_94460C.1.pep
VQSKIVSLNLQKLLAASYLMCKKSKVLLDLNEXDTTCMANSKQNIRKLVKDGFIIKKPHNIHSTSHARRTHDTNQNARHSGYSKRMPTREARLPTKFY

SEQ ID NO: 363255 - protein, 87 aa, Zea mays
  Clone ID: MRT4577_94461C.1.pep
IPGYFYKHRPLVILERPALHSCLLLPQFPLLGLLHLQYHFQSHCLAIATVLCSISTTNTHFSNYEFGHISTLTPPRERKAQMPYKQT

SEQ ID NO: 363256 - protein, 98 aa, Zea mays
  Clone ID: MRT4577_94462C.1.pep
QTTGVTWKINVPTMSFRQQCNRHWGGGGGVPFHSTHSIPPIEGNHSCSTSHMQKVKGTQLCRGCLLYGAAQKIHSPVARSIAASYFPCGGLAFPGPWP

SEQ ID NO: 363257 - protein, 169 aa, Zea mays
  Clone ID: MRT4577_94463C.1.pep
VLPLNLSYSLYHRLQLTPRSRPRPHTTGRHRSSSPGRRVPAVSTPSAVFGHWVLRIQEVGNMSYCQATTYKPLGGLTLDRPLGLGRTCKILPQHSVWQHFSRSCKLQEKVYPRLVVAACHKRLGPVYASSGKGNLDFVNDPFSMESLNKAMDGAKKQQSIQGFLMEQIA

SEQ ID NO: 363258 - protein, 32 aa, Zea mays
  Clone ID: MRT4577_94464C.1.pep
SDLEINMNLLSHEQAQALYFYTKIPFSIHLFR

SEQ ID NO: 363259 - protein, 235 aa, Zea mays
  unsure (1)..(235): unsure at all Xaa locations
  Clone ID: MRT4577_94465C.1.pep
KNILQHRTPFLKKKIYEMGRRGVSPNLVTYSSLIDGLCKGGRATSALELLDRMIKEKKLPNMITYSSVVDGLCKEHMLSEAMEILDRMRLQGRKPDAGLFGKLIVGLCDAGRAVEAANYLDEMVLAGIEPNRVTWSLHARINNTVLTALCDKGELGRAFQVYQSTRTRSISTDPTTFHLLVESFSKNNIEKAARVVLDMLSERCIPERETWDAIISGYWSKKKVRQEAREXWDHL

SEQ ID NO: 363260 - protein, 62 aa, Zea mays
  Clone ID: MRT4577_94466C.1.pep
QLGSGNAEAWHVARVHVELADRPLKMLSLRLPPLTAASAVMCNHVPTSLTTRHGTPSRNSNS

SEQ ID NO: 363261 - protein, 48 aa, Zea mays
  Clone ID: MRT4577_94467C.1.pep
WLTRSWSMLYSSKKKKKSVSKDLWLHKNDVGGFIPFYTTNGIIHFENF

SEQ ID NO: 363262 - protein, 143 aa, Zea mays
  Clone ID: MRT4577_94468C.1.pep
PRAEGNHTLWFKFAPLGIVASSISPTWLWSTTAGPVVLVFGCWLQSLSSLPVQRTITSSRPGWSCTCLVALFSFPQMCTHLSSYGVVLGHLLNGVRSQISTSSSSYSADAPSVKYLPERQEQTTSAACLSIECNAGCDYNSSL

SEQ ID NO: 363263 - protein, 56 aa, Zea mays
  unsure (1)..(56): unsure at all Xaa locations
  Clone ID: MRT4577_94469C.1.pep
EPLPKKGPSHPFFXSLFXPSPLGGFLVTNQICSFCNHINGGVGXNFDRLYLIKALH

SEQ ID NO: 363264 - protein, 74 aa, Zea mays
  unsure (1)..(74): unsure at all Xaa locations
  Clone ID: MRT4577_9446C.1.pep
RSLILLAAALXFIPXPFGKKGFLLIIIGETNPIYLPQMHETKLIPSKRLRLSQHYGWNFRITVANRGKNRSFFY

SEQ ID NO: 363265 - protein, 61 aa, Zea mays
  Clone ID: MRT4577_94470C.1.pep
DHGLITFLSFSGRSLFFSYLSAAFGFPIPEGLVPTAAPMAGLSPSSIGPDVPGNELAADAW

SEQ ID NO: 363266 - protein, 84 aa, Zea mays
  Clone ID: MRT4577_94471C.1.pep
FLPQAGGGLLFSGFGAVKAQNSPPPKKPPKTLVPKKKREFRAPKSGCPLKNKTHRGFLLDLRQIFFFFWADLNRAGWFLFFKPF

SEQ ID NO: 363267 - protein, 81 aa, Zea mays
  Clone ID: MRT4577_94472C.1.pep
FSEEFRSHFLWLQDRPYKNTCNSHSYMNSLASVFLENVELQFPEEFRSHFLWLQDRPNKITNNSHSYMNAPPGMLLECAIA

SEQ ID NO: 363268 - protein, 68 aa, Zea mays
  unsure (1)..(68): unsure at all Xaa locations
  Clone ID: MRT4577_94473C.1.pep
PGAACRCFFRPTVPGYXLTGRTIQLTPGACLSYPIRPRRPDGRRAGGRCGEGFGLLGSLWIITNGGGG

SEQ ID NO: 363269 - protein, 370 aa, Zea mays
  Clone ID: MRT4577_94474C.1.pep
MNSFQSYNTDYFYAHGAQTQNFCAEDLLNFDSTVFLDDSESESISTLQSGSKKITKTSPAVQAKQASYKKSKRARNPWTPKEDAKLMELMKKYGQSWAMISSQLEGRTGKQVRDRYLNKLRPNIKLGDWSVQEDELVVKLLKEVGNRWSLIANHLPGRTEGQVKNRFYSFIKKRLQPDGTLCQISDSRTSSEEYTSFSNSPQPETGFDFGYEFDVNAANGSAINFAPQTFNCAITKGAYVTEEEIYSEGSTTQGPTSQVGNSPFRGEVDPTDVISYDLPEAFFYKQPSQHRHFNLAPIEHDSQVDAILTNVTNYFAENNKFYMPSEVDSFFTQAETQGQAPQDDRLNQLSMRKAYLELALAKTLNEMKSL

SEQ ID NO: 363270 - protein, 218 aa, Zea mays
  unsure (1)..(218): unsure at all Xaa locations
  Clone ID: MRT4577_94475C.1.pep
ASASPDSTARTTTAPPRPPPPPPPPPPPSSIFXPPPPPPPARRSKKPPPPPSRPAPPAPPPPPQPVRTRPQRAHVHASTQQPPLYPRRVYYTYYPLPPPSPPLPPPPPPPPPLVPEGEDDSPSVTASPAPAYCASPDVNTKADRFIESFXREGLKLEKLNSYREKWQRQIQENAAVEIGEEEEGEFMVIGSLFGDDDEEDEDGISLPQTPATAVAVGF

SEQ ID NO: 363271 - protein, 127 aa, Zea mays
  Clone ID: MRT4577_94476C.1.pep
PRVRGRVGGRVGGRVGPDDGAHGLYRLWTCQDCAGDLGEFPGDEAAAADGPSAARAARSPTTLSHVVFGIGASARTWDQRRGYAELWWRPGQMRGHVWLEEQPASPWPAATCPPYRVSADASRFGDR

SEQ ID NO: 363272 - protein, 79 aa, Zea mays
  Clone ID: MRT4577_94477C.1.pep
GKEWVINIVDQKKKKKKKKKKKKKKKKKKKKKKKKKKEKRKKANYLKKKKKQKGATFLKLNAAGQTNGGAVNFYRVTKF

SEQ ID NO: 363273 - protein, 358 aa, Zea mays
  Clone ID: MRT4577_94478C.1.pep
NEMAVRIEDKDERISSLAKLFFHELSKKGSNPIYNLLPDILGRLCNQHLKEETFCNIMQFLINSIKKDKQMEALVDKLCNRFAGVNDVRQWEYISYCLSQLTFTEKGLKKLIDNFKMFEHALSEDSVMNHFRSVISKCKKFAKPELKICIEEFEEKLSKVHQEKKEQEETTKNAEAHRHRIDSLDEFLVTKEVSENSGNSAEDETSEVVDPSVDSSTEHMENTPECSVNTSAENSQTTAPLTESEGGGEEIQSAQPVSKGMSRLRAKKTRDPVVDPSVDRSTEYRGNTPEHSADTSTENSQTSAPLTGTEGGSEEIQSTQPVGKGVSRSRARKTRDPVVEDSAAPVRRATRSTRRQGS

SEQ ID NO: 363274 - protein, 101 aa, Zea mays
  Clone ID: MRT4577_94479C.1.pep
AWEWETGRTSLIQRPCVGLARLGVKVGRGGVNQWDWPAAACWCASARYPGAPVRVCLQPPVRLRLRPGTGRGVSTTASQDCPSRLQAWTGRTPPSAWNMEC

SEQ ID NO: 363275 - protein, 75 aa, Zea mays
  Clone ID: MRT4577_9447C.1.pep
KISDLCPSVVGGRLIPWDRWQGAWEITLTRRSPLGLGSGKLHRGKRSGLGPPPNFVNGFLFQKDPPSQKEPWSLP

SEQ ID NO: 363276 - protein, 131 aa, Zea mays
  Clone ID: MRT4577_94480C.1.pep
HDQRKPEILLRSFGDRSTEYKGNTPEHSADTSTENSQTSAPLTGTEGGSEEIQSTQPVGKGVSRSRARKTRDPVVEDSAAPVRRATRSTRRYVRVLTYSSLCSLVPASFPPWMIKGPQVVALFTRHAILFF

SEQ ID NO: 363277 - protein, 67 aa, Zea mays
  unsure (1)..(67): unsure at all Xaa locations
  Clone ID: MRT4577_94481C.1.pep
NWSDNASLLPPTSWTPRARPGCLEEFIVEPAQDXXSPAGRHHDDPALLASGFLARRVTSXXRASFPR

SEQ ID NO: 363278 - protein, 93 aa, Zea mays
  Clone ID: MRT4577_94482C.1.pep
RSISTILRDTHAAIIHNDQAIVKDTNPVMANGSRTVITAHNPSAMTGHDGSCMKCTPVTGRNRTSVTAKMRDRETKTVGNRELMTADKQPVQN

SEQ ID NO: 363279 - protein, 146 aa, Zea mays
  Clone ID: MRT4577_94483C.1.pep
TRNKKRLVYALLPSPVDHYAKPYRSMVSNSNLDVTASQLALRRCTRAIARAAVHSCSPASTSSRRARTFSDSTPPKMSTCDKPSESNSSGDSVAVVAASVWNKANSGSDSNSASIGAALTGSETSGAATGRSIAGTSSFSSSDPAG

SEQ ID NO: 363280 - protein, 117 aa, Zea mays
  Clone ID: MRT4577_94484C.1.pep
APPKGRGPVGGNPQPQGSLIHKKKGGTIKNQEGQKMGKTKGLAPSPKSPRGQKGVKPKAKKGGKPRVFPSRGMEKTGTIKRKPPQKKGEMGPPQKEGLKDAQGKRKIGKFVLRVVFN

SEQ ID NO: 363281 - protein, 138 aa, Zea mays
  unsure (1)..(138): unsure at all Xaa locations
  Clone ID: MRT4577_94485C.1.pep
MNSAEDVVCMLSWFIFLFYLSIYNIYRRRFDKKKKKNKKKKKKTTPKPPTTSTLNPRLISPPRPKQXTPPPSPQLLPPHSXPTPPPPRPPNPHTLPPPXSNXPPSLPMRSPPPLQSPHPSPQLHKPINPTPPHRRPAY

SEQ ID NO: 363282 - protein, 251 aa, Zea mays
  Clone ID: MRT4577_94486C.1.pep
MADYHRIHPVSAGSPPPPSAPPEQASRSGKKPSHDQLPVTAPAPAPPPPPPPPPSRRKRSRCCRCVCYTVLALVLLAVALGATAGILYLVFRPKIPTFHVDRLTVTRFDVNGTSATVTDAFDVDVTADNPNRRIGIYYDGGDVTASFNGTVLCSGAFPALYQGHRTTVHPRISLAGETRLDSAVAAQLLQQRAAGFVPLTVRARVPIRIKFGAVRLWTMTGKANCNLVVDNIQAGTQLSIRSNSCTFKLKI

SEQ ID NO: 363283 - protein, 217 aa, Zea mays
  Clone ID: MRT4577_94487C.1.pep
MYYTPTENRANYWYSADYGMFRFCVADSEHDWREGTEQYEFIESCLATVDRKKQPWLVFIAQLELGYSSGFFYGVDGSFAEPMSRQSLQKLWQKYRVDLAFYGHVHNYERTCPVYEEQCMSSEKSHYSGTMNGTIHVVVGGGGSHLSNFTAQVPPWSVYREMDYGFVKLTAFNYSSLLYEYKRSSDGQVYDSFTMHREYRDLLACVKDSCPPTSPAT

SEQ ID NO: 363284 - protein, 330 aa, Zea mays
  Clone ID: MRT4577_94488C.1.pep
ARPSASAICWGSLTLSTFGNLESTTEWLEIVFNIITITGGLVLVTMLIGNIKVFLNATTSKKQAMHTRLRGVEWWMKRKKLPRSFRGRVRQFERQRWAATRGVDECQIVRDLPEGLRRDIKYHLCLDLVRQVPFFQHMDDLVLENICDRVKSLIFPKGETIVREGDVVQRMLFIVRGHLQCSQVLRNGATSSCTLGPGNFSGDELLSWCLRRPFLERLPTSSATLVTLESTEVFGLDAADVKYVTQHFRYTFTNDKVRRSARYYSPGWRTWAAVAVQLAWRRYKHRKTLSSLSFIRPRRPLSRCSSLGEEKLRLYTAILTSPKPNQDDDF

SEQ ID NO: 363285 - protein, 92 aa, Zea mays
  Clone ID: MRT4577_94489C.1.pep
TVIVSLLHMQHKHVMNAIFVNETKRFIRIAIGAHGGEPCHEACHSLDDTDYDKVSSLSSLIRRPHKVNRHPCILNSALHYKKALRLPRPRAE

SEQ ID NO: 363286 - protein, 121 aa, Zea mays
  Clone ID: MRT4577_9448C.1.pep
SLQIVGGLSRRTSQIRQIGEDHRLWMLPRSVAATIAVRWLSVSVVDTRATARVSCSHVSLYAQVFRVSLAGVACPSCLMLPLASRTADSCRRCPATVRPLLFYSSRLPGVRMRRIRRHGSV

SEQ ID NO: 363287 - protein, 67 aa, Zea mays
  Clone ID: MRT4577_94490C.1.pep
LLGWHNLPLGIARAILKDGWDPGYRQINQITGCRLQGDPSVCTGHSDGEPYSNGRPPPSVNDTKCWS

SEQ ID NO: 363288 - protein, 114 aa, Zea mays
  unsure (1)..(114): unsure at all Xaa locations
  Clone ID: MRT4577_94491C.1.pep
GWNPRWKSVDPAGSCHVARLMKPGPFRRLVNPTSSKRMLALAWTPLGLLLRRGCPPGRRRRRRRQATATATXVSMGFARECRSISSCNATLAVDRSSCMHLRLIVRPRVRGRVG

SEQ ID NO: 363289 - protein, 44 aa, Zea mays
  Clone ID: MRT4577_94492C.1.pep
PDGSSRVYVFVQVTNHSASNLLKREDRLHRESHDDTAMKKIQSI

SEQ ID NO: 363290 - protein, 60 aa, Zea mays
  unsure (1)..(60): unsure at all Xaa locations
  Clone ID: MRT4577_94493C.1.pep
XKKKKKKKKKKKKKKKKKKKKKKKKKKKKKKKKKKKGRAVLRGSQALLTRVLANGHKLYF

SEQ ID NO: 363291 - protein, 59 aa, Zea mays
  Clone ID: MRT4577_94494C.1.pep
DNWVHCCQPRFSIHQLEVDILPFADQTFQSVIGDNARKYYHSKYKTYETIEENMLRQKI

SEQ ID NO: 363292 - protein, 63 aa, Zea mays
  Clone ID: MRT4577_94495C.1.pep
MTKLNQNIKDMKSILYGNGESEPVTEACVQLTQEFFRENTLRLLIIHLPKLNLEVCNLTCFCM

SEQ ID NO: 363293 - protein, 167 aa, Zea mays
  Clone ID: MRT4577_94496C.1.pep
PQQSVNVLGGEEDDRDEGWRRWSVLVATVWIQALTGTNFDFSAYSSALKSSLGVSQEALNCLATASDLGKALGWSSGLALLHMPLHAVLMLSAAMGLAAYAAQYYCLVFAGGADAGAGASSSVAVPYPLEGVTCSHRVACCCIGPHANGLFPYVEQTRWKHPGSRNS

SEQ ID NO: 363294 - protein, 56 aa, Zea mays
  Clone ID: MRT4577_94497C.1.pep
LLERLKEETGLHDFIMCSRRPINGKLLPLRLQLPPNNAVVHIVLVQESSNVAKTFA

SEQ ID NO: 363295 - protein, 169 aa, Zea mays
  unsure (1)..(169): unsure at all Xaa locations
  Clone ID: MRT4577_94498C.1.pep
WDPRGRPGRGLYIISLXMNGTSEAFLHAVANENQLKQSNDMLLLFSVIYIILNVVLIKSSGAVGLIAANAINMLLRISYSAVFIKDYFKGSFSFRRCVPAGWGILLISGLTTVFSERVFLNKTRFKQTVPIHIAIGIMCLSIALLEIYRGEKQFLMQIIRTLKHNDKSQ

SEQ ID NO: 363296 - protein, 191 aa, Zea mays
  Clone ID: MRT4577_94499C.1.pep
LELMERNLSPDAVVYNVFINCLCRLGKFSEAKSFLKEMRNTGLEPDQATYNTMISAQCREGNTSKALKLLNEMKWSSIKPNLITYTTLVVGLLEAGVVEKAKYLLNEMASAGFTPTPLTHRRVLQACSGSRSPYVILEVHELMMGAGLHADITVYNTLVHVLCCHGMTRKATIVLDEIVGRGNAPDTITFN

SEQ ID NO: 363297 - protein, 94 aa, Zea mays
  unsure (1)..(94): unsure at all Xaa locations
  Clone ID: MRT4577_9449C.1.pep
RGRVGVAVVQLSTYLVLXALQCDGRLCRAGWQILVESFTDFAMLSHTLWILFYHRLLLPKLRKITGTEEGFTLLQRQGIRIVLCTGPMVIIGIV

SEQ ID NO: 363298 - protein, 89 aa, Zea mays
  Clone ID: MRT4577_944C.1.pep
PWVVIMSAETARYNVVRTNGMAHRDHYRLARQISSGSWTTRRARARMDVRRCFIMINAKMETKFIQDLEPVRTQNPSVRTFASEVLRYV

SEQ ID NO: 363299 - protein, 114 aa, Zea mays
  Clone ID: MRT4577_94500C.1.pep
MHFSPHNLICALTICKDMLLRISYSAVFIKDYFKGSFSFRRCVPAGWGILLISGLTTVFSERVFLNKTRFKQTVPIHIAIGIMCLSIALLEIYRGEKQFLMQIIRTLKHNDKSQ

SEQ ID NO: 363300 - protein, 153 aa, Zea mays
  Clone ID: MRT4577_94501C.1.pep
HSHCAPTRKTESAYAIVKGGKREVPSAMGIILVSMHIMPATPANMNARTKNGNDALGSQRTPTPRCTRITHTLRLHRSRHAIVQRLPPPLGTVQLLMSNMICYTHYRILKPFHNASNHACVRTPTITQTVIVQCDTAPCKQGYLTHYMNMHCE

SEQ ID NO: 363301 - protein, 97 aa, Zea mays
  Clone ID: MRT4577_94502C.1.pep
QKYVRQAWQKADINTKWAATRWAKKIEARERKAKMTDFDRFKVMKAKNMRNRIITNEVKKLQKAALLKASPKKAPGTKGTAAAAAAAAAAAAAAAAA

SEQ ID NO: 363302 - protein, 220 aa, Zea mays
  unsure (1)..(220): unsure at all Xaa locations
  Clone ID: MRT4577_94503C.1.pep
MTTGPRMTAGYTKRKSSARHTKYRSVVLYASKDILLQIISVSLAGDVGLGTVYSHEPPLSGFDVGLTNYAADYLTGLXMVACRVLKTRGXEXESEGHVDATGEDWSWAPADERRALRALLDVGLIRTTSGNRIFGALKGALHGGLDIPHSEKRFAGFKKDDTQLDADIHRTYIYGGHAADYMRNLAEEEPEKYQSHLSEYIKQGIDADDMEALTKKVHAA

SEQ ID NO: 363303 - protein, 108 aa, Zea mays
  Clone ID: MRT4577_94504C.1.pep
SHTGPDRAQRRLTSTSIPTLQYMRRVGQKVQVLSLDKTQLASGAPRMGHPAHVTTLIHHDDYRTHTLFRPQHFTVGAGHIHATGTASYLPGFILHRYTNTLGDDCYTC

SEQ ID NO: 363304 - protein, 220 aa, Zea mays
  Clone ID: MRT4577_94505C.1.pep
GRVGERHECLDWLDLQPPASVVYVSLGSTSSLRDEQVEELASALRDSKQRFIWVLRDADRANIFADHGESPRHAKFLPEFAEHTQDRGLVITGWAPQLEILAHGATAAFLSHCGWNSIMESMGHGKPILAWPMHSDQPWDAELVCKHHKAGILIRPMEKQREVISAAAIQEAIEKMMVSDEGYKIQQRAMALGQAIRASAAVGGGSENKDLDKFIAHISR

SEQ ID NO: 363305 - protein, 79 aa, Zea mays
  Clone ID: MRT4577_94506C.1.pep
ASKTASKRAVAIMHPVAHVIHVSQLCVTDVGALQMGSLKARNCDRSFSNTIHALLITQVCASLTSRISSISHRPLSVMV

SEQ ID NO: 363306 - protein, 98 aa, Zea mays
  Clone ID: MRT4577_94507C.1.pep
MDIMQTSDSSQYGVVENSPYRFPYNKRVEDGNLGASWYFSRKEIEENSLSRRDGISLKKESFLRKSYCTFLQDLGVRLQVSPVTIATGIVFCQPFFLP

SEQ ID NO: 363307 - protein, 62 aa, Zea mays
  unsure (1)..(62): unsure at all Xaa locations
  Clone ID: MRT4577_94508C.1.pep
RXPTDKGTLWQRCFGDXXXEXWGTLTXQYRLVRRFVWXEIDSVPVSNHILPSALXVMGWCPV

SEQ ID NO: 363308 - protein, 159 aa, Zea mays
  unsure (1)..(159): unsure at all Xaa locations
  Clone ID: MRT4577_94509C.1.pep
LTSDFYFKRHWPPGQNPKGPXPGGGTPQDPARGPTGGGGRPGGPREGGEKNGNKKRGGDXLKGKAGRGPPXSPCPPPNQXGENPRRPPXEGGGTPQDRGGGGANPGKKGGGGKKCLKNPPQAVARGQGQLFGGQKYTKKIEGGGPPKNWAKRGAPQKGN

SEQ ID NO: 363309 - protein, 61 aa, Zea mays
  Clone ID: MRT4577_9450C.1.pep
ETVSTSVTILSTVCTSQAFRLPSTFIKESVQYRLSNLGHRYHQVLKPVSLRSQKKPQPLVR

SEQ ID NO: 363310 - protein, 211 aa, Zea mays
  unsure (1)..(211): unsure at all Xaa locations
  Clone ID: MRT4577_94510C.1.pep
MGRGKIKIKRIENSTNRQVTFSKRRAGLVKKAREIGVLCDAEVGVVIFSSGGKLYDYCSPRTSLSRILEKYQTNSGKILWGEKHKNLSAEIDRVKKENDNMQIQLRPVFLIQICSRSLAARALHXSLFVCVLVVIVLACPSLVMVXHLKGEDLNSLQHRELIAIEEGLQNGQTNMREKQMDYWRMHKTNGKMLEDEHKILTFRMHQQAVDL

SEQ ID NO: 363311 - protein, 233 aa, Zea mays
  unsure (1)..(233): unsure at all Xaa locations
  Clone ID: MRT4577_94511C.1.pep
NSARGGSGKTYTMLGEISDLEVRPSPDRGMTPRIFEFLFARIKAEEESRRDEKLKYSCKCSFLEIYNEQITDLLDPSATNLPLREDIRNGVYVENLTEFEVGCASDIIKLLMQGSANRRVAATNMNRESSRSHSVFTCIIESRWEKDSASNLRFARLNLVDLAGSERQRTSGAEGERLKEAVNINKSLSTLGLVIMSLVDLAHGKQRHIPYRDSRLTFLXXDXLGGDSXTMII

SEQ ID NO: 363312 - protein, 281 aa, Zea mays
  unsure (1)..(281): unsure at all Xaa locations
  Clone ID: MRT4577_94512C.1.pep
MGRGKIEIKRIENSTNRQVTFSKRRAGLVKKAREIGVLCDAEVGVVIFSSGGKLYDYCSPRTSXSIALSFFLFFCLFIIVLLLFLCASKTDRKDPNLVGKAKLSKKHGXRKIEDTNKNEGTSLKNPNLVWWXLSRILEKYQTNSGKILWGEKHKNLSAEIDRVKKENDNMQIQLRHLKGEDLNSLQPRELIAIEEGLQNGQTNMREKQMDYWRMHKTNGKMLEDEHKILTFRMHQQAVDLSGGMRELETGYHQVQHDRDFISQMPFTFRVQPNHPNLQEDE

SEQ ID NO: 363313 - protein, 254 aa, Zea mays
  unsure (1)..(254): unsure at all Xaa locations
  Clone ID: MRT4577_94513C.1.pep
MRGNLPSLATASNGAALPLSFSQTKQLHARLIVASPFSASGPAYLRLLVLRSYAARGDLSSARRLLDEAPRPASPLLYNALIRAHARRLDLPAALALFARMRRSATPPDAHTFACVLRACAESSRPDAVKVVHGIATTCGMCSRPIVLSSLVSAYAKLGLVDNARSLFDGLCEPDLVIWNSIMSAYGYQGMWYDGLQMFSLMRRAGQHPDGYSMVSLVSCFWNPEILAFGQAVHGICVXGGYDSGHHVRSTLVS

SEQ ID NO: 363314 - protein, 157 aa, Zea mays
  unsure (1)..(157): unsure at all Xaa locations
  Clone ID: MRT4577_94514C.1.pep
MLRTSATNLLRKSLVRSTPALASRAASTHAISNPTLANIEKRWEGMPLQEQAELWMALRDRMQSNWTELTLQEKKAAYWIAFGPHGPRAEDPPGTNARVAWGIFIGIAASVGLFGLVRLAAKPAPYTMTQEYQEETNEFLKXQKSDPFTGITSPGYA

SEQ ID NO: 363315 - protein, 101 aa, Zea mays
  Clone ID: MRT4577_94515C.1.pep
MGLCVSLGGMAGGEAARAAAPSCKCGTALVLMPSGDMREYPFPATTAARVLEDASAAAAPGDGWLLCDADGMGFEGPAPPAVPHAEPLRAGLYFLPARARR

SEQ ID NO: 363316 - protein, 36 aa, Zea mays
  Clone ID: MRT4577_94516C.1.pep
RGYTPTLSGLDPCVRIQHCEGSHCRAIQLERRHKTI

SEQ ID NO: 363317 - protein, 115 aa, Zea mays
  Clone ID: MRT4577_94517C.1.pep
AAGMHDRRRRGAYFPAPRRCGRRRLGLRKRLLANASQARLWDFDGTVICVEHVKLKLLTDQNLKASPMDFCTCSFFFAVNPACSPIAIACRSNCNTALLTVYDQHTNCCKASLRC

SEQ ID NO: 363318 - protein, 405 aa, Zea mays
  Clone ID: MRT4577_94518C.1.pep
DTTTLLDSEDYDMICEQHALQDILLTIDGLQSRVHLLQDRLSKAHSEGENLAFSGADTDVRVAGKRQRTQKHSFSNTKSRHTKPQKRKNLNILLKDDDDGQALAGGPALADGETDVHMIGASRSTEERSGECNHSRDKAITVDLLLGTGNSITNSDIGDLYNVNTDDVLIANQAAVEACQQFHEAKHLPSGSPSKDKIISAPAEMKNNSPPVEVKNTCGPVKIESLCSPVEGENTSDPALEQESFLEKSPSRQPVSPGNKQELKPKKRRKKKGSLFTKKQRKVDSRTPDAKEKTEGTPSDVAEETESPLSGATGPGTMRSCCAGKKRKSGNEPADANKTGKPSSAVKKQKTENPTAAANATKKRATEKKLESASASQKLQVEKAVLVAVNSRRSQRVRKPKVFAD

SEQ ID NO: 363319 - protein, 59 aa, Zea mays
  Clone ID: MRT4577_94519C.1.pep
MAAQGHAAVGSASESGGSPAASAAAAEAAVFPATSLYMGDLHESAQEVQLFHVFSQIMR

SEQ ID NO: 363320 - protein, 56 aa, Zea mays
  Clone ID: MRT4577_9451C.1.pep
KQTPPPPFHKPPNFHFFVKKKKKKKKKKKKKKKKKKKKKKKKKKKKKKKKKKNPHN

SEQ ID NO: 363321 - protein, 776 aa, Zea mays
  Clone ID: MRT4577_94520C.1.pep
VEGSKHPSIHRPRLFVEGYGRATAAKLPGYEEEFKDRCHHRSAKVDNVVYCLGDDVYVKAGENEADYIGRITEFFEGTDQCHYFTCRWFFRAEDTVINSLVSISVDGHKHDPRRVFLSEEKNDNVLDCIISKVKIVHVDPNMDPKAKAQLIESCDLYYDMSYSVAYSTFANISSENGQSGSDTASGISSDDVDLETSSSMPTRTATLLDLYSGCGGMSTGLCLGAALSGLKLETRWAVDFNSFACQSLKYNHPQTEVRNEKADEFLALLKEWAVLCKKYVQDVDSNLASSEDQADEDSPLDKDEFVVEKLVGICYGGSDTGKGVYFKVQWEGYGPEEDTWEPIDNLSDCPQKIREFVQEKHKRKKNPLPGDVDVICGGPPCQGISGFNRYRNRDEPLKDEKNKQMVTFMDIVAYLKPKYVLMENVVDILKFADGYLGKYALSCLVAMKYQARLGMMVAGCYGLPQFRMRVFLWGALSSMVLPKYPLPTYDVVVRGGAPNAFSQCMVAYDETQKPSLKKALLLGDAISDLPKVQNHHPSDVMEYGGSPKTEFQRYIRLGRKDMLDWSFGEGAGPDEGKLLDHQPLRLNNDDYERVQQIPVKKGANFRDLKGVRVGANNVVEWDPEVERVYLSSGKPLVPDYAMSFIKGKSLKPFGRLWWDETVPTVVTRAEPHNQVILHPTQARVLTIRENARLQGFPDYYRLFGPIKEKYIQVGNAVAVPVARALGYCLGQAYLGESDGSHPLYQLPPSFTSVGRRTAGQARAAPVGTPAGEVVEQ

SEQ ID NO: 363322 - protein, 75 aa, Zea mays
  unsure (1)..(75): unsure at all Xaa locations
  Clone ID: MRT4577_94521C.1.pep
HYSLATVHELESRKLYQNRVAAVDYNVALQNDVLLYTYDGNMARAVQGHRRYEGFQKTINPDRRXLVELIDSYMT

SEQ ID NO: 363323 - protein, 916 aa, Zea mays
  Clone ID: MRT4577_94522C.1.pep
MAPSSPSSARPTRASGRERSAMAEEIHQNQEEEEEVVAASTAKRRRKAASSGKKPKPTPKQAKPAVAGMKKKGETEKTEPVVDDVCAEEPDEEELAMGEEEAEAEEQAMQEVVAAVAAGSPGKKRVGRRSAAASGDHVPEFIGSPVAAAEAHSNWPKRYERSTAANKPEEDDELKARCHYRSAKVDNIVYCLGDDVYVKAGENEADYIGRITEFFEGTDRCHYFTCRWFFRAEDTVINSLVSINVDGHKHDPRRVFLSEEKNDNVLDCIISKVKIVHVDPNMDPKAKAQLIEHCDLYYDMSYSVAYSTFANISSENGQSGSETASGISSDDAGLETSSNMPERTATLLDLYSGCGGMSTGLCLGAALSGLKLETRWAVDLNSFACQSLKYNHPQTEVRNEKADEFLALLKEWAVLCEKYVHQDVDSNLAGSEDQEDADTLDKDEFVVQKLIGIRYDGTGRKKGVYFKVQWEEYGPEEDTWEPIDNLSDCPLKIREFVQEGRKRKILPLPGDVDVICGGPPCQGISGFNRFRNRDEPLKDEKNKQMVTFMDIVAYLKPKYVLMENVVDILKFADGYLGKYALSCLVAMKYQARLGMMVAGCYGLPQFRMRVFLWGALSSMVLPKYPLPTYDVVVRGGAPNAFSQCMVAYDETQRPSLKKALLLGDAFSDLPKVQNHQPNDVMEYGGSPKTEFQRYIRLGRKDMLDWSFGEGAGPDEGKLLDHQPLRLNNDDYERVKQIPVKKGANFRDLKGVRVGANNIVEWDPEIERVKLSSGKPLVPDYAMSFIKGKSLKPFGRLWWDETVPTVVTRAEPHNQVIIHPTQARVLTIRENARLQGFPDYYRLFGPIKEKYIQVGNAVAVPVARALGYCLGQAYLGESEGSDPLYQLPPSFTSVGGRTAGQARASPVGTPAGEVVEQ

SEQ ID NO: 363324 - protein, 52 aa, Zea mays
  Clone ID: MRT4577_94523C.1.pep
PPPSENALLLGKAIGGGLQKFSLCARTVIRSSPLIQEIHARFLRGSVNSQPD

SEQ ID NO: 363325 - protein, 72 aa, Zea mays
  Clone ID: MRT4577_94524C.1.pep
TIPSYPYFNIAANSLLNSSYLSSTRCLVHTSGVGSRSSSRRLCCFGELELDNDSAGAPQSECSYAARPLGTF

SEQ ID NO: 363326 - protein, 46 aa, Zea mays
  Clone ID: MRT4577_94525C.1.pep
LQLIGYLIYSVRKQNLARRHFIGLSTYDIPLITSEAYQVKGTSVNL

SEQ ID NO: 363327 - protein, 65 aa, Zea mays
  Clone ID: MRT4577_94526C.1.pep
PPGFDSRIAICRCAYLWASVWLCGADASLPPLVNTAAPGNVPQVWIVLFLDQNPAGPFKSLGIVN

SEQ ID NO: 363328 - protein, 56 aa, Zea mays
  unsure (1)..(56): unsure at all Xaa locations
  Clone ID: MRT4577_94527C.1.pep
VSSHVRPSHARPVRSQRXACEGGGSSWGSQXXLEGMXGLWXXWVLKGXQXLVDPLX

SEQ ID NO: 363329 - protein, 86 aa, Zea mays
  Clone ID: MRT4577_94528C.1.pep
GSTSLEPHPSNRRVPSCPWVAPASHGPPHLPAQVIPLCGRGYGEEAETATVGFSGHGRRRGRICCHLSLPSSSRAVLKPSDSVITR

SEQ ID NO: 363330 - protein, 94 aa, Zea mays
  unsure (1)..(94): unsure at all Xaa locations
  Clone ID: MRT4577_94529C.1.pep
DVFLSESPVTELDTRESTGEIIYETFNVPVLYVAXNXVLTLDAEYTTSIADMTGVDVDVSDGATHMVADPDGFDIXNKNNSIPTAVKDCTEFIH

SEQ ID NO: 363331 - protein, 89 aa, Zea mays
  unsure (1)..(89): unsure at all Xaa locations
  Clone ID: MRT4577_9452C.1.pep
SQGFGQSGYGGTSXSGFGGYGQSGIGHSSWSQGGYGHSGLGSYGQSGLGGYGQSDYGRNNFSSDWNDSYRGHSNWGGYGGSSNLGGYGG

SEQ ID NO: 363332 - protein, 75 aa, Zea mays
  Clone ID: MRT4577_94530C.1.pep
KRISNIISLFLIYSGLGDTIAESARALAQMLLRLRKPTRWTTGCFDINRGAQMQFRPAKGYRADLAVRSITNGED

SEQ ID NO: 363333 - protein, 68 aa, Zea mays
  unsure (1)..(68): unsure at all Xaa locations
  Clone ID: MRT4577_94531C.1.pep
LRDVFQWSRXKRPRPXRALGPPGFPLPPNQLEGLQDNLKREDVQGFQTGVWGAGKKNPLARVSFLLGK

SEQ ID NO: 363334 - protein, 68 aa, Zea mays
  unsure (1)..(68): unsure at all Xaa locations
  Clone ID: MRT4577_94532C.1.pep
IRDVFPWSRGKKALPXRALGSPGFPLPPDQLQVLPDNLKWEDVQWFQTGVWVVGKKYPLARVSFLLGK

SEQ ID NO: 363335 - protein, 40 aa, Zea mays
  Clone ID: MRT4577_94533C.1.pep
SPTRSPTRTPTRSRTHGSMKASECFGGYFSSDLSFLLPTL

SEQ ID NO: 363336 - protein, 116 aa, Zea mays
  Clone ID: MRT4577_94534C.1.pep
GAYPTTRPCRPVAPPLCLPLMLPTARARPYARASRGDDVRVRSGMRRSSWRAGLSTMSAAWLPADVRTPAATPAGAGGGSIAWLVVTSRSRGSATKTRVNLSALANYGQLCMFVCD

SEQ ID NO: 363337 - protein, 62 aa, Zea mays
  unsure (1)..(62): unsure at all Xaa locations
  Clone ID: MRT4577_94535C.1.pep
ITYVRFSHFLLAYNKYSIVSVYAKKLDLFYLVSKAFXNLHMRMYVXKTQVHYTPNRKRFISY

SEQ ID NO: 363338 - protein, 44 aa, Zea mays
  Clone ID: MRT4577_94536C.1.pep
WQNVYFVIQAYHEQLSARSAAANAEFQTPFAAAERVLNCYHQSE

SEQ ID NO: 363339 - protein, 79 aa, Zea mays
  Clone ID: MRT4577_94537C.1.pep
AYWQHAPLPSGGSLATPAMAPGPGLVDARPWRCSGRSRQHCGTPADVAGGAPYSRVLWGHCAHGGLLWSTRGITTAGIH

SEQ ID NO: 363340 - protein, 85 aa, Zea mays
  Clone ID: MRT4577_94538C.1.pep
MSKRGNNRYIKDRKQQQTNGTDNGGRTTTTDYKTKGGGGGGIHKPLKPQTQREGAQWGHAPLLGPNGARKSILTHGAAGQIWSRI

SEQ ID NO: 363341 - protein, 51 aa, Zea mays
  Clone ID: MRT4577_94539C.1.pep
YMKTLLPIQTNMLGLFLLGPTHQNKRGDLTITRAQNLCNFQSPLTQIYPTT

SEQ ID NO: 363342 - protein, 125 aa, Zea mays
  Clone ID: MRT4577_9453C.1.pep
SKNERSKCRKDASSSSRLSSSPLSDGERTTCSAAVVEKYDSGSHKNVPCPAPPLPLNPRRPCAYYCLVMSLQTWCVLVPRGHPLSFRACSFPLGASWYSLLKASESPLRTQISFQASSLCLPFPS

SEQ ID NO: 363343 - protein, 49 aa, Zea mays
  Clone ID: MRT4577_94540C.1.pep
FHVGPPVLWARHVPKAKADTSGVKVPHDPENHYGHELEYVMVDKIIQES

SEQ ID NO: 363344 - protein, 55 aa, Zea mays
  unsure (1)..(55): unsure at all Xaa locations
  Clone ID: MRT4577_94541C.1.pep
GNSCWTLMGTYRLGKDISCPKFXFSLLLHWLLCVLSTCLYAPTTWPPLRHKNLVP

SEQ ID NO: 363345 - protein, 53 aa, Zea mays
  Clone ID: MRT4577_94542C.1.pep
IISGILLLDNRELLIRYNLCFTTNRSCLRSPVTRELDRNFKNYELSSARPSCM

SEQ ID NO: 363346 - protein, 59 aa, Zea mays
  unsure (1)..(59): unsure at all Xaa locations
  Clone ID: MRT4577_94543C.1.pep
ELVFLQCPIKEWCHVSVALVVLHYFICCLTSTACSSFEVGPAGISKIFPPNSRIKKKKX

SEQ ID NO: 363347 - protein, 129 aa, Zea mays
  Clone ID: MRT4577_94544C.1.pep
QDLLLLHILYVYNYKNERDNNVGLQDNNLVVLVNFHIILHHLLIYDEISQVEVIGCHHGLDYLVVSYDNDIHYCEENHDQIGEVNLLVILLMNYYYYLLYLKSLLNNLKTLLTNLKILLRLPADRTAIE

SEQ ID NO: 363348 - protein, 598 aa, Zea mays
  unsure (1)..(598): unsure at all Xaa locations
  Clone ID: MRT4577_94545C.1.pep
GCTTNSLVHLTLRISELLHSLGQDVPGSGGSNWTDHETLLLLEALEIFKGKEWHEIAEHVATKTKEQCMLHFLQMPISEPFLDGDDFNETPQKITKQDSAETGPSDVPDKMDVDGNAEGKESTDEKXTRKQIPVPQKQEQNXDQNISAKEDTMKLGDDDLVASIVDEPNKSSLVDPAXIEEFCXADVSGEHPSNFITNILRSTFEAVDHFLGKEDMGSFAEAGNPVMALAAFLASLVERDDAVSSCCSSLRAISEMSPALQLATEHCFILPDPPSDLKDPASTFSPCAGGESQEGADTTQNVNDTDKNNSEREDSDLALEKESATFTSQKQHLEELSDAKETFIGGPEAEAKSNSTKDSDNPIAKVGSSVASDKMRDGCNANAIPCPATSNHTTEPSSVASQEASPASTKDTAIPEQVERPSSEELLADVSLPQGKVEPKKTEPAPAASSSIQQHGCKQAGNGNTEPKSKENAAADDDPITRLQRAAGTAISAAAVKAKFLVEQEEGYIRQLAALVIEKQFQKMETKMSFLTEVGNLVLRSRDLTERMRKKLLLERSMIIASRMGAAAASRTIQHGAPVTTRLPVGHVHALNPQLRRP

SEQ ID NO: 363349 - protein, 79 aa, Zea mays
  Clone ID: MRT4577_94546C.1.pep
KGENFFPLRQETTITGAGMQKKQTGSPTTEKLFIPKILKTSPRGPKCPCPQKGKQEKHKAYKRARKKNHPPWGERSFPI

SEQ ID NO: 363350 - protein, 83 aa, Zea mays
  unsure (1)..(83): unsure at all Xaa locations
  Clone ID: MRT4577_94547C.1.pep
PSRXDPANRPPNSTGPANTGRGPNSCYGPXIERPHGAGRGGAVPRHGVYPARGYAHLLAAHRLPRLPAILRRARSTTYSPTTS

SEQ ID NO: 363351 - protein, 243 aa, Zea mays
  unsure (1)..(243): unsure at all Xaa locations
  Clone ID: MRT4577_94548C.1.pep
DNSMAESTSDLHRXLATRDLEAAVAAWHSNFNRLIKYQRDYIRSLYGWLKLTLCQVDSSVPQEAHASMISRELTSFCDEWKQALDRLPDAVASEAIKSFVNVVHVIYTKQAEEMKIKKRAETYSKELEKKANSLRSIEKKYYQSYSMVGLGLPGSGXRDGIDSHAAYDARDPLAEKKTEIAQCRRKVEDEMTRHAKAVEVTRSTTLNNIQTGLPGIFQDIAGFSGGTVVEALDVVCRRAGSVR

SEQ ID NO: 363352 - protein, 116 aa, Zea mays
  Clone ID: MRT4577_94549C.1.pep
STAPGAMPLTKPLSSGSHYRVLGSLSRTLTLDAVGCQLTAQVFLHALLTSRQRPKTAHSSHTGLLGPIRPINLLVVPPRTRRPFDLSDVFFSLPDILLPLRRGLSPSLSSWKTLLD

SEQ ID NO: 363353 - protein, 51 aa, Zea mays
  Clone ID: MRT4577_9454C.1.pep
TSFPKNHLKDFGFCGFPLFLLVLCKPLFPNCFPGTPFQIFPTGGGPRIFFP

SEQ ID NO: 363354 - protein, 126 aa, Zea mays
  unsure (1)..(126): unsure at all Xaa locations
  Clone ID: MRT4577_94550C.1.pep
TLPPILPPPHQGTGNKQPPPHPQAIPIPQQAXNPRPTPFMTPPXPPPPNAQLPPTGTPPHTFSPPPPKFNPMHIYLHRPSLKKPLRYPTNPSGTQPPPASPHKRPESPTTRPGHQSPNLKEHTGLP

SEQ ID NO: 363355 - protein, 56 aa, Zea mays
  Clone ID: MRT4577_94551C.1.pep
FNGTPSFYPQLALSLMRLASEVSLLQTGRTPFSKNFFLGPLFYFPSFPKKDVLQDY

SEQ ID NO: 363356 - protein, 129 aa, Zea mays
  unsure (1)..(129): unsure at all Xaa locations
  Clone ID: MRT4577_94552C.1.pep
QARXPGGRERAAAXPARGAYLAGXGGAXXXAASXLPGAEXXXXRENXXXRDRSQRPXSRGGGEGXXQRTXXXAXKQGRKEXEXXXXTKXPXQRTPSHRQXQEEGXTXHKGKXTHWRGASTEKNPGQPQE

SEQ ID NO: 363357 - protein, 32 aa, Zea mays
  Clone ID: MRT4577_94553C.1.pep
ALDTQCPYIRVCLQNRALPRRDIGMRSYRRLN

SEQ ID NO: 363358 - protein, 63 aa, Zea mays
  Clone ID: MRT4577_94554C.1.pep
IRVSEGSYYLLIPRPGKVGCRKKIISSARSGRVVRRLRYQFAEEINFWRQRLRPYSNQQVNLT

SEQ ID NO: 363359 - protein, 109 aa, Zea mays
  Clone ID: MRT4577_94555C.1.pep
LKVLWPATCCLLRPPQGRPPARVFLATPLLRSPTYIASPLAPPQTINVFSAELESLPDQFEEGETDDEGGHLCAAQLRPPMEEVREDKDQQHQLPQVLLQMHVQGQHEL

SEQ ID NO: 363360 - protein, 78 aa, Zea mays
  Clone ID: MRT4577_94556C.1.pep
KRNHRRCVLTVLPDYGQSGAMVVDEAVVNLGTESEELETNRILPNSSSVSGNLAAVPRGIVGGTRKLHNPRSRTSTPG

SEQ ID NO: 363361 - protein, 65 aa, Zea mays
  Clone ID: MRT4577_94557C.1.pep
RTRGARNGSYHASTSKTTIRKDSSRGPIGNKPPFKDSNDATLRKSRGSLKAPFLKEWQTKILAKA

SEQ ID NO: 363362 - protein, 185 aa, Zea mays
  unsure (1)..(185): unsure at all Xaa locations
  Clone ID: MRT4577_94558C.1.pep
MNYEDMDAHKAKFKDNRKEYGVVVMCDSWTDNGSNXKKACRQLITRYTHITWQPCAAHTINLMLKDISRFSEVSEVVDDAKRICRFFYNHNXLHAMMREKIGGELIRWNATRFGTVFIFLXDILXRQDKFMQWMVSDDWKNNTWKDEVDHAFTYDCLTNRRWWSDMELVLKXVTPIYRKKKKKKR

SEQ ID NO: 363363 - protein, 226 aa, Zea mays
  Clone ID: MRT4577_94559C.1.pep
MLPDDCCHIVAEEISSPIAAHILDFYYGDDGLGDDLFAAVTATSGPFPATDDDVSSSTATTPPICGYSEDTAAAGGATAYTPLTSFDTTLTALLEEEQHHGLDAGFLPQIDGLSEVAAYYPTATDEASIGQFDQMGLPETLDEQVPPPVQMSSSASALMPLATDYDECFMAAVAAGGFMGLDGAMYQQTGAVLPGCSADASQQEFFSSAGSNSMVMIGEYQKMMGR

SEQ ID NO: 363364 - protein, 93 aa, Zea mays
  Clone ID: MRT4577_9455C.1.pep
AANERGPEQAEVLLGGASFVSLAAVALLTALQLIWLRWRSARHGDFPDVLHEHGIIIVKTLHTSKAMYDSNLAPHLTQGSHWLSEPCVSGRMT

SEQ ID NO: 363365 - protein, 128 aa, Zea mays
  unsure (1)..(128): unsure at all Xaa locations
  Clone ID: MRT4577_94560C.1.pep
PRVRYAVRHCRVRSELLALGIRQRYTLADAHHAYAESLRAVGALLHDFLRGVQSLPPXXAEPALXXPQQRKGDGLPAASPPAAMACSSGAGDAPAVAKQVRIAPDDGHIQFDGDSDSEDGHIKFHSDE

SEQ ID NO: 363366 - protein, 74 aa, Zea mays
  Clone ID: MRT4577_94561C.1.pep
LRGNHYRGHLSYILGTKRHINGKNISCLRSENNAAFTFWKGFFKSLNKFPPKNYQWLTLIFPESQPPPTFNYLT

SEQ ID NO: 363367 - protein, 55 aa, Zea mays
  unsure (1)..(55): unsure at all Xaa locations
  Clone ID: MRT4577_94562C.1.pep
SNLMTVFIQECESPLQYSEYNYLGQHFSKAHFTYSGKEMRPSLLVSNSIXNSDGA

SEQ ID NO: 363368 - protein, 210 aa, Zea mays
  Clone ID: MRT4577_94563C.1.pep
MADSGALVVTEARQQHPLSQIAASGTHRLLLKQWVKEEDLLARRVALREARLDGAHTEIAFLYCAFFAFHAASVLLLFLSSSSSVAASAAATTACRRSWIPCLVSLLSSLAMLWALWYKSDTEAVLERVLAREREDALYLARCVSELKRKGLRFDLLKEVDTLRRAKNLRAEAKGAADRPRRWQTRDLAVFALFAAACGVLVLTRFLLCN

SEQ ID NO: 363369 - protein, 38 aa, Zea mays
  Clone ID: MRT4577_94564C.1.pep
IFPMFKKHTIINLCSNDISINHFCNHIHHGLCYTCCPL

SEQ ID NO: 363370 - protein, 110 aa, Zea mays
  Clone ID: MRT4577_94565C.1.pep
AELVGTWGHAAQCYILLQKPMPSVILAFPFFLINFRAHLGATISGIFFGYLTCPSVEFDNSAKNGQKEAVALIRQQAHPCKSAAVFFITILAFAVLAFAYGTQFNNMDLE

SEQ ID NO: 363371 - protein, 62 aa, Zea mays
  Clone ID: MRT4577_94566C.1.pep
RPGGRARRHRPQARQEVPPPRSRQFIHFFSYGGGEELTKASRTIMCSCFSDGNCWRLISCFV

SEQ ID NO: 363372 - protein, 54 aa, Zea mays
  Clone ID: MRT4577_94567C.1.pep
KFGSCHPCIKKGLFFWDSQQYMGLDLSSLVWLANKHPFSSKCRGSFRRLMSING

SEQ ID NO: 363373 - protein, 92 aa, Zea mays
  Clone ID: MRT4577_94568C.1.pep
FYPDSGPRSTPQRALMRFIMLWGAVASFSRKETCRLCSVSKTHANSREERICEGVYVETLKTDCGRYSHILCVSSVGGVTVITRDSGTRVFP

SEQ ID NO: 363374 - protein, 62 aa, Zea mays
  Clone ID: MRT4577_94569C.1.pep
MGKVHGSLARAGKVKSQTPKVEPQEKKKTPKGRAKKRLTYTRRFVNVTMTGGKRKMNPNPTS

SEQ ID NO: 363375 - protein, 99 aa, Zea mays
  Clone ID: MRT4577_9456C.1.pep
LYCLISPYPGSCPCACPCTDCTQPRGCASGTVDPHSLFAQWHASTWRLPSPPPIVASPTPALCSNYITQLLLLLRPRVLFSLGNFMKSPTQKIKKDWVW

SEQ ID NO: 363376 - protein, 162 aa, Zea mays
  unsure (1)..(162): unsure at all Xaa locations
  Clone ID: MRT4577_94570C.1.pep
MESEIIRSPKKSDTWNTGRSNESPWDNTDAPQDSWVKSAARNNNTQDGSWDKVVSMKDLDSLQDSWSKATIQTNDAQNDSWDNVAKNAPDSAAEDSWGAATPAETTDSGNKEWKSDGWGAKSGNWSSQRNNPGRPPRRPDEKGSTSTKTTVRTNSXRRRTFF

SEQ ID NO: 363377 - protein, 68 aa, Zea mays
  unsure (1)..(68): unsure at all Xaa locations
  Clone ID: MRT4577_94571C.1.pep
LPGSGPTPSXDHXXSPKLGPATGXXRCHXXHLWLWRLARAHDPARPGTQXXPWXDXXAXRWGAAXEAR

SEQ ID NO: 363378 - protein, 126 aa, Zea mays
  Clone ID: MRT4577_94572C.1.pep
DETAVEPEEDASPADPDAMDVDMPPPAKPSKSSSNIYQPPDIPANPQFPFFTQTVSLYEPLFPIGWAQPVTSCQQQHLSHLRNKYVPSLRGVLLDYKNVAFGENPGRKGAATDDESPATVMANGES

SEQ ID NO: 363379 - protein, 45 aa, Zea mays
  Clone ID: MRT4577_94573C.1.pep
MAEAVLRVARRQLSQRGGSGSPILLRQMFEPVSCTFTYLLGDRES

SEQ ID NO: 363380 - protein, 44 aa, Zea mays
  Clone ID: MRT4577_94574C.1.pep
KSVRLPSVFPLLGLYICSWWEARFKYKTNFLMSRSFTRSTVVLY

SEQ ID NO: 363381 - protein, 80 aa, Zea mays
  unsure (1)..(80): unsure at all Xaa locations
  Clone ID: MRT4577_94575C.1.pep
LILPTPQPTNTKTTNLTLLTKTHTTQPTSXPPYKHNAHXHARDLAPAAALGFRSAGHGAERDLYLKGRMEPXNXDXYCRR

SEQ ID NO: 363382 - protein, 89 aa, Zea mays
  unsure (1)..(89): unsure at all Xaa locations
  Clone ID: MRT4577_94576C.1.pep
PKGRGGSTGXEKAVALPPEGKGYKKELPKKAFKNPAPSPGNITLRVPKSNPKTGKVIGVFKRVHPSDTDLGAKAPKDVKIQGVWYAQPE

SEQ ID NO: 363383 - protein, 152 aa, Zea mays
  Clone ID: MRT4577_94577C.1.pep
YLPFFFFFFGGFFLTLRRVFNPGLRKQETYVHGAHGAPPKKENPREAKQKKKKTPPHSKGGDQKENTTYNPPPKPGKAKPPAQGTKKTTWASNFPTTTGAKPKLGAKQKRPSWGPPPLARNKGPAQTGHKTGRDPAKTKGGPIATKGKAQPP

SEQ ID NO: 363384 - protein, 43 aa, Zea mays
  Clone ID: MRT4577_94578C.1.pep
TGRTDNAVIHRLSVGSTVCLITMQTLLQQSSPLKRCADPAGVG

SEQ ID NO: 363385 - protein, 59 aa, Zea mays
  Clone ID: MRT4577_94579C.1.pep
DTNPLVFRVYPFKENSVSKVMVLVKHQLSLAADLGLSPETKFTVFGSDSLDGVQMVRAL

SEQ ID NO: 363386 - protein, 93 aa, Zea mays
  unsure (1)..(93): unsure at all Xaa locations
  Clone ID: MRT4577_9457C.1.pep
PXGSSKWGWPLDRFVRRQEGAGHDPGVRLIFSHLAVSLGVVVDGGGQCGASKGAARTASDRRPGLAAAERPGLVPLSCWNGLGCVARYGEAGL

SEQ ID NO: 363387 - protein, 118 aa, Zea mays
  unsure (1)..(118): unsure at all Xaa locations
  Clone ID: MRT4577_94580C.1.pep
AVRPEFRVAQRRPRFELAAPEPLENQPAANQPAEPRTGRALARQATCATHVKSGASPRSXAPVLQRGQPLAARTPPPSRVCQVFPAASYDNMHRARPPACREHPCGAARGGFLLLLRR

SEQ ID NO: 363388 - protein, 415 aa, Zea mays
  Clone ID: MRT4577_94581C.1.pep
EKQVKEKLYYWLIHKIHDDGKGPNVLGKEGQGAIHLVAALGYDWAIKPIVAAGVNINFRDIRGWTALHWAACCGRERTVGALIASGAASGALTDPTQQYPSGRTPADLASENGHKGIAGFLAESALTSHLSALTLKESPSGNVEEICGLTAAEGFAASSSSQLACVNSQEESLKDSLGAVRKSTQAAARIFQAFRVESFHIRLEIEYGDDDCGLSDERTLSLVSLRNPKSGHGDSHSAAVRIQNKFRGWKGRKEFMLIRQKIVKIQAHVRGHQVRKNYRKVVWSVGIVEKVILRWRRKGRGLRGFQPEKQLEGPSWQIQPAKAEAEDEYDFLKDGRKQATGRLDRALARVRSMNQYPEARDQYRRLQACVNSLRESQAMQDRMLADSAGTDGGDFMTELEELCRDDGDAPMSTIS

SEQ ID NO: 363389 - protein, 96 aa, Zea mays
  unsure (1)..(96): unsure at all Xaa locations
  Clone ID: MRT4577_94582C.1.pep
PLGEGFVIRPPSRGNPGNPSIELGPEFKKGANFLGRVKAPPPKVELSSLKGFGEVWFGSGIPPKGKGAIFPQPGGKLGIPKGEGLXNKEVNGPEGF

SEQ ID NO: 363390 - protein, 69 aa, Zea mays
  unsure (1)..(69): unsure at all Xaa locations
  Clone ID: MRT4577_94583C.1.pep
GIPGCDATPVRLDSSATTTLXPAIVRSPPSAVEQXISVGSXXRKVPRMSPHQECPAYIGIPRQXVFPCC

SEQ ID NO: 363391 - protein, 64 aa, Zea mays
  Clone ID: MRT4577_94584C.1.pep
PNLNRSAGGAAAPHTHNDVHTKPSRPLELSLRYYCSHPPLLQNADSHRTTTGPPLTTTEPCWQQ

SEQ ID NO: 363392 - protein, 92 aa, Zea mays
  unsure (1)..(92): unsure at all Xaa locations
  Clone ID: MRT4577_94585C.1.pep
APSLLKGPSCSLLHGTQRGXPHVSQKPSYQPRQIVLDPSSKLFLFFFFSTRFKPFFSKFVFLFFFFFFFQYTVSVSVKIDDTVFVHWTFTSY

SEQ ID NO: 363393 - protein, 48 aa, Zea mays
  unsure (1)..(48): unsure at all Xaa locations
  Clone ID: MRT4577_94586C.1.pep
CMLKXRVKLKMVWXTVTLAWSFWAANPLIRAAVNPKKKALALYPVFLM

SEQ ID NO: 363394 - protein, 136 aa, Zea mays
  unsure (1)..(136): unsure at all Xaa locations
  Clone ID: MRT4577_94587C.1.pep
YLGLHCCSIVATCVANATIFLNCXQAPIASFFPQYFPSIIASVCENQALKPYRLKQAIAASNIPLSPLLCQQSPALSLVQSLVQTISTQHVETLALRDINQASGANLSYYSQQQLFLLYKQLTMLNAAYYMQQLLP

SEQ ID NO: 363395 - protein, 46 aa, Zea mays
  Clone ID: MRT4577_94588C.1.pep
TGADFRDQSGPCRPTEYATYVINPNLILVSNQACVYTDNSRYRIST

SEQ ID NO: 363396 - protein, 65 aa, Zea mays
  Clone ID: MRT4577_94589C.1.pep
VLDRGRPSWSFFANDRLLATDGFFFGVTGIKLIGRGLTTSGLGKPCRNLTYSLCFTSPFLWWGNF

SEQ ID NO: 363397 - protein, 69 aa, Zea mays
  Clone ID: MRT4577_9458C.1.pep
GYVRLLADVVRSVSQRRRALQRHVHAVRAVFALEVCAIQDGLPFSDKHQVWVQVVPSGVQLGVRGGVRN

SEQ ID NO: 363398 - protein, 84 aa, Zea mays
  Clone ID: MRT4577_94590C.1.pep
HHFPPSGCQPQHFAAAGLSPLTLLLQLPHPSPKTSGQSQVSNPPPFAHTPHLPTPRAELASCSLSLFHRTEPKRPHMSHCCSFA

SEQ ID NO: 363399 - protein, 44 aa, Zea mays
  Clone ID: MRT4577_94591C.1.pep
ISSALLSKGSYMDCSSHGTMLSAMISSTDMLLYSNRPSKILLEV

SEQ ID NO: 363400 - protein, 143 aa, Zea mays
  unsure (1)..(143): unsure at all Xaa locations
  Clone ID: MRT4577_94592C.1.pep
MAMAALRETSRCLASRGRSAAWRPVLLAQSRGITYKLFVGGLSQFATEASLAEAFSRYGQLLXSRASFLSAATVVRDKVTDVPKGFGFVKFASPEEANNAREEMNGKALNGRVIYVDIAKARQDRAADALPIARGPPKPISND

SEQ ID NO: 363401 - protein, 61 aa, Zea mays
  unsure (1)..(61): unsure at all Xaa locations
  Clone ID: MRT4577_94593C.1.pep
PRTWTRSGRRSPCFSGAFRRTXRRRXXXPAAPGRPCSANHQRRHSHRXXSSSPSHQPTALV

SEQ ID NO: 363402 - protein, 44 aa, Zea mays
  Clone ID: MRT4577_94594C.1.pep
VPPPRGQWKFWLMDPLIEVSIFSPSNEKKLPGFRPYPSSHMFVN

SEQ ID NO: 363403 - protein, 85 aa, Zea mays
  Clone ID: MRT4577_94595C.1.pep
AFLLVSPQNDAPRDGRARHRDRAEGGYGGDQTRLPPMLHVTDGHALEDVDDAHHDDGVTDRAGAGGTGHSALEVLLRHSGGARRS

SEQ ID NO: 363404 - protein, 94 aa, Zea mays
  Clone ID: MRT4577_94596C.1.pep
SYFIRGFQKDRYRGPARRGGGAQKRGSNFFFLNETKYMLFLKSFKGRLKLLPRFGLFGGVDKTGNFFVNNPSRAPKKFGGDDRHPLPGGILPIL

SEQ ID NO: 363405 - protein, 80 aa, Zea mays
  Clone ID: MRT4577_94597C.1.pep
VAASSTPRPCRGSTPRGVNGSRNSHDRRRRPGAPGRGGGVCNWVGVVHQLLQGALSAGLPSMLALVTSFRGSVTLNSSSG

SEQ ID NO: 363406 - protein, 120 aa, Zea mays
  unsure (1)..(120): unsure at all Xaa locations
  Clone ID: MRT4577_94598C.1.pep
KRFNPVQVAIISXRHVDPYQSPALSKRYLFPTNAARLPGFXACVESGXTQVLPECDSDXSVEMILTTEIGIGDLSTKTLTSAHGANFTYDILLIATGSSVILIIDFGTQRAKSRNILYQT

SEQ ID NO: 363407 - protein, 43 aa, Zea mays
  Clone ID: MRT4577_94599C.1.pep
QIFILVFFLKLLLLLLDFNYQKSRQYKLNIRTFVLWFNTFSKC

SEQ ID NO: 363408 - protein, 36 aa, Zea mays
  Clone ID: MRT4577_9459C.1.pep
KISFPWDPPWEGNLILFYSWGIFNLIKCPKSALPLG

SEQ ID NO: 363409 - protein, 55 aa, Zea mays
  Clone ID: MRT4577_945C.1.pep
IECSLSVLLIMCHSIDYTSDVNDNQSNFFGENSHGMISKFKVIKYKRVYYIWLVF

SEQ ID NO: 363410 - protein, 85 aa, Zea mays
  Clone ID: MRT4577_94600C.1.pep
KGPPGGGTRTRKFSPLGQGFPPLKVFPFKNRGPPKRVGGFFFKLRIRTLPYPTGGGGFFFFFFFFFFFFFFFFNRTRPYDATAPG

SEQ ID NO: 363411 - protein, 133 aa, Zea mays
  Clone ID: MRT4577_94601C.1.pep
RPKHAPRPGQSRRHHRARDDTAGRGTALGAGAPTKAACRSGRRAPGRCRSEPQARGGQGRAPGGRDRRQVDLARGLVGAAAGGDHRLRFAARGGRAQPRRTRSTAGPRGSRRHARSTPASRCRSWPWAWAPPP

SEQ ID NO: 363412 - protein, 169 aa, Zea mays
  Clone ID: MRT4577_94602C.1.pep
KSTNILLDEDYEAKIADFGIAKVAEDSSDSEFSCFAGTHGYLAPELAYSLKVTEKTDVYSFGVVLLELVTGRSPIDPRFGEGRDIVFWLSSKLASESLHDVLDPRVAVLPRERDDMLKVLKIAVLCTAKLPAGRPTMRDVVKMLTDAGTGPCSPRGQPPSRVCSNKSCC

SEQ ID NO: 363413 - protein, 158 aa, Zea mays
  Clone ID: MRT4577_94603C.1.pep
MAAPPPILELDPSHDRAVSVVEDIVRLERRIFPKHESLARSLHDELKRRNSGLIYKTSSADEGEVIGYAMYTCNTSLCATITKLAVKENCRRQGHGEALLAGAVERCRRRKVQRLSLHVDPTRTAAVALYRKAGFQVDTTVEGYYAPHRDAYRMFLDL

SEQ ID NO: 363414 - protein, 91 aa, Zea mays
  Clone ID: MRT4577_94604C.1.pep
PRARKAQMKGPLKDLPGCPREGQKGISPHPGPGGRRATWPPSEGSPNAPEFSAAEQCPPSNSEKQKGDRKELVTKLIVSEIISPAERLKHF

SEQ ID NO: 363415 - protein, 53 aa, Zea mays
  Clone ID: MRT4577_94605C.1.pep
KIHHSSVLMTKAHNANVGSEGKYSSPAYVRKCGVLSRKCNKHNHRSLLTPRKK

SEQ ID NO: 363416 - protein, 60 aa, Zea mays
  Clone ID: MRT4577_94606C.1.pep
WQELCLSIKKNRIDPVLRKTGPKTYTGRTVEKPVKALTNHLDNSSLTHTNKPSTLRCYHC

SEQ ID NO: 363417 - protein, 66 aa, Zea mays
  Clone ID: MRT4577_94607C.1.pep
GRGLCSFADLWPSLRHGGLLRRRVVYWVGVMIFGPSDRKYTIRIDSSIATQPKPWGLVRSESMGHD

SEQ ID NO: 363418 - protein, 72 aa, Zea mays
  Clone ID: MRT4577_94608C.1.pep
PPIHNLRQQANFNQHQFSNQFNHNHHHNNRNNNIMPFLHNQNDPVQQNAISPPLNHQLSRTPMQTPQQINDP

SEQ ID NO: 363419 - protein, 84 aa, Zea mays
  Clone ID: MRT4577_94609C.1.pep
ARKFLSCHSDQSSFEGHTHFILMTLNRSPPHHINTSLQRVGTGRQSSYTNTMIRHLAFIRFTTISLLGDHHLSFKPTTRKMTST

SEQ ID NO: 363420 - protein, 167 aa, Zea mays
  Clone ID: MRT4577_9460C.1.pep
MGQSIRTTGKDANPEYFFQAYYRQVPGCFHTLLSEWRDIDLTGRFNDLLPYDADWDYITNASFGQTIYLKQRIEVFGFHKILYSAPRSNCTAALAPTPILSYQSGRDAFVATVTAVACPSSVSTIHACIHPMHHPKGATPSPPAPKGSTALRACTSLMTKRQRVICL

SEQ ID NO: 363421 - protein, 207 aa, Zea mays
  unsure (1)..(207): unsure at all Xaa locations
  Clone ID: MRT4577_94610C.1.pep
GYPRSLAGVRIPAIAGGDXRPVASSLSTAATAAAISFTAGTHWKRKKTPRSKPATASPQAGEAAEDDEDIGRIICDCIGDDFSNYNRAIVETVQTGYGLAEVIYAVLNNGVQGRVAVKLAXAGVQSRXEDATAILGRIVARSKLFDVGCVLFYKEGDNGVSVXTGGLIQLAREALAVPLHMPLTIKLDLHRCSGDENGGGVLEFNPA

SEQ ID NO: 363422 - protein, 111 aa, Zea mays
  Clone ID: MRT4577_94611C.1.pep
MRFTAIVAASLACASSVSAFFPFDFGSFGNPFGAQMSGCGNQAGMVNVGALNYNNCGFGPGVSGLGGMSCGNQAGFINVGLLNSNSCAGMGAGAPGTYFSKNDDIKADHTA

SEQ ID NO: 363423 - protein, 201 aa, Zea mays
  unsure (1)..(201): unsure at all Xaa locations
  Clone ID: MRT4577_94612C.1.pep
LGHXMATSAESPIAFTFYLHDGSPQAGEAAEDDEDIGRIICDCIGDDFSNYNRAIVETVQMGYGLAEVIYAVLNNGVQGRVAVKLAXAGVQSRXEDATAILGRIVARSKLFDVGCVLFYKEGDNGVSVRPGGLIQLAREALAVPLHMPLTIELDLHRCSGDEIVGGVLEFNPAIDGQHTERLVGQNGAELEVAISWSEYPW

SEQ ID NO: 363424 - protein, 73 aa, Zea mays
  Clone ID: MRT4577_94613C.1.pep
HRRVESTPFVYLSALLSVVVSPPKQYPFYVPEFMYVSSYEYQLYSAHQSDYNLRTIERDSLLSIKICLFNLKS

SEQ ID NO: 363425 - protein, 164 aa, Zea mays
  unsure (1)..(164): unsure at all Xaa locations
  Clone ID: MRT4577_94614C.1.pep
ARSCRAVVSVVVAVVVGAAATAXPTDEQLLAYAELPKHGRDMAEVFAVRIPATVGGNXRPVAASFSTAATAAAISFTAGVHWKRKKTPRSKSATARVTSCXTGPSLATSAYSPIAFFLYLHDGSPQAGEATEDDEDIGRILCDCIGDDFSTXHRPIVETVQTGY

SEQ ID NO: 363426 - protein, 289 aa, Zea mays
  unsure (1)..(289): unsure at all Xaa locations
  Clone ID: MRT4577_94615C.1.pep
MAAATGYSDAPTDEQLLAYSELPIHGRDMAEVFAVRIPATAGGDXRPVASSLSTAATAAAISFTAGTHWKRKKTPRSKPATARVTSCXTGPSLATSADSPIAFTFYLHDGSPQAGEAAEDDEDIGRIICDCIGDDFSNYNRAIVETVQTGYGPAEVIYAVLSNGVQGRVAVKLAXAGVQSXEEDATAILGRIVARSKLFDVGCVLFYKEGDNGVSVRPGXLIQLAREALAVPLHMPLTIELDLHRCSGDEIVGGVLEFNPATNGQHTERLVGENGAELEVAISWSQYPW

SEQ ID NO: 363427 - protein, 45 aa, Zea mays
  Clone ID: MRT4577_94616C.1.pep
MDTGRKRIAPGGANGAGGPKRARESETTQMGVGSKTKPCTKFFRF

SEQ ID NO: 363428 - protein, 72 aa, Zea mays
  Clone ID: MRT4577_94617C.1.pep
KQKRQILSKLKHGYAGNTSITLFILRKLDGHHMFQRSSPPTIAHMTLPSRGLYCSQKQLWIICSQSRTRTSY

SEQ ID NO: 363429 - protein, 47 aa, Zea mays
  Clone ID: MRT4577_94618C.1.pep
GPVWTAPAPENSVELVEQVIRCSIKSWSWSCKPSEDILSLISHAPAV

SEQ ID NO: 363430 - protein, 95 aa, Zea mays
  unsure (1)..(95): unsure at all Xaa locations
  Clone ID: MRT4577_94619C.1.pep
KDEFLSYEDRTTRFFPXPPPVMPRIGGLRSGDTGLADENEEAIPEFSSASCQRFNILCSGGKDGCVCFSVFGIFPVGKILYAFEISEHNNPNQCW

SEQ ID NO: 363431 - protein, 107 aa, Zea mays
  unsure (1)..(107): unsure at all Xaa locations
  Clone ID: MRT4577_9461C.1.pep
GVYYSGGGMATPGYAGVVPYGMSQVNIXGNWCGRALSTXPTGKVYWRANPNYAMSVLDRKVVLAPANPKDEYQHWIKDMRGSTSIKDQEGYPAFALVNKANGEAIKH

SEQ ID NO: 363432 - protein, 34 aa, Zea mays
  Clone ID: MRT4577_94620C.1.pep
LVMVMHCILLWRCSCNSDLLLASITDDTQCYSCP

SEQ ID NO: 363433 - protein, 542 aa, Zea mays
  Clone ID: MRT4577_94621C.1.pep
MAAAQGGTVVCSSEKVEFLKLQNGSDIRGVAVAGVEGEPVNLTEDVTKAIAAAFAAWLLNKKPDGWRLLRISVGHDSRISAHKLQNAVTHGITAAGHDILQFGLASTPAMFNSTLTEDERSHLPVDGAIMITASHLPYNRNGLKFFTSDGGLNKADIKDILERASKIYEESAHNNLKEQGEASKGVVTNVDYMSIYASDLVQAVRKSAGDKEKPLEELHIVVDAGNGAGGFFVDKVLKPLGAVTTGSQFLEPDGLFPNHIPNPEDKTAMKFITQAVLDNKADLGIIFDTDVDRSAAVDSRGRELNRNRLIALMAAIVLEEHPGTTVVTDSVTSDGLTVFIENKLGGKHHRFKRGYKNVIDEAIRLNSIGEESHLAMETSGHGALKENHWLDDGAYLMVKLLNKLAAARTLGSSIGSKVLTDLVEGLEEADVTVEIRLKIDQNHADLKGGSFRDYGESVLRHLENAISKDPNLHKAPVNHEGVRVSGYGGWFLLRLSLHDPVLPLNIEAQSNDDAIKLGLAVLAAVNEFPALDVTALNKFVHQ

SEQ ID NO: 363434 - protein, 52 aa, Zea mays
  Clone ID: MRT4577_94622C.1.pep
SASMALSLSLAPGPRMRGTLILSCRSKKFPLWYYSSQSVERARGEDRISGRS

SEQ ID NO: 363435 - protein, 205 aa, Zea mays
  unsure (1)..(205): unsure at all Xaa locations
  Clone ID: MRT4577_94623C.1.pep
GGTLRAGRAKKVEFLKLXNGSDIRGVAVARIEGEPVNLTEDVTKAIAAAFAAWLLIKKPDDLRRLRISVGHDSXISAHKLQNPVTHGITAARHDILQFGLASTPAMFNSTLTEDESSHLPVVGVIMMTYYSVKGRFQEWWIEEKVKLSSKFVRCSIEGFNQRLSSFLQILSQVDYAAPYSSSSIHAASTTCVDPDDLSFYARHLR

SEQ ID NO: 363436 - protein, 615 aa, Zea mays
  Clone ID: MRT4577_94624C.1.pep
MAALSAKTIQNAFLAQHTRNRHGARYPSDFCSLNTRSMHSVQECRLAVADSSAKWLNTTSTLWTSFNKQADISCNAAQGGTVVCSSEKVEFLKLQNGSDIRGVAVAGVEGEPVNLTEDVTKAIAAAFAAWLLNKKPDGWRLLRISVGHDSRISAHKLQNAVTHGITAAGHDILQFGLASTPAMFNSTLTEDERSHLPVDGAIMITASHLPYNRNGLKFFTSDGGLNKADIKDILERASKIYEESAHNNLKEQGEASKGVVTNVDYMSIYASDLVQAVRKSAGDKEKPLEELHIVVDAGNGAGGFFVDKVLKPLGAVTTGSQFLEPDGLFPNHIPNPEDKTAMKFITQAVLDNKADLGIIFDTDVDRSAAVDSRGRELNRNRLIALMAAIVLEEHPGTTVVTDSVTSDGLTVFIENKLGGKHHRFKRGYKNVIDEAIRLNSIGEESHLAMETSGHGALKENHWLDDGAYLMVKLLNKLAAARTLGSSIGSKVLTDLVEGLEEADVTVEIRLKIDQNHADLKGGSFRDYGESVLRHLENAISKDPNLRKAPVNHEGVRVSGYGGWFLLRLSLHDPVLPLNIEAQSNDDAIKLGLAVLAAVNEFPALDVTALNKFVHQ

SEQ ID NO: 363437 - protein, 161 aa, Zea mays
  Clone ID: MRT4577_94625C.1.pep
MAAYEKQRPEAPMNAAYYGQPIRPLQPPYYPPPPPPPPPPQGPPPPRPVPRLGGGPRCLLGFLVTLIVAIGVATLVLRLISRPYSLKAYADSAALSRFDLGSGSSGGGDDLLQYNLTVDIRLRNPSRFGVRCDYAEAQGFYGGDRFGFDPLATFYLDGKSD

SEQ ID NO: 363438 - protein, 119 aa, Zea mays
  Clone ID: MRT4577_94626C.1.pep
PAGLRALATQRRTVSAAALPPLRVSASIIHRPAASTALRVCRTKHQIYRPPLCIGLRGLGSATRLRTGDSTPATRPASIHRTAFWTSAPTPASASCSSVPTTSLQTDPARKVTIEDQPH

SEQ ID NO: 363439 - protein, 164 aa, Zea mays
  unsure (1)..(164): unsure at all Xaa locations
  Clone ID: MRT4577_94627C.1.pep
RTTKEHHFESNAYAVASKNYXANXGYLSDKNGXLVIKNXRPCILRHGTTSTSVTFDHCIRHFGFIDILPVKKLEXLTPSXINCEIPHSNRTDLXLIDISEYGFSILSTSYXNTNDDLRLPTDDTLVCLIKELLKNINNLDVTVQSAMLDEHICAIDDDDPQQLP

SEQ ID NO: 363440 - protein, 79 aa, Zea mays
  Clone ID: MRT4577_94628C.1.pep
AHIDEHPAAERLFLAAYSWQPGCLVPAAVVINTIVPEPCYVNITKVRADKGYKSMCFLCAKMLNFHTFGWYIPLVFNSS

SEQ ID NO: 363441 - protein, 62 aa, Zea mays
  Clone ID: MRT4577_94629C.1.pep
MVLLVDSPIELQRSILRTMPSSILVIVCCTGTTLIVQLIPVSFDTLKRPLTCSCVSPQASPL

SEQ ID NO: 363442 - protein, 85 aa, Zea mays
  unsure (1)..(85): unsure at all Xaa locations
  Clone ID: MRT4577_9462C.1.pep
FNRKXNYGRVTTPGLQEYIGVVVSAWFPVQARVSGCKIVIPIFWLYGLLSVFGEYHISKGHQDVFKYPCNCHAVDALTPRALCKA

SEQ ID NO: 363443 - protein, 40 aa, Zea mays
  unsure (1)..(40): unsure at all Xaa locations
  Clone ID: MRT4577_94630C.1.pep
TQSKPXNMCPPQFSTWGGSTQSSGRGCFVPPRRTQRSSRA

SEQ ID NO: 363444 - protein, 100 aa, Zea mays
  Clone ID: MRT4577_94631C.1.pep
GGGPAMLESTLVAINEPARCMGCTSRIFWAFFWVPLSTTSSNGASPDQRTFVIITAGLGGRRRQQIGTEGGRQTPRPEREAKGECHRPHLDMSVCHPRKG

SEQ ID NO: 363445 - protein, 65 aa, Zea mays
  Clone ID: MRT4577_94632C.1.pep
AFGQDITILGARISHLALACHFEDEVVLPVQSPPVKSHSAEAPPASPRFTLFLIPRRLFICPKGL

SEQ ID NO: 363446 - protein, 175 aa, Zea mays
  unsure (1)..(175): unsure at all Xaa locations
  Clone ID: MRT4577_94633C.1.pep
RGRPGTHQRSIESPRTINNIIMNLLGKLAPLILFMVGTASCALTPEKLEISAAFPSDNQFGIVFNGQPNKILLKVLNLGSDPVGDVMRIHQVWHEFREIGGKERLLRKGVPVPSKRLLPPKLEPYIIPFMFSAEEREGNLGLRVWVEWSGPQGKKHRSMAYDSTITIKEPPTXVV

SEQ ID NO: 363447 - protein, 63 aa, Zea mays
  Clone ID: MRT4577_94634C.1.pep
VDATRPGNYWQPKCAEPWVEVKFEDDKHGKVHVVASTLIRLTNKPNVTIEDIGSPERLISLLG

SEQ ID NO: 363448 - protein, 48 aa, Zea mays
  Clone ID: MRT4577_94635C.1.pep
FPPPPPPPPVPPPPPPPPPPPPPPPPPPPPPPPPPPPPPPPPRDWWSC

SEQ ID NO: 363449 - protein, 44 aa, Zea mays
  Clone ID: MRT4577_94636C.1.pep
YYRAYIERCPVQLSYHSQVNICIAGPVTFKFVYLILLYRVVATP

SEQ ID NO: 363450 - protein, 53 aa, Zea mays
  Clone ID: MRT4577_94637C.1.pep
DIHKGCFSLYTQFILTYIHERARKGNPEQGKHPRTPLVHKELKSQQTPVIKKD

SEQ ID NO: 363451 - protein, 66 aa, Zea mays
  Clone ID: MRT4577_94638C.1.pep
SGVRWYLTAEFPVSSLKDRVRGRGYPDRQTCIQMYTRRVPIEDDQRIHASYQRLYDRRVKRVLDLR

SEQ ID NO: 363452 - protein, 70 aa, Zea mays
  Clone ID: MRT4577_94639C.1.pep
RVRRRRPGLPAAGAAPHHAMPRLPTERGTPCAAVPFAPACHGDHACLARSVDGVQIETVSSFFIFDVNSD

SEQ ID NO: 363453 - protein, 119 aa, Zea mays
  Clone ID: MRT4577_9463C.1.pep
VECYSSKDSFVTGGAQLTGRCNITVYVDIPVCTELAAPLVDNCIWRQVRGSGAEVFGSDGPDTATEKGKTRSLLFSKVCTTGGFFPLIVRCSPTASKSLTPFLGRTHMPSGRHCAAVVR

SEQ ID NO: 363454 - protein, 77 aa, Zea mays
  Clone ID: MRT4577_94640C.1.pep
PKKIKKKKKIKKKKKKKKKKKKKKKKKKKKKKKKKKKKKEKKKKGGARFRGPNFPSPALQGITFFLGPGGSIPRPGF

SEQ ID NO: 363455 - protein, 231 aa, Zea mays
  Clone ID: MRT4577_94641C.1.pep
MAMANSTVPPCLLLLTIVSLAAANGGGNNSTDSGQVRLSCGASASATDSDGRAWDGDSTSKFLTSTNAGVAARASYQDPSLPSSVPYLMARVFASSHTYTFLVRPGRVFLRLFFYPTDYGNRNASSALFGVTAGGVMLLRDFNASQSALALDAAYLVREFSVIVNSSGRLDVTFAPSTGASSHYAFVNGIEIVPTPDVFTAPVPTFANGGRPDPMPIRADTAFQTMYRLNV

SEQ ID NO: 363456 - protein, 68 aa, Zea mays
  Clone ID: MRT4577_94642C.1.pep
HSRAKSGDAWANWERIGEVGHEFKGLLTVPSWRNTVSLGRDCGQDVHGAVTPLVECEGLVLLHQGHRL

SEQ ID NO: 363457 - protein, 70 aa, Zea mays
  Clone ID: MRT4577_94643C.1.pep
YSMPSTSTNPDDHLALVIVVVVVYACVLATGVAIVVTSVHRLVDDTHTTCGCCGRDAELQTEPAVLARGL

SEQ ID NO: 363458 - protein, 207 aa, Zea mays
  Clone ID: MRT4577_94644C.1.pep
MESEADRAAAPAPAPAVAAETSDDAIQEESPATAPSSDGKPGSGAAAAPAPEVEVQLFRRGRPVAVFRSQLGGYTQDQLEVGDVLEQHGLKSVFAFDPAARKRGVAIRFNPRNGRSLLPYAPGSTIFLDGEPKDSLLKPITKMVIGVAAMTVVAAVLLKEAKMPEWLQSSKLGAVSFPPWVLACMVIVFMRLRKRTMDAMKKFGWVS

SEQ ID NO: 363459 - protein, 227 aa, Zea mays
  Clone ID: MRT4577_94645C.1.pep
MFKSHPCLTKNRSHHTSYPLNPIEMESEADRAAAPAPAPAVAAETSDDAIQEESPATAPSSDGKPGSGAAPELEVQLFRRGRPVAVFRSQLGGYTQDQLEVGDILEQHGLKSVFAFDPAARKRGVAIRFNPRNGRSLLTYAPGSTIFLDGEPKDSLLKPITKMVIGVAAMTVVAAVLLKEAKMPEWLQSSKLGTVSFPPWVLACMVIVFLRLRKRTKDVMKKFGWVS

SEQ ID NO: 363460 - protein, 147 aa, Zea mays
  unsure (1)..(147): unsure at all Xaa locations
  Clone ID: MRT4577_94646C.1.pep
MPWTRTEGARVCYVVVAPASGGVSCSGWGNMMKQIFGRRKASKTADKEFTGGRTFSQLSGSGFADLSGQPPILSSTGHAYGSGNRMGFQDSRINDNLFSSNFRPLPSXFKDVPNTEKQNLLIKKXLDVCCALVDFTDASKNMRERNK

SEQ ID NO: 363461 - protein, 84 aa, Zea mays
  Clone ID: MRT4577_94647C.1.pep
ALIVPYPRAGAPSAMLALISWLPACSRCPHTTIAGSAAANVPIARGCPCVRRSRSEIAADGPSIRTVVVEGICPVRWGRAPRAE

SEQ ID NO: 363462 - protein, 78 aa, Zea mays
  Clone ID: MRT4577_94648C.1.pep
MVCLKLPGGSCMTALTVTLMVLSSPLALAGDTRPRFLWQPKRECHFFNGTERVRFLDRYFYNQEESVRFDSDVGEYRA

SEQ ID NO: 363463 - protein, 290 aa, Zea mays
  Clone ID: MRT4577_94649C.1.pep
DAVVREVTECWQRQSRPCRSADLQGVSREELLHQSTTPPSTPSTRGKSASLESLIRADNATSSFRILEEEEEEEEDIVVPSTCPKLKPANVLVQLISCGSLSVKGHEDAAGPVRAYKPRLPSMKLPSPFVSRAMAMGELDYLSENSSRLVGVRLEEKEYFSGSLVETKTHRDGPAERYSALKRSSSYNAERARDALDCTRREEGDTDDRSSSRARCLPRTPMILASFLHPRGDPLKSPVSDCRRSSSARQQDCDAASGDGDSRRFAADASVVASAVATVKEERLVRVEES

SEQ ID NO: 363464 - protein, 50 aa, Zea mays
  Clone ID: MRT4577_9464C.1.pep
WTIWKLKLMRHLRRMLRSTLKLLLYDVNMPFCLYIIPCEVAPFFHIYLNI

SEQ ID NO: 363465 - protein, 58 aa, Zea mays
  Clone ID: MRT4577_94650C.1.pep
FFSNDLFARSGPRALFLVVLLPFYCCLRISNVIFFFEIFIVFSGWPWIWQFVKFLFWV

SEQ ID NO: 363466 - protein, 168 aa, Zea mays
  unsure (1)..(168): unsure at all Xaa locations
  Clone ID: MRT4577_94651C.1.pep
QLPLVHLLAQNIRAQQLQQLVLASLGAYYQQQQFLPFIQLGSLNXAFYLQQQQLPFSQVLVAYPQXFIPFNQLAALNSHGYLQQQRLVPFSQIDGVSPATLLTHRLLLPLYQLVEHNGGALFHLLPMLPFNPLIVANPAVFYPSPRLCRVPSFRFCYQLYVQVIKFLV

SEQ ID NO: 363467 - protein, 121 aa, Zea mays
  unsure (1)..(121): unsure at all Xaa locations
  Clone ID: MRT4577_94652C.1.pep
AAGPTAINLFVRLVILHGLRYTTMRSNGCARHIDGWTCGISSEPTSSTDQMHARLSPLMLHLHDDELSXRLACSNTFQLLATLMDVEGLLELLSKQYSASDRPSDYQDFIRDFTRQLFRMS

SEQ ID NO: 363468 - protein, 296 aa, Zea mays
  unsure (1)..(296): unsure at all Xaa locations
  Clone ID: MRT4577_94653C.1.pep
MDRDAWVEFRRANSEHAALREETRTHQHPGVAGARRPNAMPSPSPAPPPVLPISEHEDEIVAAVDANPVVVVIGETGSGKSTQLSQILHRRGYTRRGAIAVTQPRRVAAVSVSRRVAQELGVPLGDEVGYAIRFEDRTSERTCIKYLTDGILLRESLSNPELKQYSVIILDEAHERSLNTDILLGLMKRLIKDRASDLKVLITSATLDGLKVSKFFSGCPVLNIPGTLFPVEKFYSTDRPTNYIESSLRTAIDIHAKEPPGDVLIXMTGXDDIDXMVSKLEERIENLXRGLCIDAL

SEQ ID NO: 363469 - protein, 673 aa, Zea mays
  Clone ID: MRT4577_94654C.1.pep
MPPLPFWSLFRSPCPLPLLASSITSPDFLGGAGSGGYAFTTSSTGPEDTAKRRTQKSKSFKEVEKFDVFVLEKSSGCKFRSMQLLLFAIMSAAFLTILYTPSVYEHQLQSSSRLVNGWIWDKRSSDPRYVSSASIQWEDVYKSIQNLNVGEQKLSVGLLNFNRTEFDAWTHMLPESDFSIIRLEHANESITWQTLYPEWIDEEEETEIPSCPSLPDPSVPRATHFDVIAVKLPCSRVARASGDVARLHLQLSAAKLAATTARGNSGIHVLFVTDCFPIPNLFSCKDLVKREGNAWMYKPDVKALKEKLRLPVGSCELAVPLNAKARLYTVDRRREAYATILHSASEYVCGAITAAQSIRQAGSTRDLVILVDDTISDHHRKGLESAGWKVRIIQRIRNPKAERDAYNEWNYSKFRLWQLTDYDKVIFIDADLLILRNIDFLFALPEITATGNNATLFNSGVMVIEPSNCTFRLLMEHIDEITSYNGGDQGYLNEIFTWWHRIPKHMNFLKHFWEGDEEEVKAKKTRLFGANPPVLYVLHYLGRKPWLCFRDYDCNWNVEILREFASDVAHARWWKVHNRMPRKLQSYCLLRSSLKAGLEWERRQAEKANFTDGHWKRNVTDPRLKTCFEKFCFWESMLWHWGEKSKSNSTTTRNSAVPATTTTTPAAASLSSS

SEQ ID NO: 363470 - protein, 74 aa, Zea mays
  Clone ID: MRT4577_94655C.1.pep
SKQRPALSLVVSIILSSPYLECSHSTHVLFLFFSLGIPTILEDGILDRLKLLLTHGCTASSCIWPRVGDLARCG

SEQ ID NO: 363471 - protein, 64 aa, Zea mays
  Clone ID: MRT4577_94656C.1.pep
MRRSVKPVREVLTIKNTAHRESLAPSTSAAPSRRMLRRVMLLQAGAKDYEAKTPKMGPKGEHSP

SEQ ID NO: 363472 - protein, 146 aa, Zea mays
  unsure (1)..(146): unsure at all Xaa locations
  Clone ID: MRT4577_94657C.1.pep
WVAKVHKQPCHIVYTDYRGTPLQXYGCPSGGDGLYLVVDEKGKFREDSFQKALNALVPASDSAKKKENGKRQKFTMAGTSSEESDIFKMVKMIIQRQYDPVILFSFSKRECEFLAMQMAKMDLNEDDEKANIETIFWSAMDMLSDD

SEQ ID NO: 363473 - protein, 169 aa, Zea mays
  unsure (1)..(169): unsure at all Xaa locations
  Clone ID: MRT4577_94658C.1.pep
MVAHRFHQYHVVAPALPTPTDEHPSIXYRMKLWATNEARAXSKFWYFLRKLNRVTKSNGQMLAISEIFXRNPTTIXTYGIWVRYHSGTGYHNMYKEYRDSTLNSVVEHMYNXMASRHRVRSPCIQIIKTATVHFELCETDNTKHLHISAIKFPLVYRDEMPPTRKLMTT

SEQ ID NO: 363474 - protein, 213 aa, Zea mays
  unsure (1)..(213): unsure at all Xaa locations
  Clone ID: MRT4577_94659C.1.pep
MGNLVSGAAAASGGGGKLVMADGSVRALSEPVSVAELMMDHPRHFVVDXACSRRWPGGSAILSSSSRAAXARVAPLPADHVLGAGGVYVLLPATRGKVSAEEARRALSAARSRSMXASGASCRRPRRASRRRQLPPKSKSRRSRTRPRSPPLRTRTTRRRRRGRTXEEHRPASLSRELSCKGWKPSLRTIEERDLPKKTPPQLALLLVKLHCL

SEQ ID NO: 363475 - protein, 82 aa, Zea mays
  Clone ID: MRT4577_9465C.1.pep
FSFLHFLNNPNLIIMQALILFAALIGCAVAIPSGLYPAPALAAVPVVSHAKVGAIAHTPLHTVHQVHHTVHPVSIPVHHPAV

SEQ ID NO: 363476 - protein, 176 aa, Zea mays
  unsure (1)..(176): unsure at all Xaa locations
  Clone ID: MRT4577_94660C.1.pep
LXTCRNISPXQRGPSXXAAARGRAAXAAGWVPGXLAVVGAACYRXGGRARRVWSCLSATXXVVVRGYXXGXAXXAATRWXGGXXGYRXXWQPRXXAVLRHTFSTXNLGGNFEXXGARAGPKLFLCSLTXVLXLPFSPEXCLFFRXRLRVFVXXAHSLCXFDXXRSLLVXSVVLVLC

SEQ ID NO: 363477 - protein, 55 aa, Zea mays
  unsure (1)..(55): unsure at all Xaa locations
  Clone ID: MRT4577_94661C.1.pep
IIERLEFLDADTCECKNTLIEGGGVGVAIXTATSHIKVEPADDGRSVPKVESXYK

SEQ ID NO: 363478 - protein, 92 aa, Zea mays
  Clone ID: MRT4577_94662C.1.pep
ADNGQAPEALWGSQWRVIGWGWGRFEVENPSISRRATLRKRTTTSLHNANKHLQARSSSPRSILHRETQTVPQLQLSTPCPRRTRCGTPSRA

SEQ ID NO: 363479 - protein, 93 aa, Zea mays
  Clone ID: MRT4577_94663C.1.pep
PACSVPASKGAQVASNRLLSMKFMQRSLEKEVQEQLEKERKRVISEAEWVLDTKDTEIQKPKIQIECQSSFLAFTPDSTVGRRSFKPFIKLTE

SEQ ID NO: 363480 - protein, 173 aa, Zea mays
  unsure (1)..(173): unsure at all Xaa locations
  Clone ID: MRT4577_94664C.1.pep
VVVVVGSLASSSEAGSASRPSTPQPTTHMRSDSGLPAAAGTTSASSSSPSTXKPXLSSSSADGLASPVTTKGVAGGNRASLSRSRPGLTARGCPTPASETDCTSTCSMRHLNSEVASLMEPSSPSTTTCSSAPPSSSSSSGGGRSTTDRALPASAEAESSASSDALLDTGFWT

SEQ ID NO: 363481 - protein, 42 aa, Zea mays
  Clone ID: MRT4577_94665C.1.pep
MVQFVRNLVEKTPALVNAAETYSKPRLATFWYYAKVELVPPT

SEQ ID NO: 363482 - protein, 53 aa, Zea mays
  Clone ID: MRT4577_94666C.1.pep
ACAEARVNTRPSTDDAPCATRPLSTAHLIIHFSNRNTLGLSYPFRLCTHPRNY

SEQ ID NO: 363483 - protein, 96 aa, Zea mays
  unsure (1)..(96): unsure at all Xaa locations
  Clone ID: MRT4577_94667C.1.pep
QLFRIEGLXSVFFGPDFITVTKDNEELDWNLLKPDIYATIMDFFASGLLLVTEETPSGEAGSEEDDEVVAMIKELLDTRIRPTVQEDGGDVIYKGF

SEQ ID NO: 363484 - protein, 58 aa, Zea mays
  Clone ID: MRT4577_94668C.1.pep
QDDGWLGDLCGHPHLHNTAPTRRLTEVWMRGLVLAMNVCHLRHICSVDDMLEGPHRLA

SEQ ID NO: 363485 - protein, 118 aa, Zea mays
  unsure (1)..(118): unsure at all Xaa locations
  Clone ID: MRT4577_94669C.1.pep
GPKQDKKKVRPWGLLFMGAGFCLGKTQNVKTKGVFFLNSPLFSQARLLLREKKVYPVLCFCQVAFSLCTNHFGKKVKPLISNGKRTVSSPILVAPPKLFFYDLFXXKKKKKERMSESI

SEQ ID NO: 363486 - protein, 72 aa, Zea mays
  Clone ID: MRT4577_9466C.1.pep
YPNIVYQYTTGFVKPPNIFFHPHNSFDPTPLCHPQHSHSSLATLLYITDLPSSYHLLTLLLSVPSLLQTPPP

SEQ ID NO: 363487 - protein, 61 aa, Zea mays
  Clone ID: MRT4577_94670C.1.pep
KFCIYELIGGHSQPGAISMMILTMSNKLPLANINLKCYSQRNHMPIINHYVTASYYKSQLQ

SEQ ID NO: 363488 - protein, 93 aa, Zea mays
  Clone ID: MRT4577_94671C.1.pep
PTHPKKKKKKKKKKKKKKKKKKKKTKKKKKQKKKIKDKKNNARKNLVQNSRGAALKFQAFVPRLGNLDPLKMCPQNQFWGRCFKTSWRENPWG

SEQ ID NO: 363489 - protein, 54 aa, Zea mays
  Clone ID: MRT4577_94672C.1.pep
FGAGKKAYHTLALNWRIVIKNLNTLPKKHNAHEHRHSWQKGNAVMRLWRTNSPK

SEQ ID NO: 363490 - protein, 180 aa, Zea mays
  unsure (1)..(180): unsure at all Xaa locations
  Clone ID: MRT4577_94674C.1.pep
ETCFSASSSGGSLSGSGFFSSGVLLLVLSDSLAGLLVLKLSLAFVSTPGPGQPACRSHRGHRTWEGVGHRARGRVWRHVHPXTRAPAPPRXAITGSLLSGSALVASATSSTVLESTLVTTGATAVSSSTSGLYGSLGLDIALSSASSVLVNGLDRNDGLLLAVTVVAEVGKRVLCYNRHL

SEQ ID NO: 363491 - protein, 46 aa, Zea mays
  Clone ID: MRT4577_94675C.1.pep
MWGPIWSPPHQSKKVKAKKKKKKKKKKKKKKKKKKKKKKKKEKKKK

SEQ ID NO: 363492 - protein, 55 aa, Zea mays
  Clone ID: MRT4577_94676C.1.pep
QPWGPCGCMSSHGSYRPGHRGTLQADVGLLWLVPINQLLYFQSRDAEIAFTYVGR

SEQ ID NO: 363493 - protein, 90 aa, Zea mays
  Clone ID: MRT4577_94677C.1.pep
QLRYVHAGSTRKENTCRDYGNSALSTLGDGAGRAGGILTDHRYDHVDARALTAVSCTIQVRPALFIYRANRNVMLDGNTALMLITEMLMN

SEQ ID NO: 363494 - protein, 67 aa, Zea mays
  Clone ID: MRT4577_94678C.1.pep
KEVITRGYIMTIQLAKPPRKPQHMDRELNVCFTLTMDLKGGKPIPKLKPLLGFLTHRGHLPPYKNNP

SEQ ID NO: 363495 - protein, 92 aa, Zea mays
  Clone ID: MRT4577_94679C.1.pep
VAQRGGLFGLLERAVLALVLRAWGVPARFLVCGFVGPLVAGLLSAAAADLLSLVGLPSRWLSSVVVHPPELASGSGSYRSSAGVVGPPGFSG

SEQ ID NO: 363496 - protein, 68 aa, Zea mays
  Clone ID: MRT4577_9467C.1.pep
QCSSTWWSRTSTKTISFVIDAPGHRDFIMIMITGTSQADCAVLIIDSTTGGFEAGISTDGQSREHALL

SEQ ID NO: 363497 - protein, 82 aa, Zea mays
  Clone ID: MRT4577_94680C.1.pep
HIANKILTYLDIHCLKKNRKPTAAALGITMILYCTKQMNRKSCRNPQLLMWLSMHGGSPTRAWGCACVPCTKLPTADTRKML

SEQ ID NO: 363498 - protein, 52 aa, Zea mays
  unsure (1)..(52): unsure at all Xaa locations
  Clone ID: MRT4577_94681C.1.pep
LGPQDIAKIIPLIESPPTGRYERVLSPLQWFVPXLARGRRRSWPAARERVLH

SEQ ID NO: 363499 - protein, 53 aa, Zea mays
  Clone ID: MRT4577_94682C.1.pep
ATLTHVHTLPRELFGPLHMACYDNVRACYIAISPATLLQGVEIKFYSNLLTFF

SEQ ID NO: 363500 - protein, 37 aa, Zea mays
  unsure (1)..(37): unsure at all Xaa locations
  Clone ID: MRT4577_94683C.1.pep
RTXFYXGQLRFEHNXQPQSXLSFKGLFTVPHVSXELH

SEQ ID NO: 363501 - protein, 188 aa, Zea mays
  Clone ID: MRT4577_94684C.1.pep
MAPIKVGINGFGRIGRIVFRNAIEHPEVEIVAVNDPFIETKYAAYMLKYDSTHGIFNGEIKQEGNDLVINGKTVKFYTERDPAAIPWKETGADYVVESTGVFTTTDKAKAHLQGGAKKVIISAPSADAPMYVMGVNEKSYDGSADVISNASCTTNCLAPLAKVINDKFGIVEGLMTTVHSYTATQKNR

SEQ ID NO: 363502 - protein, 65 aa, Zea mays
  Clone ID: MRT4577_94685C.1.pep
ELFVCLVGAWSFSLGPCGGLPSNEHSFPVSPKKKKKKKKKKKKKKKKKKKKKKKKKKKKKKKKKK

SEQ ID NO: 363503 - protein, 183 aa, Zea mays
  Clone ID: MRT4577_94686C.1.pep
EWAATFDFLGHNAPIVVVKFNNSTFRKNFSNDQDPKAAPVGWANGASKTPTKEQQPYNVIAIGSQDRTITVWTTASARPLFVARHFFSQSVVDLSWSPDGYSLFACSLDGSAANFHFEVKELGHRLSDSEMDEWKRNRYGDVGGRQSNLAESPAQLLLEQASAKQSAGEKVTSIVEQGKAPPK

SEQ ID NO: 363504 - protein, 44 aa, Zea mays
  Clone ID: MRT4577_94687C.1.pep
LHLHFAVIQTHTRLRMNQLLLNKKPHTHQPTYSPLRFPKPYTTP

SEQ ID NO: 363505 - protein, 153 aa, Zea mays
  unsure (1)..(153): unsure at all Xaa locations
  Clone ID: MRT4577_94688C.1.pep
RWGQGTDDSEHSCYALHXRLQHFCPPRQTQQYRLDVGTAKXPTISAVGLVRPSTRAHELPYAHVDLKRSALPVPEKXQRLCTQLSDTEFEVMNPDAMKALXEDVETHGVEMLVLXTXAYRNITNDVLVSVRDYCAHHAHWSGMISQKAKQHKH

SEQ ID NO: 363506 - protein, 111 aa, Zea mays
  unsure (1)..(111): unsure at all Xaa locations
  Clone ID: MRT4577_94689C.1.pep
LLQSINRTEQLSLQQLCDVKEPTCSPPYISIMRSLPVLQSATTVLVRWQDTIMLMKKQRDRLIIDTRTYGXRXRKYAMYCPXLFSSYTLHYCWLCSLVRHINWHTEVILNE

SEQ ID NO: 363507 - protein, 55 aa, Zea mays
  unsure (1)..(55): unsure at all Xaa locations
  Clone ID: MRT4577_9468C.1.pep
MSYGEHGCTYTAIILSHDSVGITAQKNSTIGNAVNINVECYXPGLFDKLLKKRNV

SEQ ID NO: 363508 - protein, 119 aa, Zea mays
  Clone ID: MRT4577_94690C.1.pep
MVQRLTYRKRHSYATKSNQTRVVKTPGGRLVYQYTKKRASGPKCPVTGKKIQGIPHLRPAEYKRSRLPRNRRTVNRPYGGVLSGTAVRERIIRAFLVEEQKIVKKVLKIQKTKDKASKN

SEQ ID NO: 363509 - protein, 228 aa, Zea mays
  Clone ID: MRT4577_94691C.1.pep
MASRQPRPVDASLRSLSIASALLTWSVCCAAVSVRALPEPDGCSSNSNMTELQMHVSFFDRNKDGILTPLETFQGFVAIGCEVAFSTAAASTIHTALAPLTNPPGALPPYINIYVEYIHKAIHGSDTGAYDSKGRFVQAKFDEIFKKHAHIRKDALSLLEVEEMLTVNRDVLDPASWAAAEAEWQLIYQLAHDRYGFLTKERARGIYNGKIFVELEERISRRPLHSNA

SEQ ID NO: 363510 - protein, 119 aa, Zea mays
  Clone ID: MRT4577_94692C.1.pep
MVQRLTYRKRHSYATKSNQTRVVKTPGGRLVYQYTKKRASGPKCPVTGKKIQGIPHLRPAEYKRSRLSRNRRTVNRPYGGVLSGTAVRERIIRAFLVEEQKIVKKVLKIQKTKDKASKS

SEQ ID NO: 363511 - protein, 119 aa, Zea mays; identical to SEQ ID NO: 363508
  Clone ID: MRT4577_94693C.1.pep

SEQ ID NO: 363512 - protein, 119 aa, Zea mays; identical to SEQ ID NO: 363508
  Clone ID: MRT4577_94694C.1.pep

SEQ ID NO: 363513 - protein, 55 aa, Zea mays
  Clone ID: MRT4577_94695C.1.pep
KGGPNDYYFKIWVQPILLALKLEALSWNGYIPKPEIEFSKNGNRSCSVISDYKSI

SEQ ID NO: 363514 - protein, 98 aa, Zea mays
  Clone ID: MRT4577_94696C.1.pep
FRALQCRSSTSGGRRRLLLISRVGGRAACMSMTRRGNDQGIPCGAYWLLFRRLLANIAKMLLRFLRTADRFCRSSEPGRLVDTTSFVHIRPLLPTTIN

SEQ ID NO: 363515 - protein, 471 aa, Zea mays
  Clone ID: MRT4577_94697C.1.pep
MPTERVDVAVSSRTLLRASDPPPDFPAVLQASNLDLILGSFHIYLIAMYPAPAAGFPAVVAAARAAMPAFLSRFFPFAGRVVANADTGVPEIACDNTGAELVVARAGVRLADVDFADADRSLGRIAVPFQQDLALSLQLVRFACGGFALSWGTNHLLVDGHGLTALPSAWAELLRTGGLSWEPHHERASLFRPRDPPRYSASLDAEFTRYAPAGLPNSLLTATLVRRNYVVSAADVDRLRAAASTPARRATRLEALSAHVWKLLAAAVGGLDAHCRMAWLVDGRPRLDAARYDGATVRRYLGNVLTYASREAAVEAVSSSPLADVAAMAGAAIAEVFRSERYEELVDWMEVHKGVFREGGKWTEVVGTGMGSPALVVSTFVPFRVEGDFGFGRPRLVFPWVRPGRLGSAAMTVSRSPREDGSWLITARMWPRLADAVDADPDAVLKPATTARLGFGAPDPADVMQHATSRM

SEQ ID NO: 363516 - protein, 48 aa, Zea mays
  Clone ID: MRT4577_94698C.1.pep
RGPFQIKKNNKSPVCSPLLFRTHRGGDIHLRKPNPALFPQLRARSKTG

SEQ ID NO: 363517 - protein, 52 aa, Zea mays
  Clone ID: MRT4577_94699C.1.pep
CLTLNGDRVQKIQRTAIAGRCSCTALFPLYFCFMICQLCYGTGTDILCLTKL

SEQ ID NO: 363518 - protein, 89 aa, Zea mays
  Clone ID: MRT4577_9469C.1.pep
GTQNRKNPNSGEGSGFSGHGAAVQATGRQVGTILPFGIHWEPFDRNLTDQEGWDPLTRTFGKEGVEGLQTNPEWKGHRRNTLFRLEKVN

SEQ ID NO: 363519 - protein, 346 aa, Zea mays
  Clone ID: MRT4577_946C.1.pep
MASADAGTCPWDALPLHLQERILSLLPITELVPVAAVSRAFHRLLRSPTFHALLSPHRLDAFFLLSPRLAVHPLSRRVRTMPAFAALSPPSYPLVSSPSPSLLITCASLQFLPPIPDGAYLLSAIVPSGGSSTSCTLVAVITGAAARSYTLDTGDPSPQWASRGDLPLSLTLLENAAVSGDRSKLFVLGRGPEALLVFHLVTGTWEVLHVVMPQGLTTAHLFLFDGSLFLVGGIESFGVVDRVVVWRLDDDKVEEVWWREVSVMPTEVFDELLAGRFGRFWHFQAADRLGIVCLYNAVDRRLVMFDAADGMWTVLPRLSALDACESFRWFGHVLEPGVEILMGLRW

SEQ ID NO: 363520 - protein, 100 aa, Zea mays
  Clone ID: MRT4577_94700C.1.pep
IIIIPPSSCKSLLHVAGPVIKRHVKTFNQIFNPGPAGEYGILQDLTSINPFFFKHNLIPMLPDTPCQGSPSALPFLIASVFSLSIRVEAKVECTTACLHE

SEQ ID NO: 363521 - protein, 191 aa, Zea mays
  unsure (1)..(191): unsure at all Xaa locations
  Clone ID: MRT4577_94701C.1.pep
PREAIDRVYFSETPVEVVKEHDQELSKLGAALIAMXGHVAQAFTLLKSSXEAQSVVAXXXXDKNVWDXVLKNERVMEFYKSHXQXLVNTFXEETGSTDSVESPEKFEEASPEYALPTASPLSDFVDSAKKTMMEMVDNITNFFQDMFHNPAEAEAGPGSSSKKPSFAEMAAGGSFMALAMAVILVVLFKRA

SEQ ID NO: 363522 - protein, 57 aa, Zea mays
  unsure (1)..(57): unsure at all Xaa locations
  Clone ID: MRT4577_94702C.1.pep
HHTHTYLNPTITERGPXWGGSFISSFPSLVPDGHNRYVNYFYDPNVINYYLLQCQPM

SEQ ID NO: 363523 - protein, 129 aa, Zea mays
  Clone ID: MRT4577_94703C.1.pep
GRPAHMSRPRISPFDPIVASRGVVKSCGMVLPGIYMRKPGGPGSTWAKRHYQRVGGKGVVVAAIGCLHDRLQSGWRFGSFASAIGKHINPQFGKERRGLVGILHRNWVAARSFPTPWTSLGTPATPTSK

SEQ ID NO: 363524 - protein, 60 aa, Zea mays
  Clone ID: MRT4577_94706C.1.pep
RRPMRGGGTITSYTVATSVQVFTPVVKVGVLIEVENNLGSPYVKYTNKASSQSSPQDISH

SEQ ID NO: 363525 - protein, 66 aa, Zea mays
  unsure (1)..(66): unsure at all Xaa locations
  Clone ID: MRT4577_94707C.1.pep
TVRLGYLIARLXGNASPCGEDLTAIVETVGXEVDNERMELLLGQLSGKDITXELIAAGREKFAAAP

SEQ ID NO: 363526 - protein, 69 aa, Zea mays
  Clone ID: MRT4577_94708C.1.pep
YHKGGGGLFFIVNPKNQKEWARQTKIKLGVRERTHHGKHVASLGLIEMGRYHLQVHRWKTSFSGDGQWH

SEQ ID NO: 363527 - protein, 122 aa, Zea mays
  Clone ID: MRT4577_94709C.1.pep
KIHSMPLNRVYTYGHRLEALRWLALVDAVDRAVSGPGKVMKVDDVVYGDLIVNTSGVLHEIGGAIGMDSRLTGRAERREDPRVAVSCTRFAGDEAAAACGTAAAGLARRRWSSRRPLCLRAR

SEQ ID NO: 363528 - protein, 124 aa, Zea mays
  Clone ID: MRT4577_9470C.1.pep
CSVMSVGASRLGEGRERPRAHSRRPVTRPRWRAAGPCAGTCQGGSHSRTLAPRLKAVSTTPTSANDLVQIKFRRDGGNRVVEALNLSEKRKDRKAQKQRDRRMKKKKREVVETASSRWRSSALG

SEQ ID NO: 363529 - protein, 103 aa, Zea mays
  Clone ID: MRT4577_94710C.1.pep
GELPPLWLLFVTGAQTALLLSWSASSSSHPRLLWLPIHHGDGNVPSLGRWAYDDRHLPRYRVNPSPSSSMASLASSIPLDHINVTGVVAPWPMVACLCEENTD

SEQ ID NO: 363530 - protein, 98 aa, Zea mays
  Clone ID: MRT4577_94711C.1.pep
MAQKETNGSNGDHISTRPPPTPSPLRFSKFFQANLRILVTGGAGFIGSHLVDKLMENEKHEVIVADNFFTGSKDNLKKWIGHPRFELIRHDVTEPLLE

SEQ ID NO: 363531 - protein, 77 aa, Zea mays
  Clone ID: MRT4577_94712C.1.pep
GVPVLGLGIVESPQLWPEPKGGSAGTVYLTRRRHHISFSGASGVHLLECCMRIGLVHGLCLIPDKRELVKSFAKVVE

SEQ ID NO: 363532 - protein, 386 aa, Zea mays
  unsure (1)..(386): unsure at all Xaa locations
  Clone ID: MRT4577_94713C.1.pep
MAQKETNGSNGDHISTRPPPTPSPLRFSKFFQANLRILVTGGAGFIGSHLVDKLMENEKHEVIVADNFFTGSKDNLKKWIGHPRFELIRHDVTEPLLVEVDQIYHLACPASPIFYKHNPVKTIKTNVIGTLNMLGLAKRVGARILLTSTSEVYGDPLEHPQTEAYWGNVNPIGVRSCYDEGKRVAETLMFDYHRQHGIXYFILHLNCNISSXPLYCVITLGXDLSSAIFIIYVXEIRIARIFNTYGPRMNSDDDRVVSNFIAQAVRGEPLTVQKPGTQTRSFCYVADMVDGLIRLMNGNNTGPINLGNPGEFTMLELAENVKELINPDITVTMTENTPDDPRQRKPDITKAKEVLGWEPKIVLKDGLVLMEDDFRERLAVPKKTKA

SEQ ID NO: 363533 - protein, 99 aa, Zea mays
  unsure (1)..(99): unsure at all Xaa locations
  Clone ID: MRT4577_94714C.1.pep
ESWREQSWFFCGLTASTLMGTRLVDPVTHNWRIMGRIEIWLPHKSNSACNKVTKTWTXYDRPMWFPGTVAPDYLYXSMVGDYXGNXPFGVRKSLEFHQF

SEQ ID NO: 363534 - protein, 93 aa, Zea mays
  Clone ID: MRT4577_94715C.1.pep
MAQKETNGSNGEHISTRPPPTPSPLRFSKFFQANLRILVTGGAGFIGSHLVDRLMENEKHEVIVADNFFTGSKDNLKKRIGHPRFELIRHDVT

SEQ ID NO: 363535 - protein, 97 aa, Zea mays
  Clone ID: MRT4577_94716C.1.pep
KPGPQIISRSLWALVKGPPPGLFPKKNRVNPYPGEKIYRGPLFFPPRFPKKEPSLSGPKGHPPFDPPHFFGGPSFWPPRGGVFSKGVHITLKGGAPP

SEQ ID NO: 363536 - protein, 261 aa, Zea mays
  Clone ID: MRT4577_94717C.1.pep
MAQKETNGSNGEHISTRPPPTPSPLRFSKFFQANLRILVTGGAGFIGSHLVDRLMENEKHEVIVADNFFTGSKDNLKKWIGHPRFELIRHDVTEPLLVEVDQIYHLACPASPIFYKHNPVKTIKTNVIGTLNMLGLAKRVGARILLTSTSEVYGDPLEHPQTEAYWGNVNPIGVRSCYDEGKRVPETLMFDYHRQHGIEIRIARIFNTYGPRMNIDDGRVVSNFIAQAVRGEPLTVQKPGTQTRSFCYVADMVDGLIRLMN

SEQ ID NO: 363537 - protein, 381 aa, Zea mays
  Clone ID: MRT4577_94718C.1.pep
MQIFVKTLTGKTITLEVESSDTIDNVKAKIQDKEGIPPDQQRLIFAGKQLEDGRTLADYNIQKESTLHLVLRLRGGMQIFVKTLTGKTITLEVESSDTIDNVKAKIQDKEGIPPDQQRLIFAGKQLEDGRTLADYNIQKESTLHLVLRLRGGMQIFVKTLTGKTITLEVESSDTIDNVKAKIQDKEGIPPDQQRLIFAGKQLEDGRTLADYNIQKESTLHLVLRLRGGMQIFVKTLTGKTITLEVESSDTIDNVKAKIQDKEGIPPDQQRLIFAGKQLEDGRTLADYNIQKESTLHLVLRLRGGMQIFVKTLTGKTITLEVESSDTIDNVKAKIQDKEGIPPDQQRLIFAGKQLEDGRTLADYNIQKESTLHLVLRLRGGY

SEQ ID NO: 363538 - protein, 200 aa, Zea mays
  unsure (1)..(200): unsure at all Xaa locations
  Clone ID: MRT4577_94719C.1.pep
TEPLLVEVDQIYHLACPASPIFYKHNPVKTIKTNVIGTLNMLGLAKRVGARSVFIMPLILPAPHVKNSITEFIFELXILLTSTSEVYGDPLEHPQTEAYWGNVNPIGVRSCYDEGKRVAETLMFDYHRQHGIXYFILHLNCNISSXPLYCVITLGLXLSSAIFIIYVXEIRIARIFNTYGPRMNIDDGRVVSNFIAQAVR

SEQ ID NO: 363539 - protein, 99 aa, Zea mays
  Clone ID: MRT4577_9471C.1.pep
MGWDHTTGTGPSYSQLRTLDMWLGQDQKAPLPEDHGPKNEFALGHSGEGAELELLTLHLSTGLGQLLDAPQDRTCLLLIALIITLPKTQQGNCTPLPVP

SEQ ID NO: 363540 - protein, 382 aa, Zea mays
  unsure (1)..(382): unsure at all Xaa locations
  Clone ID: MRT4577_94720C.1.pep
MQIFVKTLTGKTITLEVESSDTIDNVKAKIQDKEGIPPDQQRLXFAGKQLEDGRTLADYNIQKESTLHLVLRLRGGMQIFVKTLTGKTITLEVESSDTIDNVKAKIQDKEGIPPDQQRLIFAGKQLEDGRTLADYNIQKESTLHLVLRLRGGMQIFVKTLTGKTITLEVESSDTIDNVKAKIQDKEGIPPDQQRLIFAGKQLEDGRTLADYXIQKESTLHLVXLRLRGGMQIFVKTLTGKTITLEVESSDTIDNVKAKIQDKEGIPPDQQRLIFAGKQLEDGRTLADYNIQKESTLHLVLRLRGGMQIFVKTLTGKTITLEVESSDTIDNVKAKIQDKEGIPPDQQRLIFAGKQLEDGRTLADYNIQKESTLHLVLRLRGGY

SEQ ID NO: 363541 - protein, 350 aa, Zea mays
  Clone ID: MRT4577_94721C.1.pep
MAQKETNGSNGEHISTRPPPTPSPLRFSKFFQANLRILVTGGAGFIGSHLVDKLMENEKHEVIVADNFFTGSKDNLKKWIGHPRFELIRHDVTEPLLVEVDQIYHLACPASPIFYKHNPVKTIKTNVIGTLNMLGLAKRVGARILLTSTSEVYGDPLEHPQTEAYWGNVNPIGVRSCYDEGKRVAETLMFDYHRQHGIEIRIARIFNTYGPRMNIDDGRVVSNFIAQAVRGEPLTVQKPGTQTRSFCYVADMVDGLIRLMNGNNTGPINLGNPGEFTMLELAENVKELINPDITVTMTENTPDDPRQRKPDITKAKEVLGWEPKIVLKDGLVLMEDDFRERLAVPKKTKA

SEQ ID NO: 363542 - protein, 457 aa, Zea mays
  Clone ID: MRT4577_94722C.1.pep
MQIFVKTLTGKTITLEVESSDTIDNVKAKIQDKEGIPPDQQRLIFAGKQLEDGRTLADYNIQKESTLHLVLRLRGGMQIFVKTLTGKTITLEVESSDTIDNVKAKIQDKEGIPPDQQRLIFAGKQLEDGRTLADYNIQKESTLHLVLRLRGGMQIFVKTLTGKTITLEVESSDTIDNVKAKIQDKEGIPPDQQRLIFAGKQLEDGRTLADYNIQKESTLHLVLRLRGGMQIFVKTLTGKTITLEVESSDTIDNVKAKIQDKEGIPPDQQRLIFAGKQLEDGRTLADYNIQKESTLHLVLRLRGGMQIFVKTLTGKTITLEVESSDTIDNVKAKIQDKEGIPPDQQRLIFAGKQLEDGRTLADYNIQKESTLHLVLRLRGGMQIFVKTLTGKTITLEVESSDTIDNVKAKIQDKEGIPPDQQRLIFAGKQLEDGRTLADYNIQKESTLHLVLRLRGGY

SEQ ID NO: 363543 - protein, 353 aa, Zea mays
  unsure (1)..(353): unsure at all Xaa locations
  Clone ID: MRT4577_94723C.1.pep
MAQKETNGSNGEHISTRPPPTPSPLRFSKFFQANLRILVTGGAGFIGSHLVDKLMENEKHEVIVADNFFTGSKDNLKKWIGHPRFELIRHDVTEPLLVEVDQIYHLACPASPIFYKHNPVKTIKTNVIGTLNMLGLAKRVGARILLTSTSEVYGDPLEHPQTEXAYWGNVNPIGVRSCYDEGKRVAETLMFDYHRQHGIEIRIARIFNTYGPRMNIDDGRVVSNFIAQAVRGEPLTVQKPGTQTRSFCYVADXMVDGLIRLMNGNNTGPINLGNPGEFTMLELAEKXVKGVINPDITVTMTENTPDDPRQRKPDITKAKEVLGWEPKIVLKDGLVLMEDDFRERLAVPKKTKA

SEQ ID NO: 363544 - protein, 404 aa, Zea mays
  unsure (1)..(404): unsure at all Xaa locations
  Clone ID: MRT4577_94724C.1.pep
MAQKETNGSNGDHISTRPPPTPSPLRFSKFFQANLRILVTGGAGFIGSHLVDKLMENEKHEVIVADNFFTGSKDNLKKWIGHPRFELIRHDVTEPLLVEVDQIYHLACPASPIFYKHNPVKTIKTNVIGTLNMLGLAKRVGARILLTSTSEVYGDPLEHPQTEAYWGNVNPIGVRSCYDEGKRVAETLMFDYHRQHGIEIRIARIFNTYGPRMNIDDGRVVSNFIAQAVRXALLNVFIFSSATADRLAANLFTIFSGEPLTVQRPGTQTRSFCYVADMVXFHCILNWFVVGQKTVSALYQLCHSLQVDGLIKLMNGNKTGPINLGNPGEFTMLELAENVKELINPDVTVTMTENTPDDPRQRKPDITKAKEVLGWEPKIVLRDGLVLMEDDFRERLTVPKKTKA

SEQ ID NO: 363545 - protein, 77 aa, Zea mays
  Clone ID: MRT4577_94725C.1.pep
FWLDISFLFPCSIIFYTRGIINDLPWLIIPLPAGADRPDPRELDGAAWHDAAAARCVRAAPLVRRRRDRPQQPQRGP

SEQ ID NO: 363546 - protein, 54 aa, Zea mays
  unsure (1)..(54): unsure at all Xaa locations
  Clone ID: MRT4577_94726C.1.pep
SLPVPFNSTNHYLGSVLGRYDGNVYPALYQEAWKXDPLKQNVVPXGYHEYLAPA

SEQ ID NO: 363547 - protein, 41 aa, Zea mays
  Clone ID: MRT4577_94727C.1.pep
CCLRSRGGKGWIRLLFLCQWLLLLLYSLTHACKLCVFILNF

SEQ ID NO: 363548 - protein, 48 aa, Zea mays
  Clone ID: MRT4577_94728C.1.pep
WGETIPLLIFKQILFSHVQTHYGVPCSIYFFDPKTRFSSWLSGKSQVL

SEQ ID NO: 363549 - protein, 125 aa, Zea mays
  unsure (1)..(125): unsure at all Xaa locations
  Clone ID: MRT4577_94729C.1.pep
RRRVGAGAPRPESRGEQKPHHTDARRAGEARXKEKXHXNXGGXGXXDXGKATTTGRXGDKXGGXDKRXXERGEKEXAEXNKRXXKXAXGXDKXKXEXERXXTXXXAXXKXETTKXNGXXXXAPGH

SEQ ID NO: 363550 - protein, 154 aa, Zea mays
  unsure (1)..(154): unsure at all Xaa locations
  Clone ID: MRT4577_9472C.1.pep
MARARLPLLLLLLVAFLAGTGSTAARHAAPAPASAPRASPSISAAPEYXAAPAPPEPAPAPXSALAPSQALAPDIMPVLPSPAEDGAAPPPDADEPTIPSSPSPPNPDALEPAWALAPFGSAPAVAAQSPAAAPAPASALVLLAVPWLLLVVVV

SEQ ID NO: 363551 - protein, 102 aa, Zea mays
  Clone ID: MRT4577_94730C.1.pep
LLLGNFFELCWGRNAIIAFIPPKDTSFILSKGWDLHNRFKYLWQALRWPLLHHPSFPFPWESSQPARALAPGCAVRRAITAATVTGDPINAAEAARTGAPRA

SEQ ID NO: 363552 - protein, 100 aa, Zea mays
  unsure (1)..(100): unsure at all Xaa locations
  Clone ID: MRT4577_94731C.1.pep
DGAGAXPDXETRXRGAENXAXGPGRTSXNPDXKKGGDGRHXETAADGHPGRGGXDXTGEAEKPPKAEKXXAEGGPGRSPGGPAGPHARRQQGAPARAPRA

SEQ ID NO: 363553 - protein, 382 aa, Zea mays
  Clone ID: MRT4577_94732C.1.pep
MAHAQEIQLQIRGIPDEESVDARDGPKVATGRSTRSSFRWWMTVLVDMLMVLCGTTVATLLGRLYFNSGGNSKWMATLTQSGGSPLLVVPLLLSPARSAEERRPAALKMVAIYAGIGVMIGFDNLMYSYALQYLPVSTFSLVAATQLGFNAITSRLINAQRFTALIANSVVVLTFSAAILGVGSSSDETSSNVPRGKYPLGFVLVLAASAVFALILSLFELTFEKVVRVRTARWVLRMQMHTNLVASAVSVAGLLASGDWRTIPGEMASFKDGRTRYVLTLVGTAVSWQAAAVGLVRLIMRVSSLFANVTCTLALPLVPVFAVALFGDRMTGIKIVAMLMAVWGFLSYMYQHYIDARRRAGAENAECRVCATRTGSHAVLPA

SEQ ID NO: 363554 - protein, 148 aa, Zea mays
  Clone ID: MRT4577_94733C.1.pep
PPPFFPFIFTAVKTPRNVNYNTNFTMNLPNAIYKSRLMPNLESNQQPPQLLKYILKVGPAQSRCPLSRTYLFLGPPLKGLYLFNSKNPPPPQKIGPTLKKKITIRFFRRTKKKKKKKKKKKKKKKEKKKTKKKKKKACTPPPGRGKGR

SEQ ID NO: 363555 - protein, 130 aa, Zea mays
  Clone ID: MRT4577_94734C.1.pep
KKGGGPINHPYQGFNNEEGGLLGGVGSNPQIGGNVFLGIIIFSVVVAHRGDTPPVFLKIEGEVFGPPFFLGGAPNWKPPPANKAKNQPAPLCWFSEFFPFTPGGGFPQFFFLPPPGFFWKKIPGAPLGFP

SEQ ID NO: 363556 - protein, 65 aa, Zea mays
  Clone ID: MRT4577_94735C.1.pep
KKKKKKKKKKKKKKKKKKKKKKKKKKKKKKKKKKKKKKKKKKKKKKKKGGAVFEETKFYSPGWGR

SEQ ID NO: 363557 - protein, 45 aa, Zea mays
  Clone ID: MRT4577_94736C.1.pep
HGIAGASCFSQAMLEILFCGGAGSRPMRMRTGQESCSYEMCYRFP

SEQ ID NO: 363558 - protein, 63 aa, Zea mays
  unsure (1)..(63): unsure at all Xaa locations
  Clone ID: MRT4577_94737C.1.pep
SCSADLITCGVPWSLASSWCVGHLDLSHNRLCGXIPSGPPFDRLCPASLGGGGCLCGGPFGTC

SEQ ID NO: 363559 - protein, 96 aa, Zea mays
  Clone ID: MRT4577_94738C.1.pep
LLRKSGLARRVAIRPPRFYRKDSGELEWLEGKPPETEACDNGKWSGGISASVVAEKSNSTNNWGLSFGSSEEFFVITLPGGGRAGFPKKTPRGKLK

SEQ ID NO: 363560 - protein, 75 aa, Zea mays
  unsure (1)..(75): unsure at all Xaa locations
  Clone ID: MRT4577_94739C.1.pep
YATFEQVIAPEYLLPFCQERMHITILLHCIHIFCEDXVSQXKERERTCPLRTALLNPADLMSFSDPTTSLCFQLF

SEQ ID NO: 363561 - protein, 132 aa, Zea mays
  Clone ID: MRT4577_9473C.1.pep
VKAADITSKIKKAVDSYTPEKALKKVKRLPTSVPQKINVTNVTMDGKGDGELEKQSVQMHSDVPQISKDPPTMVKASSREDAQPMTESSNAEVNTSSAVAAGESEAHEIGSPKSLKDAIQPKHKRKKKSARS

SEQ ID NO: 363562 - protein, 36 aa, Zea mays
  Clone ID: MRT4577_94740C.1.pep
CTWSYTIRRYSHNGTAIEDRNDQDHKCWKLKLPYQR

SEQ ID NO: 363563 - protein, 184 aa, Zea mays
  unsure (1)..(184): unsure at all Xaa locations
  Clone ID: MRT4577_94741C.1.pep
MLVYLDLLSGDELLSHSFPXMSQTFLWEARKVPQGXCDEIGHPSAEGGXDERDDTAVKVVDIADSFRLQEQPPFDKKSFVSYITQYITNLTAVLQPDKAYEFTXGVEAATKSLLSKLKDLPFXFVGESMNDEASVIFAYYHDAATNPTFLYFSRXLKEIECYTRYSCWRLYMIYCDSHNYSCPA

SEQ ID NO: 363564 - protein, 48 aa, Zea mays
  Clone ID: MRT4577_94742C.1.pep
STSSPHCSTFDGACTTQAHASTPYKDTYPTPASLIATIQKSYHHQHKY

SEQ ID NO: 363565 - protein, 70 aa, Zea mays
  unsure (1)..(70): unsure at all Xaa locations
  Clone ID: MRT4577_94743C.1.pep
FSRLNAANRASFLTQQQLLPFYQQFAANXPQTLLQIQXQLLPFALLALTEQTASGPVHNIGGTHYMLLMR

SEQ ID NO: 363566 - protein, 68 aa, Zea mays
  Clone ID: MRT4577_94744C.1.pep
FKRGWWFPYRVPPGGFGFLLQKCWRVLFEQTLPGSFLQKNCGGLFLKKNPEKNIKKTQKKKKKKEKKL

SEQ ID NO: 363567 - protein, 89 aa, Zea mays
  unsure (1)..(89): unsure at all Xaa locations
  Clone ID: MRT4577_94745C.1.pep
DEEDEADKEEDEEEDVPGQAKDELXRPXPPGLDXGLSXLPQSWPRQIMSLXDSRTFIFFQAGSDLGWILVLFPSSTLPHXSPPFFFFFF

SEQ ID NO: 363568 - protein, 155 aa, Zea mays
  unsure (1)..(155): unsure at all Xaa locations
  Clone ID: MRT4577_94746C.1.pep
MANQLTDAHIEXVREALGLYXKDGDGCVTTKEXRTVMRSLGQNPTAAKVQDMITEGDADGNGTIDFPXILNLMXRRWKDTDSEEDLNEVFRAFDEXRVGFISAAELRHVMTNLGPKLTDEDVDEMIREVDVDGDVRSLRGGVRHDGQARSDPRYL

SEQ ID NO: 363569 - protein, 70 aa, Zea mays
  unsure (1)..(70): unsure at all Xaa locations
  Clone ID: MRT4577_94747C.1.pep
FGNVTTGKKGVVNVKISDSQIPLVGPPSIIGPAVFVHVDPDDLGKGGHXLSKSPRNSGGRVACGNIGLQG

SEQ ID NO: 363570 - protein, 91 aa, Zea mays
  unsure (1)..(91): unsure at all Xaa locations
  Clone ID: MRT4577_94748C.1.pep
SDDDDYEALIALDDCNHHRGASDDQIXSLPLSLIEGENCSDEPCNICLDCPSAGDSLRHLPCLHKFHKECIDRWLGMKIWCPICKLNVFSQ

SEQ ID NO: 363571 - protein, 142 aa, Zea mays
  unsure (1)..(142): unsure at all Xaa locations
  Clone ID: MRT4577_94749C.1.pep
KVDRERHWIQPHVLWHRLKLTYCWAYQTTIRYITEGGGGIFLFSALLCYQKNSPQSSFLLVSYNLPSMLPQKYEMPSAYWENTFNLQIGHHIFIPSHLSMHCRRVESSEHIKLERNRKEFRIIQLLGGYXFVKLVQARQMPE

SEQ ID NO: 363572 - protein, 47 aa, Zea mays
  Clone ID: MRT4577_9474C.1.pep
ESTFLKKKKKKKKKKKKKKKKKKKKKKKKRKKKFKKKKKKKKRGGPF

SEQ ID NO: 363573 - protein, 82 aa, Zea mays
  unsure (1)..(82): unsure at all Xaa locations
  Clone ID: MRT4577_94750C.1.pep
VPSEPARLNFPTPLTRPLPPILNSPLPTPAPMIVVXIILSLLLPXYPXSHPYCXXXTIPHTTPNTFPLLSLLYLTYEIITYP

SEQ ID NO: 363574 - protein, 288 aa, Zea mays
  Clone ID: MRT4577_94751C.1.pep
LLHRVCRFDTLAGVAIKYGVEVADVKRANGLNADLQMFAHKTLRVPLHGSHQPAAAPPSLPSYSPRNHADRVAREWTTRRPPKNAASMDPFLKPPRSTVSPSMSLLQGYYGLPPTPQENLTYEGTEMATYAQGHHRKARSLSSSEHGDGADDAEKPIRRRQKADSELTTGREDNGGCLLPRAGQGLALRPKSGSRPDGNGSQLDLSATWVPSYGDGLHTVKKSSSTPEFQDSDSISIASEWLKSKWNLKPDAFTLTLPPLPLLDSIPKPLLDNIPNSIAAWRNKAAKD

SEQ ID NO: 363575 - protein, 60 aa, Zea mays
  Clone ID: MRT4577_94752C.1.pep
GLCYFFPNQNQGIGCKKNCPSCKKRADFYDHKRFWGLMFPPFWSVSRVWRYISPSKKNCG

SEQ ID NO: 363576 - protein, 84 aa, Zea mays
  unsure (1)..(84): unsure at all Xaa locations
  Clone ID: MRT4577_94753C.1.pep
MAAKIFGFLMLLGLSAGAVTETIFQQCXQALIASFFPQYLXSGVLRXCENPMLKPYRIQQAIAEGIXTLXPWFFQQREALLQQL

SEQ ID NO: 363577 - protein, 62 aa, Zea mays
  Clone ID: MRT4577_94754C.1.pep
QRPRPREKKKKKKKKKKKKKKKKKKKPKKKKKKKKKKKKKKRGPVRNLKRKNTQRATRRGLF

SEQ ID NO: 363578 - protein, 58 aa, Zea mays
  Clone ID: MRT4577_94755C.1.pep
GRILIFIPCLRCDCSLIVYDMPLIRIQCMSMDIRRPVPASLERLLRVMRRLLLPPTNF

SEQ ID NO: 363579 - protein, 45 aa, Zea mays
  Clone ID: MRT4577_94756C.1.pep
MATVPRDLIWQVLRKNNSFLVNHFANGNAKVQFTNEPNNLYNFHS

SEQ ID NO: 363580 - protein, 110 aa, Zea mays
  unsure (1)..(110): unsure at all Xaa locations
  Clone ID: MRT4577_94757C.1.pep
PYHAWQVVTMDFISGLPVSHKYNCIMVVVDKFSKYAHFLALAHPFTALTVANLYLSYIYKLHGLPSSIVSDRHPIFTSKLWQELVRLAWTKLCMICAYHPQSXDGQTERV

SEQ ID NO: 363581 - protein, 87 aa, Zea mays
  Clone ID: MRT4577_94758C.1.pep
YAVEAIIIENVWLADNASAIRGGRKHECNLRPPISIKCGTCRSRSYWNCLQEKAASDVAEPMPPDVELSVLPVDLARQVDIVCSRRV

SEQ ID NO: 363582 - protein, 54 aa, Zea mays
  Clone ID: MRT4577_94759C.1.pep
RRTRSCRSTVFMPLIFSLMKASAHCRLSVLGRARLGVGAGEHHVHAGPDRLARM

SEQ ID NO: 363583 - protein, 54 aa, Zea mays
  unsure (1)..(54): unsure at all Xaa locations
  Clone ID: MRT4577_9475C.1.pep
SKRRLFNMLLYKIKQRGFLELDLVLRKWVEDNIHSLDEYRVXTFILLLDLENPN

SEQ ID NO: 363584 - protein, 150 aa, Zea mays
  unsure (1)..(150): unsure at all Xaa locations
  Clone ID: MRT4577_94760C.1.pep
IPPAPRXVPQITVCFDIDANGILNVSAEDKTTXQKNKXHKKKVXAKNSLENYSYNMRNTIKDEXIASKLPADDKKKIEDAIDAAISWLDANQLAEADEFEDKMKELESLCNPIIAKMYQGAGEDMGGAGGMDEDAPXGSGGPGPKIEEVD

SEQ ID NO: 363585 - protein, 163 aa, Zea mays
  unsure (1)..(163): unsure at all Xaa locations
  Clone ID: MRT4577_94761C.1.pep
DVVLVGGSTRIPRVQQLLQDFFNGKELCKNINPXDEAVAYGAAVQAAILSGEGNEKVQDLLLLDVTPLSLGLETAGGVMTVLIPRNTTXIPTKKEQVFSTYSDNQPGVLIQVYEGERTRTRDNNPIIAKMYQGAGEDMGGAGGMDEDAPAGSGGPGPKIEEVD

SEQ ID NO: 363586 - protein, 49 aa, Zea mays
  Clone ID: MRT4577_94762C.1.pep
PLNSRQSFIKRALGRPRPFVPRPPSIIHVHETCSIAILMLVVSAVAATE

SEQ ID NO: 363587 - protein, 125 aa, Zea mays
  Clone ID: MRT4577_94763C.1.pep
LITISRTREGPLYLEDKLADVKGATLTADGTGVVFDVPAADVEDYIQASESAAQVTVDEVKQLPPLQEKDQSRGNSGGGRFGHGGGRRFSGGGGGGGGRGFSGRGGGGRGFSGRGGGGSRFNRRN

SEQ ID NO: 363588 - protein, 38 aa, Zea mays
  Clone ID: MRT4577_94764C.1.pep
IIAKMSQGAGENMGGAGGMNKDAPAGRGGPGPKIEEVA

SEQ ID NO: 363589 - protein, 711 aa, Zea mays
  unsure (1)..(711): unsure at all Xaa locations
  Clone ID: MRT4577_94765C.1.pep
MSPALAAGVEPMAVDDSASKKAKRKQLKAAAAAAAEAEAEAASVKKKEKKEKKRKVKEPSPPLPSAASSDEEEKSSTSSEETAPAAKKAKKEKTEKNXSRSRLQPQMTTARSRXSDEDPADPNALTNFRISEPLRQSLRSKGIKELFPIQATTFDLVLDGNDLVGRARTGQGKTLAFDLPILESLDNGANKASGRTEHGRTPSVIVLLPTRELPNQVHADFEFYGATFGLSACCVYGGSPYRPQEMALRRGVDIVVGTPGRIKDFIVKGTLNLKCLKFRVLDEADEMLNMGFVDDVELILGKVEDATKVQTLLFSATLPDWVNKLSMRFLKVDRKTVDLVGNEKLKASASVKHLALPCNKAARAQLIPDIIRCYSHGGRTIIFTETKDSASELSGLIPGSRALHGDVVQAQREVILAGFRSGKFQVLVATNVAARGLDINDVQLIIQCEPPRDVEAYIHRSGRTGRAGNTGVAVMLYEPRYKYSVSRLERESGVKFEHISAPQPTDVAQSAGSEAADAIASVSDSVIPVFRQQAEQLLSSSTLSAADLLAKALAKAVGYTDIKKRSLLSSMEDYATLHLQTGRQMWSPGFAFTILKRFMPEEKLADVKGATLTADGTGVVFDVPAADVEDYIQASENAAQVTIDEVQQLPPLQEKQQQQSRGNSGGGRFGHGGGRRFSGGGGGGRGFSGRGGGGRGFSGRGGGGSRFNRRN

SEQ ID NO: 363590 - protein, 95 aa, Zea mays
  unsure (1)..(95): unsure at all Xaa locations
  Clone ID: MRT4577_94766C.1.pep
MGNPIKGEKIASKLAAXAKKKMEGPIDAAISWLDPTHLPEAGEFDAKMKELESLCNPIIAKMFQGAGAPMGGPGAMDEDPPAGNGGPGPKIGGVG

SEQ ID NO: 363591 - protein, 104 aa, Zea mays
  Clone ID: MRT4577_94767C.1.pep
EEASPSSQYLTCFHHDNVEKTAEAAIEVIDSVAEATEKVADEVAQAFPGSETLKQAASKIKTIADEIEEDADKAEALIEKVDEIKKEVDSIVDPILDKVAKDKS

SEQ ID NO: 363592 - protein, 141 aa, Zea mays
  Clone ID: MRT4577_94768C.1.pep
MYFISAAKALVAAAVFSAVTAHNIVLPAHGRECFHESLHKDDTMTVTFQVGDREFGSAGNLDIDFWITNPTGQYETNEKSISNGDYSFTAKHDGKYLYCFGNEAWGANTKEVSFNVHGIVYVSEHEMPSDPLDREVRKLSD

SEQ ID NO: 363593 - protein, 210 aa, Zea mays
  Clone ID: MRT4577_94769C.1.pep
IFFSCTARMRPPPLSHGQIRQCPAAGNQNQQDRRVHLLCFLPILLLSSVFLTLTHLLSLFRSSPCRLELKPPAVQGLPRNGYATTCLILAHARPRHRSPARRGSAPPPAAVLRVAPRSRRYEPAPHRKSSASPSRAACSRAKPDSQPWSPSSSSASNPPPPHLLQALEHEHELASAPPLSSAPSAARGAGTHRCRAASVDAVNGPIPLTP

SEQ ID NO: 363594 - protein, 393 aa, Zea mays
  Clone ID: MRT4577_9476C.1.pep
MEHLRWRPTVNERDFIECALQSDLRVDGRHSFDFRKLKITFGREDGSSEVQLGETHVMGYVTVQLVQPYRDRPNEGTLAIFTEFSPMADPSFEPGRPGELAIELGRVIDRGLRESRAVDMESLCVVAGKHVWSVRVDLHILDNGGNLIDAANIAALAALSTFRRPECTVGGDDGQQVTVHDPEVRDPLPLTIHHMPIAVTFAYFGEGNIVVLDPTYKEEAVMGGRMTAIVNSNGDVCAIQKAGGEGVMSSVIMQCLRIASVKAADITSKIKKAVDSYTTEKALKKVKRLPTSVPQKINVTNVTMDGKGDGELEKQSVQMHSDVQQISKDPPTMVKASSREDAQPMTESSNAEVNTSSAVAAGESESHEIGSPKSLKDAIKPKHKRKKKKSDRS

SEQ ID NO: 363595 - protein, 145 aa, Zea mays
  unsure (1)..(145): unsure at all Xaa locations
  Clone ID: MRT4577_94770C.1.pep
NKITIPNDKGRLSKEEIEKMAQHAEKSKSEDEEHKKKVESKTSLEXYAYNMRNTIKDEKIASKLAAAHKKKIEDAXDAAISWLDPTQLAEADEFDDKMKELESLCNPIIPKMSQGAGAHMGGSGGMDEHAPAGSGPPGPKIEEVD

SEQ ID NO: 363596 - protein, 201 aa, Zea mays
  Clone ID: MRT4577_94771C.1.pep
MAALSSCVASGGLALQATLVVSLPHRRGTPVVISVSSHGRRPSLIGSTMNPSGMAPIKRTTRIRAVDPGPANSLGGSLTIIPIHDLLSSWLWMFGAAIAAAVPLYRRFRALEDNVEKTAEAAIEVIDSVAEATEKVADEVAQAFPGSETLKQAASKIKTIADEIEEDADKAEALIEKVDEIKKEVDSIVDPILDKVAKDKS

SEQ ID NO: 363597 - protein, 133 aa, Zea mays
  Clone ID: MRT4577_94772C.1.pep
SKEEIEKMVQAAEKSNSEAEDPKKKVESKTSLENYAYSMRNTIKEEKIASKLAPAAKKKMEDPIDAAISWLDANQLPEADEFDAKMKELETLCNPIIAKMSQGAGPAMGGPGAMDEDPPAGSGGPGPKIEEVD

SEQ ID NO: 363598 - protein, 46 aa, Zea mays
  Clone ID: MRT4577_94773C.1.pep
HLPVPTSAPKTAPPLPLTSRRTPSGENESAERGLGWSDWGGSADCG

SEQ ID NO: 363599 - protein, 76 aa, Zea mays
  unsure (1)..(76): unsure at all Xaa locations
  Clone ID: MRT4577_94774C.1.pep
KKVKAAIHRSISWLDSNQLAEAAEFDAKMKELESLCNPIIAKMYQGAGTDMGGSGGMYXYAPAGSGGPGPKIKEVD

SEQ ID NO: 363600 - protein, 119 aa, Zea mays
  unsure (1)..(119): unsure at all Xaa locations
  Clone ID: MRT4577_94775C.1.pep
MGANCCIAAKQRPQPCIIPVEVSAYRNVRHSPSWSFRWDNRTHIEDIMEIPTFLSNHSSGSIRPETKSGSIAPTEGFSNGGSPSELFHKVKWQKSEKKMETSKVAXSDPRDRPTASHSS

SEQ ID NO: 363601 - protein, 113 aa, Zea mays
  Clone ID: MRT4577_94776C.1.pep
ELKKKVEAKNSLENYAYNMRNTIKDEKIASKLAGDDKKKIEDAIDAAISWLDANQLAEADEFEDKMKELESLCNPIIAKMYQGAGADMGGAGGMDEDAPAGSGGPGPKIEEVD

SEQ ID NO: 363602 - protein, 108 aa, Zea mays
  unsure (1)..(108): unsure at all Xaa locations
  Clone ID: MRT4577_94777C.1.pep
VEAKNSLEKYSYNMGHPIKDEKIGSQLPADYKKKIEGXFDRPLSGLAPTQFPKGARFEAKMKKLESFCNPIFAKMYQGAGENMGGAGGMDENAPAGSGGPGPKIEEVD

SEQ ID NO: 363603 - protein, 131 aa, Zea mays
  unsure (1)..(131): unsure at all Xaa locations
  Clone ID: MRT4577_94778C.1.pep
FPNERVTLTCSQRARIAAGAALDSPRYPEASVSKAVGDDMQPLVXDNGTGMVKDDLAGXDHASRGDFPSIGRHPRHTGVMVDMEHKDAYVADDDQSKRGILIMYDPIEDGIDSNCHDREKIWHHXFYSELR

SEQ ID NO: 363604 - protein, 52 aa, Zea mays
  Clone ID: MRT4577_94779C.1.pep
MAAAGKSSSAMEETVAATAAARGRRGIDRQAVDRGIAYLLMVAALVATYALH

SEQ ID NO: 363605 - protein, 256 aa, Zea mays
  Clone ID: MRT4577_9477C.1.pep
VPSGFALAVTFAYFGEGNIVVLDPTYKEEAVMGGRMTAIVNSNGDVCAIQKAGGEGVMSSVIMQCLRIASVKAADITSKIKKAVDSYTTEKALKKVKRLPTSVPQKINVTNVTMDGKGDGELEKQSMQMHSDVQQISKGDENQQSIKRNSPLTRDRIAKHKQTSTFIGGPSNWDPYSKGVSLRSLKISDLPDPPTMVKASSREDAQPMTESSNAEVNTSSAVAAGESESHEIGSPKSLKDAIKPKHKRKKKKSDRS

SEQ ID NO: 363606 - protein, 68 aa, Zea mays
  Clone ID: MRT4577_94780C.1.pep
LVKSLTLIEGWPHILMFGHPLARKCLVEQTFVASQMSYHLASGKRASLSSVHLVRLETPGDLPPKAPF

SEQ ID NO: 363607 - protein, 87 aa, Zea mays
  Clone ID: MRT4577_94781C.1.pep
RRSSPPLDGLVAVRLAIRLHLVLDAVKFSTLLSVLDTVLLYVALDTLPQSSTRGRGWSRRDLAAEVAERGRRGEGDGAGESRRCEDA

SEQ ID NO: 363608 - protein, 50 aa, Zea mays
  Clone ID: MRT4577_94782C.1.pep
MGSPLGGWPSYNPHNFSQLVPADPSAQPSVGQPSATCLPGDLTSSIMMYC

SEQ ID NO: 363609 - protein, 62 aa, Zea mays
  Clone ID: MRT4577_94783C.1.pep
DAFPVLELCPRTLPFQILTFSSLTVPFPLKDKDPVLCYGSKASPPNHAVSSANRPRNFAGSP

SEQ ID NO: 363610 - protein, 112 aa, Zea mays
  unsure (1)..(112): unsure at all Xaa locations
  Clone ID: MRT4577_94784C.1.pep
KKEQXPPLLSCWPAGDLMQQMFSQSYYRPKIPEASGGHHADDFFAALAELEWDPMSLIFPGGDPGKKGRMSSESLGMGPPPLFNMLDWGASPTDVAATSAGSSFEQDKEWLA

SEQ ID NO: 363611 - protein, 56 aa, Zea mays
  Clone ID: MRT4577_94785C.1.pep
SNFSLSPAPGGADTGLRHEKPFLYLVLGQFLGPDTCQRDDRWRGRLGTKIPRAILC

SEQ ID NO: 363612 - protein, 101 aa, Zea mays
  Clone ID: MRT4577_94786C.1.pep
IFVEKTGRFHLSVPVMGHFGGCQWCLSQERSVTFPGGDGKSSTCKGVIRSQCHDRRTMMRIYSGATYSYNNAVYSWQLHKWSQIALSTLTLPGAVDPLLAF

SEQ ID NO: 363613 - protein, 64 aa, Zea mays
  Clone ID: MRT4577_94787C.1.pep
QGCSQGLTMVIPMPLSMIVSSSVGRCQRPHVDEQSPSGHPACSCPPTSGSLLYSRHRGSVRWSP

SEQ ID NO: 363614 - protein, 192 aa, Zea mays
  Clone ID: MRT4577_94788C.1.pep
PPRPGGSGPPGGERPWAPPQTQGPPPVGGGGPPGFKPGNNNPPPRVVPAGGLAKVQRAGGIIPPPPRVGGGFSPPGPQFGLMYPQRPFFPWFLGEGMEEGEFSQAREDLAAPQKDSQGVGAEFSQGGGGPQGGEFLTLFWGGVVGVVCPRFPVVCPEGPPSGFVFVGFYLSVGGGVPPSVVRLFSPPLLLGF

SEQ ID NO: 363615 - protein, 88 aa, Zea mays
  Clone ID: MRT4577_94789C.1.pep
FALLLTCNVFYLDQWLAAWFLSFKKKKKIKKKKKGRPPISDPFAPGLIPGREPEGVPVSPKGSRIKLWGNQGKSFSRGKIFTRQNSHK

SEQ ID NO: 363616 - protein, 114 aa, Zea mays
  Clone ID: MRT4577_9478C.1.pep
MRTQSIKRNSPLTDRIAKHKQTSTFIGGPSNWDPYSKGVSLRSLKISDLPDPPTMVKASSREDAQPMTESSNAEVNTSSAVAAGESEAHEIGSPKSLKDAIKPKHKRKKKSDRS

SEQ ID NO: 363617 - protein, 109 aa, Zea mays
  unsure (1)..(109): unsure at all Xaa locations
  Clone ID: MRT4577_94790C.1.pep
FTRLPINLLSPPTLTHNPPPGKSPPPHTHTRXNPPPPTGGGPPPRTTKTPDPKKXNTRPPHKQQHSPPHLYKPPSPFTGRAGPPKFSKRDTRRPPPXQSPFLFRAPPPR

SEQ ID NO: 363618 - protein, 113 aa, Zea mays
  Clone ID: MRT4577_94791C.1.pep
TLNFQPASFLEPTDACYKTNFSSDLHHNTCNILDSLKRSYLLFLLSFYIQTSRSFTKEEISKHNTRKDCWIVIKDKVYDVTPYVEEHPGGDAILNNAGGDSTEGFFGEGSWDF

SEQ ID NO: 363619 - protein, 97 aa, Zea mays
  Clone ID: MRT4577_94792C.1.pep
MVIPSKPSEPTPPFTSMDSPFTAARYHSLVIEKETFPHDALEATAWTEDGLIMAARHKKYKHIQGVQFHPESIITPDGKKIILNFVRFIEELEKQRS

SEQ ID NO: 363620 - protein, 445 aa, Zea mays
  unsure (1)..(445): unsure at all Xaa locations
  Clone ID: MRT4577_94793C.1.pep
MTVHCGFVRGKVPGLNTGFDIDEADHSEMQLCQSTVVASAIFGNYDVMQQPENISKFSKDTVCFFMFLDEETEAAIKNTTIGHTKKIGLWRVVVVRNLPFTDARRNGKVPKLLLHRLFPNARYSIWIDGKLKLVRDPYQVRTRGLQTRDTSAHPRPLPTGTAQMACSHIAXAAGVSSPAAAAARSPAHSPAAAFARLRSTPRFASAGLSVKGNGAAFPLVAAAGPAAAAPVADLDGRPATEKQPIIVIDNYDSFTYNLCQYMGELGLNFEVYRNDELTIEDVRRKNPRGILISPGPGEPQDSGISLQTVLELGPTIPIFGVCMGLQCIGEAFGGKIIRAPSGVMHGKSSPVYYDEELGKALFNGLPNPFTAARYHSLVIEQETFPHDALEATAWTEDGLIMAARHKKYKHIQGVQFHPESIITPEGKKIILNFVRFIEELEKQRS

SEQ ID NO: 363621 - protein, 93 aa, Zea mays
  Clone ID: MRT4577_94794C.1.pep
RFHASSPVLPTCSLFFRVPLGLIPGPSFFNCLAGKPFGSPSLIPLEAIPFSPSGVLIKGPAQLAFPNSCPFGLVFGTPSLPVLYPLGGGLFPP

SEQ ID NO: 363622 - protein, 282 aa, Zea mays
  Clone ID: MRT4577_94795C.1.pep
MACSHLAAAGGSSPAAAAVVRSPTHSPAAAFARLRSTPRFSSAGLSVKGSRAAFPWVAAAGPAAAAPVADLDGRPATEKQPIIVIDNYDSFTYNLCQYMGELGLNFEVYRNDELTIEDVKRKNPRGILISPGPGEPQDSGISLQTVLELGPTIPIFGVCMGLQCIGEAFGGKIIRAPSGVMHGKSSPVYYDEELGKALFNGLPNPFTAARYHSLVIEKETFPHDALEATAWTEDGLIMAARHKKYKHIQGVQFHPESIITPEGKKIILNFVRFIEELEKQRS

SEQ ID NO: 363623 - protein, 51 aa, Zea mays
  Clone ID: MRT4577_94796C.1.pep
VSADVSAHHQGWFMYFKAGYLIEWGPKNFWLVVGGIKLGRKSFNPRSGFLF

SEQ ID NO: 363624 - protein, 248 aa, Zea mays
  unsure (1)..(248): unsure at all Xaa locations
  Clone ID: MRT4577_94797C.1.pep
IGYLEAGRENLVTLRQVTPPPTLAPSLPAPVADLDGRPATEKQPFIVIDNYDSFTYNLCQYMGELGLNFEVYRNDELTIEDVRRKNPRGILISPGPGEPQDSGISLQTVLELGPTIPIFGVCMGLQCIGEAFGGKIIRAPSGVMHGKSSPVYYDEELGKALFNGLPNPFTAARYHSLVIEQETFPHDALEATAWTEDGLIMAARHKKYKHIQGVQFHPESIIPPVNKKIILNFVXHIEXLEKQRSCRR

SEQ ID NO: 363625 - protein, 107 aa, Zea mays
  Clone ID: MRT4577_94798C.1.pep
KGIRTFGGSITDAHIVKKMIQVARHLENMAYSIETLLDVDTLSWRSSRADYTPLSSARTRRCSHLTGPSNGGGRIGCLDSRSMNMEKDLVPTRSATAHGVAKAMESR

SEQ ID NO: 363626 - protein, 46 aa, Zea mays
  Clone ID: MRT4577_94799C.1.pep
STDIPLHMPCWSIKPLLQTRATYTLTITKKNTQICFQNELLNSNIL

SEQ ID NO: 363627 - protein, 115 aa, Zea mays
  unsure (1)..(115): unsure at all Xaa locations
  Clone ID: MRT4577_9479C.1.pep
MRLQTISSIYSRAQKNPIDTRKVGLRALALLALATXATYTHTSDXCGCHPPTKGHLPSPEHLSTTDLRTPSGHITTSGHLSTNDQLTTWDHVPSPVYLXDAIXHYSTKPGRPQCH

SEQ ID NO: 363628 - protein, 41 aa, Zea mays
  Clone ID: MRT4577_947C.1.pep
ARGGNDLITFTRDTLRTTGYSPLLLAVIVRIFLRRSHHHLS

SEQ ID NO: 363629 - protein, 101 aa, Zea mays
  Clone ID: MRT4577_94800C.1.pep
ERPPGQVLFFFFFFLFSFFFFFFFFSFFLLCFPFRFNARYPQAYGNSVLRPPLGTTLTLQTCERLPSFSPGGPLLIPKNFVMRIPPTIKLKAGPPQRAACR

SEQ ID NO: 363630 - protein, 59 aa, Zea mays
  Clone ID: MRT4577_94801C.1.pep
HASALVYTLATDGSPFPLELFTPWGEATLADFYVNVIAISVRVIYKEAHWISSAEWVVL

SEQ ID NO: 363631 - protein, 71 aa, Zea mays
  Clone ID: MRT4577_94802C.1.pep
KLQPSSAHRHANALFINPRFRPGAFPNWGEMRPAHGGHRSFFPMGNSFRMIFPRGGRLATKLNELVTLDGD

SEQ ID NO: 363632 - protein, 131 aa, Zea mays
  Clone ID: MRT4577_94803C.1.pep
GKNRDGPAARSLTVLSIAGSFSGEGATYPSPITAHPKGFYTAHSGPNTPTGSTGPAPGPLLHRTGCIFLGWAPVFTGGTWPAMLSTPMPPGGGKHKPGLGLTQRGFQSKVGLGLKSQPFAIRGLDLNQFYG

SEQ ID NO: 363633 - protein, 84 aa, Zea mays
  Clone ID: MRT4577_94804C.1.pep
LSYFTLLFKIKSPKPIYKQNPKAMTTLKNRAMQKPKHSFIQPQGTGTRIISRQETTQKVISHFFLNQPTFPTRLSQHYKKKFCF

SEQ ID NO: 363634 - protein, 104 aa, Zea mays
  unsure (1)..(104): unsure at all Xaa locations
  Clone ID: MRT4577_94805C.1.pep
PPPGARGGPQGGPGPXRGPRPWGGDSPPGGPPPPPGPXGFGPPPGNFFGQGVVLPMGAPPPRGFFFVTNNPVFVKNRLKPAPGYPPGEILKGFSRKTVKTFCSP

SEQ ID NO: 363635 - protein, 237 aa, Zea mays
  Clone ID: MRT4577_94806C.1.pep
LKPDITAPGVNVIAAWSGATSPTDKSFDKRRVAFNILSGTSMSCPHVSGVAGLIKTLHPDWSPAAIKSAIMTSATVLDAEMKPILNSSYAPATPFSYGAGHVFPSRALDPGLVYDMRTMNRGSFVCPTTPMSLHDLNYPSITAHGLPAGTTTMVRRRLKNVGLPGTYTAAVVEPEGMHVSVIPAMLVFRETGEEKEFDVIFTVSDRAPAASYVFGTIVWSDGSHQVRSPLVVKTTQG

SEQ ID NO: 363636 - protein, 161 aa, Zea mays
  unsure (1)..(161): unsure at all Xaa locations
  Clone ID: MRT4577_94807C.1.pep
MTNTIQKKFKVSSTQLLYQSCPYQSLTLFLIGPFLDGFLTNQNVFAFNYTSQVVFFIVLSCLISVSVNFSTFLVIGKTSPVTYQVLGHLKTCLVLAFGYVLLHDPFSWRNILGILIAVVGMVLYSYFCTVEXQQXNVEVSPQQVKEKRAGPLIXDSMSKVK

SEQ ID NO: 363637 - protein, 63 aa, Zea mays
  unsure (1)..(63): unsure at all Xaa locations
  Clone ID: MRT4577_94808C.1.pep
LWAHGAPITFIHLGRAPSETEPGTAHSGCLLXXFPPNYGFHQASPRMRRRRPPRGGPSLSDXP

SEQ ID NO: 363638 - protein, 116 aa, Zea mays
  Clone ID: MRT4577_94809C.1.pep
SRGRGRTDASARALWINKALEFYGGKAPFDVNTDCIMYDHCVVHSGRTTKKGCIMQNDWVFTQLDNKNNEDEMMRLENEAAPRRFDEDEVMDMSKSQSPFTQYYRMTHTPEWDIWD

SEQ ID NO: 363639 - protein, 42 aa, Zea mays
  Clone ID: MRT4577_9480C.1.pep
LTHFIFVQASLFRVITLNQLPFLDPCALSAFFSMEKNCDDRY

SEQ ID NO: 363640 - protein, 85 aa, Zea mays
  Clone ID: MRT4577_94810C.1.pep
SRMIVGNNNSKCFLRVSWHAKNYIDYSVFWSWPCLCAYDNAELSQTLEMAILVLTNYGIQGFNLLVETFSCLTLYWKIFLRSYII

SEQ ID NO: 363641 - protein, 117 aa, Zea mays
  Clone ID: MRT4577_94811C.1.pep
LTDQSLREGVTKHGLVKQSSSSRQQTSTEAMTNHQSVRRQPDARGRGWSRPRGEVTRRRPASQKVWPMRPSSGGEAVSRPSVVANARTVEVLSVREARMWRRARSWTGRGRTALAGC

SEQ ID NO: 363642 - protein, 331 aa, Zea mays
  unsure (1)..(331): unsure at all Xaa locations
  Clone ID: MRT4577_94812C.1.pep
MEAAEERPRRRPAGLGVLALLCSSLLLNVLFLAYYYFLSPPSQLADGGSCGLSWALRAARDAEALAATDSCSGHGQVFLDGVVGEDGRPGCECNRCFDGPHCSIRTPNCTADATSGDPLFLEPYWKRHAAASAVLVPGWHRLSYATTDGLFQSVELENHIRRLHRAVGNAVVDGKRLVFGAGSTQLINALVHALSPDANAAAASPPAXVVATAPYYPPYRTQTAMFDGREYRWEGTTAAAWANASRNSSSFIEFVTSPNNPDALLRAPVLRGSAVIADHAYYWPHFTHIAAPADEDVMLFTMSKPSGHAGSRLGWALIRDEKVSKRAYEYV

SEQ ID NO: 363643 - protein, 134 aa, Zea mays
  unsure (1)..(134): unsure at all Xaa locations
  Clone ID: MRT4577_94813C.1.pep
TVVRAGARTQDGHFLRTTQRLIFSGTQRKDGMTLGYYNIHKECTLXHVPLRLRGGAKKRKKMTNTKPKKIKHMHNKEKLSGLQLYKADDTTSKVTRLRKECPNXECGAGVFMANHLDRHYCCKSGLTYVYNQKA

SEQ ID NO: 363644 - protein, 65 aa, Zea mays
  Clone ID: MRT4577_94814C.1.pep
DALVSAREVATIKTKRNKKRMMRLLRKRRQHYAERQVSSWALRTPWITTNYMTYILSVNTWQDAT

SEQ ID NO: 363645 - protein, 46 aa, Zea mays
  Clone ID: MRT4577_94815C.1.pep
AQDRAQGLGSNGPIIQILSRTALSRAHLDSRVRDRHRRNSQAVTRR

SEQ ID NO: 363646 - protein, 117 aa, Zea mays
  unsure (1)..(117): unsure at all Xaa locations
  Clone ID: MRT4577_94816C.1.pep
MDPTPPSRLLCNNMPSQQSPLNVTVTXXLSHEKRLRLVHATTESSETDAEQPEEPKPATKIKKMPLESKQKMIMKQRARMKLAKKLRHRRXKRLLRKRKLRKKGRWPPSKMKKLKNV

SEQ ID NO: 363647 - protein, 85 aa, Zea mays
  unsure (1)..(85): unsure at all Xaa locations
  Clone ID: MRT4577_94817C.1.pep
QKKSAYILPTRGENTFQVYEYITYEANKHISRASFPGMQERTIITSSLXKTYRGTGDHNSKFAAQLVGTHPAIKIARLGKGPLTN

SEQ ID NO: 363648 - protein, 41 aa, Zea mays
  Clone ID: MRT4577_94818C.1.pep
IVPLNLSNILHCVVPVCNVYTMLLTCMMYVPPLLYMPLYLS

SEQ ID NO: 363649 - protein, 117 aa, Zea mays
  Clone ID: MRT4577_94819C.1.pep
AFHSPAHARVHPGGFFRHPGRLPTHGRRHEPGEDAGAGRGGGELPGGWDPPAAPHPDPVGGPPRQTGGTLGAKTGGTPKQRKFVSSNKLSHGGKKTREKKTPHPPHPKKKNKPKKWK

SEQ ID NO: 363650 - protein, 42 aa, Zea mays
  Clone ID: MRT4577_9481C.1.pep
LVCCVQVREPTCSTRPRTVVRLQSPPGPGGRSFEEMRPIAWL

SEQ ID NO: 363651 - protein, 72 aa, Zea mays
  Clone ID: MRT4577_94820C.1.pep
GGLVRSPLPEGVRLVFEAVAAVDNNYFMSVIDFASSGALEEEGLVPAVDPLETVFSPDVDEYSTAGGLISMT

SEQ ID NO: 363652 - protein, 101 aa, Zea mays
  unsure (1)..(101): unsure at all Xaa locations
  Clone ID: MRT4577_94821C.1.pep
PQRTHGTPNPTTIPKGAPPPPKTRRPPNTRPPXPQKPPPTPHPPPPPPPXPPPPPPPPPSPPPPPPPPPHTTTPPPPHPPPPLTGTRPPPPXPSPPPPPPP

SEQ ID NO: 363653 - protein, 94 aa, Zea mays
  Clone ID: MRT4577_94822C.1.pep
PLQPVLAQPVSVFFITCRSQLQMNLRRETKYLPIPLRRGPHAERATMSGAAVYQEMVAVIATLYEGHYTDARSLHAGRPSVSIPYVSLPCPGYY

SEQ ID NO: 363654 - protein, 104 aa, Zea mays
  Clone ID: MRT4577_94823C.1.pep
QFRAGLPGGKSPSTFFRPFSFHISAERVLWLTSSVFGPPARLSVYLATLTNQVAMYDLDIQIPTAWTSLSLTPILCDSGAAARPEDHPHVRIQQGIGRTSWTTA

SEQ ID NO: 363655 - protein, 103 aa, Zea mays
  unsure (1)..(103): unsure at all Xaa locations
  Clone ID: MRT4577_94824C.1.pep
ARPLLPDVLTSPPDSAQKTPFXRLPPVARRRSMPRFQQQPERDASRPPARGPTPSVLRAVFALHRQSAFVLDXHLSVPIKCSNIKFLKGHVWGYMGRRRVLFL

SEQ ID NO: 363656 - protein, 111 aa, Zea mays
  unsure (1)..(111): unsure at all Xaa locations
  Clone ID: MRT4577_94825C.1.pep
CGFTFFFASFGCYAPTFMVPAEIFPASFRSSCLCLMPVFGKLGVSIGSFGFLYLAQNPDPAKSDFGYXSGIGVRYSLFFLSGCFLLGLAFPLLVLSAPRWCLKCMSGKINE

SEQ ID NO: 363657 - protein, 53 aa, Zea mays
  Clone ID: MRT4577_94826C.1.pep
PNDNSTLQQNIQEEQQICSDPNCSQKTKFRKHKVQKRITDLDAHSVYKLQQTA

SEQ ID NO: 363658 - protein, 70 aa, Zea mays
  Clone ID: MRT4577_94827C.1.pep
VISSFCLLWGEGERERARERSNIEACKGSSNQNFGGVQPASGGSARRTCGGGQPDPVAQNESVATGGALS

SEQ ID NO: 363659 - protein, 621 aa, Zea mays
  Clone ID: MRT4577_94828C.1.pep
MQRRAPRLRVLLHLLILVPALSEVPDHYASPRVGSGTRTGLSNSPAQEYLDPTYPVPRSPPGASTCVLPVLSYSFANTYGTPPAKAAYAPPAECPAPWSLVVLSFSVAIAGDQYDRVAAVWLDGAELLRTTTAEPTTDGVRWTIHKDVTRYSALLRSPRGGELSVMLENLVNDVYTGVYNVSVSLEFHGVPAYLGDAGSSSAAGSAEPGGQATLKLPASYFQPADLILPISEGMGSSNGFWFRIQNSSDPRSKLVRIPSNTYRAVLEVFVSPHSNDEFWYSNPPYLYIRENNLTTGRGNAAYREVVVSVDRHFAGSFVPFPVIYTGGINPLFWQPVAALGAFDLPTYDVELTPFLGILVDGKPHEIVLSVVDGIAEWLVDANLHLWLDPASTNVSAAPSRYRTPRLSIKRRYSTRRPLDGKFKIRAKRKSQFSGWVKSSFGNFTTNVETELEVTSLVDFTSQGRNKTVRLQVEQDTEVVVRSSETRKAVGKVETEAKYPLWLEMVTEDGENDTYVMRANLTHSLSVETDAEAEGLFDGETRVVDEQAAAGWMLVRGHDVLDGSAATTQTYRYSNEAGRYERAIDTLDGAVLSDNVTESYWASGDGLAWLAAGPAGGGAMEL

SEQ ID NO: 363660 - protein, 107 aa, Zea mays
  unsure (1)..(107): unsure at all Xaa locations
  Clone ID: MRT4577_94829C.1.pep
SSSPLAVGKAPTNLRXQLVQQIVPALAQLGVANPAAYLRQLLPFNQLAVSDSAGGLQQRQQFLNPLAVANPLVAAFPQQQQLVPYNQFSLMNPALLWQPPPVGGAIF

SEQ ID NO: 363661 - protein, 217 aa, Zea mays
  Clone ID: MRT4577_9482C.1.pep
WVPRGRPGHPILPRGGNSQFSRRRLGDRRRRHPTPGALRTRSGSSLATNTHQDFSAGPVPDAIKRKLAAETSVPPQQSSFSCVTGQKQPQNWYPTKKKVKVPHLPSQILQCPRPNVVPSFWCKICKVDCVTEFNFSAHVGGKKHKAKKLEILGKRNAGGPASRCAGNRSAGQNGLAVSGSRSSEQNVAGSVAAGPNCDMSSESRTNGTEGSGCTVRL

SEQ ID NO: 363662 - protein, 185 aa, Zea mays
  Clone ID: MRT4577_94830C.1.pep
FSLPWRAPPSLAAVPLCWSELQLAAPVAEASSLRAHQLPMSRSIRLNRSSPAVHACRCAAALVRISPKLLPWLTGVWPAPIRVRSYRHRRVVAGDSFACASNSRVESFSCSPARPLGSLGLNPHRVVDLVGYHRSSSRRVCSSIYVTLLYRRRTRHPLFDPHLTSSLQTRSRRRFVCRQEIPSVG

SEQ ID NO: 363663 - protein, 101 aa, Zea mays
  Clone ID: MRT4577_94831C.1.pep
YPPSNYFGRRTLGLDHGGSEFPSLLRPPQDRRLTPPANRTYTPRPRCSSLNDEGRAHMGISMRRMIYKMWLHSFSVGAICVSDSVALYDETHLMNDLKYAH

SEQ ID NO: 363664 - protein, 130 aa, Zea mays
  unsure (1)..(130): unsure at all Xaa locations
  Clone ID: MRT4577_94832C.1.pep
MREGIPIHIARACMQRTNAXAELGCLEHDVHVDSAHCPVDKTIVGGRRQQKDLISETGAAKHVXRAGSGELEPIVMEEGQTETXSTVLTREQLMRGKEDAVNTTARGHYTIVRASVERWPRYLDEACMTI

SEQ ID NO: 363665 - protein, 205 aa, Zea mays
  unsure (1)..(205): unsure at all Xaa locations
  Clone ID: MRT4577_94833C.1.pep
LTLLPSSVQQQASGTPPASLPPPIRCLLATRRWPPPPPSPSPRRRPPPSPRDPRCLEELTRRELELAAASASRGRXGRVMMALAVDVSRFEGVPMAPPDPILGVSEAFKADKSELKLNLGVGAYRTEELQPYVLNVVKKAENLMLEKGENKEHFSLSRHWTLRLAAAFIQRYFPEAKVLISSPTWGNHKNIFNDARVPWSEYRYY

SEQ ID NO: 363666 - protein, 277 aa, Zea mays
  unsure (1)..(277): unsure at all Xaa locations
  Clone ID: MRT4577_94834C.1.pep
SLLPSSVQQQASSTPPAAAVAARSKVFGGGVNQARTRTGCRVGITRKNFGRVMMALAVDVSRFEGVPMAPPDPILGVSEAFKADKSELKLNLGVGAYRTEELQPYVLNVVKKAENLMLEKGENKEYLPIEGLAAFNKATAELLLGADNPVINQGLVATLQSLSGTGSLRLAAAFIQRYFPEAKVLISSPTWGNHKNIFNDARVPWSEYRYYDPKTXVGLDFEGMIADIEAAPEGSFVLLHGCAHNPTGIDPTPEQWEKXADVIPEKKHMPFXFDVAY

SEQ ID NO: 363667 - protein, 574 aa, Zea mays
  unsure (1)..(574): unsure at all Xaa locations
  Clone ID: MRT4577_94835C.1.pep
MKNVAKCDTWCELQNPANHRVFERKLRPKPSGGGHVCRGGPQFVTETPRPAPSTRSPPRPAAPLPSARPSSPHSRKRRASYPILISPPFFSAAAGQRHATRLTPASDPLLTRHPEMATAAAFSVSSPAASAVAARSKVFGGVNQARTRTGCRVGITRKNFGRVMMALAVDVSRFEGVPMAPPDPILGVSEAFKADKSELKLNLGVGAYRTEELQPYVLNVVKKAENLMLEKGENKEYLPIEGLAAFNKATAELLLGADNPVINQGLVATLQSLSGTGSLRLAAAFIQRYFPEAKVLISSPTWGNHKNIFNDARVPWSEYRYYDPKTVGLDFEGMIADIEAAPXGSFVLLHGCAHNPTGIDPTPEQWEKIADVIQEKKHMPFFDVAYQGFASGSLDEDAFSVRLFVKRGMEVFVAQSYSKNLGLYSERVGAINVVCSAPEVADRVKSQLKRLARPMYSNPPIHGAKIVANVVGDPTMFGEWKQEMELMAGRIKNVRQKLYDSLSAKDKSGKDWSFILRQIGMFSYTGLNKAQSDNMTDKWHIYMTKDGRISLAGLSLAKCDYLADAIIDSFHNVN

SEQ ID NO: 363668 - protein, 122 aa, Zea mays
  unsure (1)..(122): unsure at all Xaa locations
  Clone ID: MRT4577_94836C.1.pep
MVKICCVGAGYVSGPTMAVIALKGPHIDRAVVDISNPTIAAWXNRDTLPIYEPGLNDVVNQCTCRNLLFSTDVEKHVDEADIIFLSAITRTKTRGLGSGMDSELIYCXSAAPMIVYVSKSDK

SEQ ID NO: 363669 - protein, 520 aa, Zea mays
  Clone ID: MRT4577_94837C.1.pep
MKWTEKQRAEYRRREGGAGGRGRAGYPILISPPFFSAAAGQQHATRPTPASDPLLTRHPEMATAAAFSVSSPAASAVAARSKVFGGGVNQARTRTGCRVGITRKNFGRVMMALAVDVSRFEGVPMAPPDPILGVSEAFKADKSELKLNLGVGAYRTEELQPYVLNVVKKAENLMLEKGENKEYLPIEGLAAFNKATAELLLGADNPVINQGLVATLQSLSGTGSLRLAAAFIQRYFPEAKVLISSPTWGNHKNIFNDARVPWSEYRYYDPKTVGLDFEGMIADIEAAPEGSFVLLHGCAHNPTGIDPTPEQWEKIADVIQEKKHMPFFDVAYQGFASGSLDEDAFSVRLFVKRGMEVFVAQSYSKNLGLYSERVGAINVVCSAPEVADRVKSQLKRLARPMYSNPPIHGAKIVANVVGDPTMFGEWKQEMELMAGRIKNVRQKLYDSLSAKDKSGKDWSFILRQIGMFSYTGLNKAQSDNMTDKWHIYMTKDGRISLAGLSLAKCDYLADAIIDSFHNVN

SEQ ID NO: 363670 - protein, 180 aa, Zea mays
  unsure (1)..(180): unsure at all Xaa locations
  Clone ID: MRT4577_94838C.1.pep
GTCAVAGIMSDANILINTARLHAQRYALSYQEPIPVEQLVQSLCDTKQGYTQFGGLRPFXGVSFLFAGWDKHHGFQLYMSDPSGNYGGWKAAAVGANSQAAQSMLKQDYKDALTREEAVGLALKVLSKTMDSTSLTAEKLELAEVFLQPDTGEVQYQVCSPEALGKLLAKSGLTQPTPEA

SEQ ID NO: 363671 - protein, 82 aa, Zea mays
  Clone ID: MRT4577_94839C.1.pep
PDRYIIYHNDGVECALSTHFPTGSPNLTSNKDHVAEPTRPRPRNRPLAPPRTLRLVNESRACAEHDHDPTRPHSTSNISKID

SEQ ID NO: 363672 - protein, 221 aa, Zea mays
  Clone ID: MRT4577_9483C.1.pep
LALLPPGRPHPTQSYPAGGILSQFSRRRLGDRRRRHPTPGALRTRSGSSLATTTHQDFSAGPVPDAIKRKLAAETSVPPQQSSFSCVTGQKQPQNWYPTKKKVKVPHLASQILQCPRPNVVPSFWCKICKVDCVTEFNFSAHVGGKKHKAKKLEILGKRNAGGPASRCAGNRSAGQSGLAVSGSRSSEQNVAGSVAAGPNCDMLSESRTNGTEGNGCTVQL

SEQ ID NO: 363673 - protein, 195 aa, Zea mays
  unsure (1)..(195): unsure at all Xaa locations
  Clone ID: MRT4577_94840C.1.pep
MSRRYDSRTTIFSPEGRLYQVEYAMEAIGDAGSALGILAADGVVLVGEKKVTSKLLQTSRSAEKMYKIDSHLACAVAGIMSDANILINTARLHAQLYMSDPSGNYGGWKAAAVGANSQAAQSMLKQDYKDALTREEVGLALKVLSKTMDSTSLTAEKLELPIFLQPXVQYQVCSPXLGKLLANSGLTQNTHNVPM

SEQ ID NO: 363674 - protein, 135 aa, Zea mays
  Clone ID: MRT4577_94841C.1.pep
MSRRYDSRTTIFSPEGRLYQVEYAMEAIGNAGSALGILAADGVVLVGEKKVTSKLLQSSRSAEKMYKIDSHLACAVAGIMSDANILINTARLHAQRYALSYQEPIPVEQLVQSLCDTKQGYTQFGGLRPFGVSFL

SEQ ID NO: 363675 - protein, 314 aa, Zea mays
  Clone ID: MRT4577_94842C.1.pep
MRSEGPRVRAASPSPRVGPGTARRDLALLILPSRLPLKFHKRKPQSRRHHPKSSKRKPHLAAAAMSRRYDSRTTIFSPEGRLYQVEYAMEAIGNAGSALGILAADGVVLVGEKKVTSKLLQTSRSAEKMYKIDSHLACAVAGIMSDANILINTARLHAQRYALSYQEPIPVEQLVQSLCDTKQGYTQFGGLRPFGVSFLFAGWDKHHGFQLYMSDPSGNYGGWKAAAVGANSQAAQSMLKQDYKDALTREEAVGLALKVLSKTMDSTSLTAEKLELAEVFLQPDTGEVQYQVCSPEALGKLLAKSGLTQPTPEA

SEQ ID NO: 363676 - protein, 123 aa, Zea mays
  Clone ID: MRT4577_94843C.1.pep
MAPPPLRPVLPVREGPPTPPWLRGSSTQSRDSGPPGPSLRVEATPSKVRIDSPKPAPARENTKAAPKPLTAGVRGGRTHRAVLGIIRRIRSLELYDATSANCDHTSNSGAAGDAFHLTIDLSR

SEQ ID NO: 363677 - protein, 202 aa, Zea mays
  Clone ID: MRT4577_94844C.1.pep
MAASFARGGVAAAAATALVMVAAVLAVSWAGVARADFAQDRAMCADRLMGLATCLTFVQDKATARAPTPDCCAGLKQVVAASKLCMCVLVKDRDEPALGFKINVTRAMDLPSLCSNPATFSDCPKILGMSPDAPEAEIFKEYAKKHESNNGTTIPAAATGAAAATGKSTSAAPTADGAGRQPGTVFFYVVSALLVSVAVLLC

SEQ ID NO: 363678 - protein, 69 aa, Zea mays
  Clone ID: MRT4577_94845C.1.pep
VQNCLASIEVCCLCIWSVFFWGACWFCCVGSIFGGVFRKGLCFRSYLILLCCVVGCLVFYGKMKKVIVF

SEQ ID NO: 363679 - protein, 162 aa, Zea mays
  Clone ID: MRT4577_94846C.1.pep
MARKAMQASPIHPVMSGCFPPAYSSLIYCPVQIWNGMIMNSWRRDLGLLRRRPYVPSRTVRAHAQTVRTYAEEESLLRQVTDRPSPVPRTIRASTESTVRRSFLLFGARIGANKWITDRNTLIALLKDNLARAQNHMKQQADSWRVDHTFQVGEQVLLKLQP

SEQ ID NO: 363680 - protein, 49 aa, Zea mays
  Clone ID: MRT4577_94847C.1.pep
SCAMAGFDASGIPESGWRGVLLFQQSDLFMVTMLSTITTSYSLTIENLL

SEQ ID NO: 363681 - protein, 36 aa, Zea mays
  Clone ID: MRT4577_94848C.1.pep
SRFDREKFMCEKLLYMRNVFGDVDIMIDLLMESSKQ

SEQ ID NO: 363682 - protein, 205 aa, Zea mays
  unsure (1)..(205): unsure at all Xaa locations
  Clone ID: MRT4577_94849C.1.pep
ATPSNGARSPFFPPPPPDHAIAGAISALCYTSASDVLVLFEAAERLPLLHVGQIYQKFECKDRSDGGTVRNVVRWSIENLLEEQEGATLMVSAKFVVLSKRNIFLQFEEVAVENIKISEQLQTLIAPAILPRSFLSLQILQFLKTFRTQVPVSGPERRSPGGLYYLSYLDRDMLLGRSVGGGGIFXVFTKAQPLTRFSGNRGHII

SEQ ID NO: 363683 - protein, 84 aa, Zea mays
  unsure (1)..(84): unsure at all Xaa locations
  Clone ID: MRT4577_9484C.1.pep
NSESGEKNEGSESAPEGQAQQRRPYRRRRFPPYYMRRRXGRRPQYSNPPVQGEVMEGADNQGAGEQGRPVRQNMYGGYRQFRGG

SEQ ID NO: 363684 - protein, 76 aa, Zea mays
  Clone ID: MRT4577_94850C.1.pep
IGHHISELALHIIMTSEHKLRACTTSVASTLVSRSGRATSGCLKPENPTTTDYTSILALPDGMGLSVYPSLKKNTC

SEQ ID NO: 363685 - protein, 288 aa, Zea mays
  Clone ID: MRT4577_94851C.1.pep
MALAAPSSLLLLPTTPSQAPSPRCASRLRSRPLRELRLCQRLATAAAAAAATAPFASSPTTSADTERRKHELLRAVQETRRGFAAGPDQRAAIEEAVVAVEERGAGKGTPIDLAALDGTWRLCYTSASDVLVLFEAAERLPLLQVGQIYQKFECKDRSDGGTVRNVVRWSIENLLEEQEGATLMVSAKFVVLSKRNIFLQFEEVAVENIKISEQLQTLIAPAILPRSFLSLQILQFLKTFRTQVPVSGPERRSPGGLYYLSYLDRDMLLGRSVGGGGIFVFTKAQPLT

SEQ ID NO: 363686 - protein, 209 aa, Zea mays
  unsure (1)..(209): unsure at all Xaa locations
  Clone ID: MRT4577_94852C.1.pep
MASWLKVAEDLLEVVDRRAKSVATELSDEQTAPQPSGSNGQEGQAKRGKPREKGPLKLTTGDAGNRTAAQKERKNRQPPRERIKIEKIKPSARPDSSNDDALAIVSASEPEVTSVDVKGANAESTSDKVENTTVDLKNDVAANAVDNAVEVQSIERTPEDTGPITDHVADSGNLESASESSAPSXSDEKXEPSSSNQSTDIGLAVSXEG

SEQ ID NO: 363687 - protein, 58 aa, Zea mays
  Clone ID: MRT4577_94853C.1.pep
KPSGLGLPNPQLFGRPFRKEGFIPVNNLLRNLKIREFLHFQGERALHKGVADQVLQRP

SEQ ID NO: 363688 - protein, 42 aa, Zea mays
  Clone ID: MRT4577_94854C.1.pep
GNWDSILWVGNDSTILLTKVRFMTNMIVYLTMIHFNYLMMIF

SEQ ID NO: 363689 - protein, 125 aa, Zea mays
  Clone ID: MRT4577_94855C.1.pep
YAASVLDSPLSSGNNAEYAGWQVLCSRAGLRQLPLDPSTVRCLSDLVKEGYHKDFVIDVDQQWLLQGWKGHLTMYIMSFLAHPIMLRVVSCLDQAKITMPHSSSFILVRSIGVRPKSSFRRSHEH

SEQ ID NO: 363690 - protein, 459 aa, Zea mays
  Clone ID: MRT4577_94856C.1.pep
MGRITRGPPFWTGSQDETTSSQVFVRWRMRRRRVRRRPRAKGGVFAFAPTERMQKYGLKMNPLKCAFGVSIGRFLGFIVHEHGIEIDPKKAGKVESFTPLVRLKHESDFRWGAKQREAFTATKKYLLTPPVLKASKAGVPFRLYIAAQERVIGVVLIQEHSGKESVVAYLSRRLLDSENSMGIKDVDVFGDSLLVVQQVIGEFQCLDDTFTIVHISRDKNSRANFLAHQALGYNIERGQFFTQKEPMFAGINSIERSKSGHKKFEAEQQDGMNNADWRKPLIECLQNPSNTKDSNVRRQVLKYTLMEEHIVYRFGIPQTLTIDQGVAFMSHQFKEFAKSLQIKLLNSSPYYAQANGQAESSNKVLIRLIKKKIAKKPKRWHEVLSEALWAHRVSRYGATKVTPFELVYGQEAVLPIEGGLSAVVYGELMLDRIDGNNESRLTALREIEKEKLRVAKAYN

SEQ ID NO: 363691 - protein, 193 aa, Zea mays
  unsure (1)..(193): unsure at all Xaa locations
  Clone ID: MRT4577_94857C.1.pep
RRKQSYVMPFLHPAPCSKYRKQPSIPRLTTTTRPDEARRHRYYAKYSHCAHRASATPAGRTRPVTKPFAYHHPXYLYITPIIFLMNKMSVIDERDLLEMVVLNDLNFYWLNDDSTYNYXEIILTYXFHTTIRNVSMFNXLYAPFXHDRELRGLTSVGKKFLDLXCNAHTHHNNNPAYRYTXNRNQTLSLRRYR

SEQ ID NO: 363692 - protein, 591 aa, Zea mays
  Clone ID: MRT4577_94858C.1.pep
MARARAYKAPRDLDHTPPHALDLTGAQTHRRLPVYVVSAAARSPCHRRPASRTLPSPIRPSEKTVHTSVKLPERGIEVCFAGEASPRSPDSTRPPRERRPDCNLADGEYVLVPEQGAAQEVAPDPAPEPAPEDLPATALEGKPRRLPSSRDLRRGLPFRLWWVQVRSLHDGSRGINLEIYIDDVVVKSAGFDDHVADLRLALERMRKYDLKMNPLKCAFGVSAGRFLGFIVHEHGIGSDPKKVEAIGKLEEPTCKRDVQKLLEKINYLRRFISNLAGKVESFTPLVRLKHESDFRWGAEQREAFAAIKKYLLTPPVLKASKAGVPFRLYIAAQERVIGAVLIQEHSEKESVLLNSSPYYAQANGQVESRNKVLIRLIKKKIADQPKRWHEVLSEALWAHRVSQHGATKVTPFELVYGQEAVLPIEVNLQACRVACQNSLSAEVYGELMLDRIDGNIESRLTALREIEKEKLRVARAYNKKVKKKSFQIGELNWEGPFKVVGIVHGNAYFVEDLQGKKLSKALNGKYLKKYYPSVWQGNGDAGMYEDKVKHASEKRKTSKKIIDAMKGMRLEIRNKASHANRSKNGVGIEVS

SEQ ID NO: 363693 - protein, 66 aa, Zea mays
  Clone ID: MRT4577_94859C.1.pep
LVVSSCCALDGPGYYYIYLPTLYICMYLCRWAFYQFINTYFSVHKKIYCINVFLLPYINERYFFGS

SEQ ID NO: 363694 - protein, 160 aa, Zea mays
  Clone ID: MRT4577_9485C.1.pep
LLPSSMQRPNAPSACATITFAEALRREMEYRKWVERTHPHLLVGICGAPEMQRDFSAGSVPDAIKRKLAAETSVPPQQSSFSCVTGQKQPQNWYPTKKKVKVPHLASQILQCPRPNVVPSFWCKICKVDCVTEFNFSAHVGGKSTGQKARDLGKRTLGGC

SEQ ID NO: 363695 - protein, 68 aa, Zea mays
  unsure (1)..(68): unsure at all Xaa locations
  Clone ID: MRT4577_94860C.1.pep
SCTTCDSRPLSAQSHDMSVADIASRRSRHLHEXRTAVEVVARCAECGQSRGRRTQDADGAYERREEED

SEQ ID NO: 363696 - protein, 61 aa, Zea mays
  Clone ID: MRT4577_94861C.1.pep
TGRTGNDGGNANNNIGYNNAKNNISKNINNNAKNNNNNANKNDIINNNANNNNKNINNISV

SEQ ID NO: 363697 - protein, 105 aa, Zea mays
  unsure (1)..(105): unsure at all Xaa locations
  Clone ID: MRT4577_94862C.1.pep
ILAEKGVVVLPDIYANSGGVVVSYFXEWVQXMHVRRCFIARLVPCSNLLSCAMLIDRXNIQGFMWAEEKVDDELEKDMSSAFQHMKAMCKSLVLPKCVVTLELRV

SEQ ID NO: 363698 - protein, 237 aa, Zea mays
  Clone ID: MRT4577_94863C.1.pep
MEQAKCAGSLSNCQAVARCGKVIPLGVGSRAPVLLPGRLSPADQAGRQARARIGGPFSNADSRFHSRFYHEFTKPWGWGFQFYCLSGWRFVPRLVYVQCSDKLGFAQIIQWRSHVPHAALLTGRWLHDHLFFWSGSFGRFMHTHASEVQISLFTTRLFFLVALNRSSTVIRDVNGDPIPANPWGIPLLGYGYGTKIVPMSMDMGQNLHPLGKRLYADGGYQLRIRRLEGTPNYGPRQ

SEQ ID NO: 363699 - protein, 105 aa, Zea mays
  Clone ID: MRT4577_94864C.1.pep
TKQVAPWQESKCLWMYLYSKCRRPPIPVIFTKCKCSTCCCNAPTDNKPPATKPRWHAVRLIVENTTQTNDYHSVPSTHNRKLPYGPHVQQRLPRSWSIHPICNTR

SEQ ID NO: 363700 - protein, 72 aa, Zea mays
  Clone ID: MRT4577_94865C.1.pep
KKVGNGRYLNTTAYGHFGRNDPDFTLKVVQPLKTEKPSSALGASSVLKEAFSLVWSGLVCLRSIMLFYGSYL

SEQ ID NO: 363701 - protein, 95 aa, Zea mays
  Clone ID: MRT4577_94866C.1.pep
VFFFFLFKKKRVLPIHSPNYRIVVRTKKGGWLIFHWGGPLSRNLTPKGLINLPILRLPFSPIGRMFFGCPKKNFKEQTTLWNLFCRGEFQNGPPK

SEQ ID NO: 363702 - protein, 48 aa, Zea mays
  Clone ID: MRT4577_94867C.1.pep
IKKKKKKKKKKKKKKKKKKKKKKKKKKKKKKTQKKKKKNFFPLARNPP

SEQ ID NO: 363703 - protein, 121 aa, Zea mays
  unsure (1)..(121): unsure at all Xaa locations
  Clone ID: MRT4577_94868C.1.pep
MVGKEEDVRLPRHKFSERQPIGTVAQGTDDKDYKEPPSGPLFXPGELKNWAFYRGAIAEIVDTFLFVDIYVLTRMRVSEASSKXPSLGIQGIACVFREMIFDHVYCTGGIYGGHIIAVVPF

SEQ ID NO: 363704 - protein, 81 aa, Zea mays
  Clone ID: MRT4577_94869C.1.pep
NRRRTKLANSAPPHRIYREIEACHIHFSTRCTCMRRLATDFVPPRNSFGTTLICLPVLDLAIIWIVRGLVSLRNLVHVPDT

SEQ ID NO: 363705 - protein, 68 aa, Zea mays
  Clone ID: MRT4577_9486C.1.pep
FMCLWMCGKESLIRVKYSSSGLQSYRIPQLGNLPRRDLSHGRLVGVRFLHNEVSLRRLKSGIRTSIIK

SEQ ID NO: 363706 - protein, 61 aa, Zea mays
  Clone ID: MRT4577_94870C.1.pep
TALFLSPVPFFVKLRPFSTPPLCVSPPPVCGAHSLCLVSDSSVIKHLHVLAAPISLFRTNK

SEQ ID NO: 363707 - protein, 134 aa, Zea mays
  unsure (1)..(134): unsure at all Xaa locations
  Clone ID: MRT4577_94871C.1.pep
MGRLQKRAVAXAAVEDLVLMAGGQEPXAGITFGQVAADIVPCMCYARGQCSGPSXGCCSGVKSLNNDIRXTTADRPAYCNCLNNAATDHNKLNADYTGSVHNEGIVGITYDISIFTDCFNENGTLYDNNCACNA

SEQ ID NO: 363708 - protein, 75 aa, Zea mays
  Clone ID: MRT4577_94872C.1.pep
QSSPTEPSFFCIVIRQAFNPTMCSSATSSSYAHLIEYSLPPYKVETLILGQREYCTTPPSHNIRTFLTLVCSLSN

SEQ ID NO: 363709 - protein, 68 aa, Zea mays
  Clone ID: MRT4577_94873C.1.pep
NFPRGRTVKFFHWWAPPPKEKPKATGGFPTSSKLCNCLKFFHAFSHTLAPNSFFLPPPAFLTLKGKGG

SEQ ID NO: 363710 - protein, 75 aa, Zea mays
  unsure (1)..(75): unsure at all Xaa locations
  Clone ID: MRT4577_94874C.1.pep
DXILNEQHEYPIGWLTRLFRQKDKHQGEGLLQGKNKAKNRTYPQPRTCAVNWETSVEYFKRRPLLNGVPGRRKNR

SEQ ID NO: 363711 - protein, 135 aa, Zea mays
  Clone ID: MRT4577_94875C.1.pep
KLFFFFFFFFFYFIHFFVAFSFYFFSFNQLAAFNFAAYLQQQQLLPASQLTDESRAGCLTHQQLVAVYLHAMPTAGTLLQLPQSLPFNQLALTNPARGDQQRIIARSPALDRIGDMAQCGTAADEVRGYPEPRKA

SEQ ID NO: 363712 - protein, 138 aa, Zea mays
  unsure (1)..(138): unsure at all Xaa locations
  Clone ID: MRT4577_94876C.1.pep
IRGRPRRPGRLAPRDGLSSFSNKVMAWEARVLFNGDLVKRVLRCLGPXKISVAVTIFGGLGIAGTWEREFGAKVNNCKIMVEKYLLVGXGFLVIKIFCVFNKXIYLSQICVFYLFNGETLLIVFLLIIMILFLSILFF

SEQ ID NO: 363713 - protein, 301 aa, Zea mays
  Clone ID: MRT4577_94877C.1.pep
PLFSSSDHLLLLALRLPNLAAVSWAWDSRSAICVRVWPATAPPEAALPSAPLREAWPSPTSSPTRDAAAAPAPTPATAPSRLAPTPLKWYCPSCVEPDVALKHKNHGRSHEGCDVCEWLVVKPEEPAEDVSEPELAVKTQESSVSSMGEDSEPDLSTTALANLCKNCGTCEDEDRKFMVCGHGLCSFKFYHVLCLKERQIASEKQKNLKCWYCPSCLCRRCFKDKDDEKIVLCDGCDEAYHIYCMDPPCESVPRGKWFCTRCSARRSVQGMQRYEKSILEKVKRAPGANGPKVQASAGPEK

SEQ ID NO: 363714 - protein, 554 aa, Zea mays
  unsure (1)..(554): unsure at all Xaa locations
  Clone ID: MRT4577_94878C.1.pep
MACDGAARGRPPKRPASGGLAQPNVVTYKRRRRGTGANAGHSAVTSGPDPAEMSAVVHAIDSQQGGRQTLGRHWRNWRDTLEGVLQSTAGKQGSGGIQSCIRAALRFSGCPPTEHGNLAHDGGAGRDDPVGAVHSEENSGALVQLEDGTAAPLEANKTMCHNALFDILISEKFAMLCDLLAATFHVSKPDDVIGLQIIDAKMRNGDYAQNHALLDHDIKQIWKKFEHVGQEMAGLASSLLLISQASNQKQASGVSEIDVAEXDRRNKPGWCCPQSPKGVDSPVRXGYSTIPKRTGRSGSDGICKDCGRKADSKGRIICDRCEAAYHVSCLKLAIDEEAPAKWYCPSCVEPDVALKHKNHGRSHEGCDVCEWLVVKPEEPAEDVSEPELAVKTQESSVSSMGEDSEPDLSTTALANLCKNCGTCEDEDRKFMVCGHGLCSFKFYHVLCLKERQIASEKQKNLKCWYCPSCLCRRCFKDKDDEKIVLCDGCDEAYHIYCMDPPCESVPRGKWFCTRCSARRSVQGMQRYEKSILEKVKRAPGANGPKVQASAGPEK

SEQ ID NO: 363715 - protein, 106 aa, Zea mays
  Clone ID: MRT4577_94879C.1.pep
RLCGPGGASAASKKLPLPPRVTSAAILRNISKEQEGLWLEPPASPSSLCPEAPGPGLAVPYLCPRAAPLPLLFLCTVSVACSCASWARAEGGHSISPRGAALNVGV

SEQ ID NO: 363716 - protein, 218 aa, Zea mays
  Clone ID: MRT4577_9487C.1.pep
LLPSSMQRPNAPSACATITFAEALRREMEYRKWVERTHPHLLVGICGAPEMQRDFSAGSVPDAIKRKLAAETSVPPQQSSFSCVTGQKQPQNWYPTKKKVKVPHLPSQILQCPRPNVVPSFWCKICKVDCVTEFNFSAHVGGKKHKAKKLEILGKRNAGGPASRCAGNRSAGQSGLAVSGSRSSEQNVAGSVAAGPNCDMLSESRTNGTEGNGCTVQL

SEQ ID NO: 363717 - protein, 67 aa, Zea mays
  Clone ID: MRT4577_94880C.1.pep
PFSLRSLQELPQRVRSKQGSPQIPSQNKNYSPPVSHQVSAVRRRSLYDQPLFRYSLHYPILEKLAPP

SEQ ID NO: 363718 - protein, 127 aa, Zea mays
  Clone ID: MRT4577_94881C.1.pep
AVRQAPQTSGAGLEQEMHHRARVPEEDRPLSRILHSRWPYPSPPSPLLARPPLSPPPIFRGPHPPARGHPFTRRLWWLVSALVPSIRSPVPSPQLSEQRAVDVASRSLPVYPLPEVSIQVAEVQVSQ

SEQ ID NO: 363719 - protein, 101 aa, Zea mays
  Clone ID: MRT4577_94882C.1.pep
HFTYPGGGTYKEGAGQPLPLKNFYSQTEFPFCITHPQAQGKHAFLVPNRPCNISEGPPATKGGGAHRAPPAMFLPISIWKKPIIPQIGPHGVFGEPVGDPI

SEQ ID NO: 363720 - protein, 124 aa, Zea mays
  unsure (1)..(124): unsure at all Xaa locations
  Clone ID: MRT4577_94883C.1.pep
TSRRMFLHSLMSFMIVFETSLLIPLVYAKGLRPSAGRTFSGTVYLPSVVGGWHRKKREICRRRLCTTVLRRRGGDADGDCCDDGVCGWHVLVRVRLVEKRSPFVSVFLCRSFWFCIDISRPXLE

SEQ ID NO: 363721 - protein, 73 aa, Zea mays
  Clone ID: MRT4577_94885C.1.pep
LSPSVRADVVHIPALISYPVAASRCAEMSENASAHRTGEKIDNSRTESRTRLSSSRPTLHTRLRELQNRQNRR

SEQ ID NO: 363722 - protein, 81 aa, Zea mays
  Clone ID: MRT4577_94886C.1.pep
MASVAGEGRSRVLVIGGTGYIGRFIVAASAREGHPTAVLVRDAAPADPAKAAVLQGFRDAGVSIVKGDMYDHESLVTAIKS

SEQ ID NO: 363723 - protein, 98 aa, Zea mays
  Clone ID: MRT4577_94887C.1.pep
TYILVLTQYTPLQIPSITYYLWITPDSCNILANVIKTTYVPASVSYPFLHRTQAVGSSKVGTVLPFGGRRRGGLRVPGRGPTDGRDDNHNSRRDRPKG

SEQ ID NO: 363724 - protein, 202 aa, Zea mays
  Clone ID: MRT4577_94888C.1.pep
ARGVALFGDGAGAAVIGTDPAPAERPLFELHSALQRFLPDTERTIEGRLTEEGIKFQLGRELPHIIEAHVEDFCQKLMPTRPPTRPADGGGPEPMSYGDMFWAVHPGGPAILTKMEGRLGLGADKLRASRCALRDFGNASSNTIVYVLENMVEDTRRRRLLAADDGGEDCEWGLILAFGPGITFEGILARNLQATARASAQP

SEQ ID NO: 363725 - protein, 94 aa, Zea mays
  Clone ID: MRT4577_94889C.1.pep
SWFPTCSRIHNHPYSQSGPAISSSSLRHSTSVGLCIRSRRSGPRVCCAYSTYRPLLARILVNLVPILVIRSPIELPPRLPSSEEIGTTPIKTPQ

SEQ ID NO: 363726 - protein, 61 aa, Zea mays
  Clone ID: MRT4577_9488C.1.pep
GSSKQMYAACSQVETFGLTGSLFQSHVNKCQKKHWLQVIIMQVHGPVNNHSTLCDHYPISL

SEQ ID NO: 363727 - protein, 226 aa, Zea mays
  Clone ID: MRT4577_94890C.1.pep
MGAVLGRHDTHKRSSHGSKLEVKMVDAMQQRASHGTSLKSFDSIIMKFPKIDESFRKCKTIFEQFDEDSNGEIDKEELKHCFQKLEISFTEEEICDLFEACDINEDMGMKFNEFIVFLCLVYLLNEAAVLEAKIKMGLGNLEATFETLVDAFVFLDKNKDGYVSKDEMIQAINETTTGERSSGPIAMKRFEEMDWDKNGMVTFKEFLFAFTRWVGIDENEDEDDDE

SEQ ID NO: 363728 - protein, 126 aa, Zea mays
  Clone ID: MRT4577_94891C.1.pep
WRTPQRSSRLQWHAWPSVPCAGTIRTGCCSFMSPVWICFLFLRCRCVQGKEQKSDTTPAMSFAGSRLCISFPSLACHLVSRPFVSEWGNKRRCAQRSSHTEWAGVAFGRSTTPRELAGDWCLPAGP

SEQ ID NO: 363729 - protein, 88 aa, Zea mays
  Clone ID: MRT4577_94892C.1.pep
GKPRWRVLPVCTISRTSSGPPQNYTASECVGSAKRAPAPETGAARTGREISTSNATSCCIACIEVTGACHRDRAAHLCSQKHADHGDQ

SEQ ID NO: 363730 - protein, 38 aa, Zea mays
  Clone ID: MRT4577_94893C.1.pep
NMINKKIIILNYIIFIFNYFIRTTTTFISTQIIILHTD

SEQ ID NO: 363731 - protein, 148 aa, Zea mays
  unsure (1)..(148): unsure at all Xaa locations
  Clone ID: MRT4577_94894C.1.pep
METKIFSLMMLVVLTTCVDNTTILXMIXQAIIALLFPQYLSLIIAXIXENPPLPPYMLQQAIAGSITPLSSLWRQQSAVLSLQPSLLHTMTAQQLQQLLLPINNQVAVENLSYYSQQQQFLSYQQLTTLNAADYLQQLLLPFKLVTAD

SEQ ID NO: 363732 - protein, 108 aa, Zea mays
  unsure (1)..(108): unsure at all Xaa locations
  Clone ID: MRT4577_94895C.1.pep
SSRRGAAQRWQWQNQWLIVVPPVTMLGVMKARVDGXATRGHALLKKKGDALTDQLRAMLKMMAADEEYMGDTLRACCLSLVGGKYVCDDGVRHPELQSVRAVCARRRT

SEQ ID NO: 363733 - protein, 83 aa, Zea mays
  Clone ID: MRT4577_94896C.1.pep
LKWLTVLRRGLSLPMVSVFVIGPFAASLPCHNSQHWLTEYSHVVCLAVRPATPMSFSLSLSRPATISKCPRRNYGFAFTIKHA

SEQ ID NO: 363734 - protein, 135 aa, Zea mays
  unsure (1)..(135): unsure at all Xaa locations
  Clone ID: MRT4577_94897C.1.pep
MADVDADRRLPGGATKRRTIRKXYSYRGVELYTLFEVXTDELVQLLPVRARRRIGMGLKRKPMDLIKKLSMANKDAPAGEKKEAEKTHLRYMIIASGRIASXVGVYSGKQSNLGGMKXPEMIGHYLAEXSICYKP

SEQ ID NO: 363735 - protein, 59 aa, Zea mays
  Clone ID: MRT4577_94898C.1.pep
SLSGIALYGLEYVHEAIALDEEPLLVKGCLEESVVDHRVLREFEVSMMAPALVRTAASG

SEQ ID NO: 363736 - protein, 51 aa, Zea mays
  Clone ID: MRT4577_94899C.1.pep
YHCKLIHLSLYITIQNSTPSTRILRFVRFAHNPCGLSQIEPVKNHNKSSSR

SEQ ID NO: 363737 - protein, 68 aa, Zea mays
  Clone ID: MRT4577_9489C.1.pep
KTRGHSVHLWIRTCRPRGGTPLLREPGTWYPPSRSIFGFVLGLTLVFIMFGAPSIIPLSIIFLCTISL

SEQ ID NO: 363738 - protein, 116 aa, Zea mays
  unsure (1)..(116): unsure at all Xaa locations
  Clone ID: MRT4577_948C.1.pep
LENHHSXAAAAADEDDXTMWRSRARALLLLRSSVPRSPPPQQNPLRSLIRAPPPPPRRLSRFLSSSSPEALPDAPSSAAEALPDDPFAFAPGGVSGSADPTEADEDNLAALWEEDA

SEQ ID NO: 363739 - protein, 47 aa, Zea mays
  Clone ID: MRT4577_94900C.1.pep
NRVHWVNHNGLLAKNVSLIARFPQGLSCENLTHVGGPAILPLPKAER

SEQ ID NO: 363740 - protein, 51 aa, Zea mays
  Clone ID: MRT4577_94901C.1.pep
RAAGRAGTQLDFDTAQLLEWKQLAQVGTFVRQQLVEGIPGSFFGLTLRAKF

SEQ ID NO: 363741 - protein, 135 aa, Zea mays
  unsure (1)..(135): unsure at all Xaa locations
  Clone ID: MRT4577_94902C.1.pep
AKPGPQDGXHTSXXRARXXXXTGTPRENAXGPXAAXXRRRAXRTQKGXDPATDPARGGAXXXTXXXPAGXGQXXXGPRRRGXPGXARAHAATGGXTGGAAXXXGRQQXKGXXGRAXXTNSTDGPKAARQDPGHPG

SEQ ID NO: 363742 - protein, 42 aa, Zea mays
  Clone ID: MRT4577_94903C.1.pep
TTRTATSFSMLSSHHLPGPAWGLFLRSTTDLRVGLFLIPILI

SEQ ID NO: 363743 - protein, 88 aa, Zea mays
  Clone ID: MRT4577_94904C.1.pep
KTGPTHAYNLTKNKFILHLLSHKQKCRLLLYYLASTISKTPSTSPNTEISPTTFILNIFILKHFLHFFHVHSLIYTINLYILTLPHYY

SEQ ID NO: 363744 - protein, 75 aa, Zea mays
  Clone ID: MRT4577_94905C.1.pep
KTPPTRGTSSFSTFAPPTTHIPRPYLYCGNARTTMITLISPLPPYFTPSSLLPGTSTVLASSSNFIPSHSFTSPH

SEQ ID NO: 363745 - protein, 119 aa, Zea mays
  unsure (1)..(119): unsure at all Xaa locations
  Clone ID: MRT4577_94906C.1.pep
LKSNQPVRSSQPRRQRQPVTSTYMSSLMSLASALIGDAARLHSATGSAGEEPDRVYGAVLCRADSAGANYRRRRGALGAIDGDGHSPCALHSDVTVYSELYHXRFSDRNFPRNFKNAPK

SEQ ID NO: 363746 - protein, 56 aa, Zea mays
  Clone ID: MRT4577_94907C.1.pep
HPEEEHSPHGAPPPRWSVSHGSFKLLLHMGTCVASCHMLYLYMHVVLSSTSALCAS

SEQ ID NO: 363747 - protein, 50 aa, Zea mays
  Clone ID: MRT4577_94908C.1.pep
MALWEITAITAYFLGLRRTYRLALRGQRRLIGPNHPRLRDFVYRWTRSIF

SEQ ID NO: 363748 - protein, 66 aa, Zea mays
  Clone ID: MRT4577_94909C.1.pep
HLGTSPPLERMVASEDPVLLILQGMFAPFIPWWLQNGLPGFGLVRSKKKNIPIKGGRRQKASVPGI

SEQ ID NO: 363749 - protein, 65 aa, Zea mays
  Clone ID: MRT4577_9490C.1.pep
GLGFFMWVMHLIWPYKYSFNQKKNSSFPQVWVFQQAEPHLSPSRGLKQESARSKFTCQPDVTFYP

SEQ ID NO: 363750 - protein, 68 aa, Zea mays
  Clone ID: MRT4577_94910C.1.pep
GAAPTRPARRSCPGRHPCSSAYVRAAQQRPRISGGPRPRRRRAPRRPGCLRTRPCLIRLTIVYCNDRR

SEQ ID NO: 363751 - protein, 59 aa, Zea mays
  Clone ID: MRT4577_94911C.1.pep
TNLPQRYALFGGLRCWRTPVAALASSLKAVTRTPCEHDHVTPLFPRSLTAIDRMRQIVA

SEQ ID NO: 363752 - protein, 73 aa, Zea mays
  Clone ID: MRT4577_94912C.1.pep
QSIKKKKAPDENKTMGRRPSHGGSRRAPCCPWRYWSSRSARGSPAWSHRPPLAQKMVGSTFSPRISHMLCEHA

SEQ ID NO: 363753 - protein, 117 aa, Zea mays
  Clone ID: MRT4577_94913C.1.pep
MILGSGTPKAHVDNAISSRMPPGMGAISDLELPVLENDGNIEKAEACRKELEDICILLKRKHAEAKELAVRAIVNNNTMLMLNHPMIEEKIYSIQKFANDLKSKKYLFEEVGTINSH

SEQ ID NO: 363754 - protein, 91 aa, Zea mays
  Clone ID: MRT4577_94914C.1.pep
FPWGGLRKKAPALNTFHSITGGVFARSFLARNASTPVQAIGNTGLHLWSTSLIAILRVPLNATPCAHCTSVYSEASSGFLTTAIRVPNWSA

SEQ ID NO: 363755 - protein, 188 aa, Zea mays
  unsure (1)..(188): unsure at all Xaa locations
  Clone ID: MRT4577_94915C.1.pep
MSFVFRGSRADIEAGGFTGFAPERRTMRIHAGCRPVNSNSLVFLLTVFVLFMVLNSHQMSPNLLLWIVLGVFLMATSLRMYATCQQLAHAAAANSFLGHTELRVHVPPTIALATRGQLQSLRLQLALLDREFDDLDYDTLRALDDDNSLHAPSMSEEEXNSLPVXQYKVQAQQGNAPARKVMRHHSNR

SEQ ID NO: 363756 - protein, 77 aa, Zea mays
  Clone ID: MRT4577_94916C.1.pep
MAGVNSSVVGLKPAAAVPQAAAASSPAKRVQLAAPEGRRAALLGLAAVFAVTATTGSAKATIFDEYLKCGSNVFWKW

SEQ ID NO: 363757 - protein, 52 aa, Zea mays
  Clone ID: MRT4577_94917C.1.pep
LAPVLFTIVQSVYLGSSSVASSPSVFLIEAPSGSIVSGLLIEDSSKPMHQQA

SEQ ID NO: 363758 - protein, 145 aa, Zea mays
  Clone ID: MRT4577_94918C.1.pep
MAGVNSSVVGLKPAAAVPQAAAASSPAKRVQLAAPEGRRAALLGLAAVFAVTATTGSAKATIFDEYLEKSKANKELNDKKRLATSGANFARAYTVEFGSCQFPYNFTGCQDLAKQKKVPFISDDLEIECEGKEKFKCGSNVFWKW

SEQ ID NO: 363759 - protein, 54 aa, Zea mays
  Clone ID: MRT4577_94919C.1.pep
QASHSIYIIPISAHMVAFRSRLTIPPMRDGVTLRLLFPSITEVPYAIGKKSAAP

SEQ ID NO: 363760 - protein, 78 aa, Zea mays
  Clone ID: MRT4577_9491C.1.pep
DGRNVDAAQAFKIACIEGGFFKLNLKRGPRHHQRHVRGLARSQAHVVYHSNLLGFTAEGLYRGLCEVIERLRPSSRTT

SEQ ID NO: 363761 - protein, 101 aa, Zea mays
  unsure (1)..(101): unsure at all Xaa locations
  Clone ID: MRT4577_94920C.1.pep
MGDVPKTRLTHCMNIECSKHTLHTVTHSNKGTDRQSDKSKRTNYQGQSGYGRQTNPVFHMMAKSTYKIVLKLPXLSSKHYSQGXIYKFTHFQIGSNTNCNG

SEQ ID NO: 363762 - protein, 88 aa, Zea mays
  Clone ID: MRT4577_94921C.1.pep
RIGADSRGASRGWATTTRWSLPSPAPQFVIATVTTLASCCPSCESQLATRAELATEDSRWFLSAVGCLMHAVHVSPALLLCPVPLKTG

SEQ ID NO: 363763 - protein, 37 aa, Zea mays
  unsure (1)..(37): unsure at all Xaa locations
  Clone ID: MRT4577_94922C.1.pep
HTPALPLTSTPPQSTXHGSAAACPTSAVAEAGCAICH

SEQ ID NO: 363764 - protein, 80 aa, Zea mays
  Clone ID: MRT4577_94923C.1.pep
GKDYKSQARLDHPRTQNRTASILLCLIKGSPSLVDSRQLVGWSVLACFCSYRVGNYDGRLSEAGRVGRPGNSGPVPAGVP

SEQ ID NO: 363765 - protein, 89 aa, Zea mays
  unsure (1)..(89): unsure at all Xaa locations
  Clone ID: MRT4577_94924C.1.pep
KARQTWNLANLAVKLFYHMSSQILGITTEPPKFHMAGRARHGQNEHICSPPPQPXTMQELMAQQNEILRQLAQYQEPQHYGGGDHHQRF

SEQ ID NO: 363766 - protein, 82 aa, Zea mays
  Clone ID: MRT4577_94925C.1.pep
SRPPMVPPPPSSTKLAQLLLELQAHPSKESFDAAFVDVLVKPWLPLPLGLKPPSVDSVMSELPKQGVPKIPPAGATTVGASG

SEQ ID NO: 363767 - protein, 402 aa, Zea mays
  unsure (1)..(402): unsure at all Xaa locations
  Clone ID: MRT4577_94926C.1.pep
MAELVMAQCGVPSGGEGGAWPPGFAWDGGAADASRGMYGDAVPPSLSLFDAAGSVAADPFQAVQQAPGAGGGGVDDVAGWQYAAAAGSELEAVQLQQEQQPRDADSGSEVSDMQGDPEDDGDGDAQGRGGGKGGGKRQQCKNLEAERKRRKKLNERLYKLRSLVPNISKMDRAAILGDAIDYIVGLQNQVKALQDELEDPADGAGAXRRPPGPPAAGXWWGWRTTSRRPRATSTRSPGPRGPVRRXEEEEEKGNDMEPQVEVRQVEANEFFLQMLCERRPGRFVQIMDSIADLGLEVTNVNVTSHESLVLNVFRAARRDNEVAVQADRLRDSLLEVMREPYGVWSSSAPPVGMSGSGIADVKHDSVDMKLDGIIDGQAAPSVAVGVSEDHYGGYNHLLQYLA

SEQ ID NO: 363768 - protein, 159 aa, Zea mays
  Clone ID: MRT4577_94927C.1.pep
RRRSSISLRLTGRSMAAHLRSISLPTRPHSLILKAEQELQRLRSCCAPVSPPPPVHALRALLQDLSNLHEYTEEIARLPSNWDALRRYLRSLILSLHISWSFILSSPAYDNGQSVFPEEVEEEVPDQQFGEGCPHCNHCLGGDEVTEGDFQEFQDYDEF

SEQ ID NO: 363769 - protein, 89 aa, Zea mays
  Clone ID: MRT4577_94928C.1.pep
PLLRRLLPLLLQKLHLHHTVPYHIIHALQLHTICYSNITPCTNHKNNAILTLQLRFDHRQALPHLLLYSITILLIPYFKASPFEADQAL

SEQ ID NO: 363770 - protein, 188 aa, Zea mays
  Clone ID: MRT4577_94929C.1.pep
MENAASAIAKPSLSKKPSPSFRLRNGSLNALRLRRVFDLFDRNGDGEITLDEMASALDALGLGADRSGLEAAVGGYIPAGAAGLRFDDFESLHRALGDALFGPMPVAVTEDDDDEGDMKEAFRVFDEDGDGFISAAELQAVLKKLGLPEARNLATVQEMICNVDRNCDGRVDFGEFKNMMQGITVWGA

SEQ ID NO: 363771 - protein, 40 aa, Zea mays
  unsure (1)..(40): unsure at all Xaa locations
  Clone ID: MRT4577_9492C.1.pep
XVGTVRTRSRLDASLLFSMIRHDGSSQEYCRHSVLACENV

SEQ ID NO: 363772 - protein, 61 aa, Zea mays
  Clone ID: MRT4577_94930C.1.pep
TFAFGHFFLRKFLPLKDNFIFLKRNLKFSRFRLIFFGFFFYEPPGLGFRGLRQVKIKRLLC

SEQ ID NO: 363773 - protein, 152 aa, Zea mays
  unsure (1)..(152): unsure at all Xaa locations
  Clone ID: MRT4577_94931C.1.pep
MSLLYKISPRVEASLHLHSNMDELLPACNPFITADHMTYIDKYDTMHRQXWHFDCFLYESNKFLLHTKXLCGFAIRNPEEIPWGDAGAFFVAESTAVFTDKDNAAVHLKGGAKNRVISAPSKDAPMSDVRVNEDKYTSHVNIVSNASLHPQT

SEQ ID NO: 363774 - protein, 97 aa, Zea mays
  Clone ID: MRT4577_94932C.1.pep
FLYGFHHHSRTAAPKAHHAMPGYEPSFNQHTPPPRISLRAHLPPGLAPDAEPFHGGKSKLGRGRPCHDECEEPPQSWRQQAHWRHIDHVDGGRRRRP

SEQ ID NO: 363775 - protein, 119 aa, Zea mays
  Clone ID: MRT4577_94933C.1.pep
MPTVVFQFANSKRVATHSTLAWAAGQHRPIQEADSASGARRRYDPKPGEKMVGDKITDTEARLNNKENTEGVARLLSNYLLGVDRDSSYRRKNKLRLGLKASPPRPGNAFFTTDPRGVF

SEQ ID NO: 363776 - protein, 418 aa, Zea mays
  Clone ID: MRT4577_94934C.1.pep
QPSEEPPKRLIEQHRWPAMIAGQAPKNLMSRSIDLSDKANIPVPPSNTSRGLSPRKTPSVRPVASSNTSRGLSPRKTPSVGPVPSSNTSRCPSPMKTPSVEASVKLSNQSLDEVARSLAIQSSRRDDKVDSQTIERSKSLSRPNRTVTFPVPILQRSSSPSRTLPATSSTSRAFQSPSRTRPSTPCQSQSAGAIQSSVPSSLINYMVDARKGKKNASQIENIHQVRLLHNRHLQWLFINAYAEDALSFQKATVENTMYNVWRNTVNLRDSVNMKRIMVQHFQQELRLYNILKEQIAYLEQWPTLERENSISLLGATEALKASTLRLPVTLGAKANTIALKNAVSSAVDVMQVLGSSVCCIHSKITDSTSLVSELSVIAGQEKIMLDECRELLATAAKLQVQESSLRTHLVQQRQRLQD

SEQ ID NO: 363777 - protein, 97 aa, Zea mays
  unsure (1)..(97): unsure at all Xaa locations
  Clone ID: MRT4577_94935C.1.pep
MFLFRMTGVLLMANHGHRNRQRACNALLAYVSLYAFKFFFFYFLHFISTFYIFXFLFFIFXIIFFIFLFFFXFYYLLFYFXYLFFYFFFIILFFFIY

SEQ ID NO: 363778 - protein, 28 aa, Zea mays
  Clone ID: MRT4577_94936C.1.pep
MYLSCRNQEKKSPYHEDQYVHFSVNIPE

SEQ ID NO: 363779 - protein, 59 aa, Zea mays
  unsure (1)..(59): unsure at all Xaa locations
  Clone ID: MRT4577_94937C.1.pep
GRCEADRTGLARSRSWSTLLPAPGVRCXXVGAKHYTCVTPHFXLGGFENKMKGKEGILT

SEQ ID NO: 363780 - protein, 102 aa, Zea mays
  Clone ID: MRT4577_94938C.1.pep
SDSLSDAWYLKKKKKKKKGRDKKKKKKKKKKKKKKKKKGRPLPIFKSRAAPFEVPCLLSLSCDFIFFFLRHLNLFHCPPFYNFFTWKTLLFPNLFSFHFIPF

SEQ ID NO: 363781 - protein, 117 aa, Zea mays
  unsure (1)..(117): unsure at all Xaa locations
  Clone ID: MRT4577_94939C.1.pep
RMITCKVASWLLSIKNETGAVSPKMIPETAMYLNYMSQGSLQLXXXXXXXXFXXLPLPLPHPASDRRCHCRRRHRWGGWVVVWCGCKYKPARTDVSGRLSILAMSGHGNPRVRPRVR

SEQ ID NO: 363782 - protein, 104 aa, Zea mays
  Clone ID: MRT4577_9493C.1.pep
ENQLSKLRRYQQKLTGTQGSISWFTHLHLPACTSDASTEVSSIVFSTARASSSSALTVAPRAVSSALVVFVPGGATIASFRVFSTVVESSFVATGHSLQVSHLP

SEQ ID NO: 363783 - protein, 64 aa, Zea mays
  Clone ID: MRT4577_94940C.1.pep
EEVLFSSSPVSIFRSLYPVSQFFILLILEMKELQVSDQHLSIGGFIMSCKIGGHHSLDCIRYVK

SEQ ID NO: 363784 - protein, 87 aa, Zea mays
  unsure (1)..(87): unsure at all Xaa locations
  Clone ID: MRT4577_94941C.1.pep
GTIAGCALDVAEGPQXPYHEYETCILYPIGIIWSLAFIKLRKLPYVLVLPRNAEYSEDVWMDIRDVAIAILQSFLYDGVVPYNVISD

SEQ ID NO: 363785 - protein, 41 aa, Zea mays
  Clone ID: MRT4577_94942C.1.pep
WPQASAHPSGFGPGAAVLEDPGLRPRAGDVLVFLWGNLNQI

SEQ ID NO: 363786 - protein, 126 aa, Zea mays
  Clone ID: MRT4577_94943C.1.pep
AGHTHTHTHDAGGQRASLLHDARAEEERETAAPPVGVGGAGALPRRARSGCSQIYLTNWRSSCCIGAGYGGGAAVAVIALKCPDIEVVGADISKPRIEAWNSDTLPIYEPGLDDAAKQRRGTNLFF

SEQ ID NO: 363787 - protein, 504 aa, Zea mays
  unsure (1)..(504): unsure at all Xaa locations
  Clone ID: MRT4577_94944C.1.pep
MSDQQRHYGSYELLPAHPDLRCLVCTRPFTLDAEVTDSLEALAICRECKTTVLSDSNRDDTPRANRQRRWRRQQSSIRGVSVFSQLINLARQQGHEADTDSPTVPRRHTSYSSTPSRSQRGHTSDDESDGLSYADSVFGEIESNISFGDEGGESDTSLDRHTMVGREIGIQLDNESYMNTDTDIDPMNAGVYQWDSDDPEDDEDEESEESGLDEGDDTMQERRQQWHDIAPSGLNEQESEGAAXDLENSWKPRXINRTXSESRHGRTGNQETXFIGNPGDYVDARQFEMLLEQFADEDNNSRRGAPPAAASSIENLSSVVISKGYEINGGVTCPVCKDDMPITTVAKQLPCMHLYHSSCILPWLNSRNTCPVCRYELPTDDSEYERSKHAAVNEGGIHGVERTHPQEVVEETYEPEVDGGSNTGGDTMNETNTHEQHTAQQPNGAHGRHRWLFIAAAPVVSLVSLALVLCFTNPAGNVRRQLCRRSQTTTTAHVDTRRSWWSMF

SEQ ID NO: 363788 - protein, 266 aa, Zea mays
  Clone ID: MRT4577_94945C.1.pep
IDTFGQRTSIYRGVTRHRWTGRYEAHLWDNSCRREGQSRKGRQVYLGGYDKEDKAARAYDLAALKYWGTTTTTNFPISNYEKELEEMKHMTRQEYIAYLRRNSSGFSRGASKYRGVTRHHQHGRWQARIGRVAGNKDLYLGTFSTEEEAAEAYDIAAIKFRGLNAVTNFDMSRYDVKSILESSTLPVGGAARRLKDAVDHVEAGATIWRADMDGAVISQLAEAGMGGYASYGHHGWPTIAFQQPSPLSVHYPYGQPSRGWCKPEQD

SEQ ID NO: 363789 - protein, 59 aa, Zea mays
  Clone ID: MRT4577_94946C.1.pep
MARAQTGETAVVVAAINRKDCCHAAKEPRYTTPLEAMEKGPREKLIYVTCVNNGTGNKQ

SEQ ID NO: 363790 - protein, 43 aa, Zea mays
  Clone ID: MRT4577_94947C.1.pep
IGKNIVAPLLVLNLIMYIIHIGFASWNLNHFINGQTNYPFVSV

SEQ ID NO: 363791 - protein, 240 aa, Zea mays
  unsure (1)..(240): unsure at all Xaa locations
  Clone ID: MRT4577_94948C.1.pep
MRIRGLAMSGGREVAISAVFTALLVVSILFLPSVLLTSGRLGPSSAKEWPFLTAAKDGGGYPVSFAYLISASTGDAERATRLLAALYHPANSYLLHLDRDAPAEEHRRLAELVSGQPVYGRVGNVWIVGKPNLVTYRGPTMLSTTLHAMAVLLRVGRRWDWFVNLSASDYPLVTQDDLMEAFSRLPRDLNFIQHTSHLGWKIKKRARPVILDTALYQXDRSELXPVAYITTXRRGLPTAF

SEQ ID NO: 363792 - protein, 45 aa, Zea mays
  Clone ID: MRT4577_94949C.1.pep
YIIGTHILRTFDKQPSELFHVLSLKAQDSFDEAILIVETHIMLCI

SEQ ID NO: 363793 - protein, 126 aa, Zea mays
  unsure (1)..(126): unsure at all Xaa locations
  Clone ID: MRT4577_9494C.1.pep
ECLNDSDGVHKYILIGDVPVSNTDHIKMAHNVISAXLRTFIEVDLENXPRRAVXTIHIYGYTLFVXMYGAYLXWSLASRSTYNLLDTVSRDTTQVYTRSWTVAMTTLDNDCMCGCRSNIYQRQILP

SEQ ID NO: 363794 - protein, 74 aa, Zea mays
  Clone ID: MRT4577_94950C.1.pep
SCLLNQLKEMIPWICGSPVTPRNVKALMLGELMPHLMDGRIFASSDQAHRITNVHVEGHVANDPCGACTLDLWA

SEQ ID NO: 363795 - protein, 117 aa, Zea mays
  Clone ID: MRT4577_94951C.1.pep
NNQTKRGRREDQKAKNPPGGRGSPNQGFIFQTRGGGLQNGQDPKKQIPPSEKPPPAEICHPTKKSSPNNLGGTPKLGKTSRLWLGRLFDRGLRPHPNFKNGEARPNPKNLGPHLNKS

SEQ ID NO: 363796 - protein, 96 aa, Zea mays
  Clone ID: MRT4577_94952C.1.pep
QAPGLPPLRLVSSSHATRPPPRACKAFHRSARLVRPLQAAMWTTPPILHSLIEGYTHLQLLNWARRSGSFQQGFFLGAQAILPFLVFGGGWSGLFL

SEQ ID NO: 363797 - protein, 133 aa, Zea mays
  Clone ID: MRT4577_94953C.1.pep
MSKVFTLDAVAKHNSKEDCWLIIGGKVYDVTKFLVDHPGGDDVLLSSTGKDATDDFEDVGHSNTARAMMDEYLVGEIDASTIPSRTKYVPPKQPHYNQDKTPEFVIKILQFLVPLAILGLAVAVRMYTKSESA

SEQ ID NO: 363798 - protein, 98 aa, Zea mays
  Clone ID: MRT4577_94954C.1.pep
SHCTFTACCRTLLSRKSKTSARYTWPQLPMFCMYRPILRYSTIRKPMNYRTPWCDHRHLLHAGPESLVNVRPLLHHANGNSGVRGCHSSMLRLDRKKK

SEQ ID NO: 363799 - protein, 97 aa, Zea mays
  Clone ID: MRT4577_94955C.1.pep
QDQITPNRAVGDIYLFIYYLFLGGEELERTKLFLGVYAERQKITPFTRVWRLRLQPNSKNKNKRTGHRGISPRENGPCFFFLGEQTKHILCPPPDSP

SEQ ID NO: 363800 - protein, 58 aa, Zea mays
  Clone ID: MRT4577_94956C.1.pep
HPSANSSKTRGVGWYSAGTAALTVADNNLYLTSYAVPKTQTLVVCVLLSPCSCLVRMQ

SEQ ID NO: 363801 - protein, 274 aa, Zea mays
  unsure (1)..(274): unsure at all Xaa locations
  Clone ID: MRT4577_94957C.1.pep
ALRHQWPPRRRRRPHSLSHRPSRAAASFRSLVTPAGPCVSLCDSSRQPFGDEENPYELLGIRPLDSFDHMKMAYKKKRKDAEETGDDEFLAKLDRAYDTVMMQQLQYRKKGVTYGSVQVSKDIKYADNQPIVLWGPRFSRSTVKDMRINMAISAAFVVWIAIMGNADWKPLQFLCFAFFCRILQKLRATEPLITPIYNEYGEVEGRGIRMXXRVVRALGLIFECVFTASLAYTAASNMVELSLQYTPRMFYYYQELIVTVAASVLLYITASWYR

SEQ ID NO: 363802 - protein, 87 aa, Zea mays
  Clone ID: MRT4577_94958C.1.pep
RVGGRVGGRVGEYGEVEGRGIRMAKRVVRALGLIFGCVFAASLGYTAAINLIELSMQYTPRLVYYYQELIVTMATSVLLCITASYYR

SEQ ID NO: 363803 - protein, 253 aa, Zea mays
  Clone ID: MRT4577_94959C.1.pep
MASATATAPTFALASSFSRGGFLPLPRRAGRPMLQSLRLVASAVKRRRGAVVVAADAAAAAGSAEFGDEENPYELLGIRPLDSFDHMKMAYKKKRKDAEETGDDEFLAKLDRAYDTVMMQQLQYRKKGVTYGSVQVSKDIKYADNQPVVPWGPRFSRSTVKDMRINMAVSAAFVVWIAIMGNADWKPLQFLCFAFFYRILQKLRATEPPITPIYNEYGEVEGRKNGKTKRVVRALGLFWMCVSRCIPAYTAAS

SEQ ID NO: 363804 - protein, 152 aa, Zea mays
  unsure (1)..(152): unsure at all Xaa locations
  Clone ID: MRT4577_9495C.1.pep
SRPNKKKKKGKKKGKKRXKRKGKRENKAKRGNQRQKKNTQGQTRPKGLTRNKPHKNPGEGQQQKRKPKRKKAPKRKKSKAKTKALQKEPRRQGASKKPGEGKGPNKNNRAKKGAKRNPAEPRRTGGAAPGTTKEGAKTAGTKGEPAKSPGKK

SEQ ID NO: 363805 - protein, 152 aa, Zea mays
  Clone ID: MRT4577_94960C.1.pep
MAKPRLLLCLLVAAAALLLVASAKKSGDVSALQIGVKYKPESCSISAHKGDRVKVHYRGTLTDGTVFDSSFERGDPIEFELGTGQVIKGWDQGILGMCIGEKRKLKIPSKLGYGDQGSPPTIPGGATLIFDTELVAVNGEPSSKSEEDDADL

SEQ ID NO: 363806 - protein, 63 aa, Zea mays
  Clone ID: MRT4577_94961C.1.pep
VNTSRKEAYSLRPTSFFFSTPFSFLHVWVPILTPPPVVETPPLLFFGSTPSYFATIIILTTYI

SEQ ID NO: 363807 - protein, 61 aa, Zea mays
  unsure (1)..(61): unsure at all Xaa locations
  Clone ID: MRT4577_94962C.1.pep
FATFRLVLCXALGSAPRRVPIFGPIVRKSGHGAGWPTPKMVFEAAGRFSFLAKLFGASWAE

SEQ ID NO: 363808 - protein, 33 aa, Zea mays
  Clone ID: MRT4577_94963C.1.pep
FPKICNMFKGGHQTPILSPGALDHIRHKIISYP

SEQ ID NO: 363809 - protein, 74 aa, Zea mays
  unsure (1)..(74): unsure at all Xaa locations
  Clone ID: MRT4577_94964C.1.pep
HQRTKHMEISXVLHFIFERVALGEVQVLHVPTTKQTPTIVSKEFCSSLNIRSAPISTVEGVSQGDIHVRHNVQT

SEQ ID NO: 363810 - protein, 97 aa, Zea mays
  Clone ID: MRT4577_94965C.1.pep
PLGPIRSRKRRVSHAAYLAKSSETSRGEVVPSELEAVALAAPDAPHMHRVEVMGTQDATQVRDVSAGDCVVDQNLNLGPNVLPEETSGGACKATSFC

SEQ ID NO: 363811 - protein, 83 aa, Zea mays
  unsure (1)..(83): unsure at all Xaa locations
  Clone ID: MRT4577_94966C.1.pep
LHHYSLFHYLTLLSFSPRDTRAPRXALLHPKSSLLLHLSRKINITGPVSEIVYPAAKTPHLLLLNSWPYLVGSSCSTLPASTS

SEQ ID NO: 363812 - protein, 129 aa, Zea mays
  Clone ID: MRT4577_94967C.1.pep
MGVFQDTGVGGGAGSRTSRRVFQYQRLECCWDDGATSRWRCPPAANGKKAEAPCLFSVRRLKWSKVTSVLIPRKVAELSAKICHAGARTEAVVCPAVVFMSPWGLPVLSRPLLVGHNTCRYHRGRDTFW

SEQ ID NO: 363813 - protein, 61 aa, Zea mays
  Clone ID: MRT4577_94968C.1.pep
KSTGRGLTTGEREKPGGTPTKSPGRKPPFPQWGKKQKAPPQPPFQKFPHPKGKRTPPLTGP

SEQ ID NO: 363814 - protein, 90 aa, Zea mays
  Clone ID: MRT4577_94969C.1.pep
QSMHTSIGTGELAYAVGSKLMDVRTLPKETEGGEVSTSQQAEHEVPCSLAENSNLIYGSGCTTRPHKRKICSKSAETVGFNQHNDNSRGS

SEQ ID NO: 363815 - protein, 40 aa, Zea mays
  Clone ID: MRT4577_9496C.1.pep
SFVKGAVNCFKEKKHMFGGTVPTSLNWQSCYLNPDYNFWG

SEQ ID NO: 363816 - protein, 67 aa, Zea mays
  Clone ID: MRT4577_94970C.1.pep
LFSSAVVLVFGVRASSVWPVPVRVSFSGAAPVFLSYFPGPWLLVFVSAWVCAVLSAYAWVAPGVPVV

SEQ ID NO: 363817 - protein, 199 aa, Zea mays
  unsure (1)..(199): unsure at all Xaa locations
  Clone ID: MRT4577_94971C.1.pep
RPLFFFFFFFVYFVFLYLCFVIFLFYFCYIVLRAKKAPPRQHKGKRKQXGPSTPNKXPQGAPPPARHHPTPPNKPRQPKQRKNQTGNXQQKGGPREKQGHKTGPRAKNQTKEQXHPPPPGEKKKXSLPPPRKGKKRKRAREKPPTPPGPPKTNRGSGPGPPAPRDWPGGPPQRARATGGTRGGNLNPHRTPRGRRPSDP

SEQ ID NO: 363818 - protein, 87 aa, Zea mays
  Clone ID: MRT4577_94972C.1.pep
NRSWSGCETSLVSKGGLGYRSTASPAGADTEVDWAFAIAIYLAEARLVKANPLKPDLPHITGESSAASGEGRSCCRGVDHLLPARPA

SEQ ID NO: 363819 - protein, 142 aa, Zea mays
  unsure (1)..(142): unsure at all Xaa locations
  Clone ID: MRT4577_94973C.1.pep
VGGLKDDLGGRCGGGQLQAADQLQRRTIRREREIEDAAASAQXLTTATMVELAGGCXSDWGLMGXXIHGKAEGMRRVLEMADALRLETMREVVALLRPAQAVHXLLAAAELHLALHELGRRKDGRXATSPPPGRLSDGRWLA

SEQ ID NO: 363820 - protein, 50 aa, Zea mays
  Clone ID: MRT4577_94974C.1.pep
KRQALVTFLENNRAGVPVFGFVVDRGWLPALFMIEFSLVMWLLGKTVGIS

SEQ ID NO: 363821 - protein, 94 aa, Zea mays
  Clone ID: MRT4577_94975C.1.pep
PRYAKPAHIVYPCWPPAFYMQAVALSQLNRHSASVDKVKKASQFLKKRPKTPKVPFFALPTQKSGPFFIHITFPPPSPLQKEFSNLSPPVKKAK

SEQ ID NO: 363822 - protein, 289 aa, Zea mays
  unsure (1)..(289): unsure at all Xaa locations
  Clone ID: MRT4577_94976C.1.pep
MVNTFFLFCGCVDQASVAVVEKWGRFLRLADPGLHFFNPLAGECVAGSLTTRVQSLDVRVETKTKDNVFVQLICTIQYRVVKENADDAFYELQNPQQQIQAYVFDVVRAIVPRMNLDDLFEQKNDVAKAVLEELEKVMADYGYSIEHILMVDIIPDAAVRKAMNDINAAQRLQLASVYKGEAEKILMVKKAEAEAEAKYLSGVGIAKQRXQAITDGLRENILNFSHSVSGTSAKEVMDLIMVTQYFDTIKELGDGSKNTTIFIPHGPGHVKDISEQIRDGMMQASSSNV

SEQ ID NO: 363823 - protein, 79 aa, Zea mays
  Clone ID: MRT4577_94977C.1.pep
SIIIQAKASHREEREREENAAAMAPCPTGVRCTRYGHTQSLVREKFITGGVLRWASMRRAMAEIVCRTDSSSVVKSRVI

SEQ ID NO: 363824 - protein, 104 aa, Zea mays
  Clone ID: MRT4577_94978C.1.pep
KKDVYQELFFINNILNMFFHRTRMRRYNAHKTQLHKHTQLLLRCNHSSYPTYPNGIAPWSPSNSPEVRGSPETTPGRRQIHQRLQVLLSLPRMKVEPPAMTVTA

SEQ ID NO: 363825 - protein, 124 aa, Zea mays
  Clone ID: MRT4577_94979C.1.pep
DSDAADGDGHGPTGGRVPVVTGPPSSAAAASQVGKNHSTCRWSTGTGPRIRCVRDYPQDLQSRALEHVNLSPRLTGSPSRKRDPVPSPRPSPAMILSPRLASVGFHPQTTVSLTLPDFKRSRLH

SEQ ID NO: 363826 - protein, 109 aa, Zea mays
  Clone ID: MRT4577_9497C.1.pep
GELGPLKTHSSAPHCDIYIHNSPLNTGVTPKSLFFFFFFFFFGAQVRFGSSCTNALFTSDRQPVQYYVLHCTTPEASEQACASRVRVTVRVCGRTHACMQLSIYKRPCK

SEQ ID NO: 363827 - protein, 198 aa, Zea mays
  unsure (1)..(198): unsure at all Xaa locations
  Clone ID: MRT4577_94980C.1.pep
MADTVIQPKQEEVNAGNMELKDNTIIVVLGASGDLAKKKTFPALFGLHRNGFLPNNIHIVGYARTKMDREEYLKRVKSYIKTPTKELEKQLDEFCEFCSYVSGQYDQDESFVGLEKHMQEIEKGRKENNRIFYMALPPSVFITVSQHLKRNCYPKNGISRVIVEKPFGKDLPSSRELQRALAPDWTEDELYRIXHYLX

SEQ ID NO: 363828 - protein, 76 aa, Zea mays
  Clone ID: MRT4577_94981C.1.pep
KKKKKETEVIHEYYGEKQPTSIHHPLLLSASARASPTTTCPCWLRSRNRRKQRKTPRPEKNTWITRLAVAGRTRQV

SEQ ID NO: 363829 - protein, 69 aa, Zea mays
  Clone ID: MRT4577_94982C.1.pep
LDSGPQCLIIERSTKRSKLYLRYFRFDFKIHALGPTRESCKLRKHSLDFKTHRFALFTQVPKQSRYKIP

SEQ ID NO: 363830 - protein, 152 aa, Zea mays
  Clone ID: MRT4577_94983C.1.pep
VCMVCGVAAPSEVDLLRCSTCATPWHSPCLSNPPALSEAAIWSCPDCSGDPVAPAAPAAGGELVAAVRAIEADTTLSDAEKARRRQNILAGRSAASAPDDDVDDSAEDDVLNIFGRSFSCAFCMKLLDRPVTVLQMSLIRSMLASMFKINNC

SEQ ID NO: 363831 - protein, 47 aa, Zea mays
  unsure (1)..(47): unsure at all Xaa locations
  Clone ID: MRT4577_94984C.1.pep
VWERQVXPRPIGKNHGRLIEFMCRDLKVTSLLQAVLNLIHLQSTPLY

SEQ ID NO: 363832 - protein, 206 aa, Zea mays
  unsure (1)..(206): unsure at all Xaa locations
  Clone ID: MRT4577_94985C.1.pep
MASSPQPPPPFAAQNPTAQGSGQGPPXRGGGSPRGVRQPPDLPRRGPXPPGAPRGLTPQQAPPTLSARPGPPPSAARPAFPGSPPAPPFVRAPTPSTSASPPFGGQPGVMSQPPPPFGGPPGASSQPPPPFGVPPGVVSQAPSLFGGPPATASQASSPFVGHSVAASQAAPFGAPPVAGSHPPPFGGPPGAGPQPAPPMRQTFAGQ

SEQ ID NO: 363833 - protein, 109 aa, Zea mays
  unsure (1)..(109): unsure at all Xaa locations
  Clone ID: MRT4577_94986C.1.pep
SIDHVRAYVRESTRHELTKNAAYIGTPGKGILAADEPTGTIGKRLSSINVPRGGENRRALRELLFCCPAALQYITGAILFEETLPQKTKDGTPFVDALKEGAXPPCHHG

SEQ ID NO: 363834 - protein, 105 aa, Zea mays
  Clone ID: MRT4577_94987C.1.pep
DDKMTHLPSIYPPKEVNNWITREAYRLLRNLLIAIDSLPLGKHHCSTASLHLLSATTIEPSSIPPLLYMKHCHNPEIASEDKMLHCTLNACMLHCHNYISKPSSP

SEQ ID NO: 363835 - protein, 105 aa, Zea mays
  unsure (1)..(105): unsure at all Xaa locations
  Clone ID: MRT4577_94988C.1.pep
TGGSPRPFPPRPFPLPTSXRFGSCWRSSSPAFSTGAPKGAKRTSSKSSSPRKKEPSRLDPLFPYPLQAAPVCCMPLAQGKKKGNPPPPIGAPKFVFLVETPRVRS

SEQ ID NO: 363836 - protein, 72 aa, Zea mays
  Clone ID: MRT4577_94989C.1.pep
TTAHELLISEAPDALLMSTGVFFTRGLTVRGAHTLVATDDSGLLDHDIYRLLVRFNKVTYDVECGDVLKVLD

SEQ ID NO: 363837 - protein, 112 aa, Zea mays
  unsure (1)..(112): unsure at all Xaa locations
  Clone ID: MRT4577_9498C.1.pep
SPTKPLPVPAADRRSSHAAQIGPLSSGGGLHPRDDRGGPHSVEDGTSTTHLLFISQNKNEEHIDKVSDQXCNAVLDTXLAEDTDSKAACETCTKTNMVMIFGEMNTKGTGKY

SEQ ID NO: 363838 - protein, 420 aa, Zea mays
  Clone ID: MRT4577_94990C.1.pep
MDLHVKDEFLVHFIFASLPKEFNTFVVNYNIQPEKWDLDRWATIHVANSLQGFRLTRTMQRKERHIKAANGVQADVEAVGDLPLELANGFILVLRDVLYVPSLQKNLISVSCLDNDGFDCHFGDGKCHILRGRIERLVKNDILPPLEFSDLEQCRECIKGKYAKKIKKNVKRSTVILQIIHTDICGPFPMKSVDGFDSFITFTDDYSRFGYIYPIKEITKALDKFKIFKAEVGNQHSSKIKVVRSDHGGEYYGRHTPYGQVPRPFARFLHENGIVAQYSTPGEPQQNGVAERRYRTRMDMVRSMMSYSTLPLSLWMEAMKIAIHILNRVPNRYTKFVEMRHAVFLEDEMMRGSMDPIENDATSEGEQQQPQTVDVPNVEAPRRPQRIKRSAIPNDYEVYNTEGLQMEGDPTSFEEAMISE

SEQ ID NO: 363839 - protein, 459 aa, Zea mays
  unsure (1)..(459): unsure at all Xaa locations
  Clone ID: MRT4577_94992C.1.pep
MGFIKDIPPLKGDNCTEWKKKIDLAFVLLEMDWVVTTPCPNELVAPLRETDEAESAWQTRQRDRAPKQMAYKLEHRKWVIANKKCMCDTVTEYLDRIKGQFYGSSKTYATQLIKQLVIKRYSGGGNGTGIREHILMMSYMNSKLKPMDLHVKDEFLVHLIFASLPKEFDTIVVNYNIQPEKWDLDHCMDMCVQEEERMKAANGGTLHYVKDIKKINFNANANSPAKAKGKAPQHHQPQQKKFMVNKDQCLHCKKTEHYKKDCPEFLKSIMAKNGENIIMFINESLYVQYSKSTWRIDSGATIHVANSLQGFCSTRTMQRKERHIKVANGVQADVEAIGDLPLELANGFILVLRDVLYVPSLHRNLISVSCLDNDGFDFHFGDGKCEIFHNKESVGLAFQKEDLYLLSLHENVNSISDMNENVPSSMNENRKRKRTPDASSKLWHCRLGHISRGXIERLV

SEQ ID NO: 363840 - protein, 199 aa, Zea mays
  Clone ID: MRT4577_94993C.1.pep
GDAGSRDAPWRLPPCARPAERLRASHAPPQRPLSRLPASSSARLSPWSPVSRSSSSANCTPLPWRLPSPAAIVFLGALPQLAPSSSLAFLPLCSSRARNFFPRWRLVPAPLRRDVSLRTVALLAEPLHRALLVRQVAPWPCRALCSSSLSFPSARRLSQPPRAMELPGCARMLHCLVVVASSPDSSALRALVFSLRVDV

SEQ ID NO: 363841 - protein, 239 aa, Zea mays
  unsure (1)..(239): unsure at all Xaa locations
  Clone ID: MRT4577_94994C.1.pep
MALDDACAYDCCALPPPLHCLDWDWDSELLHTHRHTTSAGGAAVQAEPPTFFVPATPGVQPSAASSGGYLHDAINHWSDTFRSKRQRMAATTTTPPARRPATTVSEDLQCLLAGFWDSTSEAEGGADFRHDLNTTTPEPEPETTTEIRCSFASGEDEAVASGREDQQRGASAQVLLPAPAAVAQRGEEEEEKEAKATAVVPPPRFPXPRQPLLPCSGSCSCKRRPRVQPPRRRRPPLPA

SEQ ID NO: 363842 - protein, 57 aa, Zea mays
  Clone ID: MRT4577_94995C.1.pep
LLHPADWLLCGSSLCWALPATASLSLTILVWLIHSLFYLCRLIISAMDLPSDVSPSL

SEQ ID NO: 363843 - protein, 92 aa, Zea mays
  unsure (1)..(92): unsure at all Xaa locations
  Clone ID: MRT4577_94996C.1.pep
HRRDSXGCKEQRKKTIGEQEPEERKTRGRRWGGARAAWPVIGVSSGVAHGPMHDAGPAWMPQHRAPEQAELSDPYAASRLNSELKAACSLRH

SEQ ID NO: 363844 - protein, 90 aa, Zea mays
  Clone ID: MRT4577_94997C.1.pep
VCGTTAGKALTDLCEESVVPGTSSTLSARPVKTIHLTQSPRTIITSKTSIILQQRNHLPYHHHQNKKVRLSSPLPISALYIHTITKAHLP

SEQ ID NO: 363845 - protein, 94 aa, Zea mays
  Clone ID: MRT4577_94998C.1.pep
IDVAVLYPLSGALYAQSLRNDLNKQNLSASNRPTGHQSHGMLCLRAHEQITQDLENIDLCPRKQTRSYADLDPCHMPLGTHSPTTSSLATFKSQ

SEQ ID NO: 363846 - protein, 83 aa, Zea mays
  Clone ID: MRT4577_94999C.1.pep
KRKGVNLFSPLVGNPSFLPFPPNLFSPFRAGCGLKFLIAGGPPFSLAKKKLSPPGQCNRCPFFQRVNGTLFGEKVKLEPFPGN

SEQ ID NO: 363847 - protein, 46 aa, Zea mays
  unsure (1)..(46): unsure at all Xaa locations
  Clone ID: MRT4577_9499C.1.pep
WTSSLHSPRTSDLPNIKVPLILGNWXSLMSRRLMKVLQRWTTNLEP

SEQ ID NO: 363848 - protein, 105 aa, Zea mays
  Clone ID: MRT4577_949C.1.pep
GVQKKKKFFIKKKRAAGLRPRGSISPEDYLARRGGRKNPPLTQALVIFFSPPSGRGIPPHLRGNPGLKTRGAPPSQTGPFFGICTCPPLIPELLKTKLNPYFWGL

SEQ ID NO: 363849 - protein, 51 aa, Zea mays
  Clone ID: MRT4577_94C.1.pep
YVRRAEEEIERRNADTGRRNRCGAGVLPYELMAPTSGPGITCRGVPNSVTI

SEQ ID NO: 363850 - protein, 86 aa, Zea mays
  Clone ID: MRT4577_95000C.1.pep
QTWRGTCLPPCSNAPAEACSIGSQSVTSPWFSRASSEVTSHLDEQAGTWSRPSHGKNRCLLMRRMADAVEKKERDLGRTCELTLGC

SEQ ID NO: 363851 - protein, 71 aa, Zea mays
  Clone ID: MRT4577_95001C.1.pep
HAQEQGQVQYLSLCSWDLRFQVPTCSSDDTCSHFDCAAQGLLFTMMRRTATLARSSRQHAAPTRHPQPPRP

SEQ ID NO: 363852 - protein, 50 aa, Zea mays
  Clone ID: MRT4577_95002C.1.pep
LSRTCSYSRKLRLMLPPAERRLASMRGFHERGKFIGFMTTWLMLDYLVAC

SEQ ID NO: 363853 - protein, 110 aa, Zea mays
  unsure (1)..(110): unsure at all Xaa locations
  Clone ID: MRT4577_95003C.1.pep
DFERPHFFSFRQSRADSCKTGDPLGMMTEALPPNREIAMGLSFFIFGFWYVFAXVKFVNLLQLMPVWWRWVYWADPAAWTVYGLMFSQLADRTEQILVPGLGVQTVREPR

SEQ ID NO: 363854 - protein, 77 aa, Zea mays
  unsure (1)..(77): unsure at all Xaa locations
  Clone ID: MRT4577_95004C.1.pep
PPVCWLPFSSARVQVSCXSKKKKKKKKKKKKKKKKKKKKKKKKKKKKKKKKKKKKKKKKKKKKFFFLGGEPPLGQIF

SEQ ID NO: 363855 - protein, 182 aa, Zea mays
  unsure (1)..(182): unsure at all Xaa locations
  Clone ID: MRT4577_95005C.1.pep
GGPERSRSGGASAIPLASEGVAGPETVPGSWKPCTPLFKDELDIGISTIRXLDLLEMWRTFFYSYQLIIVQDXNPTKSIKVPEGVYYELYNRNDINRMLGSKDCCICFKDSXLTXFGYMVSNKKYIYTIDEDXILCQGPXGKDIYXXEQYIMNHLRLSTLLLFNRLYDPXREGVDFXRGNPL

SEQ ID NO: 363856 - protein, 43 aa, Zea mays
  unsure (1)..(43): unsure at all Xaa locations
  Clone ID: MRT4577_95006C.1.pep
LSWIVIMFCTAYYKQHGNKLVARIPGRKKDDAKGGRYSSXNSR

SEQ ID NO: 363857 - protein, 137 aa, Zea mays
  unsure (1)..(137): unsure at all Xaa locations
  Clone ID: MRT4577_95007C.1.pep
PTHTFTLCLFFKSAFSFRDSWCXYRTTXGLIKVKHSYPFGVDPVLHCIRIELPFLNSLKIKISILLGVAQINLVILINYFNAKFFKNSLNLLYHFIPQLIFFNNLFCYPSFLIIIKLXTLLKTHLYHFIIYIFLIPT

SEQ ID NO: 363858 - protein, 70 aa, Zea mays
  Clone ID: MRT4577_95008C.1.pep
STSTFFSTPPSTIYLPSNLPITPTLPLTYSLHPSAQISLSSPLPLTTYFPKTSTIYMTSPPFLHKNFNFP

SEQ ID NO: 363859 - protein, 239 aa, Zea mays
  unsure (1)..(239): unsure at all Xaa locations
  Clone ID: MRT4577_95009C.1.pep
SIETDALRAIPLLFAEIGILPATPGRESKRLPCSPLLRLTLLSWTSDAPQTPQRCRTLAATTPRRPXPTSAPSKGKSSAPNPSGNHAATPAPSGTPSKGKSAAAQAAALGHGSSSHHHSAGGGGGGADASATTLKRKRGVFQKDLQHMMYGFGDDPNPLPETVALVEDIVVEYVTDLVHKAQNVASKRGKLLTEDFLYLIRKDLRKLHRATELLSMNEELKQARKAFDVDEETLATTNI

SEQ ID NO: 363860 - protein, 142 aa, Zea mays
  Clone ID: MRT4577_9500C.1.pep
SFPVKKSGFILFFEEKFQGGPGNSFTPPPAKIMGGDGFQKGQKRIHAMANALGLEGFSPLYAFFNPPNGEGILIKINTGPGRAPPPGLVPPTLAKEPPGGPPRVFPPFLELGVCKGQKALPPFVFLFRCAGFILVPSRRVFF

SEQ ID NO: 363861 - protein, 84 aa, Zea mays
  Clone ID: MRT4577_95010C.1.pep
LQLPAKQAAIMLPIVPRPPRRHAKYKETPLVDGASALGSNAGSPQLLLSTNQAPRVQSPVNTPLVFVDGKQNTRNYARIHPCRL

SEQ ID NO: 363862 - protein, 63 aa, Zea mays
  Clone ID: MRT4577_95011C.1.pep
AKTLDKKPVFTLPAHKNALNFQSLLKTGQTQHVHMSVQLDMGSFTSHHTQIPCLIVRHSDNIS

SEQ ID NO: 363863 - protein, 140 aa, Zea mays
  unsure (1)..(140): unsure at all Xaa locations
  Clone ID: MRT4577_95012C.1.pep
SRQQWPCRYVFIPRTLHAPTASKDRVLVGNLELPNKSLLTPLSVERVTTCRPRDVCHYHNAVNXVQVADKNNCNXVXMARHTTKLREFWAPGQRASRMIATIXHKLGKNYNTNITCWKVNTHYSPNVAXTYXTSSIPTYA

SEQ ID NO: 363864 - protein, 66 aa, Zea mays
  Clone ID: MRT4577_95013C.1.pep
AVLSAAALLFFFCFTRPEPNQFAVMRGLRITTKTTKGRPRDHPGNSSVVLFGQTIKRSTYNGYTDY

SEQ ID NO: 363865 - protein, 61 aa, Zea mays
  Clone ID: MRT4577_95014C.1.pep
KCRLSSRGMGAWVSSTVVPCQYNSILFKSSRPSVFVSCQVNSSSMRYWSFGIFGRLYMSCA

SEQ ID NO: 363866 - protein, 95 aa, Zea mays
  Clone ID: MRT4577_95015C.1.pep
DGVTQSHFLSSFSSEPEPPNRRHSCDIGLKLPSGAYFLILFFILQILQESVLVRTHFIVGHWDAFSGLGRSLLSFVHWPAGVRISRRGSDSPGNG

SEQ ID NO: 363867 - protein, 73 aa, Zea mays
  Clone ID: MRT4577_95016C.1.pep
TTHMDLQDLVLCAPKVYLNITGHCTSASFLNVHLTNIITRNYSKSTTINENGLNCTYRLFCQTKVTITSIIVY

SEQ ID NO: 363868 - protein, 149 aa, Zea mays
  Clone ID: MRT4577_95017C.1.pep
MMSAKRLVQMSSSRWRRMAALARKRLASTPVKETDGSSCSTSSVAGKGHCAMYSADGRRFEVPLVFLGTALFGELLSMSQEEFGFAGDDGRITLPCESLVMEYMMCLLTRDASEEVKRLFLSSMARPCHYGSGLVQTMHHTQRTVVPSF

SEQ ID NO: 363869 - protein, 82 aa, Zea mays
  Clone ID: MRT4577_95018C.1.pep
MLALLGVPLTGHHLLLSPPLPRGLQRAVTRSASWRRRPDASARVSARGSGCGSLHGERVRAPRLARVQPACGRGRVSAPVPA

SEQ ID NO: 363870 - protein, 49 aa, Zea mays
  Clone ID: MRT4577_95019C.1.pep
MYTKRAFVHWYVGEGMEEDEFSEAREDLDALEKDYEKVGTKFNKGEDGT

SEQ ID NO: 363871 - protein, 90 aa, Zea mays
  unsure (1)..(90): unsure at all Xaa locations
  Clone ID: MRT4577_9501C.1.pep
LEDSATELLKLVITHKHDGSYKIETEHGTSGIHDQVDHTRDHHYGDDRSRLQPDMTLASYSKRNSKHMHVXNGNHYHHYGETARTEPAAE

SEQ ID NO: 363872 - protein, 60 aa, Zea mays
  unsure (1)..(60): unsure at all Xaa locations
  Clone ID: MRT4577_95020C.1.pep
IGVGLATFFSQPRLLVYYQRCXAPNAGTILPLHQAMPFNQLAFASPTAFHRRPLIGGALF

SEQ ID NO: 363873 - protein, 53 aa, Zea mays
  Clone ID: MRT4577_95021C.1.pep
DPCAHHGLNLITPVLAEHRAIHLTTSSGFQGLTRNGIFQCNFFSERLYNFTGR

SEQ ID NO: 363874 - protein, 165 aa, Zea mays
  Clone ID: MRT4577_95022C.1.pep
MLIPKADRKKIHEYLFREGVLVAQKDFNLPKHPDIDTKNLFVIKAMQSLNSRGYVKTQFSWQYYYYTLTPEGLDYLREWLHLPAEIVPATHIKQQRSHAPPRGMLGEGERERRPFGRGRGGDRGDREGGYRRRDAGEGKEGGAPGEFAPQFRGGFGRGRGAAPPS

SEQ ID NO: 363875 - protein, 644 aa, Zea mays
  unsure (1)..(644): unsure at all Xaa locations
  Clone ID: MRT4577_95023C.1.pep
MTMSSQEVTAELLLGDGSNYKSWSVSIYNAFMSVDPDLRQIFRRSIFPSDLSKNPSNDELRCFSLNHRACSILVDSLSRGAYFAILSNGNDLIVDAHDLWNRIKEKYFVANCTTSTPYIACDANHSKGEDQERWTPNDESTSSTGLVSTNNKCFIANNDGGDKSHDEEEYEDDSEDESSSSQGTFSYIASTDINDRENETDDVEEEEIRRFYTHLNKEDKALLIKLLRRNKEQSEMLLRLEETLIKTNNSLEKMTKEHEELKCSHDVLVQRYDSILIEQNSNDDAISCVAQLKMENVMLEREVKXLSHDNLALGEEYDVLSYSHNKMIDDHIMLNVAHEVIIANLNSCEPHSRTSAHLNCISPCANPCCSKESQFLNKHQDAGSQKKLCGNKKQRQLRRRRIAQLSQDIHGRVVKKLEKGKTAASAELHKKIVPKDEEINMSLEKGKDLFNHVVCTDLFSMSSKSKKRRGKRRCFKCKKLGHLIASCPYKDKDEGTRSCFGCNNKDHMITSCPLLMNQARAPSKMTPTKENNKQQVSCQVERRFCYKCGEQGHLSKSIFHLTFKLVSLCDESDRVCLDQVSRWKREDEHEIEQSGLGYLCKSKTTDQAKDGGKKSFEVPSAREKAKEAEEPKAKGEEEGLQSQG

SEQ ID NO: 363876 - protein, 34 aa, Zea mays
  Clone ID: MRT4577_95024C.1.pep
NWTESNKVYFKIIKVNIQNSSSKLTETTLFASTN

SEQ ID NO: 363877 - protein, 154 aa, Zea mays
  unsure (1)..(154): unsure at all Xaa locations
  Clone ID: MRT4577_95025C.1.pep
MEWLEKDLREKFDLPPKNRSEEALRRWRDAVSVVKNPRRRFRMVADLATRRQNDLKRRSTQEKIRVALYVQQAALHFIDGGKHKDYRLTDDIMXXGFCISPDELASITSKHDAKALSMHGXXVDGICAKVRSSPTAGVXRHDDDDPDARRTVYG

SEQ ID NO: 363878 - protein, 85 aa, Zea mays
  Clone ID: MRT4577_95026C.1.pep
MLRVAVLRQSHTGAAAGTMTGVPTVSFSELRQLLASGRARLFDVRSREEAAAGTIPGALNIPVSELEMALNMDSAAFQTSYCAEK

SEQ ID NO: 363879 - protein, 65 aa, Zea mays
  Clone ID: MRT4577_95027C.1.pep
SSHPISRHPTHSNHVVIRLIGEFIHHCPQLICHHQVTINNAILLKSITWNTLMVCSWVINTNKYH

SEQ ID NO: 363880 - protein, 70 aa, Zea mays
  Clone ID: MRT4577_95028C.1.pep
RDKLHYSSLIPKTNTEHNTHIFPAMVKENACSNSYKTNKKKGRVNQLLLCPSSATNHCVRCEHRERSFVR

SEQ ID NO: 363881 - protein, 80 aa, Zea mays
  Clone ID: MRT4577_95029C.1.pep
HDLPQLLSACNLVSHTITVNNVGVIGLNCVSIVLNLPDVAITVLAPINMLSLFDHDEDVDTVCILNGTGRANHRNADEAT

SEQ ID NO: 363882 - protein, 52 aa, Zea mays
  Clone ID: MRT4577_9502C.1.pep
RDRGRTTRPPMNSRHCRRARWLCILAYILVRCPLQHVVMIKIKLNFSVHGHA

SEQ ID NO: 363883 - protein, 222 aa, Zea mays
  unsure (1)..(222): unsure at all Xaa locations
  Clone ID: MRT4577_95030C.1.pep
MSSSSKLFQSACKAARSFLASSSAPAAASSVLADGRNAALATLANLGRNSTLPAAYAHHLHTNAASSQGYAWIAAIPAAVYMLQDQEVHAAEMERTFIAIKPDGVQRGLISEIVSRFERKGYKLVAIKLVVPSKQFAEKHYHDLKERPFFNGLCDFLSSGPVLAMVWEGEGVIKYGRKLIGATDPSKSEPGTIRGDLXAVVVGRNIIHGSDGPETXKDEIAL

SEQ ID NO: 363884 - protein, 67 aa, Zea mays
  Clone ID: MRT4577_95031C.1.pep
EEQAGTSYIFFFLLFKKKKKLNMFFLPGRLVLKGDFWSFPSPWGWVGHSFGGPIWPYRGSFFISLAV

SEQ ID NO: 363885 - protein, 90 aa, Zea mays
  Clone ID: MRT4577_95032C.1.pep
NMQALKCTYEQGKQDFMLEFHKMLSDSELLKLPCSIGDMGLKVLSNRASDILIDAMSVLSGRAKLLIMGVVGGRAGSPPLDGLSMRGNMG

SEQ ID NO: 363886 - protein, 80 aa, Zea mays
  Clone ID: MRT4577_95033C.1.pep
HYYIRHAHRTPQCSSAFTPALRVKAQLFVLSENVRSPFDLGLMLVVAVVLLDEVVHPLLVGKSVALCVKSSVCPMCQTFA

SEQ ID NO: 363887 - protein, 60 aa, Zea mays
  Clone ID: MRT4577_95034C.1.pep
VQHSKTHQAKRTNHHLATKGSKKLTLLWPLGLLRNPTKGVNNSKGLIGSKGHNSKVLPTS

SEQ ID NO: 363888 - protein, 68 aa, Zea mays
  Clone ID: MRT4577_95035C.1.pep
LRKRHPYDKVVEINPIDIGLDRGSCVAVIALSDENGGFLAGRVGGRVGGRVSGRVGGRVIDPEFGPFL

SEQ ID NO: 363889 - protein, 81 aa, Zea mays
  Clone ID: MRT4577_95036C.1.pep
TVSGSWCGPSCDLHLVKSYLLDSSRLMRAKRISDEVSSAIVGGACPCSFVHVCTLSRVPTRAQFPSQSIDRIDQLISSSSK

SEQ ID NO: 363890 - protein, 136 aa, Zea mays
  unsure (1)..(136): unsure at all Xaa locations
  Clone ID: MRT4577_95037C.1.pep
GCDVGPDGRLLRGYDQYACDGKDYIALNEDLSSWTAADTAAQITQRKWEAARVAEQDRAYLEGLCVESLRRYLENGKETLQRADPPKTHVTHHPISDHEVTLRCWALXFYPAEITLTWQRDGEDQTQDTELVETRP

SEQ ID NO: 363891 - protein, 63 aa, Zea mays
  Clone ID: MRT4577_95038C.1.pep
LITKNIFRFHSTPRINITFTYLTPVPKYRKKSFKVKEYNIRYWNNYMIQFNQPMTLFTRTRGD

SEQ ID NO: 363892 - protein, 101 aa, Zea mays
  Clone ID: MRT4577_95039C.1.pep
MATIIIQYPSGHDFDVDYYVKTHMPLAEKTWKSKGLQSAQVIKLGGDSPYQLYTIMKWESMAHFQAAATAEDAKNVHDDVKNFTTATAELRVGETIADSKL

SEQ ID NO: 363893 - protein, 87 aa, Zea mays
  Clone ID: MRT4577_9503C.1.pep
TKVNGSFGALLFFRKELNLTFLAKGGCSNSSGFFLLLACTYGFSWCGVFHTPGGGDHIFFFPPCVGLPPFYFWGRFLTPALPLFSNP

SEQ ID NO: 363894 - protein, 192 aa, Zea mays
  Clone ID: MRT4577_95040C.1.pep
MCFQLKSNFLIFSTYSAHRLLSSNLNVIMQHRATVAAEAINQTLGGRCRNHVHLLGHLQERGSQGRDVNRAQLTGRGGEVVEAATGSGELFIDVTVFEGHVMSRGGTTWNPRRDGAEVNVDEQVEVRERNRRVDDELIRASEVGHANRTEARRLGGCEIVCVTRTRRGLPVNPIQEIRVVRQEMCLDVCAEG

SEQ ID NO: 363895 - protein, 139 aa, Zea mays
  unsure (1)..(139): unsure at all Xaa locations
  Clone ID: MRT4577_95041C.1.pep
RNDPRAHXPFTIPLGTMCFQLKSNFLIFSTYSAHRLLSSNLNVIMQHRATVAAEAINQTLGGRCRNHVHLLGHLQERGSQGRDVNRAQLTGRGGEVVEAATGSGELFIDVTVFEGHVMSRGGTTWNPRRCGANGVPGST

SEQ ID NO: 363896 - protein, 158 aa, Zea mays
  unsure (1)..(158): unsure at all Xaa locations
  Clone ID: MRT4577_95042C.1.pep
YPCNRVQVALRKFKWKDCHSPPDTNIAFIVDRRNIIFVVGRNGRLYQYNRITELWHRPXFTSLSPGKAVRPSPHISCSPGTPVRPSPLSLAGSLFMVSENGGXLVEYHFSPKDRWECLEHWTPHWDMSIVGAPGSCFDGSQQFVAGSNGXMYQRHMEG

SEQ ID NO: 363897 - protein, 86 aa, Zea mays
  unsure (1)..(86): unsure at all Xaa locations
  Clone ID: MRT4577_95043C.1.pep
KRSGLEVYCPYKRRQVAWHTAFVTNHSPXYYFRTTDVTGXRXNPVGAMIMVLAGDTASTNCGLISLAPIEPAQKFVLREGGKPDAV

SEQ ID NO: 363898 - protein, 75 aa, Zea mays
  unsure (1)..(75): unsure at all Xaa locations
  Clone ID: MRT4577_95044C.1.pep
MGXKVFVXGNWKCXGXTTDQXEKIXKTLNEGQVPPSDVXKVXXSPPYVFLXGVKSQXXQEFHDXAQNCXXKKGGA

SEQ ID NO: 363899 - protein, 47 aa, Zea mays
  Clone ID: MRT4577_95045C.1.pep
DQVLLRAVPLRQRMDPSPCKGVDQDLVHLPSGVGGRAVAARRSGRVG

SEQ ID NO: 363900 - protein, 117 aa, Zea mays
  unsure (1)..(117): unsure at all Xaa locations
  Clone ID: MRT4577_95046C.1.pep
RTHACVCSGGGSWRALELIVDGKNEQAPLQLLQVNAMRKLPSVEEVTLLLLPYKGLPLKQNIKDWLERFQRLPYVSAYDNMSHINPVXEMXQKRAVRVLHQLLHLVATCCALMLPLH

SEQ ID NO: 363901 - protein, 48 aa, Zea mays
  Clone ID: MRT4577_95047C.1.pep
LDRDLPVVRTSASESGFSSTVVSCFSSACGVHPRSVLFLGSFGVSTPP

SEQ ID NO: 363902 - protein, 100 aa, Zea mays
  Clone ID: MRT4577_95048C.1.pep
AKVNESIRWETVALNNASLAGHAKAERMLQETGPVCAERTLDGDRCHYTALNQSLRWLLKSFEARPPPLGPLPTAMRATFLACRANRTAFLAMLQGSAGA

SEQ ID NO: 363903 - protein, 76 aa, Zea mays
  Clone ID: MRT4577_95049C.1.pep
WRIQGPLMRQETVNGGLVQTHRTNPNCKDQQETVKRRDAGETDYPTGPRLFKPKQQAVLYTQEQTGGACYTRGRGC

SEQ ID NO: 363904 - protein, 102 aa, Zea mays
  Clone ID: MRT4577_9504C.1.pep
QYHLPSYRTNPWGVFVAIPPFLCYLIFRTNPLLCPLYYWSDHNMIMCVVLLRYAIHIKKGMNKGFFFKYYIQLVGRNCNENATGVGTVTGQLEKEHRKKKLV

SEQ ID NO: 363905 - protein, 283 aa, Zea mays
  unsure (1)..(283): unsure at all Xaa locations
  Clone ID: MRT4577_95050C.1.pep
MADIKDWRSLSDPTPEWEEVAKSMGGQVFDIGVFPDIKSLREVLAATKKDFTAAWGPITGVKEEKDQKITVRDGEKITVRTYTPEKTGGPLYVMIHGGGWCVGDLASEDLLSRLLCGKLGFVVVSVDYRLGPEHKFPTAHNDCWDAFEWAAENASQLGADPSKGFIVGGNSAGGNLATTISHLARDEKLSPPLTGTHLMIPSICVDKELPEKYRKDAHSWEQNKDAAILSRKACDLFFDNYVPSHSDRGNELFSPLNFKTXHAGLPPTFLQICGADXLRDEAL

SEQ ID NO: 363906 - protein, 37 aa, Zea mays
  Clone ID: MRT4577_95051C.1.pep
NVSLLALILVFTLYFCFQFFEWVLYPRLAKKSLCIFC

SEQ ID NO: 363907 - protein, 183 aa, Zea mays
  Clone ID: MRT4577_95052C.1.pep
IGYLEAGREPTLLRRFVRWMDHVCTAGSGILHRASRTRGGTLLPSPPRHTPRRPHSCDSFSAPWTGRLHVSCDCCNSMCICCYLLDASGTNADLQLFLLYLRHSRLHLRLLTKRHLGQIRKSLTSDNDPPPDGRSIPVECDGELIVIPKGRRTIHLHSMMSTGGKTGKSTTQRPSLHLLSRSS

SEQ ID NO: 363908 - protein, 141 aa, Zea mays
  unsure (1)..(141): unsure at all Xaa locations
  Clone ID: MRT4577_95053C.1.pep
NPEEIGGIDSLTILQTPVTKDRQLSFSQSVRDVVLGSGEIXVDDVKYTVSHVVEPMERSFTKINKTIHQISENVKQLEKQKRKAKDDSHLIPLEPWSEEFSEAHDHVAGGSASDSGLAKTRYNRILNRPRRSFESRLRRWF

SEQ ID NO: 363909 - protein, 117 aa, Zea mays
  unsure (1)..(117): unsure at all Xaa locations
  Clone ID: MRT4577_95054C.1.pep
AFTLEVASPGNDGLASGPAIVDAFVLVLLESEPAITGVAVSCLSVIXSTEXHGTRRVLQEGVILAVVCLSGRDAPRTRVXVHRLLRLCRGHRQRXXLEEMQPRVELNKVAKRAPALE

SEQ ID NO: 363910 - protein, 169 aa, Zea mays
  unsure (1)..(169): unsure at all Xaa locations
  Clone ID: MRT4577_95055C.1.pep
MVYIYPAEXPLRQQXALXXGCTXXPDXARQXXARXXLLAPVSELTXPPXLRXPLKARFSGSRKAPXGATXXXXRAPQLXRRAXRRPLXESXXTNRXXPHCNXXGARXMCXXSCXYMXVMXMMXXCXXVXAXXSXXXVQXNQTXXKNXGLCRVNSXXKPXLGPGFGGEES

SEQ ID NO: 363911 - protein, 102 aa, Zea mays
  Clone ID: MRT4577_95057C.1.pep
AGTKLVSLGLLVLMGIGLANAARVARYSSADGTGNGEGQGSGYVNGGGSGSGSGTGSGDSSPYGTHASAGGGGAGGGASQYGGSGYGSGSGSGSGSSTYSQG

SEQ ID NO: 363912 - protein, 55 aa, Zea mays
  Clone ID: MRT4577_95058C.1.pep
ARYYYLITNPAIRAIKLVEPRCLPLLQATVHVHTGHILPTTIVVSIVRLDSQREP

SEQ ID NO: 363913 - protein, 39 aa, Zea mays
  Clone ID: MRT4577_95059C.1.pep
STQTRPEEFQLAYLLPSKLVFRKDGRNSCSTGAQTPFLP

SEQ ID NO: 363914 - protein, 63 aa, Zea mays
  unsure (1)..(63): unsure at all Xaa locations
  Clone ID: MRT4577_9505C.1.pep
NHVYTSGGGSYNRGLATHYLLAHTDVPLLLYNXAIHHMCRLSLVIYRPTYTNLNKLLYHVILY

SEQ ID NO: 363915 - protein, 44 aa, Zea mays
  unsure (1)..(44): unsure at all Xaa locations
  Clone ID: MRT4577_95060C.1.pep
HNGYYTFGXPGGTKHVSKSKLHTFFRALYHDHTQAHSFPHLFIP

SEQ ID NO: 363916 - protein, 116 aa, Zea mays
  unsure (1)..(116): unsure at all Xaa locations
  Clone ID: MRT4577_95061C.1.pep
KVESSTNNRATLATKIFSLLMLVALYACDANPTIFPQCSQARIDYILSPYIPLMIAAVSENTPLXPYKLQRAXLAEWTIPFSLLLQQXTSVLYLVHSXVQTIRGQTTEQLVLPVIN

SEQ ID NO: 363917 - protein, 118 aa, Zea mays
  unsure (1)..(118): unsure at all Xaa locations
  Clone ID: MRT4577_95062C.1.pep
VLFWELRAGSTXVPASVFEDCCLSVEEELNSVYRQCRACDKSIGPLEIRVVSEGTFDKLMDYAISRGASINQYKAPRCVRPGPVVELLDARVQAKYFSPKCPKWSPGNKQWNASNGDA

SEQ ID NO: 363918 - protein, 158 aa, Zea mays
  unsure (1)..(158): unsure at all Xaa locations
  Clone ID: MRT4577_95063C.1.pep
TLPPPPAPNPPPPPPPPTSTRPPPPAPRGGFQLWPHHPAEEHHHHFYAPNIIRFADPFAGSSRSGRGSDAFVAAGAGTISCQDCGNQAKKDCVHMRCRTCCKTXGFDCPTHVSXTWVPAAXKRRERQQQATEPSKRHRDATASAQPSSTTALQFSSGS

SEQ ID NO: 363919 - protein, 45 aa, Zea mays
  Clone ID: MRT4577_95064C.1.pep
KKELCHRDTIIDRRSSRQKYKAQRHMSIAFARWFVASVRALNRVC

SEQ ID NO: 363920 - protein, 112 aa, Zea mays
  unsure (1)..(112): unsure at all Xaa locations
  Clone ID: MRT4577_95067C.1.pep
RAIGILEAGRDSPPPXVPLRAAPPPAPPVGGSPTPPGALLRLTTVPATPPPPSSAVGGSPTPLGAPPRRTASPSKPMPXQPASGSPPPTPLARGPPPXARQPTDSPPRPPRA

SEQ ID NO: 363921 - protein, 188 aa, Zea mays
  unsure (1)..(188): unsure at all Xaa locations
  Clone ID: MRT4577_95068C.1.pep
MARNGDGPXIGIDLRTTDSCASTCKNDRAKIIANDQGNRTTPSNIPFTDSXASSSDARNNQPPMNPIXSRFDAQXLALTRRLXCHTVQSDITMWAFPDISLTGENTMTAVQHIGXDRQFAPEQISSMPLINMHEIIXAYLDHTIXNAVVPVPXYFKESDMQDTKDGGEIAGLHAVRIIHEPTAAAIAY

SEQ ID NO: 363922 - protein, 99 aa, Zea mays
  Clone ID: MRT4577_95069C.1.pep
KKSKWLIPNGGTECLWPNSGDRHPPSIMPTDKTTLKYTMQQYSSTTQHSHAPKTRSTCLDKLGLLAAIWDRKQDHRFVRFDKRGITLNIAYPIQLYDLT

SEQ ID NO: 363923 - protein, 230 aa, Zea mays
  unsure (1)..(230): unsure at all Xaa locations
  Clone ID: MRT4577_9506C.1.pep
MVQMDIICCGVCGTDLHTVDEGWGPTEFPCVVGHEIIGKVTKVGNNVKKVKVGDRCGVGCQSASCHQCEYCKKGMENPCAVHAVWSFNDRYENPTKDKTYGGFAEKWRGPQDFVVKIPDNFSSEVAASFLCGGVTTFTPLKRYNVGKGSKVAILGLGGLGHFAVQXAKAMGAEVVAFDVIPDKVKDAKKLXCDGYVLMQNEEEIKPHXHTFTHILATRLSTVLAYLFDML

SEQ ID NO: 363924 - protein, 69 aa, Zea mays
  Clone ID: MRT4577_95070C.1.pep
NSLLSHSEWSCSQLDDVVSQVKDTEPSVILVDVVGHLYRFVYLLANYARASAAQVVERVVWAAGGGRAR

SEQ ID NO: 363925 - protein, 67 aa, Zea mays
  unsure (1)..(67): unsure at all Xaa locations
  Clone ID: MRT4577_95071C.1.pep
MGLLDHLWDDTVAGPRXENGLGKLRKHHTFTFRPSSGKETEGGSVRSYGDESSEEATRVTRSIMIVK

SEQ ID NO: 363926 - protein, 154 aa, Zea mays
  Clone ID: MRT4577_95072C.1.pep
MNIPPRPSSSVSEDIGLFNTTSAEIGLVSPFVPGRQDMPHANSIGGEEDLVGTMDSGYYTNLLVNGVQESQAPPSDARAAAKSCQGRSKNFRDDEDILLVSAWLNVGMDPIQGVDQRHGTLWTRIHDYFNANKMFDSNRCEGSLMNRWVSIQHD

SEQ ID NO: 363927 - protein, 133 aa, Zea mays
  Clone ID: MRT4577_95073C.1.pep
FPQCFPSSVASPTAPPPFVSSAAGDILRMPEVRSSLHVRFPHSFSSSVSPSTVSSLFLPIVSITVVRFAWMHRCEHADTWLRIMRLDAWGISIDEYEKHGWSIEQIAQEISRLPLLARCKYYCNIFKLYCTML

SEQ ID NO: 363928 - protein, 60 aa, Zea mays
  Clone ID: MRT4577_95074C.1.pep
ADPRIALFISDLSKYNYASSHLMHMVNRPSTQGNGARGQKKKKKRVKLMRKKKKKDRSSC

SEQ ID NO: 363929 - protein, 66 aa, Zea mays
  Clone ID: MRT4577_95075C.1.pep
QIAWGETFFYKKFMSFFGGWSLGKQGLTRRKHVFSHGGAYLCNTRNAQARILRPVCNTQPDRYSPP

SEQ ID NO: 363930 - protein, 177 aa, Zea mays
  unsure (1)..(177): unsure at all Xaa locations
  Clone ID: MRT4577_95076C.1.pep
MKKQGDIASLFRNHAAKXKQKFIFTSLSPDVTQASTPQEQEEERINEEIVNPIPSALSSPTLYDVSRLPHDPGERQPIASYYANDHDAIRRAYILRGPFQPYAHEFPNRKIGVRDRHFNFVWFQNFPWIEYNVKKDAAFCFMCYLFKSKANKGKGTSAKKKKKKKKKKKKAAALLNM

SEQ ID NO: 363931 - protein, 156 aa, Zea mays
  Clone ID: MRT4577_95077C.1.pep
LYKKLDCKLPVVHGTPPAGHRSSEMGSQTGSSQPPAPGARNSGAGCSLQERPVAGSPPTRNSCQAARQRQEQEAVLLSCCHQKRSDLRRSWEVGTADAGWPGGVLGGPSLGCARAHLNPHVGPLMLSSSGVTAGRRCPIGSTTLMPKPSISRSLTL

SEQ ID NO: 363932 - protein, 392 aa, Zea mays
  Clone ID: MRT4577_95078C.1.pep
MWPWLERIASACWDRVRKYALTRKGEDDADTDADVDAVADELLWSRDLTRHAAGDFSFAVVQANDVLEDQSQVETAAAATFVGVYDGHGGAEASRFISNHLSAHIVRLAQEHGTMSEDVVRKAFSATEEGFLSLVRRTHLIKPAMATIGSCCLVGIIWRGTLYLANLGDSRAVVGCLDGSNRIFAEQLTRDHNASMEEIRQELRSLHPDDSQIVVLKNGVWRIKGIIQVSRSIGDAYLKKREFAVDPSTARFHLSEPLRRPVLTSEPSISSRILGSQDRFLIFASDGLWEHLSNQQAVEIVHNSPREGVARRLVQTALKEAARKREMRYGDIKKLEKGVRRYFHDDITVVVVFIDHELRAEHSSSTSVPELSVRGFVDAGARSSFSGMNDIT

SEQ ID NO: 363933 - protein, 67 aa, Zea mays
  Clone ID: MRT4577_95079C.1.pep
TRACTTAGPPCGPVRLLCPSLRPWLLRPAARRRAGGTPTMMHLHYPSLCVVVRHPTSDLVVVQITSY

SEQ ID NO: 363934 - protein, 96 aa, Zea mays
  Clone ID: MRT4577_9507C.1.pep
GGCLSMFHVSTPLPVMTGGFLSCILGLVLPLAYGFQPDLVLVALGPGHGLQGPHAALLAAMLRGLAGGRVLALLEENSTPQLAGILARVLNGEALL

SEQ ID NO: 363935 - protein, 100 aa, Zea mays
  Clone ID: MRT4577_95080C.1.pep
APLTLSPASYQPQICCRNRHCISQRTDVRAATHPAACCHSHQRGPISKPPAKLVVPPSRAIYIGADNTTICMKSNAIYDPITIKSVLPALDSSAMMIQDM

SEQ ID NO: 363936 - protein, 69 aa, Zea mays
  Clone ID: MRT4577_95081C.1.pep
LLLFVFFLVPTRDNKRGENVNWAPFRCTPGSVLMCSDSMRGEWQHTRYGILLLQSPCPSPSSRSRAHTG

SEQ ID NO: 363937 - protein, 267 aa, Zea mays
  Clone ID: MRT4577_95082C.1.pep
SNVYDTICEILAQYVIASDPNFVGIESSYLTQYLKKINVFNIIKNCLISNPNQEIVSLLIDFSNVDNTNLYLKAELPLTIVENIVSSVILVPRLKEIVQNNCEYNFVLISQYNCLSNFRLSLESHFSLPDISHSEFSKIWQEKQSQEFPLYGQFLDLITFQLANQISINVPSESERTNICYEGERKFHTFIGQYTIPSGETKSSFRIDKPQVILPIKINGKLIIKNEIEQVYIINNQFFEQTPSLSVEIHFSLMLGKPLLLEIFEVY

SEQ ID NO: 363938 - protein, 63 aa, Zea mays
  Clone ID: MRT4577_95083C.1.pep
APCIGTSCLAPRPCSCTHISIASYCWHVVQIVDRYGTPLGMNISSSGSGSTPSKPRPVRCCRH

SEQ ID NO: 363939 - protein, 91 aa, Zea mays
  unsure (1)..(91): unsure at all Xaa locations
  Clone ID: MRT4577_95084C.1.pep
XXXXXXXLKHLSILLVCMTSSSLYLSTLQITSDAGGTSEQAHCFLPAFALSRPDISNTGSRPQQPKWSAERINRQQPDCSSRFSHATTYHC

SEQ ID NO: 363940 - protein, 38 aa, Zea mays
  Clone ID: MRT4577_95085C.1.pep
SRSRTSWQLIESFRSRTTPIKTDRQQGMNACLIQHRLV

SEQ ID NO: 363941 - protein, 236 aa, Zea mays
  Clone ID: MRT4577_95086C.1.pep
MELSPAGRWTDLPEDIALDVASRLQEADVCALGGCSRTWRRACDADCIWERLFRCRWPAAVAEASASSSRMQGWKALYISQHRRMAAAISNVVEFVGGSLNNGSLESEYYLKAIADLAMILDIGFLDVQFFLFSRNHSAIINLIGLHYSIASLHVLPAEVSKALQAHRVSERMVCVNLLKLGRWFYGFRLPDEYESRKISLGELTTAEGAEILAILNRGAVHEVFRLRIGLVNVDK

SEQ ID NO: 363942 - protein, 82 aa, Zea mays
  Clone ID: MRT4577_95087C.1.pep
VILGYFISPSIFSFIRVLHSNKSHPISFCQSYFLFMQFYSIDPIFFVLFLAMRCFSIDIQFHSRNFSIPFQSNIDRHSISHS

SEQ ID NO: 363943 - protein, 52 aa, Zea mays
  Clone ID: MRT4577_95088C.1.pep
LPQYVYLIESLIDTIQWNISSHSGPVAHGSRRSYFRSIYHSSLLFNTLLPCK

SEQ ID NO: 363944 - protein, 125 aa, Zea mays
  Clone ID: MRT4577_95089C.1.pep
AGGAPPIIVGWPPLWAPRVFPFLFRVVFFFGFLTGYHFPPGTAFALVSPRFGPGLGSLSTAPRCVGFPPWGVPAQGPCVGGGGGTKGAPPSFCFCNPWIFFWFLRFGWLVGPAPNQGFFLKRGGY

SEQ ID NO: 363945 - protein, 83 aa, Zea mays
  Clone ID: MRT4577_9508C.1.pep
ACLPRGGSAGPVFFLFFSFLFLPGFGPFWVGKGRPRVADAFNGNLGLIGVNFGVGRARLFWWPFLAVMAVGVDFVLVQPPLIL

SEQ ID NO: 363946 - protein, 42 aa, Zea mays
  Clone ID: MRT4577_95090C.1.pep
RIRGGVISLGVSMNRVDFSPGGTNPPHVHPRAIDVGLVIRGE

SEQ ID NO: 363947 - protein, 34 aa, Zea mays
  Clone ID: MRT4577_95091C.1.pep
SDTWVRPASRACFKWLSARKRRDIESIGRADYVF

SEQ ID NO: 363948 - protein, 42 aa, Zea mays
  Clone ID: MRT4577_95092C.1.pep
STPAMFSKSPRRRSEESFPCYGAIMISASHLPYNRKCLKFFT

SEQ ID NO: 363949 - protein, 261 aa, Zea mays
  unsure (1)..(261): unsure at all Xaa locations
  Clone ID: MRT4577_95093C.1.pep
MADRANHPSVMQKFGGQFHLASSFSEGVRARNICPSVPSYERRFTTSSYMTQNLGISVPMMSSSPLFANAPPEKKGVKNFAIDFLMGGVSAAVSKTAAAPIERVKLLIQNQDEMIKAGRLSEPYKGIGDCFGRTIKDEGFGSLWRGNTANVIRYFPTQALNFAFKDYFKRMFNFKKDKDGYWKWFGGNLASGGAAGASSLFFVYSLDYARTRLANDAKAXKGGGDRQFNGLVDVYRKTLXSDGIAGLYRGFXISCVXIIVY

SEQ ID NO: 363950 - protein, 46 aa, Zea mays
  Clone ID: MRT4577_95094C.1.pep
PRVRFYCPSFNSQHQSTQERNRDSEAQVTYILRERRNPDGLLDQRS

SEQ ID NO: 363951 - protein, 86 aa, Zea mays
  Clone ID: MRT4577_95095C.1.pep
LRLVNLLNSSAETCMCLMTSKRPFQTLFNLYTSEGASTALVPAGGASIRVREDGNSAAWRPPAAESTCWRLHFQRVLGGVEDGNSY

SEQ ID NO: 363952 - protein, 74 aa, Zea mays
  Clone ID: MRT4577_95096C.1.pep
WVAMVFCLLFSIPVARKVHILEPLALTLGVHKEAQTKGGISHPLMTRNHYYHHAHKLQRELTTQLNESTTQLGL

SEQ ID NO: 363953 - protein, 89 aa, Zea mays
  Clone ID: MRT4577_95097C.1.pep
GLFYAPAWFGCLRHRGIQRHGWTGSRSRRPVLTSHMIGQKTGLCHGQPLNAEQLQHLQQRRQHQQHAPSLDAEATRLQLSYLVYGRRDE

SEQ ID NO: 363954 - protein, 97 aa, Zea mays
  Clone ID: MRT4577_95098C.1.pep
RLNRVWNGLLDVIRHMQVSADELRRLTRRNHVPEYVEYLHKNSLVNAMSVVTEIAQGLDHVSTDLEEVLIGPQPLLEDYEALGLYNDRRLPHMNERI

SEQ ID NO: 363955 - protein, 113 aa, Zea mays
  Clone ID: MRT4577_95099C.1.pep
GLGFSCILDHQPTPIPPCILSQSINARNLRLYLACVISKLRKEEGTLLTHFRRSFNCIGACWRRLHPREGRWELGSVEATCCRLLESACWRLHFQRVLGGVEDPRVLCVVTTA

SEQ ID NO: 363956 - protein, 72 aa, Zea mays
  Clone ID: MRT4577_9509C.1.pep
PRVRHFLLRPPPTHPRLRSRPLQSPLRPRLMNRSAEKVVVEEPAAAADVEHPKANEAVAPEVVVAEPDHQEE

SEQ ID NO: 363957 - protein, 78 aa, Zea mays
  Clone ID: MRT4577_950C.1.pep
SLCLHTHHPDSAIFIITVCMIRQDVRECACQQESISSSRQFHMHRDSRRSQSGISMRCWQSAAIRKLIIALRSAADCR

SEQ ID NO: 363958 - protein, 187 aa, Zea mays
  Clone ID: MRT4577_95100C.1.pep
MPHWQVHAILKDLVRKAINETHELKQFPTLRVEVGNAAFESLDRMRDESKKNTLKLVDMECSYLTVDFFRKLPQDVERGGNPSHSIFDRYNDSYLRRIGQTVLSYVNMVCSTLRNSIPKSIVYCQVREAKRSLLDHFFTELGAREMKHLSKLLDEDPAVMERRTNLAKRLELYRSAQSEIDAVAWSK

SEQ ID NO: 363959 - protein, 66 aa, Zea mays
  Clone ID: MRT4577_95101C.1.pep
HHLGLGNPKRRRGLVPWPPRPFFLILPQRRASEDPEVDSIWFGRALIFIFSGLKGFLAFFLMSSLI

SEQ ID NO: 363960 - protein, 43 aa, Zea mays
  unsure (1)..(43): unsure at all Xaa locations
  Clone ID: MRT4577_95102C.1.pep
VGKDRNILFRVSVLYSLVCALILLHVALMLVLSVGDIXSVGSI

SEQ ID NO: 363961 - protein, 616 aa, Zea mays
  unsure (1)..(616): unsure at all Xaa locations
  Clone ID: MRT4577_95103C.1.pep
MENLISLVNKLQRACTALGDHGEESALPTLWDSLPSIAVVGGQSSGKSSVLESVVGKDFLPRGSGIVTRRPLVLQLHRIDGDREYAEFMHVPRKRXNAFFXLSTDFAALRKEIADETDRETGRSKQISPVPIHLSIFSPYVVNLTLIDLPGLTKVAVEGQPENIVQDIENMVRSYIEKPNCIILAVSPANQDLATSDAIKISREVDPKGERTFGVLTKIDLMDKGTDAVDILEGRSYRLQTPWVGVVNRSQQDINKNVDMIAARRREREYFASTPEYKHMASRMGSEYLGKMLSKHLEQVIKSRIPGIQSLITKTIAELETELNRLGKPIANDAGGKLYTIMEICRMFDGIYKEHLDGVRPGGEKVYHVFDNQFPVAIKRLQFDKQLSMENVRKLITEADGYQPHLIAPEQGYRRLIESCLISIRGPAEAAVDAVHAILKDLVRKAINETHELKQFPTLRVEVGNAAFESLDRMRDESKKNTLKLVDMECSYLTVDFFRKLPQDVERGGNPSHSIFDRYNDSYLRRIGQTVLSYVNMVCSTLRNSIPKSIVYCQVREAKRSLLDHFFTELGAREMKQLSKLLDEDPAVMERRTNLAKRLELYRSAQSEIDAVAWSK

SEQ ID NO: 363962 - protein, 86 aa, Zea mays
  Clone ID: MRT4577_95104C.1.pep
LYLYLYNPKRRFPAASYAHINLSAWQRWLTLGSLARPTWRTRSRPATGLSLELGTLSWWRRTWTRPSVHCGKGSAGASGRTDLSRT

SEQ ID NO: 363963 - protein, 76 aa, Zea mays
  unsure (1)..(76): unsure at all Xaa locations
  Clone ID: MRT4577_95105C.1.pep
GSELKLNELKNGRLAMFSNXSFLVQTMVTGKGPLXNLADHLVDPVNNMAWAYSHQLGPRQLSSQVMLCNFIFFRIV

SEQ ID NO: 363964 - protein, 112 aa, Zea mays
  Clone ID: MRT4577_95106C.1.pep
TTGSRVVVAARRGYGQRYAHIGGLLLLLVLVVEQEAATVAAAPCRSAAIVMALVGEATRVRRSGGGGHGGGAGGGAYGGRRRARRGSGGGDAVVVVAGRPQPTRPPTRPRSR

SEQ ID NO: 363965 - protein, 81 aa, Zea mays
  Clone ID: MRT4577_95107C.1.pep
QFGLPLSSLRETKFCYFNNYNVRQPRHLCRACRRYWTAGGALRRVASASPGRRRPRPNARSAAAAAAPSASAAAREVGGER

SEQ ID NO: 363966 - protein, 90 aa, Zea mays
  Clone ID: MRT4577_95108C.1.pep
RLFKLDRLLSPKLHVTGRLSLNSRTCCSCPHLLEPQKVIGRHEVTYRLATGSVEHHEVCLIPVAGILVAYCDGRGADGRVLLSNKLDTER

SEQ ID NO: 363967 - protein, 61 aa, Zea mays
  unsure (1)..(61): unsure at all Xaa locations
  Clone ID: MRT4577_95109C.1.pep
RSPSVRXRVGKKKKKKKKKKKKKKKKKKKKKKKKKKKKKKKKKKKKKKKKKKKKKKGGAPF

SEQ ID NO: 363968 - protein, 86 aa, Zea mays
  Clone ID: MRT4577_9510C.1.pep
PNALWELVEPFSRIDSARGTGLLALVILVLSNVASNVPTVLLLGSRVAASAAAISPESQKKAWLILAWVSTVSGNLTLLGSAANLI

SEQ ID NO: 363969 - protein, 108 aa, Zea mays
  Clone ID: MRT4577_95110C.1.pep
MAPKKEKAPPPSSKPAKSGGGKQKKKTRGKPRVKPRVNNAVLFDQATYDKLLSEVPKYKQITPSILSERLRVNGSLARRAIKDLMAKGLIRMVFVHSSQQIYTRATNT

SEQ ID NO: 363970 - protein, 72 aa, Zea mays
  Clone ID: MRT4577_95111C.1.pep
KHNKKTHTYKKQSTIHHKGIYICLGGVTRTTFIITHANCIQQFHNTLQAPPIYTTLTSTILTNTPPKKNWIH

SEQ ID NO: 363971 - protein, 108 aa, Zea mays
  Clone ID: MRT4577_95112C.1.pep
MAPKKEKAPPPSSKPAKSGGGKQKKKKWSKGKQKEKVNNAVLFDQATYDKLLSEVPKYKQITPSILSERLRVNGSLARRAIKDLMAKGLIRMVSVHSSQQIYTRATNT

SEQ ID NO: 363972 - protein, 108 aa, Zea mays; identical to SEQ ID NO: 363971
  Clone ID: MRT4577_95113C.1.pep

SEQ ID NO: 363973 - protein, 159 aa, Zea mays
  Clone ID: MRT4577_95114C.1.pep
ERGARGRNGRRRWERTRGAEGAEGAKAQGQNGRPEGPKGAPEGRKRREGREAKTNARLAGITQAPQHQGGQKGQPRLRQRRSAHLDGKNKGPPRGKGTGEGAQRDPAPPKERAKKKNTRGGPTKGTPGIFPANEAGGGPKKKKKKKKKKKKKKKKKKPP

SEQ ID NO: 363974 - protein, 108 aa, Zea mays; identical to SEQ ID NO: 363971
  Clone ID: MRT4577_95115C.1.pep

SEQ ID NO: 363975 - protein, 100 aa, Zea mays
  Clone ID: MRT4577_95116C.1.pep
PHATAFLPPRSSSSIFCPFLFSLPSSPWASFISIRSVGQFGQPPHSPWVFFFFAFFCLFLFCLSSLYFPFILSFSRIFPVDQWPLGFVCSTWFHLVTSFM

SEQ ID NO: 363976 - protein, 57 aa, Zea mays
  Clone ID: MRT4577_95117C.1.pep
RAGTAPTPAIPRSDYEQSVKGVSSYLKKGGYNPDKIYFVPISGFEGDNMIERSTNLD

SEQ ID NO: 363977 - protein, 71 aa, Zea mays
  Clone ID: MRT4577_95118C.1.pep
QTSVKPIKKQETVKVTQGPNNPLEIIKGPKINQGQEFQTPSKLGPKASFGPSKLGLDVSLLLVRTRGRTRG

SEQ ID NO: 363978 - protein, 109 aa, Zea mays
  Clone ID: MRT4577_95119C.1.pep
LEGSHFSLKGVLLKFGKKMEIGVFWGKFLSAKNSKKNTSRKFKVKTLGGLKRELTKINWFALTAPFQRGKPFWPLVLINWQTRGERRFVFWHPGCFFFSQEKREKVFCL

SEQ ID NO: 363979 - protein, 213 aa, Zea mays
  unsure (1)..(213): unsure at all Xaa locations
  Clone ID: MRT4577_9511C.1.pep
MASPNADPAQHHASTPPLLLAVRHLPFPGVHRTRALPGPDVLTPLARRLEELASAATSHPLLKPLFAAHSHLSSFSQGRRRLVAARRATVLSGGHCFAAVLGNSVAGLVVSNGINNFLNLYNTVLVVRLVLTWFPNTPPAIVAPLSTICDPYLNIFRGIIPPLGGTLDLSPILAFLVLNAFTSTAAALPAELPSXGNGAASPEDCCLTLLGAA

SEQ ID NO: 363980 - protein, 98 aa, Zea mays
  Clone ID: MRT4577_95120C.1.pep
HHALLLLELIFEYNIFGRRDKATDLKRIVIYITSTWEKRKRDKRVFFLVSTTPFIQEEGSNPQLLNKTIQIYPSEIFILDGFLGGMFLNSNGLKDWMS

SEQ ID NO: 363981 - protein, 77 aa, Zea mays
  Clone ID: MRT4577_95121C.1.pep
ALFLSVSLWMRTTGVGAGVDLSVSCEVTPDPDVCLPSLQADTESVMPQDLSEAALLSVTIASGAAGDYVRHDTDVVR

SEQ ID NO: 363982 - protein, 57 aa, Zea mays
  Clone ID: MRT4577_95122C.1.pep
RAYADFSVRNLYRKDPQATVANLARCGGNLPINNSPLNDYGLAKGKSLHLVIRPQDL

SEQ ID NO: 363983 - protein, 93 aa, Zea mays
  Clone ID: MRT4577_95123C.1.pep
MLYAGRPSTNVVTVLSLAFPILFGRCCTFYFRHCGSYVIGPLLSLLPTPPLPGWRMALDLHTDIHSHLCRDYTHHCHFPCHCPITLSFRLVTF

SEQ ID NO: 363984 - protein, 349 aa, Zea mays
  Clone ID: MRT4577_95124C.1.pep
MPLEIQDSEVDIVIAALQPNLTTFFEAWRPFFSRFHIIVVKDPDMAEDLQIPAGFDLKVYTKSDINGLLGASSSINLSGHSCRYFGYLVSRKKYVISIDDNCLPAKDTAGSTVDVVAQHMANLKTPATPFFFNTLYDPYRKGADFVRGYPFSLREGVECMLSCGLWLHNADYDPMTHVVKRNQRNTTYVDAVMTVPLGAMLPVSGINVAFNRDVLGPAMFPGLRLRNEGKHRWDTLEDIWNGLCAKVVCDSLGYGVKTGLPYVMRSDAEAGKALESLKEWEGVKVMDDVLPFFQSLKLSRTAVTVDDCVKELAGVVREKLGPKNAIFTKAADAMVEWNNLWKVHGAQNA

SEQ ID NO: 363985 - protein, 63 aa, Zea mays
  Clone ID: MRT4577_95125C.1.pep
PPRGQMFRGLNWFGQAMVIQLGQFTPQKHVNFDCFPAQKNGQTNLSTKKVAVPVINFLKTQTL

SEQ ID NO: 363986 - protein, 42 aa, Zea mays
  Clone ID: MRT4577_95126C.1.pep
LRAVVLWFSVLVRLNKLEDVVGCTLVAHMLACMWTDPALPCQ

SEQ ID NO: 363987 - protein, 112 aa, Zea mays
  Clone ID: MRT4577_95127C.1.pep
GTLRCSCTFRKVTRRLGGRQLRRITLGDNRADSRIAPLSTSVSEDGFSSSSRSTGIGITSNDETDFVDRTTLVDDVRLRSGARPVSSIGASRAGLNRVEPIAGQAHKSDQSS

SEQ ID NO: 363988 - protein, 107 aa, Zea mays
  Clone ID: MRT4577_95128C.1.pep
FICLNLSMQTSNQNVPSLHDDSLGLIKSIAVDNVCIDASAKPASAFTSIACIEFTYMATMQGGCGPCGCYLRSTYLHYKPTFSPSPPSERKERRCGKKENIESLLTY

SEQ ID NO: 363989 - protein, 56 aa, Zea mays
  Clone ID: MRT4577_95129C.1.pep
RIIVVIFQKVSHRTRYQGYTGVYKQRGELNLRNIISYIIYLNYHHYSLLYSLGELS

SEQ ID NO: 363990 - protein, 144 aa, Zea mays
  Clone ID: MRT4577_9512C.1.pep
MSAAVVCAERATSDMLIGPDWAVNIELCDIINMDPGQAKDALKLLKKRLGNKNSKVQILALYVLETLSKNCGDIVYQQIIERDILSEMVKIVKKKPDLNVREKILSLIDTWQVAFGGPSGRYPQYHTAYQELRAAGVDFPPREE

SEQ ID NO: 363991 - protein, 70 aa, Zea mays
  Clone ID: MRT4577_95130C.1.pep
DPGLEAKMCTSMLKLRMRRDEHILIVNARCCDKDTVCSFMLIKGSTDAVDAVPTVVHFNKLWHKRKHRRA

SEQ ID NO: 363992 - protein, 95 aa, Zea mays
  unsure (1)..(95): unsure at all Xaa locations
  Clone ID: MRT4577_95131C.1.pep
GXGEGEGAGEGASVAGAGAEAVGVELAMGRXXXRGRAARSGRTKEENTHPCRAGRPMRPPASKNPKXRPLSPRRTXGXEGELVRXERDDDDRVGS

SEQ ID NO: 363993 - protein, 37 aa, Zea mays
  Clone ID: MRT4577_95132C.1.pep
FYPQTAIFNSSTGEYINFATKILNRYSIPWVFNNTGI

SEQ ID NO: 363994 - protein, 204 aa, Zea mays
  unsure (1)..(204): unsure at all Xaa locations
  Clone ID: MRT4577_95133C.1.pep
MMVAEKPALGFQAHGDGDDELELELASPAPPPRKMHSLEFEHIGSLAAVAESLAPGSRWQRALTSVRVVIFQAKINVLLPFGPLGIMLHYLSGTHQGWVFLFSLIGITPLAERLGYATEQLACYTGPTVGGLLNATFGNATEMIISIYALKNGMIRXVVQQSLLGSILSNMLLVLGCAFFAGGLVHSDRDQVFNKASAVVXSGL

SEQ ID NO: 363995 - protein, 92 aa, Zea mays
  Clone ID: MRT4577_95134C.1.pep
LVSGLDHRDSLYESLHVQQDYVTGAGDGAGASDSVSASMMSASRRGNRTRGCTRRCSSLQCRERACLYSGQRRCCIGDIAAGSQGSRSARTR

SEQ ID NO: 363996 - protein, 300 aa, Zea mays
  Clone ID: MRT4577_95135C.1.pep
MAAAAVHEPEVIRDKAAMRAWSRRRRAEGKAVALVPTMGFLHEGHLSLVSAAVAASAGPVAVVVSIYVNPSQFAPTEDLATYPSDFAGDLGKLAATGVVAAVFCPPDLYVRGSADRPSAASASGGAVSCLEDAGGHAHETWIRVERLEKGLCGSSRPVFFRGVATVVAKLFNIVEPDVAVFGKKDYQQWRVICRMVRDLDFAIPMEGSKKALSISRSLVDARTAALSGSNRSQEIKDQIVRTITEAGGQVDYVEIVGQESLVPVERMDRPCVICVAAWFGKVRLIDNIEIHVDSSTVLSI

SEQ ID NO: 363997 - protein, 281 aa, Zea mays
  unsure (1)..(281): unsure at all Xaa locations
  Clone ID: MRT4577_95136C.1.pep
WGHLSLLSASRPASAGPIAVVVSIYVNPSQFAPTEDLATYPSDFAGDLRKLAATGVVAAVFCPPDXYVRGSADRPSAAGASGGAVSCLEDAGGHAHETWIRVERLEKGLCGSSRPVFFRGVATVVAKLFNIVEPDVAVFGKKDYQQWRVICRMVRDLDFAIQIVGSEVVREADGLAMSSRNVNLSEEDRKKALSISKSLVDARTAALSGSNRSQAIKDQIVRTITEAGGQVDYVEIVGQESLVPVERMDRPCVICVAAWFGKVRLIDNIEIHVDSSTVLSI

SEQ ID NO: 363998 - protein, 241 aa, Zea mays
  Clone ID: MRT4577_95137C.1.pep
MGDWDPRGRPGSIYSLFTRSGRVFTYPSFPIPKDQAMFRYLAALILVVALATCTNKSVDARVVHPIVTLEADGSSPTSGDGRRLISSTNQDELGALCQQMHYKTLCSTMTTLPGVTTPEQLLDASLRITAVKAAMAEMKLDNAIKSGSAQGNPMMSSLKTCKESYASLVDSINTTRNTLKSGGSNADLMSELSAADTFATDCGDTFDERPDLNSPIPGAQRHVNRLISNCLDLAATIKEQP

SEQ ID NO: 363999 - protein, 69 aa, Zea mays
  Clone ID: MRT4577_95138C.1.pep
IPRMKVLCSAIVRMHSCTDYASGFFFQRACHALLQYRQMMDSIFASSAMSRALLIRTQRIYKLLIGRVG

SEQ ID NO: 364000 - protein, 58 aa, Zea mays
  Clone ID: MRT4577_95139C.1.pep
KARPSVAAGRVKIEAKNVVCFWCKGGGLWRRDVCRLVLPPPPELKFSRMDQCVPCTCI

SEQ ID NO: 364001 - protein, 108 aa, Zea mays
  unsure (1)..(108): unsure at all Xaa locations
  Clone ID: MRT4577_9513C.1.pep
YSFNQLRRRCFPFHQDPVTFTFESNIIKMRFSTADADALSASVSLVAAQDKCDAQNIRNTSDSGYQPRIDACNKKGNDFICLSDDYRDALVSYNNCPDSXEQAPGREH

SEQ ID NO: 364002 - protein, 89 aa, Zea mays; identical to SEQ ID NO: 205992
  Clone ID: MRT4577_95140C.1.pep

SEQ ID NO: 364003 - protein, 57 aa, Zea mays
  Clone ID: MRT4577_95141C.1.pep
AAREDNAQVLLFVRCKDNNAAHASESLRRAKVKFPGRQKIMASTKWGLTKFNPADYL

SEQ ID NO: 364004 - protein, 361 aa, Zea mays
  unsure (1)..(361): unsure at all Xaa locations
  Clone ID: MRT4577_95142C.1.pep
VSLFLSSLDTPQRKRLDSLSDKTRRDAKPRPNYQTLPXSPRPRSPTSLAMSSSSNSGKKPAPAGGRGGPTIRTLADINRGPAGFPGAGGGSSDDDEPQEYYTGGEKSGMLVQDPTRRNDVDAIFEQARQAGAIHGMPPFLGGESSSSRSFTGTGRLLTGETVPSAAPQEPVPVRIRHNIHLWNNGFTVDDGPLRYYDDPENEEFLESLKMSKCPKELVPTDGEHVDVSVIKRMEDYREPVRPQSAFQGVGRTLGGGPSPDESATPAPAPTAPAASRSAGIVVDDSQPFTSIQLRLADGTRMVARFNMHHTVGDIRSFIDASRPGTARPYQLQTGFPPKQLADPTQTVVQAGLANSVIMQKM

SEQ ID NO: 364005 - protein, 93 aa, Zea mays
  Clone ID: MRT4577_95143C.1.pep
YAKANHLFYITSKGNDTDSNLQQDYITYYTLSLFLLHYSSFLSLLVASLSGVGDHSSTRFIEGGGLKRSSSPPRASPAAPKDPASIPTGSACT

SEQ ID NO: 364006 - protein, 124 aa, Zea mays
  unsure (1)..(124): unsure at all Xaa locations
  Clone ID: MRT4577_95144C.1.pep
XRFLPTPKERPQAGIQEEXRAPTPTGDRTRTTETTPPPKTKGHPTTQAPGREKQPTNKRTPERPSPRRRAPPGRRKEPGKGGTRPTQYTGKEKPKREGRTPPGQRTGPKPSPGGPRHKEQRRRN

SEQ ID NO: 364007 - protein, 77 aa, Zea mays
  Clone ID: MRT4577_95145C.1.pep
HFLWVLTEIDWDIGAEEQPVDTIRPWHLNRMKCIHAYIELDGSENYKGRVSNKSMNKEDWHHSDSELCCDITADSSE

SEQ ID NO: 364008 - protein, 86 aa, Zea mays
  Clone ID: MRT4577_95146C.1.pep
LLDHLFIECKHHGKDLVAEGVITSKDIEGTKAGKASTGVLNVGLPAYVILKALLRSAKANSDGLVLSNGSEITSDNRPTSKIFEWF

SEQ ID NO: 364009 - protein, 420 aa, Zea mays
  unsure (1)..(420): unsure at all Xaa locations
  Clone ID: MRT4577_95147C.1.pep
VPRGRPFVFPFGPRPRLVISDTELVKAVMTDSTGGFDKAASGGNNPLARQLIGEGLVGLSGETWARHRRVISPAFNMERVKAWIPEIAAAASPVLDKWEAEGGSRTEFEIDVHKAFHTLSADVISCVAFGSSYEEGKRIFQLQEEQMQLALLAMRTVYIPGFRFVPTKKNRKRQRLNQEIQCSLRKLIEINGTKCEDSKNLLGLMLSASKAGSEYKMGIEEIIHECKTFYFAGKETTANLLTWATLLLALHQEWQVKARDEVLKVCGKHEHPNAKXLSDLKIVTMVLKETLRLYPPATFINRTATRDIKLGKLDIPAGTRLDFPIIHIHRDHEVWGMDAEEFNPSRFADGSSYHLGAYFPFGIGPTICVGQNLAMVEAKVALAMTLQRFAFTVSASYAHAPMLVFTLQPQFGAQVLVRKI

SEQ ID NO: 364010 - protein, 163 aa, Zea mays
  unsure (1)..(163): unsure at all Xaa locations
  Clone ID: MRT4577_95148C.1.pep
FTLLLALHQEWQVKARDEVLKVCGKHEHPNAENLSDLKXCETIYLKSSYICSAFEMIXAVFIVLYFCYVDQVTMVLKETLRLYPPATFINRTATRDIKLGKLDIPAGTRLDFPIIHIHRDHEVWGMDAEEFNPSRFADGSSYHLGAYFPFGIGPTICVGQNLA

SEQ ID NO: 364011 - protein, 84 aa, Zea mays
  Clone ID: MRT4577_95149C.1.pep
KCLQLLQSVLPGGRLLLWTISSQVDMLGICRSSSGTNLSEKDIYAVVPVFFCSSRCCARFPYNSHCEYFIEGFVMCTWCKGRRR

SEQ ID NO: 364012 - protein, 95 aa, Zea mays
  Clone ID: MRT4577_9514C.1.pep
KPGSSSTAAPHLLIFSTFFFFGCFFFGKGGDPSLCIGRIPTWHQTQSGKTKPPKSYRWSQKTPPINAQLGPIVFRSRPNIRIIWLPIPNRDAPRC

SEQ ID NO: 364013 - protein, 61 aa, Zea mays
  unsure (1)..(61): unsure at all Xaa locations
  Clone ID: MRT4577_95150C.1.pep
TGLNKKKVESCVRKKKKKRGGLMDPSDYSKRYRNFMTLXGCHIEGSYFPDKNLSTELRLEG

SEQ ID NO: 364014 - protein, 308 aa, Zea mays
  Clone ID: MRT4577_95151C.1.pep
MSMEVAGAEAPVKGKFLGILVCWLLGNGSLFAWNSILTIEDYYSHLFPDYHPTRVLTLVYQPFAFGITLIMTYYEAKMNTRLRNLAGFSLFFLGSFALIILDVATKGHGGLGVFIGVCIISAIFGTADANCQGALVGDLSLMCPEFIQSFMAGLAASGVLTSALRLVTKAAFESSKDGLRIGAILFFSITCLFELVCLLLYTFVFGKLPIVKYYRAKAAAEGSKTVASDLAAAGIISEQQGQMEEDPEKYKRLTTKELLMQNIDYALDIYLIYVLTLSIFPGFLSEDTGAHNLGTWYALVLIAMYNVW

SEQ ID NO: 364015 - protein, 93 aa, Zea mays
  Clone ID: MRT4577_95152C.1.pep
SWIPEIAAAASSVLDKWQAEGGSRTEFEIDVHKAFHTLSADVISCVAFGSSYEEGKRIFQLQEEQMQLALLAMRTVYIPGFRFVPTKKNRKRQ

SEQ ID NO: 364016 - protein, 89 aa, Zea mays
  Clone ID: MRT4577_95153C.1.pep
TFGAPNVPEWFRAPNTQGPYPPPPPQQPNGGVNQSPKHLTNQKAPGLADDPSLKITGGREDPRKTFSILPPMLPGGPTLGTTLGRRGPK

SEQ ID NO: 364017 - protein, 84 aa, Zea mays
  Clone ID: MRT4577_95154C.1.pep
GGNFFPFLYWAPGKKKPVPKNIFLRGVGNPIFPKEFSFSQRGKKTNFLWEKENFLETRGWKLALTSAILPTKLFSLIMDTCLPT

SEQ ID NO: 364018 - protein, 74 aa, Zea mays
  Clone ID: MRT4577_95155C.1.pep
TIQSYYTYLPPAPAADSVLDPAPAPSAPAPASAPVPAAVVLFAAPAPPASDVRLVAAPAPVPAPAPAPAPAAAP

SEQ ID NO: 364019 - protein, 148 aa, Zea mays
  unsure (1)..(148): unsure at all Xaa locations
  Clone ID: MRT4577_95156C.1.pep
AGPGSRVPTVEAPSMAPRISAESFFPWPTPPLLLPSSSSGQQLRRRGFPAREHQPHDTPEIHYAAAPSPIRAPKQHPSLLPLFFLPTKQQPQRARRRPWRPLQSSPLAVRRNARGKYCVVRSSPRRLRALLARCFAXPSGQNAVDAHR

SEQ ID NO: 364020 - protein, 92 aa, Zea mays
  Clone ID: MRT4577_95157C.1.pep
QFIMQLTYPTAGVDTSLGAHTHHVLDRSTVSNYKPTTSRVTVPNTLSYYTRSTSPSTNLFMSSNATNKTAFSKLTTSKKCSTRVQTPACYTS

SEQ ID NO: 364021 - protein, 185 aa, Zea mays
  Clone ID: MRT4577_95158C.1.pep
PRRACTPVALSPMASRSSTPVRRRQEGPVGVTTAIVAGTLTEQVAAADEVACVGDERPVAGHVPSVNSLESRAAAWDEAERAKFMARYKREEVKIQAWENHEKRKAETKMKKMQMKADQMKARGQEELSNRLATTRRMAEEKRASAEAKLNERANRTSEKANYIRRTGHLPSSFRISGLCGSSFE

SEQ ID NO: 364022 - protein, 81 aa, Zea mays
  Clone ID: MRT4577_95159C.1.pep
ERRSKSSLRSNPGGEVVGCSCRFMDTSLVQQWPLLTSALAWVCMTREMSPPSSFPRAWIEGSSSLSVCLSLSLPFLPVAVY

SEQ ID NO: 364023 - protein, 60 aa, Zea mays
  Clone ID: MRT4577_9515C.1.pep
PLGDPGRRMFHANRSREFRLRLRHMAEGCFVRCSAGATPYRTLAFADVHLITVYISGRNI

SEQ ID NO: 364024 - protein, 146 aa, Zea mays
  Clone ID: MRT4577_95160C.1.pep
GFRVEARVRPRVRPRVRPRVRPRVRITMSSGPWYPVPLVRMDSLSSSSTAPDVELTLANFTVDRLIQMFGAKGFTVQELVSLDGAHTLGFSHCKEFSDRLYNFSNHGGKPKQFYPSMNPFYARGLHDLCTDYLKDPTIVAFNDIMT

SEQ ID NO: 364025 - protein, 76 aa, Zea mays
  Clone ID: MRT4577_95161C.1.pep
MCVATLTQMIIYYLHVEFKPDRPPDRWVNETICRKQNDGIRQDHHYTDPVRHRVLHTLKSELNYLGTDQIHRHCYF

SEQ ID NO: 364026 - protein, 114 aa, Zea mays
  Clone ID: MRT4577_95162C.1.pep
LLWAIGFLEAGREAAIPPNLALRLAVQAFKREEDSAKSLKRRRERLELGNKRTPERFVGRQAVVTAQCLNGWYVVKTSDNAESVKLQYRSLAKVADGNGPSGLVPSNVQSTSWL

SEQ ID NO: 364027 - protein, 318 aa, Zea mays
  unsure (1)..(318): unsure at all Xaa locations
  Clone ID: MRT4577_95163C.1.pep
MASPAGANSGASSSRGTPLPLPFPFPAAAHFPSRGAGPFLSQHYHPPSTSDGDDEVEEDEGSMDDGSAEEDDAELSDGGALGSPRRRAFSAPGIGRMEINGGNGVRSIQEGQQWHLCNHGIEIGRPSPGGDEPGTIPRDVRVENGHGVVGRRDGGPASSYWDLLRAHLSDPLTGVLMDDALILSCGHSYGSSGMQHVYRMKACGKCGMPITEAAIRPNLALRLAVQAFKREEDSAKSLKRRRERLXNWVIIKGNKRTPERFVGRQAVVTAQCLNGWYVVKTSDNAESVKLQYRSLAKVADGNGPSGLVPSNVQSTSWL

SEQ ID NO: 364028 - protein, 181 aa, Zea mays
  Clone ID: MRT4577_95164C.1.pep
EFLNVLPPGGCDLAEANFSRADLSGADFRKANFDHANLYKVNLSQAQLRHGTVEEAFLQGADLSQANLKGANLGRALMKEVNLSLINLSEIHLKALPNKEQINCAGCALRGTIFQGANFQNANFEYALMEKALLAGAILRGANLIDACLRGADLRNVNFQNSHISGINLAKTIMPDGSVHP

SEQ ID NO: 364029 - protein, 119 aa, Zea mays
  Clone ID: MRT4577_95165C.1.pep
PPRAVAQVSPPPRIQRPGVGFCPNKGPPFFAPYVLLGGSPISFLGAPPPLNWGFLNLVRFRGPFSFFCGPGGLIFCFPPRAVPKLSPPLFPAGFFFKEKKKEKKKKKKKKKKKKKKKKG

SEQ ID NO: 364030 - protein, 132 aa, Zea mays
  unsure (1)..(132): unsure at all Xaa locations
  Clone ID: MRT4577_95166C.1.pep
NEACGKCGMPITEAAIRPNLALRLAVQAFKREEDQQXSLKRRRERLELRXKGVQFPFSVFDRVIIKGNKRTPERFVGRQAVVTAQCLNGWYVVKTSDNAESVKLQYRSLAKVADGNGPSGLVPSNVQSTSWL

SEQ ID NO: 364031 - protein, 276 aa, Zea mays
  unsure (1)..(276): unsure at all Xaa locations
  Clone ID: MRT4577_95167C.1.pep
MGEMGVRSIQEGQQWHLCNHGIEIGRPSPGGDEPGTIPRDVRVENGHGVVGRRDGGPASSYXDLLRAHLSDPLTGVLMDDALILSCGHSYGSSGMQHVYRMKACGKCGMPITEAAIRPNLALRLAVQAFKREEDSAKSLKRRRERLELVYALFQLISHPSNRAAIFVACXKSILPYVIRHEVXDPNRTELATRGKGVQFPFSVFDRVIIKGNKRTPERFVGRQAVVTAQCLNGWYVVKTSDNAESVKLQYRSLAKVADGNGPSGLVPSNVQSTSWL

SEQ ID NO: 364032 - protein, 55 aa, Zea mays
  Clone ID: MRT4577_95168C.1.pep
GQVSISSKRAVAIADAPGDDNGYVMIKQLSDRSIPSRQPPRSQWRRSGQSSARSG

SEQ ID NO: 364033 - protein, 60 aa, Zea mays
  Clone ID: MRT4577_95169C.1.pep
NNKSHNCVETRQGDKETWMEPGFMRQSCTLVVVSYVIVDFYQANVSKSILAVDRLSSHMR

SEQ ID NO: 364034 - protein, 94 aa, Zea mays
  Clone ID: MRT4577_9516C.1.pep
IHKPLNFWLPPKRFRALFLIHKKIGMGSLLEKKKITAGLSLYIFHWLSNLKAERGGGATFTGDVAPQVIALFFGVNNGGAQLLGGFFFFPHFSW

SEQ ID NO: 364035 - protein, 55 aa, Zea mays
  Clone ID: MRT4577_95170C.1.pep
RLHLISISSELLLSLASLSPYILDCNIGHFVLTSIAYFNDPSPFHPIYYFSKYAF

SEQ ID NO: 364036 - protein, 98 aa, Zea mays
  unsure (1)..(98): unsure at all Xaa locations
  Clone ID: MRT4577_95171C.1.pep
GCRRPPHSTVESPDPSMAAAVAAVAAATTAEDEARLLRLEEQAEHGGGGAWRLPLSGPPAPSPSACPRSTGRTSSSYQRLRSRPCXPLISGRSTSRGS

SEQ ID NO: 364037 - protein, 172 aa, Zea mays
  Clone ID: MRT4577_95172C.1.pep
RNNVGYPDSIYGSLLFIHKLLIENDNNPNSNITQLDKPSLANLTTTAMAASLAALYTSSLASLSSPLSPLSTVPVSPIAAALVAATLSLASLSSLLVSTASAATTVAAIALAITASAFPLLLVLLATATVAIVLSVVALVVAYLALSSLLASSMAFSPFLVFLALVVSSFLV

SEQ ID NO: 364038 - protein, 71 aa, Zea mays
  Clone ID: MRT4577_95173C.1.pep
TNHKFSILSFEGVSLQLAAYFQRVDYLQQLTPSTYLYSNYTLQTVQSTIQNSVFGDHMSELLDTVLASHFL

SEQ ID NO: 364039 - protein, 134 aa, Zea mays
  Clone ID: MRT4577_95174C.1.pep
SNSGRQASSHSVTPLSQDFGSSRRRRRPLLPPRHREYNFVGPPNSSKLTWTDELMKRVDVGGEESGSSTSSPTANANANAMLPLRIYTLFIIVILIHAGKKCIFFQFKIGRQEKMGRKYAPPPTSLSVLAVRLR

SEQ ID NO: 364040 - protein, 134 aa, Zea mays
  unsure (1)..(134): unsure at all Xaa locations
  Clone ID: MRT4577_95175C.1.pep
MVPTPNVSMDIKCASRTHAYHRRAFCIIEAKNGCIFLKXRSPPSQHXPNFYPADXMTSHMPMTLKPSLTKITPSITPVYLLILLAXFFLGMRVTILSHVNSGLILSSAPLKMTGVPIRRDNHTYVIATSAYADI

SEQ ID NO: 364041 - protein, 52 aa, Zea mays
  Clone ID: MRT4577_95176C.1.pep
TFYYLNETHLSHEQGGLLGLSTSTILAETEGDKNRPLRLGSTEGLAKTTIHY

SEQ ID NO: 364042 - protein, 221 aa, Zea mays
  unsure (1)..(221): unsure at all Xaa locations
  Clone ID: MRT4577_95177C.1.pep
EWFESDGNFVHKGLQFGRVYGCARSIIVAERVVLXRPACILETRKTAPGLRLIDKWAVLIGGGKNHRLGLFDMVMIKDNHISVAGGIANAMRSVDQFLQKEKLTIPVEVETRTIEEVKDLLKYAAENKTSLTRIMLDNMVVPLGNGDLDVSMLKDAVRLINGRFETEASGNVTVDTVKKIGETGVTYISSGALTHSVTALDISLKIDTELALQVGRRTNRA

SEQ ID NO: 364043 - protein, 375 aa, Zea mays
  Clone ID: MRT4577_95178C.1.pep
MPAIPTAPAPCPVRFLLARRHSLHISYPSPCSNHQRLPPRLLRLPARPRAAPMSAEARAPASPVAPPAHPTYDLRAVIALALAEDAGDRGDVSCLATIPSDVEAEATFIAKADGVIAGISLADMIFNQVDPSLKVEWFESDGNFVHKGLQFGRVYGCARSIIVAERVVLNFMQRMSGIATLTKAMSDAARPACILETRKTAPGLRLIDKWAVLIGGGKNHRLGLFDMVMIKDNHISVAGGIANAMRSVDQFLQKEKLTIPVEVETRTIEEVKDLLKYAAENKTSLTRIMLDNMVVPLGNGDLDVSMLKDAVRLINGRFETEASGNVTVDTVKKIGETGVTYISSGALTHSVTALDISLKIDTELALQVGRRTNRA

SEQ ID NO: 364044 - protein, 78 aa, Zea mays
  Clone ID: MRT4577_95179C.1.pep
LPLLPPYLSPTVSSVCENPILTLRTNGIDWLYLYLSPYTITVLDMQIAHQCDFYKVIHLFLKSTFLNYTYILEFSLTS

SEQ ID NO: 364045 - protein, 120 aa, Zea mays
  unsure (1)..(120): unsure at all Xaa locations
  Clone ID: MRT4577_9517C.1.pep
MHTGADMIPTEKGVDPSEVDDALAHAFFDLENGHQDLHSGXGSLCIDTAIQMAVTVSMKAXVLHAPCRLRAAFGTIRGRLLRELVKKFIAQGGVVGAXRRVVRPPITGSACSYALRTDDS

SEQ ID NO: 364046 - protein, 67 aa, Zea mays
  Clone ID: MRT4577_95180C.1.pep
MASTACFVIVSKNDIPIYEAEVGSAPKKEDLAYHHQFILHAALDVVQDLAWTTNAMFLRSVDRFNDL

SEQ ID NO: 364047 - protein, 49 aa, Zea mays
  Clone ID: MRT4577_95181C.1.pep
CYQDRINGLCASIGGRRIKVVVTGPKGYLGRRLCPALAGAGHAVRPLVR

SEQ ID NO: 364048 - protein, 106 aa, Zea mays
  Clone ID: MRT4577_95182C.1.pep
PRVYCENQPMLPIGLSDIPGEAMVKLYCPKCMDVYTPKSSRHHHTDGAYFGTGFPHMLFMVHPEYRPKRPANQFVPRLYGFKIHPMAYQLQLQAASNFKSPVKTIR

SEQ ID NO: 364049 - protein, 127 aa, Zea mays
  Clone ID: MRT4577_95183C.1.pep
SRTRGFKSSSSPGFFFFLLLLLLFFLPPTRSVSTTSHVRTVQHTTPHQLPPAPNPELDLYSLQSWSLRAKAYVHTYAFAVSGRTYVVVRWVRRRRRGGARCSWRWWCWSRPRASAVAVVPAVKRGRS

SEQ ID NO: 364050 - protein, 166 aa, Zea mays
  unsure (1)..(166): unsure at all Xaa locations
  Clone ID: MRT4577_95184C.1.pep
VYIEQQVTARASTQAEIWEALDKTNAVASVISTLQNYTEDVHPLNYLTEMISLLRSILCXWPSSRYHVWSNHNLMAKLAHYCLTAETTVSAKILKLYAALALCGNGAMVLLKNEELIIKTGNLMGKSHPTVTRIEALRLCQVFLRSSRGCNWLMTAHGQPIVQGIT

SEQ ID NO: 364051 - protein, 126 aa, Zea mays
  Clone ID: MRT4577_95185C.1.pep
MSLASTPSRPQRRAESSRPASYDESLLDAELQVYLGDAASRRVRRLRRLSAEERERETETEALIALSLRFPIDELLPEERPLLPAHIVDTPNDYMVVRNTHPLLQERILGGADADRERTLDRHRQL

SEQ ID NO: 364052 - protein, 54 aa, Zea mays
  unsure (1)..(54): unsure at all Xaa locations
  Clone ID: MRT4577_95186C.1.pep
XTGRAPSRRPLYFFLFFFFFKGYIIRGLPTTLGSSKKGTGIKNKNSLPYLIKHY

SEQ ID NO: 364053 - protein, 47 aa, Zea mays
  Clone ID: MRT4577_95187C.1.pep
IEGALRLNSPWLETSTVGEWSRMMLLLGGHPGLSSASTPLNPPELSE

SEQ ID NO: 364054 - protein, 84 aa, Zea mays
  Clone ID: MRT4577_95188C.1.pep
MSCAELPLPVTVTLPETPAVNGEGSSAATAAAPGAGSKPKKKICCACPDTKRLRDECVVEHGEPACTKWIEAHKRCLRAEGFNV

SEQ ID NO: 364055 - protein, 77 aa, Zea mays
  Clone ID: MRT4577_95189C.1.pep
MSCAELPPETPAVNGEGSSAATAAAPGAGSKPKKKICCACPDTKRLRDECVVEHGEPACTKWIEAHKRCLRAEGFNV

SEQ ID NO: 364056 - protein, 208 aa, Zea mays
  Clone ID: MRT4577_9518C.1.pep
MELDDLVSWEMLRSLSLWFPAGEVLSPLISAGLDSCPVLEEISIKVEGDCRTCARPGPLFGLSDLAGFPVLAKMKLDLSEAVGYALTAPAGQMDLSLWERFYLQGIDSLMTLYELDYWPPQDKEVNQRSLTLPAVGLLQGCVGLRKLFVHGTTHEHFLTFFLKVPNLRDMQLREDYYPAPESDMMNTEMRAESWLRFEVQLNNRLIED

SEQ ID NO: 364057 - protein, 66 aa, Zea mays
  unsure (1)..(66): unsure at all Xaa locations
  Clone ID: MRT4577_95190C.1.pep
KAAKKHAILNIWDHEMTENMKNTTVRSGTMLYNALHRDKSRDSHXYLISSDNCMSVXDDGDTTGGG

SEQ ID NO: 364058 - protein, 61 aa, Zea mays
  Clone ID: MRT4577_95191C.1.pep
PSPPAASPCCPALFRRVVPSYVPLSLGPPRSLQHLPRLVLIFAPPSGLQSGAQRKEGLAIP

SEQ ID NO: 364059 - protein, 101 aa, Zea mays
  unsure (1)..(101): unsure at all Xaa locations
  Clone ID: MRT4577_95192C.1.pep
MQIIIYDDSEGQKPGSYVVCALTGHIAELSLISHGFSQDGPVETDEFMSFEKPTSPAFKVKKHTDLVDITPAVDSALLMNELQXIGLIVWPINYSIYGGIL

SEQ ID NO: 364060 - protein, 91 aa, Zea mays
  Clone ID: MRT4577_95193C.1.pep
IRNSRNPTDPTTNHPPSPHHYLSFLFSIIKISRNNNTDSNQNSLDYLFRRNKPPKPAVAPADSTPPIEKPSTDKTDAAKQITTRVTDQTNN

SEQ ID NO: 364061 - protein, 48 aa, Zea mays
  Clone ID: MRT4577_95194C.1.pep
NKMERRNPQTPFFKTFLKNLAFSVLVSPLMGSFKPFKLDWENHVLLPQ

SEQ ID NO: 364062 - protein, 53 aa, Zea mays
  Clone ID: MRT4577_95195C.1.pep
PPSLNPNPCLLKFPPRQAGHEKNSQINPNLHRHLKTPPPEQVPRMSRPASRYP

SEQ ID NO: 364063 - protein, 64 aa, Zea mays
  Clone ID: MRT4577_95196C.1.pep
RRRAPQSIASQSDIAMEVASMLLVMVSLETLLLVRGAGDGAAIRLTSDVGGVDADLETEMAKAM

SEQ ID NO: 364064 - protein, 116 aa, Zea mays
  Clone ID: MRT4577_95197C.1.pep
GRHTTPPSSPPMTVLLQSGQGKPTCQPSSPVTADLFNAAKSLEFGSLGPFSLGLPSTSTQFEEEFPALPTRKRAEGPISVAPSAKAVETKSRSEESEEMFRLRNESDFPPLQAGCR

SEQ ID NO: 364065 - protein, 60 aa, Zea mays
  Clone ID: MRT4577_95198C.1.pep
GYKKTHYTVAEAARKLPEDAASRRGLLLDFFVILPVMQVRCSAGLDYSLVNVIACFFRSE

SEQ ID NO: 364066 - protein, 137 aa, Zea mays
  Clone ID: MRT4577_95199C.1.pep
PRVRADFCFLKKKKKKKKKKKKKKKKKKKKKKKKKKKKKKKKKKKKKKKKKGGGRFKGSKFIYACLQSNNFFLGAPKLNSLAVVLKRWDWKNPGVTKLNRFGENSLFARWGKNKKARTNRLFKKLPTLNGKWDPPFI

SEQ ID NO: 364067 - protein, 174 aa, Zea mays
  Clone ID: MRT4577_9519C.1.pep
MQQNAARLLAAAVACLALALAPSSDAQGTAVPSCAAKLVPCTGYLNSTSTAAPAAACCGPLREAAANETACLCAMLLNRAALRAFGVAPEQGLVLARRCNVTTDASACAAAGGSATGGSTAASSASTGSASSSSSSSSVAKPTANGGGVARRLSMTGASSLLGFSFIWWWAVMA

SEQ ID NO: 364068 - protein, 206 aa, Zea mays
  Clone ID: MRT4577_951C.1.pep
MARVLRTSLVAPSPAGAALHERSLPLTYLDALWLHATPVERVFFYPDATSDVLSNLTDSLSNALAAFYPLAGRLRLTPGAHNRYELHYQPGDGVTFTVAEHHHVGFGELATDDPTEVAKIVPLVPPLPEGGAVLAVQATVLRGGLAIGVTVHHAACDGVSSTHFLRTWDWAVAACSGASASEPPCVDRSIIRPRDDLYDAITVYRL

SEQ ID NO: 364069 - protein, 39 aa, Zea mays
  Clone ID: MRT4577_95200C.1.pep
DEQRDYLHKGEQEGHNAFSPWGHSRCVRGIFMDGYFLGL

SEQ ID NO: 364070 - protein, 61 aa, Zea mays
  Clone ID: MRT4577_95201C.1.pep
YNMYLYKLPRDLDLKVPSPDSYFALASVDAFYVAVLQVTSEVTGLKCIKVACPRNVTWHDH

SEQ ID NO: 364071 - protein, 69 aa, Zea mays
  Clone ID: MRT4577_95202C.1.pep
IGVAWRTAGIFGRTSRVDPGAGRSEWYVLIPPLLGCSVLGFRSLAARCRICFAPLKLNGVARSSNRICI

SEQ ID NO: 364072 - protein, 40 aa, Zea mays
  Clone ID: MRT4577_95203C.1.pep
THSLTSPVVDHIHSMIMLIENANLRYSVTSENIQYNIVVV

SEQ ID NO: 364073 - protein, 197 aa, Zea mays
  unsure (1)..(197): unsure at all Xaa locations
  Clone ID: MRT4577_95204C.1.pep
MRLMNARLSERISGCCDGVERCEEPCDETSIFDEGPIFDEEPCSHRCFLDSDPDSPCDWVDLPSVVLAAAPGSQDLLPPPGIHAVPSINTSIVGARRSKIHARKVRDVRLLHVSSPSPDQELDLPIGKHVPDCASVDGKSCLRAYTTTGMEDEVGHFGLDAKEHFLDEHSKFPNNGLMNQLLXDPLPLDPYIDAAPS

SEQ ID NO: 364074 - protein, 86 aa, Zea mays
  Clone ID: MRT4577_95205C.1.pep
FRTRPYPHYSFLHSTHRADLVNKRSAGLAIPCLGVDLHSNRIVSNLCDGGDLTAELGLYRFDHGTLQHQVKATRAPYSSGTGLPGG

SEQ ID NO: 364075 - protein, 65 aa, Zea mays
  Clone ID: MRT4577_95206C.1.pep
NFANTTFCLYNWGPMICFFDTGHKHLHNILQTFIFLYMPRKTLIFPTSQKALERPIKPAEALLKF

SEQ ID NO: 364076 - protein, 65 aa, Zea mays
  Clone ID: MRT4577_95207C.1.pep
IGCVVTHTVFSSLVNLTSTVLFKFEESLSLSLSRGIVSIELCLIRLGSMIHAFTTKMIWASANNR

SEQ ID NO: 364077 - protein, 100 aa, Zea mays
  Clone ID: MRT4577_95208C.1.pep
NNSIEQLIVKQTKKHISTPAPHDSYSVLSVSSSGKYVAIVWPDIPSFAVYKANDWSVVDSGTGKLFAWDTCRDRYALVESALAPRMPLVVKGGSSKKAKE

SEQ ID NO: 364078 - protein, 151 aa, Zea mays
  unsure (1)..(151): unsure at all Xaa locations
  Clone ID: MRT4577_95209C.1.pep
MFNNLASHPKFISDTKVAIAIAVSKDHKPDQTDERQRIEDAGGFVMWAGTWRVGGVLAVSRAFGDKLLKQYIVVDPEIQEEVADGTLEFLILASDGLWXSNEEAVAMTRSIRDPXEAVNKLLQEAYKRESSDNITCVVVRFLHGQGSSGYA

SEQ ID NO: 364079 - protein, 131 aa, Zea mays
  unsure (1)..(131): unsure at all Xaa locations
  Clone ID: MRT4577_9520C.1.pep
MGRDGGGGVAGGMSDSVLRXVLLSYLGGGVWFFLSFSGIVYRRCVLGPXMYNWPFPVSLTMVHMGFWSSLAVALVRVLRVVGLPAWSSVAPQCCACSVVPVGALYAVWVWVCTSGYIYLGGVFLPMLKALL

SEQ ID NO: 364080 - protein, 75 aa, Zea mays
  unsure (1)..(75): unsure at all Xaa locations
  Clone ID: MRT4577_95210C.1.pep
NSIPQTXPIPGGTEKKERLVLWPREHRKRLRRDHQPWHGDQRSLQAHTLGFRQGIRIESKHAHRMAVGRLPGVVS

SEQ ID NO: 364081 - protein, 355 aa, Zea mays
  Clone ID: MRT4577_95211C.1.pep
LSYKNTSGRDTQKPQCERPWLVGVASFSQTLACIRARTKLRLRGASSCRQKLSGASAMVWFQCEDCGENLKKPKLAGHFRSCSAYKLSCIDCGELFSQDTVQGHTQCISEAEKYGPKGQTKPSNGAQGKADKPKPNADVDINVGLSTRPPWFCSLCKTTTTSKQTLLLHADGKKHRAKAKAFHVSQKQKDGAEQTPDVKEAGVVPTKESAQVNGGVSGDHERNEDKDAGKRKRMDDMTIEPGNTKRQLTQSGDEKSENKAKSKADELASGTDCKSVQKQKIKWKKIITKTLKANADGVMKLKKLQKIVSKELQECGVSKDKEELRATLMDKIASSSRFSVDGKNVRLVAKNEEES

SEQ ID NO: 364082 - protein, 55 aa, Zea mays
  Clone ID: MRT4577_95212C.1.pep
YPRICGLHTPSMLSPPPPEIKSPCLRTVIFLQLCGVCFFFVMTYVKPCYYKLWFC

SEQ ID NO: 364083 - protein, 103 aa, Zea mays
  unsure (1)..(103): unsure at all Xaa locations
  Clone ID: MRT4577_95213C.1.pep
IKKSGNKKKREGKWQRIIRFFDLNTGAKIPSVGLGTWHSDPVLVAEAVAAXAIKVGYRHIDCAQIYGNEKEIGSLLKNLFEEGVVXREDLWITSKLWNTDHAS

SEQ ID NO: 364084 - protein, 141 aa, Zea mays
  Clone ID: MRT4577_95214C.1.pep
RLALGHTTVDGGPRQALRSHARRPAPGREEPRSTTRLLVACRTELISPPRSMPQGGAPRQAARSRTRHPAPGHTAAPSLDLCAPRRHLQRWFMAGTFLSDRLGSFSNKPPLSFQSHCKRAKQVLYNLISDSVHVVYLCFQP

SEQ ID NO: 364085 - protein, 110 aa, Zea mays
  Clone ID: MRT4577_95215C.1.pep
MSTGTDAVPVAVAPAKRPPINKYAFACALLASMNSVLLGYDISVMSGAQLFMKEDLKITDTQIEILAGVINIYSLFGSLAAGLTSDWLGRRYTMVLAALIFFTGALLIWC

SEQ ID NO: 364086 - protein, 87 aa, Zea mays
  Clone ID: MRT4577_95216C.1.pep
MLHSVYHSLGNEHPKMGVLLPDRILSELTCMYQRGTDKGFVCVTTDRSTLKGEVQVEKTENTGQGVEHMCLIRAFNGKKNIFTWGCL

SEQ ID NO: 364087 - protein, 102 aa, Zea mays
  Clone ID: MRT4577_95217C.1.pep
SFFFFDTAPACGPVNDTGGHLGPDGKWDTLTCLSEIDACIQTLTTWLPKVQLGATAVPNGSTKMTLQVLCSLMGIEPDIPVCAVSLVVQGNSLVEAVLALTA

SEQ ID NO: 364088 - protein, 102 aa, Zea mays
  unsure (1)..(102): unsure at all Xaa locations
  Clone ID: MRT4577_95218C.1.pep
MQSILSSEGDSCPVRSCTDXAVLDQLVGFLESRXAGYPTSLDVDXSIVADSXFNQRRNVLLCLFSLXNKMLHSCLHATNVFINYFVNLTLSPCPVSYSPELK

SEQ ID NO: 364089 - protein, 87 aa, Zea mays
  Clone ID: MRT4577_95219C.1.pep
VPGPPPRPPPPPPPPPPPPPPPPPPPPPPPLFYRANTNFPGPNHFFKSPFWGAPPKNFFCSNQPLCWQRAKDPKNYPLPTPKKGKRP

SEQ ID NO: 364090 - protein, 59 aa, Zea mays
  Clone ID: MRT4577_9521C.1.pep
MVLAVDLLNPTPQSEARKHKLKTLVPAPRSFFMDVKCPGCFTITTVFSHAQTVVICAGC

SEQ ID NO: 364091 - protein, 120 aa, Zea mays
  Clone ID: MRT4577_95220C.1.pep
CGPVTSIKPLAKVFKTTARRPRYGPVNKITTRPASMPDLNLWMRGFGVERVCKVLLSNFFSSVVNVTFDTRRCSRLSKATRSFLRKAVANGRTESTFLRGAPLRTLRDITLRAIFNQNVD

SEQ ID NO: 364092 - protein, 44 aa, Zea mays
  Clone ID: MRT4577_95221C.1.pep
SWTIIFAITLLLDVVIVIMYIFNLRGRPAVYHDYYIYIYIYIYS

SEQ ID NO: 364093 - protein, 135 aa, Zea mays
  Clone ID: MRT4577_95222C.1.pep
NPPEAPPVGALAPACVGDNPSLRPSMAHVVGPLEQGAQGSISPVERRSAGPRKVLPPRAGFLRPPRRPNLAFPLVNFRCLRGWVAPVGREHWFLGKQNVFGVRAHPKGESKKKWRKGWLKFKKKKKFFWGKVLRR

SEQ ID NO: 364094 - protein, 45 aa, Zea mays
  Clone ID: MRT4577_95223C.1.pep
NYYMLRYPFNATDGKRFQRCCSGGSAQKKNLGGSLNIQLTRGNFP

SEQ ID NO: 364095 - protein, 53 aa, Zea mays
  Clone ID: MRT4577_95224C.1.pep
MDPPQQPEPVTYVCGDCGAENTVKLVDVVQCRECGHRILYKKRTRRIVQFEAR

SEQ ID NO: 364096 - protein, 143 aa, Zea mays
  Clone ID: MRT4577_95225C.1.pep
SNGLSGFFFLHHSDHGEDDANPRRRYVPCDARVTVLPVIMAQEIWSCSSVVDLQPYCQRRGILRGLAHDLPQRDLRRSRRASVEPPQHPVDDLALSLPELRRGAEVYHSPGNAVFLPNSKPMIPVYGQGLARRSGAGPASRYP

SEQ ID NO: 364097 - protein, 518 aa, Zea mays
  Clone ID: MRT4577_95226C.1.pep
MAALLYLHPYLAVLPLLISPICSGASPWRTMTTGSHMRGEDHDKVTLLSPDSTFSCGFHEVGTNALTFSIWYTPSASASATERTVVWTANPYSAERGQHSPVNKYGSRLSLNRDGNLVLTDTNGSTVWETKTSSGRHTTAALLDSGNLVIRDSSSGNNKVVWQSFRSPTDTLLPGQELTKDTRLVSGYHHLYFDNDNVLRMLYDGPEITSIYWPSPDYNALKNGRNRFNSTRVAVLDDLGTFVSSDGFRIEASDSGPGVKRRITIGYDGNFRMYSLNASTGAWRVTGQAVIQMCYVHGLCGRNGLCDYLGGLRCRCPPDYEMVDPTNWNRGCKPMFLTTDDGNQSHEEEFTFVEQPHADYYGFDLSSNESVPFEACRDMCLNSSACLSFTYKGGDGWCYTKGLLYNGQVFPYFPGDSYMKVPKSFNSSAAYSSISNQKEALTCGPAGSAELMLGPASMYGTKKDNINWTYLYVFAAVLGALEMLVIATGWYLFFNKHSIPKSMEDGYKLVTNPWMNTF

SEQ ID NO: 364098 - protein, 55 aa, Zea mays
  Clone ID: MRT4577_95227C.1.pep
YNWHSYGNVKGHGVPKTAVQVNRLSCDRPATFWALSVCFAVVFTCERPGVPGCVA

SEQ ID NO: 364099 - protein, 105 aa, Zea mays
  unsure (1)..(105): unsure at all Xaa locations
  Clone ID: MRT4577_95228C.1.pep
AQLKKLKYQLSLLSVAKVAVGAHNKLFKIKVVRTSIAXVLTVISHNQKXALWEAYNKKILLPLFIRRKKTRAIRRRIVXLQLSMKTXRVNISVSXFPMRKYAIKA

SEQ ID NO: 364100 - protein, 68 aa, Zea mays
  Clone ID: MRT4577_95229C.1.pep
CFGYCLMEMSYDRRKILLEITFSKSRFEQRAPDFQKHTAWQESEKAQFTTGWILPLGLHETTHELKTP

SEQ ID NO: 364101 - protein, 68 aa, Zea mays
  Clone ID: MRT4577_9522C.1.pep
TLYHETCVTMCVFVFAANKRHICVQEKNLCLVSLLPRTPCSLSPSICIYTHKQLLGRNYKTDTARESI

SEQ ID NO: 364102 - protein, 96 aa, Zea mays
  unsure (1)..(96): unsure at all Xaa locations
  Clone ID: MRT4577_95230C.1.pep
FAAFIDTTSTHAENKAIPMSRTCDADDRTVQGAVRMGLVANTCRASSLGRERVKQEHRGLALEAXGKALMLRXNSKVFYTPTMTLPKQDIMILADG

SEQ ID NO: 364103 - protein, 73 aa, Zea mays
  Clone ID: MRT4577_95231C.1.pep
FCRKYAIFPMFVYRFFLVCIRLLHEFYLVVCKDRCSVFRRVIFVFGFALSTRHHLEGFGVGSKKNLVICVGEL

SEQ ID NO: 364104 - protein, 74 aa, Zea mays
  Clone ID: MRT4577_95232C.1.pep
NSPGLFFFVPNIPKNWPRSPKWGPVLSPLSLGGIWRRPIQMSVFFPWRVILLSPLRFPPALWKSLVLLKKAIFQ

SEQ ID NO: 364105 - protein, 48 aa, Zea mays
  Clone ID: MRT4577_95233C.1.pep
KGVAVANYLVCGQKILGVIFYFLAGLGAKRGFWFFLFLGIPLNCFLVA

SEQ ID NO: 364106 - protein, 36 aa, Zea mays
  Clone ID: MRT4577_95235C.1.pep
ISLLATAVSLASQASFSHTTHIFLASTIIKSESNFC

SEQ ID NO: 364107 - protein, 129 aa, Zea mays
  Clone ID: MRT4577_95236C.1.pep
WFSVAWVDPNSKYCTKVDASGSSDPSWGMKFSVSVDEHGLSNLQQMVLTVEVYRREPIFLREHLQGAAVVQMKEYFDKFQHGGEQPGVVEETASFQLRRKKSDKAHGFVDISICILEWGSELEHWPQEL

SEQ ID NO: 364108 - protein, 140 aa, Zea mays
  Clone ID: MRT4577_95237C.1.pep
PGGPPPGWFVPGNGPKKNFFCPSPGSRFPNQGKVVLGPGPFFLALVSPKFNGAKVLFFPGGEPPFRPGKDPWWKALGFSQTPGVQFSPIRPRVPPLPFYKKKSVGFFSRGGFSQKFPSFLSPPQKTPCLKQKHPFTPPFF

SEQ ID NO: 364109 - protein, 72 aa, Zea mays
  Clone ID: MRT4577_95238C.1.pep
SINNYTKYEGSCYHLILHGYIKAGGLRSKQKVYKFLPSPCMVIESPILGTSAAYGAMRNTHLIHRRVVILLC

SEQ ID NO: 364110 - protein, 74 aa, Zea mays
  Clone ID: MRT4577_95239C.1.pep
FFFFVCRLKFVELIDKLDEGSMSWTEFQTVVRKQHENRLGGPYERLRGASPRQEEYFYSNPIPGCLCKRVQRSR

SEQ ID NO: 364111 - protein, 65 aa, Zea mays
  unsure (1)..(65): unsure at all Xaa locations
  Clone ID: MRT4577_9523C.1.pep
INLLSYKNHCLEIWEYKKRYLRSGVWWSTASTVHKGGKSKIPNPQDKFFLIDVKAFNPKGXPSVR

SEQ ID NO: 364112 - protein, 128 aa, Zea mays
  Clone ID: MRT4577_95240C.1.pep
REAPARPGSVPAVTLRRFELGDVDAMLEWASDPEVTAFMAWDACTSRDALLAFLRDAVLPHPWFRAVCLGGGGHCRPVGAVSVTPTDDACRAELRVVLARAHRGKGVATAAARRAVSAAFGDLPGVER

SEQ ID NO: 364113 - protein, 85 aa, Zea mays
  Clone ID: MRT4577_95241C.1.pep
LSLTSLSHASCSLTLISLPPGVLLHTRRAPGRLLRAERAHRRPHHDAAASCPAPAIRAKLGSPSRARQTRPRCRAAAQRQTPSLA

SEQ ID NO: 364114 - protein, 320 aa, Zea mays
  Clone ID: MRT4577_95242C.1.pep
MSLQIPVRSGALRRLLLLGGAEGLLRTYSTGDRRRRVIREARQEEEDEAFLRTLNFGADPENNPLPPPPRHGRGLSDASAGKQQQQPERSAQKVVGETLLEKLKLGDGPSAAAAIGGGDEPRQSEDEPAPAQPVDVDEIFRKMKETGLIPNAVAMLDGLCKNGLVQDAMKLFGLMREKGAIPEVVIYTAVVEAFCKVAKLDDAVRIFRKMQGNGVIPNAFSYWLLIQGLYKGGRLDDAVGFCVEMFEAGLAPNAETFVGLLDAVCKTKGVDEGENLVRSFQDRNFAIDEKSIRDHLDKKGPFSPVVWEVIFGKRKSDRPF

SEQ ID NO: 364115 - protein, 48 aa, Zea mays
  Clone ID: MRT4577_95243C.1.pep
THIYTQEQTMKAARCRDLTACTSLQFLVLLSSYTQIDHDVDYHHHDAI

SEQ ID NO: 364116 - protein, 89 aa, Zea mays
  unsure (1)..(89): unsure at all Xaa locations
  Clone ID: MRT4577_95244C.1.pep
HDCFSRFDIVPHHILFHXRHFLALGGGGYHXIPXFTEHLLVRENLIYARSHSTLPTCLESRTWWCSSLQAAATACGANRLFSTLSLTPC

SEQ ID NO: 364117 - protein, 73 aa, Zea mays
  Clone ID: MRT4577_95245C.1.pep
LHISAASCVAKSFFLLCRQPGLLLHHSPLGDLVRVLNLQVQLPERLPTVPYLVQEQITRKLHERHVSLALLRL

SEQ ID NO: 364118 - protein, 67 aa, Zea mays
  Clone ID: MRT4577_95246C.1.pep
AEQWLREGSQLQESLPKNVDPVLWSCEIKRKEEELDTFCRNITRHKGSPARTDGSRGSDYMPTPDRD

SEQ ID NO: 364119 - protein, 91 aa, Zea mays
  Clone ID: MRT4577_95247C.1.pep
CYPTASTHCPVCSLSIDVQTGHPARARPKPRFGPVQIGSGQARPVNGSGRAVPAPRAQASAQTRHGHAHSPPCRPDSPPCLNGSCQALART

SEQ ID NO: 364120 - protein, 195 aa, Zea mays
  unsure (1)..(195): unsure at all Xaa locations
  Clone ID: MRT4577_95248C.1.pep
QELPITEYICCAMSKQELLEAQEQEHQLAYQDKLMERTKDRKNALESYVYDTRNKTEDWLYEXGDDETEVVYSSKLEELKKLVDPIENRCNDDEVRAEIARELLKCIVDHRMAAKSLSAPERDAVDNECNKAEQWLSEGSKLQESLPKNVDPVLWSCEIKGKEEELDMFCRNITRHKGSPARTDGSRGSDHIQNT

SEQ ID NO: 364121 - protein, 750 aa, Zea mays
  Clone ID: MRT4577_95249C.1.pep
MSVVGFDVGNDTLVAAAARQRGIDVLLNAESKRESPAAIAFSRNARLIGCHAASASSAHAPFSSVKRLLMGATGRHPDSSLLRDLSRLPFPAAVGGGAVVHADHIGRRIALSPTHLLSMLLAYLKQLAEADLGGAPVADCVISVPCYFTQAQRRAYLDAAAIAGLRPLRLMHDLAATALGYGLYRSDLGGSGGPTCVAFVDVGQCDTQVAVVSFDMSGMKVLSHGFDADLGGRDFDEVLFEHFAEEFKDRYMIDVTGNVKASMRLRAACEKAKKVLSANAEAVVNIECLIEEKDVRGVIRREDFEKLCARLLERVVEPCNRAVTDSRIGLERLHSVELVGSGSRVPAIAKVLKEFFRKEPSRTLNSSECVARGCALQCAMLSPTFRVREYEVHDAIPASIGFYTSDGPVSTLSSDALFRRGLPFPSVKIITLQKNDSFSFDAYYVDANELPPGTSTDIGSFQIGPFQAHMEASKVKVKIRLNLHGLVSVESAALIDDYQRNATSADHMEVDTSGDDMGHKSRSERSIQRQELPITEYICCAMSKQELLEAQEQEHQLAYQDKLMERTKDRKNALESYVYDTRNKLSERYRSFATDSEREQISFNLQQTEDWLYEEGDDETEVVYSSKLEELKKLVDPIENRCNDDEVRAEIARELLKCIVDHRMAAKSLSAPERDAVDNECNKAEQWLSEGSKLQESLPKNVDPVLWSCEIKGKEEELDMFCRNITRHKGSPARTDGSRGSDHMPTPDRD

SEQ ID NO: 364122 - protein, 75 aa, Zea mays
  unsure (1)..(75): unsure at all Xaa locations
  Clone ID: MRT4577_9524C.1.pep
SVAHTCVALPRNRESVEHLRGRRPRASLARRPPRAMEASAGLVAGSXXQPXNELGADPGPRGPQAAAGAERAGVR

SEQ ID NO: 364123 - protein, 392 aa, Zea mays
  Clone ID: MRT4577_95250C.1.pep
PSRTLNASECVARGCALQCAMLSPTFRVREYEVQDAIPASIGFNTSDGPVSTLSSDALFRRGLHFPSVKIITLEKNDSFSFDAYYVDANELPPGTSTDIGSFQIGPFQAHTEASKVKVKIRLNLHGLVSVESAVLINDYQRNGSSTDHMEVDSSGDDMQGHKSRSERSIQRQELPITEYIYGAMSKHELLEAQEQEQQLAYQDKLVEWTKDRKNALESYVYDTRNKLSERYRSFATDSEREQISVNLQQTEDWLYEEGDDETEAVYSSKLEELKKLVDPIENRCKDDEVRAEAMRDLLKCIVDHRNAAKSLSTPERDAVDNECNKAEQWLREGSQLQESLPKNVDPVLWSCEIKRKEEELDTFCRNITRHKGSPARTDGSRGSDYMPTPDRD

SEQ ID NO: 364124 - protein, 86 aa, Zea mays
  unsure (1)..(86): unsure at all Xaa locations
  Clone ID: MRT4577_95251C.1.pep
MEPVAVVAVPFPAQGHLNQLLHLSLQLASRRVDVHYAAPAQHIRQARARVHGWGEEALHSIQXHDLGIPSYVSPTAKSMVNWCKRR

SEQ ID NO: 364125 - protein, 103 aa, Zea mays
  unsure (1)..(103): unsure at all Xaa locations
  Clone ID: MRT4577_95252C.1.pep
PTPTASXTVAPXAPXAAHATACPQTWRPPPPPASRPRSSPPRPPRPAPAAXRRPPRAAAATATPATAAPTAAAPAAAATEPVRRWRPKVQRTTPSRTKKKNGV

SEQ ID NO: 364126 - protein, 127 aa, Zea mays
  Clone ID: MRT4577_95253C.1.pep
NPPRFPSPPQFLSIPKSMSTFSNPCHPKGPTNLLSLPHHVPPSDSLSCEFFHKAPSYPYPSRFSHPGPFLAPRGFFTSHPFLPFCPPPQRIFLPSWGIYPSFLLPQVCFFTVLYILPPYPVCVNKSS

SEQ ID NO: 364127 - protein, 168 aa, Zea mays
  unsure (1)..(168): unsure at all Xaa locations
  Clone ID: MRT4577_95254C.1.pep
TREPQRPPPSQRRPQRRRHTPTPRRRRHGQHSNPGGTTTQAAPGSTTNSTTRRPTTARRRNSAPGDGGGRRRRRRRPGPRASTTRARTSRRPRTRGRPRPATAPTARPPPRTSARRRTTRRRSRATTRPPTRRTTRARRRPXRERQGXERTSRRGTRPSTRRARPGSG

SEQ ID NO: 364128 - protein, 86 aa, Zea mays
  Clone ID: MRT4577_95255C.1.pep
SFLLCRWTPLMVGRSWQRNSVEEILSREPEGRIHTLPSPYLCLPLMSIMNIARECGWRYLNQSPVCIDPCAVCLEGSWSVAAEGCK

SEQ ID NO: 364129 - protein, 184 aa, Zea mays
  Clone ID: MRT4577_95256C.1.pep
MAPMKLYGAVMSWNVTRCATALEEAGSDYEIVPINFATAEHKSPEHLVRNPFGQVPALQDGDLYLFESRAICKYTARKNKPELLREGNLEEAAMVDVWIEVEANQYTAALNPILFQVLISPMLGGTTDQKVVDENLEKLKKVLEVYEARLTKCKYLAGDFLSLADLNHVSVTLCLFAALMKPSA

SEQ ID NO: 364130 - protein, 128 aa, Zea mays
  Clone ID: MRT4577_95257C.1.pep
MNHHQAQPVRTGDVYPPTAVKREASHERDKIIEQGDQRGGALHVDQTDLPAGRRMVTASAGGQVMAQFTVPVPDTKVAEATDAVTLGEALHAAAQTSAGDKPVDLADAAALQAAEARATGLGGNVRGG

SEQ ID NO: 364131 - protein, 110 aa, Zea mays
  Clone ID: MRT4577_95258C.1.pep
VLLKSSGWHTPVVPQIRTNASIGTVVDNNICHPTEFDFFVCIHAGAKGTSRPTHYHVLRDDNKFTADALQSLTYNLCYIAQIIQGGPIRCQVCTPQQPTDAARRSPSSGI

SEQ ID NO: 364132 - protein, 155 aa, Zea mays
  Clone ID: MRT4577_95259C.1.pep
IFSICVLESRAICKYAARKNKPELLREGNLEEAAMVDVWIEVEANQYTAALNPILFQVLISPMLGGTTDQKVVDENLEKLKKVLEVYEARLTKCKYLAGDFLSLADLNHVSVTLCLFATPYASVLDAYPHVKAWWSGLMERPSVQKVAALMKPSA

SEQ ID NO: 364133 - protein, 108 aa, Zea mays
  unsure (1)..(108): unsure at all Xaa locations
  Clone ID: MRT4577_9525C.1.pep
MLPCSGHQRSATAASLYDLFCLTGLGFLCLSCNSCMANYRXTETPASXACDMVSYLDLMALFVCLHYYEQXSTALPXRARVKAGVXSLTTLLTIMFRYQVAENMPLPV

SEQ ID NO: 364134 - protein, 214 aa, Zea mays
  Clone ID: MRT4577_95260C.1.pep
MAPMKLYGAVMSWNVTRCATALEEAGSDYEIVPINFATAEHKSPEHLVRNPFGQVPALQDGDLYLFESRAICKYAARKNKPELLREGNLEEAAMVDVWIEVEANQYTAALNPILFQVLISPMLGGTTDQKVVDENLEKLKKVLEVYEARLTKCKYLAGDFLSLADLNHVSVTLCLFATPYASVLDAYPHVKAWWSGLMERPSVQKVAALMKPSA

SEQ ID NO: 364135 - protein, 41 aa, Zea mays
  Clone ID: MRT4577_95261C.1.pep
NSPRSLMSATRSPMSRVRPFSLQLLRYIACRNELSQSSALQ

SEQ ID NO: 364136 - protein, 167 aa, Zea mays
  unsure (1)..(167): unsure at all Xaa locations
  Clone ID: MRT4577_95262C.1.pep
MAPMKLYGAVMSWNVTRCATALEEAGSDYEIVPINFATAEHKSPEHLVRNPFGQVPALQDGDLYLFESRAICKYAARKNKPEXVVDENLEKLKKVLEVYEARLTKCKYLAGDFLSLADLNHVSVTLCLFATPYASVLDAYPHVKAWWSGLMERPSVQKVAALMKPSA

SEQ ID NO: 364137 - protein, 86 aa, Zea mays
  Clone ID: MRT4577_95263C.1.pep
SVRGPCGERDGRIWMWHRCLKCKPKDGVPPATRRIIMSDAVWWLSLGKFLELSFSNHASANRVSSCGHSLQRDCLRFYGYGHMVAF

SEQ ID NO: 364138 - protein, 119 aa, Zea mays
  unsure (1)..(119): unsure at all Xaa locations
  Clone ID: MRT4577_95264C.1.pep
MDPLKLYGAVMSXNVTRCSTALDEAGSDYEIVPINFDTGEHNILEHLVLNPFGQVPALHDGDLYLFESRALCYYAARKIKPELLTEGNLDEAAMVDVLIEVQAIQYTVALNPILLQVLI

SEQ ID NO: 364139 - protein, 33 aa, Zea mays
  Clone ID: MRT4577_95265C.1.pep
RKKFKCKTNVLGTLLNVFLKKPFSNVEVLAILI

SEQ ID NO: 364140 - protein, 215 aa, Zea mays
  unsure (1)..(215): unsure at all Xaa locations
  Clone ID: MRT4577_95266C.1.pep
MAPMKLYGAVMSWNVTRCATALEEAGSDYEIVPINFATAEHKSPEHLARNPFGQVPALQDGDLYLFESRAICKYAARKNKPELLRVGNLEESAMVDVWMEVEANXQYTSVLNPILFQVLISPMLGGTTDQKVVDENLEKLKKVLEVYEARLTKCKYLAGDFLSLADLYHVSATLCLFATPYASVFDAYPHVKAWWSSLMERPSVQKVAAMMKPSA

SEQ ID NO: 364141 - protein, 171 aa, Zea mays
  unsure (1)..(171): unsure at all Xaa locations
  Clone ID: MRT4577_95267C.1.pep
MAPMKLYGAVMSWNVTRCATALEAAGSDYEIVPINFATAEHKSPEHLVRNPFGQVPALQDGDLYLFESRAICKXLISPMLGGSTDQKVVDENLEKLKKVLEVYEARLTKCKYLAGDFLSLADLNHVSVTLCLFATPYASVLDAYPHVKAWWSGLMERPSVQKVAALMKPSA

SEQ ID NO: 364142 - protein, 175 aa, Zea mays
  unsure (1)..(175): unsure at all Xaa locations
  Clone ID: MRT4577_95268C.1.pep
MKLYGAVMSWYVTRCATALEEAGSDYEIVPINFATFVHNSPXHLVRNPFGQVPALQDGDLYLFXSRAICKYAALKNKPELLREGNLEEAAMVDVWIEVEANQYIVALNTILLHVLMNPXMLGGTTDQKVVDXNLENLKIVLDVYXARLTKCKYLAGDFLRLLDLNHVYDTLCLFA

SEQ ID NO: 364143 - protein, 99 aa, Zea mays
  Clone ID: MRT4577_95269C.1.pep
AVVTTQSTQVLVRVLFYRIIRYLPWDGPTPWSDALQLFSCFVSSCFVHRVNFILDSCMLLYIFNESFNIFLDVLIISITTLSLSKFTFHHLNYKKNTNK

SEQ ID NO: 364144 - protein, 87 aa, Zea mays
  Clone ID: MRT4577_9526C.1.pep
LKKKRSFINFKAVLKIMKNPNLPFPKLPVFPKLAPLFLRDFAYDNVSNNRYPIFAPPKTKPSKKLYHLGPLRSQNLVKTIQCHQWQK

SEQ ID NO: 364145 - protein, 80 aa, Zea mays
  Clone ID: MRT4577_95270C.1.pep
MAPMKLYGAVLSWNVTRCATALEEAGSDYEIVPINFATAEHKSPEHLVRNPFGQVPALQDGDLYLFGMILCLGILFFAWK

SEQ ID NO: 364146 - protein, 55 aa, Zea mays
  Clone ID: MRT4577_95271C.1.pep
SSKKKKKKEKKKKKKKKKKKKKKKKKKKKKKKKKKKKKNKKRDNTLKITNLHKLT

SEQ ID NO: 364147 - protein, 98 aa, Zea mays
  Clone ID: MRT4577_95272C.1.pep
GFMEDFWQPCFFFCFWGIYSRPRNVGPCPFVRGIQINFKIFLFRSVKIFVGGRIPIPPFGFFKAVFFFNFGTFIMFGPFVFPPGIGPVRGPFFHVGPI

SEQ ID NO: 364148 - protein, 118 aa, Zea mays
  Clone ID: MRT4577_95274C.1.pep
MVKAVAVLGSSDGVKGTIFFTQEGDGPHYNPASKEHGAPEDENRHAGDLGNVTAGADGVANINVTDSQIPLTGPNSIIGRAVVVHADPDDLGKGGHELSKSTGNAGGRVACGIIGLQG

SEQ ID NO: 364149 - protein, 82 aa, Zea mays
  Clone ID: MRT4577_95275C.1.pep
SARADVHAKGLSNCSSAQVPDEAKSGPRVRPRLGLKTVCKEAAGPVANACASQVKQSLMDPLVVEIAVPLRFIAHICLKRED

SEQ ID NO: 364150 - protein, 125 aa, Zea mays
  unsure (1)..(125): unsure at all Xaa locations
  Clone ID: MRT4577_95276C.1.pep
MVKAVAVLGSSEGVKGTSFFTQEGDGPTTVTGSVSGLKPGLHGFHVHALGDTTNGCMSTGPHYNPASKEHGAPEDENRHAGDLGNVTAGADGVANINVTDSXRAVVVHADPDDLGKGGHELSKST

SEQ ID NO: 364151 - protein, 152 aa, Zea mays; identical to SEQ ID NO: 233746
  Clone ID: MRT4577_95277C.1.pep

SEQ ID NO: 364152 - protein, 183 aa, Zea mays
  unsure (1)..(183): unsure at all Xaa locations
  Clone ID: MRT4577_95278C.1.pep
MVKAVAVLGSSDGVKGTIFFTQEGDGPTAVTGSVSGLKPGLHGFHVHALGDTTNGCMSTXFIFLFLWLAYVIRVCAKLISVIELSTCWXXGPHYNPASKEHGAPEDENRHAGDLGNVTAGADGVANINVTDSQIPLTGPNSIIGRAVVVHADPDDLGKGGHELSKSTGNAGGRVACGIIGLQG

SEQ ID NO: 364153 - protein, 105 aa, Zea mays
  Clone ID: MRT4577_95279C.1.pep
GRKLPLPPPDLNDARRLSRYGPHSRAQRGHALARPAVKLSSASCARWKAVEAYARRTSWQQKVTVKEDATPDDVQQTVSKNVKNTSFWEGEGVTGESATPAAATA

SEQ ID NO: 364154 - protein, 40 aa, Zea mays
  Clone ID: MRT4577_9527C.1.pep
HTSGKEYKLKPIGDAGPVMEAGGIFAYARKTGMIASKAAA

SEQ ID NO: 364155 - protein, 126 aa, Zea mays
  unsure (1)..(126): unsure at all Xaa locations
  Clone ID: MRT4577_95280C.1.pep
MVKAVAVLGSSDGVKGTIFFTQEGDGPTAVTGSVSGLNPASKEHGAPEDENRHAGDLGNVTAGADGVANINVTDSQIPLTGPNSIIGRAVVVHADPDDLGKGGHELSKSTGNAGGRVACXIIGLQG

SEQ ID NO: 364156 - protein, 152 aa, Zea mays
  Clone ID: MRT4577_95281C.1.pep
MVKAVAVLGSSEGVKGTIFFTQEGDGPTTVTGSVSGLKPGLHGFHVHALGDTTNGCMSTGPHYNPASKEHGAPEDENRHAGDLGNVTAGADGVANINVTDSQIPLTGPNSIIGRAVVVHADPDDLGKGGHELSKSPGNAGGRVACGIIGLQG

SEQ ID NO: 364157 - protein, 67 aa, Zea mays
  Clone ID: MRT4577_95282C.1.pep
IPRPTHTSSHTSVSLLLFFLYLPESPFAGYLEFQNNQIILTDSHHNTIPYLQIYTIQLPTTTFITPS

SEQ ID NO: 364158 - protein, 152 aa, Zea mays
  Clone ID: MRT4577_95283C.1.pep
MVKAVAVLGSSEGVKGTIFFTQEGDGPTTVTGSVSGLKPGLHGFHVHALGDTTNGCMSTGPHYNPASKEHGAPEDENRHAGDLGNVTAGADGVANINVTDSQIPLTGPNSIIGRAVVVHADPDDLGKGGHELSKSTGNAGGRVACGIIGLQG

SEQ ID NO: 364159 - protein, 152 aa, Zea mays; identical to SEQ ID NO: 233746
  Clone ID: MRT4577_95284C.1.pep

SEQ ID NO: 364160 - protein, 43 aa, Zea mays
  Clone ID: MRT4577_95285C.1.pep
PAHCPRMEQPRKVWSGPQDRQFPFPEALGQPGNPGPRLPSLPP

SEQ ID NO: 364161 - protein, 152 aa, Zea mays; identical to SEQ ID NO: 364158
  Clone ID: MRT4577_95286C.1.pep

SEQ ID NO: 364162 - protein, 52 aa, Zea mays
  Clone ID: MRT4577_95287C.1.pep
PNYLNRSGSWAFFFDCKNPKQWPQKPMITPKGRTPTHNDVPTASEAHTEKGR

SEQ ID NO: 364163 - protein, 64 aa, Zea mays
  Clone ID: MRT4577_95288C.1.pep
PTTETATPLGYVIEHGRRVRLSFTACYHIKGKTDSSSSYLLHPDHFASINLPWGTRPSCSSLHP

SEQ ID NO: 364164 - protein, 97 aa, Zea mays
  Clone ID: MRT4577_95289C.1.pep
HRVRSRVSTPILNPCPPRLRRKPRCSSPEHSLPEPPPPPGPRPRYRGSPPLGAYCMLKSSTLGRGEVEIRTDYGSISSLAGRYSSYHSSHYYISCHI

SEQ ID NO: 364165 - protein, 70 aa, Zea mays
  unsure (1)..(70): unsure at all Xaa locations
  Clone ID: MRT4577_9528C.1.pep
KARPNLKXGHFGEPVGDPSSVPFFAKAGLDYVSCSPFRVPIARLAAAQGALSEAASSLATGFACCLGGFG

SEQ ID NO: 364166 - protein, 118 aa, Zea mays
  Clone ID: MRT4577_95290C.1.pep
FIKKGGHQLLFFALQQETNLSALQINTYHPVWQEQPKTETPPVRSNLTTANGNHTPPKKQEVLLANQPFNLEPKGEPHLLPFFYPKNKIPRYIKSLKSGFPPEGQKKDQGAPPFYHTP

SEQ ID NO: 364167 - protein, 78 aa, Zea mays
  Clone ID: MRT4577_95291C.1.pep
MALTNFIVTVAVVGAGVLLFTTDMRRSGALFRRNARQLQQWLQEDTASAASKVYFGVRCQRFFPIIFIGMIFATSSYL

SEQ ID NO: 364168 - protein, 126 aa, Zea mays
  Clone ID: MRT4577_95292C.1.pep
LIPSYSHGCSGRCMLPGAPGPSESSRECSVVSGTGISQFPQAKSKLSINSDAADSEKLLLANKYSQASDDDFVIYYLLIMNKKMSFFPWSARRTDANGHVHRHIPAVGEHLDDVVLDADPRTAPPD

SEQ ID NO: 364169 - protein, 219 aa, Zea mays
  unsure (1)..(219): unsure at all Xaa locations
  Clone ID: MRT4577_95293C.1.pep
PWPPYSTKRLPRPQNHPTAHGLSTPHTAXSPLSKRRRAPAIRSAATDSSFSSGETPSKKTTRKEKQQERRRQQDVQERQQQLLGMEEASLAKQDGGGGSNSNSNGEVDDDDELPQPVFDRILRRIAFTVGLPMASGVALLNVYDALKRGQGVVVPSWVPLLTILVAFGTSALGIAYGTLSASWDPDKEGSLLGIDEARANWPVLWQEEIEKQKAKQKKK

SEQ ID NO: 364170 - protein, 190 aa, Zea mays
  Clone ID: MRT4577_95294C.1.pep
MAPVKLYGATLSWNVTRCVAALEEAGVEYEIVPINFGTGEHKSPDHLARNPFGQVPALQDGDLYVFESRAICKYACRKNKPELLKEGDIKESAMVDVWLEVEAHQYTAALSPILFECLIHPMLGGATDQKVIDDNLVKIKNVLAVYEAHLSKSKYLAGDFLSLADLNHVSVTLCLAATPYASLFDAYPHV

SEQ ID NO: 364171 - protein, 53 aa, Zea mays
  Clone ID: MRT4577_95295C.1.pep
ADALVLNAAASLLVSGEMKNFHDGVAFSHETQRGRENTYTPWAWIKKSNSSPN

SEQ ID NO: 364172 - protein, 62 aa, Zea mays
  Clone ID: MRT4577_95296C.1.pep
AVSVMQYLDTFTSEWFRDKDHHSMSQVNTASILISVIRLQVIMKIMYITESSRVAFNQELLV

SEQ ID NO: 364173 - protein, 72 aa, Zea mays
  unsure (1)..(72): unsure at all Xaa locations
  Clone ID: MRT4577_95297C.1.pep
PLPMFSKFGLLVRPIVTGKGPLKNLVDQIVTPVKNNAWAXATNFVPAQLSSTAMQRAFIVFWIGKGVRTWIN

SEQ ID NO: 364174 - protein, 118 aa, Zea mays
  unsure (1)..(118): unsure at all Xaa locations
  Clone ID: MRT4577_95298C.1.pep
ITNLLSAIPYIGTDLVQXLXGGYSVDSPXTLTRFFTFHFILPFIIAALAALHLLFLHETGSNNPLGITSHSDKITFHPYYTIKDALGLLLFLLSLMTLTLFSPDLLXRPQTNTXIXPX

SEQ ID NO: 364175 - protein, 225 aa, Zea mays
  unsure (1)..(225): unsure at all Xaa locations
  Clone ID: MRT4577_95299C.1.pep
MISRSTLARTAQQAARQSCRVQRRTYAAAASTGSYETSDASGLKIASRDAHGPTTKLAVVAKAGTRYQPLPGLTAGLAEFAFKNTQRRSALRITRESELLGGQLASSHSREAVVVEANFLREDLPYFTELLAEVISMTKYTTHEFHEDVERVLHHKQAALNADVAATALDNAHAIAFHSGLGSSILPSSSTPYQKYMNEEYIAXYADVAYAKSNIALVADGASAD

SEQ ID NO: 364176 - protein, 77 aa, Zea mays
  Clone ID: MRT4577_9529C.1.pep
RTRTIRCPRRCRRLCPRPIYGHRYDDPDLHRPLPTHFERDEHLRGWVAQDHDSHDLHTGRAAQHINIVCNKADIDMN

SEQ ID NO: 364177 - protein, 104 aa, Zea mays
  Clone ID: MRT4577_952C.1.pep
GWGGGFFFFFFFFFFFFFFFFFFFFFGPRPRDCNFPICKIPHKTSDFKKPGGGGTLLCIKNTGTLGPLKALRNNNNNNKSKRGKLLRAPVCNTKINRCKLGLFY

SEQ ID NO: 364178 - protein, 40 aa, Zea mays
  Clone ID: MRT4577_95300C.1.pep
RTRGGSQCKCKERKEVQKRDDVYLFQLHAIEQLKQPGVSN

SEQ ID NO: 364179 - protein, 182 aa, Zea mays
  unsure (1)..(182): unsure at all Xaa locations
  Clone ID: MRT4577_95301C.1.pep
MAAVTAAAVSLPSSSSSPAAAKAKASASASPSSPCGHLQFPRRHGGPRAVRLRVQVSTTETAEAEPVKKLEKVSKKQEEGLVTNKYKPKEPYVGRCLLNTRITGDQAPGETWHMVFSSALGDFGDSKTVSLCVKRLVYTNDQGEVVKGVCSNXLCDLKPGAEVKITGPVGKEMLMPKDPNAT

SEQ ID NO: 364180 - protein, 49 aa, Zea mays
  unsure (1)..(49): unsure at all Xaa locations
  Clone ID: MRT4577_95302C.1.pep
IGPYFFFVLLIFNFHFFFLFXIFFFFFFFFFVXKVFSNNIIRDRQNFSK

SEQ ID NO: 364181 - protein, 368 aa, Zea mays
  Clone ID: MRT4577_95303C.1.pep
MAAVTAAVVSLPSSSSSPAAAKAKASASASPSSPCGHLQFPRRHGGPRAVRLRVQVSTTETAEAEPVKKLEKVSKKQEEGLVTNKYKPKEPYVGRCLLNTRITGDQAPGETWHMVFSTEGEVPYREGQSIGVIADGEDKNGKPHKLRLYSIASSALGDFGDSKTVSLCVKRLVYTNDQGEVVKGVCSNFLCDLKPGAEVKITGPVGKEMLMPKDPNATIIMLATGTGIAPFRSFLWKMFFEEHEDYKYTGLAWLFLGVPTSDTLLYKEELEKMKEMAPDNFRLDFAVSREQTNAAGEKMYIQTRMAEYKEELWELLKKDNTYVYMCGLKGMEKGIDDIMLDLAAKDGINWLDYKKQLKKSEQWNVEVY

SEQ ID NO: 364182 - protein, 48 aa, Zea mays
  unsure (1)..(48): unsure at all Xaa locations
  Clone ID: MRT4577_95304C.1.pep
EVGGVSAGGRGRMPSASRGLNHGEWTHQEDAYGQACLKIQCXQPHFEN

SEQ ID NO: 364183 - protein, 81 aa, Zea mays
  Clone ID: MRT4577_95305C.1.pep
GRVGPLFPNPVREGESESSRSGERGRQPSLRDEGQVEEEADEAAQEEAPKDEAEIQVGRSMECPPGVLVFGCCLPNNFSFL

SEQ ID NO: 364184 - protein, 106 aa, Zea mays
  Clone ID: MRT4577_95306C.1.pep
NSARGLPPQMSLMASLSNPYIVEYKDGWVDEGTSVCIVTSYCEGGDMAERIKKARGILFSEERVCRWFTQLLLALDYLHCNRVLHRDLKCSNILLTRDNNIRLGKM

SEQ ID NO: 364185 - protein, 110 aa, Zea mays
  unsure (1)..(110): unsure at all Xaa locations
  Clone ID: MRT4577_95307C.1.pep
HFSHSHDDHHHHSHGDGGGHAAGGSWVGEDGLVWLSDVGLVRDFQEPMDSPXVLTMHAPSVASRDFFDLAFTVGIGGPVSTVKTALMLALCRFLHDKXYSLAAVTEGIFT

SEQ ID NO: 364186 - protein, 79 aa, Zea mays
  unsure (1)..(79): unsure at all Xaa locations
  Clone ID: MRT4577_95308C.1.pep
LVLGDFFGGLMTTVHAITATQKTVDGPSSKDWRGGRAASFNIIPSSTGAAKAVGXVLPVLNGKLTGMCFRVPTSYCFVG

SEQ ID NO: 364187 - protein, 82 aa, Zea mays
  Clone ID: MRT4577_95309C.1.pep
KRSLLAQGNRQGENISRKAAEPTDKQEQDKATGRRQDNQRTTRDQTTDRGAAQGNKPDPTENQGPRKKRSAHRAKPVHAPRR

SEQ ID NO: 364188 - protein, 63 aa, Zea mays
  Clone ID: MRT4577_9530C.1.pep
SHYYSLLLIEDKQADRLTTTKTDEETDHNVGCWPQPHMVHASYPVLHTNDLGRCHPHVRYWHN

SEQ ID NO: 364189 - protein, 36 aa, Zea mays
  Clone ID: MRT4577_95310C.1.pep
IQTISLLMPSDKKHIYNENWGALRLPRVSNRGCESA

SEQ ID NO: 364190 - protein, 150 aa, Zea mays
  Clone ID: MRT4577_95311C.1.pep
KKKGRLQLMCYKYLWDNLIAEKFPADNFFSHFNLDPNYLLSDDVKGYISSLGFDAKTFEDVLKYFKVTCHTLPRSQEQLLLRYELQEDRSLLEEYRFTYDARWFRDQIQDVLSFWTGSHEPKLVAEEEMWKCRFCKFVSSCPMNASMPRC

SEQ ID NO: 364191 - protein, 129 aa, Zea mays
  Clone ID: MRT4577_95312C.1.pep
MSSQPLLQTTPGKRIALPTRVEPKVFFANERTFLSWLNFTVILGALAIGMLNFGDRVAFISAFLFTGVAMCTMVYALVTYHWRAQSIRMKGQAGFDDRFGPTVLAIILLLAVVVNFVLRITDKSKNHSN

SEQ ID NO: 364192 - protein, 69 aa, Zea mays
  Clone ID: MRT4577_95313C.1.pep
QKIHIPHHHGDRSILSCYANVNVIGHTDAAVARTHDFHCAHDPVYVTKDGEQHTDPELPGAPTAAVADS

SEQ ID NO: 364193 - protein, 54 aa, Zea mays
  unsure (1)..(54): unsure at all Xaa locations
  Clone ID: MRT4577_95314C.1.pep
GTNLLHKAXVVETPPSISVLHGGVPLYISNLGSVPIMLLKPSQVPMHAASSLGR

SEQ ID NO: 364194 - protein, 100 aa, Zea mays
  Clone ID: MRT4577_95315C.1.pep
WCPILVSQVFHMIWAPHYLGLQGGPQGIIGQGRPGQEWLKKKREVRHEQVQHLNRPGHLPHVGRHPPPEGGLPLHVLSMVPPPPRQPYYPALMEQVGAEA

SEQ ID NO: 364195 - protein, 136 aa, Zea mays
  Clone ID: MRT4577_95316C.1.pep
QFFPAATAILPPCLLISTAGSLSHGAAANPMQRAPPPCGVRPPLLHMCCVGSPSPTPCGGSTTVVSLGAQLLGADPSMAVSCARAPLLPWRHNPSQPPSSPWPSISMAGAPLSLVPHGCSFRCPAPPRTAPALPLL

SEQ ID NO: 364196 - protein, 66 aa, Zea mays
  Clone ID: MRT4577_95317C.1.pep
LTILVLIFYNVFVFYLEGCGYREKHGDSLATCMLHLDMAFAAMSYTMVSWVGVGDSADLLHMHRRV

SEQ ID NO: 364197 - protein, 420 aa, Zea mays
  Clone ID: MRT4577_95318C.1.pep
MAQDMEDEEHELEVATYQHLRCRARNERRYAGSILGRVRIHRDHMSGDARIRAEYFCAQTYFTLVLKYRFIQYRFRMRRHVFERLVLAVQQVDPYFVQRPSCAGELGLSALQKVVAAVRILAYGVPADAVDEYVRIGESTAHEALKHFCTAIQTAFGGYYLRKPTPADIARLLHVGESRGFPGMLGSVDCMHWEWRNCPTAWKGMFTGRGKHPTMILEAVASYDLWIWHAYFGMPGSCNDINVLQRSNLFDSHLHGDSPPVSFSVNGHTYNMGYYLADGIYPDWPAFVKTIRHPYDVRTQHFATVQESARKDIERTFGVLQKRWAIVRGPAYGWSPQHIGDIMKTCIILHNMIVEDEGPSSMNTSFDNIGVLADTSHGSFSERNEYINNRYDQLHDPVKYNQLQVDLIHHHWARLGSGAA

SEQ ID NO: 364198 - protein, 76 aa, Zea mays
  Clone ID: MRT4577_95319C.1.pep
GPPMFCCDPDVIFYCRPRLVPLLETPKTKVVVHLRRKALSGGVALLKSVVKNFLELKGPPRLLNFNSLRKCKTAFE

SEQ ID NO: 364199 - protein, 44 aa, Zea mays
  Clone ID: MRT4577_9531C.1.pep
EFLGRPTRPRNDITVSFRIEIFYSTSITNLLVREVDYLSRTGGP

SEQ ID NO: 364200 - protein, 61 aa, Zea mays
  Clone ID: MRT4577_95320C.1.pep
GPPHIPHLLGRKGPLPGRPHEQKESAAVNYQPVSEQRVDSTFVPAKGVSLHILSVLDPVFM

SEQ ID NO: 364201 - protein, 50 aa, Zea mays
  Clone ID: MRT4577_95321C.1.pep
LSTLVSCPVSVSRAAAPRWVALPLSCFGLLHCPPVHGELSIFISCVLAVR

SEQ ID NO: 364202 - protein, 70 aa, Zea mays
  Clone ID: MRT4577_95322C.1.pep
TEFSPEAKIMIWQQALSQVASCTDHSGSKPHPTIYPFCLAALTQSAMTQESQEHRIDLQDLLGSQQTQSP

SEQ ID NO: 364203 - protein, 80 aa, Zea mays
  Clone ID: MRT4577_95323C.1.pep
RDFAAGRCRTTTLHTERTAGTCHVWIQRFYRRHSPFTYNTHIICRVPTNNRNLDTRMYQKKVYCILLWYCVNYWCSKTSL

SEQ ID NO: 364204 - protein, 110 aa, Zea mays
  Clone ID: MRT4577_95324C.1.pep
YKELYHASVCYLRRRIVLLSRVRTSSVHGVSTSSIPLSTVRAIVNSESAIVFARRTCHRTVESTWNAEIRLGFRCAYANYHHLCSILTTLAVFLVLDLIWQRRKEAGGGV

SEQ ID NO: 364205 - protein, 62 aa, Zea mays
  Clone ID: MRT4577_95325C.1.pep
KVSATMLQGHGFCVVGVFFHPPRVSPSPIFCCMLGAFSFANASVYLRCWMFRFHGKPFCLFG

SEQ ID NO: 364206 - protein, 41 aa, Zea mays
  Clone ID: MRT4577_95326C.1.pep
HGCLVRVLIRSAGRLLCSPLQCSYACIKHPHVAPMTNRRIL

SEQ ID NO: 364207 - protein, 509 aa, Zea mays
  Clone ID: MRT4577_95327C.1.pep
AREVRGLRCGGGGLASAMASGGSSRYSSYKAPGLRGALLEAAHVSCLEDRYALGPQLGWGQFGVIRSCSDLVTGEALACKSIAKGRLVSPDDVRGVRLEIDVMARLAGHPNVVGLKAVYEDRDSVHLVMELCAGGELFHRLHERGCFPEREAAALFRHLMEVVAHCHAKGIVHRDLKPENILLVSRSPQSPIKLADFGLATYTQPGRSLSGMVGSPFYIAPEVLSGGYNEAADVWSAGVILYILLSGIPPFWGKTKSKIFDCIRSMELRFPSDPWDRVSDSAKELVTGMLRRDPRLRLTAKQVLEHPWMQEHADPQDSCGQCHETGLQREGAGSCSFSTPLASRSRDVSFDTRGPIAWRGGGEDEATCCSPTFAAVCRSSFSAFITDPAPPPCSASSALGGSGFSFGEPCEPLDGGGGGGFPMPMASMPSFSFFCARDSSEPAEPQPVAASSTPRTARGSTPRGVNGRRNHTIGGGGREHLDVAVESVIRWASCTNFSTAPSLRASLVC

SEQ ID NO: 364208 - protein, 49 aa, Zea mays
  Clone ID: MRT4577_95328C.1.pep
KEALLLLRPSKCRVKTTGATLCLFTAYAKIKLTKLFFPLLNDTSNPKLT

SEQ ID NO: 364209 - protein, 99 aa, Zea mays
  Clone ID: MRT4577_95329C.1.pep
KFFPWSGLFFRKNCFKITGSASLGRTIGGADASVPPKKGSPRWVVKVASNQKKDAPQKNHFPLSRFYPCGLGPTLLFSFYLELGPLDWAPLIFFPSGGG

SEQ ID NO: 364210 - protein, 121 aa, Zea mays
  unsure (1)..(121): unsure at all Xaa locations
  Clone ID: MRT4577_9532C.1.pep
RPSQPPPQTNLPPPPSHPPSASVLLPPQHHQGDGXPPXPGGNYSGGPVVVANGAGFGGGDVSGGTTLFVGDLHWWTTDADLEAELSKYGTVKEVRFFDEKASGKSKGFCQVDFYDPGAAAS

SEQ ID NO: 364211 - protein, 68 aa, Zea mays
  Clone ID: MRT4577_95330C.1.pep
PRVRPRVRASSTPRTARGSTPRGVNGRRNHTIGGGGREHLDVAVESVIRWASCTNFSTAPSLRASLVC

SEQ ID NO: 364212 - protein, 52 aa, Zea mays
  Clone ID: MRT4577_95331C.1.pep
RFCLRSKWRCHFFSRLKSNQIPVNWDYDTYLVSSDLTFFSSKKNETFTSILV

SEQ ID NO: 364213 - protein, 87 aa, Zea mays
  Clone ID: MRT4577_95332C.1.pep
AVVALPCPSKAIMVASRQSGAGLGDIWGRRRPLQGLLHPPACPPALVSLGGSSHHRKGPRRGRCLQVCTWHVACGLCPMTQPCAPCL

SEQ ID NO: 364214 - protein, 172 aa, Zea mays
  unsure (1)..(172): unsure at all Xaa locations
  Clone ID: MRT4577_95333C.1.pep
MDMATVPRDLFCWIARKNNSLLANQLGNGNAXKVLLTQEPNNLYNVHSYTXSGLTDKKTVTIXPDAEKDYPEALFTTKTKKXNTPGKLTHXSVMHKEFHMMAKAEKNHLVDNYYRPDLTKTALGRLSYVYHSLQNTKSGVKKKEQAAYALSLGFDIGAHMLRSYLCNVFNSF

SEQ ID NO: 364215 - protein, 136 aa, Zea mays
  Clone ID: MRT4577_95334C.1.pep
GRFFFFFFASKETLLRLDEDCCYNSKAEHTSSGFYYGRNCTLPFPQLSAASFSIQVSAFPTALRQELHLAGSLNFQQQVSAYTAPTFQPAIQAATMRGEVAATTSREELDEARCREVSLGAERSLTRRWQGDLCGG

SEQ ID NO: 364216 - protein, 111 aa, Zea mays
  unsure (1)..(111): unsure at all Xaa locations
  Clone ID: MRT4577_95335C.1.pep
AHAQGLVYPAARLWRKPRHGGYDDKAHPSIDATKYSEGERDCSPNHTRSCESGAQHSLACCSQPADGAETSGTIDISGEQFYAXRRVIPAKNNLDVDRFDSWSGTGLTHIQ

SEQ ID NO: 364217 - protein, 75 aa, Zea mays
  unsure (1)..(75): unsure at all Xaa locations
  Clone ID: MRT4577_95336C.1.pep
METIHKVKNILLLDSKGKLVKTKYYTNTSPTIXTKPGLPKLSFVXTHNTNARTDEIGITDGPILXYKVMQDLNFF

SEQ ID NO: 364218 - protein, 48 aa, Zea mays
  Clone ID: MRT4577_95337C.1.pep
MTAQAAEELAAQIEQQKLEEQKTEAKKVVVEEDDEDYEDYDYYDKDYD

SEQ ID NO: 364219 - protein, 240 aa, Zea mays
  unsure (1)..(240): unsure at all Xaa locations
  Clone ID: MRT4577_95338C.1.pep
MKNSGGGAAHGDGGDIYNVRAAEILANEALLLPINEAAPIYENLLATFPTAAKYWKQYVEAYMATNNDEAAKQIFSRCLLNCLHISLWRCYINFIRRINDKRGSEGLDETKKAFDFMLDYVGNDAASGPVWMEYINFLXSMXVVTPHEESHRMTTVRKVYQKAILVPTNHVEQLWKDYENFENSVSRTLAKGLLSEYQPKFNSAKAVYRERKMYIDDIDWNVLSTSSTGLFKVCASSVLV

SEQ ID NO: 364220 - protein, 125 aa, Zea mays
  Clone ID: MRT4577_95339C.1.pep
KDVNPPVAPLKTKGPPPFLDWCPPGFKWGIKYQAPTVVPGAPLPKVQGAVGIFSPSPRVVGVFFPLNTKFALFFPKGGFLPWFVGEGMEKGEFSQAPEDLAPLEKDSKEVPPKGGSFSGSEGGEN

SEQ ID NO: 364221 - protein, 101 aa, Zea mays
  unsure (1)..(101): unsure at all Xaa locations
  Clone ID: MRT4577_9533C.1.pep
HASVECTLIDRYEAPPLAQSVYPQLADLYDIFXDIPSAXTAMTPVFKTVRQAYKGDPIRNNQXAEVYGCRTGLQGPTMGLYSASRPTIDTGNKHGSNDRDH

SEQ ID NO: 364222 - protein, 53 aa, Zea mays
  Clone ID: MRT4577_95340C.1.pep
KKERRVPWYIINWDFSPLTSESECINGTKLIHPSFCRNRLKQLGSIYAFTFNK

SEQ ID NO: 364223 - protein, 61 aa, Zea mays
  Clone ID: MRT4577_95341C.1.pep
PRCLSTANRRRRTPLPRGNTPLPLQCRGSQSQLRSTIPPLSTEFDHQRTPKLKERQASVSY

SEQ ID NO: 364224 - protein, 61 aa, Zea mays
  Clone ID: MRT4577_95342C.1.pep
QRTCRTLHRGHPCFAEDMTLDCLKDMTTPFTSWGLHSQAADNWFSWDDCGKKYYKTSSRGT

SEQ ID NO: 364225 - protein, 100 aa, Zea mays
  Clone ID: MRT4577_95343C.1.pep
MASPPSPPAAAAAPAAAASGPPPPAQVVGNAFVHQYYNGTVGGDTVTVPQDASPQPECQVAEPALNPKEEVLNREVVCNPPNDVNPIVEETPVPEVINEV

SEQ ID NO: 364226 - protein, 141 aa, Zea mays
  Clone ID: MRT4577_95344C.1.pep
QKKELKLSIQWQRARAPATCSPAAAEILHAASTYGKFEDKPAGQYIEKAEGYLKEFSAGGHAAEPAAAGDAAPPKPAEEAPKEKEPVPAPAPKEEGGKSSSEGFGLGDVVKGAEQLVEKHGGAGEESAAGGLFKMAQGLLK

SEQ ID NO: 364227 - protein, 222 aa, Zea mays
  Clone ID: MRT4577_95345C.1.pep
MASPPPPPAAAAAPAAAASGPPPPAQVVGNAFVHQYYNILHQSPELVYRFYQESSRLGRPSGTGDDGMETVTSMDAINDKIVSMGIDRAEIKAVDAQESLCGGVTVLVMGHLTGRNSVSREFVQSFFLAPQEKGYFVLNDILRYVGEEGGDEGGEQQPATEVAADVVAADVEAATPASILANGTVGGDTVTVPQDASPQPECQVAEPALNPKEEVLNRGGGL

SEQ ID NO: 364228 - protein, 92 aa, Zea mays
  unsure (1)..(92): unsure at all Xaa locations
  Clone ID: MRT4577_95346C.1.pep
GFSPAXWLXAGCXLLLLLLLRCXGPPPSLCXXLLLXVCXLVAVCRLPPALVVACGLVVLCVRFAPXXLVACSFAPXPGCVARXRGXXLGXPG

SEQ ID NO: 364229 - protein, 488 aa, Zea mays
  Clone ID: MRT4577_95347C.1.pep
MASQPPPPAAAAASGAPPPAQVVGNAFVHQYYNILHQSPELVYRFYQEASCLGRPAGTGADGMDTVTTMDAINDKIVSMGIDRAEIKAVDAQESLCGGVSVLVMGHLTGRNSVSRQFVQSFFLAPQEKGYFVLNDILRYVGEGGGDEGAEKQPAPEVAADAETTTSAPILANGTVGGDATTVPQDASPQPECQVAEPALNPKEEVLNGEVCNSLSDVEKPVAEETPVPDVINEVPNNVAVAPPISSPPVPLKEAPKKSYASIVKVMKEHRPLAPAVPSRPAPPITEKQASPAPTPVTEAPAFSPNPQSGGFQDPEVDAHAIYVRSLPLNATPQQLEEEFKRFGTIKHEGIQVRSNKIQGFCYGFVEFEDASAVQAAIEASPVTIGERQCFVEEKRTTGSRGGGSRGGRFPPGRGGNFRGEGIRGRGTYNGGRGYGRGEFSYRSDYGGRGGGRGGSLHGGDVGYQRVDHSSTASGRGARAPSAATAVAK

SEQ ID NO: 364230 - protein, 100 aa, Zea mays
  Clone ID: MRT4577_95348C.1.pep
SPCLFSSTSVNVCPSTIDELYQQCMLQTYGWCSPHCISCSIATVFPIECLVPKYTQLSSIHKKYSFLLHAMSSSRDSSDSGHFFFWRKCTSWTAREHLAP

SEQ ID NO: 364231 - protein, 77 aa, Zea mays
  Clone ID: MRT4577_95349C.1.pep
DATRPPTLTHTLPHLHGLGLHLGQDTESHAITLSINHYQQCSYDFQHQGLCPRPPRSSYTPTTMNICLSFTVSPTYT

SEQ ID NO: 364232 - protein, 186 aa, Zea mays
  Clone ID: MRT4577_9534C.1.pep
MGFISGVVMGLVVGVVIMAGWSRVMQRRSRKRVAKAADIKVLGSLGREDLKKLCGDNFPEWISFPQYEQVKWLNKHLSKLWPFVSQAATAVVKESVEPLLDDYRPPGIKSLKFNKFSLGNVSPKIEGIRIQNLQPGQIIMDIDFRWGGDPSIILAVDARVASPPIQLKDLQVFTVGRVVFQLSEEI

SEQ ID NO: 364233 - protein, 205 aa, Zea mays
  Clone ID: MRT4577_95350C.1.pep
TSKATNSLRNYYKVGRLKPEKAIPDTILRHAKGLAIDTVVKVEMMVTYKLGTGLVIARRVDGSWSPPSAISTCGIGYGAQAGGEIADFIIVLRNTDAIRTFSGKAHLSVGAGVSASAGHVGRAAEADFRAGDGGYAACYTYSCSKGAFVGCALNGGIVSTRDTENARFYGGPVQASDILLGSMARPPAASPLYKALSELFDKIGK

SEQ ID NO: 364234 - protein, 100 aa, Zea mays
  Clone ID: MRT4577_95351C.1.pep
PRKKTPKFWENPFPLVFRPLIKKNFGGGGQKTGKKGPPLFLFLKPPTPSFGRDKKKNPLKAPPPLLKKKGGNLSFNPPPPPDYNRGGTGPTPQMFDPWKT

SEQ ID NO: 364235 - protein, 50 aa, Zea mays
  Clone ID: MRT4577_95352C.1.pep
MLDTVRTDVDTCDQGFEEREELTPLMAKQDAELAKLSSNCLAIATAAGLR

SEQ ID NO: 364236 - protein, 118 aa, Zea mays
  Clone ID: MRT4577_95353C.1.pep
FCFVHRIRQEHLVSDPGTLIPSDVSVLSTELDRNFVSDNQHFGQDDNTNLLGSSLSGVSSSAYGSFEYELLDRRSTSSNVGPSDTDGPTTNLTSNQQNMSSNSFDKLSVSTFTSENRP

SEQ ID NO: 364237 - protein, 121 aa, Zea mays
  Clone ID: MRT4577_95354C.1.pep
MASFSAASLAACGSSSSALLPQIRAELNYRAHQCLCRWAPRAGSSSSRNPRGVNNLRAADSARGPSPWLAELRTEPREKLCSGVPSGDGSDESPPRSLGHLACVSVGRKENLVSHWIRDGG

SEQ ID NO: 364238 - protein, 127 aa, Zea mays
  unsure (1)..(127): unsure at all Xaa locations
  Clone ID: MRT4577_95355C.1.pep
MEPASNPKADPLIDAEMTMXILDIIQEGANYNEIKKGASEPTNTLNMGXISEIVEMVADTEPLEILLHLPLLSEDKNVPXVFGPSKQALGRASGVTRPDIACSKTSNEGKQLKQQIQGLKDSIDKLL

SEQ ID NO: 364239 - protein, 57 aa, Zea mays
  unsure (1)..(57): unsure at all Xaa locations
  Clone ID: MRT4577_95356C.1.pep
MAATSSGVIYKVXDPSGWAILGXVXYADWASRKNFRVGDTLQFMYRGGVRSVRGGGE

SEQ ID NO: 364240 - protein, 76 aa, Zea mays
  Clone ID: MRT4577_95357C.1.pep
MQRVRHGCYGEAQHQHKQGAMMTVLKVVTAGTLSGLTLVLPGLMLVSTVIVLTVVTPVLVIFRPVLVPGVIVLALM

SEQ ID NO: 364241 - protein, 110 aa, Zea mays
  Clone ID: MRT4577_95358C.1.pep
VQQARFTCPSIISSTGPAFRETISSTGWGFFFCSKTSCPDVVVLSVDDSKKVILKYYPYADIVVLPFCFLVTADYLPYLVRIFFYILVQTPYISLLYIIYPLFSFLCPKL

SEQ ID NO: 364242 - protein, 72 aa, Zea mays
  Clone ID: MRT4577_95359C.1.pep
QWVSEEALQPQTKVVNWLHYWSTWFIGLVGWNKNDTLGWPNWWAFLHFKIFKGGCEKCLLLWWINGGARRCT

SEQ ID NO: 364243 - protein, 119 aa, Zea mays
  Clone ID: MRT4577_9535C.1.pep
PAHPLSSRICCSLSSEARSQLPFGDSVLAPPGSPSLSGLLEVVEAGHSAFPLSLYIEVSPRCAEPECRFPSSVMYADALRRMFLTTFHMGVLDGASLSLSFAHVCHPSYSTSRSVGSDR

SEQ ID NO: 364244 - protein, 135 aa, Zea mays
  Clone ID: MRT4577_95360C.1.pep
TSPCSKVTRARCRRRWRRSRRRLARTSTRPAALGAIGNQNQRKSQLAQWAAAAAAAAAASCGVPRPQGRTVRWISKVLLMDAVVTSSRRRTLAPSASASGLLTGSQESLLVVVRSRCYLLSTFRVLRRRGRTEYG

SEQ ID NO: 364245 - protein, 207 aa, Zea mays
  unsure (1)..(207): unsure at all Xaa locations
  Clone ID: MRT4577_95361C.1.pep
MAATFALLLLLILSSSVRAAPDAVVSRIAFGSCANQSEPQPIWNAVAGFDPQVFVWLGDNVYGDNKRPFRVFGRERTVGPWKNVPRFYPSTEEELRRRYQLARAQPGYARLRERAXGKELSGKVIAQRLLLDFLDEPEDSKRRKQAGVYASYMFGPEGKRVKVILLDTRYHRDPLLSDGTILGDPQWQWLERELHGPQSEITIIGSS

SEQ ID NO: 364246 - protein, 111 aa, Zea mays
  unsure (1)..(111): unsure at all Xaa locations
  Clone ID: MRT4577_95362C.1.pep
MGIGLGCSQDGKVFGQLSQGIRYRPQNLFGRPDVERCPFLRNIDGVTTGSLFWARRVGAQGGEGPIFXEGSGFESAFELFHGPHGIVPPSTSSYVSPRSPNEHGRRFIYLG

SEQ ID NO: 364247 - protein, 49 aa, Zea mays
  Clone ID: MRT4577_95363C.1.pep
QKRKGLLCAHTQKKRIYNQCTEARIPKLVGDLEKALKYQQHLLPLGQTG

SEQ ID NO: 364248 - protein, 446 aa, Zea mays
  Clone ID: MRT4577_95364C.1.pep
MAATFALLLLLILSSSVRAAPDAVVSRIAFGSCANQSEPQPIWNAVAGFDPQVFVWLGDNVYGDNKRPFRVFGRERTVGPWKNVPRFYPSTEEELRRRYQLARAQPGYARLRERAQVLGTWDDHDYGLNDAGKELSGKVIAQRLMLDFLDEPEDSKRRKQAGVYASYMFGPEGKRVKVILLDTRYHRDPLLSDGTILGDPQWQWLERELHGPQSEITIIGSSIQVVSNLSATTGPLFYVESWARFPRERERLFRLIDSSKRPGVLFISGDVHFGEITRFDCGAEYPSYDVTSSGLTQSVENSVPEVFQPLMRLLAILTPTTMRVLSPNCQYKSCTIGQPNFGAIEIDWNAVPPRIKLELRDVEGHSVHSVEFPISELQPSEAHAIKRQTHTFQRHCTLETELPWLTRYRLALMLFVIIAVFAVVVVMLAIACLSNFTKSSKKSKKE

SEQ ID NO: 364249 - protein, 131 aa, Zea mays
  unsure (1)..(131): unsure at all Xaa locations
  Clone ID: MRT4577_95365C.1.pep
RLGLRPXRXAXXXXGRXVRAAGAXRRRGXAARTLXRRRRRGFGLIVASARKARLPWGRLLLRRRRRASSFPGASSSSSSRFSGEVGEAPPLTASASGMGRSDRRSASGLWLGFGWEGEAGCREAEAILVPN

SEQ ID NO: 364250 - protein, 91 aa, Zea mays
  unsure (1)..(91): unsure at all Xaa locations
  Clone ID: MRT4577_95366C.1.pep
SPNAXSRGPEXAQSARKPPIACPVEGKAGPQCVLSYMPACMSLQACCGTRKKHGAINFFFCNHRVIELHKKAVDVLHCLFSVYQISSPNSF

SEQ ID NO: 364251 - protein, 89 aa, Zea mays
  Clone ID: MRT4577_95367C.1.pep
EPLSQTPLKNDLSDIGEAQPSLHKRSNWIPSYVLAETNAYPTQPLNRGAHTQEHIEQARSPRYLHITPINLLRILFLDPTREWRMPPGM

SEQ ID NO: 364252 - protein, 70 aa, Zea mays
  Clone ID: MRT4577_95368C.1.pep
FFASDLVTLPDVLSIFCSCIHSLVDKAPLPYLLKDVNAMRSRERFVSSCLETCTLFLLLPKMQNHQIFVN

SEQ ID NO: 364253 - protein, 77 aa, Zea mays
  Clone ID: MRT4577_95369C.1.pep
GHKCSLTTDNWDDSNTNSLEGFTTCAPIEDLYRPLHLGQSCRAYPMTCECPHQHFVCEVTASSMLSIPKLTWRLLHW

SEQ ID NO: 364254 - protein, 96 aa, Zea mays
  Clone ID: MRT4577_9536C.1.pep
MAYLSRTAAAVAVAVRSAVRSAPLTGRVLGAPLPSLASPSAARSARILRRTAAAASAGLETLMPLHSAVAAARLRSCIAVDSSCWSSLSQGYALPL

SEQ ID NO: 364255 - protein, 102 aa, Zea mays
  Clone ID: MRT4577_95370C.1.pep
GWRFCNQGPNRGVDLKQNRSIILMKQKKERVLYTQGKNRARGFNEKPRKTHPISQGGAPWTNTGAPEGASEIKTRGTKIFAWKSKPRPLTKKEGGSKQTFSL

SEQ ID NO: 364256 - protein, 140 aa, Zea mays
  unsure (1)..(140): unsure at all Xaa locations
  Clone ID: MRT4577_95371C.1.pep
DQTRSNNPSATGRQLALPCLLALAASASSTHTNGXAARQPPSPAKVPATEHPPTQGDLAHEAHQPPTVQLSASTHQPPSAQVPQPSXVQPSPQQYPTQPPRPQPQPTTHPCPGQQPVMQYLHQQQGTSCNQLNGMHPHIY

SEQ ID NO: 364257 - protein, 125 aa, Zea mays
  Clone ID: MRT4577_95372C.1.pep
NTRAAPVRQLGIRLEVNLMIWHCTIRGKQGTDWEGGYFPLTLHFSEDYPSKPPKCKFPQGFFHPNGWRPAITVKQILVGIQDLLDQPNPADPAQTDGYHLFIQDPTEYKRRVKLQAKQYPALLVS

SEQ ID NO: 364258 - protein, 83 aa, Zea mays
  Clone ID: MRT4577_95373C.1.pep
GKPGETSLPHFLEKTFFRPSPFKGGEQFNPKGQKQSPLFFTKGNRLQFKLKATNGKGAPKKIKRAPNQGIKNFWGTPLIVFPG

SEQ ID NO: 364259 - protein, 96 aa, Zea mays
  Clone ID: MRT4577_95374C.1.pep
KFPGIPSCFCPQYPIIKKREVLFVHKTTGLTPHNIYATYYPPQEQGHLTTIQTFNLPFPTGGARFSPNSLVGPRGIPVEQVDGARAPWRELWGSLG

SEQ ID NO: 364260 - protein, 163 aa, Zea mays
  unsure (1)..(163): unsure at all Xaa locations
  Clone ID: MRT4577_95375C.1.pep
MSGGIARGRLAEERKAWRKNHPHGFVAKPESLPDGTVNLMIWHCTIPGKQGTDWEGGYFPLTLHFSEDYPSKPPKCKFPQGFFXHPNVYPSGPVCLSILNEDSGWRPAITVKQILVGIQDLLDQPNPADPAQTDGYHLFIQDPTEYKRRVKLQAKQYPALLVS

SEQ ID NO: 364261 - protein, 160 aa, Zea mays
  Clone ID: MRT4577_95376C.1.pep
MSGGIARGRLAEERKAWRKNHPHGFVAKPESLPDGTVNLMIWQCTIPGKQGTDWEGGYFPLTLHFSEDYPSKPPKCKFPQGFFHPNVYPSGTVCLSILNEDSGWRPAITVKQILVGIQDLLDQPNPADPAQTDGYHLFIQDPTEYKRRVRLQAKQYPALV

SEQ ID NO: 364262 - protein, 136 aa, Zea mays
  Clone ID: MRT4577_95377C.1.pep
SLRAISLLGNPVQANTGEDTLRKAVSGLLPRIDYLNKQGVNPQRAREVAKDSVAQAALGNNAGGNSRRRLAPRLSQSPGLSSGKGRGRGGREGNGTRRGSRSRFMARPQSSSYQGDAAKHDNGVGLEKGKKTTPCV

SEQ ID NO: 364263 - protein, 894 aa, Zea mays
  Clone ID: MRT4577_95378C.1.pep
MVRNKARVEGCIAEAFAAREITLFSSKYFSHTNNVNAQTTRYHVVEQAPITDLSAFKWDGKGVGAYTSHLVGTIERNKTLLFLYVNMPELHPYFQIFDSIYKPNKQLTQKQLDDLRLKGLHGGPSFVQWFHEHCKKPEASVSKDLQQISHGQLTARKFDRYGINGYRFRTAKLEVSHPLAATTNSGVVASSYSDDGQLEDYYGIVQDITEYTFGGHKPLRLVTFDCIWFDPHVGTRVDEFGMVEVKHASRYKGNEYNNIILAHQAHQVYYLSYPHKSFKTWWVAYKVNPEVHPYRYQNYNLSTNDDDDDDVFQEVGDQADDSDNDSIMFRMDSSGRRSRQRRSRGSSGTPNMFEAAMDEEAEEAAAELEDGEETSGADASTKEAATQAAPWRAIRFRRSLTLKPSKPFDQRRVIEPKGTRAWKEVSWDGTGHRTPVLTELGICLRFAYPAMVTEGGQEIAAHYWAHWDLKPYGNDGTYTSKVWDLFWGQFRVCDPYTLDDPYVREVFNGSADRAVKGMMYKARLRAVTVYQKRQGNYCDANMAKEIHLTAQQYKESEVDWLSHHSDAWAWMCKYWASEEFLSISNRNRMNRLSKPGVHFFGADGHVGKAARMEARNGVEPTLLQVFVEGHKGPDPNHPEILNDSNATEKLARYIENVRDKNGPDADWLTGEFDTEAAYKAGGGVPHGRLAIGHGVVPRRSYSRRSNFSAGSNRPRRSSAREGELLEKMTQMEESMAQYKQQVQQQMQQMQNWMLHQMYGGAGTQFGMPPFQQPPIITHPVSGQSSDRSTAAADGSQGSATSVQDQLMASGVIGGQMMSWAPRQPGIWPPMQTQMPPPMPWGFPPRGQSQSPGLPSHSLGSGSGSHHASPPLDQSTFMDLLMNPSGGGSNDPPTE

SEQ ID NO: 364264 - protein, 54 aa, Zea mays
  unsure (1)..(54): unsure at all Xaa locations
  Clone ID: MRT4577_95379C.1.pep
FIFFFFLRRLLTFFANXTHFFNISIKSLYMITSLHLPIYQQNYIFIHINPSHFS

SEQ ID NO: 364265 - protein, 93 aa, Zea mays
  Clone ID: MRT4577_9537C.1.pep
CAKIFSHQPSVRAQRRTRLTAPTTLRMTSSKTERLLNTQVMDKKVTLWQDALDIIVGVFDGLTAPFPARRSPCVVLTRRTSTMWTLSSCLWCC

SEQ ID NO: 364266 - protein, 135 aa, Zea mays
  unsure (1)..(135): unsure at all Xaa locations
  Clone ID: MRT4577_95380C.1.pep
RFEFIPVTAPLEAEYNLERAQKPVNALFTSTNQLGLTTDVTDYHIHQVSTLDAYLSDEFCLDERLTIAXKVKHPKRISDHRHLLQHPNXTGIDSQSQRGCGVSTRITIQGVDYVFKDNYVTLSGTYDQCYPTYRI

SEQ ID NO: 364267 - protein, 159 aa, Zea mays
  unsure (1)..(159): unsure at all Xaa locations
  Clone ID: MRT4577_95381C.1.pep
XPPASFRCRAFSRVLGRGEXWGRRQGVLXXLRAEAVXXGRTVRVTXAXHXGARAHGXFHXNXXIXXXXXXXAVGXXXAVNACFCGKDXXKXSRPTXVFRXATVXATIXXNWLSXXGVXAXXPPKILTXXKSSSERGVGKSQSLAKKRTLCAQRTDXNIR

SEQ ID NO: 364268 - protein, 79 aa, Zea mays
  Clone ID: MRT4577_95382C.1.pep
SQGVLPPALRTADSPELREGSRRRDGALDMGHLRCLLTQRHAAQQVSHHFLHWRQCVSVHQRRITLASGAIVRVSRREQ

SEQ ID NO: 364269 - protein, 96 aa, Zea mays
  Clone ID: MRT4577_95383C.1.pep
VRRSSRPLHLGLEFRPRTAHPAVDDHREQIMICFRASRNRRSSVGDQVIKLSEFYEVEDPEHLFGEGCLWCNLCSGKEEGVEADLQEFQDFDEFKD

SEQ ID NO: 364270 - protein, 208 aa, Zea mays
  Clone ID: MRT4577_95384C.1.pep
MAKVNAGAALLSLCLLLAYSAGQSAAAYVDVEGTVRKEVENAIKGNPGIGAALVRLVFHDCWVNGCDGSVLLDKTPSGGNTEKKAINNIGLDGFNLIDTIKYKLGNSVSCADIVVFAARDAARYLSGGKIAYSVPSGRKDGIVSSDATADAILPQSTFEFQQLKDNFANKGFTQEELVILSGAHSIGVSHLSSFQDRLNDSTATPIDD

SEQ ID NO: 364271 - protein, 112 aa, Zea mays
  Clone ID: MRT4577_95385C.1.pep
MDLVSWGVAISAFVKHGLGQEALSLFNSCRVDCPEKPDEFILGTILNACANAALIRQCRCIHSLVVRTGHSKHLCVSSALVDAYAKCGDITAAKGAFATGSTKDAIVYNTML

SEQ ID NO: 364272 - protein, 155 aa, Zea mays
  Clone ID: MRT4577_95386C.1.pep
MMHMTFYWGKSATILFDGWRTSTWPDYLLSLAALLLAAAFYQYLEALRVRVKLVAGGGAKPAPSSIIPPPAGSDPRTPLLAPAFAAGAGRWPARLAVAAMFGVNSGLGYLLMLAVMSFNGGVFVAVVVGLALGYLAFRSSDGEDLVVVDNPCACA

SEQ ID NO: 364273 - protein, 150 aa, Zea mays
  Clone ID: MRT4577_95387C.1.pep
MMHMTFYWGKSATILFDGWRTSTWLGYLLSLVALLLAAAFYQYLEALRVRVKLIAEGSAKPASSIPPPASSDPRTPLLAPAFAGRWPPRVAVAAMFGVNSGLGYLLMLSIMSFNGGVFIAVVVGLALGYLAFRSSDGEDLVVVDNPCACA

SEQ ID NO: 364274 - protein, 137 aa, Zea mays
  Clone ID: MRT4577_95388C.1.pep
GLPPIQLASIQTNNLFFTSLTPASNLFLSCKRAARSSSSQPQLVTAAAVLAATLLLQAAGAGHGLETRAKLKRGGRSSGTTKPRGRNGNCGTNPPRLAEARERIAQQTRTGNCEPRRQRQLPQDHEENCRGLDHHGQ

SEQ ID NO: 364275 - protein, 155 aa, Zea mays; identical to SEQ ID NO: 364272
  Clone ID: MRT4577_95389C.1.pep

SEQ ID NO: 364276 - protein, 180 aa, Zea mays
  Clone ID: MRT4577_9538C.1.pep
WVRVRGFSRRVAHASAVEEIVDFCGIIKEDPETKKPRVKIYTDKETGRKKGDALVTYFKEPSVALAVQLLDGTSFRSGGKTPMSVSPAKFEQKGDVFISKKSDKQKKRKIKKVEDKMLGWGGHDDKKLMIPATVILVHMFTRAELSADAKRLFVLSGLLFRSFLNIIPFGWPFPSPAELN

SEQ ID NO: 364277 - protein, 44 aa, Zea mays
  Clone ID: MRT4577_95390C.1.pep
HSAPHTPVRRSIALPLRLSQPSAGGCSSAAPPSWWRWRTTVGDR

SEQ ID NO: 364278 - protein, 78 aa, Zea mays
  Clone ID: MRT4577_95391C.1.pep
EASGPSILSISHSCGKEDRAPYISASYVGVTKALEAPEPSILPMETKKAVEGSGKVEPHLMFYGKTCIPADVLRLKVY

SEQ ID NO: 364279 - protein, 80 aa, Zea mays
  Clone ID: MRT4577_95392C.1.pep
MALDATSLPVLSVPALEVCSGTRRTGNGGGVSSAPGAEVSVDVPVLWSDEGRMKRELVAWAKAVASMAIRETMRAELTAD

SEQ ID NO: 364280 - protein, 128 aa, Zea mays
  Clone ID: MRT4577_95393C.1.pep
ILSTKNPNTSVFLPLKKKKKKKKKKKITLFGRGYRLVFSQNLPSDTSMVALRPTKKKKKIPLALPPGACNFPLSLLQQQSLTTSSLGTIAPRSPPLPSLPSLSPLAVVNPCPYLQQRVLASNPLALAN

SEQ ID NO: 364281 - protein, 92 aa, Zea mays
  Clone ID: MRT4577_95394C.1.pep
CFCFLVTGQKQRQLIFREDTGFDRKRAENCLFSYINRHISIVGTDDGMSMSHFNDGLSTRPIRIRLRSFYSKGVRDYLLGQRGDCPGHGPAV

SEQ ID NO: 364282 - protein, 84 aa, Zea mays
  Clone ID: MRT4577_95395C.1.pep
RIQRGAFNLYTSTLGDQIRDMGAKYYADGEEGFEMGKLLGQPQPKKPPPPPHQGPGGCCSHEAPVGGTGFSPQFLGSPDKKAIT

SEQ ID NO: 364283 - protein, 116 aa, Zea mays
  unsure (1)..(116): unsure at all Xaa locations
  Clone ID: MRT4577_95396C.1.pep
PKTYKLNHQETQPDVRILAIPCVSWTTTTTAERSRRCCCWPPWTRRPWPTPAAPASSASRRPRSLGPPPAGRRPSPWQGTPEGPAACPTTPPXPMPPPPAAXTPTAAVVAPSSPPP

SEQ ID NO: 364284 - protein, 92 aa, Zea mays
  Clone ID: MRT4577_95397C.1.pep
GAKPIISSSLHYGTLDQPLEQANKHIAQAQYTSWSLRNTTQRRVLTSPSWAFESRFEKQTDSRKTNRANGSGQFLGAFTTQQFTLYRLQGPS

SEQ ID NO: 364285 - protein, 136 aa, Zea mays
  unsure (1)..(136): unsure at all Xaa locations
  Clone ID: MRT4577_95398C.1.pep
PPAALQRGAGISGTWLAHALAPPPQLPQQQEPPGFYGRRRYEDEYNSNPNGWPRRANGTSSSTSSRDDCSRGSYNGRGKRKYGEYRRGYLDSXRDREERGRPFPNGRRYEEDGDEDGAPWVQKKRRGNRGMMRRVL

SEQ ID NO: 364286 - protein, 76 aa, Zea mays
  Clone ID: MRT4577_95399C.1.pep
TTIMLSYDNFITELTGKVYVFTLSKIAGIAARQDLDPAAVMTLLYGVIPQMMDSGERRMNAHVLYGKIFIAPIRLG

SEQ ID NO: 364287 - protein, 140 aa, Zea mays
  unsure (1)..(140): unsure at all Xaa locations
  Clone ID: MRT4577_9539C.1.pep
ISASTTNRXXAMXXSQCNAGTVSXWIHSKKRAAGVRXXCXXRREXXIGLAXXAGPSXXCFXRKAPLEGPLTKXGRXWRAGRRXEALRXLPTSPAXAEGRGSQSLVERRXXAPARVSAQLPPIRTSSTXFFXXYFPLFFGR

SEQ ID NO: 364288 - protein, 370 aa, Zea mays
  Clone ID: MRT4577_953C.1.pep
MMRDGVPPSVAGSGGAAGGDGPRRCSQCGHHGHNARTCTARPVKLFGVRIGDKPIRKSASMGNIAHLAAEGSGGREEGYGSDGERPHKKRGEAWTEEEHKKFLLGLNKLGKGDWRGISRKYVVSRTPTQVASHAQKYFNRQTNVHRRKRRSSLFDMVIDDPSDQLPLSRSSSQEMEQQHLDDPQPVAALPAPVVSPATVVPPVPVEVSASVPSPVQVPVPVSAPVMTSQPMEQDSDTTSSIAGEAGTVMPGAMPPYLYPMMIPPPYYHTAFVPMPCYGYVPFYCEPQGAAQAPHEVVKPVAVHSTPPLNAKDLYNMSELSLKGDSNANGGVPASPLPPKPIGRPERQSAFHGKGPTPTGGSSGGLIPAVK

SEQ ID NO: 364289 - protein, 75 aa, Zea mays
  Clone ID: MRT4577_95400C.1.pep
HGRHQHDALSSYTPTALGTVLNWIHMMRLVLRAIAIVSYGARLIEDKLILRTSRSELPHAKHRMDYACNILRYQV

SEQ ID NO: 364290 - protein, 82 aa, Zea mays
  Clone ID: MRT4577_95401C.1.pep
GIRAFEGPQKRSLSVFAKHGLSIGTWGFSITSIYDEKYMIVSKVAATSKICSKELRLNRGKRTQTEIVNGYPVLIDFSISQQ

SEQ ID NO: 364291 - protein, 75 aa, Zea mays
  Clone ID: MRT4577_95402C.1.pep
SCRCRCCAEEKMRDTRPPAGKGVGDKLALCARSFDPSYSCLRRPPATTTDGWMDAAARCLNLAFRCRRSCCAAQG

SEQ ID NO: 364292 - protein, 94 aa, Zea mays
  unsure (1)..(94): unsure at all Xaa locations
  Clone ID: MRT4577_95403C.1.pep
MNVLIVALAILALAAXSADYSTSGGCGCQTPPCHLPPPFYMPPNHYLPPKEQPDPWHYPTKPPQLNPCQQLRSCRIRSLSSLFLGQCVXFLRHQ

SEQ ID NO: 364293 - protein, 124 aa, Zea mays
  unsure (1)..(124): unsure at all Xaa locations
  Clone ID: MRT4577_95404C.1.pep
SIPTQSRRKNPQPQTPINPMPQKWRRPPKTPKSRKPQSGPNPPPAPXPPSPPPPPRLLPAPCPPPAESPSWVKRSSGGPSLPLPSPNRCPFFFFLPNPPPPDCPPPLLPXCFPPLSVPTAPPPV

SEQ ID NO: 364294 - protein, 70 aa, Zea mays
  Clone ID: MRT4577_95405C.1.pep
KNHQLLPFSQLAAVGPAAFLTQHHLLPFYLPPAPNVGPLLQLHQLLPFGPLTLPNPPVFYPQPPLGGAPF

SEQ ID NO: 364295 - protein, 147 aa, Zea mays
  unsure (1)..(147): unsure at all Xaa locations
  Clone ID: MRT4577_95406C.1.pep
MGKMKIVICGVRRIGGLADRVVLQSEDVELVADNDPFMTTDYMXTYMFKYXDTEHGQWKHSDIXLKVSMTLIFGEKPFTVFGIRNPEEIPXREAGAEYVVKSTGVFTDKDMAAAHLKGGAKMVVISAPSKDAPMFACADNEDKYTCD

SEQ ID NO: 364296 - protein, 159 aa, Zea mays
  Clone ID: MRT4577_95407C.1.pep
SAQRGSFAVRRGHGQTSSNTSTRNIRTRGADMARANHWTTVVARNSPWLRKTLRGRVPWRWQDRARREHDMGSGPCPASWRPWLGARWNGSRAGASAQRPWKQRAARQAGKELGRAARLAGAKERGTEGDGARRARARWRWSKHQEAARVYLGRPRRVP

SEQ ID NO: 364297 - protein, 92 aa, Zea mays
  Clone ID: MRT4577_95408C.1.pep
LGSPSPAVPLSSAVVGCIPASPALLGVPAPLPFALAAYGLGKGVTRWSMASRTIAIKEVAMLLTPSGCWSTVILPPPDAIALRVASVFKSLQ

SEQ ID NO: 364298 - protein, 113 aa, Zea mays
  Clone ID: MRT4577_95409C.1.pep
GGGSGGGGGGAGRRPPTTAQSLVFYVSIYQIALGNGAYQPAVTTFGADQFDETDARERRSKAAFFGYFFVANNLGGVLAVTALAYMEDEGQWVLAFWRHRRGACSGFSFPSFF

SEQ ID NO: 364299 - protein, 82 aa, Zea mays
  Clone ID: MRT4577_9540C.1.pep
RQLFQNLLNSSWKPSPMTCPQSGKLPPTAAHCCLFPPPRGTKQENSSVGDEPFPRALQMLTKKTTFCYRARIPPFSFWSCFE

SEQ ID NO: 364300 - protein, 108 aa, Zea mays
  Clone ID: MRT4577_95410C.1.pep
TFFIKSPIFNFPCHHFTSAPLFKTLPLPTLIPSLNIPFFPPKIITKSPFLNTFSNKNPPLFPNKPPPKYPIIPFGFIFYTHHNLYLSQHPTPLYLNFPPSLSHHYPPF

SEQ ID NO: 364301 - protein, 122 aa, Zea mays
  Clone ID: MRT4577_95411C.1.pep
RTPLPEESPPKLPSSPLAAFLGAVNPYPGGRPALACPPLHRRLFEVVLTKNLPEPGEPYFRRKPEKVKAASPKMNPAAPPKDGAASPGSCFGSMGAKVAWDNGNLGQSGDRPFSKEGAGELK

SEQ ID NO: 364302 - protein, 46 aa, Zea mays
  unsure (1)..(46): unsure at all Xaa locations
  Clone ID: MRT4577_95412C.1.pep
CVTXQAVPXILXXLEXMXMVNRRXKIXRXPXTFFNLSLXAXXCXVD

SEQ ID NO: 364303 - protein, 435 aa, Zea mays
  Clone ID: MRT4577_95413C.1.pep
MMTGRLNVATSSSPGGDDFLFMPMQQHQPPPPPPPPYVGFEHGHGVAGGGSQRVAGGVQHHLYDGLDFAAAALQFQQQAEAPHLHQQQLLTLPSSLGPMAPPPPPPPPLPMPMPVPGMPGDHVYPALGMVKREGGGADGRIGLNLGRRTYFSPGDMMAVDRLLMRSRLGGGGGAFGLGFGFGFGGAHHQAPPARCQAEGCKADLSGAKHYHRRHKVCEYHAKASVVATGGKQQRFCQQCSRFHVLSEFDEVKRSCRKRLAEHNRRRRKPPTTASSKDAASPPANKKPNCGSITSSYSTDNKNLNTAKSTMSSNTGSVISCLDQAAGNKQLQARPTLTLGASPDKDQQQQQQLRAMLQAQAAAGGGHHHHHQEQHFITSLQVHNNDGCGGGNSSSNNNIILSCSSVCSSALPSANGEVSDQNNAGGMHNLFEVDFM

SEQ ID NO: 364304 - protein, 91 aa, Zea mays
  Clone ID: MRT4577_95414C.1.pep
HFHSAVSTERRSSRQIFLRVSTSETVRTLSTQHRRSRAPCSARRRTRTTKAMGCYTPCTLAGAAAQEDGRYRTGTSTWARTPCSWRGGRRT

SEQ ID NO: 364305 - protein, 98 aa, Zea mays
  Clone ID: MRT4577_95415C.1.pep
GIHIPRYISAKQPWRAMRKDRATSVCNADLYGWTVGGGLNLAVKMTMLLLLWVEATNLVVLDTVVMEGILMGLLFGSSSGGSHGQDSLLVRWTPFAQS

SEQ ID NO: 364306 - protein, 87 aa, Zea mays
  Clone ID: MRT4577_95416C.1.pep
MRKIKIGINGFGRIGRLVARVALQSEDVELDAASDPFMTTDYMTYMVKYDTVHGHWKHSDITLKDCKTLLLGDKPVTEFGIRNPEEI

SEQ ID NO: 364307 - protein, 337 aa, Zea mays
  Clone ID: MRT4577_95417C.1.pep
MGKIKIGINGFGRIGRLVARVALQSEDVELVAVNDPFITTDYMTYMFKYDTVHGHWKHSDITLKDSKTLLFGQKPVTVFGIRNPEEIPWGEAGADYVVESTGVFTDKDKAAAHLKGGAKKVVISAPSKDAPMFVVGVNEDKYTSDINIVSNASCTTNCLAPLAKVIHDNFGIIEGLMTTVHAITATQKTVDGPSAKDWRGGRAASFNIIPSSTGAAKAVGKVLPDLNGKLTGMSFRVPTVDVSVVDLTVRIEKGASYGDIKKAIKAASEGPLKGIMGYVEEDLVSTDFVGDSRSSIFDAKAGIALNDNFIKLVSWYDNEWGYSNRVVDLIRHMFKTQ

SEQ ID NO: 364308 - protein, 110 aa, Zea mays
  unsure (1)..(110): unsure at all Xaa locations
  Clone ID: MRT4577_95418C.1.pep
HEQKLYATSWGLVQPRGLFIIXMSLLKHLMXELXDTTANNLIVHNVLYSVCNLHILFRQSTFTHQFWSNIKTDRGAFLEGFELLGSRIANNIFLLFTLTSIDVSGCSLDT

SEQ ID NO: 364309 - protein, 128 aa, Zea mays
  unsure (1)..(128): unsure at all Xaa locations
  Clone ID: MRT4577_95419C.1.pep
MGKIKIGINGFGRIGRLVARVALQSEDVELVGGKDPFITTDYMDYMVKXYDTGHGHWEDSDITLQGSQNLFLREKAVNGFGIPEPGGIPGGGGGAXYLLEATGGFTXKTKVAGHLXGGAKKVVILAPG

SEQ ID NO: 364310 - protein, 58 aa, Zea mays
  unsure (1)..(58): unsure at all Xaa locations
  Clone ID: MRT4577_9541C.1.pep
GFSGHXXFKMXPGXVXKILAEMAIDGDSPTAAEADLDLGFFRIGRFDGNPVGNANKDQ

SEQ ID NO: 364311 - protein, 39 aa, Zea mays
  Clone ID: MRT4577_95420C.1.pep
CRATTTPMWRSGPTGPRSLCNACGFRSRKKRRQELGLEH

SEQ ID NO: 364312 - protein, 100 aa, Zea mays
  unsure (1)..(100): unsure at all Xaa locations
  Clone ID: MRT4577_95421C.1.pep
MGKIKIGINGFGRIGRLVARVALQSEDVELVAVNDPFITTDYGTYMFNYYTVHGQWKHXDIALKDYKTLLFGEKSDTDFGIRNPKEIPRSEAXGAEYVVE

SEQ ID NO: 364313 - protein, 90 aa, Zea mays
  Clone ID: MRT4577_95422C.1.pep
HLLVAADRYDLERLKLICEDKLCRYIDTGSAATILALAEKHNCHGLKDACFALLSSAATLGAFMETDGFDHLTVSCPSLLKELFSKFVPT

SEQ ID NO: 364314 - protein, 337 aa, Zea mays
  Clone ID: MRT4577_95423C.1.pep
MGKIKIGINGFGRIGRLVARVALQSEDVELVAVNDPFITTDYMTYMFKYDTVHGQWKHSDIALKDSKTLLFGEKPVTVFGIRNPEEIPWGEAGAEYVVESTGVFTDKDKAAAHLKGGAKKVVISAPSKDAPMFVVGVNEDKYTSDVNIVSNASCTTNCLAPLAKVIHDNFGIIEGLMTTVHAITATQKTVDGPSAKDWRGGRAASFNIIPSSTGAAKAVGKVLPELNGKLTGMSFRVPTVDVSVVDLTVRIEKVSSYEEIKKAIKAASEGPLKGIMGYVEEDLVSTDFTGDSRSSIFDAKAGIALNDHFIKLVSWYDNEWGYSNRVVDLIRHMFKTQ

SEQ ID NO: 364315 - protein, 179 aa, Zea mays
  unsure (1)..(179): unsure at all Xaa locations
  Clone ID: MRT4577_95424C.1.pep
MGKIKIGINGFGRIGRLVARVALQSEDVELVAVNDPFITTDYMTYMFKYHTGHGHWKHNDITLKDFKTLFFGDKPGTGFGIKNPEENPWGEGGAXYFVEFTRVFNCQDKGGGHFKGGAQKGGIFCPNKKSPRLVXGGNEDQYTLGGNNGSKGWWTTNXLVPLVRXIHYHFRIGEGLVTT

SEQ ID NO: 364316 - protein, 285 aa, Zea mays
  unsure (1)..(285): unsure at all Xaa locations
  Clone ID: MRT4577_95425C.1.pep
MGKIKIGINGFGRIGRLVARVALQSEDVELVAVNDPFITTDYMTYMFKYDTVHGQWKHSDITLKDSKTLLXFGEKPXVTVFGIRXPPLPLLPETRIAFTCSSCELVFEPLRVYRNPEEIPWGEAGAEYVVESTGVFTDKDKAAAHLKGGAKKVVISAPSKDAPMFVVGVNEDKYTSDVNIVSNASCTTNCLAPLAKVIHDNFGIIEGLMTTVHAITATQKTVDGPSAKDWRGGRAASFNIIPSSTGAAKVYDKIHNVACNQLCNGCLHKLVKSTIDSLFCVHLAL

SEQ ID NO: 364317 - protein, 338 aa, Zea mays
  unsure (1)..(338): unsure at all Xaa locations
  Clone ID: MRT4577_95426C.1.pep
MGKIKIGINGFGRIGRLVARVALQSEDVELVAVNDPFITTDYMTYMFKYDTVXHGQWKHSDIALKDSKTLLFGEKPVTVFGIRNPEEIPWGEAGAEYVVESTGVFTDKDKAAAHLKGGAKKVVISAPSKDAPMFVVGVNEDKYTSDVNIVSNASCTTSCLAPLAKVIHDNFGIIEGLMTTVHAITATQKTVDGPSAKDWRGGRAASFNIIPSSTGAAKAVGKVLPELNGKLTGMSFRVPTVDVSVVDLTVRIEKGASYEEIKKAIKAASEGPLKGIMGYVEEDLVSTDFTGDSRSSIFDAKAGIALNDHFIKLVSWYDNEWGYSNRVVDLIRHMFKTQ

SEQ ID NO: 364318 - protein, 67 aa, Zea mays
  Clone ID: MRT4577_95427C.1.pep
ICTVFQLTDRIINMYDGIELILVVQVNASGIQQTQADIAAMAYVVGRCAHGHVNSAVAYPPFGIHLQ

SEQ ID NO: 364319 - protein, 392 aa, Zea mays
  unsure (1)..(392): unsure at all Xaa locations
  Clone ID: MRT4577_95428C.1.pep
VAPSLCDCVRVRVRVRSGFGRIGRLVARVALQSEDVELVAVNDPFITTDYMTYMFKYDTVHGHWKHSDITLKDSKTLLFGDKPVTVFGIRNPEEIPWGEAGAEYVVESTGVFTDKDKAAAHLKGGAKKVVISAPSKDAPMFVVGVNEDKYTSDVNIVSNASCTTNCLAPLAKVIHDNFGIVEGLMTTVHAITATQKTVDGPSAKDWRGGRAASFNIIPSSTGAAKAVGKVLPDLNGKLTGMSFRVPTVDVSVVDLTVRIEKGASYEDIKKAIKXDQQFICFNNHSIYFXHCLKVISTPCWINRHYHMFSVYVWXLAVDYRAASEGPLKGIMGYVEEDLVSTDFLGDSRSSIFDAKAGIALNDHFVKLVSWYDNEWGYSNRVVDLIRHMFKTQ

SEQ ID NO: 364320 - protein, 337 aa, Zea mays
  Clone ID: MRT4577_95429C.1.pep
MGKIKIGINGFGRIGRLVARVALQSEDVELVAVNDPFITTDYMTYMFKYDTVHGQWKHSDITLKDSKTLLFGEKPVTVFGIRNPEEIPWGEAGAEYVVESTGVFTDKDKAAAHLKGGAKKVVISAPSKDAPMFVVGVNEDKYTSDVNIVSNASCTTNCLAPLAKVIHDNFGIIEGLMTTVHAITATQKTVDGPSAKDWRGGRAASFNIIPSSTGAAKAVGKVLPELNGKLTGMSFRVPTVDVSVVDLTVRIEKGASYEEIKKAIKAASEGPLKGIMGYVEEDLVSTDFTGDSRSSIFDAKAGIALNDHFIKLVSWYDNEWGYSNRVVDLIRHMFKTQ

SEQ ID NO: 364321 - protein, 388 aa, Zea mays
  Clone ID: MRT4577_9542C.1.pep
MNGGGEDGKQQPHLVLAHKLFLLSHSDVDDLAKVDLRADVFAAVKSDDMAALYESLAADGVLETDAALLAEMRARIDEEIRKLDEKIADAEENLGESEVREAHLAKSLYFIRVGEKEKALEQLKVTEGKTVAVGQKMDLVFYTLQIGLFYMDFDLISKSIDKAKNLFEEGGDWERKNRLKVYEGLYCMATRNFKKAASLFLDSISTFTTYELFTYDTFIFYTVLTSVISLDRVSLKQKVVDAPEILAVIGKVPHLSEFLNSLYNCQYKSFFIAFSGLTEPIKLERYLQPHFRYYMREVRTVVYSQFLESYKSVTMEAMAAAFGVTVDFIDQELSRFIAAGKLHCKIDKVAGVLETNRPDARNAFYQATIKQGDFLLNRIQKLSRVIDL

SEQ ID NO: 364322 - protein, 87 aa, Zea mays
  unsure (1)..(87): unsure at all Xaa locations
  Clone ID: MRT4577_95430C.1.pep
RCTNGNRHRPYQLRLGLFIYREMIIEPFYVXPIFLWLFLFPYXCFSLSGFLFLYSFLFVLHFFFLLGRWGGLFNCYFYIFVFLYIFF

SEQ ID NO: 364323 - protein, 82 aa, Zea mays
  unsure (1)..(82): unsure at all Xaa locations
  Clone ID: MRT4577_95431C.1.pep
MDHPLTSAPFIIRNIIKFHVFLTHKHTFLHVYRKKTTDDLISMPYIXTLFSCTLKILYSLVKTNSIPLLTINAFWCVIKACY

SEQ ID NO: 364324 - protein, 74 aa, Zea mays
  unsure (1)..(74): unsure at all Xaa locations
  Clone ID: MRT4577_95432C.1.pep
CAGGWYTCMVTSGDRLLPEWYSDRGIQVILPGDIVTADLASXTLDSASADSFTYETPLGATGATLIGHAVVGAE

SEQ ID NO: 364325 - protein, 365 aa, Zea mays
  Clone ID: MRT4577_95433C.1.pep
MYHPQCELLTMAHETPDLDAGQPHLTVSGVASIPAELSFHLLHSLDAAAAVNPVTAPPQSTIDYFLGGADPHQQAMQYEPLPPAAGGHHQYTMDMFRDYCDGHYPTAEPYIRGTMTGALVFGATDDDDSAAAYMPGGHFETSPPPPRATGRGRKRGRALGGGFHAVLANGVEKKEKQRRLRLTEKFTALMHLIPNVTKTDRATVISDAIEYIQELGRTVEELTLLVEKKRRRRELQGDVVDAAPAAVVAAAGEAESSEGEVAPPPPAVPRQPIRSTYIQRRSKDTSVDVRIVEEDVNIKLTKRRRDGCLAAASRALDDLRLDLVHLSGGKIGDCQIYMFNTKIHKGSSVFASAVAGRLMEVVDEY

SEQ ID NO: 364326 - protein, 58 aa, Zea mays
  Clone ID: MRT4577_95434C.1.pep
LFFFFFFFFFFFFFFFFFFFFFFFFFFFWGEKRTPGISPPQKKGVPKPHFGFAQRETF

SEQ ID NO: 364327 - protein, 248 aa, Zea mays
  Clone ID: MRT4577_95435C.1.pep
MASAGAGEGKETAAGSSLHSKTLLKSQPLYQYILESTVFPREPDCLRELRVATATHPMAGMAASPDEVQLLQLLIEILGAKNAIEVGVFTGYSLLATALALPDDGKIVAIDVTRESYDQIGSPVIEKAGVAHKIDFRVGLALPVLDQMVAEEGNKGKFDFAFVDADKVNFLNYHERLLQLLRVGGLIAYDNTLWGGSVAASPDEPLSERDRALAAATREFNAAVAADPRVHVCQVAIADGLTLCRRVA

SEQ ID NO: 364328 - protein, 393 aa, Zea mays
  unsure (1)..(393): unsure at all Xaa locations
  Clone ID: MRT4577_95436C.1.pep
RTRGVAISAVGLIAFFAVRKAAMKRWEARAPTVSEEESSSTGYPSKMLADARYISQTLKLGALGIPSYRAFSLVELEAATNNFENSHLLGQDSHGEMYRGRLGNGTPVTIRTLKMKRSQTAQSFNRHIETISRLRHQNLVSALGHCFEYNLDESTVTQLYIVFEYVQNGNLRSRISQGTEGSEVPGEGGVAAALGGGRAVEPVHGGIIPGLVGNDLRITNRRKPSVVVVQSHQAISAILEQAMRPEQGGSPVKRSHDLPXSTGDKDKDLKRGTXVVSLQYGNXITDMYVETILESTACMGDCRRGPRMCFALXDPAVSKGCSXESLRTVMEICPRCLVKEAAQRPSVEDVLWNLQFAAQVQDDWETDAWSSGGGSPVSSSSRPTRPSRLHLSR

SEQ ID NO: 364329 - protein, 105 aa, Zea mays
  unsure (1)..(105): unsure at all Xaa locations
  Clone ID: MRT4577_95437C.1.pep
GRGGRGGRGGNTDGGGGAGGSGGAXTXSXXAXXGNRKNAXATDXRAXXRRXAXKXHPDRXASDPGAAGEAKQRXQRXQEADXXQADKGKKAXXDAGXXDSXDDND

SEQ ID NO: 364330 - protein, 242 aa, Zea mays
  Clone ID: MRT4577_95438C.1.pep
LDESTVTQLYIVFEYVQNGNLRSRISQGTEGCRLTWSQRISAAIGVAKGIQFLHGGIIPGLVGNDLRITNVLVDQNHVAKIGSYNIPILAEAMRSEQGGAGNKFQADSRVKSDKTDIFDFGVILLEVVSGKTITSMYEVEILKELLAWAIADEDRVRRRSFADPAVSKGCSDESLRTVMEICQGAWAKEASQRPSVEDVLWNLQFAAQVQDDWETDAWSSGGGSPVSSSSRATRPSRLHLSR

SEQ ID NO: 364331 - protein, 99 aa, Zea mays
  Clone ID: MRT4577_95439C.1.pep
RAVEPAVRRPGAGRLGDGCLEQRRRKPSVVVVQSHQAVSATLEQIDDQVLHQSPVKRSHDLPIVYRGQGQGSKDGKCWSAYSTASASDGMLKTTAVSAR

SEQ ID NO: 364332 - protein, 41 aa, Zea mays
  Clone ID: MRT4577_9543C.1.pep
MIRNPLEKQNKFCFDTEKVLFTERRFLKLKYFLNYLRSTMT

SEQ ID NO: 364333 - protein, 158 aa, Zea mays
  unsure (1)..(158): unsure at all Xaa locations
  Clone ID: MRT4577_95440C.1.pep
DFLLSSGFHQEGGGYVTVRECGDPNVPGAGMKNSMPQYKRRPPASSLPQTASLSGPGRVGNAYNXIAGNYSLNTGAAXGPTTWGVDEALGTHIKDPNDYAAIQQIDNSGMWIHGGAGSRTESANSAGNYNGLQGQSQHGGYHQGHQHFEYGGLAYPSF

SEQ ID NO: 364334 - protein, 317 aa, Zea mays
  unsure (1)..(317): unsure at all Xaa locations
  Clone ID: MRT4577_95441C.1.pep
EPQLARPVHNALTGEIPASFAALRNLTLLNLFRNKLRGSIPELVGDLPSLEVLQLWENNFTGGIPRRLGRNGRLQLVDLSSNRLTGTLPPELCAGGKLETLIALGNFLFGSIPEPLGKCEALSRIRLGENYLNGSIPDGLFELPNLTQVELQDNLLSGGFPAVSGTGAPNLGAITLSNNQLTGALPASIGKFSGLQKLLLDQNAFTXXXPPVLGRLQQLSKADLSGTRLXGGVPPEIGKCRLLTYLDLSRNNLSGEIPPAISGMRILNYLNLSRNHLGGEIPATIAAMRRAAAVDFSYXXLCGLVPAXGLCACLGAS

SEQ ID NO: 364335 - protein, 51 aa, Zea mays
  Clone ID: MRT4577_95442C.1.pep
SRLILLQVGEDEDDLNSIVSVENLPPAAAHGMSSLAVSGGGLHGRQKSHYT

SEQ ID NO: 364336 - protein, 36 aa, Zea mays
  Clone ID: MRT4577_95444C.1.pep
SDYISVVGTTARKMKESGMASTSALGVGDHWPGRVG

SEQ ID NO: 364337 - protein, 338 aa, Zea mays
  unsure (1)..(338): unsure at all Xaa locations
  Clone ID: MRT4577_95445C.1.pep
MGKIKIGINGFGRIGRLVARVALQSEDVELVAVNDPFITTDYMTYMFKYDTVHGHWKHSDITLKDSKTLLFGDKPVTVFGIRNPEEIPWGEAGAEYVVESTGVFTDKDKAAAHLRGGAKKXVVISAPSKDAPMFVVGVNEDKYTSDVNIVSNASCTTNCLAPLAKVIHDNFGIVEGLMTTVHAITATQKTVDGPSAKDWRGGRAASFNIIPSSTGAAKAVGKVLPDLNGKLTGMSFRVPTVDVSVVDLTVRIEKGASYEDIKKAIKAASEGPLKGIMGYVEEDLVSTDFLGDSRSSIFDAKAGIALNDHFVKLVSWYDNEWGYSNRVVDLIRHMFKTQ

SEQ ID NO: 364338 - protein, 214 aa, Zea mays
  Clone ID: MRT4577_95446C.1.pep
MAAVEVCVKAAAGNPDTLGDCPFSQRVLLTLEEKKVPYEVKLVDLGNKPEWFLNISPEGKVPLFNGGDGKCIADSDVITQVIEEKFPTPSLVTPPEYASVGSKIFPAFVKFLKSKDASDGSEKALLDELQALDDHLKAHGPYINGENVSATDLSLGPKLFHLQIALEHFKGWKIPENLTNVHAYTKALFSRESFVKTKPSEEHVIAGWAPKVNA

SEQ ID NO: 364339 - protein, 339 aa, Zea mays
  unsure (1)..(339): unsure at all Xaa locations
  Clone ID: MRT4577_95447C.1.pep
MGKIKIGINGFGRIGRLVARVALQSEDVELVAVNDPFITTDYMTYMFKYDTVHGQWKHSDIALKDSKTLLFGEKPVTVFGIRNPEEIPWGEAGAEYVVESTXGVFTDKDKXAAAHLKGGAKKVVISAPSKDAPMFVVGVNEDKYTSDVNIVSNASCTTNCLAPLAKVIHDNFGIIEGLMTTVHAITATQKTVDGPSAKDWRGGRAASFNIIPSSTGAAKAVGKVLPELNGKLTGMSFRVPTVDVSVVDLTVRIEKGASYEEIKKAIKAASEGPLKGIMGYVEEDLVSTDFTGDSRSSIFDAKAGIALNDHFIKLVSWYDNEWGYSNRVVDLIRHMFKTQ

SEQ ID NO: 364340 - protein, 134 aa, Zea mays
  Clone ID: MRT4577_95448C.1.pep
SKQDWDGLFKMDQLKKELGKGCTFDGWVEGPITFPPTYKYEFNSEKYVSDATKSGRRTPAWCDRILSYGEGTRLLSYNRAELILSDHRPVTAVYMADVEIVCPRRLQRALTFSNAEGEDHLLSRKEAHLEPKTN

SEQ ID NO: 364341 - protein, 105 aa, Zea mays
  Clone ID: MRT4577_95449C.1.pep
KKKKKKKKKKKKKKKKKKKPKKKKKKTCTFPALSVRKGQNIAEYPPHWWAVLTIHLKRATKCPQMESPLQQNKAGVLTTTPGKKKTLVTPKKIFLAQNPFFKRWK

SEQ ID NO: 364342 - protein, 67 aa, Zea mays
  Clone ID: MRT4577_9544C.1.pep
QHEQDILIFIYFPCFWMPDQFIKGYINPHIESSSGAMNSIFYVSCAIWIFQQKLLVFVTGGRIWLYN

SEQ ID NO: 364343 - protein, 58 aa, Zea mays
  Clone ID: MRT4577_95450C.1.pep
LVEVILEHYGFEADEAAVTCLVCLVPVALDVYIKFWVYKYLPRLSPSVGNVLDEIKRH

SEQ ID NO: 364344 - protein, 62 aa, Zea mays
  Clone ID: MRT4577_95451C.1.pep
ITSCAFCRYHSESGWHTLVEVILEHYGFEADEAAVTFFVCLVPVALDVYIKFWVCLFHLIKQ

SEQ ID NO: 364345 - protein, 95 aa, Zea mays
  Clone ID: MRT4577_95452C.1.pep
FFGREKCKPWGSRYRRQPLLPPFSLPFKQKRENRSAAVVRPEVTYIIISEFNSCGCVRFKSANVDPPRHRAPYVLYVATSVMASLSPCVAASESS

SEQ ID NO: 364346 - protein, 89 aa, Zea mays
  Clone ID: MRT4577_95453C.1.pep
GALAKAHVQKGNLPAQKALRSVHVWLPLPANHSNQSNPMERTVIDLMNPLAFVPPEERGAVAHLVLQPYTLDPPHPALGVRVHIQQPGP

SEQ ID NO: 364347 - protein, 98 aa, Zea mays
  Clone ID: MRT4577_95454C.1.pep
DYNRDGLQPELYRRSFGWESRFFYASYDRPRVILTSGTAYSDVAFTDQIVSFVGRRSVLPLNLFDVPPVYCRVYTSGGGVQIQTTSNKHINQPKGSKP

SEQ ID NO: 364348 - protein, 59 aa, Zea mays
  Clone ID: MRT4577_95455C.1.pep
GRSSISQQTRGVPGPYECSNPRRGCYHLPTPSAYEDCSMSFASYNRDKSEDVLPLMGAS

SEQ ID NO: 364349 - protein, 73 aa, Zea mays
  Clone ID: MRT4577_95456C.1.pep
KIRKNCITNRAVSTCPKRHHQPVPFRQAVCSLSSDTAHCDWRIRAPDIQSASVCLWHAPPPRPLHVATADVDG

SEQ ID NO: 364350 - protein, 92 aa, Zea mays
  Clone ID: MRT4577_95457C.1.pep
NRRSDASAHFTHFSSFVFYGEAPCRSAGLLPINDRLSRKPCNSCSKTVLEVCYFRHSHAELLLLTPQHHSWSLSLLDTRCIWMLEHRTNIYT

SEQ ID NO: 364351 - protein, 76 aa, Zea mays
  Clone ID: MRT4577_95458C.1.pep
VLPPARGGRAEDQVGDGAAELLQELRDPAGAQRRDADRPSTARNHACSELMVLVSYYVLASDHLGFLRRPAQVVVM

SEQ ID NO: 364352 - protein, 60 aa, Zea mays
  unsure (1)..(60): unsure at all Xaa locations
  Clone ID: MRT4577_95459C.1.pep
CPSPLPXXXSHLAPPSPMPRPXHPRTLXNPCLSPGTAPHXFXIKPNQAPWPFAPCLSHQA

SEQ ID NO: 364353 - protein, 245 aa, Zea mays
  Clone ID: MRT4577_9545C.1.pep
MRLLSGASASRLPFLARARPRCVSRYSSASACRAASSSAAPVGDGGARKPWLFVGLGNPGKMYQRTRHNVGFEMIDAIAETEGVSLSSMQFKAMIGKGRIGDVPIMLAKPQTFMNASGESVGQLVSYFKIPLNQVVVMYDDLDLPFAKLRLLPKGGHGGHNGMRSIVNHLKQSRDFPRLRIGIGRPPGKMDPANFVLRPFNKKEQQELDFALHRGLEAVRIMVLEGFNKSATYVNTAQSSEMLNR

SEQ ID NO: 364354 - protein, 127 aa, Zea mays
  unsure (1)..(127): unsure at all Xaa locations
  Clone ID: MRT4577_95460C.1.pep
IRHEANGHTNRKALSXIENIIGGLHHDXAIITRAMSDKPAATAHARDQAGFDGHXRPVTWSGGETFXFEPTADLLEPCRRERLKRNAGTAXHTPAXDSEXTKLTXDDRPLXILADKDEMTRPELIEI

SEQ ID NO: 364355 - protein, 80 aa, Zea mays
  unsure (1)..(80): unsure at all Xaa locations
  Clone ID: MRT4577_95461C.1.pep
LAVANAAASLRQLLPFXQLAVSDSAGNLHQRQQLLDPLTVANPLVAAFLQQQQLVPXYNQFSLMNPALSWQQPIVGGAIF

SEQ ID NO: 364356 - protein, 70 aa, Zea mays
  unsure (1)..(70): unsure at all Xaa locations
  Clone ID: MRT4577_95462C.1.pep
QKYELLRFSEISSVSNATLLTHRXLLPLYEHDVHIVGTVLKLHQLVQLNEFDLKNKNVFXSKXIIGGVLF

SEQ ID NO: 364357 - protein, 162 aa, Zea mays
  unsure (1)..(162): unsure at all Xaa locations
  Clone ID: MRT4577_95463C.1.pep
HYQRGRARAANKLPRGALLAALISTTKTAIITQXDYLLLASLHTQLLPAATKMELRRXAEPAYRLQQALAASVLQQPIAQLQQQSLEHITIQTIATQQQQQLLPALSQLAVVNPVAYLQQQLLAYNRLALANIADYQQQHQLQQLLPALSQLAMANPVVFLQ

SEQ ID NO: 364358 - protein, 246 aa, Zea mays
  unsure (1)..(246): unsure at all Xaa locations
  Clone ID: MRT4577_95464C.1.pep
MCGILAVLGCADDTQGKRVRVLELSRRLKHRGPDWSGMHQVGDCYLSHQRLAIIDPASGDQPLYNEDKSIVVTVNGEIYNHEQLRAQLSSHTFRTGSDCEVIAHLYEEHGENFIDMLDGVFSFVLLDTRDNSFIAARDAIGVTPLYIGWGIDGSVWISSEMKGLNDDCEHFEIFPPGHLYSSKQGGFKRWYNPPWFSEVIPSVPYDPLALRKAFEKAVIKRLMTDVPFGGLLSGXLDSSLGAAVTV

SEQ ID NO: 364359 - protein, 93 aa, Zea mays
  Clone ID: MRT4577_95465C.1.pep
LHQLLLLFVPALTQLAVANPAAYLQQLLPFNQLTVSNSAAFLQLRHQFLNPLAVPNPLVTAFLQLQQLLPYSQFSLMNPALSWLQPIVGGAIF

SEQ ID NO: 364360 - protein, 134 aa, Zea mays
  unsure (1)..(134): unsure at all Xaa locations
  Clone ID: MRT4577_95466C.1.pep
FNGKNFAEQHKFIPFNRKLALNQVSIRRQQQLPFSKIYTADRQQFLPFNKVAALNYHDYCQQQQLVPIRQLAGVSRSTXYLSQPQLWRFCQHAAPSAGTLSQGQRWQPFNQRGLTNPAAXFYLQPIIGGASFKI

SEQ ID NO: 364361 - protein, 187 aa, Zea mays
  unsure (1)..(187): unsure at all Xaa locations
  Clone ID: MRT4577_95467C.1.pep
RCALRDHHSAVQVHGAENLWTPRPLLRLDLRSWRNQPLPATQSVDKEAAEIEQVGLLXACMLYKLKDERERGITSDITLRKHENTKYYXRDNDEHGDRDFIKNMITGTSQADCAVLIIDSTTGGFEAGISKDGQTREHALLAFTLGVKQMICCCNKMDATTPKYSKARYDEIVKEVSSYLKKGGYNP

SEQ ID NO: 364362 - protein, 145 aa, Zea mays
  unsure (1)..(145): unsure at all Xaa locations
  Clone ID: MRT4577_95468C.1.pep
HQGLPSLRGLFEENPVTYSQQQLLAFNPLXALASGAAYQRQQQLQQFMPVLSQLAMVNPAVYLQLLSSSPLAVGNAPTYLQQQLLXQIVPTLTQLGXENPDGYLXQQLLSFNQLDVSNSGAYLQQRPRLLNPWAGAYPMVGNLLQ

SEQ ID NO: 364363 - protein, 51 aa, Zea mays
  Clone ID: MRT4577_95469C.1.pep
RMKGGGQTLGTHQLFLIKRSRSGTHDNCVLMHVDLRTTRSLDGRLLSWGGP

SEQ ID NO: 364364 - protein, 290 aa, Zea mays
  unsure (1)..(290): unsure at all Xaa locations
  Clone ID: MRT4577_9546C.1.pep
MRLPSAASASRLPSSLFLQPRARTRCIPSSSLACRASSSSAAGAGDGGSRKPWLFVGLGNPGKVYQGTRHNVGFEMIDVIAEAEGISLSSMQFKAMVGKGRIGDAPIMLAKPQTFMNASGESVGQLVSYFKIPLSQVVVMYDDLDLPFAKLRLLPKGGHGGHNGMRSIVNHLKQSRDFPRLRIGIGRPXGPPGKMDPANFVFRPFNKKEQQELDFALHRGLXIMVLEGFNKSETYVDSGQSSEMLNRCWANKLPYAVLIPYQRDLMEYAVAASLDASFVRGPPPPWPRKL

SEQ ID NO: 364365 - protein, 159 aa, Zea mays
  unsure (1)..(159): unsure at all Xaa locations
  Clone ID: MRT4577_95470C.1.pep
MATKXLALLGLLGLFGGATNAFIISQWLLGSRGLISQFLPPGSSMGFEHLTVQANMEQQALAVSVLQQPIAQLRQQFLSHLSIQAITTQQQQQLLPALSHLAMVNPAAYLLEQLLACNPLALANVVAVQPQQQLQQFLPALSQLAMVNPARYVXQQQLL

SEQ ID NO: 364366 - protein, 95 aa, Zea mays
  unsure (1)..(95): unsure at all Xaa locations
  Clone ID: MRT4577_95471C.1.pep
SASSSAHSSKSAKSSTPSSPTGTSSSDSGGHHIGRGERQGQWLRRRRLDGAINRVPVGFYQRVWKILQKCHGLSIDGYVLPSSTTRDMXPHDIKF

SEQ ID NO: 364367 - protein, 151 aa, Zea mays
  unsure (1)..(151): unsure at all Xaa locations
  Clone ID: MRT4577_95472C.1.pep
MAFKTLSLLALLALFVSATNAFIISGGSLAPGAIIPQFLPPVTXMGFKHPAVQAYRLQQALAASVLXQPIAQLQQQSLAHLTIQTIATQQQQALSHLAVVNPVAYLQHQMLACNPLALAYVAAYXRRRHSQQFLPALSPLSMGNPTGYLPQ

SEQ ID NO: 364368 - protein, 79 aa, Zea mays
  unsure (1)..(79): unsure at all Xaa locations
  Clone ID: MRT4577_95473C.1.pep
MSCRCGSSWNCGSSCYCCKMYPDLEENSGGGAQASAGAVCLGVAPETNNAGQFXAAGESGEADHGCSCGDSCKGMPCNC

SEQ ID NO: 364369 - protein, 89 aa, Zea mays
  unsure (1)..(89): unsure at all Xaa locations
  Clone ID: MRT4577_95474C.1.pep
MATKILALLALLALLVSATXAFIIPQCSLAPSAIIPQFLPPVTSMGFEHPAVKPQAQQRWAALHTNAMTQSAITKHDHTHSCYTHRDCL

SEQ ID NO: 364370 - protein, 218 aa, Zea mays
  unsure (1)..(218): unsure at all Xaa locations
  Clone ID: MRT4577_95475C.1.pep
MGQEKSHINIVVIGHVNFGKSTTHRTHLSTTIAGIDKRVFERFEKEAAEMNKRTFKYAWVLDKLKADRERELTIDIALWKPETTKHYCTXIDAPXGHRDFIKNMITGTSQADXAVLIIDSTTGGSEAGISHDGQTREHALLAFTLGAKQMICXCNKMDATTPKYFNARYEETVKEVSSYLKKVVYNPDKIAFATISGFEGDTMIERSTNLDWYKGPTL

SEQ ID NO: 364371 - protein, 142 aa, Zea mays
  unsure (1)..(142): unsure at all Xaa locations
  Clone ID: MRT4577_95476C.1.pep
RIPVDQRRAPGQYSHFTSPKGWTPLSGYRLNSDAASVLQQPIAQLQQQSLAHLTIQTIATEQQQQVXHGLAHYTMENPVANWKQNLLASNPLAIANVVANQQQQQLQQFLPALSQLAMVNPAVYLQQQQLLSSSPLAVANAP

SEQ ID NO: 364372 - protein, 75 aa, Zea mays
  Clone ID: MRT4577_95477C.1.pep
LISQWGLLELLFTHIDRPTAILCPLCYDICWFNYLAGSSVPIFQPWVVDSAYWKVWAVSLFPMLFFAVLSQLELL

SEQ ID NO: 364373 - protein, 101 aa, Zea mays
  Clone ID: MRT4577_95478C.1.pep
FGTRHLHSHSPQPLWSLRRPDCETHRDASPIWRQPVAPHRRQWTRRRGARAISLLASTTPTRPRSPGVPRTPRSWRARALPARPPRVSTDSLPPHSIRPST

SEQ ID NO: 364374 - protein, 87 aa, Zea mays
  unsure (1)..(87): unsure at all Xaa locations
  Clone ID: MRT4577_95479C.1.pep
PVAKGEGSQVQQNVAAGAWKGRVKPADSEGTISWAGTRXKKRVPLKLCAEGAQXWXPEQGACASWINPGHVFRHCYLMEQTYGHPHL

SEQ ID NO: 364375 - protein, 84 aa, Zea mays
  unsure (1)..(84): unsure at all Xaa locations
  Clone ID: MRT4577_9547C.1.pep
KGLFLSPIKVGFQGVPKKXPLIKAMVEXFLYPKWETLFWGKKFFVLKRKASPNPFFRFKVFLAKIKRGGVFRQNLPKLKKGSPA

SEQ ID NO: 364376 - protein, 49 aa, Zea mays
  Clone ID: MRT4577_95480C.1.pep
DDASASRKRDNSIIQTNHEAHRKPICMRTYLYVAHIIYKVISRYIYIVI

SEQ ID NO: 364377 - protein, 102 aa, Zea mays
  unsure (1)..(102): unsure at all Xaa locations
  Clone ID: MRT4577_95481C.1.pep
YLNCRRLGRRPAICYRQIKNKPYPKSRYCRGVPDPKXRIYXVGMKRKGVDEFPWGGGLVSREKENVSREALGAALIACNKYMTKSAGKDAFHLRGGVHPFMS

SEQ ID NO: 364378 - protein, 162 aa, Zea mays
  unsure (1)..(162): unsure at all Xaa locations
  Clone ID: MRT4577_95482C.1.pep
VSYTLQYVRSSVDCLCLLMFDPIKPALGAIVSSLKETNLSKRAQSLRMVPPADLMETIRXKLKIXKKQFLRCWEILIFLSLDSQDHKSMDNFRACIYDLMKGEILGSASGTNRKRXVEQQPEYLRTQEQQLNELVDIQIEEIDGVAKNVNSXGKDKMAELAV

SEQ ID NO: 364379 - protein, 72 aa, Zea mays
  Clone ID: MRT4577_95483C.1.pep
SIFCDCLALTGDGVVANAGPSSTRSPDPPCHHPLPGARFHPLFTPISTIFLNYSGGLGLHLFWVSSVVPERS

SEQ ID NO: 364380 - protein, 92 aa, Zea mays
  Clone ID: MRT4577_95484C.1.pep
AAAAKNRLQVVESPPPHELWGLPMASPIAAAYDGGLLPSLSVANFKNYQDRTLSILERSDYTTISGSPHIKKSRRRNISSFSMSSRNQRSLH

SEQ ID NO: 364381 - protein, 296 aa, Zea mays
  unsure (1)..(296): unsure at all Xaa locations
  Clone ID: MRT4577_95485C.1.pep
MNRKAQPEAPGDMGLGHGLDEDGEAGVQLLLQILRLRDGVAPRIVGRVHPVGQISSHRSVRPPNLHPKIGNLLAVHGLIREVGEPAGPPYWLHHGVGDVERHPRLPLLDLQYVRSSVDCLRLLMFDPIKPALGAIVSSLKETNLSKRAQSLRMVPPADLMETVRXKLKIKKKQFLRCWEILIFLSLDSQDHKSMDNFRACIYDLMKGEILGSASGTNRKRLLQMPTSFNKEASFAVYWTHEIGDEDEQTVXQQPEDLRTQEQQLNELVDIQIEEIDGVAKNVTSRGKDKMAELAVQ

SEQ ID NO: 364382 - protein, 386 aa, Zea mays
  unsure (1)..(386): unsure at all Xaa locations
  Clone ID: MRT4577_95486C.1.pep
MTASTSSTLTSSRGYSGRASSRKRGIEAVSDSNIFVENLVEKEEFLHTFSKECEYIRTAVTNGSAIKHDGSYESDPAVEIVRVELQGAAAFLXYSRLVPLVLLLVEGSTPIYIGEHGWEMLLVVKKATQEAGSKFELLGFASVHNFYHYPESIRLRISQILVLPPYQGEGHGLGLLEAINYIAQSENIYDVTIESPSDYLQYVRSSIDCLCLLMFDPIKPALGAIVSSLKETNLSKRAQSLRMVPPVDLMETVRXKLKIKKKQFLRCWEILVFLSLDSQDHKSMDNFRACIYDLMKGEILGSASGTNRKRLLQMPTSFNKEASFAVYWTHEIGDVDEQTVXQQPEDLRTQEQQLNELVDIQIEEIDGVAKNVTSRGKDKMAELAVQ

SEQ ID NO: 364383 - protein, 351 aa, Zea mays
  unsure (1)..(351): unsure at all Xaa locations
  Clone ID: MRT4577_95487C.1.pep
LENLVEKEEFLHTFSKECEYIRTAVTNGSAIKHDGSYESDPAVEIVRVELQGAAAFLXYSRLVPLVLLLVEGSTPIYIGEHGWEMLLVVKKATQEAGSKFELLGFASVHNFYHYPESIRLRISQILVLPPYQGEGHGLGLLEAINYIAQSENIYDVTIESPSDYLQYVRSSIDCLCLLMFDPIKPALGAIVSSLKETNLSKRAQSLRMVPPVDLMETVRXKLKIKKKQFLRCWEILVFLSLDSQDHKSMDNFRACIYDLMKGEILGSASGTNRKRLLQMPTSFNKEASFAVYWTHEIGDVDEQTVXQQPEDLRTQEQQLNELVDIQIEEIDGVAKNVTSRGKDKMAELAVQ

SEQ ID NO: 364384 - protein, 68 aa, Zea mays
  Clone ID: MRT4577_95488C.1.pep
GKSLTDDVLMRRFVVDEEAARRRDEMEVVRRRQAAVSRRRRLGPSPLSRMALADADAESKAEEEPEAP

SEQ ID NO: 364385 - protein, 147 aa, Zea mays
  unsure (1)..(147): unsure at all Xaa locations
  Clone ID: MRT4577_95489C.1.pep
MTASTSSTLTSSRGYSGRASSRKRGIEAVSDSNIFVENLVEKEEFLHTFSKECEYIRTAVTNGSAIKHDGSYESDPAVEIVRVELQGAAAFLXYSRLVPLVLLLVEGSTPIYIGEHGWGMLLVXKRXTQEAGSKXELLXFASVHNSI

SEQ ID NO: 364386 - protein, 63 aa, Zea mays
  Clone ID: MRT4577_9548C.1.pep
RAEQHDEEAAASSGQAPENARPITVSAAYSSTPLPPREIRFLFSPCCACQLATSSNCLEIPGR

SEQ ID NO: 364387 - protein, 538 aa, Zea mays
  Clone ID: MRT4577_95490C.1.pep
MASRPAGTTPIKCPYFGARFFRRQPRCPNAAFKFTTSFPPTHSRLSYSRNLKTPSSLTTPGRRAVLPSPMALKQKDTDAAAATDTGTKKRRRVFFSDTDAGVEANECMKVFLVWNPGEVSSVDCTAIQPFDLNHFFGEDGKIYGYKNLKINVWISAKSFHGYADVSFDETSDGGKGITDLKPVLQNIFGENLVEKEEFLHTFSKECEYIRTAVTNGSAIKHDGSYESDPAVEIVRVELQGAAAFLYSRLVPLVLLLVEGSTPIDIGEHGWEMLLVVKKATQEAGSKFELLGFAAVHNFYHYPESIRLRISQILVLPPYQGEGHGLGLLEAINYIAQSENIYDVTIESPSDYLQYVRSSIDCLRLLMFDPIKPALGAIVLSLKETNLSKRAQSLRMVPPADLMETVRQKLKINKKQFLRCWEILIFLSLDSQDHKSMDNFRACIYDRMKGEILGSASGTNRKRLLQMPTSFNKEASFAVYWTQEIGDEDEQTVEQQPEDLKTQEQQLNELVDIQIEEIAGVAKNVTSRCKDKMTELVVQ

SEQ ID NO: 364388 - protein, 86 aa, Zea mays
  unsure (1)..(86): unsure at all Xaa locations
  Clone ID: MRT4577_95491C.1.pep
NISFTVWDVGCQDTIKPLSRDYFQNTQGIIIIEDSYDRDHAVEDRDYLHKMLXVDELRDAMLLVFANMHDLANAMNACDITDKLAL

SEQ ID NO: 364389 - protein, 233 aa, Zea mays
  unsure (1)..(233): unsure at all Xaa locations
  Clone ID: MRT4577_95492C.1.pep
WQQRGGGAAAPPASVCSPPPASAAAPRTASLPPSLFSLPSLCILLLLQYVRSSVDCLRLLMFDPIKPALGAIVSSLKETNLSKRAQSLRMVPPADLMETVRXKLKIKKKQFLRCWEILIFLSLDSQDHKSMDNFRACIYDLMKGEILGSASGTNRKRLLQMPTSFNKEASFAVYWTHQIGDEDEQTVEQQPEDLKTQEQQLNELVDIQIEEIAGVAKNVTSRRKDKMAELVVQ

SEQ ID NO: 364390 - protein, 132 aa, Zea mays
  Clone ID: MRT4577_95493C.1.pep
MSRSLGIPVKLLHEAAGHVVTVELKTGEVYRGSMVECEDNWNCQLENITFTAKDGKVSQLEHVFIRGSRVRFMIIPDMLKNAPMFKRLEARIRGKGSAIGVGRGRAVAMRARAASGRGGGPVGRGSAPPVRR

SEQ ID NO: 364391 - protein, 126 aa, Zea mays
  unsure (1)..(126): unsure at all Xaa locations
  Clone ID: MRT4577_95494C.1.pep
LGGVLLYLGEHVFDNNLMAAAQAIMDQVFGXAEYEXLHGRRSNRAAFNLYTYNVGDQNQDIQTKDYADGEDAGEMRKLFRQKEPKKNHDYYXHGPGGCWFNKAPVAETXGSSPQSSGSTDKNAITG

SEQ ID NO: 364392 - protein, 132 aa, Zea mays
  Clone ID: MRT4577_95495C.1.pep
MSRSLGIPVKLLHEAAGHVVTVELKTGEVYRGSLVECEDNWNCQLENITFTAKDGKVSQLEHVFIRGSRVRFMIIPDMLKNAPMFKRLEARIRGKGSAIGVGRGRAVAMRARAAAGRGGGPVGRGSAPPVRR

SEQ ID NO: 364393 - protein, 65 aa, Zea mays
  unsure (1)..(65): unsure at all Xaa locations
  Clone ID: MRT4577_95496C.1.pep
MATKILALLALLALXVSATDAFIIPQCSLAPSAIIPQFLRPVTSMGFEHLAVKPKAQKRWGGYTP

SEQ ID NO: 364394 - protein, 117 aa, Zea mays
  unsure (1)..(117): unsure at all Xaa locations
  Clone ID: MRT4577_95497C.1.pep
MATKILSLLALLALFASATNAFIIPQCSLAPSSIITQFLPPVTSMGFEHPAVQAYRLQQAIAASVLHHPISPLLLHSLAHLTLQTMAAQLRLLFLPALCLLGLVXNPAACLLRSLVA

SEQ ID NO: 364395 - protein, 106 aa, Zea mays
  unsure (1)..(106): unsure at all Xaa locations
  Clone ID: MRT4577_95498C.1.pep
KGXTKEGXKNKKXXAXXGPEEXAQTRXXQAXEXXXGKXNXEAPKEXPXXXKAXNEGXXXDEETXXDXXXXXXAXGKDXQXXKXAKHXXEGXQXAEXXEEXDDERSH

SEQ ID NO: 364396 - protein, 161 aa, Zea mays
  unsure (1)..(161): unsure at all Xaa locations
  Clone ID: MRT4577_95499C.1.pep
TNALIIPQCSLAPSAIIPQILPPYTSMGFXHLAEQAQHXNKLLAASVLQQPIAQLQQQSLPHVTIQVITTQQQQQFLPVLSHLYMVNPAAYLQDQLLASNPLALANVVADQPQQPLQHILPTLRQLAMANPAAYLQQQQLLXSIPLAAGNAPTYLQQQLLQ

SEQ ID NO: 364397 - protein, 267 aa, Zea mays
  Clone ID: MRT4577_9549C.1.pep
KKLRHLLADRFADEKQTEFRYFIGVEAPKGLLNLEELQTLETVQASKDLPEQLKKLMQLRSLWIDNVSGADCDNLFATLSTMPLLSSLLISARDVNETLCLQALAPEFPKLHRLIVRGRWAAETLEYPIFCNHGKHLKYLALSWCQLGEDPLGVLAPHVPNLTYLSMNRVSSASTLVLSAGCFPHLKTLVLKKMPNVEQLEIGHGALPCIQGLYIMSLAQLDKVPQGIESLLSLKKLWLLYLHAEFRTQWLTNGMHQKMQHVPEIRV

SEQ ID NO: 364398 - protein, 185 aa, Zea mays
  unsure (1)..(185): unsure at all Xaa locations
  Clone ID: MRT4577_954C.1.pep
RETERIDLLAASKLEKGGATAEGDEIGIDPAAETPEQRNKFLVLRLYEALNARDHAAVQSLLAPDLEWWFHGPPKHQQHMMRLLTTTTTTTTGSFRFVPRSVDALAASSGTVIAEGHERGCYWVHAWTVGPDGVITQLREYFNTDLTVTRLAAAVAXSASGRAAAPTAPPTPCRDSCSPSDHSEG

SEQ ID NO: 364399 - protein, 50 aa, Zea mays
  Clone ID: MRT4577_95500C.1.pep
SVLKKLDEYLLTLSYITVYQASKDDLADYTSFSSAPSSKYIILITCCLIS

SEQ ID NO: 364400 - protein, 454 aa, Zea mays
  Clone ID: MRT4577_95501C.1.pep
MGKEKSHINIVVIGHVDSGKSTTTGHLIYKLGGIDKRVIERFEKEAADMNKRSFKYAWVLDKLKAERERGITIDIALWKFETTKYYCTVIDAPGHRDFIKNMITGTSQADCAVLIIDSTTGGFEAGISKDGQTREHALLAFTLGVKQMICCCNKMDATTPKYSKARYDEIVKEVSSYLKKVGYNPDKIAFVPISGFEGANMIERSTNLDWYKGPTLLEALDQITEPKRPSDKPLRLPLQDVYKIGGIGTVPVGRVETGVIKPGMVVTFGPTGLTTEVKSVEMHHEALQEALPGDNVGFNVKNVAVKDLKRGFVASNSKDDPAKEAASFTSQVIIMNHPGQIGNGYAPVLDCLTSHIAVKFAELVTKIDRRSGKELEKEPKFLKNGDAGMVKMVPTKPMVVETFSLYPPLGRFAVRDMRQTVAVGVIKSVEKKDPTGAKVTKAAAKVTKAAAKKK

SEQ ID NO: 364401 - protein, 80 aa, Zea mays
  Clone ID: MRT4577_95502C.1.pep
PPVVRLDIRERSGLSRASFGSTLCVYDHRLAFALIATRSTLSSVQAMGACATATPLQVLIGYMKIDFTVTSGSPPPPPKR

SEQ ID NO: 364402 - protein, 130 aa, Zea mays
  unsure (1)..(130): unsure at all Xaa locations
  Clone ID: MRT4577_95503C.1.pep
QLQQFMPVLSQQAMVNLAVYVQLLSSSPLTVGMALTYKQQQLLHKIVPVLNKLTVTIPAAYLQQLLPFXQLAVSNSAAYLQQRHKLLNPLTVANPLVATFLQQQQQLLPFNQFSLMNPALQQPIVGGAIF

SEQ ID NO: 364403 - protein, 163 aa, Zea mays
  unsure (1)..(163): unsure at all Xaa locations
  Clone ID: MRT4577_95504C.1.pep
QLVGIDTXLIDRFEKEADEMNKCSFKYAXCLNKLKAERERCITIDIALWXFATTKYYCTVIDAPGHRDFVKNMITGTSQADCAVLIIDSTTGGFXEAAISKDGQIREHALIAFTLEVTEMICCCNKMDTTTPKYSKARYEEIVQEVSSHLKKXGYNPDKVPFL

SEQ ID NO: 364404 - protein, 121 aa, Zea mays
  Clone ID: MRT4577_95505C.1.pep
MATKILALLALLALFVSATNAFIIPQCSLAPSAIIPQFLRPVTSMGFEHLAVQAYRLQQALAGSVLQQPINQLEQQSLGHLTIQTIATQQEQQVLPTLGPLNVGKPGGFFEQQGVVFKPLG

SEQ ID NO: 364405 - protein, 108 aa, Zea mays
  Clone ID: MRT4577_95506C.1.pep
MSQEQPRRPSGHEETSGGGEQGAVRYGDVFPAVSGGLAEKPVAPQDAATMQSAENLVFGQTLKGGPAAAMQSAATANERMGAVGHDQATDATAVQGVTVSETRVPGGG

SEQ ID NO: 364406 - protein, 87 aa, Zea mays
  Clone ID: MRT4577_95507C.1.pep
FKQNAIAVSKKTKRGPKKKRGNAKITQFFVFTQQVNLTHLALQGGHNRLGWPGNALANDFYRGPGLPQEWGVPPVFLITSPFSFFQA

SEQ ID NO: 364407 - protein, 155 aa, Zea mays
  unsure (1)..(155): unsure at all Xaa locations
  Clone ID: MRT4577_95508C.1.pep
MATNILXLLALLALFVSATNAYIITQCSLAPSAIIPQVLPPVTSMGLGHLAVQAYRLQQALTASVLQQPIDQLAVVNPGAYLQQQLLASNPLALANVATYQQQQWQHILPALSQLAIGNPDCYLQQLQTAXSSPLAEANAPTYLRAQLLRQIVLL

SEQ ID NO: 364408 - protein, 262 aa, Zea mays
  unsure (1)..(262): unsure at all Xaa locations
  Clone ID: MRT4577_95509C.1.pep
LASQRLSFCDSLPPSVSCEVALPPPVIRETCRTHQLASIGHVHSVSSTPTGHLIYHLGGIDTRVXIEMYENEAAEMSCCCCPSRSVLDKLXADRXTGITNDIYLRKXETTQYYCAVIDAPAHHDFIYNMITVTSQTDCAGLIIDSTTXGCEDGISKDGQTREHALLACTLGVKHMICCCNKMDATTPKYSEARYDEIAKEVSSYLKKVGYNPDKIAFVPISGFEGDNMIERSTNLDWYKGPTLLEALDQITEPKRPSDEPLR

SEQ ID NO: 364409 - protein, 157 aa, Zea mays
  Clone ID: MRT4577_9550C.1.pep
SLMIVASFFAPIYYAFSCHPNFRLLYLSSISILGLLAIITLLSPALFTPRFRPFRANLFLAMGSSAVIPATHVLCLYWDHPNVFIALGYEIATALSYFVGATFYVSRVPERWKPGAFDMAGHSHQIFHVFVVMGALAHCVTTLLIIDFSRASPSCGF

SEQ ID NO: 364410 - protein, 104 aa, Zea mays
  unsure (1)..(104): unsure at all Xaa locations
  Clone ID: MRT4577_95510C.1.pep
LKQQLLQXQLLQQIEPALTQLMMANPAAYLQRLLPFNQMTVSNYAAYQQQRQQLLNPLAVANPLVAAFLQQQQLLPYNQFSLMNPALSWQQPIVGGASFRLHMR

SEQ ID NO: 364411 - protein, 56 aa, Zea mays
  Clone ID: MRT4577_95511C.1.pep
IHAQVVALARAALMVTSSAASYDVLSCCARQNALAVDELSLSINGDVDQHRLCVNI

SEQ ID NO: 364412 - protein, 43 aa, Zea mays
  Clone ID: MRT4577_95512C.1.pep
TNYLRPDIKRGHFTPEEHNSILQLHAIIGNRWSTIAAQLPGRT

SEQ ID NO: 364413 - protein, 376 aa, Zea mays
  unsure (1)..(376): unsure at all Xaa locations
  Clone ID: MRT4577_95513C.1.pep
MDSHGHVSGGKRKGKRARKPEPPVLASPDNSHDHKHHDTAPSSSPLSTAAVAASDSPDPEPASSSPAPRRRGRKSRRIRNGTHSEVDAAPSPSPPPRRGGPKGAPNGAVDVAEPSRRELAVKMVEVPAAVEPLRWDQVVKVVPSMDAVVKVFCVHTEPNFSLPWQRKRQYSSSSSGFIIGGRRVLTNAHSVEHYTQVKLKKRGSDTKYLATVLAIGTECDIAMLTVEDDEFWKGVSPVEFGSLPALQDAVTVVGYPIGGDTISVTSGVVSRIEILSYVHGSTELLGLQIDAAINSGNSGGPAFNDKGKCVGIAFQSLKHEDAENIGYVIPTPVINHFIEDYKKSGEYTGFPILXGIEWQKMENPDLRRPMGMKTNQ

SEQ ID NO: 364414 - protein, 77 aa, Zea mays
  Clone ID: MRT4577_95514C.1.pep
LLFLKKKKFIHKFIQHSNLKQKHKTQKSPKRKLTHIKYLSLISPLPVLKPIFPTALINHPKLDKTSFSNILPTSLFS

SEQ ID NO: 364415 - protein, 90 aa, Zea mays
  Clone ID: MRT4577_95515C.1.pep
RQSTGSLDAVNPRVGIINQTGLICQQCLVVDSDTRGDYVCCCTRRHWDTATNPLWHPVVRLGDLFHMPVKYTQCHRAKKNKNKRGAARDL

SEQ ID NO: 364416 - protein, 54 aa, Zea mays
  Clone ID: MRT4577_95516C.1.pep
MVQEFGESFVWHRSNPSFYLGVPEARIREEIHMENFYPGNRCLELRNWVGVCSG

SEQ ID NO: 364417 - protein, 183 aa, Zea mays
  Clone ID: MRT4577_95517C.1.pep
MDAAKLVTPIAVSHILAHPSAGSDGAVTDLVVQVLDLKSVGTGSRFSFTATDGKDKIKAMLPTNFGSEVRSGNLKNLGLIRIIDYTCNVVKGKDDKVLVVIKCELVCQALDAEINGEAKKEEPPIVLKPKDECVGVTPPLAMKPKQEVKSASQIVNEQRGNTAPVKPLSMTKRVHPLITLNPY

SEQ ID NO: 364418 - protein, 158 aa, Zea mays
  Clone ID: MRT4577_95518C.1.pep
YRRPSSSFFFFFFFFFFFFFFTSTTLLGLYSSIIAGAFGTRGFEIDTQLISLSMTPCVTDLLSYRTHMHQHFSYWSQMSIHVHGGNLTRLSSSSARTHHSQGSPYYRRRFQIFYHDNQLDGTNYWINSTGEQAPSSKTISSWCSKESREQASHEQATP

SEQ ID NO: 364419 - protein, 148 aa, Zea mays
  Clone ID: MRT4577_95519C.1.pep
GRVGARVQRAQRQRPSLCRAWRWRPLPLDHVSGCEARDRRWLTASSIEERGIQGRDDDPVCVVHQQTGLDTARAVLRAPPSTSDEPSRVRSSTSASPAPTGSDELTCGIAGYDYQSVRRWTTFKRLGYGLVECEKIFVPVHRNAHWCT

SEQ ID NO: 364420 - protein, 95 aa, Zea mays
  Clone ID: MRT4577_9551C.1.pep
GKYWGQMIQPFITSNWFLTVFSSANLTVFQTRAVRELQSTMCFFILNDRVRFTKTIAFLHCNSGLSRFAFFPGVGHVCSLGACFENLMFTITGQL

SEQ ID NO: 364421 - protein, 60 aa, Zea mays
  Clone ID: MRT4577_95520C.1.pep
SQLKYFIFWSFLSFGKVDFLKAMYSFTLESTEGGKWGIRGRLPVRMGLQLPGSCQVIDRH

SEQ ID NO: 364422 - protein, 89 aa, Zea mays
  unsure (1)..(89): unsure at all Xaa locations
  Clone ID: MRT4577_95521C.1.pep
MRSAQVRFSQRGDGPTTLTGRLSGLKAGLHGLHGHALGDDTRGCMAHWPHLSSDGKDHVQPXIGPALADDIGNVTAGADGVVTETHTER

SEQ ID NO: 364423 - protein, 76 aa, Zea mays
  Clone ID: MRT4577_95522C.1.pep
RLLYDYYKESCRAPQAPNRNNERCTSYLVCRQLSFRRPVSLGDLLAFDAAHMESVTTVMTRVWNITSSLLELTTSR

SEQ ID NO: 364424 - protein, 102 aa, Zea mays
  Clone ID: MRT4577_95523C.1.pep
PSKSLFTIFESGSGRIFFKPFYILTCGHTLLLVQFKLGLGAHNKAGQIGPGVEHQQFFQVGEKSHRPHHRLMLLVVGVGLLLCRCSFSLGHYTLPVTLSLSR

SEQ ID NO: 364425 - protein, 136 aa, Zea mays
  unsure (1)..(136): unsure at all Xaa locations
  Clone ID: MRT4577_95524C.1.pep
ATVTGMKRSLRAIYTTVDGILEEIIAXRKGIRDEKISGGAENVDENLVDVLIGLQGKGGFGFHLDNSQIKAIILDMFAGGTGTSASAMEWGMSELMRNPSAMKRLQAEIREVLRGKAMVIGAYMLAGNLRYLKMVI

SEQ ID NO: 364426 - protein, 143 aa, Zea mays
  unsure (1)..(143): unsure at all Xaa locations
  Clone ID: MRT4577_95525C.1.pep
RHSRGPTTAAKTDSPRTRRGXGASAATATTGPQRTQAPRARLTAADRAPTAXGGGENPTRQPDRSQQAAAAGSGPQAPGGPQQPPAPGQQGPPAQGGAQNTRAQQRQQRERARPAADAQQQQTRPXNQPAAXNAGAEGQQQQP

SEQ ID NO: 364427 - protein, 32 aa, Zea mays
  Clone ID: MRT4577_95526C.1.pep
IFQNVQMSVNFLVSLLKKNWQNVCSSMFLTSV

SEQ ID NO: 364428 - protein, 177 aa, Zea mays
  Clone ID: MRT4577_95527C.1.pep
MAFRSCLVRLLLPMAALLLLSKIFAAKGLDLKDLAVLSGAHTLGTAHCPSYAGRLYNFSSAYSGADPSLDSEYADRLRTRCRSVDDTATLSEMDPGSYKTFDTSYYRHVAKRRGLFQSDAALLADATTREYVLRMATGRFDGVFFQDFGESMIKMGNAGVLIGAAQGEIRKKCYIVN

SEQ ID NO: 364429 - protein, 134 aa, Zea mays
  unsure (1)..(134): unsure at all Xaa locations
  Clone ID: MRT4577_95528C.1.pep
APGAXAGAPXGRLPRAGGXXRAPVGPXAGGXAXGVGPAGAPPXXRPRPXXLXPRRRSPPPPFXGLXLPXVPLAVXLLXVAGVPSGSCRGRXFACFXSGXAAPSPWXXPCPFLVFPFFVPXGCFCPPXXXCPCRF

SEQ ID NO: 364430 - protein, 82 aa, Zea mays
  Clone ID: MRT4577_95529C.1.pep
DELSLPDSCVSPPHLTWLLLCFSSLVSLLCSNPSQQRWLECLSTLSTTAQCRTRLYTTPYSPLPSSRSVEKLHQINLSMNPC

SEQ ID NO: 364431 - protein, 60 aa, Zea mays
  Clone ID: MRT4577_9552C.1.pep
NETQGCRYELVQDLRYFFCNISNWRCCRASFCCTRKCYRNLGPRGNESLTNWCSNTKNNQ

SEQ ID NO: 364432 - protein, 447 aa, Zea mays
  Clone ID: MRT4577_95530C.1.pep
MGKEKTHINIVVIGHVDSGKSTTTGHLIYKLGGIDKRVIERFEKEAAEMNKRSFKYAWVLDKLKAERERGITIDIALWKFETTKYYCTVIDAPGHRDFIKNMITGTSQADCAVLIIDSTTGGFEAGISKDGQTREHALLAFTLGVKQMICCCNKMDATTPKYSKARYDEIVKEVSSYLKKVGYNPDKIHFVPISGFEGDNMIERSTNLDWYKGPTLLEALDLINEPKRPSDKPLRLPLQDVYKIGGIGTVPVGRVETGIIKPGMVVTFGPSGLTTEVKSVEMHHEALQEALPGDNVGFNVKNVAVKDLKRGYVASNSKDDPAKEAASFTSQVIIMNHPGQIGNGYAPVLDCHTSHIAVKFAELVTKIDRRSGKELEKEPKFLKNGDAGMVKMVPTKPMVVETFSEYPPLGRFAVRDMRQTVAVGVIKSVEKKDPTGAKVTKAAAKKK

SEQ ID NO: 364433 - protein, 122 aa, Zea mays
  Clone ID: MRT4577_95531C.1.pep
RPGLSLLSLVPAGPPWSIARSEGGGGGGTPNFSDMAMRLAAAATFVRRLAPARPPVRILGGLRRSECGHKPSARFKGSFGNARRRRLSASRPRRGAPLHTLAPPLQAYLSWRLPPPSVREGT

SEQ ID NO: 364434 - protein, 124 aa, Zea mays
  Clone ID: MRT4577_95532C.1.pep
APSAIISQFLPPVPSMGLEHPPVQAYRLQLAHAASALQQPIAQLQQQSLAHLTLQTIATQQRQHFLPSLNHLAVVNPVAYLQQHLLASNPLAMANVATYQQQHQPQHFMPSFIHSTIMIHTVQC

SEQ ID NO: 364435 - protein, 154 aa, Zea mays
  unsure (1)..(154): unsure at all Xaa locations
  Clone ID: MRT4577_95533C.1.pep
TPLALATXVASHPHHQLPQFLPALSQLPMVTPIASLQQQQFXSSSPLAMGNAPTYLQPQLSQPQLLQQIVPALTQLAVATPAAYLQQLLPFNQLPVSNFAAYLQQRQQLLNPLAVANPLVAAFLQQQQLLPYTQFSLMNXYIVRPPPIVGGPIF

SEQ ID NO: 364436 - protein, 80 aa, Zea mays
  Clone ID: MRT4577_95534C.1.pep
EQQESLRNQRKLQVGTGARSEKIRTYNYKDNRVTDHRLKMNFELTSFLLGDIESAIQSCATMEQQELLEEMASSVGAVNV

SEQ ID NO: 364437 - protein, 111 aa, Zea mays
  unsure (1)..(111): unsure at all Xaa locations
  Clone ID: MRT4577_95535C.1.pep
SLAPTAIISLFLRPVTSWGWEHLAVHAYRLQQALAESVLQQPINQLLLQSLAHLTIHTISTQHQQQFLPALIQLDVVNPVSYLQQHVLASNPLALANVAAXYQQQQQLQQF

SEQ ID NO: 364438 - protein, 73 aa, Zea mays
  unsure (1)..(73): unsure at all Xaa locations
  Clone ID: MRT4577_95536C.1.pep
MATKILSLLALLALFASATNASIIPQCSLAPSSIIPQVLPPGTLMAFEHPSXQAFRFHQAMAGGVXHHPIAQL

SEQ ID NO: 364439 - protein, 149 aa, Zea mays
  unsure (1)..(149): unsure at all Xaa locations
  Clone ID: MRT4577_95537C.1.pep
MGKEKSHINIVVIGHIDSGKSTTTGHLIYKLGGIDKRVIERFDKEAAEMNKRPFKNAWVLDNLKAERERSITVDIALRKFYITKYYCSVVDAPGHRDFIKNMITGTSQADCAAPIIAYTTGAYXEMPIPNDGKNREHSSPSAKTSKRNK

SEQ ID NO: 364440 - protein, 181 aa, Zea mays
  unsure (1)..(181): unsure at all Xaa locations
  Clone ID: MRT4577_95538C.1.pep
MPKEKSHINIVAIGHVDCXGSATTTGHLIYKFAGIDKCAIXRLDKEAAEMNKRSFKYAWVLDKLKADRERGITIDIALWKFETTKYCCTSIDAPAHRDFIKNMITGTSQADCAVLIIDSTTGAVEAVISKDGQTLXHALXLAFTLGVKQMICCCNKMDATTPLYSKARYDEIVKEVSSYLQ

SEQ ID NO: 364441 - protein, 46 aa, Zea mays
  Clone ID: MRT4577_95539C.1.pep
LLPPIECIFTPNSCLNKPGRQTLVPHLSQPQASHFQGRQQDSGLLP

SEQ ID NO: 364442 - protein, 42 aa, Zea mays
  Clone ID: MRT4577_9553C.1.pep
RGIESLLSLKKLWLLYLHAEFRTQWLTNGMHQKMQHVPEIRV

SEQ ID NO: 364443 - protein, 84 aa, Zea mays
  Clone ID: MRT4577_95540C.1.pep
HSCRFKGQLDVNTKVSLRMQLPNRKYCRRSLLRLQQLLLLTAVNGSLVFSPAIAYSKPNNTAERDGESCWPAAQGVGYSFWCRP

SEQ ID NO: 364444 - protein, 164 aa, Zea mays
  unsure (1)..(164): unsure at all Xaa locations
  Clone ID: MRT4577_95541C.1.pep
QQQVQQFMPVLSXIXAMVNLAVYIQLFLYSPLSVGNALRYLQQQLLQQIVPALTQIVVANPAAYLQQLLPFNQLAVSNFAAYLQQRQQLLNPLAVANPLVATFLQQQQQLLPYNQFSLMNPALQQPIVGGASFRLHMRCTRQWCPHTDMCFLEIINILIEIYLD

SEQ ID NO: 364445 - protein, 70 aa, Zea mays
  Clone ID: MRT4577_95542C.1.pep
LLLSWWALMVPDCVILPDFTILEPGWPLVRPFFCFVVLARTSVCSLSTIFGHMFFIKKKKKKKKKKKEGA

SEQ ID NO: 364446 - protein, 183 aa, Zea mays
  unsure (1)..(183): unsure at all Xaa locations
  Clone ID: MRT4577_95543C.1.pep
KTKKKKKEKTENQRQGKEETKQQQQQTTTVXPALRKLTMEKPTVNQKLLTKRPLTVGNAPTYLQQQLLQQIVPALTHQLAMANPATYLQQLLPFNQLAVSNSAGYLQQRQQLLNPLAVANPLVATFLQQQQLLPYNQFSLMNPALQQPIVGGAFFRLHMRCTRQWCPHTGMCFLEIINILIEI

SEQ ID NO: 364447 - protein, 58 aa, Zea mays
  Clone ID: MRT4577_95544C.1.pep
KTGNEFKLGGPIKKVLSWKEGEVKLGSLKRPPLFFYPFFFFFFFFFLFNFFFFLFFFF

SEQ ID NO: 364448 - protein, 226 aa, Zea mays
  unsure (1)..(226): unsure at all Xaa locations
  Clone ID: MRT4577_95545C.1.pep
MNELTTMLTKIVXLLGLLALLQRATXCVSLYPQXHIDPXSACIPQXLPTXVHLMGLXHPGVKGYRLQLWLGGSVLQQPIVQXLQQQXLAHLTLQTIETQQQQHFVPSLSHLQVGNPGAYLEQQLLASNPLGLANVCTYQEQQQLQQFMSALSQLAMVNPAVYLQLLSSSPLAVGNAPTYLQQQLXLQQIVPALTHQLAMANPATYLQQMLPFNQLTVWNSAAYLQE

SEQ ID NO: 364449 - protein, 110 aa, Zea mays
  Clone ID: MRT4577_95546C.1.pep
PAGHEHLSLHRRYRTPFRLRILPGAVRRQLWPARALDSSISDVRPSTRSDAFAQCNRLPVAGNQREPDGEPGVPRGGRSSRSFGSRGDHVRRWIGDKVDVSFYVAFYSKR

SEQ ID NO: 364450 - protein, 63 aa, Zea mays
  unsure (1)..(63): unsure at all Xaa locations
  Clone ID: MRT4577_95547C.1.pep
MDASGAGSKAKKGAAGRKAGGPRKKSVSRSVKAGLQXPAGRIGRYLXKXRDXQRVATLPPPFI

SEQ ID NO: 364451 - protein, 206 aa, Zea mays
  Clone ID: MRT4577_95548C.1.pep
RAFFRQSGLPYVEVNLDVFPEREAELGSRAGAAARVPQIFLNEKLLGGLVVLNSLRNGGEFERRVRDLAGRRCPDSAPRVPVYGFDDDAGKADEEAEDAMVGIVRVLRHRLPIQDRFVRVKLVKNCFSGTDMVDGIVNHLDCSRKKAVEIGKELARKHFIHHVFRENDFEDGNQNLYRFLEHDPAVPKYYNFRGSTNDGEPRPAAA

SEQ ID NO: 364452 - protein, 59 aa, Zea mays
  Clone ID: MRT4577_95549C.1.pep
CRNRASFTGATHAFVFDLVRFLVGSLLPIRGKLLYSELMAHNYVLTGEVEGVLNCHSNV

SEQ ID NO: 364453 - protein, 96 aa, Zea mays
  Clone ID: MRT4577_9554C.1.pep
PWLHLLLLYYSAALLGRRDPHRRVTSSRVERLEPGMQSSCRPTGRLDVGLGGAKEGKICGPSVRSEGGKSGSEDAVNSRSGWRQMWRRRTASAESD

SEQ ID NO: 364454 - protein, 132 aa, Zea mays
  Clone ID: MRT4577_95550C.1.pep
RKQLAPKAARKSAPAPGGVKKPPRFRPGPVALREIRKFPKSPGLFIRKLPFQRLVREIAQGFKTGLRFQSSAVAALQEAPEGFLVGLFEDPNLWAIPAKRVPFMPQDIQLAPRIRGERAFAVALLLFVVVMF

SEQ ID NO: 364455 - protein, 36 aa, Zea mays
  Clone ID: MRT4577_95551C.1.pep
TICCRSSGSLVPFSHGIRLLKGTKLPLDADRQTSSA

SEQ ID NO: 364456 - protein, 90 aa, Zea mays
  Clone ID: MRT4577_95552C.1.pep
GGPPNIGKGWWAQTPCLGTPSIHLLGFGGFSRIETGRVPRRPLFKEGPPGVFFFLGKKKRPPRGEQPVWAFLKKAGGGFFQPKKKSTTPR

SEQ ID NO: 364457 - protein, 773 aa, Zea mays
  Clone ID: MRT4577_95553C.1.pep
MPRKASSNSDARAKSRKRKRAAASASPSKQPDDHSDDSDTAAAANGDDETSRAASVNGGGGTLAGVGGDDDPVLDLRAAEVLSSSAEPVSAFPAAVRRAVSRPHPSVLAVIAAERAAASSDDAPVTPASVPVLENISHGQLQVISAMLPDHPSLSYDPDKPSTYVCTPPPLMEGCGVHKQFYDKLHIVPRHSDWFVPQTVHRLERQVVPQYFSGKSQGQTPEKYIMLRNKVIAKYLERPGKRLVFAECQGLVTSTPELYDLSRIVRFLESWGIINYLATGSVYRGPRTASSLIKEETTGELQLVSAPMKSIDGLILFDRPKCSIQANDISSLVSTSSAPFVVNHDGDSANLDEKIWERLSESSCSFCSQPSHASDYESQKETDIALCSDCFHNAKFVTGHSNLDFQRVDAMKDGSDTDGDRWTDQETLLLLEGIEKFNDNWNHIAGHVGTKSKAQCIHHFIRLPVADGLLENIEVPEASLPSGMQSSGFLHSDSNGSTSGSQPGNQIPFINSANPVMSLVAFLAAEVGPRVAASCASAALSVLTREDSRMNAEGIDAMGHGTHLNYGPSSSISSETVKNAASCGLSAAATKSKLFADQEEREIQRLSATIINHQLKRLELKLKQFAEVETMLLKESERLDLMRQQLVTQRIRMLSTRFTSTGGTIPGGSSGMVSNLMNQASGLRPPLMMPGSVTQSSMPAMYANNMQGHPQMALLQQRQQMLSFGPRLPLSAINPGSSSSAPNMMFNHGMPNSAAPNHHPLLRSPSGDNSNVG

SEQ ID NO: 364458 - protein, 47 aa, Zea mays
  Clone ID: MRT4577_95554C.1.pep
MCSGPGALPHKRIGWSLVLNDAQAKPFTGIHFIFGDSWILPPPSLVG

SEQ ID NO: 364459 - protein, 96 aa, Zea mays
  unsure (1)..(96): unsure at all Xaa locations
  Clone ID: MRT4577_95555C.1.pep
ATNENRLAGELLSARVSRAAGLVQDAVRMVTDDYMRSAVDYFEATRSLXSFASTLRGGTWSRFEFHGADFGWGEPDMTDPSTLPEKEDITEPDTPK

SEQ ID NO: 364460 - protein, 130 aa, Zea mays
  Clone ID: MRT4577_95556C.1.pep
SSSVPPSSLVPAFAQAAHRHHRRPDPDASFDGGTRTQSACCSRPWTTIVPFVRGVLLVQRALLTTRQARPPMLFRSGVSVDLRKKRSCAVGVRSPRRKTDMRSHSRVCMFLEVAISDSRERESGRPRGTQ

SEQ ID NO: 364461 - protein, 41 aa, Zea mays
  Clone ID: MRT4577_95557C.1.pep
PEKMIGRFLSRRLLLSTGYAYPAYECYKTCALNTPQIEHLI

SEQ ID NO: 364462 - protein, 174 aa, Zea mays
  unsure (1)..(174): unsure at all Xaa locations
  Clone ID: MRT4577_95558C.1.pep
IGYLEPAGILVVTAVCFLRRIHGRKISPERESSPRPSLAARWARLTLPRSALGDGALSDIVGQTRQARMELQXVMWEYVGIVRSTGRLKGVEVCEMRNLFCCAKLVVRSALARRESRGLHFTEDFPYLEESRRKPTVIFPAAVQELTWSSKPLQRQLQADDNACSSSGWALGIR

SEQ ID NO: 364463 - protein, 67 aa, Zea mays
  Clone ID: MRT4577_95559C.1.pep
PYTFWEADPPHHHKRPGMAKQPCGGPVRFGAFWFYSSKDIVGNVFFKLFCIFLKGRLPTSYGTSKFS

SEQ ID NO: 364464 - protein, 154 aa, Zea mays
  unsure (1)..(154): unsure at all Xaa locations
  Clone ID: MRT4577_9555C.1.pep
MDHVVGGKFKLGKKIGSGSFGELFLAVNVQTGEEVAVKLENVKTKHPQLHYESKLYMLLQGGTGIPHLKWFGVEGEYNVMVIDLLGPSLEDLFNYCSRKFSLKTVLMLADQMINRVEYMHXKGFLHRDIKPDNFLMGXLGREANQVYIIDYGLA

SEQ ID NO: 364465 - protein, 159 aa, Zea mays
  unsure (1)..(159): unsure at all Xaa locations
  Clone ID: MRT4577_95560C.1.pep
MGKENSHINIVVIGHVHSGKSTTTGHLIYKLGGIDKRVIERFEKEAAEMNKRPFKYAWVLHKPKAERERGIPIDIALWNFETTKYYCTGIDAPGHRDFIKNMIPGTSQAHCAALIIDPPTGGSEAGISKDGQTPEPALLAFTLAAQQTIXCRHQMDGTP

SEQ ID NO: 364466 - protein, 395 aa, Zea mays
  Clone ID: MRT4577_95561C.1.pep
VTLLASGGVGHIYPTTTNPPVATGDGIAMCHRAQAVISNMEFVQFHPTALSDEGLPIKPKTRRENAFLITEAVRGDGGILYNQSMERFMPMYDDRSELAPRDVVARSIDDQLKKRGEKYVLLDISHRPRDKVLAHFPNIAAECLRYGLDITRQPIPVVPAAHYMCGGVRAGLQGETNVKGLYVAGEVACTGLHGANRLASNSLLEALVFARRAVQPSIDLMVDADGDARPSLAARWARPTLPRSVLGDSVLSDFVGRTRQARMELQSVMWEYVGIVRSTGRLKQAEWRIGDLESEWEEFLFRRGWKPTTVGVEVCEMRNLFCCAKLVVRSALARRESRGLHFTEDFPYLEESRRKPTVIFPAAVQELTWSSKPLQRQLQADDNACSSSGWALGIR

SEQ ID NO: 364467 - protein, 111 aa, Zea mays
  unsure (1)..(111): unsure at all Xaa locations
  Clone ID: MRT4577_95562C.1.pep
MATKILALLALLALLVSATNAFIIPQCSLAPSAIIPQFLPPVTSMGFEHPGGQAYRLQLVLAGSALQQPIAQLQQQCLAHVTLQTMGTHQQQHXLSLLSHLAVENRDSYFQ

SEQ ID NO: 364468 - protein, 236 aa, Zea mays
  unsure (1)..(236): unsure at all Xaa locations
  Clone ID: MRT4577_95563C.1.pep
MPLARSVSPASWANQKSLLSIAAIAHVHSAKSTTXGHLIYNLAGIDKRAIHRFEKEAAEMNKRSFKYAWVLDKLKAERERGITIDIALWKFETTKYYCTFFDAPGHRDFIKNMITGTSQADCAVLIIDSTTGGFEAGISKDGQTREHALLAFTLGVKQMICCCNKMDATTPKYSKARYEEIVKEVSSYLKKVAYNPDKIAFVPISGFEGDNMIERSTNLDWYEGPTLLEALDQITE

SEQ ID NO: 364469 - protein, 185 aa, Zea mays
  Clone ID: MRT4577_95564C.1.pep
MTCSMDLPAKGGFSFDLCRRNSMLEKNGLKLPGFRKTGTTIVGLVFQVRPPTLVASPFRYPDGVVLGADTRATEGPIVADKNCEKIHFMAPNIYCCGAGTAADTEAVTDMVSSQLQLHRYATGRESRVVTALTLLKSHLFRYQGHVSAALVLGGVDCTGPHLHTVYPHGSTDTLPFATMGSGSLA

SEQ ID NO: 364470 - protein, 110 aa, Zea mays
  unsure (1)..(110): unsure at all Xaa locations
  Clone ID: MRT4577_95565C.1.pep
HPPKENPQKKAGYEGKNQKGGSSXGAGSGLFGPLHLWDDLMKFSGPGESMLSRSVVVKKMWASIKETTLRVPFARGKIFCVEKLRALLGVEPFPGFPVSKLLAPPFPKTK

SEQ ID NO: 364471 - protein, 73 aa, Zea mays
  Clone ID: MRT4577_95566C.1.pep
GASPVTAGPLKLDSIKNILFHSIKLGYIVRLSLLPGVMNPQVYWLEMNRCKNIFLCFTSRKYCLIQNGAWTRG

SEQ ID NO: 364472 - protein, 177 aa, Zea mays
  Clone ID: MRT4577_95567C.1.pep
MFRLVIGNSVRHQATVQLQQQFLAHITGHTIAAQLPQQVLPALSHLAVVNPVVYLQQRLLACNPLALANVDANQQQQQLQQFLPALSQLAMVNPADYLQQQQLLSSSPLAVANAPTYLQHELLQHIVPALTQIAVANPVAYLQQLLPFNQLTMSNSVAYLQQRQQILNPLAVANPLV

SEQ ID NO: 364473 - protein, 273 aa, Zea mays
  Clone ID: MRT4577_95568C.1.pep
MTGSMDLPAKGGFSFDLCRRNNMLEKNGLKVPGFRKTGTTIVGLVFQDGVVLGADTRATEGPIVADKNCEKIHFMAPNIYCCGAGTAADTEAVTDMVSSQLQLHRYATGRESRVVTALTLLKSHLFKYQGHVSAALVLGGVDCTGPHLHTVYPHGSTDTLPFATMGSGSLAAMSVFESKYKEGLTREEGIQIVCEAICAGIFNDLGSGSNVDVCVITKGKTEYLRNHQLPNPRTYASSKGYSFTKGQTEVLSSKVTLLKQKVEVAEGGDAMEE

SEQ ID NO: 364474 - protein, 118 aa, Zea mays
  Clone ID: MRT4577_95569C.1.pep
QQWLRKGLTLLALVALLVSATNAFIITQRSLAPSAIIPQYLPPVTVMGFEHSAVQAYTLQLALAASVLQQPIAQLQQQCLAHINLQTMATQQQQQFLPSLSQLAVVNPVAYLQQQLLA

SEQ ID NO: 364475 - protein, 593 aa, Zea mays
  unsure (1)..(593): unsure at all Xaa locations
  Clone ID: MRT4577_9556C.1.pep
MDHVVGGKFKLGKKIGSGSFGELFLAVNVQTGEEVAVKLENVKTKHPQLHYESKLYMLLQGGTGIPHLKWFGVEGDYNVMVIDLLGPSLEDLFNYCSRKFSLKTVLMLADQMINRVEYMHQKGFLHRDIKPDNFLMGLGRKANQXVLYMCLILAVQLVIFEPKVFTCILPLALLVLHLRIPKDPALLIWMGGVXALCDVLLTFDDDFLFNVPAFYSLLPIIYFFYLWLMLYGFLIYLAAIMLCSRKHLFSGIEISWYXVVELLLAFVXVYIIDYGLAKKYRDLQTHKHIPYRENKNLTGTARYASVNTHLGVEQSRRDDLESLGYVLMYFLRGSLPWQGLKAGTKKQKYDKISEKKMLTPVEVLCKSYPSEFISYFHYCRSLRFEDKPDYSYLKRLFRDLFIREGYQFDYVFDWTILKYPQIGSNPRTRAGERTSGAAGPSMDRIEKTPGEASGRRNPSGPVXSERQLRATATRDRXSMSLKEIMHSTDRSGERTVERPRTSSRTGSASRRAVASSSRPATSSMEPSEQQYSRASRLFSSNSGSRPSSAQRVNPAPGESRATSLSRAAVARGSRDEPLHRSLELLSLGSGKRK

SEQ ID NO: 364476 - protein, 273 aa, Zea mays
  Clone ID: MRT4577_95570C.1.pep
MTGSMDLPAKGGFSFDLCRRNSMLEKNGLKLPGFRKTGTTIVGLVFQDGVVLGADTRATEGPIVADKNCEKIHFMAPNIYCCGAGTAADTEAVTDMVSSQLQLHRYATGRESRVVTALTLLKSHLFRYQGHVSAALVLGGVDCTGPHLHTVYPHGSTDTLPFATMGSGSLAAMSVFESKYKEGLTREEGIQLVSEAICAGIFNDLGSGSNVDVCVITKGKTEYLRNHQLPNPRTYVSSKGYSFTKGQTEVLSAKITHLKQKVEVTEGGDAMEE

SEQ ID NO: 364477 - protein, 348 aa, Zea mays
  Clone ID: MRT4577_95571C.1.pep
MDFIVGLPHTCAGYDSIWIVVGHLTKAAHFIPVKTTYNSAVLAELYMSRIVCLHGVPKKIVSYRGTQFTSHFWQQLHEALGTHLKFSSAYHPQTNGQTERTNQILEDMLRACALQDKLGWDKRLPYAEFSYNSYQDSLKMSLFQALYGRNCRTLLHWDQLGERQVFAPDILLEAEENVRMVRENLKTAQSRQRSYADTRRRELSFEVGDYVYLKVSPIRGIKRFGVKGKLAPRYIGPYQIQARRGEVAYQLSLPESLSAVHDVFHVSQLKKCLRVPEEQLPTEDLEVQEDLTYIEKPTQILETADRVTRRSTIRMCKVKWGHHSEEEATWEREDDLKAKYPELFSSQP

SEQ ID NO: 364478 - protein, 140 aa, Zea mays
  unsure (1)..(140): unsure at all Xaa locations
  Clone ID: MRT4577_95572C.1.pep
PGLWLLRLHFRLWSLQGQFWLPTLVKRNSNLTMGVMVNVNFAKSTTTGHLIYNLEGIDKRVIKRFKKEAAEMNKRSFKYAWVLDKLKAERERGITIDIALWKFETTKYYCTVIDAPGHRDFIKNMITGTXQADCAVLIID

SEQ ID NO: 364479 - protein, 52 aa, Zea mays
  Clone ID: MRT4577_95573C.1.pep
GIGTPLPCQVIKTGPSSWFFCPLLILPEPYRAYREPPLISKPVGRVFCRHPK

SEQ ID NO: 364480 - protein, 238 aa, Zea mays
  unsure (1)..(238): unsure at all Xaa locations
  Clone ID: MRT4577_95574C.1.pep
MSKHKHHLNIVPIGHVKSGKSTTTGHLIYKLXGCIDKRVTXRIENEAAEMYNSTFKYTRVLDKFKAEREIGITIDIALCKPETTXYYCSSIDAPGHRDFIWNMITVTSQSDCAALIIDXSTTGXMMLRISKDAQTREHALLAXTLGVKKMICCCNKMDATTPLYSEALYEXIVKEVSSYLKTVGYXTDKIAFVPISGFESDDMIERSTNLDWYKGPTLLEALDQITEPKRPSDKPLRL

SEQ ID NO: 364481 - protein, 266 aa, Zea mays
  Clone ID: MRT4577_95575C.1.pep
MATKILSLLALLALFVSATNAFIIPQCSLAPSAIIPHFLPPVTSMGFEHSALQANRLQQALAASVLQQPIAQLQQQSLAHLTIQAITTQQQQQFLPALSYLAMVNPAAYLQQQLLASNPLALANVVANQQQQQLQQFLPAHSQLAMVNPAAYVQQQQLLSSSPLAVGNAPTYLQQQLLQQIVPALTQLAVANPVAYLQQLLPFNQLTLSNSAAYLQQRQQLLNPLVVANPLVAAFLQHQQLLPYNQFSLMNPVLSRQQPIVGGAIF

SEQ ID NO: 364482 - protein, 181 aa, Zea mays
  Clone ID: MRT4577_95576C.1.pep
MATKILSLLALLALFVSATNAFIIPQCSLAPSAIIPQFLPPVTSMGFEHLAVQAYRLQQALAASVLQQPINQLQQQSLAHLTIQTIATQQQQQFLPALSQLDVVNPVAYLQQQLLASNPLALATVAAYQQQQQLQQFLPALSQLAMVNPAVYLQQQQLLSSSPLAVGNAPTYLQQQLLQQI

SEQ ID NO: 364483 - protein, 213 aa, Zea mays
  unsure (1)..(213): unsure at all Xaa locations
  Clone ID: MRT4577_95577C.1.pep
PPSRARYYAVLALLALVASATNAFLLXQCCLGPRSIIKQXLPPDTSMGFNHPAAQAYRRQHDIGGRVFQQPISKLQQQSLGHRTIHTIVPQQQQQCLPAVSHLAMANPAAYLQQHVLASNPLALANVVANQPQQQLQQFLPALSQLAMVNPAAYLQQQQLLXSSPLAVANAPTYLAQQLLQQIVPALTQLGEENPAAYLAQLXAFNQLTMLEL

SEQ ID NO: 364484 - protein, 55 aa, Zea mays
  Clone ID: MRT4577_95578C.1.pep
LLVSVPFKYSTVINHERVPTILLFAHMSDTSTACCLVPSSAPHACMHPGLPQQSN

SEQ ID NO: 364485 - protein, 89 aa, Zea mays
  Clone ID: MRT4577_95579C.1.pep
PPRLKNVCFYPELAQKTKRDCSMGGGIHPFGQDSGKKSIQCRQGFQKKEIQYHLVKQEMSANGGKIYPKPMEGDLRGRQKTGACVTECL

SEQ ID NO: 364486 - protein, 363 aa, Zea mays
  Clone ID: MRT4577_9557C.1.pep
MDHVVGGKFKLGKKIGSGSFGELFLAVNVQTGEEVAVKLENVKTKHPQLHYESKLYMLLQGGTGIPHLKWFGVEGEYNVMVIDLLGPSLEDLFNYCSRKFSLKTVLMLADQMINRVEYMHQKGFLHRDIKPDNFLMGLGRKANQVYIIDYGLAKKYRDLQTHKHIPYRENKNLTGTARYASVNTHLGVEQSRRDDLESLGYVLMYFLRGSLPWQGLKAGTKKQKYDKISEKKMLTPVEVLCKSYPSEFISYFHYCRSLRFEDKPDYSYLKRLFRDLFIREGYQFDYVFDWTILKYPQIGSNPRTRAGERTSGAAGPSMDRIEKTPGEASGRRNPSGPVNQSDSYAQRPRETVSMSLKEIMHST

SEQ ID NO: 364487 - protein, 36 aa, Zea mays
  Clone ID: MRT4577_95580C.1.pep
KETIGGPFSTNWKPPSPRPWNEQPPGNREFPSDRVQ

SEQ ID NO: 364488 - protein, 123 aa, Zea mays
  unsure (1)..(123): unsure at all Xaa locations
  Clone ID: MRT4577_95581C.1.pep
PRISVQANHYFXPIRNGLFPLAPASFXILLFHQTLYHSFLFDNIAFYDRLTEVLSTDEDLVWIHYYHLLTLPTFLHKRFPRAKVRFLLHSPFPSSEILRTIPVRDDLIRSLLNTDLIGFHTFD

SEQ ID NO: 364489 - protein, 187 aa, Zea mays
  Clone ID: MRT4577_95582C.1.pep
ASLGHYALTNADGTSKQGIGYAMIIFACLFIAGYAMTWGPIIWAVVGEIYPSRYRAKCMALATASNWTWNFLISFFTPYITSAIDYRYGYVFAACCFTGAVVVYFFVCESHGRTLEEIDTMYILHVTPWKSKHWEPPANEELPALDNTYLTPGARGIKKGNEARAPEQSRKESIPTGDVQASGARGE

SEQ ID NO: 364490 - protein, 44 aa, Zea mays
  unsure (1)..(44): unsure at all Xaa locations
  Clone ID: MRT4577_95583C.1.pep
SSIAAPLHLSFILIFXKTKTTTTLGRSNLTKTLYPITSLLLFYP

SEQ ID NO: 364491 - protein, 105 aa, Zea mays
  Clone ID: MRT4577_95584C.1.pep
FFFFFFFFFFFFFFFFFFFFFFFFFFFKAKNPHKGKKKRSLFFCHKKKRVNRHRRTNGVLTDHEQAKLLIFTWKNTFFLQFHFLLGGGISFSKALKFISFFHGHL

SEQ ID NO: 364492 - protein, 82 aa, Zea mays
  Clone ID: MRT4577_95585C.1.pep
PTRARTRPCTHSWRDLVHATVGPVRAPPVLHHVRRLQGQGHVPSRLLRLLLSGSLATNTRLVNCTCPALAYVHALWYVLHDT

SEQ ID NO: 364493 - protein, 192 aa, Zea mays
  unsure (1)..(192): unsure at all Xaa locations
  Clone ID: MRT4577_95586C.1.pep
MEGAEALFPGDGCGGDPMDFSWTADGEKHPDPAACASPGRDDEATSASTPVPSPQEMAESMILVPGPRVVMSGLRLADCRSDDCVLFINAGGGAIESCDPCVKVSGDSFFEGGDVIETNESIAEGGDCPFIYHSARYGSFSYKFDGLAPGAYFLDLHFAEIYXTCGPKGISMFDVLVQDEKILSQLDVYACS

SEQ ID NO: 364494 - protein, 261 aa, Zea mays
  Clone ID: MRT4577_95587C.1.pep
MALEPLRHGLVSLLVLLLLLVHAASAARARDLHLEMVTTSAATARAVPSCASWRLGVETNNIRDWYSIPAECRGYVRDYMYGDLFRQDCAVVAREAAAYAEGLELGGDGKEVWVFDVDDTTLSNLPYYADTGFGAEPYNATYFDEYVANATAPPLPEVLQLYETLLSLGIKVVFITGRHDYEKEPTIKNLRSAGYHTWDKLVLKPSSLGSSVVPYKSGERQKLVDAGYRIVGNMGDQWSDLIGAPEGDRTFKVPDPMYYVG

SEQ ID NO: 364495 - protein, 153 aa, Zea mays
  unsure (1)..(153): unsure at all Xaa locations
  Clone ID: MRT4577_95588C.1.pep
YTADLSVRANVFANQPQQQLQQHLPALSQQAHXNRGAYLQQPQLLXSNPVAVDNGPTYLQQQLLQQXIVPALTQLVVANPAAYXQQLLSFNQLTMSNSAAYLQQRQQILNPLAEANPLVAALLQQQQLLTYNQFSLINPVLSRQQPIARGAIF

SEQ ID NO: 364496 - protein, 156 aa, Zea mays
  unsure (1)..(156): unsure at all Xaa locations
  Clone ID: MRT4577_95589C.1.pep
PIFSIDPSSIIPGFLLPVSXMAFEHPAVQAYRLQQAIAESVLQQPIAXQLQQQSLAHLTIQTIATQQQQQFLPALSHLAMVNPVAYLQQXLLASNPLALANVVANQQQQQLQQFLPALSQLAMENSVXYLQQLQLYSSCPIAGANAPTYPAQELVN

SEQ ID NO: 364497 - protein, 46 aa, Zea mays
  unsure (1)..(46): unsure at all Xaa locations
  Clone ID: MRT4577_9558C.1.pep
MMECISIYIGQVGIEVGNECWEVXWFEHGIQAVGXQMPGDKTIGGC

SEQ ID NO: 364498 - protein, 53 aa, Zea mays
  Clone ID: MRT4577_95590C.1.pep
LYKHVSCCVVTHHALARHANVLKTAVKLQKKNAREAEGVGGGVRGRVGPGGYS

SEQ ID NO: 364499 - protein, 184 aa, Zea mays
  unsure (1)..(184): unsure at all Xaa locations
  Clone ID: MRT4577_95591C.1.pep
HQWLPYNSSLLALLALLVSATNALIIPQCSLAPSAIISQFLPPDTSMGFEHPAGQAYRXLQLALAAIALQQXPIAQLQQQYLAHLTLQTIATHQRQQQRFLASLTHLAVGNPVTYLQQELLACNPLALANAHAYQQQQQLQQVIXPVLIQLPMVNPAVYLQLLSSNPLAVGTAPTFLQHQLLQQ

SEQ ID NO: 364500 - protein, 92 aa, Zea mays
  Clone ID: MRT4577_95592C.1.pep
DYLFHQNQFRPRRLQRGLTTTHKNLESLKKKQLFSDLGASTTKSPELLLSKHLHTFIGTGQTLVQKAAARLCCFTRKHSHPFSFLVGLHWCP

SEQ ID NO: 364501 - protein, 222 aa, Zea mays
  Clone ID: MRT4577_95593C.1.pep
MATKILALLALLALFVSATNAFIIPQCSLAPSAIIPQFLPPVTSMGFEHLAVQAYRLQQALAASALQQPINQLQQQSLAHLTIQTIATQQQQQFLPALSQLDVVNPVAYLQQQLLASNPLALANVAAYQQQQQLQQFLPALSQLAMVNPAAYLQQLLPFNQLTVSNSAAYLQQRQQLLNPLAVPNPLVTAFLQQQQLLPYSQFSLMNPALSWQQPIVGGAIF

SEQ ID NO: 364502 - protein, 78 aa, Zea mays
  Clone ID: MRT4577_95594C.1.pep
YLLTQGRFNFSHQAHELASVRAACIGMKDVRVIRKFRHHRFRHYQHPHYPLLFVLQALQAAALALGMHPLRPREEKGP

SEQ ID NO: 364503 - protein, 113 aa, Zea mays
  unsure (1)..(113): unsure at all Xaa locations
  Clone ID: MRT4577_95595C.1.pep
NPADYLQQIQLLSSNPLAVTNRPTYLQQQLLEQIVPGLTQLXVVANPAAYLQQLLPFNQLTMSNSAAYLQQRQQLLNPLARGNPLDAAFLQQKQLLAYNQXFSLINPXVLSRQ

SEQ ID NO: 364504 - protein, 447 aa, Zea mays
  Clone ID: MRT4577_95596C.1.pep
MGNEKSHINIVVIGPVDSGKSTTTGHLIYKLGGFDKRVIERFEKEAPEMNKRSFKYAWVLDKLKAERERGFTIDIALWKFETTKYYCTVIDARGHRHFIKNMITRTSQADCAVLIIDSTTGGFEAGISKDGQTREHALLAFTLGVKQMICCCNKMDATTPKYSKARYDEIVKEVSSYLKKVGYNPDKIAFVPISGFEGDNMIERSTNLDWYKGPTLLEALDKITEAKRPSHKPLRLALQDVYQIGGIGTVPVGRVEAGVIKPGMVVTFGPTGLTTEVKSVEMQHEALQEALPGDNVGFNVKNVAVKDLKRGFVASNSRDDPAKEAGSFTSQVIIMNHPGQIGNGYAPVLDCHTSHIAVKFAELITKIDRRSGKELEKEPKFLKYGDAGMVKMIPTKPMVVETFSAYPPLGRFAVRDMRQTVAVGVIKSVEKKDPTGAKVTKAAAKKK

SEQ ID NO: 364505 - protein, 145 aa, Zea mays
  unsure (1)..(145): unsure at all Xaa locations
  Clone ID: MRT4577_95597C.1.pep
QQQQLQQFLPALSQLAMVNPXAYLQKQQLISSSPLAVVNAPTYLQQQLLQQIVPALTQLSVANPAAYLQQLLPFNQLTVSNFAGYLQQRQQLFNPQAVANPLVVPFLQQQQLLPYNQFFLMNPPLLWQQPIVEGAFFRLHIKCTR

SEQ ID NO: 364506 - protein, 82 aa, Zea mays
  unsure (1)..(82): unsure at all Xaa locations
  Clone ID: MRT4577_95598C.1.pep
KKGRPRVRKRQVMITPSFIVIIKFLXTGGRYGYIGEYEYVDEHKAGKIAVELNGKLYKCGVNSSRVDKSAXEIEGWTAMLLT

SEQ ID NO: 364507 - protein, 195 aa, Zea mays
  unsure (1)..(195): unsure at all Xaa locations
  Clone ID: MRT4577_95599C.1.pep
MGKENAHINIGVIGHIDSGKSTTTGHLIYKLVGIDKRGIQRFEKEAAEMNKRAFKYAWGLDKLKGERERGITIDIALRKFETTKYYCAVIDAPGPRDFIKNMITGTSQDDCGALIIGSTTGGFEAGIXSKDGQTREHALLAFTLGMKHKICCCNNMDATTPKYSKAPYDEIANEYSSYLKKVGYDPDKIAFASIS

SEQ ID NO: 364508 - protein, 71 aa, Zea mays
  Clone ID: MRT4577_9559C.1.pep
NQQKDGCPASATYTVRSCSYTVTGSQTTSCLRINGYRQSGALRYLCERDGGARWLLRRPLGRPIHDRGQQG

SEQ ID NO: 364509 - protein, 77 aa, Zea mays
  Clone ID: MRT4577_955C.1.pep
LSSSCHTGGKLLTNLPRGVLLRMHASGGVTETVNDTLHPRTPDGHLRFGQSQSLFLPEREGQGDTLFRMLCLIDSII

SEQ ID NO: 364510 - protein, 63 aa, Zea mays
  Clone ID: MRT4577_95600C.1.pep
RKEVLVFLTPKFGGVPTNVPFLLPKGLEIFWEPLSLKISREKFFLAKGGFLPFPHETPLFAPP

SEQ ID NO: 364511 - protein, 114 aa, Zea mays
  Clone ID: MRT4577_95601C.1.pep
LKKKKVFYFSPLLVANAPKYFNKKLLQQIVPVLIKLVVANPVAYLQKLFPFNQLIMWNFVGYLQKRQQFFNPLAGGNPLVGAFLQKQQLLPYNRFFLINPVLSRQQPIVGGAIF

SEQ ID NO: 364512 - protein, 120 aa, Zea mays
  Clone ID: MRT4577_95602C.1.pep
APSAHRPSVRQVQLQSLAHLTIQTIGTQQQQQFLAALSQLDVVKPVAYLQQQLHAFSPQALANVSAYQHHQQLQQFLPALSQLAMVNPAAYLQQQQLLSSSPLAVGNAPTYLQQQVMQQK

SEQ ID NO: 364513 - protein, 99 aa, Zea mays
  Clone ID: MRT4577_95603C.1.pep
CKKKVLKAPLKKASLVGPRTVQCDGRHNRVFLKPWSSGPGVFMFAFSNYFFQLFNPANLNWPATNGVHVSGKSRKPLACGGLFFHNKKKKLSMERASNN

SEQ ID NO: 364514 - protein, 223 aa, Zea mays
  Clone ID: MRT4577_95604C.1.pep
MASSSSIGINFIQVLEHQTRALFSELDKRLQARDDKWEFRVAVLESRAADSERQLDNVSSDLRTDVAAQISVVEALESIVVDSTQHMDSVSSSIRADPEVRQAAVDATAEDRRHHFEAATSSHITELESTTQVFELWHPRIDSAINHLHPSMVKVRAAIDTRDLQWSPDAHGGGSGGLLGEPGGEPTEISGAAHAGGLPRPHQHPHRHPAIQSVRRRGALGLP

SEQ ID NO: 364515 - protein, 96 aa, Zea mays
  Clone ID: MRT4577_95605C.1.pep
MERRHGFFAALREEVARGLSPARARRKPDATDLAAALSFTGVAGAGEMLAPLMEGPDPEPSDDGDGSGRRGAARGRKEGWGHWVRVQFARAPSSAV

SEQ ID NO: 364516 - protein, 50 aa, Zea mays
  unsure (1)..(50): unsure at all Xaa locations
  Clone ID: MRT4577_95606C.1.pep
MPYAGGGAADDEEFRAEVVVRLINEEYXIWKKITPFLYVLVITHALVCPF

SEQ ID NO: 364517 - protein, 57 aa, Zea mays
  Clone ID: MRT4577_95607C.1.pep
LSPRKTIHLLTKASLSSTIPPPPPKTNLQPVHTQHRPPITLVSFSVPTLIPHHLTEI

SEQ ID NO: 364518 - protein, 105 aa, Zea mays
  unsure (1)..(105): unsure at all Xaa locations
  Clone ID: MRT4577_95608C.1.pep
RRRPWFSPPNNGPKPPPXFSNPPPLXPPPPFPFFFPPXFFPPXTVIPFPPRLIFLLFSPQPLPTIIKKKISPPXPPPQISXSPPPPEPVPPPPPKLFFLHFFQTH

SEQ ID NO: 364519 - protein, 128 aa, Zea mays
  Clone ID: MRT4577_95609C.1.pep
MLSVRSLYHYRARLKHPCTWPSDCLPLPSTGSLLPLLRLAAACPLSTQHSRGGRACTAAAMRDWAPSIIATALFALLCPGGVLQMPGRHRPVDLMNMKTSFPSMLVHAVIYFLLLMLFLVILQPHLYI

SEQ ID NO: 364520 - protein, 471 aa, Zea mays
  unsure (1)..(471): unsure at all Xaa locations
  Clone ID: MRT4577_9560C.1.pep
MDHVVGGKFKLGKKIGSGSFGELFLAVNVQTGEEVAVKLENVKTKHPQLHYESKLYMLLQGGTGIPHLKXNPSPGEXGLPPSDRLHSREALAMSYCSAAWSFCPAVTPGEESDGKXRASHSRRKGRTLVCDSVNDRIRQQFPWGXVYIIXDIGLAKNYXRDLQTHKHIPYRENKNLTGTARYASVNTHLGVEQSRRDDLESLGYVLMYFLRGSLPWQGLKAGTKKQKYDKISEKKMLTPVEVLCKSYPSEFISYFHYCRSLRFEDKPDYSYLKRLFRDLFIREGYQFDYVFDWTILKYPQIGSNPRMRAGERTSGAAGPSMDKIEKATGEAAGRRNLSGPVNQTDSYAQRPRETVSMSLKEIMHSTDRSGERTMERPRTSSRTGSASRRAVASSSRQASSVEPSEQQYSRASRLFSSNSGSRPSSTQRVNPSPGEARATSLSRAAVARGARDEPLHRSLELLSLGGGGKRK

SEQ ID NO: 364521 - protein, 68 aa, Zea mays
  Clone ID: MRT4577_95610C.1.pep
MRDWAPSIIATALFALLCPGGVLQMPGRHRPVDLMNMKTSFPSMLVHAVIYFLLLMLFLVILQPHLYI

SEQ ID NO: 364522 - protein, 78 aa, Zea mays
  Clone ID: MRT4577_95611C.1.pep
YKFIKKRRGQEKTRPFWPRKNEKALQIHRGKVFQPIKGPPPAVWGEKNTGNRGAGKVTPVPRGGGERGKNMKAFEKGG

SEQ ID NO: 364523 - protein, 70 aa, Zea mays
  Clone ID: MRT4577_95612C.1.pep
GQMGGGMVDAAVKLTKVVLALGLRGARLRQCRQRDLPSAELYDYASSYLQAISPTRQFPEIRTLVSEIYS

SEQ ID NO: 364524 - protein, 109 aa, Zea mays
  Clone ID: MRT4577_95613C.1.pep
HTKITRVMCSPSTSEAHRRRIINSTGVYCSEQGLAAAERCRRPLHRRPFELRHPRLISRAYRQLRRACVDALAVVNEAPPWSIWRRPPEFCTAALWLELCKRVESEGLK

SEQ ID NO: 364525 - protein, 65 aa, Zea mays
  Clone ID: MRT4577_95614C.1.pep
LYRCLLLRTGSRCRRTLSQTLHRRPFELRHPRLISRAYRQLRSVPAAELNTCLRSPWIRACVDAL

SEQ ID NO: 364526 - protein, 495 aa, Zea mays
  Clone ID: MRT4577_95615C.1.pep
MTGKHTSISELLEFEGSADTGTKIYSTDMRNNAVSASSFSSIAQRFLANTLQRRTSKYTDLPMSSERANADTSAKSESTLNPVVEPSEAVFAEETKFENKTENGMDGLSKTSIFSSRHYSEKSSPPLEYMKISFHPMSAFEMSKLNLDFCDGNIHEISDDMMLPTFQLLSESSIPQPGSGSESEDDTFGRSYSYSSYDDLSPRLYSNSEAWDQDDGTGLEEHELYDDSNQIGSSTAPLSSYMGFEQMNLSDMKSDISLANVGDQNVIGTLQSCTVEELPNFDTLMSRSDDQNGETPIPHNLGNMTPDEDQLPPPPPLPPMQWRMTRQTTSLEEETCITTKDMLRKTSSLPHIHTSAQEEHCPPTAPLDLQGHAGEVGVQKTGGVREITNPPSIIDIKSSLLQQIRDKSEQLKLNGHERSKKAVGGDIKSLDEREELLQQIRSKTFNLRRTNASKADGSSQSTASSNVAAILEKANAIRQAVASDEGGDDDTWSDI

SEQ ID NO: 364527 - protein, 64 aa, Zea mays
  Clone ID: MRT4577_95616C.1.pep
SIGLHSDTIHLFTRLFLRMAGCILCISSPIDTTSESAIPASFASLKAAVVIHCNIPYPRADHHK

SEQ ID NO: 364528 - protein, 86 aa, Zea mays
  Clone ID: MRT4577_95617C.1.pep
QIHLSPSDSTLLQSSSHNAAVQNSGGLRQIDHGGASLTTARASTQALIHGERRHVFNSAAGTLEHSYRQRRRNSGSDKLNPIASMR

SEQ ID NO: 364529 - protein, 107 aa, Zea mays
  Clone ID: MRT4577_95618C.1.pep
SAFSPFYGGGATGGLRPLRTDTPPRDCNAVLIKSALHRLEVIDACSDQCEVHMGQEWLASCHDRLLGSILRSRRACRNQRAQHERAAVLPCRPHAGTAWDGTRYPKA

SEQ ID NO: 364530 - protein, 39 aa, Zea mays
  Clone ID: MRT4577_95619C.1.pep
DAWDLQNPHRHSSNGGAQIRGGDLVVKACGERRVQRKIS

SEQ ID NO: 364531 - protein, 429 aa, Zea mays
  Clone ID: MRT4577_9561C.1.pep
MAKSKSSAKAGPPLLGKYELGHLLGRGNFAKVYHARCLGGGDPVAVKVLDKAGLAATGMASRLLREVSAMRRLSHPNVLRLHEVLATRSKVYLVMELAPGGDLLSRLASLPSRRLPEHAARRVFLQLASALIYSHARGVFHRDVKPQNVLLDAEGNLKVSDFGLAALPDSVRDDGRLHTACGTPAFAAPEVLRRRAYDGAKADAWSCGVILFVLLAGHLPFDDANIADMCRRAHRREYTVPRWVSQPARRLVARLLDPNPATRLAVAELAGHPWFKRSLSVDSQLGGLLDGQAERELAFQAPPALNAFDIISMSPGLDLSGLFGEGRRRREKRFMTTASPERAVERLAQAGARLGYFIVGKKGAERLPLGVLPGLVAMSMEMSEVSPELMLVELRLEGGHGDEDEAFGWEELRVELGDVVTAWHVSEEG

SEQ ID NO: 364532 - protein, 110 aa, Zea mays
  unsure (1)..(110): unsure at all Xaa locations
  Clone ID: MRT4577_95620C.1.pep
RSSEFGSRVEALLFNFTDGWFVGGVQWEKGGNKHPNXPNDYAXRACHYSCNYAYQDVAHDITLGDDYFFSEYPIVDKRLAHAVIRLEMVLNLIFGGGEAVDIPVLVQSQL

SEQ ID NO: 364533 - protein, 50 aa, Zea mays
  Clone ID: MRT4577_95621C.1.pep
ITNLKRKTINPRRIKNHKTVAHSHGTGYISPLRGSISARNVKSLSLMPLP

SEQ ID NO: 364534 - protein, 111 aa, Zea mays
  Clone ID: MRT4577_95622C.1.pep
SASGSYDELSLSVDKLFRGLLAAQQDPLAAGAKECSQEEVAISGLLDGTGEYTLVYEDYEGDRVLVGDVPWGMFVSSVKRLRVLKTSDLSSSLTAPPGQKRTVTECPVFTS

SEQ ID NO: 364535 - protein, 118 aa, Zea mays
  Clone ID: MRT4577_95623C.1.pep
AEYHKTLDFKLLVSVLNMNHFQEANSIYIYIFHLSAYYNACLYMHPLLCFILMSSSLSYGPTSDLQIPRLLGGLQFVPSEEIWPPLAEHPLNIRMGRRQTNLQDVCFFGEEAARSEDI

SEQ ID NO: 364536 - protein, 157 aa, Zea mays
  unsure (1)..(157): unsure at all Xaa locations
  Clone ID: MRT4577_95624C.1.pep
HAPTTAQNRPPGPAHPGGARARRRPHRRRRPRHRRQRGARGTPQAEEEPSAEPKGQQXPSDAXXARGAXAQAEXTETTGNGTTTDAHGRQKXPASNNNATHNSDGHTPNDHAEDGXTDGGAAGEXAGDKTAKAPRDRGKEDXTNKDGGGKAATAAAN

SEQ ID NO: 364537 - protein, 61 aa, Zea mays
  Clone ID: MRT4577_95625C.1.pep
RGVKGGGPLGNKAGQLFGKANGGGLFANKTTWVKGICSKSIKFGKTRVFTIMKFLKEGQGI

SEQ ID NO: 364538 - protein, 47 aa, Zea mays
  Clone ID: MRT4577_95626C.1.pep
CSPPNRQDGLWRIRWVVLSLNCPRIVQTVWRAYATLGPWPCVLTPQS

SEQ ID NO: 364539 - protein, 62 aa, Zea mays
  Clone ID: MRT4577_95627C.1.pep
LGGEGPYPVGPVESRGIQSFLKLAVGRVNGFGFPFRRDDLFGEDLFAELSFKAYGKGALYPL

SEQ ID NO: 364540 - protein, 100 aa, Zea mays
  Clone ID: MRT4577_95628C.1.pep
QRLNNPQKHTTGAHHHFRPNTNASYASNTSRKDKPSKALSPTVLLDTKPNTTLPTLNTETMHTPAPSCKANHCRNKNHKQAHLQAKNGNAVHPSMPRSNG

SEQ ID NO: 364541 - protein, 73 aa, Zea mays
  Clone ID: MRT4577_95629C.1.pep
VAVGGDGAGSGGRRSSQMRSGRWGRARSGCVDCGIWRSRLVTSCEIRSVARPFFFFFFFFFIFFFFFFILCHL

SEQ ID NO: 364542 - protein, 286 aa, Zea mays
  Clone ID: MRT4577_9562C.1.pep
MSSGTTTTEEESGKGPPPQHQHHFVLVHGACHGAWCWYKVATLLASAGHRVTALDMAGCGASPVRGEDVASFEDYSRPLLDAVGALPPGERAVLVGHSFGGQSLALAMERYPERVAVAVFVSAAMPAAGKPMALVLQEFSREIGPDFYMDCIYSTGSEPEHPVETLLLGPEYLAKRLYQLSPPEDLTLAMAMVRPSRWFEDDATLRRDDGLTAGRYGAVRRVCVVAEDDASWSAEFQRRMASWSPGAEVRGLRGADHMPMLSKPADLSDMLVEVANKYSSDLEDPA

SEQ ID NO: 364543 - protein, 118 aa, Zea mays
  unsure (1)..(118): unsure at all Xaa locations
  Clone ID: MRT4577_95630C.1.pep
KNRGGLSPRPQRARPKKKPYCQNQRKTARATLKGPQKRLFFSGASKPESSMFPKKKKKPQKKSPTPYHFTRTRAISRTFGGKLDVLNGNWAPGPFKPSFPNQKDGKKNNPCEGPYXXP

SEQ ID NO: 364544 - protein, 447 aa, Zea mays; identical to SEQ ID NO: 240817
  Clone ID: MRT4577_95631C.1.pep

SEQ ID NO: 364545 - protein, 161 aa, Zea mays
  unsure (1)..(161): unsure at all Xaa locations
  Clone ID: MRT4577_95632C.1.pep
AGAQQRVIIPQXTLVLSSLXIPRFFPPVLLWASKXPPVGGYLVQQXTVGSGLQQHXAQLRQXQYLAHLTIQTIATQQQQQVLPALSHLAMVNPVAYLQQQLLVFNPLALLNVXANQQQQQLQQILPALSQLAMVNPGGYLQQQQLVLSIPLAVANAPTYLQ

SEQ ID NO: 364546 - protein, 447 aa, Zea mays; identical to SEQ ID NO: 240710
  Clone ID: MRT4577_95633C.1.pep

SEQ ID NO: 364547 - protein, 81 aa, Zea mays
  unsure (1)..(81): unsure at all Xaa locations
  Clone ID: MRT4577_95634C.1.pep
XLIPFFFFLLKVFFFEKVPGVLPPKTRETNITKRNSKKGREMRRRPEKTQKKIRWKDWHQPNAKKDYSLNAISKEQAQAHI

SEQ ID NO: 364548 - protein, 94 aa, Zea mays
  unsure (1)..(94): unsure at all Xaa locations
  Clone ID: MRT4577_95635C.1.pep
MATKRWCLLALLALFASATNAFIIPQCSLAPSSIITQILPPVTLMGFXHPSLQAYRLQQAIAAMRLQQPIFQLQHLFLAHLTFPTIASQYLQQF

SEQ ID NO: 364549 - protein, 139 aa, Zea mays
  unsure (1)..(139): unsure at all Xaa locations
  Clone ID: MRT4577_95636C.1.pep
ELLPALIHVVLVNPDVYLQEQLLASNPLDVANVAANQLQQQLQQFQPTLSQLAMVNPDVYVQQQQLLSSNPLAAGNAXTYLQQQLLQQIVPALTQLAGANPCAYLQQLLTCDQLTLANSADDLQQRQQLLNPLLVANPL

SEQ ID NO: 364550 - protein, 72 aa, Zea mays
  Clone ID: MRT4577_95637C.1.pep
RTLGGRVGGRVGSSTSSPQHHCPDASFCGRRRLAAKCSVSTSVSSPCRTKDTLTSTSFTGLRPTPGSKHPDS

SEQ ID NO: 364551 - protein, 133 aa, Zea mays
  Clone ID: MRT4577_95638C.1.pep
QQQQLQQFMPVLSQLAMVNPAVYLQLLLFSPLAVGNAPKYLQQQLVQQIVPALTQLTVANPDAYLQQLVPFNQLGVSNFGGDLQQRHQFLYPLAVGNPLVGTFLQQQQQLVPYNQFFFMNPALQQPIVGGALF

SEQ ID NO: 364552 - protein, 230 aa, Zea mays
  unsure (1)..(230): unsure at all Xaa locations
  Clone ID: MRT4577_95639C.1.pep
QQCATKILSLLALLALFASATEAXIIPQCSLAPRSIMTQILPPVTSMGFEHPDEQVYRIQQAIAVSVLQQPISQXLQQSLAHLTIQXTIATQQQQQFLPALSHLAMVNPAAYSQQQMLASNPLDLVNVXANQPQRQMQQFLPELIQLCMEDPVAYLLQQQLLSSIPIAVANGPTYLQQQLVQQIAPXLTHXLLVANPAAYLQQLLPFNQLTMSNSAAYLQQXQQVLNPLA

SEQ ID NO: 364553 - protein, 39 aa, Zea mays
  Clone ID: MRT4577_9563C.1.pep
LQFMIFFLYNIGSCSFVYCGSGMLPVNRKVPCRKMNCCN

SEQ ID NO: 364554 - protein, 153 aa, Zea mays
  Clone ID: MRT4577_95640C.1.pep
MTTPSLVESLVLQLHEISAVKFGNFKLKSGIFSPIYIDLRLIISYPSLLQQIFQTLISSVSSTSFDLVCGVPYTALPIATCVSLAQNIPMVMRRKEIKDYGPAKAIEGDFKPGQSCLIIEDLVTSGPSGLETAAPLRAGGIKISDAVGLIERE

SEQ ID NO: 364555 - protein, 146 aa, Zea mays
  Clone ID: MRT4577_95641C.1.pep
MGKEKSHINIVVIGHVDSGKSTTTGHLIYKLGGIDKRVIDRFEREAVEMNKRSLKYAWVLDKLKAERERGITIDIGVWKFETTKYYCTVIDAPGHRDFIKNMITGTCQADWAVLIIDYTNGGVEARISKGGETREHPLLALTLWSE

SEQ ID NO: 364556 - protein, 203 aa, Zea mays
  unsure (1)..(203): unsure at all Xaa locations
  Clone ID: MRT4577_95642C.1.pep
FQYSWALDKLKAERAXGITIDIGLSKFDTHXYYCTDIXCPCNIRDFIKNMITDTYQADCAALIIDSTTGGCEAGIYKDGQTREHALLAFTLEVNQMICCCNKMDATTPKYSKARYDEIVKEVSSYLKKVGYNPDKIAFVPISGFEGDNMIERSTNLDWYKGPTLLEALDQITEPKRPSDKPLRLPLQXVYKIGGIGTVPVXSC

SEQ ID NO: 364557 - protein, 165 aa, Zea mays
  unsure (1)..(165): unsure at all Xaa locations
  Clone ID: MRT4577_95643C.1.pep
MTQSKEKHCQLKADAGXASKTYPHEXSPVRKNGFIVITNRPXQVVQVPTSETGKHEHVKCHFVAIQIFLGNKLQHIAPSSHNXGIPHVKRNDYHLIDISXDAFVSLLTSDSNSXDDLILXTDETLAGQIQEGFXESDKDLAVTVXSAMGEEHICALNDGAPKKLR

SEQ ID NO: 364558 - protein, 96 aa, Zea mays
  Clone ID: MRT4577_95644C.1.pep
PLAACLVAAHLADPASSERLDASFDEAFIPEKRRLLPESSFRAYVFLLQACSRSRVACMHVMSQHPCYSYSQSIASGSDLASTAHAAAACCSPSLS

SEQ ID NO: 364559 - protein, 167 aa, Zea mays
  Clone ID: MRT4577_95645C.1.pep
PLAMVNPAAYLEQQLLASNPLALANVVANQPQQQVQQFLPALSQLAMVNPAAYLQQQQLFSFSPLAVANAPTYLQQQLLQQIVPALTQLVVANPVAYLQQLVPFNQLIMSNFGGFLQQRQQLLNPLAVANPLVAAFLQQQQLLPYNQFFLINPVLLRQQPIVGGALF

SEQ ID NO: 364560 - protein, 114 aa, Zea mays
  Clone ID: MRT4577_95646C.1.pep
RPFLFLPFPIPLFRPVIRLQLMTSLHAGAHVTSIHLGVAHPPIVVTYPLRPALPAAQRSNRKAVSCPRTVFTTHGFCRWGHQCLDPVPARSCQWHADRSPYRPPYEGGFTPSCC

SEQ ID NO: 364561 - protein, 135 aa, Zea mays
  Clone ID: MRT4577_95647C.1.pep
PPGQKGQPPSGKCLRVKTRSPGGSFVAGFVGQSNNGGLGLGFKTVFKKIAPPGRGSPMGPPNVDSPFFPFWAPKVPPILPGVVGPPARGRADSKPPVFFKRGAFLWMNKTPPVGFFHFCKPRFFCFCFNYPGPQL

SEQ ID NO: 364562 - protein, 502 aa, Zea mays
  unsure (1)..(502): unsure at all Xaa locations
  Clone ID: MRT4577_95648C.1.pep
MAPQAAGSTPAVAALGFLLPTCWEIEVTCAAAMILVALYAAYELLNPRPFQAAAAGDADELLVRGLDGTNKGGASGRSAYVVKLELLAARNLMAANLNGTSDPYALITCGAEKRFSSMVPGSRNPMWGEEFNFFVDSLPVKINVTIYDWDIVWKSTILGSVTVPIESEIPSGPVWHTLDSTSGQVCLHIKVIKVHESSSRALNSSAEAGARRRISLDKQGPTVVHQKPGPLQTVFELPPDEVVDHSYSCALERSFLYHGRMYVSSWHICFHSNVFSKQIKVVIPLRDIDEIRRSQHAVINPAITIFLRMGAGGFGVPPLGCPDGRVRYMFASFWNRNHTFRALQRAVKNFQMMIEAEKQERAQSALRAHSSSRKNSKKEINIPEDCAALTGQLQPFVKEEVLVPVFNGTFPSTAEHFFSILLSDDSNYITEYRTFRKDKDINLGQWHIADEYDGQVRELNCKSICHSPMCPPYSAMTEWQHIVLSADKMDLVXSTVQQNVPL

SEQ ID NO: 364563 - protein, 271 aa, Zea mays
  Clone ID: MRT4577_95649C.1.pep
MAAGGPALLRALLVAALCAVPWRAEAAIGMNWGTVSNHRAPPGVVVDLMRANRISKVKLFNADPGVLRALAGSGIQVMVGVTNDELASIAGSQAAADDWVAQNVSRYVGRGGVDIRYIAVGNEPFLTSYQGQFQSYIIPAMTNIQQSLVKANLASYVKLVVPCNADAYQSASVPSQGVFRTELTQLMTQLAAFLSSSGAPFVVNIYPFLSLYQNSDFPQDYAFFEGSTHPVVDGPNVYYDAFDGNFDTLISALSKIGYGNLPIAIGEIGWP

SEQ ID NO: 364564 - protein, 101 aa, Zea mays
  Clone ID: MRT4577_9564C.1.pep
PPPQKKIKIYEWDYKNTLPKKKNSKIGRPPSKKKKNAWFWEPPKKKKNPTPGFIYWGETKKTRKKKKAPKKAYILKISRSGKWLKNTKTLFSNQKNFQWRF

SEQ ID NO: 364565 - protein, 144 aa, Zea mays
  Clone ID: MRT4577_95650C.1.pep
ARGQVRELNCKSICHHPQRQRYSAMTEWQHIVLSADKMDLVFETVQQVHDVPFGSFFEVHCRWSVKTISSSLCSLNISAGAHFKKWCIMQSKIKSGAVDELKKEVKEMLDFAQGYILKVRSPDQENSNLAQQDNMAPDAVSGDQ

SEQ ID NO: 364566 - protein, 62 aa, Zea mays
  Clone ID: MRT4577_95651C.1.pep
RQVCYNFFTLAFQLLCRNNRINCCWGIFFGGWVGGHAFVGWDVSMMRGGYYLFIAIEWNWSI

SEQ ID NO: 364567 - protein, 194 aa, Zea mays
  unsure (1)..(194): unsure at all Xaa locations
  Clone ID: MRT4577_95652C.1.pep
MAAGGPALLRALLVAALCAVPWRAEAAIGLNWGTVSNHRAPPGVVVDLMRANRISKVKLFNADPGVLRALAGSGIQVMVGVTNDELASIAGSQAAADDWVAQNVSRYVGRGGVDIRCGALVIRIMXEAGPFAHLLFSLVPLLRYRYIAVGNEPFLTSYQGQFQSYIIPAMTNIQQSLVXKANLAGYGKLVVPCN

SEQ ID NO: 364568 - protein, 597 aa, Zea mays
  Clone ID: MRT4577_95653C.1.pep
MASQVAGSTPAVAALGFLLPTFWEIEVTCAAAMILVALYVAYELLNPRSSQAAAAGDADELLVRGLDGADKFKGGVSGPSAYVVKLELLAAKNLMAANLNGTSDPYALITCGAEKRFSSMVPGSRNPMWGEEFNFFVDSLPVKINVTIYDWDIVWKSTILGSFTVTVESEVPSGPIWHTLDSTSGQVCLHIKVIKVHESSSRAINSSAEAGARRRISLDKQGPTVVHQKPGPLQTIFELPPDEVVDHSYSCALERSFLYHGRMYVSSWHICFHSNVFSKQIKVVIPLRDIDEIRRSQHAVINPAITIFLRMGAGGFGVPPLGCPDGRVRYKFASFWNRNHTFRALHRAMKNFVMMIDAEKQERAQSALRAHSSSRKNSKKEINVPEDCAALTGKLQPFVKEEVLVPVFNGTFPCTAEQFFSILLSDDSNYITEYRTDRKDKDINLGQWHVADEYDGQVRELNCKSICHSPMCPPYSAMTEWQHIVLSADKMDLVFETVQQVHDVPFGSFFEVHCRWCVKTISSNSCSLNISAGAHFKKWCIMQSKIKSGAVDELKKEVKVMLDFAQGYMLKVSSPDQENSNLAQQDNTAPDAPSDTG

SEQ ID NO: 364569 - protein, 139 aa, Zea mays
  Clone ID: MRT4577_95654C.1.pep
MFAARSFARAAPRQAIARAPARAGRRNYSSESPKQFAGAEDNEFNRERAHIEQHAGESGEFWRKLSLYVAVPCIIVASVNAKVRWDAHWEHVAHEEHEHPRSERPEYPYQNIRTKNYFWGDGDKTLFWNDKVNYHKKDE

SEQ ID NO: 364570 - protein, 213 aa, Zea mays
  Clone ID: MRT4577_95655C.1.pep
MAGAGAKAAGALALALVLALAGANSEGDALSALRRSLRDPGGVLQSWDPTLVNPCTWFHVTCDRDNRVTRLDLGNLNLSGHLVPELGKLEHLQYLELYKNNIQGTIPSELGNLKNLISFDLYKNNISGTIPPALGKLKSLVFLRLNGNHLTGPIPRELAGISSLKVVDVSSNDLCGTIPTSGPFEHIPLSNFEKNPRLEGPELQGLAIYDTNC

SEQ ID NO: 364571 - protein, 93 aa, Zea mays
  Clone ID: MRT4577_95656C.1.pep
GPPNVYLKKYNSQSSEPIVVKLETIIPYTPVVLARATLAYSYLGEGSHTFVNLVVPSKVQPGFVQGLSPVTAPWTLKFKPCYLRKATRLDTFH

SEQ ID NO: 364572 - protein, 218 aa, Zea mays
  Clone ID: MRT4577_95657C.1.pep
MAAGAGARARAKAAGALALALVLALAGANSEGDALSALRRSLRDPGGVLQSWDPTLVNPCTWFHVTCDRDNRVTRLDLGNLNLSGHLVPELGKLEHLQYLELYKNSIQGTIPSELGNLKNLISLDLYKNNISGTIPPSLGKLKSLVFLRLNGNHLTGPIPRELSGISSLKVVDVSSNDLCGTIPTSGPFEHIPLSNFEKNPRLEGPELQGLAIYDTNC

SEQ ID NO: 364573 - protein, 106 aa, Zea mays
  Clone ID: MRT4577_95658C.1.pep
GCHAACAVHHHTARASSIPFPFPLSPLCSVHTTPSSTAPSSSSRLAAGAIASTSRRQTPTGGERREEKLGPREGGELLGDDDEKTGAVTLAVRDLRLIDLTERSQG

SEQ ID NO: 364574 - protein, 46 aa, Zea mays
  Clone ID: MRT4577_95659C.1.pep
LFSGLLWIPSSPISNPKDGYPCLPIVVTMALSNRAPVSKHFEVQVM

SEQ ID NO: 364575 - protein, 70 aa, Zea mays
  Clone ID: MRT4577_9565C.1.pep
YRIIPTHRTKKNYWETAILPLQTPNTYEGVTTCGGSRAVTMKVLGGSRRRMAPSEAQGGVQSENPARFLR

SEQ ID NO: 364576 - protein, 74 aa, Zea mays
  Clone ID: MRT4577_95660C.1.pep
LRRADDKHQQGGERREEKLGPREGGELLGDDDEKTGTVTLAVRDLRLMLVSLCRIVTGIVPANQSLYKLEKQSG

SEQ ID NO: 364577 - protein, 46 aa, Zea mays
  unsure (1)..(46): unsure at all Xaa locations
  Clone ID: MRT4577_95661C.1.pep
QPKPLYNSPPLXLGSFHPRAPTTRASSSSGRYLVAPDPYVYPSPSL

SEQ ID NO: 364578 - protein, 105 aa, Zea mays
  Clone ID: MRT4577_95662C.1.pep
TIYQASVESPPVIYNAPLMPGQTSAQSPVECHFSPPGAQAAQFPSGPKSNCVKCRTVERQNSEQSLVQTELNRHAFKQIRYMLITCLPYNVPVDDSLHKQNPVRL

SEQ ID NO: 364579 - protein, 106 aa, Zea mays
  unsure (1)..(106): unsure at all Xaa locations
  Clone ID: MRT4577_95663C.1.pep
RSLADPFHGAPRLELATTTPSAGGTRSXAAYAKVDEENDKPSLFXGSITEALDFSQPRPKNDAEMLNETRNPTTGXGSVTRKRYAPLTRKIAATYQDFFKSYDEVD

SEQ ID NO: 364580 - protein, 84 aa, Zea mays
  unsure (1)..(84): unsure at all Xaa locations
  Clone ID: MRT4577_95664C.1.pep
AREDDDGVHTLTELCEGGXLFDRICXGSNYSKPAANNLVRTIXLSSAXLCHENSMRHMDRKTGNCLDQNTSEEYTIKVMQYSLF

SEQ ID NO: 364581 - protein, 79 aa, Zea mays
  Clone ID: MRT4577_95665C.1.pep
GTYRHDCVDISKNGARSDRCRLVCQPDMNLQDSITNYVSSSSIQLSAPPAYSSFSKSHPSVDAAAVILKRLLIDTEKAE

SEQ ID NO: 364582 - protein, 174 aa, Zea mays
  Clone ID: MRT4577_95666C.1.pep
GNDTGLAKDANSDDGLFSDRKPSPVGGPLACLYTWRDPCACVSLTLSSSWINLDASRLQQKPLDCSWPISCPFLFRRSNFALQELLNQEHPSHCHCLPISSSRASRPGHHQVERALLVRKRSLVLSVTGRRQMRGGEMGFNRAGEHNHQPVVQQTRRDFIFPIRYGEIWDRIGI

SEQ ID NO: 364583 - protein, 133 aa, Zea mays
  unsure (1)..(133): unsure at all Xaa locations
  Clone ID: MRT4577_95667C.1.pep
NVQDSGNDQELLNQEHPSHCHCLPISSSRASRPGHHQVERALLVRKRSLVLSVTGRRQMRGGEMGFNRAGEHNHQPVLPPTRRDFIFXYQIWGDMGSHWHLIRLPSTRKGPNELFRLSAXCSADTQASLAPRA

SEQ ID NO: 364584 - protein, 180 aa, Zea mays
  Clone ID: MRT4577_95668C.1.pep
QTNATQQQQQQLVPSVTHLAVVNPVTYLQQQLLASNPLALANVAAYQHHQQLQQFMPVLSQLAMVNPAVYLQLLSSSPLAVGNAPTYLQQQLLQQIVPALSELAVANPTAYVQQLLPFSQLGVSNYAAYLQQRRQLLNPLAVGNPLVATFLQQQQQLLPYSQFSLMTPALQQAIVAGAIF

SEQ ID NO: 364585 - protein, 136 aa, Zea mays
  unsure (1)..(136): unsure at all Xaa locations
  Clone ID: MRT4577_95669C.1.pep
RDLLGCTPFQVANAPTSLHQQMLHQIGPGLTQLAAANPADYLQQLLTFNQLAVSNSAAYLQQRQQLLNPXPVANPLVATLLQQQQQLLPYNQFSLMNPALQQPIVGGAIFQITYEMYSTMVPSYRHVIARNNQYID

SEQ ID NO: 364586 - protein, 184 aa, Zea mays
  unsure (1)..(184): unsure at all Xaa locations
  Clone ID: MRT4577_9566C.1.pep
MSLEVHDSEVDIVIAALQPNLTSFFQAWQPFFSRFDIIVVKDPELTADLQIPSGFNVKVYTKSDIDGLLGATSINFSGHSCRYFGYLVSRKKYVISIDDNCLPAKDPAGMTVDAVTQHMINLKTPATPFFFXTLYDPYRKGADFVRGYXFSLREGVECMLSCGLWLHXADYDPMTHVVKRNPTH

SEQ ID NO: 364587 - protein, 170 aa, Zea mays
  unsure (1)..(170): unsure at all Xaa locations
  Clone ID: MRT4577_95670C.1.pep
MATKILALLAFLALLVSATNAVIIPQCSLAPSAIIPQFLPPGTSMGFEHPAVQAYKLQLTLAGSALQQPIGQLEQQSLAHLTLQTIATQQQQHFLAPLSHLSVVNPGAYLQQQLLGFNPLALANGAGYQQQQQLEQVMPALSQLAMGEPGGYLQMVSFNPLAVGHAXTYL

SEQ ID NO: 364588 - protein, 72 aa, Zea mays
  unsure (1)..(72): unsure at all Xaa locations
  Clone ID: MRT4577_95671C.1.pep
KKYXARVRDLKESTYYMEGNTWHPEXETVYCKLXVNIGYGRHKXLNRLAFGLNRAEIQPNPYTTVGELSEPT

SEQ ID NO: 364589 - protein, 188 aa, Zea mays
  unsure (1)..(188): unsure at all Xaa locations
  Clone ID: MRT4577_95673C.1.pep
QLRTHTRPTHGYQYLSLFALLALFASATNAFIIPQCSLAPSAIIPQVLPPVTSMGFEHPAVQAYRLQQALAASVLQQPIAQLQQQSLAHLTIQTMVTQQLQQFLPTLSQLAEGNPVTYLQQQKLAYNPLALANIVAYQQQQQXNRFYHSLXQLAMVNPAAYLQQQQLIACTPLDVANAPTYLQQQLLQ

SEQ ID NO: 364590 - protein, 187 aa, Zea mays
  unsure (1)..(187): unsure at all Xaa locations
  Clone ID: MRT4577_95674C.1.pep
MATKILSLLALLALLASATNASIIPQCSLAPSAIIPQFLPPVTSMGFEHPAVQAYRLQLAIAASVLQQPIAQLQQQSLAHLTIQTIATQQQQHFLPSLSHLAMVNPVAYLQQQLLASNPLALANVAAYQQQQQLQQFLPALSQLAMVNPAAYLQLLQLXISSSXVDVAYAPTYLQAELMEHIXPSLT

SEQ ID NO: 364591 - protein, 110 aa, Zea mays
  Clone ID: MRT4577_95675C.1.pep
MELDSMVLISKNFNRYNVELVDTVQDLCKQLETNSVEFEVFIASGVMPKAVKVLQDKKFKMKEQMVDTKKTLVAFKNTIDQGKATNKYLAEKLDSANKPKDMALVEKKKY

SEQ ID NO: 364592 - protein, 111 aa, Zea mays
  unsure (1)..(111): unsure at all Xaa locations
  Clone ID: MRT4577_95676C.1.pep
MATKILSLLALLALFASATNAFIIPQCSLAPSSIITQFLPPGTSKXYEHPAVQAYRLQQAIAVSVLQQPNSQLHQQSLAHLTLLTIVTYXQHHFLPALSHLAMGNPSAYFQ

SEQ ID NO: 364593 - protein, 127 aa, Zea mays
  Clone ID: MRT4577_95677C.1.pep
MRLATINNLAPLATLISWFLALVALFASATDASIIRQCSLAPMSIIPQSLPPLTSMACEHPTAQAYRLQHAMAASVLQQPIAQLQQHSLAHLTIQTIATQQHQQFLPSLSHLAMVNPVAYLQHHLLA

SEQ ID NO: 364594 - protein, 129 aa, Zea mays
  unsure (1)..(129): unsure at all Xaa locations
  Clone ID: MRT4577_95678C.1.pep
LQQFMPVLSQQAMVNPAVYLQLFXFSPLGVGNAPRYLQQQLLQQIVPALTKLVVANPVAYLQQLFPFNQLVVSNFGGYLQQRQQLFNPLAVANPLVATFLKQQQQLLPNNQFFLMNPALQQPMVGGAIF

SEQ ID NO: 364595 - protein, 408 aa, Zea mays
  Clone ID: MRT4577_95679C.1.pep
NTWTIADDWGSENRCPSPDSDAKDSAKVDDLEKCSSIVGEDQKEILPSKLHSHVSTMPPARKKKAESRKYFPFRQGYLAVAILRIGAHGIHMTVDGKHITSFAFREDLEPGFVGEVRIAGDIKLLSVIASGLPTTEDFEHVTDLEILKAPPVPMDKPVDLFIGVFSTANNFKRRMAVRRTWMQYDSVRSGKVTVRFFVGLHKNELVNEELWNEARTYGDIQLMPFVDYYSLILWKTIAICIYGTNVLSANYVMKTDDDAFVRVDEVLSSLDRTNVNHGLLYGRVNSDSQPHRDPYSKWYITPEEWPEESYPPWAHGPGYIVSKDIAKEVYRKHKSGELKMFKLEDVAMGIWINEMKKDGLDVKYENDGRILVEGCEDGYVIAHYQEPRDMMCLWDQFQKTKRGTCCKE

SEQ ID NO: 364596 - protein, 120 aa, Zea mays
  Clone ID: MRT4577_9567C.1.pep
GFRLSFSQPFRNSLSLGSNFVWGTKPAWGRPGPLLFTGPGAVACSWVLIQSVVIPVGVFLVISEWGSIFFYWSLRASTGLLAEGRRIVPGGAEDTYGLEKIHWGSTAALFVKGITFLGGV

SEQ ID NO: 364597 - protein, 103 aa, Zea mays
  unsure (1)..(103): unsure at all Xaa locations
  Clone ID: MRT4577_95680C.1.pep
RSPKAHFNSDPKPTRRHASKPRRDIGNHGPSXARQXILDPRQPQKPHNDKKQAXRRCVSNHPPDAPTSSGCSRLPYNGPSELPHTRCNTLFPPPRKKKKNKRP

SEQ ID NO: 364598 - protein, 163 aa, Zea mays
  unsure (1)..(163): unsure at all Xaa locations
  Clone ID: MRT4577_95681C.1.pep
VNLVANLQQQLLAQNPLALANVVANQXHQQLQQFLPAFSQLAMVNPAAYLQQQQMVSSRPLAVANALIYLQQQLLQQIVPALTQLVVANPGAYLQQLLPFNQLTMSNSVGYLHQRQQLLNPLAVVNPLVAAFLQQQQLLPYNQFSLTHPVLSRQQPIVGGAIF

SEQ ID NO: 364599 - protein, 182 aa, Zea mays
  unsure (1)..(182): unsure at all Xaa locations
  Clone ID: MRT4577_95682C.1.pep
PGYSLILWKTXAICIYGTNVLSAKYVMKTDDDAFVRVDEILSSLDRTNISHGLLYGRVNSDSQPHRDPYSKWYITPEEWPEENYPPWAHGPGYIVSQDIAKEVYRKHKNGELKMFKLEDVAMGIWINEMKKDGLDVKYENDGRILVEGCEDGYVIAHYQEPRDMMCLWDKFQKTKRGTCCKE

SEQ ID NO: 364600 - protein, 48 aa, Zea mays
  Clone ID: MRT4577_95683C.1.pep
ESDSGLEISSQPSVDAPHRAVMVLSPDRFGGMWHPCSHSRCRFPISNW

SEQ ID NO: 364601 - protein, 211 aa, Zea mays
  unsure (1)..(211): unsure at all Xaa locations
  Clone ID: MRT4577_95684C.1.pep
MGKEKPHINIGVIGHVDXSDRSTTTGHLIYKLEGIDKRVIQRFEKEAADMNMRPFKYAGVLDKLKAERERGITIDIALWKHETTKYYCTVIDAPGHRDFIKNMITGTSQADCAGLIIDSTTGGSEAGISKDGQTREHALLAFTLGVKQMICCCNKMDATTPKYSKARYDEIVKEVSSYLKRVEYNPDKSASVHISGSEGDNMIDRSTNLDW

SEQ ID NO: 364602 - protein, 44 aa, Zea mays
  unsure (1)..(44): unsure at all Xaa locations
  Clone ID: MRT4577_95685C.1.pep
TTIKYMLDRSHGSMXFKKTTFLFPPFTTRHKLFYTKEGSKLTFS

SEQ ID NO: 364603 - protein, 79 aa, Zea mays
  Clone ID: MRT4577_95686C.1.pep
FCLLPTTTQPLQSQSLTAGMGGTQESISLVGTKRGHNCPVSAIVTSIDDSPDMGSCCYDMNLLAWNLINPGQSTLESVA

SEQ ID NO: 364604 - protein, 68 aa, Zea mays
  unsure (1)..(68): unsure at all Xaa locations
  Clone ID: MRT4577_95687C.1.pep
AFRPSRFAPPEGEAAGLDIKGGCXELLPVGVGRRSXPGMALGLYALELAVAQLAHAFNWSLPDGIKPS

SEQ ID NO: 364605 - protein, 80 aa, Zea mays
  Clone ID: MRT4577_95688C.1.pep
MSLYLHLDLTGVRRWYHDGGVAGPMDRGGSCTVAFIDLLAFGSASSFAKSFVKSNVSAHDVVIFSKSYCPYYTRGIAVFK

SEQ ID NO: 364606 - protein, 89 aa, Zea mays
  Clone ID: MRT4577_95689C.1.pep
ATLLLTCVNFLVQAHEFRRTPAAGPGRGQSDGSKRHGTRASMRYHASCRVLCLRLSEMRWAGMTGEEAASCRPVADWLVVVLLTARTRG

SEQ ID NO: 364607 - protein, 114 aa, Zea mays
  unsure (1)..(114): unsure at all Xaa locations
  Clone ID: MRT4577_9568C.1.pep
PVATRRKAQRAAEQRRQLDGSGWSEKEPPETEEAGWGFVDGEVSSQGRARGGESVCSRRSDRSVGRTARSKSSREKSLCRGTDTRGRPGAVGAGGGDGRSCCYIHLRSRMLXMG

SEQ ID NO: 364608 - protein, 116 aa, Zea mays
  unsure (1)..(116): unsure at all Xaa locations
  Clone ID: MRT4577_95690C.1.pep
FNSCCFICNCLCPCAWVVFSVRSLDSSHSPCGGDCSFCPPILSLGPVSLIPLSGCSSSTAVVRACLVSVLGSAAAVVRAALVAVLGAGAWGAAAKXAKTNKQASCRRPRATGRVVE

SEQ ID NO: 364609 - protein, 68 aa, Zea mays
  Clone ID: MRT4577_95691C.1.pep
TQPILTVLGGGPPPKIRHWFIFRLISNENVFQIPNFYCFFLSHEIHFLKNSVPLFIFYPPIFHSKQKL

SEQ ID NO: 364610 - protein, 115 aa, Zea mays
  unsure (1)..(115): unsure at all Xaa locations
  Clone ID: MRT4577_95692C.1.pep
GDVKASNVLLGASLDAEVCDLRFPHVYFSAALQPPEASVARARASSAPIADGMGSPDYEDPHFLLSGVGTKKGDVCRLGRXLVYELLSGRWDYCTDTGTGLAHWVSSIHGMRRRS

SEQ ID NO: 364611 - protein, 66 aa, Zea mays
  Clone ID: MRT4577_95693C.1.pep
DAWADAWAQFSWAFLFLNTAMSTHLLLVMVLFTHIQDGYVTFVLFFREILQFCGKINKVLTSVVLF

SEQ ID NO: 364612 - protein, 142 aa, Zea mays
  unsure (1)..(142): unsure at all Xaa locations
  Clone ID: MRT4577_95694C.1.pep
FSQRLRLYIFLTSAGALSPPLLCDALYHDAALTALRDHLLGTSSDSFSRKHLTSSSSHMRTRRGRLMFTTTSISPPSPSARHSWTTSSLPLREXCPADFTIGAHMSAKPLEGACTXDXKPEPSWDTFCDNLAESDTWSEATS

SEQ ID NO: 364613 - protein, 82 aa, Zea mays
  unsure (1)..(82): unsure at all Xaa locations
  Clone ID: MRT4577_95695C.1.pep
GLSFSSRCLLLDLCRXWNENWVXAREQSEHAXLVFVXXXCYIATPCFSGLLFHWFTPSGHDCXGSNLIFIVFTMIXFVFAFA

SEQ ID NO: 364614 - protein, 56 aa, Zea mays
  Clone ID: MRT4577_95696C.1.pep
TPTFQAQDHTYHRHLNLTHSRSIKFSHHSCRIASGTLPSSHKTLGNHRTPRSRRTV

SEQ ID NO: 364615 - protein, 55 aa, Zea mays
  Clone ID: MRT4577_95697C.1.pep
PPPHIKPILITPFWFVVVPRMVIWKCDNQHISTYNKVIRWFCKKSVKSVCMVEKG

SEQ ID NO: 364616 - protein, 96 aa, Zea mays
  unsure (1)..(96): unsure at all Xaa locations
  Clone ID: MRT4577_95698C.1.pep
MVLLELKPMTARIXITSMQHPFNPLKPTRTPGDXSHIIKQIDIFTLTALNSKQLAFMRQDYLIYPTSNPRITNAAFSMTTVPHLAKAIHASVSPLD

SEQ ID NO: 364617 - protein, 44 aa, Zea mays
  Clone ID: MRT4577_95699C.1.pep
LSGSRALQGLCMSPFRVQSSARPLAVPFQAPELCKASDLCPFRL

SEQ ID NO: 364618 - protein, 156 aa, Zea mays
  unsure (1)..(156): unsure at all Xaa locations
  Clone ID: MRT4577_9569C.1.pep
AGIFIPACLTXISVLNTPFWYYSMAEQQCXTTRTYNSSLLEHILIGXPWADARAVIINPLIANTVAHMAEEQADLIRRGYPDGLWFDQLGWSXLGGEHRELGTKEIKNGLLAXMLRRMGAWLQGEYTXGTGRIDNLFGHLVDTGHDTXILQAFTPK

SEQ ID NO: 364619 - protein, 56 aa, Zea mays
  Clone ID: MRT4577_956C.1.pep
GCCVIGVNSDGTVISGSASALVSLNSLALAALVCHDVPSTHPILLALVVVIVSGAR

SEQ ID NO: 364620 - protein, 227 aa, Zea mays
  Clone ID: MRT4577_95700C.1.pep
MGRKDTSSSSAATGGGKKEKPMSVSAMLASMDAPAAKAKSSKAKAKAKPSKAPASSYMGDIDLPPSDDEDEEEARLAAAAKPKPARAAVVDLSAGAAPSHKDAKKKDKREAVAAAAAEAARQEALRDDRDAFSVVIGARVPGSSADDGAVDDNVRDVVLENFSVSARGKELLKGASLRISHGRRYGLVGPNGMGKSTLLKLLSWRQVPVPRNIDVLLVEHEIIGDDR

SEQ ID NO: 364621 - protein, 83 aa, Zea mays
  Clone ID: MRT4577_95701C.1.pep
IPITCDGCMVQQELEGLDQDRCRIVSSLFYEPMVIMIRQQCCKHVFSLPPFTHHFFCFSSAQELDSHIFTCFACLILLNKCFL

SEQ ID NO: 364622 - protein, 145 aa, Zea mays
  unsure (1)..(145): unsure at all Xaa locations
  Clone ID: MRT4577_95702C.1.pep
RCCRRHPDVLLMVEVGYRFRFFGEDAAVAAAVLGIVAHPDRSFLTASVPNFRLGFHVRRLVAAGHKVGVVRQTETAAIKAAARGVGGAPFSRGLSAVYTRATIEAAAGXAGGWRRRRARGGXSSYLVCIVDKEVEAAGREGPTAT

SEQ ID NO: 364623 - protein, 83 aa, Zea mays
  unsure (1)..(83): unsure at all Xaa locations
  Clone ID: MRT4577_95703C.1.pep
ALTQLVVANPXAYLQQLFPFNQRIMSNFAGDLQQRHQFLNPLAVANPLVAAFLQQQQLLPYNQFFLINPVLSRQQPIVGGALF

SEQ ID NO: 364624 - protein, 40 aa, Zea mays
  Clone ID: MRT4577_95704C.1.pep
PDTNPHRVGRAGRFGPKGLPITFVSSSPGSEGPNQGQERF

SEQ ID NO: 364625 - protein, 121 aa, Zea mays
  unsure (1)..(121): unsure at all Xaa locations
  Clone ID: MRT4577_95705C.1.pep
DKQQQLSTSPPAKGKAHTDRQQQVVQQIVPALTQLAVANHVAYWQQLLPFNQLTLSNSAADLQQRQQLLNPLVVANPLVAAFQQQQQLLPNNQFXLMPPPPPRQQPIVGGASFRLHMRCTR

SEQ ID NO: 364626 - protein, 447 aa, Zea mays
  Clone ID: MRT4577_95706C.1.pep
MGKEKSHINIVVIGHVDSGKSTTTGHLIYKLGGIDKRVIERFEKEAAEMNKRSFKYAWALDKLKAERERGITIDIALWKFETTKYYCTVIDAPGPRDFIKNMITGTSQADCAVLIIDSTTGGFEAGISKDGQTREHALLAFTLGVRQMICCCNKMDATTPKYSKARYEEIVKEVSSYLKKVGYNPDKIAFVPISGFEGDNMIERSTNLDWYNGPTLLEAPDQITEPKRPSDKPMRLALQDVYKIGGFGTVPVGRVETGVIKPVMVVTFGPTGLTTEVKSVEMHHEAIQEALPGDNVGFNLKNVAVKDLKRGFVASNSKDDLAKEAASFTSQVIIMNHPGQIGNGYAPVLDCHTSHIAVKFAELITKIDRRSGKELGEEPKFLKNGDAGFVKMVPTKPMVVETFSEYPPLGRFAVRDMRQTVAVGVIKSVEKKDPTGAKVTKAAAKKK

SEQ ID NO: 364627 - protein, 169 aa, Zea mays
  unsure (1)..(169): unsure at all Xaa locations
  Clone ID: MRT4577_95707C.1.pep
RARGSAANACIITNADMAPSSIVXQVLPPVTVMAFEHPAVQAYRLQHANAVXVLQQPICPIXQQSLTHVTVQTMATQQQQQFLPALSHLAMVNPVAYLQQQXLASNPLALTDVAANQQQQQLQQFLPALSQLAMVNPAVYLQQQQLLSSSPLAVANAPTYLQQELLQQI

SEQ ID NO: 364628 - protein, 228 aa, Zea mays
  unsure (1)..(228): unsure at all Xaa locations
  Clone ID: MRT4577_95708C.1.pep
MATKILALLALLALFESATNAFIIPQCSLAPRAIIPQLLRPXTSMGXFEHLXAVQAYRLQQALAASVLQQPINQLQQQSLVHLTIQTIATQQQQQFLPALSQLDVENPVAYLQQXVLAYNPLALANVAAYQQQQQLQQLLPALSQLAMVNPAAYLQQQQLLSSSPLAVGNAPTYLLQQLLQQIVPGLTHLAEANPAVYLQQLLAFNQLTVLNSAAYLQQRQQVLNPPA

SEQ ID NO: 364629 - protein, 243 aa, Zea mays
  unsure (1)..(243): unsure at all Xaa locations
  Clone ID: MRT4577_95709C.1.pep
IRLEDGPEMVTQCPIRPGSRYTYRYNATGQEGTLWWHAHSSMLRATVHGAIVIKPRNGAQGYPFPKPDQERIVLLGEWWNGNVFDLERNAFLTGNLVPQADAYTINGKPGDLHRCSGGSNRRPRTFKLKVRSGSTYLLRIINAAVNTPMFFKVAGHSFTVVGADAGYTAPYETDVVVVAPGQTVDALMATXAAPPSRRRYYMMAXPYNSARPSLPFRNSTATAVVEYVDVGQQNKQGPXRRPV

SEQ ID NO: 364630 - protein, 98 aa, Zea mays
  Clone ID: MRT4577_9570C.1.pep
GRSRGRFRGKKKKKKKKNNKKKKKKKKKKKKKKKKKKKKKKKKNRGKSPKTEKGGGFSYPPIFFSKIGGGDWGELGNGRFTCPKKKGWKKTKKDFFFF

SEQ ID NO: 364631 - protein, 125 aa, Zea mays
  Clone ID: MRT4577_95710C.1.pep
SQLAMVNPPVYLKLLSYSPLPVGNAPRYLQQQLLQQIVPALTQLAVANPFAYLQQLLPFNQLAVSNFAGYLQQRQQLLNPLAVANPLVATFLHQQQQLLPYNQFSLMNPPLQQPIVPAPHFLNYI

SEQ ID NO: 364632 - protein, 154 aa, Zea mays
  unsure (1)..(154): unsure at all Xaa locations
  Clone ID: MRT4577_95711C.1.pep
MATKILALHGLLALFVSATNAFIIPQCSLAPSAIIPQFLPPVTSMGFEHPAVQAYRLQQALAASVLXQPISQLQQQSLAHLTIQTIATQQQQQFLPALSLLAMVNPAAYLKQQLLASKPLALPNAAANHQQQQXLHRLLPAHSPLTMSEPYRPT

SEQ ID NO: 364633 - protein, 182 aa, Zea mays
  unsure (1)..(182): unsure at all Xaa locations
  Clone ID: MRT4577_95712C.1.pep
MAGALALAVLLAVASLHAEAVWLDVPQSGTKCVSEEIQSNVVVLTDYSIXVTSPYGNTLHHSENSTVGQFAFTTAEAGNYVACFWVDSAEKGSGVSVNLDWKIGIATKDWDAIAKKEKIEGVELELRKLEVAVQAIHQNLIYLKEREAEMRTVSETTNSRXVVWFSTLSLWVCIAVSGFASP

SEQ ID NO: 364634 - protein, 110 aa, Zea mays
  Clone ID: MRT4577_95713C.1.pep
MVKEKTHINIVVIGHVDSCKSTTTGHLIYKLGGIDKRVIDRLEKEAADMNKRTFKYAWVLDKLKAERERSITTDIALWKFETTKYYCTCIDAPGHRDFIKNMITGTSQAD

SEQ ID NO: 364635 - protein, 207 aa, Zea mays
  Clone ID: MRT4577_95714C.1.pep
MAGALALAVLLAVASLHAEAVWLDVPQSGTKCVSEEIQSNVVVLTDYSIMFESHPYSHPTIAVKVTSPYGNTLHHSENSTVGQFAFTTAEAGNYVACFWVDSAEKGSGVSVNLDWKIGIATKDWDAIAKKEKIEGVELELRKLEVAVQAIHQNLIYLKEREAEMRTVSETTNSRVVWFSTLSLWVCIAVSVLQVRHLQGFFRKKKLI

SEQ ID NO: 364636 - protein, 103 aa, Zea mays
  unsure (1)..(103): unsure at all Xaa locations
  Clone ID: MRT4577_95715C.1.pep
MGKEKSHINIVAIDHVDSGKSTTTGHLIYKLGGIDKRVIERYENDAAEMNKRYFKYAWVLDKLNAXRERGITIDIDLWKCDTTXYYCTDIDAHGHRDFIKDMI

SEQ ID NO: 364637 - protein, 249 aa, Zea mays
  unsure (1)..(249): unsure at all Xaa locations
  Clone ID: MRT4577_95716C.1.pep
SSQLSVCLLRLHFGLCPLQARSHLQPCRKDKSHINIVVIAHVDSGKSTTTGHLIYKLXGIDKRVIERVDNEAAEMNKRPFKDACVLXKLKADRERGITIDIALXWKVETTKYYCTAIDAPGHRXDFIKNMITATSHADCAVLIIDSTTGGFEAGISHDGQTREHALLAFTLGVNQMICCCNXMDATTPKYSKARYEEIVKAVSSYLKRVGYNPDKIAFVPISGFEDDXMIERXTNLDCYXGPNLLDALD

SEQ ID NO: 364638 - protein, 69 aa, Zea mays
  Clone ID: MRT4577_95717C.1.pep
PHVKSEPGSSGSDSSFSADGDVSSPGSSDVVLDMQLLDFSEAPWDDSESFGLRKYPSMEIDWDSILLIS

SEQ ID NO: 364639 - protein, 251 aa, Zea mays
  unsure (1)..(251): unsure at all Xaa locations
  Clone ID: MRT4577_95718C.1.pep
MAGIVVVFDFDKTIIDVDSDNWVVDSLGLTDLFERLLPXPRVPAAVRAAHALGCDLRVLSDANAFFIHTVLDHHGLLACFSQVNTNPSRVDAHGRLRIGPCHDPRAAPHGCGVGTCPPNMCKGLVLDRILREAEAEAETASSAKPRVIYLGDGRGDYCPALRLARTDFVMPRRGYPVWDLICEDPARLQAEVHPWTDGAELEETLLRLVRRAVVEDAALPPPPPPPLDCKLESMPVAAQDGMPIVPLGVKN

SEQ ID NO: 364640 - protein, 285 aa, Zea mays
  unsure (1)..(285): unsure at all Xaa locations
  Clone ID: MRT4577_95719C.1.pep
MAGIVVVFDFDKTIIDVDSDNWVVDSLGLTDLFERLLPTTPWNTLMDTMMGELHARGRTLAEVTEALRAAPIDPRVPAAVRAAHALGXDLRVLSDANAFFIHTVLDHHGLLACFSQVNTNPSRVDAHGRLRIGPCHDPRAAPHGCGVGTCPPNMCKGLVLDRILREAEAEAETASSAKPRVIYLGDGRGDYCPALRLARTDFVMPRRGYPVWDLICEDPARLQAEVHPWTDGAELEETLLRLVRRAVVEDAALPPPPPPPLDCKLESMPVAAQDGMPIVPLGVKN

SEQ ID NO: 364641 - protein, 79 aa, Zea mays
  Clone ID: MRT4577_9571C.1.pep
HPRPHTTRLRLARREQPRAHNNPTQATATAMNTPSWKTTHHRESGNASRPRPEKPRDDPRDRPSFRFLMSYSSIIKFFV

SEQ ID NO: 364642 - protein, 132 aa, Zea mays
  unsure (1)..(132): unsure at all Xaa locations
  Clone ID: MRT4577_95720C.1.pep
AVRTISLLEGRFXGRNAGMVAKRXEVIRDSTYGHXLRASRGKYPKNVIRKDSDEKTVKNQLAKCLIKLDNFTHLXMPTHYTLDVDFKDDATDEHDALSTHEKKVDGCQKHKERLDDKYNNGDNRRVFTWLRF

SEQ ID NO: 364643 - protein, 108 aa, Zea mays
  Clone ID: MRT4577_95721C.1.pep
MVLIILHFWQGTSRSSHYHGGHLRFATLLCIVLHTKHPLHRKNLQDELDAKPEELEGEELESKLLEPVAALSVHPVHVPGNKQLACPTSQKVIAKYDELAALQAEMAL

SEQ ID NO: 364644 - protein, 67 aa, Zea mays
  Clone ID: MRT4577_95722C.1.pep
MGRGKIVIRRIDNSTSRQVTFSKRRSGLLKKAKELSILCDAEVGLIIFSSTGRLYDFSNTKYDSSTS

SEQ ID NO: 364645 - protein, 203 aa, Zea mays
  Clone ID: MRT4577_95723C.1.pep
ARALLPGIAGSSVFLPFPARTAAFPPELPVLAMATAPAPWTALGFLLLGRFQRAHLQRRPAKASLRARLLPCRATLARSLKLAVPLLSTSGRPWPRVFLLRRPLDNSPHRTLSMVLPPDAIALVSLGAPRALSTAYPAVSDLADGSCCSCARLHLHGPGRRIAVRSGSMVGFGRGHGHATRDLGTPLWTPRRCPHVLDEKPEL

SEQ ID NO: 364646 - protein, 67 aa, Zea mays
  Clone ID: MRT4577_95724C.1.pep
LESRKKHVSYDDYYWKRKMMLMVEATGKVQEFTLRGPEISGSLSLPAHSLPQDGLASLFYVMGSSIP

SEQ ID NO: 364647 - protein, 96 aa, Zea mays
  Clone ID: MRT4577_95725C.1.pep
VIGLASCDELVQGHPRRRACQCAGWRVRARKRLDPAHRQHGLVGTRFLRVQQEQAAAAAPALLRIRSWSHRVTTNKGAVEKERRKGPIRGERVLGR

SEQ ID NO: 364648 - protein, 174 aa, Zea mays
  Clone ID: MRT4577_95726C.1.pep
ITVPAYFNDSQRQATKDAGVIAGLNVTRIINEPTAAAIAYGLDKKATSTGEKNVLIFDLGGGTFDVSILTIEEGIFEVKATAGDTHLGGEDFDNRLVNHFVMEFKRKHKKDISGNPRALRRLRTACERAKRTLSSTAQTTIEIDSLYEGIDFYATITRARFEELNITPTTSPAC

SEQ ID NO: 364649 - protein, 115 aa, Zea mays
  Clone ID: MRT4577_95727C.1.pep
WLANISITSSQIYISRYIERKRTVSYKSLTRELWERSLLLASNEIRDPRVQRLERATSGYIQGGTVEYEETSGCFMEAVMPALLSWHTQDVCQAISRNKCLVGKGRSERRTRPSP

SEQ ID NO: 364650 - protein, 90 aa, Zea mays
  Clone ID: MRT4577_95728C.1.pep
PTRPPTRPALVKNKSDDKWITSPSRSWELVQLDAEFSPQIVSLLASYQDGTTVLQRTIDRTLSVKLKKHLLALGWSIKLQKGRNSRKWPS

SEQ ID NO: 364651 - protein, 217 aa, Zea mays
  unsure (1)..(217): unsure at all Xaa locations
  Clone ID: MRT4577_95729C.1.pep
MAGKGGNKGEGPAIGIDLGTTYSCVGVWQHDRVEIIANDQGNRTTPSYVAFTDTERLIGDAAKNQVAMNPTNTVFDAKRLIGRRFSDPSVQADMKMWPFKVVPGPADKPMIVVTYKGEEKKFSAEEISSMVLTKMKEIAEAYLSTTIKNAVITVPAYFNDSQRQATKGXAAVIAGLNVTRIINEPTAAAIAYGLDKKATSTGEKNVLIFDLGGGTFD

SEQ ID NO: 364652 - protein, 67 aa, Zea mays
  Clone ID: MRT4577_9572C.1.pep
LPYFNNTFNLKFTLTPMVTLAPTETRNNTLLIHQKKLQYQGFITIIQHNTFLRQVKTPHIFHPNKST

SEQ ID NO: 364653 - protein, 693 aa, Zea mays
  Clone ID: MRT4577_95730C.1.pep
MQISCPPIPPFFLNSSFPPRTRAYSASPGDFFPLLHDTLDESVSMAGKGDGPAIGIDLGTTYSCVGVWQHDRVEIIANDQGNRTTPSYVAFTDSERLVGDAAKNQVAMNPINTVFDAKRLIGRRFSDASVQSDAKLWPFKVIPGSGDKPMIGVQFRGEEKQFSAEEISSMILNKMKETAEAYLGTTIKNAVVTVPAYFNDSQRQATKDAGVISGLNVMRIINEPTAAAIAYGLDKKSSSDGEKNVLIFDLGGGTFDVSLLTIEEGIFEVKATAGDTHLGGEDFDNRLVNHFVQEFKRKNKKDITGNPRALRRLRTACERAKRTLSSTAQTTIEIDSLYEGIDFYTTITRARFEELNMDLFRKCMEPVEKCLRDAKMDKSSVHDVVLVGGSTRIPRVQQLLQDFFNGKELCKSINPDEAVAYGAAVQAAILTGEGNEKVQDLLLLDVSPLSLGLETAGGVMTVLIPRNTTIPTKKEQVFSTYSDNQPGVLIQVYEGERARTKDNNLLGKFELSGIPPAPRGVPQITVCFDMDANGILNVSAEDKTTGQKNKITITNDKGRLSKEEIEKMVQEAEKYKAEDEEHQKKVNAKNTLENYAYNMRNTIRDDKIASKLPEDDKKKIDDAVEGAINWLDNNQLAEVDEFEDKMKELEGICNPIIAKMYQGAAGPDMAGGMDQDASPAGGSGAGPKIEEVD

SEQ ID NO: 364654 - protein, 118 aa, Zea mays
  unsure (1)..(118): unsure at all Xaa locations
  Clone ID: MRT4577_95731C.1.pep
GGAENNSAXXGSXXXDADMSAATTRNAKRTGWGERTAVTAVAAGSCGVAVGGGVVVEEGGGCGAAMGEGMAAPVGWASMDLFSDAAGRIGGRRMRFSNELVEVWVSWIPRLPRVDCVP

SEQ ID NO: 364655 - protein, 96 aa, Zea mays
  Clone ID: MRT4577_95732C.1.pep
KDDSWHRWTNPGRLGFSICRGRCWNLGHFDQAICMPYPWYCEPSYQKPFFLVILSWNPNQKVGFQVQALPPGHQDQKKKLAVCQGLLDGWVRPGVP

SEQ ID NO: 364656 - protein, 73 aa, Zea mays
  Clone ID: MRT4577_95733C.1.pep
LVVNSRYLDRNQMIRLGTTQSTEMLLPANNFLYTKKHHRLVNTPCLAKKIKDLFKTQAWTEYFPQDVPFSTLT

SEQ ID NO: 364657 - protein, 297 aa, Zea mays
  Clone ID: MRT4577_95734C.1.pep
MTRVLLPLLLLLALPGAYARPARQYLGQCPGLEYRLPPFAAALRATCPVSTEGYSSPYEVVSGEELLRMLDGKEEHTAVLFYASWCPFSQRTRSVFDDLSSMFPRVKHLAVEESSIMKAILSRYHVRALPSIIIARNSHVFWPLGSKDLDSLVSLYTAATGEEPVAYIGSRKWSAAQSTDGYAKAWNSSIISETVKREPYLALSILFICLRVFFFFFPKSFALIQDLWTGYREQINLGILGRLAQLLECVPHAVDVRKVWSKLRLVVGANENGRVWAALTSLPLGGRPSPIHGLLLD

SEQ ID NO: 364658 - protein, 124 aa, Zea mays
  Clone ID: MRT4577_95735C.1.pep
GLCPPGGFFGGRWFRERGFSPCAPSLPRFWTPFKRKGAAAGVFWVFFRDGGAPTWGKGGFFLRPRGGLPRGSLKGLFWGPLLGPHFVTKRGGVFRVAGGGLGPFPKKGCPLGPGNFGFPFRFFR

SEQ ID NO: 364659 - protein, 70 aa, Zea mays
  Clone ID: MRT4577_95736C.1.pep
LKKKLKKKKKRASFLRGSMHYLRMLATSYLFYRITLIQFNARIFTTSRLEKPLRSRIKSSWCNFSFQQLP

SEQ ID NO: 364660 - protein, 96 aa, Zea mays
  unsure (1)..(96): unsure at all Xaa locations
  Clone ID: MRT4577_95737C.1.pep
DATKXFFCWKRLDGWECXXVFELVKAKMPTLEEMKGFVIFLLFHLCLLWGGDFFFFYMTXVSGWGGVYFWRVGSPRAWTGTRGGWGVVWRFCWGRG

SEQ ID NO: 364661 - protein, 87 aa, Zea mays
  unsure (1)..(87): unsure at all Xaa locations
  Clone ID: MRT4577_95738C.1.pep
PQEMFPPPQDVSKGPLSPRLRCVVSGPHVFVGPTKFLYGXGGAPKVQMVGSRQHLLKGLEYQAIPQARPHFGGFFCHPKQMERRINH

SEQ ID NO: 364662 - protein, 443 aa, Zea mays
  Clone ID: MRT4577_95739C.1.pep
MELSMSGSSLRTFGRCVTFLARVASELVLQAHPAKLEMHTLNSSRSAYASISLARDFFDQYHLDAAASAPSSTPLQCSVLLKSLLAVLRTPHAALDRLAVSLPEPDAPKLQITLHCLNGVRKTYWIVCSAEPEVQSLSLDRGRFPSRLAIRPRELARLLSNFQSSLQELTIIATDPASGLPDASGDVGGKAVELRSYNDPTKDDCDTRLHTQLWIDPAEEFVEFVHAGDPVDVTFGVKELKAFLTFCEGCEVDILLFFEKTGEPVLLVPRFGLDDGAASDFEATLVLATMTVSQLSDSDDAQQPATSAQNAGEPGAAAPTLVPENVSNHTKIWSELSGSTPKSIEANRENHAQKKRNASTNMLNDMSMLPNVTNAPSKPPVADNANNIMQPLQMDHMEERPEGISGIPRSQHHPSNWVGADDNDDDNEDDEELLVQTTPYYMD

SEQ ID NO: 364663 - protein, 137 aa, Zea mays
  Clone ID: MRT4577_9573C.1.pep
KRVRPGNNITRELRESLQIGGGGKPFTFLYWAISFKVPKKKRTKFDTGGKKTSPKTGYRFGGVRVPMVFQGSGALPIFLKPGPYRALGAATWAGTLLKGVPAPPKPEKRSTPFLFWELKNISRGWGSNWGGCIEGGG

SEQ ID NO: 364664 - protein, 165 aa, Zea mays
  Clone ID: MRT4577_95740C.1.pep
NQQHQQLQQFLPTLSQQAMVNPAANGQQQQLFSYSPLVVGNAPTYLQQQLLQQIVPALTQQAVANPVANLQQLLPFNQLTLSNSAGYLQQRQQLLNPLEVANPLVPPFQQKQQLLPNNQFFLMNPVLWRQQPIVGGPKFKITYEMYSKKGPSNRGVFPRKNQNID

SEQ ID NO: 364665 - protein, 76 aa, Zea mays
  Clone ID: MRT4577_95741C.1.pep
YLSVQAVDHMKVVASCKTFRPGGWEMQPDNRMRNLEIWEPGDGERSRDGTHRVVEEQTQRVGRPRIEASQSSWPPT

SEQ ID NO: 364666 - protein, 170 aa, Zea mays
  unsure (1)..(170): unsure at all Xaa locations
  Clone ID: MRT4577_95742C.1.pep
PSPPPPPLGIFSFLGALGKEKTHINIVAVGHVDSAKPTTTGHLIYKLGGIDNRVIERLEKEAAEMNKRSFKHAWVLDKLKAERERGITIDIVLRKIQTTKHYCTVIDAPGHRDFIKNMITGTSQADCAVLIIDSTTGGFEAVISQDVQTPQHALXLDSPLGVKEMICCCN

SEQ ID NO: 364667 - protein, 213 aa, Zea mays
  unsure (1)..(213): unsure at all Xaa locations
  Clone ID: MRT4577_95743C.1.pep
MGNENVPHSTFVVIXGHVDSGKSTTTGHLIYKLXGIDKREIDRLQKGAAEMNKRAFKYSCLLDKLKAERERGITIDIALCKIETTKYYCTLIDAPGHRDFIKNMITDTSQVDCAVLIIDSTTGDVEAGISKDGQTREHALLAFTLGAKHMICCCNKMDATTPQYSKARYEETVKEVSSYLKIVGYNPDKIAFDSISGYEGDHMIERITNLDCY

SEQ ID NO: 364668 - protein, 79 aa, Zea mays
  unsure (1)..(79): unsure at all Xaa locations
  Clone ID: MRT4577_95744C.1.pep
FVYNYSAYALNLTVVLTYPRAAAHHQMLHSNLHIIEPCSSIFKPASHIFHATSLGIKXMNVHYIHLHISIYLLYNLQYI

SEQ ID NO: 364669 - protein, 168 aa, Zea mays
  unsure (1)..(168): unsure at all Xaa locations
  Clone ID: MRT4577_95745C.1.pep
MSKEKSHINIVAIGHVDSVXPTTTGHLIYKLGGIDKRXIDRIEKEAADMNKRSFKYAWVLDKLXDERERGITIDIALRKIETAKYYCTDIDAPGHRDFIKNMIXTGTSQADCAVLIIDSTTGGFEAVISEDGQTREHALLAFTLVVNQKICCCKXMDATAPIYSEARY

SEQ ID NO: 364670 - protein, 179 aa, Zea mays
  unsure (1)..(179): unsure at all Xaa locations
  Clone ID: MRT4577_95746C.1.pep
PPLALANGVANHQQQQLQQILPTLSXLAMENPAAXYVQQQQLLSFNPFAVGNAPTYLQQQLLXQQMVPXALTQLAVANPVAYLQQLXIPFNQLTLSNSAAYLQQRQQLLNPLVVANPLVDGLLQQLQLMPYNQFYLMNTVLLRYXPIVGGAIFYITYDMYSIMVPSYRRVYPRDHQYID

SEQ ID NO: 364671 - protein, 742 aa, Zea mays
  unsure (1)..(742): unsure at all Xaa locations
  Clone ID: MRT4577_95747C.1.pep
EPGESVTDDRILGARMTKASCVSSVPRKYEVVEEXSLVXDLGELQRQLIVALPEVYSEKFVSKKNGTENLELPEVKDYQPRKVAGDEILEQEVYGIDPYTHNLLSDIMPADLELSPTDKHIFIEELLLNTLNKQVRHFTGSGNTPMTYNLRPVIEEIQRSAEDNGDRRTSKMCLGMLKTMRNRSEQNFVAYRKGLGVVCNKKGGFGVDDFVVEFFGEVYPSWRWYEKQDGIKHIQNNSEDQAPEFYNIMLERPKGDGDGYDLVFVDAMHKANYASRICHSCNPNCEAKVTAVNGKYQIGVYTLRPIAEGEEITFDYNSVTESKEEHEASVCLCGSQVCRGSYLNFSGEGAFEKVLMEFHGVLDRHSLLLQACETDSVSQQDLIDLGRAGLGTCLLAGLPGWLVAYTAHLVRFIYLERQKLPDEILRHNVDEKRQFLIEINMDSEKNDAEVQAEGVLNSRLQQIVHTLDKVRYVMRCIFGDPKNAPPPLVRLSGKSLVSAIWKGDSSIVAELIQSMEPHVEEEVLSDLKAKIRAHDPSESEDIEGGIRNSLLWLRDELRTLSCTYKCRHDAAADLIHLYAYTKCFFRVRDYKTVKSPPVHISPLDLGPKYADKLGPGFQEYCKTYPENYCLAQLIYWYSQNSEPESRLTRARKGCMSLPDVSSFYVKSAKPSQERAYGNRTVRFMLSRMEKQAQRPWPKDRIWVFKSDPRFFGSPMMDTVLNNSPLDKEMVHWLKTRPNVFLG

SEQ ID NO: 364672 - protein, 195 aa, Zea mays
  Clone ID: MRT4577_95748C.1.pep
RLQVPVRNSRVDPRVRPRVRSLGGMFTGQPPGPPPPPPGLPGQASLLQAAPGAPRPSNSTLVDELESSFEACFASLVSQDYVNGTDQEEIRTGVDQCIQKFLDIARQTECFFLQKRLQLSVQKPDQVIKEDVSELRSELQRKDALVQKHLTKLRHWQQVLEDINVQHKKPADMPQGSLAFLEQASANIPAPLKQT

SEQ ID NO: 364673 - protein, 157 aa, Zea mays
  unsure (1)..(157): unsure at all Xaa locations
  Clone ID: MRT4577_95749C.1.pep
MPSAPPLSCSEPCNINLTSSMGKEKYHIHVAAIGQDNSGXSTTTAHIIYKFEGIEKRVIERFQKEAAEMNKRTFKYAWVLDKLKAERERGITIDIALWKFETTKYYCTVIDAPGHRDFIKNMITGTSQADCAVLIIDSTTGGFEXGXPKDGQTREHA

SEQ ID NO: 364674 - protein, 71 aa, Zea mays
  Clone ID: MRT4577_9574C.1.pep
LHPVWCDDEHLRATLLTTSPTATRRTVTCILRSVSRIRSDRASPCPGATFHQRPASVCFIHDRREVNASFL

SEQ ID NO: 364675 - protein, 125 aa, Zea mays
  unsure (1)..(125): unsure at all Xaa locations
  Clone ID: MRT4577_95750C.1.pep
LVKTLQVGKFQQLVATFIGGFVIAFVKGWLLSLVMLACIPPVVIAGGIVSKMLAKISTKGQASXPDAGNIVEQTLGAGFLVPTSVKTXVVSFNGEKQAIARAPNIVMLGIGGLLTPREFKAPNSD

SEQ ID NO: 364676 - protein, 113 aa, Zea mays
  unsure (1)..(113): unsure at all Xaa locations
  Clone ID: MRT4577_95751C.1.pep
NAFIIPQCSLAPSAIIPQFLPPVTSMGFEHPAVQAYRLQQALAVSVLQQPIAQLQQQCWAHVTIQTMCSXQQQQFLPALSQLAVVNPVDYLQQXCLSCNLLDLINIFAYQQQQ

SEQ ID NO: 364677 - protein, 144 aa, Zea mays
  unsure (1)..(144): unsure at all Xaa locations
  Clone ID: MRT4577_95752C.1.pep
MATKILALLALLALLVSATNGFIIPQXSLAPSGIIPQFLPPITSMGFXHPAVQAYKLQLKLEARALQQPIAQLQQQSLGHLTLQTIETNQQQHFLPSLMHLXMENPVAYLQQQMIAYNPLDLKNGATYQKQQQLPEKYDTASPT

SEQ ID NO: 364678 - protein, 74 aa, Zea mays
  Clone ID: MRT4577_95753C.1.pep
ARKKCNTLAKKARLLEIGWDRALDSLGSVHQICDDICSSVLGGPDADDLSHREVGVLYDVHRLSEYAESFGTEG

SEQ ID NO: 364679 - protein, 133 aa, Zea mays
  unsure (1)..(133): unsure at all Xaa locations
  Clone ID: MRT4577_95754C.1.pep
MGKEKSHINIEDIGHDDSGKSTTTGHLIYELXGGIDKRVIERFEKEAAEMNKRSFKNAXVLDKLKAERERGITIDIALRKIETTKXYYCTDIDAPGHRDFIKKMITGTSQADCAVLIIDSTTGGFEVVISQDG

SEQ ID NO: 364680 - protein, 251 aa, Zea mays
  Clone ID: MRT4577_95755C.1.pep
MGKEKTHINIVVIGHVDSGKSTTTGHLIYKLGGIDKRVIERFEKEAAEMNKRSFKYAWVLDKLKAERERGITIDIALWKFETTKYYCTVIDAPGHRDFIKNMITGTSQADCAVLIIDSTTGGFEAGISKDGQTREHALLAFTLGVKQMICCCNKMDATTPKYSKARYEEIVKEVSSYLKKVGYNPEKVPFVPISGFEGDNMIERSTNLDWYKGPTLLEALDQINEPKRPSDKPLRLPLQDVLQIGGIGTVP

SEQ ID NO: 364681 - protein, 95 aa, Zea mays
  unsure (1)..(95): unsure at all Xaa locations
  Clone ID: MRT4577_95756C.1.pep
HFNKHSPNYFNTFFNHPPLKHKLRIFLQKKTLKIFPRPTSCPLPPIVQFQTLKYNIKSMAWRSFTLXELKAACIPKKLAPTICISVDHPRKNKFL

SEQ ID NO: 364682 - protein, 115 aa, Zea mays
  Clone ID: MRT4577_95757C.1.pep
GGRAAQKSLDICFLPRVQKPKIPGLGGPESKPERGGFNFITWVEGPRIKHSLTSMLAGVKIQSKNRSQFSTSPNAICGRSHRYKQGALLNYLLHLHNLVFFLFPPTGHAWGPKLT

SEQ ID NO: 364683 - protein, 260 aa, Zea mays
  unsure (1)..(260): unsure at all Xaa locations
  Clone ID: MRT4577_95758C.1.pep
MDNVGVWRPVVTPKGPKSLESLSANTLTGASPSLSIQRQPVVDLLCAMTLLVQQSTSFVDMSLDMDDGDGSFFWLSLDEQKRRGFSCDPSMVHAGCGGLLGTCHSKDCAGVDLVDPLSAEVSEPSMISLLQSDIRVALKAAFANMDGPLSVIDWCRGRGNAAESAGTGDAYSFQYSSGDILEPSSSLSIGGDSMSPPQPTSSNRGISDXEFQXRDIXRVRPTIAVLPSPSMLVGYQDXDWLKASVNSLKXWEKAXFEPYA

SEQ ID NO: 364684 - protein, 50 aa, Zea mays
  Clone ID: MRT4577_95759C.1.pep
VLLTLHSTSHTIPNMPSEPHPGSIMARNKEDTIEAETLFCARPVRQAKDH

SEQ ID NO: 364685 - protein, 203 aa, Zea mays
  unsure (1)..(203): unsure at all Xaa locations
  Clone ID: MRT4577_95760C.1.pep
MLKHEDDNVKVLLATCFCEITRITAPDAPYNDDILRDIFYLIVGTFGGLSDVNSQSFGRRVAILETVARYRACVVMLDLECDDLITNMFQTFLGVVXSMQAIMILIIDESEDVQESLLRVLLSALGQKKTGAAMSARKLARSVIEHSATKLEPYIKKFLTSSWAGNGSSSNDQIDHQXVVFDLYQCAPKVLKAIVPYIXWELL

SEQ ID NO: 364686 - protein, 138 aa, Zea mays
  unsure (1)..(138): unsure at all Xaa locations
  Clone ID: MRT4577_95761C.1.pep
MVFLSPSSQVFWPGSFPPWYPWKKGAIFSAPFFFFFFEKRTNSGPLSTRGGLGSDPWPVFLFGRGPIFPVVPGPGFTRDFLFINCWAGCPPKKKIKREXKKKRELKKKKKKEKANKKKKKKKKKKKKKKKKKKRKKKL

SEQ ID NO: 364687 - protein, 374 aa, Zea mays
  Clone ID: MRT4577_95762C.1.pep
MASPKHSHRHHRAAATKHRRPLALRRAMLHSCVCFLVGLVTGLAPSDWTDAASRAAVHANGAATAQVFRALHAMNQTAAAGALGQLLALQHYQQQPVVEKEKEKEKKPLDLVVVVTTTTTSTGLSERERRSAGLTRTAHALRLVSPPLVWLVVEAAREAGPTARLLRRTGVVYRHLTYAENFTSEAWEEERHHQRNQALAHIERHRLRGVVLFAGLADVYDGRLLEQLRRHIRTRSVGAWAVATVWEQEKRVAVEGPVVVCNTTTTTTSAASTACAWFSASDSTLLAAAAAAAPPVTADDSVHGFAFASDLLWDPSRWDRFPTSEPDQSQDSIKFVQRLVMAEYNKTRAIIPADDDYSSNRSQIMVWRVDTTLL

SEQ ID NO: 364688 - protein, 87 aa, Zea mays
  Clone ID: MRT4577_95763C.1.pep
QGPELRPRGDFLGARPPGLMVDLEFIKLCTLPFPRFECAFLEWTLIYRLPRGFLTSGTPFLGHRNNILQNHVHLFLGMTKCISGEGR

SEQ ID NO: 364689 - protein, 235 aa, Zea mays
  unsure (1)..(235): unsure at all Xaa locations
  Clone ID: MRT4577_95764C.1.pep
MAFDAFTDKTAVFRRLKAKPENKMCFDCNAKNPTWASVTYGIFLCLDCSAFHRSLGVHITFVRSTNLDSWTPDQLKMMAFGGNNRAHAFFKQHGWTEGSGKVDSKYTSRAAELYRQILQKEVAKSSTVNVLPSSPVAASQPPNPTDDFPDFKLADAPEETTNGKHEPLVANPPKEPAQAPKAPTHPTYVSSVKKPLGAKKVGAKTGGLGXKKLTTKSNESLYDQKPEEPKPALPQ

SEQ ID NO: 364690 - protein, 91 aa, Zea mays
  Clone ID: MRT4577_95765C.1.pep
QPSRFSSAFASNRVRSTPPPGKREFCIRTTNQKRDQLGANKTSTTSSSLISTSTSICFDPFAEQMLRTLVLVWNEDMAVRSARTAKIAKSG

SEQ ID NO: 364691 - protein, 107 aa, Zea mays
  Clone ID: MRT4577_95766C.1.pep
IPSPSWSGPGPVLWEEAAQEAALVALAGRPLPRPRERRHRWLCLPPALLPPQPQPGEQISPPPAPPPPRWSSCATPRGRRSQLPRWLASPLLSLLWLVRTRGRTRGS

SEQ ID NO: 364692 - protein, 58 aa, Zea mays
  Clone ID: MRT4577_95767C.1.pep
SLPGGDLQIPPATSSRKIKNGSPPTTSTSYNFNRQARTRIFSSLTEILLTTTNPAHPP

SEQ ID NO: 364693 - protein, 140 aa, Zea mays
  Clone ID: MRT4577_95768C.1.pep
ARIINPHIRIASMDALIHASLEQKLTRVSVVVVVRRMHVRVVAQRNVLDSSSRSKYDVAEAITKPAGASRSEAGSVFACLPRVAQRGRQHSHLGRRGEGVIRHVSSRRADVHDRRRSCHELQSLAVWAAPLRPLHSFRRS

SEQ ID NO: 364694 - protein, 98 aa, Zea mays
  Clone ID: MRT4577_95769C.1.pep
PAQQQKRPSALAPTTSSSQPSLSLCSNGALLARSRGHGHALRRGGGSCFTAISYSARKVSLTPGISPPMPARVYPSLSARFILAVLPALTQIACRPHL

SEQ ID NO: 364695 - protein, 112 aa, Zea mays
  Clone ID: MRT4577_9576C.1.pep
RPCAGPCCAGAIIIITLADHNHDYRKLISSRPQHRELPRQWTRSWPELADAVDPDRPRSPGEAMSALRQGLTGASGRTGISASWGTVCAPRVGGLATTTPLVTCAGILRRGA

SEQ ID NO: 364696 - protein, 35 aa, Zea mays
  Clone ID: MRT4577_95770C.1.pep
HSLPTAMFPPILCLHQPAYVTCKCMPTPALDLYNL

SEQ ID NO: 364697 - protein, 61 aa, Zea mays
  Clone ID: MRT4577_95771C.1.pep
ILAFSLRGFVILLGVFCRRGRFFRLLQLRLTSSKREFRRFRPTLSGDGRILRAYGRRLKHI

SEQ ID NO: 364698 - protein, 52 aa, Zea mays
  Clone ID: MRT4577_95772C.1.pep
MSAAALSARGPRACALLFALARGALARPRLPALGPVAAAFPAVRVVGCGRAP

SEQ ID NO: 364699 - protein, 71 aa, Zea mays
  Clone ID: MRT4577_95773C.1.pep
IWGNKFILGVVTPTELMMIEMVMDPLIIFPQPYKKVGSGKIMGFFIHQTKPVPSIQSKGPFERWCSILLSP

SEQ ID NO: 364700 - protein, 63 aa, Zea mays
  Clone ID: MRT4577_95774C.1.pep
TNRTSQIILSRLFYPDYFILQKLSKLFYPWGVTNRALVPKGLIIEWASFQATSNVTGTLSIPS

SEQ ID NO: 364701 - protein, 287 aa, Zea mays
  Clone ID: MRT4577_95775C.1.pep
MAMSDLTATVIPKPDGADDESVEIREVWADNLEEEFALIRDIVDEYPFVAMDTEFPGIVCRPVGAFRSPADYNYATLKANVDMLHLIQLGLTFSGPRGELPALGAGRRRCVWQFNFREFDDARDIFASDSIELLRRSGIDFRRNAERGVDARRFAELLMSSGVVLNDSVYWVTFHAGYDFGYLLKILTCNSLPDTQAGFFKLMKIYFPTVYDIKHLMKFCNSLHGGLNKLAELLDVERVGESHQAGSDSLVTSCAFWKLKDSFFAGSTEKYAGVLYGLNAENGVSAH

SEQ ID NO: 364702 - protein, 55 aa, Zea mays
  Clone ID: MRT4577_95776C.1.pep
KAAPKAPAAANAEPGPAASFFYGAVTEDAASPTDVNKALKDHQLSEFKQLIYYMR

SEQ ID NO: 364703 - protein, 264 aa, Zea mays
  Clone ID: MRT4577_95777C.1.pep
MMISSVLCPPAAGAAAPVTGAGAPPIIGSRSSSLHPPPPAASRIHLPRLPPPPSPCSSSTPTSPFPSHASSALQPFDEVLSSMSPREQTSLLSRQRCWRRARDLFNRLRALPGYAPNPVHDAVLLRHLARARRWAELHRAWIGMPFPPSNPAYAALADALAKAGLARGALLLLRHMRTRGVAPDEVSMNTFVRILKDEGRHDDALALFHSWCDGRFEVDFLDLDSITVDLDGPMQFLLADMYDDKIAAPAAGVAPERPRKPSLW

SEQ ID NO: 364704 - protein, 158 aa, Zea mays
  Clone ID: MRT4577_95778C.1.pep
GDWGQGGPLSRHCGGLPKLNFPTFDGTYPKLWQKCCEDYFEMYATETFVWVKVSTMHFVGAAARWLQSIEPRLPSMSWRQFCQAIHDRFGREQHELVIRKLFHIKQTSTVQDYVDRFSELVDLLVTYEHTTYPLYYTMKFIDGLRDDIKSVILEAVAP

SEQ ID NO: 364705 - protein, 74 aa, Zea mays
  Clone ID: MRT4577_95779C.1.pep
RFYLSSLTIQAPFIMDYRPRVLSLVLIALQALVVIDVALGAKMQPCEILWSLIIRLSELVSGNRRRNVKVSCHW

SEQ ID NO: 364706 - protein, 59 aa, Zea mays
  Clone ID: MRT4577_9577C.1.pep
DIINVTLILISASHYPLGYMFFSNGGWTFQYFNGTIGLNNLYAYCSLIGCLHFHTTPIA

SEQ ID NO: 364707 - protein, 141 aa, Zea mays
  unsure (1)..(141): unsure at all Xaa locations
  Clone ID: MRT4577_95780C.1.pep
RGRSRTPGASSWGRSLNSPRGPAPPFFVVNPRLGGGPSVKNKIPWREAATAHMFFAVIYYRAPEKRGERFQGKTIHFSRIRGRQLESVLPKKKEGQKLWRFNPWLKPFLGQGMEKKPSPFFLFWXXXKKKKKKKKKKKKRA

SEQ ID NO: 364708 - protein, 61 aa, Zea mays
  Clone ID: MRT4577_95781C.1.pep
SQKTEKKMEGGKTEYCKSFENGTKVEVRVPFELKRSHYEMLIIIICVLIMIVVSVLPIGCL

SEQ ID NO: 364709 - protein, 109 aa, Zea mays
  Clone ID: MRT4577_95782C.1.pep
EYPGRPTRPFLPRGPQRGCGAGYTMVQPLGHQEPRRGLNAAMERTMVDYLCVLTHIKAQCCSNPVATAEDYRRWTRTTTARGHADGPRGLGGLRPVAPDLLDHHQAGPA

SEQ ID NO: 364710 - protein, 96 aa, Zea mays
  unsure (1)..(96): unsure at all Xaa locations
  Clone ID: MRT4577_95783C.1.pep
MAPMGEMXPAAKKPVEEEPAADMTTVGKKPMAEKRVPAVXSVGLDGGVGKRGMKXGMISVETYMIYIFKVLMLVHPDIGFFCKAMFIMNSFINDIF

SEQ ID NO: 364711 - protein, 120 aa, Zea mays
  unsure (1)..(120): unsure at all Xaa locations
  Clone ID: MRT4577_95784C.1.pep
HLDVLDLAVEGEELLHVPRRSPREARWFTLIVXTSETSMVQFGEVQSCGDGDDDADADGDDVQNSAGATAILTEPGFSPAAHEGAHADKASLGYARVMPRPGPIWVDTPRQWADERVPRC

SEQ ID NO: 364712 - protein, 79 aa, Zea mays
  unsure (1)..(79): unsure at all Xaa locations
  Clone ID: MRT4577_95785C.1.pep
PPACFLFALSSGRPSGGAFFFSWGLPLWLLICGWPRSLCSTLYFWVPSLPPSVIGHLLSSPFGVRWGGLSXPVGHFAPG

SEQ ID NO: 364713 - protein, 69 aa, Zea mays
  Clone ID: MRT4577_95786C.1.pep
YIFIKDAPGSPNIQVDTPTYINTNTDPQHAYRDSKLKNCVSLSFTHTTQYLCIAGNISLAYYFSTPTTS

SEQ ID NO: 364714 - protein, 34 aa, Zea mays
  Clone ID: MRT4577_95787C.1.pep
KSYCSVTNLHKNPPWVGLVATVIKVEFKNNPGAL

SEQ ID NO: 364715 - protein, 45 aa, Zea mays
  Clone ID: MRT4577_95788C.1.pep
SLSLSPSTACHLSTYILTISVSSLSTFVTSPSTSFICMRTIFSTY

SEQ ID NO: 364716 - protein, 91 aa, Zea mays
  Clone ID: MRT4577_95789C.1.pep
KKGFGPPLKKKLGTYKNPRGFLETPGQNPGAPLLNVSPRPKKSFLFKGAQGTCSPLFPPKNCGMFLGPVSFPPKIGPPMSGPLFHWGENPL

SEQ ID NO: 364717 - protein, 164 aa, Zea mays
  Clone ID: MRT4577_9578C.1.pep
MDDTTEAAAMKTLMTFCGYHPLEMVMHPLGLFPAEKKDNPMWCNRALQSDAMAHLSNLAQTTKLTLDSQEDFVVDLFSELVEKDLQVERLSQRITTLEQQQELEETNDHLDMHHLEMEANEAGSDGEEAPEELGPAPGANVTASVMPLHPYPVSLPLLRVDESF

SEQ ID NO: 364718 - protein, 122 aa, Zea mays
  unsure (1)..(122): unsure at all Xaa locations
  Clone ID: MRT4577_95790C.1.pep
MGADALRSCRRRLLCLTPRPWWGSASALARPPXAAPLSLPNGGLLGGSHAISWGLTRFFRSKEKHFPAISDPKVEPSFKELAAAPWDEPPESLVAAAKKGGSKAARDNAGQEALKNVFGAAE

SEQ ID NO: 364719 - protein, 126 aa, Zea mays
  Clone ID: MRT4577_95791C.1.pep
QFPVRAGRPSFFISSAPTPPPLLPGTNLSRESSPCEGIFSYTPITTPPFQLLLNLLSNTAQLSLSYLRSLGELLNLTSFSNPYSLYYTTSHLLHNLVYFLYNYALFVVFTLCTSLLAHPLSLLILL

SEQ ID NO: 364720 - protein, 93 aa, Zea mays
  unsure (1)..(93): unsure at all Xaa locations
  Clone ID: MRT4577_95792C.1.pep
MADGGDDTTIEQVHRGIXDSSNKTLVKSGALYKYGLDTLVLSHEPXSMRELRLVTHKHEWGDMHSSPDXASLLAILIKLSGSLDTLDVGWFTG

SEQ ID NO: 364721 - protein, 55 aa, Zea mays
  unsure (1)..(55): unsure at all Xaa locations
  Clone ID: MRT4577_95793C.1.pep
GEHPQGQGGQGGRTGRRLENAILARXKAKNEATHGTNKGEAAADTESLHVKDYKD

SEQ ID NO: 364722 - protein, 199 aa, Zea mays
  unsure (1)..(199): unsure at all Xaa locations
  Clone ID: MRT4577_95794C.1.pep
MSASPAAAAALLILFALGAAGGVAADGSDHRYKMYEPVPLYANKVGPFHNPSETYRYFDLPFCSPEKVKEKSEALGEVLNGDRLVDAPYKLDFRSEVESKAVCSKKLTKEDVVKFRNAVAKDYYFQMYYDDLPLWGFIGKVEKGGKADPSEWKYYLYRHIIFDILYNNDXRVIEINVHTDQSALVDLTEDKETNVDFLY

SEQ ID NO: 364723 - protein, 95 aa, Zea mays
  Clone ID: MRT4577_95795C.1.pep
YGGANNANPPALFNMQLFELLYVADYMYHRARTKNPGSTDPIRRNCVLGPTLHHVYPKGQTKIHLGPGDDDAFLYRIIAAPPVINHLFVRSWSDQ

SEQ ID NO: 364724 - protein, 39 aa, Zea mays
  Clone ID: MRT4577_95796C.1.pep
LQIFTSVMDSRIAVKAMNSHQSSHWNEQFMAKADIARSS

SEQ ID NO: 364725 - protein, 19 aa, Zea mays
  Clone ID: MRT4577_95797C.1.pep
HPILSRHVQNRFLRFEEIA

SEQ ID NO: 364726 - protein, 119 aa, Zea mays
  unsure (1)..(119): unsure at all Xaa locations
  Clone ID: MRT4577_95798C.1.pep
VNSNSSKPAGLPFKSKDEPRIESFLQKNGNLHPKRYTYADVKRMTRSFTEKLGQGGFGPVYRGSLHDGRQVAVKMLKDTKSEGXEFMNEVASISRTCHVNIVTLTGFCLQGSKRALVYE

SEQ ID NO: 364727 - protein, 117 aa, Zea mays
  Clone ID: MRT4577_95799C.1.pep
MVGVFIRSKSISQETTDPGTVYIDCLTTCISCYKIDVQQNRTYWEIAEFGSLYLCVVFNLFPNCLFCLPTSLPVPTIIFLRDQFETVQKHANSLFFLARFVFWSLPDSLGGASFWLG

SEQ ID NO: 364728 - protein, 109 aa, Zea mays
  Clone ID: MRT4577_9579C.1.pep
QFCPPLASPNEPGRSPPRPNNQGKARREAPPLSRAASDRVRLRSRCGGRAGAGAGQGPGQERHPSGVPPASQLLSPPRKSRSFRTGSVQENPQIPSVVFLRTWQENTYD

SEQ ID NO: 364729 - protein, 117 aa, Zea mays
  unsure (1)..(117): unsure at all Xaa locations
  Clone ID: MRT4577_957C.1.pep
MWSHSGTFIEVFVAFKVLISFYIYDHLXFIALFIALFFILMFISLFFXYLILLFLVSFFFFIFFLLFFLFIXSFLYVLFFLFFLSFYYFFFIIFLFFIFFNSYFYIFIFFIFLFFIF

SEQ ID NO: 364730 - protein, 419 aa, Zea mays
  Clone ID: MRT4577_95800C.1.pep
MALLGEYSSQELLQGQLQLWHQSLGFFKSLALAVAMDLRIADAIHRLGGAATLPQILAEAGIKIDPRNNKLRDLRRVMRALTVSGIFTVVQRPASSSDGGGRRGAEAEGPVYKLTAASRLLVVGEKESSTATTRQLPPPPPSLTVYVQLLLETCRGSAFSRAVREWFQFQQPPQDDEQHQQPAGRLSSPFALACGGQTIWERAERDAHAFPFDDAMASDTAFLMPIVLRECGDEVFRGLTSLVDVAGGLGGAAATIAAAFPDLSCTVLDLPHVVAKAAAGTADSNVVQYVAGDMFQSIPPADAVLLKWILHDWSDDECVRILKNCKQAIPPRAAGGKVIIIDMVVAGSGSGSGSADDEPSESDLRHVETQILFDLLMMCVNGVERDEQEWKKIFSEAGFQDYRIMPLLGVRSIIELYPN

SEQ ID NO: 364731 - protein, 145 aa, Zea mays
  Clone ID: MRT4577_95801C.1.pep
LFSQIVRPLVSSAGPFFSKGLFGSPPRVRVSPGESNLTKTFPPAWVPTLDPFKIFGLNRAPQNSNPMLGFWGILLASFFLFWGFLPPNTRFPPRGFFNFYFFWAPLKSKFKKLGWCPLFKKKKKKKKKKKKKKKKKKKKKKKKKK

SEQ ID NO: 364732 - protein, 70 aa, Zea mays
  Clone ID: MRT4577_95802C.1.pep
QLKESMRFIIVSLFTVVKVLAGTVLVPSLVILNWLSSCLIIRPSASPYFLKNPVGAPCDQYRRRWTWPRR

SEQ ID NO: 364733 - protein, 86 aa, Zea mays
  unsure (1)..(86): unsure at all Xaa locations
  Clone ID: MRT4577_95803C.1.pep
FARLIVCANLTLNXLLSLPLXTMPGMMPQLMTPNMMGPFXMPSLMSPMVLPSMMTQMMMPQCHCDAESHIMLGQRLPFMFNPLALR

SEQ ID NO: 364734 - protein, 250 aa, Zea mays
  unsure (1)..(250): unsure at all Xaa locations
  Clone ID: MRT4577_95804C.1.pep
PLDNCSFPTPTPSPELPSTPSSPSPAHHDRKLSIGFIIAVAVGGFAVLMLIVVVLCVCLSKRKGKKEAGVDYKGTGVRSDKPKQEFSSGVQTAEKNKLVFLDGCTYNFDLEDLLRASAEVLGKGSYGTAYKAILEDGTVVVVKRLKDVVAGKREFEQQMELVGRLGKHSNLVPLRAYYYSKDEKLVVYDYIATGSFSGMLHGIRGVAEKTPLDWNTRVXKIILGTAYGIAHIPSEGGAXLPHGNIKSTNV

SEQ ID NO: 364735 - protein, 852 aa, Zea mays
  unsure (1)..(852): unsure at all Xaa locations
  Clone ID: MRT4577_95805C.1.pep
GTSRPAGPAPVTAIDSRSQQKRTGAERRGRRIVLRENKRIHLLSPLQIYAGGAGASVLLRGGGAALLAGRPREPVPRTDRWGRRRSSSCCCVAAAALPRRASAATDAGDVSAINGLYVALGSPKLPGWSASGGDPCGESWQGVTCTGSSITSIIFNAANLGGQLGSLGNFTSITEINLSNNNIGGSIPEDLPVTLQNIFLSDNQLTGSIPMSLSELHSLTAMSLNDNHLDGKLPDAFDSLTGLVNLDISSNNFSGPLPPSLGSLTSLTTLHMQDNQLSGTLNVLQDLPLKDLNVENNMFSGPVPPKLLNKPNFKNDGNPFNTSIAPSTSPSSTPTGSRPTQTPSSSSSPSGSPPPSSAASNSSSGSTARNSNSPSSKKNKSSPLRTVGYVLLAIVLFIVLVLLVIFCLSKYQERQSRRDYSTSQLGRVHQRVEEPKSKQAXRCSLNMKPKKVYLRFLKERSPEKXLAVPVAIEKPPEKRQEHVINXSEQNQRSLLHHHLHXIQLPQEQCSLILPSRLPSPHPVEKVSVNPIVLPEKRVSTPPRTGPSTSATSFSVASLQQYTNSFQEQNLIRESRLGKVYLAELAGGKLLEVMKIDNANSVHXHLGASFXLLESISDIRHPNILELVGYCAQADXRLLVYNHFSRKTLHDVLHEGEDLDKPLSWNARLHIALHAAKALEYLHDTCEPPVVHQNFEPANVLLDNRCSVRVAECGLAQLMASGSVTQLSGRMRALLNYEAPEIHESEPFTCQSDVYSLGVVMLELLTGRKPYDSSRPRDEQHLVRWADSQLHDMESLSKMVDPSIRGECSVILLSRFADIISQCIQPGPEFRPAMSQIVQDLARIVGASGAVSE

SEQ ID NO: 364736 - protein, 60 aa, Zea mays
  unsure (1)..(60): unsure at all Xaa locations
  Clone ID: MRT4577_95806C.1.pep
INFCIDPFLTDRWHPVVDRXXHSRSAAAVLDVAVIAPEYISVVLGVHACVGQGPHVHYLC

SEQ ID NO: 364737 - protein, 372 aa, Zea mays
  Clone ID: MRT4577_95807C.1.pep
KEHVINLERTESEIFAVAPPPPPPPPSTPPPPSPPPRLPSPPPAEKVTVNPIVRPVKRVNTPPRTGPSTSATSFSVASLQQYTNSFQEQNLIRESRLGKVYLAELPEGKLLEVMKIDNANGRIPVDDFLELVACISDIRHPNILELVGYCAEYEQRLLVYNHFSRKTLLDVLHEGEDIDNPLSWNARLQIALHAAKALEYLHDTCEPPLVHQNFDPANVLLDNRCSVRVAECGLAELMASGSVTQLSGRMRALLNYVAPEIHESEPFTQRSDVYSFGVVMLELLTGRKPYDSSRPRAEQHLVRWADSQLHDMKSLSEMVDPSIRGECSVILLSCFADIISRCIQPGPEFRPAMSQIVQDLARIVGASSEVSE

SEQ ID NO: 364738 - protein, 71 aa, Zea mays
  Clone ID: MRT4577_95808C.1.pep
WNSRHQACHKQLIVQSSRLSRVLTRDFVLIFEGSFFQHRAFALLSCVLSYAVNEYDSLLHRCRWFERIQVI

SEQ ID NO: 364739 - protein, 246 aa, Zea mays
  unsure (1)..(246): unsure at all Xaa locations
  Clone ID: MRT4577_95809C.1.pep
MGAAPVLVLLLIAAATLPRLARAVTDAGDVSAINGLYVALGSPKLPGWSASAGDPCGESWQGVTCTGSSITSIVFNAANLGGQLGSLGNFTSITEINLSNNNIGGTIPEDLPVTLQNLFLSDNQLTGSIPMSLSELHSLTAMSLNDNHLDGKLPDAFDSLTGLVNLDISSNNFSGPLPPSLGSLTSLTTLXLQLFLLXYPLTLYLLFQDVLLHRHMQDNQLSGTLNVLQDLPLKDLYVYTPFSVVN

SEQ ID NO: 364740 - protein, 86 aa, Zea mays
  Clone ID: MRT4577_9580C.1.pep
FIFLNRSFFFLSFRLFVFFFFFFSEPTFQAAFIGERIEAGENKPSYKRILSRRKGGEDRDSKTTVGYGFFYQILQHGLIAGTPSSS

SEQ ID NO: 364741 - protein, 67 aa, Zea mays
  Clone ID: MRT4577_95810C.1.pep
ATRPTRSFASRFFLPCIVLTGRDIFGCSGPKVLESIAPNFLSLTTLYHLCFLIFLLVKTLLIKKLII

SEQ ID NO: 364742 - protein, 67 aa, Zea mays
  Clone ID: MRT4577_95811C.1.pep
RKHILMGPCGKEKMGNLFLTKKRRLYNAYSQTFCLYSCDTLCFPLYLGIGFLYLMSSHPGLNPGRQE

SEQ ID NO: 364743 - protein, 57 aa, Zea mays
  Clone ID: MRT4577_95812C.1.pep
GSYCFSYRPRYSSTQLERDSQEFVMIVSLTGRQVGPASDALEVYERYEGFIISTQGL

SEQ ID NO: 364744 - protein, 92 aa, Zea mays
  Clone ID: MRT4577_95813C.1.pep
EFSRGTGGIAAPEKGLLGGSPKGGNLCRLAEGEILVCLHEFVCQSNQVLVFKTLCLCPGPLGKGSGVSCHLPLLNSQSVCFCNSGPSLYPTS

SEQ ID NO: 364745 - protein, 181 aa, Zea mays
  unsure (1)..(181): unsure at all Xaa locations
  Clone ID: MRT4577_95814C.1.pep
MASSVVAAASSLLGTRLVDPVPQNGGILVRLGFCLXGARTKTAPXEVVKTSTSSDRPLCFPGAEELDYLDGSLVDDYGVDPFGLGXPVEYLQFXLDSMDQNLTKNEAGGINGTRFEYSESXATPLLAYCEVFGLQRCRECELIHGXRWVMLATLGALSAEWLTGVICYDAFYVELVDGSSY

SEQ ID NO: 364746 - protein, 157 aa, Zea mays
  Clone ID: MRT4577_95815C.1.pep
MAGLARCATRITFVNKRTLSKLFNFQSPCTQQIANISSKAWRELNGIQRPPPYDYKNNTYELYHSWYDRTSKRFDENSKIILVEGPIAAGKTEFAKKLAEDLDMYYIPQASMDDIYINDYGYDLRDLDDQLPPGARSFDEKKFVNDPNNRLTAAFQL

SEQ ID NO: 364747 - protein, 165 aa, Zea mays
  unsure (1)..(165): unsure at all Xaa locations
  Clone ID: MRT4577_95816C.1.pep
WVPRGRXRALVDLLKFKSQEGVRVCLLVWDDKTSHDKFFIKTGGVMATHDEETRKFFKHSSVICVLSPRYASNKLSIFKQQVVGTLFTHHQKCVLVDTQARGNKRKITAFIGGLDLCDGRYDTPEHRLFKDLDTVFQNDYHNPTFSAGAKGPRQPWHDLXXCRID

SEQ ID NO: 364748 - protein, 90 aa, Zea mays
  Clone ID: MRT4577_95817C.1.pep
SSCTPFPLHPLLPRSAHALRPLNSQGNLSTIPAVDTSIRLVRARNNQLIGHRISRLDEESRIPISSARVCGPFRLRLFSAASSFVVLALR

SEQ ID NO: 364749 - protein, 82 aa, Zea mays
  Clone ID: MRT4577_95818C.1.pep
KFFLKKKKNLSGPFFPGQGAQKKLGGGSPNFSKRAPWQFYFSHPWGGRIPFFAPQKVNEKRAKIVNFLPEEFSLENNLPKNN

SEQ ID NO: 364750 - protein, 55 aa, Zea mays
  Clone ID: MRT4577_95819C.1.pep
DDCQDTDGRYQRKACKGQCKDERKIITREKGQTTEGLEACKLREGTQGAWPWRPR

SEQ ID NO: 364751 - protein, 116 aa, Zea mays
  unsure (1)..(116): unsure at all Xaa locations
  Clone ID: MRT4577_9581C.1.pep
SRPGPSSADSGRVRGAAATPPPPGSHSRPCHPFLTPXSPSPPXIWRGPPTPFHPSRLPTTSPPPPXGPPPRXQXAPPTPPRRPPPPPTPAPPPRSRPPPPPPPGRPARAAPRPSPP

SEQ ID NO: 364752 - protein, 61 aa, Zea mays
  Clone ID: MRT4577_95820C.1.pep
TSNTSLQQLTIERATVAIDGERLAAAAAEERHEADDELVVRLQRAEVIERAWMDTRLRTRG

SEQ ID NO: 364753 - protein, 123 aa, Zea mays
  Clone ID: MRT4577_95821C.1.pep
VRSIYTEGKELGRGQYSVTSLCRHKATSERYASNTIAKRKLPTKEDVEDARREVHIMYHLAGQANIMELKVAYEDKQIGHLGMELCASGELFYRIIVKGKCTERAPAYLLRTIEEIVHTCHYM

SEQ ID NO: 364754 - protein, 142 aa, Zea mays
  unsure (1)..(142): unsure at all Xaa locations
  Clone ID: MRT4577_95822C.1.pep
TRFLCCRSPSSCAFWQPTPTQLAQRRVNPLVHLALYDATRSSPTMRFYTAQGVEXELRHAAREFFLHDGVEIDLESQTEHLTRIIKCQWXQKDPDQDARGLSXDIRLLNYLDPTKTGLLTHLLNDGDPISTSYMNYDWSLNA

SEQ ID NO: 364755 - protein, 32 aa, Zea mays
  Clone ID: MRT4577_95823C.1.pep
FLSKYIFFIMFLILFIYYTIIYYKFFIFTFYL

SEQ ID NO: 364756 - protein, 43 aa, Zea mays
  Clone ID: MRT4577_95824C.1.pep
CLRWMHTAIEKTNPLQVDEKKRRKNISKPCFHSRSSRFGVRFS

SEQ ID NO: 364757 - protein, 120 aa, Zea mays
  unsure (1)..(120): unsure at all Xaa locations
  Clone ID: MRT4577_95825C.1.pep
FDPALNLHPSKFHTNVVPYPRIHFMLWCYAPPISADKAYHEQLVVSEITNSVFEPSFMIAKCDPRHGKYMACXLMYRGDVVPKXDXNADVVTIKTKRTIQFVDWCPTGFKCGSNYQSSSV

SEQ ID NO: 364758 - protein, 107 aa, Zea mays
  Clone ID: MRT4577_95826C.1.pep
NSIVSPPLFQNFNFFFLDPKLKSPPPFLTISCRENPGPPQFYPLLTIPLFLLLGKMKKAPPNPLFKNLPPLDAQWAPPLSGTLNPGGGGFTAHKSPSLSKPLYPFFF

SEQ ID NO: 364759 - protein, 214 aa, Zea mays
  Clone ID: MRT4577_95827C.1.pep
MAPPPRRLLPVLLGFLAAASLATLAAAVYEDQVGLADWHQKYIGKVKQAVYHTQKSGRRRVVVLTEENVIASLDLRSGDIFWRHVIEKNNPIDQLSLSAGKYVVTLSSGGSILRAWNLPDGQMIWETNIQTSTSSKSLLHVLSNSKVVKDNLVLVLAGQWIYAVSSIDGVISWGKEFTLDGLEIKQVVQSPENDIVYVVGIAGSSKLAVYQLNA

SEQ ID NO: 364760 - protein, 115 aa, Zea mays
  Clone ID: MRT4577_95828C.1.pep
GLFWGPPADFYYPVGSGDDGVFWDPAQGLETPEVGFSGGGGFGKNFPGFDWPPSPLGVARENPPWAWVAGPVFGFCFYPGGGPKSLFVVGPQPLLPKVSFQSLSSSFQICEVACL

SEQ ID NO: 364761 - protein, 70 aa, Zea mays
  Clone ID: MRT4577_95829C.1.pep
GLSGGPSRLSTQILVNCVILRASCPVSPTVRASDALELWSPRTPGVMSASIWADRSTPIRRSLMGRVPRS

SEQ ID NO: 364762 - protein, 201 aa, Zea mays
  Clone ID: MRT4577_9582C.1.pep
MMIPWGGVGCCLSAAALYLLGRSSGRDAEVLRSVARAGSMKDLAAILDTASKVLPLVVAVSGRVGSDTPLICQQSGMRGVIVEETAEQHFLKHNDAGSWIQDSAVMLSVSKEVPWYLAIKDDVGTIRIQRPHKGPFYVSPKSIDQLIMNLGHVRRLYRLASMGFATFGAFLLAKRAIQHFLERKRRHELQKRCLTPYVISF

SEQ ID NO: 364763 - protein, 92 aa, Zea mays
  unsure (1)..(92): unsure at all Xaa locations
  Clone ID: MRT4577_95830C.1.pep
PSFTTDTYKKYIIDXMISIKGTLDEQRPERVKPFMTGAAEQIKHILANFKNYQFFIGENMNPDGMVALLDYREDGVTPYMIFFKDGLEMEKC

SEQ ID NO: 364764 - protein, 123 aa, Zea mays
  Clone ID: MRT4577_95831C.1.pep
LAPSLVFPAQCKCNRPTGDGGYLFRFKVSKADSLSGRTALHVAAAGGHVRCARLLLAGAGSGRSKLVNRAASGGGGGVTALHLAALHGHADCVHLLVDERADVAARTLPCAAPSMACGGAGSA

SEQ ID NO: 364765 - protein, 58 aa, Zea mays
  Clone ID: MRT4577_95832C.1.pep
QRLSTNTLMKNYMSTHKLSNNTIMNNYTISLILKLNTDHSTNLINNLWSKELVHGQRT

SEQ ID NO: 364766 - protein, 254 aa, Zea mays
  unsure (1)..(254): unsure at all Xaa locations
  Clone ID: MRT4577_95833C.1.pep
MASTVPFSPAKVQMLQATNCHGHAPFGSSFAVPRTGPKQRSLAVRVSSEQEAAAAVRAPSGRSIEECEADAVAGKFPAPXCVCQXPKAPDGTPEIRPLDMPKRPRRNRRSPALRAAFRETTISPANLVLPLFIHEGEEDAPIGAMPGCFRLGWQHGLLDEVYKARDVGVNSFVLFPKVPDALKSPTGIEAYNDNGLVPRTIRLLKDKFPDIIVYTDVALDPYSSDGHDGIVREDGVILNDXTVYQLCKQAVSQA

SEQ ID NO: 364767 - protein, 188 aa, Zea mays
  unsure (1)..(188): unsure at all Xaa locations
  Clone ID: MRT4577_95834C.1.pep
MRGFRDGPPIGIDLGTXYSCLRVXEHDRVEIVACHQGNRAAPSDVVFSDCERLIXDSAFKQVAMXPHDTGFDATRRIXRTVSDAXVQSDIEVWSFTVISGAGEKSMICCPAKGDDIHVAAEEISSMDIITMXRDIAEAYLGSTIKNAGISVPAYFNDSRRQATKDAGVIAGLNGLRIINESTPAAIAY

SEQ ID NO: 364768 - protein, 39 aa, Zea mays
  Clone ID: MRT4577_95835C.1.pep
HLVLDSFNILLLIALFLHDLHFMLNHFLFTFLFNFTFFI

SEQ ID NO: 364769 - protein, 101 aa, Zea mays
  Clone ID: MRT4577_95836C.1.pep
CWWKDVDGARAQQEEHARHCGRRRACRPFVMVAVQYVAVLGSGHIPLEVGRDQLMVVDVLCSHHIVPHGSMELRHTREVYLEWGREPGGGRAEDRHSQVCA

SEQ ID NO: 364770 - protein, 88 aa, Zea mays
  Clone ID: MRT4577_95837C.1.pep
YISNMGLRFEFCTTSQSFLSLALPSSHSIRVRILCHVMRPGPPDLSAGWVVDFDHLTHGSGTLLDRGPGACPVLVDCVARGVSLAAAP

SEQ ID NO: 364771 - protein, 104 aa, Zea mays
  Clone ID: MRT4577_95839C.1.pep
TCGVRSVVTGDLDVGSVGVFVDIRDLSGEGLTSQTHACLYRSHCTSHVRLPLYQRPLPAAVSYYEVRLSPMGVGGASYCKLAAAPRPVRGPLKMIGAGPLVWSG

SEQ ID NO: 364772 - protein, 146 aa, Zea mays
  unsure (1)..(146): unsure at all Xaa locations
  Clone ID: MRT4577_9583C.1.pep
YFKQVVLPSEGVQNLVSSERSELMRIAANDKREELKIFSQEIVRFGNRCKDPQWHNLDRYFVKLESESAPQKQLKETAIAEMQKLMSLVQRTTXALCCSLKISSKPQMPVISFFFLAFFFQDLYHELHALDRFEQEYCSKINGKGH

SEQ ID NO: 364773 - protein, 56 aa, Zea mays
  unsure (1)..(56): unsure at all Xaa locations
  Clone ID: MRT4577_95840C.1.pep
HPEIKVFFYSDVGNSERKFWPKDRMKPIIFSXARLDRGXNMTGLVEMYGMNARLRE

SEQ ID NO: 364774 - protein, 50 aa, Zea mays
  Clone ID: MRT4577_95841C.1.pep
GLLTSRARYAGERLVHCCALGLGGCLWRRLVGEAAALASAGAWVSPEVPP

SEQ ID NO: 364775 - protein, 200 aa, Zea mays
  unsure (1)..(200): unsure at all Xaa locations
  Clone ID: MRT4577_95842C.1.pep
MERARRASHAGSCSRVFLLGPSHHYYTPKCALTRASVYCTPIGDLPVDQEVIEELSATGKFEFMDLNVDEAEHSMEMHLPYLAKVFQGHNVKVVPILVGALSSQNEALYGQLLSKYVDDPKNFFSVSSDFCHXGSRFSYTYYEKKHGAIHKSIEALDRMGMEIIETGDPVAFKXYPAEYENTYXXTHPISVFLHMVKHCS

SEQ ID NO: 364776 - protein, 300 aa, Zea mays
  Clone ID: MRT4577_95843C.1.pep
MERARRASHAGSWYTNDARKLEEELNGWLGAAGLTKSPDVRAVIAPHAGYSYSGRCAAYAFGNIDPTNISRVFLLGPSHHYYTPKCALTRASVYCTPIGDLPVDQEVIEELSATGKFEFMDLNVDEAEHSMEMHLPYLAKVFQGHNVKVVPILVGALSSQNEALYGQLLSKYVDDPKNFFSVSSDFCHWGSRFSYTYYEKKHGAIHKSIEALDRMGMEIIETGDPVAFKEYLQEYENTICGRHPISVFLHMLKHCSTKIKIGFVRYEQSSQCKNMRDSSVSYASAAAKVAGASGEEDKQD

SEQ ID NO: 364777 - protein, 238 aa, Zea mays
  Clone ID: MRT4577_95844C.1.pep
NDVQFGTEGVHYYYSYFPDTEEPKLHERLNLIYFHLALLISTIPVIEELSATGKFEFMDLNVDEAEHSMEMHLPYLAKVFQGHNVKVVPILVGALSSQNEALYGQLLSKYVDDPKNFFSVSSDFCHWGSRFSYTYYEKKHGAIHKSIEALDRMGMEIIETGDPVAFKEYLQEYENTICGRHPISVFLHMLKHCSTKIKIGFVRYEQSSQCKNMRDSSVSYASAAAKVAGASGEEDKQD

SEQ ID NO: 364778 - protein, 238 aa, Zea mays
  unsure (1)..(238): unsure at all Xaa locations
  Clone ID: MRT4577_95845C.1.pep
MFRAAPRLIARPALRTASLRSVAPTKRYISTAPPSQKSRSFKSLVARVGIAGAIIYYYNTTDVFAEEPRQLVQALPETEVESEHLPTIESIAEERKRRQAVQAQLEIQKQKEAESAQQNGEQGGIEGLEEEADQQGAFNPETGEINWDCPCLGGMAHGPCGEQXQSAFSCFVYSKEEPKGMDCIDKFKDMQNCFREYPEIYGSELDSDDADDDMTAAPEPVETSSAFHRFRSSGRLCT

SEQ ID NO: 364779 - protein, 65 aa, Zea mays
  Clone ID: MRT4577_95846C.1.pep
LPKAAFYRSQTPSYLPCNPSILTLDHVAANDLLYYSVFSPFQLPSPLFYPTSLFRLTFTYMPQPG

SEQ ID NO: 364780 - protein, 85 aa, Zea mays
  unsure (1)..(85): unsure at all Xaa locations
  Clone ID: MRT4577_95847C.1.pep
MYQNGNIKKNYEMNPEDEXKKSGANIDLDSQMKGKXVDRKTCTRQTIXLPENALVETDKLKPGEGTRDNKYCYLILDTLASKYDS

SEQ ID NO: 364781 - protein, 78 aa, Zea mays
  Clone ID: MRT4577_95848C.1.pep
PSLSPWGGPTMGASFRLLGQSKILPLEPLLVNSLIGKADGFAEVFLDPKSKTVRGLQEKNHFVGLTENGANNPPVFKK

SEQ ID NO: 364782 - protein, 166 aa, Zea mays
  unsure (1)..(166): unsure at all Xaa locations
  Clone ID: MRT4577_95849C.1.pep
ARXRXXQXPGKEEXRQFFPXXXXXGKKXGQNRGEERAXQXXRXTKTKKSTXTGXERXRXKERXXPXEGXEXENKNDKNXAXAGEXKGXRXXXXQXEGXKPEGSXXARRTXKNTSRGXKRTTXKAKQXKTRDGXPXGRXXXXAGXKGXNGQRGTNNADEPETRATGE

SEQ ID NO: 364783 - protein, 37 aa, Zea mays
  Clone ID: MRT4577_9584C.1.pep
MLHRCGHMCCCMACSSHLTNCPLCRRRIDQAVRTFRH

SEQ ID NO: 364784 - protein, 99 aa, Zea mays
  Clone ID: MRT4577_95850C.1.pep
KATGKGFFMGKGKRKPGSLAKGEEGEAPFFFMAQKGPPYPPPPWGNPLIPPGGIKKIKWQLGKPPGLTVPEALPRGSQQAFRSKKAPRFNSPPRAEFRR

SEQ ID NO: 364785 - protein, 251 aa, Zea mays
  unsure (1)..(251): unsure at all Xaa locations
  Clone ID: MRT4577_95851C.1.pep
MWHAAAAPNNLHPAVATTSSPALRRARWPITRPSSSVKVQSSIRNGNGSADNLDHLQRASKGRQQRQGASAPGPRARRVVRTTPFGLWWDSFPEARTLDQMVRTIMDADDADXHPLRRRRACGGGGGPHRRAARRXGRTPWEVRERAGEYLVRFDMPGMARDDVRVSVQDRTLVVAAEKKQQPAADGGGDEEGDNEGEAWPPASFGRYRTRVELPENVDVERIAAEVKDGVLYLTIPKLSAGAKVVNIQVQ

SEQ ID NO: 364786 - protein, 111 aa, Zea mays
  Clone ID: MRT4577_95852C.1.pep
HARVRKLGIRLDAFIGPRSIHGGALEGGGREPRPLVRTADVPPGEPRVLPPLQEAVTARRRGKNDLHFFTLQPANRACSWATQPSTERYALVTAILLGNPSKLRFRLLHGH

SEQ ID NO: 364787 - protein, 63 aa, Zea mays
  Clone ID: MRT4577_95853C.1.pep
HAHARTICAASPPRAVVELLCDPDTEGRQGAGLVPGEPLAQLRLGGDAGGGPEREAHVREQPA

SEQ ID NO: 364788 - protein, 75 aa, Zea mays
  Clone ID: MRT4577_95854C.1.pep
MASMRQLLRVQVEAIMGGFTSCCARTVYLASLTGPLATVKVHNSSERLHLVFHQELDALLCVCHPHIGHLLAFYH

SEQ ID NO: 364789 - protein, 71 aa, Zea mays
  unsure (1)..(71): unsure at all Xaa locations
  Clone ID: MRT4577_95855C.1.pep
TKNDPKNKFSWCPPPTFPGTEPPKLGPQPXFPKNPAXTPPPLPPPRGLFPCSFPPPARPISSGKPSPPPPP

SEQ ID NO: 364790 - protein, 42 aa, Zea mays
  Clone ID: MRT4577_95856C.1.pep
MSWRETLRMSSPRSMSHARLSLVFRSAALNRISPARAEANSR

SEQ ID NO: 364791 - protein, 82 aa, Zea mays
  Clone ID: MRT4577_95857C.1.pep
KRWGEAPVQVSRIGGTSLASFACTDSSSCGKGLVRRPVDVLRRVSKNRWSAGLGLVGKVGTLACNTFVQRSVASNKWFPIFL

SEQ ID NO: 364792 - protein, 44 aa, Zea mays
  Clone ID: MRT4577_95858C.1.pep
MLACPSVPTSSPMSFSTLPAQFLSVGFSTPSNTSASSFGASSCS

SEQ ID NO: 364793 - protein, 164 aa, Zea mays
  unsure (1)..(164): unsure at all Xaa locations
  Clone ID: MRT4577_95859C.1.pep
SIHHLLVAAIAQGHEEHWSRLNAPKRWCAXKLGSCLGHSESYAPINNMEGVSLMLILRKKFKYAVKYREVIVILIQFRVXLVWETICTVKIYPVXCIYAISIHKXWGNYKLLCDTMYRIQLYPLMHEDAKFKLCEVKIDQTGQKGITYLNTXHWRTIRYPDPII

SEQ ID NO: 364794 - protein, 57 aa, Zea mays
  Clone ID: MRT4577_9585C.1.pep
PLPRDIARPSKRTSRTHERVVRGLIDDNDSLQMTHVNRRDSSPISRTEFFICCLVSK

SEQ ID NO: 364795 - protein, 141 aa, Zea mays
  unsure (1)..(141): unsure at all Xaa locations
  Clone ID: MRT4577_95860C.1.pep
MAAKILCLLALLALFASASDASIIPQCSLAPSGIVPQLLPPGTSLALRHPAVQASRLQLAECSXVLQXPIAQLLHQSLAHLTIQSIASQQPQQFLPALSHLAMVNPGAYLQQXVLACNPLXLANVXADQHQQQLLQVLPEL

SEQ ID NO: 364796 - protein, 134 aa, Zea mays
  unsure (1)..(134): unsure at all Xaa locations
  Clone ID: MRT4577_95861C.1.pep
QNQDHFLGATSIQNQKVFLGNKQTKKKKKKKLICTIQYRVVKENADDAFYELQNPQQQIQAYVFDVVRAIVPRMNLDDLFEQKNDVAKAVLEELEKVMADYGYSIEHILMVDIIPDAAVRRAXNDINAAQRLQL

SEQ ID NO: 364797 - protein, 81 aa, Zea mays
  Clone ID: MRT4577_95862C.1.pep
RVVMKGGRSAQRTDSYGPTASSSPRFRNERRRQVVDCMMRNGAQVRCFLHQNDTIQGLGVPRTTLLCSLSCSLLCLYRQQR

SEQ ID NO: 364798 - protein, 70 aa, Zea mays
  Clone ID: MRT4577_95863C.1.pep
WLPAVFVQKKTRNRCPCFSKRNCRIVFSGPFFRLFFFHWLALFMFCKFLQSVCVRVCVSVKESKGKVWGF

SEQ ID NO: 364799 - protein, 105 aa, Zea mays
  Clone ID: MRT4577_95864C.1.pep
FGAVGLGDGRVTSLGGGADDVVGSPVVPPLPPPVVGAFALFGAVVVAVDVVFVDCRDGTGLGYLALAPVYSFLFCVFVAGVCLACAPSSFMIPRGCGFGPRWLFM

SEQ ID NO: 364800 - protein, 233 aa, Zea mays
  unsure (1)..(233): unsure at all Xaa locations
  Clone ID: MRT4577_95865C.1.pep
MGFTDFVSDAGLTLLNNWVKTRSYIVGYTPSQADVKVFQQIKQIPAPEKFPYAWRWYNHILTFEGEFETLPGDPTKEATAYGPESSELTLNPAKAPEKEAEAEDDDDVDLFGSDDEVDEEAERIKAERLAEYNKKKAGKVKPAAKSIVTLDVKPWDDETNMDELKANVLSIEKDGXXVWGASKLVAVGFGIKKLQINLXVVEDDKVSLDELQQQIEEFEDHVQSTDIVGMQKV

SEQ ID NO: 364801 - protein, 58 aa, Zea mays
  Clone ID: MRT4577_95866C.1.pep
KLVAWLQHTYMCVHLVLKQTKKRKTLSAKFQFIYPASIHILPREGSINAKWKLIYIMV

SEQ ID NO: 364802 - protein, 80 aa, Zea mays
  unsure (1)..(80): unsure at all Xaa locations
  Clone ID: MRT4577_95867C.1.pep
MRRAAMAQSPARQLSRPWRTESAEFTLRLHDFDDHAHNADMDVKDTDFTKLPLDVDHAKXAIWGCSTGRMFLQTLCPLYT

SEQ ID NO: 364803 - protein, 95 aa, Zea mays
  unsure (1)..(95): unsure at all Xaa locations
  Clone ID: MRT4577_95868C.1.pep
NTRTRAQHTAQGPYLEDIIPXALQKNNXMTYNAEIPNKPNVMPLTMFREQKLRHELTEDHFVGWLDSMEWSWRKTAGQNPEYDQYPCTYQLFYRG

SEQ ID NO: 364804 - protein, 119 aa, Zea mays
  Clone ID: MRT4577_95869C.1.pep
FLCRGMPHTQGLRGFVADGIALKVIGAQKVSVTHPHSIGLLSNGSLLASNNDLSQIWPLSYSTCAPLLQVGIVGSVVIVVHQTSVSGGHVKTFLRSHDTIELLSDKCKLHIANRLISEF

SEQ ID NO: 364805 - protein, 350 aa, Zea mays
  unsure (1)..(350): unsure at all Xaa locations
  Clone ID: MRT4577_9586C.1.pep
MMIPWGGVGCCLSAAALYLLGRSSGSDAEVLRSVARAGSMKDLAAILDTASKVLPLVVAISGRVGSDTPLICQQSGMRGVIVEETAEQHFLKHNDAGSWIQDSAVMLSVSKEVPWYLDDGTGRVYVVGARSAAGLILTVASEVFEESGRTLVRGTLDYLQGLKMLGVSELXRVLPTGTSLTVLVTRGFYYPLAIKDDVGTIRIQRPHKGPFYASSKSIDQLIVNLGKWAKLYRIASMGFATFGVFLLAKRALQHFLERRRRHELQKRVLNAAAQRQAREAEGSKGTSDAEPNSKKDQLVLDICVICLEQEYNAVFVPCGHMCCCMACSSHLTNCPLCRRRIDQAVRTFRH

SEQ ID NO: 364806 - protein, 101 aa, Zea mays
  unsure (1)..(101): unsure at all Xaa locations
  Clone ID: MRT4577_95870C.1.pep
SQPLAEGEQKQDTPKLYNRWTFNDVQVNDITVNDTLDVNATKHAMHLTHTATRYSKKRLRKAHSPIVERLTNCIMMHGHHSGKAAMAERIIKXHALDIIDE

SEQ ID NO: 364807 - protein, 96 aa, Zea mays
  Clone ID: MRT4577_95871C.1.pep
RMHRSIRVRHGIAPEVGLANMAAYGTPPHAPSPLGKDYLASVPSIHSRGHLVEQDLPCHVYVYIYILWSLLSPLHRPCSPADPPVGSAPGTVYLRF

SEQ ID NO: 364808 - protein, 97 aa, Zea mays
  unsure (1)..(97): unsure at all Xaa locations
  Clone ID: MRT4577_95872C.1.pep
IPGTARVSFLSTSGGVVRWRCCKRYPRGAERRSVGSCLTAEPNSKXCCETXTKTNMEMVFGEITTKATVDYXMIVRDNCREIVFTFDDVGTLRRPAV

SEQ ID NO: 364809 - protein, 252 aa, Zea mays
  Clone ID: MRT4577_95873C.1.pep
MEAAMDLMRRMPPRSAETALNALLSLLPDHSLDLLSQVDLPLQVCMDKESLKEYILCEYNRDADSYRSPWSNKYDPPLEDGTVPSQGMRNLEVEANEVFSVYRDQYYEGGISSVYIWEDEDNGFIACFLIKKDGQGKRGYMQIGSWDAIHVVQVGPEEEGAAHYCLNSTVMLSLTTDNKQSGTFNLSGSIRRQMSMTLAVADGHLVNMGKMIEEMEGKLRNSLDQVYFGKTREMVCTLRPPPEVLNMRLPDS

SEQ ID NO: 364810 - protein, 79 aa, Zea mays
  Clone ID: MRT4577_95874C.1.pep
WPILASDMPPFRDKQPSSQCLIARFGPRDPLPHGYIDRAVYLSSAYLEISSCLPVSPRLYSHHALRLLLPFIFPCWCPA

SEQ ID NO: 364811 - protein, 54 aa, Zea mays
  Clone ID: MRT4577_95875C.1.pep
LLLGYFIRFWVIHHFNSFSQGNFKPIYYIDETPPPILIFHTKSLFTHPPHVAQH

SEQ ID NO: 364812 - protein, 60 aa, Zea mays
  unsure (1)..(60): unsure at all Xaa locations
  Clone ID: MRT4577_95876C.1.pep
AVAGGGGRESWPYLLGASNARAAGRGRAVTRVILHSSGRVXRHLQLITNTXWGGGXLXNL

SEQ ID NO: 364813 - protein, 48 aa, Zea mays
  Clone ID: MRT4577_95877C.1.pep
YIQLAIRPFYIIKTNLTINSFLSFLSNQNTNQFCTFSIYIIFIFKLFL

SEQ ID NO: 364814 - protein, 82 aa, Zea mays
  Clone ID: MRT4577_95878C.1.pep
WGADYSDGVCGVDAFALYQSMENRFKVPFLGAVAGVGSHFCRLFRVSIPVSSYRFFRASFFFLFSYCRCKVRFFLGVGGRPG

SEQ ID NO: 364815 - protein, 70 aa, Zea mays
  Clone ID: MRT4577_95879C.1.pep
DGRVLNASLDTILGPSNLLDPNASFAQMWQKMIVSPIVSTPCFQQSSREEKDGMELKIWWPLKWNSYILS

SEQ ID NO: 364816 - protein, 45 aa, Zea mays
  Clone ID: MRT4577_9587C.1.pep
HHMAMPDTLLLTHRPLNDSTSIASQRSILQHIPFFNGRTPARQQS

SEQ ID NO: 364817 - protein, 84 aa, Zea mays
  Clone ID: MRT4577_95880C.1.pep
ENTPNNDTGKATNLVIHLGARGKTRRGSPKSELSNSQREQDFVSIHGGKIDVTCQLKSLRNEVYERSVLKLVRDTGVQQYKFPF

SEQ ID NO: 364818 - protein, 270 aa, Zea mays
  unsure (1)..(270): unsure at all Xaa locations
  Clone ID: MRT4577_95882C.1.pep
MAPGGGGGIRAPSPDLPVPARQKFANSTRRPRAYSAASALPRLPRPQSIRRGAVVVVVACARGSEQQSSPAVAAKVRPEPGTLSVEFRTRDGCRLGIARYPDFAYNAQGGRGVGAGRGSKSGEDDGIGTVLVDFDVATLYIPPMSGATTRFLGLPLPPYLXIDILPEALGGTIDRATGQVDLKFRSRFCFSVGSVYKAPPLFVETTLTSEESRGAIRSGTGERMDEEGRCRLVGVAVVDPIDDLFMNTFLSLPTECIAYLSATISIAAAR

SEQ ID NO: 364819 - protein, 136 aa, Zea mays
  Clone ID: MRT4577_95883C.1.pep
MEYVGYHLAQVDATMKASIVAQLVAEIIAPEKVGDVNGIGLEEGWSLLPRVVLRATGSPGKVASLAQQREHRPQHSHEAWQRLRLLRLVCLQQGVPDPCPGRPAGVDAVEQLHLLHYHLRSKPRRELERHQCTISD

SEQ ID NO: 364820 - protein, 37 aa, Zea mays
  Clone ID: MRT4577_95884C.1.pep
LTPYPTISSINQRLLVLEAFQVSHPCRQPATPTELRA

SEQ ID NO: 364821 - protein, 49 aa, Zea mays
  Clone ID: MRT4577_95885C.1.pep
DLICRYGLRVLNGNGSSDVHYHPHDVCIEPGEKARAETPAQRCCSVSDA

SEQ ID NO: 364822 - protein, 106 aa, Zea mays
  Clone ID: MRT4577_95886C.1.pep
HRGGRPIPPEIGRKNQLQTLSLLENSLSGPLPAELNNSTKDVTTVSTRKLLTKLHPLQNIAQLVELESLDLSSNTSSGSTADCPDKRLKLTSLVVCIIWVDSYISY

SEQ ID NO: 364823 - protein, 119 aa, Zea mays
  unsure (1)..(119): unsure at all Xaa locations
  Clone ID: MRT4577_95887C.1.pep
GRHDSTFYRRGMLQALLLMFTVDLSQVFMARMSTRLQTPLKSECMVLITKLLMAKNDAHGGDEDRHAEEHVSDMIIEDEMIEGIVSDYNXLSLDRIRSLPEMIGHYADEFYICYRAHKL

SEQ ID NO: 364824 - protein, 94 aa, Zea mays
  unsure (1)..(94): unsure at all Xaa locations
  Clone ID: MRT4577_95888C.1.pep
NWRGCRYVARIRSSAIDIRQDILERYGECEHEKLQLRKGSASVDEHKARKEGYNELNQWLTTTQSKILPCDKYVKVFHKLLTAYRHMTXHTGKK

SEQ ID NO: 364825 - protein, 47 aa, Zea mays
  Clone ID: MRT4577_95889C.1.pep
VYLIVTACLTVSWQLKVNRRGGQVREAGRQPGPLESTPSTHASAHAS

SEQ ID NO: 364826 - protein, 343 aa, Zea mays
  Clone ID: MRT4577_9588C.1.pep
MMIPWGGVGCCLSAAALYLLGRSSGRDAEVLRSVARAGSMKDLAAILDTASKVLPLVVAVSGRVGSDTPLICQQSGMRGVIVEETAEQHFLKHNDAGSWIQDSAVMLSVSKEVPWYLDDGTGRVYMVGARSAAGLILTVASEVFEESGRTLVRGTLDYLQGLKMLGVKRTERVLPTGISLTVVGEAIKDDVGTIRIQRPHKGPFYVSPKSIDQLIMNLGKWAKLYRLASMGFATFGAFLLAKRAIQHFLERKRRHELQKRVLNAAAQRQAREAEGSIGSSDTEPNSKKDQLVLDICVICLEQEYNAVFVPCGHMCCCMACSSHLTNCPLCRRRIDQAVRTFRH

SEQ ID NO: 364827 - protein, 177 aa, Zea mays
  unsure (1)..(177): unsure at all Xaa locations
  Clone ID: MRT4577_95890C.1.pep
CSVKYTGXGPCMMSIRSTSFSPATEAMSETKVAPITQXKSTWVNLTSQDTERPDLANAPVVVTGGRGLKSAENFKLLEQLAEKLGAAVGATRAAVDAGYVPNDLQVGQTGKIVAPDLYMAFGVSGAIQHLAGMRDSKVIVAVNKDADAPIFQVADYGLVADLFEVLDELLKKIPEKK

SEQ ID NO: 364828 - protein, 63 aa, Zea mays
  Clone ID: MRT4577_95891C.1.pep
HHSLMSQDVYPACRSVKADSSYETRSITSNRTPMSPFTPSNYVFYSGAESVSRRLTRCQTVNE

SEQ ID NO: 364829 - protein, 354 aa, Zea mays
  Clone ID: MRT4577_95892C.1.pep
MAAMLVGALRRGSGCRGGLRLIAHSLRRFVSTLVVAEHEGGFVKPSSLSALAAAEAIAKDNKVSVLLGGSGPALHKAADHAACSHPLVSEVLVADSEALAHPLAEPWAELLRSVQQKGGYSHVIASSTSFGKNLLPRAAALLDVSPVTDVTAVKEPHVFVRPIYAGNALCTVKYTGEGPCMMSIRSTSFSPATEAMSETKVAPITQVDLSFLSEGKSTWVNLTSQDTERPDLANAPVVVTGGRGLKSAENFKLLEQLAEKLGAAVGATRAAVDAGYVPNDLQVGQTGKIVAPDLYMAFGVSGAIQHLAGMRDSKVIVAVNKDADAPIFQVADYGLVADLFEVLDELLKKIPEKK

SEQ ID NO: 364830 - protein, 88 aa, Zea mays
  Clone ID: MRT4577_95893C.1.pep
SRYVATLLFLVGCTIGFNMLVFHCSTPYIMEGMYKSETLYEPVIFDSQMLRYALHAALATSISRTSIFVAIVHGLLFLNPTFFVSVRV

SEQ ID NO: 364831 - protein, 314 aa, Zea mays
  Clone ID: MRT4577_95894C.1.pep
MEAVSMSPSTVSSHTHDDHDAASVTEAMSLQEGLLFSDTLKDLRNLRSQLYSAAEYFEVFYRNNSHKSTVMTSLKDYTVEALVSTVDHLGFVSYKVDNLVSEKAVEVKETEFLVSSVEQRVRICQQTTDQEARSQQALLIKAPKYHRRYILPGLDLLESSIHPVSEPPRYSRQYTGRKMHKSQSSISTPVRRQATMRREPSPTPNDRSRSLSPSRKARAKSPSPRIVNTNTARETRAGSPIPSSSPMARSASTVARRPPSNSRHLRLASMQLHSDWEQQERSSSKGRRGFLRSLLTRRRWRNDESSLYSYLDEY

SEQ ID NO: 364832 - protein, 83 aa, Zea mays
  Clone ID: MRT4577_95895C.1.pep
FPPFYHRSFGGSPRKPVRPKFSGTPLCPPHELGRKKKSWFSHTFPFLIFFFKVFGPLNLGPFGPPFMGFGKIPFKNSFFMVGL

SEQ ID NO: 364833 - protein, 169 aa, Zea mays
  unsure (1)..(169): unsure at all Xaa locations
  Clone ID: MRT4577_95896C.1.pep
FFFFFFLFFWGFLSFLSFFYFFQHFYHPYSYKSLCSANKKSSQNPPPGGTPPPGGKTKTPENSNPEPKKTALPPPPPPXKKGFFPPPRTPPYKKKINLPKXNLVYSPTPPDPGPYQAIQNPPPFFPPLWGVTLHPPXPPPTGPPEPKKMVXPPPPPGWGFTHRVKRVSF

SEQ ID NO: 364834 - protein, 230 aa, Zea mays
  unsure (1)..(230): unsure at all Xaa locations
  Clone ID: MRT4577_95897C.1.pep
MAASSPTPGGGLGAILAAGDRDYLIRNSGEQVKISSIEGDTVAIYFSASWCPPCQRFTPKLIEAYKELTSHGKSFEVIFVSGDQDEEAFNAYFAKMPWLAVPFSDSEGRKSLDERFEVNGIPHLVFLDAKTGEVLTDEGVEFVSEYGIEAYPFTTERINELKEQEKAAKDNQTIHSVLATPNRNYVISKHXXKVPIVDLEGKYVGICFVVNGYPPVEEFTPVLAKIYAKL

SEQ ID NO: 364835 - protein, 48 aa, Zea mays
  Clone ID: MRT4577_95898C.1.pep
MKRLQKYQKKRYLIYIKSFIKKRSLLKLMNMCHSYLMITPFSCYILFE

SEQ ID NO: 364836 - protein, 64 aa, Zea mays
  Clone ID: MRT4577_95899C.1.pep
GKACLLLRLGHREQKDEWQPRLVEVFQKHNVLPPNAIVSAGSVSSACTAGGGQLYMWGKMKNTG

SEQ ID NO: 364837 - protein, 169 aa, Zea mays
  unsure (1)..(169): unsure at all Xaa locations
  Clone ID: MRT4577_9589C.1.pep
HKGPFYASSKSIDQLIVNLGKWXSRXLLEHIFGCYFLVRASYASSMFVXLYRIASMGFATFGVFLLAKRALQHFLEKRRRHELQKRVLNAAAQRQAREAEGSKGTSDAEPNSKKDQLVLDICVICLEQEYNAVFVPCGHMCCCMACSSHLTNCPLCRRRIDQAVRTFRH

SEQ ID NO: 364838 - protein, 87 aa, Zea mays
  unsure (1)..(87): unsure at all Xaa locations
  Clone ID: MRT4577_958C.1.pep
KGKIPRCVXLAPGFVFFFPVARYFFPALHEIVQVGIPPDIQCSPDILFLPRGLLLKENSPPPNLERDLCFMGADQGLEIHQSRGSAF

SEQ ID NO: 364839 - protein, 122 aa, Zea mays
  Clone ID: MRT4577_95900C.1.pep
QQQQFFPFNQRGALNFAGFLQQQLPFSQVGVASPQQFFPFNQLGALNFAVFFQQQQLPPFSQLVFVSPVAFLTQQQLLPFYLPGGPNGGPLFQLQQLLPFNPLVFANPTGFSPQPPIGGAPF

SEQ ID NO: 364840 - protein, 77 aa, Zea mays
  unsure (1)..(77): unsure at all Xaa locations
  Clone ID: MRT4577_95901C.1.pep
XGEVGXRENEXTTRSAPQRTEKPTHRXARHSQRGQRERKTSNTPTLGRPNTFFFRGFYARMTDRFQILPTPQLLQHL

SEQ ID NO: 364841 - protein, 118 aa, Zea mays
  unsure (1)..(118): unsure at all Xaa locations
  Clone ID: MRT4577_95902C.1.pep
PRVRQCLAQISCCPQMLVVALLYHVXCPFIXHWMMVHKQFRWSWYPVPTFAPYKVXGLFYTLILAMCGHAQTTATALVALQSLTPDAQSVLRLLDEYXQIHNXKDESLPVNXLYTKWS

SEQ ID NO: 364842 - protein, 348 aa, Zea mays
  Clone ID: MRT4577_95903C.1.pep
MLEMIHCHWRRQEICKVRCRGVPTVDMKNLCYHLEEKSGGKVIHRVGGVVFLYRGRHYDPKTRPRYPLMLWKPATPVYPKLIKEAPDGFTKEEADEMRRKGRDLLPICKLAKNGIYITLVKDVRDAFEGSDLVKIDCEGLNPSDYKKIGAKLRDLVPCVLLSFDDEQILMHRGKEWKSRYSKPLTLIPKVPKNNLAMTSVMNSSDEVSDANTQVAIREVLRPKMFKLWKSAVDSSLALLLDDAEANNLTPDSLLTLVEEFSVTSQAVEHSFPALLVTNGDASTDSLSAEYMNDEPETSVAGNEEGQLEQSPDLRDDEHFDLDMFERLESSVPLGSLPIDSMIERLNSE

SEQ ID NO: 364843 - protein, 217 aa, Zea mays
  Clone ID: MRT4577_95904C.1.pep
MRTEMAPCSPLLLAVALLCAAAAAAAAGGFGGPTARYDRVFSFGDSLTDTGNALHLAATAGGPASRPPYGETFFRRATGRASDGRLVIDFIVEALAVPQPTPYLAGATATGADFRRGVNFAFGGATALDLHFFVSRGLGSFVPVSLRNQTVWFHNVLRLLGSAREQRKTMATSLFLVGEIGVNDYFIGLNENRTVGEVRTFVPHVVGAIRSVITDVI

SEQ ID NO: 364844 - protein, 88 aa, Zea mays
  Clone ID: MRT4577_95905C.1.pep
CHSLRTCQPELMPSHGMPSWAWRSRCHGGGRWSRSAGRRSWIKAATTASPSARLSQSIPCLGSTEAGLFALLQALSCRYACSSRFRLR

SEQ ID NO: 364845 - protein, 36 aa, Zea mays
  Clone ID: MRT4577_95906C.1.pep
SDVYTAIRMRSTVSAQMLYLLPLTGSGREALAPMMP

SEQ ID NO: 364846 - protein, 185 aa, Zea mays
  unsure (1)..(185): unsure at all Xaa locations
  Clone ID: MRT4577_95907C.1.pep
HPXPYLRAQLSSTEAPSCRISSSLRMAAELSPALNTGHHLLPPMVRAPSLLHLPRRRAPLLQPAEQLGRAPSLLAWSRPASMATAHLPLLASSRARRHLARSASFLSLPMTELSLSWCPGLTGILAARPSCCHARPTPLRAPASWPRFLPPPSSLPWPAYDFAFAEAPWPDSAQFAPCSPLCHAP

SEQ ID NO: 364847 - protein, 53 aa, Zea mays
  unsure (1)..(53): unsure at all Xaa locations
  Clone ID: MRT4577_95908C.1.pep
LSFSLVNLCCRSHRLTLNNWCRFRQYVLRSLXLNSPPWRCLSRAANSPTGITT

SEQ ID NO: 364848 - protein, 32 aa, Zea mays
  Clone ID: MRT4577_95909C.1.pep
KKIILSCFKPCLQGLSSFITLSRIKKTAANIT

SEQ ID NO: 364849 - protein, 200 aa, Zea mays
  unsure (1)..(200): unsure at all Xaa locations
  Clone ID: MRT4577_9590C.1.pep
SRARRPEGRKSVRTPRSRSRSQQGGWKRSSRAWLRPVKPTLAKGTPSASFRLRNGSLNAVRLRRVFDLFDRNGDGEITVDELAQALDALGLDADRAGLSATVGTYVPDGAAGLRFEDFDRLHRALGDAFFGALGGQDDXGHGFISAXAERCEVLKKLGLPEASSMANVREMICNVDRDSDGRVDFNEFKCMMQGITVWGA

SEQ ID NO: 364850 - protein, 169 aa, Zea mays
  unsure (1)..(169): unsure at all Xaa locations
  Clone ID: MRT4577_95910C.1.pep
ASGDPPGPLPSXXWCVGVLCWKAPXXGXXSGLXCLPPSPGXAPXXPAXXLLGSLPLRRXXGPAXRLXXIWXFAGVLGAGAAXXAAXLVKVLKGSXXAXLXXCWARXXRWXXWVGRXXXWXXPXXCXLSGXGXVXXXXLXXVXXXPTXXQXDXXEAXXTSLXXXLGNXGR

SEQ ID NO: 364851 - protein, 67 aa, Zea mays
  Clone ID: MRT4577_95911C.1.pep
MNQAVMTQDTRMEWEGVHSSRDGEIGRGNGAVNKGLDILKHLGSLGELREAEEPEEHAWVFGHQHLV

SEQ ID NO: 364852 - protein, 68 aa, Zea mays
  Clone ID: MRT4577_95912C.1.pep
LLVSGRFGGFLCSYYQNVPDEAAKKEIKFIFTAYKHTLKLNKTAGAERNKGKGRGRRTRIAKHYTSTT

SEQ ID NO: 364853 - protein, 208 aa, Zea mays
  unsure (1)..(208): unsure at all Xaa locations
  Clone ID: MRT4577_95913C.1.pep
HASAHASAHASAQASAHASALHISPATLFIIPTLFQMVILVVYDRFIVPFLRRITGYVGGVTHLQRIGIGFLSTVVATGVAAIVEASRKKVARDSGLVDATAGIPISVFWLTIQFFLLGIVDVTSFVGLLEFFYSEASTGMKSIGSSIFYCILGVSAWLGSLLIQVANRVTRHRDGTGGWLDGTNLNKXKLERFYWLLAVLELVSLLV

SEQ ID NO: 364854 - protein, 123 aa, Zea mays
  unsure (1)..(123): unsure at all Xaa locations
  Clone ID: MRT4577_95914C.1.pep
MKSKMVEEVLCERAVLCRGWGSWPVSLSPGGPSGVVVIPGYLNGTSDGKKICYANSFYIEKXLGDLEVTVFHEYXDSVDWLFVDHTPYHIPGNLYGNKLXFSADDQFEYTLLCYAKKKKKKGP

SEQ ID NO: 364855 - protein, 119 aa, Zea mays
  Clone ID: MRT4577_95915C.1.pep
GGCFFAFMGGGDKIPETILFPLGGLTPIAPGEKALLIARGAIIGGGQPLMKQNQGLCPFSGVLATKKQIFFKGPLEPLGGRKDILFFNGGKGFFFFYGGASYLLCLSLPLGGALITAFL

SEQ ID NO: 364856 - protein, 129 aa, Zea mays
  unsure (1)..(129): unsure at all Xaa locations
  Clone ID: MRT4577_95916C.1.pep
MAVIRRRNVFDPFSLDLWEPFDGLPFGCGNSXSLXPRDRTTSSKSGCFAAVRIDCEDTQEAHAXKVEVPXLNKDEVKVEVEDSNVSSXLGESYKEQEEKTDTWHRVDRTMGRILLTFRLTENGKMQKIA

SEQ ID NO: 364857 - protein, 190 aa, Zea mays
  unsure (1)..(190): unsure at all Xaa locations
  Clone ID: MRT4577_95917C.1.pep
REKQKNKNKPKLRGKKKKRRTQKGNKKKQQRKEQERSKKEGGQHRHTAEARPKREEEQKPNKKPAENKNRGGGGAQRASQQKTSAKRKTEKPRRRKKRREQTKNEKTNNGERGRXKKRGAKPKKRTQKRRGRSGGRNERXKPTQRKKHTEPQXQGRRQEKTREKKANTRPQTKKGPRRKKRAKKRPPRAS

SEQ ID NO: 364858 - protein, 49 aa, Zea mays
  Clone ID: MRT4577_95918C.1.pep
WGQCVLGTQSRRISEDLHSKQAPENKRRVNIIRCSGMTYTHACRASAER

SEQ ID NO: 364859 - protein, 214 aa, Zea mays
  Clone ID: MRT4577_95919C.1.pep
MGQKTQGLEPSVVLREESEEAAGSVLSAELLTNGKSSTQAEPPRKGGMEATGAASQPSAPQTTHPAVAPLAFLLGKWRGEGEGSFPTISSFRYGEELLFSHHPSKPVISYTQKTWKTASGEPMHAESGYWRPRPDGSVDVVIAQSTGLAEVQKGSFDAEKKTVTLQSELVGNASKVKQITRTFQVADGELSYVVQMATITTSLQPHLKALLRRI

SEQ ID NO: 364860 - protein, 81 aa, Zea mays
  Clone ID: MRT4577_9591C.1.pep
RGNGGVKFGQYIYTSWSVGMNVFNPRKLHSILVSWCIHKSSFSHLSEGSKRLACFCSFACRDGPPHIYYIQSMRLERFIWF

SEQ ID NO: 364861 - protein, 155 aa, Zea mays
  unsure (1)..(155): unsure at all Xaa locations
  Clone ID: MRT4577_95920C.1.pep
MMVLWVFGYCSLIWNPGFYFDDXILGFVKGYERTFNLACIDHRSXTRDHPARTCTLETYYQVICXVIAYCDKVAAKKHVKAIQYLERRXCEYDQQIYVDFYXNXDPLKPAVTLDLVFASTPDAIADKHYLGPAPLHGMAMQIATVNGPTDYNTDY

SEQ ID NO: 364862 - protein, 84 aa, Zea mays
  Clone ID: MRT4577_95921C.1.pep
HAFGHAFDELRRANGHGALGRTQSHQPSCPFQQRRRYFWYSRHLPNARACPRKISLGTSISDHRPVRPPQLQARVARLLRHVRC

SEQ ID NO: 364863 - protein, 60 aa, Zea mays
  Clone ID: MRT4577_95922C.1.pep
KTCTRTREGGTHTHAVNGQEIRKETSARSYTRIFLIDEAERRPRRRRTLELRHVPVGGVV

SEQ ID NO: 364864 - protein, 51 aa, Zea mays
  Clone ID: MRT4577_95923C.1.pep
AGLKERGRFTYPQFNNPVRYRVCVCLKSIPLFSHKFLAVIWADNTPPAVNV

SEQ ID NO: 364865 - protein, 76 aa, Zea mays
  Clone ID: MRT4577_95924C.1.pep
SISHILSPTWAAFPVSGGSSPLLTSPAMGKTKNGINGFGRIRSLVDWVALQSEDDKLVPVNDPSLPRIHDPHVQEP

SEQ ID NO: 364866 - protein, 147 aa, Zea mays
  Clone ID: MRT4577_95925C.1.pep
DLLKQATKTRLGGMGFHHTNLTISFCNGHRPTYTFGGFHGLFVNMAFGQFFFHNLLIAFLLLELLKVESPPANTDILKGGNQGWIHHGRGKKKLVSFFGRAKSYKSSPNITNSASPFLKSRGRGMSLLDSNLLGFNTTLWKSVRDLI

SEQ ID NO: 364867 - protein, 53 aa, Zea mays
  unsure (1)..(53): unsure at all Xaa locations
  Clone ID: MRT4577_95926C.1.pep
IYLFLLIXXFSXFHFPVGXSSSPAKVLXKXWAPGVGCWRSPSPXHEREREKRA

SEQ ID NO: 364868 - protein, 104 aa, Zea mays
  Clone ID: MRT4577_95927C.1.pep
RKLHRLVLCPDIYSLLQRPCPSQELKLTFHKNLAKPILESVSSIASSSTTSRTNIDENLPCEKPSKHPCKTTKVLPISQGKGIGHLEKHPDDEILDCLLAKNSD

SEQ ID NO: 364869 - protein, 173 aa, Zea mays
  Clone ID: MRT4577_95928C.1.pep
FFFFFFFFFFFFFFFFFFFFFFFFFFFHPKEKKEGGGPPKKKPEKNPRGGKAQQGEKKKKPKPQRRAGGEGKGKKQKKEKPRQRARPGTKTQKKPRAGQKRVEKAIPPDPKGPKTPPNQRKGGPTTGTLKRKKRPPERAQDQGKGKETPPNRKGSQALKKHRLKKRKKAYRGA

SEQ ID NO: 364870 - protein, 91 aa, Zea mays
  Clone ID: MRT4577_95929C.1.pep
MASPIFPAAGLLSRFMVADWQMSMDQHHALGQGQWHGHRVTSTTLADAVAGRQLYAADTMLRLELDENPKASMCAAWSGNCSIVRYKDLPS

SEQ ID NO: 364871 - protein, 40 aa, Zea mays
  Clone ID: MRT4577_9592C.1.pep
RSIKKKKKKKKKKKKKKKKKKGGGEQKKKKKKKKKWEGVN

SEQ ID NO: 364872 - protein, 354 aa, Zea mays
  Clone ID: MRT4577_95930C.1.pep
MCVEEPEDAERFGFGDPGVEEPAKFPLAQMERVCENTTSADFRQKLSNFVPVIRSGDWSDIGGRQYMEDTHVCIPDLAKNFGFPSLDNEVVSFYGVFDGHGGKDAAHFVCDNLPRMIVEDSDFPLQLEKVVRRSFMQIDCQFAETCSLHRASSSGTTALTAMVFGRSLLVANAGDCRAVLSRCGTAVEMSMDHRPCSLSEKLRVESLGGYVDDGYLNGLLGVTRALGDWHLEGMKGAGETGGPLSADPELKMTTLTKDDEFLIIGSDGIWDVFSNQNSVDFARKRLQEHNDVKLCCREIVEEAIRRGATDNLTAVLVSFHLEAPPRIRVDRPGRVERSISAEGLNSLRILLGRQ

SEQ ID NO: 364873 - protein, 60 aa, Zea mays
  Clone ID: MRT4577_95931C.1.pep
VIYSELCVTAQIQTAASRARTRSGRDERCAMSCSSRRAPTYDLSLGPGSTGTRLKAPRVR

SEQ ID NO: 364874 - protein, 38 aa, Zea mays
  Clone ID: MRT4577_95932C.1.pep
LYVRASSRSQLFLCEPPPSGPRPWTRRLSILAYHSILH

SEQ ID NO: 364875 - protein, 126 aa, Zea mays
  Clone ID: MRT4577_95933C.1.pep
MATVTTHASASIFRPCTSKPRFLTGSSGRLNRDLSFTSIGSSAKTSSFKVEAKKGEWLPGLASPDYLTGSLAGDNGFDPLGLAEDPENLKWFVQAELVNGRWAMLGVAGMLLPEVFTKIGIINVPE

SEQ ID NO: 364876 - protein, 36 aa, Zea mays
  Clone ID: MRT4577_95934C.1.pep
GQFAWFSNAGIYSVSVRSYFWSCLFRQIFFWFAMPI

SEQ ID NO: 364877 - protein, 68 aa, Zea mays
  Clone ID: MRT4577_95935C.1.pep
GFRGKFTPGRFRGQRNRGKRLSPGIFKKKKKKKKKKKKKKKKKKIKKKKKKKKKKKKKKILKGRQLAI

SEQ ID NO: 364878 - protein, 61 aa, Zea mays
  Clone ID: MRT4577_95936C.1.pep
LLHEMRCLYKHFMCHYNIKRKQRKGDPSKDASEDQQPVRLLISKSSHNVPMLRTRKIIVAI

SEQ ID NO: 364879 - protein, 116 aa, Zea mays
  unsure (1)..(116): unsure at all Xaa locations
  Clone ID: MRT4577_95937C.1.pep
RLAXLPGGGGGGPPFGLVVVGSRVGVLVLRCQPCFWYWREKTKFXVVWXXPXRLFGGVVLTTSAGIMDHGGGGGTYLGGEVLGLFCCRCCESLCWPACLSYSFRLGCLCFCFGVFL

SEQ ID NO: 364880 - protein, 340 aa, Zea mays
  unsure (1)..(340): unsure at all Xaa locations
  Clone ID: MRT4577_95938C.1.pep
MEGGVTVADKAEFKECLRLSWTQPYILQLVLSAGIGGLLFGYDTGVISGALLYIRDDFAAVEKSTVLRETIVSMAVAGAIFGAAFGGWMNDKFGRRPSIILADALFFGGAVIMAFSPTPRVIIVGRVFVGLGVGMASMTAPLYISEASPARIRGALVSTNGLLITGGQFLAYLINLAFTKVPGTWRWMLGIAGVPALVQFVLVLMLPESPRWLYRKGRKEEAAAILHKIYPANEVEEEIDSMRRSVEEEVLLEGSIGESGFMGKLRKAMGSKVVRRGLTAGVIVQVAQQFVGINTVMYYSPTIVXQLAGYASNNTAMALSLITSGLNAIGSIVSMFFVPA

SEQ ID NO: 364881 - protein, 30 aa, Zea mays
  Clone ID: MRT4577_95939C.1.pep
TCSPSLTFRTQEYDTDLGTHRDNALRSVVG

SEQ ID NO: 364882 - protein, 123 aa, Zea mays
  unsure (1)..(123): unsure at all Xaa locations
  Clone ID: MRT4577_9593C.1.pep
SKAGQENPYVEDFDKLHRALGDAFFGALXARTTPPPRRTAPAPAPXEEDEQEMREAFKVFDVDGDGFISAAELQEVLKKLGLPEASSMANVREMICNVDRDSDGRVDFNEFKCMMQGITVWGA

SEQ ID NO: 364883 - protein, 176 aa, Zea mays
  unsure (1)..(176): unsure at all Xaa locations
  Clone ID: MRT4577_95940C.1.pep
DSRQAASVSADASQASVRLQNNKQRQRQARIMSGLTLGLVXLGLVELKILQRRGTDTKXSAVVLPAVQKQHQLHVTLLLCNVAVMEPFQTLAIFLDIMFHPILVVLSSVTFVLAIGEGSCLGSHWGSCRSASSSWRSSNVAAKASQETIDSIKRSMEENNLLHQLISFNRGQVPPS

SEQ ID NO: 364884 - protein, 36 aa, Zea mays
  Clone ID: MRT4577_95941C.1.pep
QSDCTVRIIDSTTGCFDAGIAKDVHTRDHSLRAVTL

SEQ ID NO: 364885 - protein, 48 aa, Zea mays
  Clone ID: MRT4577_95942C.1.pep
YYRKLYACTVPFPNFPVTPHTSIFSIYTSLYRTVIQTGPWVLLNYPFY

SEQ ID NO: 364886 - protein, 166 aa, Zea mays
  Clone ID: MRT4577_95943C.1.pep
MPPKLDPSQVVEVFVRVTGGEVGAASSLAPKIGPLGLSPKKIGEDIAKETAKDWKGLRVTVKLTVQNRQAKVSVVPSAAALVIKALKEPERDPQKVKNIKHSGNISLDDVIEIARTMRPRSMAKEMSGCVKEILGTCVSVGCTVDGKDPKDLQQEIDDGEVEIPSA

SEQ ID NO: 364887 - protein, 166 aa, Zea mays; identical to SEQ ID NO: 239806
  Clone ID: MRT4577_95944C.1.pep

SEQ ID NO: 364888 - protein, 119 aa, Zea mays
  Clone ID: MRT4577_95945C.1.pep
SLTKKNPGEKTQRGKLFPLGGKPPPQRVPPPFWGGPFSGFLQPGPGGDPPPKNSTFFPWYGTRQKKNPPRFFNWGKQGFLNSGKGVFQGGAKKGGWGPLFFKGGNLKPPPGKAKKKPIC

SEQ ID NO: 364889 - protein, 141 aa, Zea mays
  Clone ID: MRT4577_95946C.1.pep
ISAHRLEELEKEKRHISAHRNYMSLISCLESLAGRIWELKIEYFCRGICQAFVVVTSHIEGGIELEALSEGYCDAWSDTELAEMVKAAEPFARKLGVALLDCAPPRGVKENLCLCNGLRDITFLTFLQFYEHPCWLALGRA

SEQ ID NO: 364890 - protein, 155 aa, Zea mays
  Clone ID: MRT4577_95947C.1.pep
MQIFVKTLTGKTITLEVESSDTIDNVKSKIQDKEGIPPDQQRLIFAGKQLEDGRTLSDYNIQKESTLHLVLRLRGGMANKRKKKVYTTPKKIKHKRKKTKLAVLKYYKVDGDGKIERLRRECPQPECGAGVFMAAMHNRQYCGKCHLTYVFDEAK

SEQ ID NO: 364891 - protein, 153 aa, Zea mays
  unsure (1)..(153): unsure at all Xaa locations
  Clone ID: MRT4577_95948C.1.pep
RVVPFIKTRSRQCQLVRRXSNVFDPFSMDLWXDPYDTMLGSIFPGATFTNSETAAFASARVDWKEIPGARXYNADLRRNPGRKHVIVEVEDSTILVISGHRNRDKEDKAXKWYRVQRRQGQLVMRLRLTENTKVDHVKAGLYNGVLTVTVPIA

SEQ ID NO: 364892 - protein, 45 aa, Zea mays
  Clone ID: MRT4577_95949C.1.pep
ERNIVTAIDTGKNECIYRDSLIYVNASHCNEYNALPIHVNDSLPA

SEQ ID NO: 364893 - protein, 204 aa, Zea mays
  unsure (1)..(204): unsure at all Xaa locations
  Clone ID: MRT4577_9594C.1.pep
MDADQQGVVAAAVKPALAKGTPSASFRLRNGSLNAVRLRRVFDLFDRNGDGEITVDELAQALDALGLDADRAGLSATVGAYVPDGAAGLRFEDFDKLHRALGDAFFGALXARTTPPPRRTAPAPAPXEEDEQEMREAFKVFDVDGDGFISAAELQEVLKKLGLPEASSMANVREMICNVDRDSDGRVDFNEFKCMMQGITVWGA

SEQ ID NO: 364894 - protein, 96 aa, Zea mays
  Clone ID: MRT4577_95950C.1.pep
AAGFFFFFFLVSEYTLLLKFINIQSTPKLLNHNIKAAKNSFPVQLDLSISHFVDKTFKVGHAKLSSIPRRRRRDHSRSRSQLLHHLAWTCRAGAQQ

SEQ ID NO: 364895 - protein, 41 aa, Zea mays
  Clone ID: MRT4577_95951C.1.pep
FSGHIRRVPYLWRRLNWMPFHVIKCLCSPFFVLLVLKDHPP

SEQ ID NO: 364896 - protein, 168 aa, Zea mays
  Clone ID: MRT4577_95952C.1.pep
MSSPVAKAARRVTTELRGVVVSAGLMEKTVKVRVGGQKWNKTVNKWFADPKHYLVHDPNSSLRTGDVVSIAPGWPTSQHKRHVIKEIIAPYGVPVSERPPVPTLEERIADYEAKKAAKDERRADRRQEEENKRREEKRLVNEKKDAKRQAWEEAQQKHKLDTSTSDVD

SEQ ID NO: 364897 - protein, 116 aa, Zea mays
  Clone ID: MRT4577_95953C.1.pep
SWQRRRRGQRPCGAVQARDHVGRLRQTATPAVRPLCHRKLVPITFHELNGVSGNLWCLHRWRRGRSEIRLKAANTNTIALINYKSQIAIYSISANCNANSFCSIRFYIKKKKLSAG

SEQ ID NO: 364898 - protein, 93 aa, Zea mays
  Clone ID: MRT4577_95954C.1.pep
VVVPPCRRAWSPVSPHGPFAEHFCDIALRGPRSIFLCAPALCVGMRKGIVGPAGARVVRRLGGARLWRGACLLVPPRPRCKSPRVCPGVPRCN

SEQ ID NO: 364899 - protein, 83 aa, Zea mays
  Clone ID: MRT4577_95955C.1.pep
CCSILTLLWIFGGHRPHTGVLRGKPHAPIKGIFSSASKQAPMSQSHVFSFLSVLFGKETCRDVSSCQIPHFLLAQFHRSKHKH

SEQ ID NO: 364900 - protein, 81 aa, Zea mays
  Clone ID: MRT4577_95956C.1.pep
SYASIATFDQHFGSLVDLQVAPSSTMLNNEHNESASSHDLDDQCSCIHGDPEELDGAVLLLMSLSHFTCTLTIIFALLSVL

SEQ ID NO: 364901 - protein, 72 aa, Zea mays
  unsure (1)..(72): unsure at all Xaa locations
  Clone ID: MRT4577_95957C.1.pep
SATARPTARPFCRRCAPALTGRAVPRRRYLKKLEAQSKPRLDTLHGITKTGGHPSDPTRSTRXRXRAMAXHA

SEQ ID NO: 364902 - protein, 50 aa, Zea mays
  Clone ID: MRT4577_95958C.1.pep
LYCISTLDTSVLMTHTNYLFHLLNNEFIPKPSTCWGSMGHETSMWGPIFT

SEQ ID NO: 364903 - protein, 82 aa, Zea mays
  Clone ID: MRT4577_95959C.1.pep
WGRGGGTSIAPKFLFMAPFFLLDTLWPYSQGEGASFPPPLEKRGAHLLSLRSPPRGPRLFTIPGRDKSLSKKARPKVFFTTP

SEQ ID NO: 364904 - protein, 144 aa, Zea mays
  unsure (1)..(144): unsure at all Xaa locations
  Clone ID: MRT4577_9595C.1.pep
QALDALGLXPDRARLPPPSGAYVXDGRRGXRFEDFDKLPRALGDAFFGALGGQDDATAXADGAGAGAEEDEQEMREAFKVFDVDGDGFISAAELQEVLKKLGLPEASSMANVREMICNVDRDSDGRVDFNEFKCMMQGITVWGA

SEQ ID NO: 364905 - protein, 57 aa, Zea mays
  Clone ID: MRT4577_95960C.1.pep
YTMEHFQEVFRGSSQQRELELQVTTLKQQLQEAEIHYKQDMILLPSFHFALYANSHV

SEQ ID NO: 364906 - protein, 92 aa, Zea mays
  Clone ID: MRT4577_95961C.1.pep
ALVLAVRGERMGTFKEHRTHGGWRRKKGSAARGAGQRASADDAGRKPFLSCCVKAKARGGGADVSCHDTEVSGWWTEPSTRLWLNKQRGVLQ

SEQ ID NO: 364907 - protein, 72 aa, Zea mays
  Clone ID: MRT4577_95962C.1.pep
LEDHQAAPIDLHLYAEAVEMNYLAPVLVELAYVWEEQIVFGYACSAEEWTPRKVVELSRPGHAVHGYNPGPP

SEQ ID NO: 364908 - protein, 56 aa, Zea mays
  Clone ID: MRT4577_95963C.1.pep
RCILWKYSRFQLQQALVTWDLQSQTYNPPRNCLHRGSDLGLELWVLGGWDGWGSRS

SEQ ID NO: 364909 - protein, 38 aa, Zea mays
  unsure (1)..(38): unsure at all Xaa locations
  Clone ID: MRT4577_95964C.1.pep
XVXHIDEALTXCXPSTGXDEILXLSRRLPLXQPSGWQY

SEQ ID NO: 364910 - protein, 133 aa, Zea mays
  Clone ID: MRT4577_95965C.1.pep
RGSPPWRPIPKPPLPHLCPVPFRFCCSIFSSWRPAIIPNSLPLSAPPPLPLRPPPLLLPPPLLFVLFPPVFFSPVNGSHLYSAPLYDHSLSRQLPPPPSPVRPPRPAPACRSRAFRTRPFVYLLFKKIKNNLF

SEQ ID NO: 364911 - protein, 79 aa, Zea mays
  Clone ID: MRT4577_95966C.1.pep
FIFYDKRSFLSKRIKEKPMPDSMILRKQAGGSLIVTDDLHIIRQSICACRPPTYGCIGNVWRRPLSLLEPTPSWHSTTG

SEQ ID NO: 364912 - protein, 203 aa, Zea mays
  unsure (1)..(203): unsure at all Xaa locations
  Clone ID: MRT4577_95967C.1.pep
MVGSLVSWALLISHGGRQRVGIDAKAAGLGGSFYVPXLGSSVNGKADSTKXVQEGWPSAWVGPGKKTILPPQGQHSCVVYINFTGPCEVYVTIQVEGNLVDTTHLSQYKXEHGEWIEILRVDILAITGGGNPEGKMPGVWSKNSCSKKXDCNILPNSLGMDFGKHGKMTEVXLLNSQLFHLNMXRCNNMRSQDVTVTSPGDSP

SEQ ID NO: 364913 - protein, 120 aa, Zea mays
  Clone ID: MRT4577_95968C.1.pep
GYLEISDVNCEALPEALSRCWNLQALHVLACSKLAVVPESIGKLKKLRTLELNGVSSIKSLPESIGDCDNLRRLYLEGCRGIEDIPNSLGKLENLRILSIVACFSLKKLSPSASFGKLLN

SEQ ID NO: 364914 - protein, 213 aa, Zea mays
  Clone ID: MRT4577_95969C.1.pep
IPGRPRVRGAWADAWGSRSSGRICLVRSVVYWAAQLLGAVAAALVLRLATGGMHLPEYALAVGVSGWNAAVLEAAMAFGLMYAYFATVMDKARRVRAGAGALAAPLRLGLLAGANVLACGALEGAVMNPARAFGPAVVGSRRWRHQWVYWVGPMVGAGLSGVVFEESPAPSWCVEDYMHAGAQDVVVVPAPRESSELKTSWDVCSIVVCRGRS

SEQ ID NO: 364915 - protein, 122 aa, Zea mays
  unsure (1)..(122): unsure at all Xaa locations
  Clone ID: MRT4577_9596C.1.pep
TCALAAAAAAPAETAERRRSVVRLLVAARIPHHGRTAAXAASGYGGCTASQRSQXLSTEXHEKFRQELSHDSPDTLAIVLDKSTKWRPELPLAKSVLVSFYLILPSVLGPILRSMQGKGKDY

SEQ ID NO: 364916 - protein, 109 aa, Zea mays
  Clone ID: MRT4577_95970C.1.pep
PRFNWENLGKPLFFPLLIHSLFTPFCHAGEARTGPPSKHFPNFCAHWVAPCTGPLTALYVGVSRGLPATFPFPLPPPFCPFFPFFSVPFAAFPRDFLNRGFLLGSLLGA

SEQ ID NO: 364917 - protein, 395 aa, Zea mays
  unsure (1)..(395): unsure at all Xaa locations
  Clone ID: MRT4577_95971C.1.pep
MVSSGTGSIAKRWRELQGEKSWKGLLEPLDMDLRKSIISYGELVAATGDGFNNEPHSPHVGLCKYGHDDLLTKSGVAAASHYKVTKFVYAWEDSKLTWIGYVAVATDGEGVAALGRRDIVVAWRGSMTGAEWWKDVEVLPTCPWPTLGXRTTPSGTGTRAPXVHSGFLSLYTEPPKPPKDTNSDMAFFVNGSARDQVLAEVRRLMELHRDEDTSITVVGHSLGSALAILNAIDLVGNGVNSSGLLGGRPPCPVTAIVFACPHVGNDSFRDAFTSFKYLKVLHVKNQQDWVPXFSWAGYXDLGVTLHIDTALSHYLKKPNLVTAHSLESYMHAVAGEVGSDGKFRLLVDRDVALVNKSADALKDEYHVPASWWVPHNKNMVKNDQGKWELKDFEQF

SEQ ID NO: 364918 - protein, 268 aa, Zea mays
  Clone ID: MRT4577_95972C.1.pep
MNMIRAVRRRFTVGHLATAKDPATLRHAAAELLATAIFVFAAEGATLSLGRMHHHDKGGGGLAAVALAHALALAAAVGCAANISGGHVNPAVTFGALIAGRICLVRSLVYWAAQLLGAVAAALVLRLATGGMHLPEYALAGGVSGWNAAVLEAAMAFGLMYAYFATVMDKARRVRAGAGALAAPLAVGLLAGANVLACGALEGAVMNPARAFGPAVVGSRRWRHQWVYWVGPMVGAGLSGVVYEHLVAGPAAEEEEEPAPSCGDRRRA

SEQ ID NO: 364919 - protein, 69 aa, Zea mays
  Clone ID: MRT4577_95973C.1.pep
QMGFPPFKPPFVKGYGEKRKPIEVCNLCGKWVRVTTLAESPGGIGNQNIWAPIVGPLWPFKCGKWVQME

SEQ ID NO: 364920 - protein, 276 aa, Zea mays
  unsure (1)..(276): unsure at all Xaa locations
  Clone ID: MRT4577_95974C.1.pep
MGGGGGVHRRAAALLFVVVLAAVDQAGKSVCEAQLRRGYYAGVCPDVESIVRGVVARKVQQTAATVGATVRLFFHDCFVEGCDASVMVASTANNTAEKDHVINQSLAGDGFDTVIRARAAVDAVPGCRGKVSCADVLAMATRDAIALVNECAQAGGPSYAVELGRLDGLRSTASSVNGRLPAPFFNLDQLSQMFAANGLSQADMIALSAGHTXVGLAHCGTFSGRLRGPSAPDRTLDSGYAAQLXAWCPTVVDPQVAGAMDHVTSGVLDNQFFRNL

SEQ ID NO: 364921 - protein, 156 aa, Zea mays
  unsure (1)..(156): unsure at all Xaa locations
  Clone ID: MRT4577_95975C.1.pep
ALFLKNFIFFFFSLFFNFFFFLIFFFFLPPPPPPPXTQTPPXXNPPPGGGERGPGPXXKGLDPGPGLSPPREADPGRDPAXASPSPPGXPXPGDPSPXPPLAGAGPXXXPGXGXPPXXPPPPXPGSPNXKPXRPPGEQPXPXSXAPTAPPPGGKPA

SEQ ID NO: 364922 - protein, 66 aa, Zea mays
  Clone ID: MRT4577_95976C.1.pep
LAGWCSNQNLELSLNDKVVLNPAVFFVQVPYYLFNKFLCIYIWDRSMDANCFSPPYILAFAKYDIK

SEQ ID NO: 364923 - protein, 62 aa, Zea mays
  Clone ID: MRT4577_95977C.1.pep
THASDRRLLLRSVPFRKMSLETFRLKTPRLNYGNGKINSDYRYDTTELFPPENGGGAVCVVP

SEQ ID NO: 364924 - protein, 50 aa, Zea mays
  Clone ID: MRT4577_95978C.1.pep
KKKKEKKKNKKKKKKKKKIKKGGFSKGYNVFLLYKVTLRALPMGDLASFS

SEQ ID NO: 364925 - protein, 106 aa, Zea mays
  Clone ID: MRT4577_95979C.1.pep
MGIGYVVGVLGGAILAHAAYATIQYRAVLKITEEEFSRPPMDVMMELLLGLALCMWAGLAVPAKFLSVLPHSEENRIVSFPANLDFMIFNHRGRALPSDSDLKLKT

SEQ ID NO: 364926 - protein, 115 aa, Zea mays
  Clone ID: MRT4577_9597C.1.pep
MSTTTTTISHTVPPTSSTTSSTGNLTGYLWNTPCHIRSPISTTTSTTPTCTYTGTYRDSDREWVKGRIPIRTLIQSVVPSYMTCYTTSLTRTMSAINCVRYRFRSSDPWTVSRNV

SEQ ID NO: 364927 - protein, 50 aa, Zea mays
  unsure (1)..(50): unsure at all Xaa locations
  Clone ID: MRT4577_95980C.1.pep
ESFDVINXRSEPLAAYIFTNTKKLKEQFVMTMSAGGLVVNDTTPHLAVHT

SEQ ID NO: 364928 - protein, 79 aa, Zea mays
  Clone ID: MRT4577_95981C.1.pep
DLIKHATKTDLAAMDFHHTNLTISLCNVHPPTYTYCAIHALFVTISSGQSFFHHIIIALLRLSQLSVQRPSSNTDISKF

SEQ ID NO: 364929 - protein, 161 aa, Zea mays
  unsure (1)..(161): unsure at all Xaa locations
  Clone ID: MRT4577_95982C.1.pep
MTRVIHDSGDDMQKEALDLVSSDVNFPKGHFPDYRIGPNNQIIDPEETHEAVPLKEIVAKETAQLLEQHKRLSVRDLKEKFEKGLSGASKLSEEXAKRREAASLDRQVLLKKLRDVLDTLKGRVAGRNRDDAEEAISLVEALAVQLTQREGEXIYEKAEVK

SEQ ID NO: 364930 - protein, 101 aa, Zea mays
  Clone ID: MRT4577_95983C.1.pep
EKSKWRRLSRRDYRTPLVFHDGQLAFLPTPLNTVAMFTWLPLGAALEIVRLSVALALSCKVCTELLVGTGQSGRLRGSLPTPGNSGGSGQLYACNHRTLID

SEQ ID NO: 364931 - protein, 137 aa, Zea mays
  unsure (1)..(137): unsure at all Xaa locations
  Clone ID: MRT4577_95984C.1.pep
MTRVIHDSGDGMQKEALDLVSSDVNFPKGCFPDYRIGPNNQIIDPEETHEAVPLKEVVAKETAQLVEQHRRLSVRDLKEKFEKGLSSASKLSEEAKRREAASLDRQVLLKKLRDVLDTLXKGRVAGXNKDDAEEAIS

SEQ ID NO: 364932 - protein, 64 aa, Zea mays
  unsure (1)..(64): unsure at all Xaa locations
  Clone ID: MRT4577_95985C.1.pep
FIQLQQIXNHHEESKLWDGQTPLRMPVQISSHPEYNAAKPGHVGIESQTGNTYSILCAVPHPNS

SEQ ID NO: 364933 - protein, 128 aa, Zea mays
  unsure (1)..(128): unsure at all Xaa locations
  Clone ID: MRT4577_95986C.1.pep
NFGHCVFRGPPGISVFGFSPGDVFFKKIVAQGGDFFXGGDGQLFFYGVVPDGGFLLGPPPFQKEPRLFPESFLFFFGNPPPPSFFFPPWGPPPMRDNVGGFFPRGWPPPKVHDPIFWPFGVPPPGPAF

SEQ ID NO: 364934 - protein, 94 aa, Zea mays
  Clone ID: MRT4577_95987C.1.pep
QIGSGEFVQSVGLPMQLQVLACSLLEVSTVEWQLLASRVSAQQAHAALGLGKRRWIRIRERAQGSTAYKCSWPGHAKAVAPTGPPSSIGWASVK

SEQ ID NO: 364935 - protein, 85 aa, Zea mays
  Clone ID: MRT4577_95988C.1.pep
KLETQGFSFFGLSPVGGESPQLGAFRPYKDDHKKSTKVRGGGAPHPRLKSRHIPPHRSHLGLKTHPRGFTTEASRSLGTKRGSNS

SEQ ID NO: 364936 - protein, 47 aa, Zea mays
  Clone ID: MRT4577_95989C.1.pep
MGGVPELTACLLALLQLLFALSEGCAFATGVITGAPKVPAPRRTGCG

SEQ ID NO: 364937 - protein, 350 aa, Zea mays
  unsure (1)..(350): unsure at all Xaa locations
  Clone ID: MRT4577_9598C.1.pep
MSRRTSQRPMRIPWTGSATGRHPQVLALPPWSPPSTCSILGVLEWGLQWMLSTPPWIQFTLNCPKWRSNGPMERALTASPGPASLTRANRHRRAHLRPSASPMAHVLGPAFPLLTGTVDLGPMWSISTSRSRERSQMQDLVHQHLVRAQLRMQRQADKKXRSERSFAIGDWVYMKLQPYVQSSVSLRAHHKLSFKYFGPYKVTARVGKVAYRLDLPVSSKIHPVVHVSQLKLAAGYKGPAPATLPLDLPEFSVPVQILQTRGLTKGNRLVQQGLVQWSGLPSDLATWEDLEAFRQCFPGAPAWGQAGFQGSENVTSQASVPDHPQEQPQRRKPGTRERRANVRVTAPEWV

SEQ ID NO: 364938 - protein, 73 aa, Zea mays
  Clone ID: MRT4577_95990C.1.pep
MDVLICCWLLLLLASAASAGSERCVRQGKAAYSPSLSPAPHGSSGPCGYSAMGGEINGGLLADGGPRQHRGGL

SEQ ID NO: 364939 - protein, 95 aa, Zea mays
  Clone ID: MRT4577_95991C.1.pep
QNRSPPRRQAEASAELKMPRTTGEQSSGCPPLPALTTDILSHGKGLTAHTRPAGAVQAGKTTSAHRPAHAMVAVYNDKNAADPRLADDTLNSVNE

SEQ ID NO: 364940 - protein, 95 aa, Zea mays
  Clone ID: MRT4577_95992C.1.pep
TQGSGKAWGKGWGGYIFSPEAALRPKMFTPGNGLLKKSCPLSSGGANRPLSPHFPLKKPQLRATFFISHGILGVALGVPIKPVPLATKLSLMFGV

SEQ ID NO: 364941 - protein, 269 aa, Zea mays
  Clone ID: MRT4577_95993C.1.pep
MPRNFRKRGIEQDTDDRSDDEDTRRIALEEIKYMQKLRERKLGIPADLAAASTNGSSARGLLGTGAAVAGEAEKEDLVLQDTFAQETAVTIEDPNMLRYVETELAKKRGKMVDVGHKEEMDHVDELYTVPDHLKVKKKNSEESSTQWTTGIAEVQLPIEYKLRNIEETEAAKKLLQEKRLARKPKPDANIPSSYSADYFHRGKEYDEKLRRENPGLYKDNDSRPSGNPGGKATDTKNPDGVGAGRREAASDELMLQRFRKREKFRALRR

SEQ ID NO: 364942 - protein, 58 aa, Zea mays
  unsure (1)..(58): unsure at all Xaa locations
  Clone ID: MRT4577_95994C.1.pep
NSPKPSRSSTTKLKNLSIGIPLTATLHSPGNVSEIYRVVKADMPPFGSXCTDFSLRCV

SEQ ID NO: 364943 - protein, 120 aa, Zea mays
  unsure (1)..(120): unsure at all Xaa locations
  Clone ID: MRT4577_95995C.1.pep
CEHGVVMEGTSKAEXDAYMTNAQXAGMLVTIYFTGAWCVLCRAILPLIVEHAKKFNQVVFLNGDMDEVNVGSRXYEGEVMTSFHLVKNGKTGATIVGVRKEELLALIEKHDEPAPESEFD

SEQ ID NO: 364944 - protein, 83 aa, Zea mays
  Clone ID: MRT4577_95996C.1.pep
RVLFYRSPEVIYGYSSATVTDVQSEGWVDTILTIGQTYLTATLLYHVLHHWIKITACQPPTAQLRKVSYTVMARKQDSTTLCK

SEQ ID NO: 364945 - protein, 150 aa, Zea mays
  Clone ID: MRT4577_95997C.1.pep
GKITTLEMKMETLVPNYTMADRNPQSPPFVEGCFSSNPPLISSSREPEWSSCKTSVLHCCTVLVICVRVAAKIIHRVEVGGKGPEFYRHSLVSSLSASSPGATGCSASTLLRAVHFLYGTKPRRQAGIALAHFLEPGTGTATLSSPLFTF

SEQ ID NO: 364946 - protein, 61 aa, Zea mays
  Clone ID: MRT4577_95998C.1.pep
YFEKVFFFSNGVLVCILVSFEGLSGWFYSAGILWGHVPTLFLVQFVTTDCPAVCLPHLLKI

SEQ ID NO: 364947 - protein, 212 aa, Zea mays
  unsure (1)..(212): unsure at all Xaa locations
  Clone ID: MRT4577_95999C.1.pep
MYARERLPRHARTPIPWALAAAAACARPHSLAFSGSSGAAASASAAGSWGPAGAGASGSSAASSSRAAASASATGSAAAGSSAPAGGAASSSAAASCSAAGVSSGPAGAAASASAAGSAAAGSSSPAGAAASGSAAACCSAAGSSSGAAGAAASASASASXSAGADSSGTTAGGGVSTTGASSAATTVGVWTSAVAIGGDEKADGYTKEWRG

SEQ ID NO: 364948 - protein, 75 aa, Zea mays
  Clone ID: MRT4577_9599C.1.pep
SLTLWFTHSSNSCNILTSQGLSSHSFEGRPCISNRKTPGLTRMHPTTYNNTYPIDYTTPINCLFLARPVYLYASD

SEQ ID NO: 364949 - protein, 74 aa, Zea mays
  Clone ID: MRT4577_959C.1.pep
RLLCSELTSPVYALGSIYLLLHCQGGTIAPQCFSLPIWFSWGNGRKRSTKRRKFFRVSLPIRVHGRLLSEPLRP

SEQ ID NO: 364950 - protein, 123 aa, Zea mays
  Clone ID: MRT4577_95C.1.pep
PTHLGYKCARCPVSHFPLFRQRPTTTMPPCGRERFGVGSPLPPTPPSTKPRIHCRCAIHIALSASSQLAVGVRKLNMRDYRLGDREFFVGEVAPPWPHPPSRPSLFTLLILKSQWPSIPVFSR

SEQ ID NO: 364951 - protein, 487 aa, Zea mays
  Clone ID: MRT4577_96000C.1.pep
MGLVKEGVDLEEGTLEIGMEYRTVSGVAGPLVILDKVKGPKYQEIVNIRLGDGTTRRGQVLEVDGEKAVVQVFEGTSGIDNKYTTVQFTGEVLKTPVSLDMLGRIFNGSGKPIDNGPPILPEAYLDISGSSINPSERTYPEEMIQTGISTIDVMNSIARGQKIPLFSAAGLPHNEIAAQICRQAGLVKTLEKGKHAEGGEDDNFAIVFAAMGVNMETAQFFKRDFEENGSMERVTLFLNLANDPTIERIITPRIALTTAEYLAYECGKHVLVILTDMSSYADALREVSAAREEVPGRRGYPGYMYTDLATIYERAGRIEGRTGSITQIPILTMPNDDITHPTPDLTGYITEGQIYIDRQLHNRQIYPPINVLPSLSRLMKSAIGEGMTRRDHSDVSNQLYANYAIGKDVQAMKAVVGEEALSSEDLLYLEFLDKFERKFVTQGAYDTRNIFQSLDLAWTLLRIFPRELLHRIPAKTLDQYYSRDASH

SEQ ID NO: 364952 - protein, 29 aa, Zea mays
  Clone ID: MRT4577_96001C.1.pep
RCARGCTGFLSQLRTSCSSLTGSLTFDLQ

SEQ ID NO: 364953 - protein, 55 aa, Zea mays
  Clone ID: MRT4577_96003C.1.pep
RCFGPSSGKILVSPEIMARPPPTSSTNNPGSLGNIKTTKPAPPKLLLQLFPFLLT

SEQ ID NO: 364954 - protein, 84 aa, Zea mays
  unsure (1)..(84): unsure at all Xaa locations
  Clone ID: MRT4577_96004C.1.pep
MGIFSYCLLCKLLTDTSLYSGKQAIADDASDPLVYLCPDLHAYATEIDXHIITILPDNKADLVPLNIKQRSTDYSKAHDILYLF

SEQ ID NO: 364955 - protein, 219 aa, Zea mays
  unsure (1)..(219): unsure at all Xaa locations
  Clone ID: MRT4577_96006C.1.pep
PPASAITLFLGATLALAQRDIKRSLAYSTMSQLGYMMLALGIGSYQAALFHLITHAYSKALLFLGSGSVIHSMEPLVGYSPDKSQNMVLMGGLRKYVPITRTTFLCGTLSLCGIPPLACFWSKDEILSNSWLYSPFFGIIASFTAGLTAFYMFRIYLLTFDGYLRVHFQNYSSTKEGSLYSISLWGKXLSKGVNRDFVLSTMKSGVSFFSXNIPKIPAN

SEQ ID NO: 364956 - protein, 133 aa, Zea mays
  Clone ID: MRT4577_96007C.1.pep
LHLSSTYRGHGSSSRTFCPPRHLRSGTPHFPTSLSDFSHSPHVRHIFCLSCPSADGAIIQIPLRQELIHTGITLIIFRVEHPTSHSIPCHYPPLHLIRLTVRMQCPHQIPRLPRTVRLLRLLAHGCERTLLHL

SEQ ID NO: 364957 - protein, 78 aa, Zea mays
  Clone ID: MRT4577_96008C.1.pep
MASAAAATQVGTYFLRNYYNLLQQTPDVVHQFYSEASTMVRVDDLTGNNTATRSCRSAIAKPRAEAEEKLRRTQLRSD

SEQ ID NO: 364958 - protein, 94 aa, Zea mays
  Clone ID: MRT4577_96009C.1.pep
MASAAAATQVGTYFLRNYYNLLQQTPDVVHQFYSEASTMVRVDDLTGNNTATRSCRSAIAKPRAGDGAGTLLELMVMHDLPCIQFIMICYLAID

SEQ ID NO: 364959 - protein, 81 aa, Zea mays
  Clone ID: MRT4577_9600C.1.pep
MLPLRRAKPTKRANGQVCQICGDSIGVSATGDVFVACNECAFHVCRPCYEYEREGNQCCPQCKTRYKRQKCWFPGNFFECV

SEQ ID NO: 364960 - protein, 59 aa, Zea mays
  Clone ID: MRT4577_96010C.1.pep
RDLLAIDWSATYTHTSGECGWQPTSTVYLQTPVHPAAAIYKRPAPHVLSNSHAAPNGRT

SEQ ID NO: 364961 - protein, 89 aa, Zea mays
  unsure (1)..(89): unsure at all Xaa locations
  Clone ID: MRT4577_96011C.1.pep
DLQIKGSRPRPVSSSGVRASSPKHSPLKWRKGGRRSANSIHAKGKLCPYPEAVDRHNFQKRXCCGARWSCDPESIRSHTTRSQQAPVKL

SEQ ID NO: 364962 - protein, 236 aa, Zea mays
  unsure (1)..(236): unsure at all Xaa locations
  Clone ID: MRT4577_96012C.1.pep
MSHRKFEAPRHGSLAYLPRKRAARHRGKVKSFPKDDPKKPVHLTAAMGYKAGMTTIVRDLDRPGAKANKKEIVEAVTIVDTPPMIVVGLVGYIETPRGLRSLTTVWAEHLSDEIKRRFYKNWYKSKKKAFTKYAKKHSENNGASITRELERIKKYCTVVRVLAHTQIRKTPLKQKKAHLMEIQVNGGSIADKVSFGQELFEKPVDVSSIFEQDEMIDVVAVTKGHGFNGVTXRWGT

SEQ ID NO: 364963 - protein, 92 aa, Zea mays
  Clone ID: MRT4577_96013C.1.pep
MTKRTKKVGITGKYGTRYGASLRKQVKKMEVTQHARYVCQFCGKNAVKRQAVGIWNCKSCRKTTAGGAYTVATPAAAATRSTIRRLREIAEV

SEQ ID NO: 364964 - protein, 108 aa, Zea mays
  Clone ID: MRT4577_96014C.1.pep
LRLPRPSRKRAPPFKPPPPPPALWPLLPPWHPPSRFSPGPPLGHLICRWTRGGAKAALFLCGVCWVFSPPFFGPYLFVYPFVISRLEPEMRTCNPPFFQPGAYFYAFG

SEQ ID NO: 364965 - protein, 51 aa, Zea mays
  Clone ID: MRT4577_96015C.1.pep
AGLEGYRLLLLSILSMDLQLLGSSGFNDILLFICLFFLVPTPDNVTLEKQK

SEQ ID NO: 364966 - protein, 122 aa, Zea mays
  Clone ID: MRT4577_96016C.1.pep
GVGSGKFNRLTIQYPLQIKAALAGGKPEYVVDGAGVWDYVHIQDLVQLYELVLLDWVEGRKAIPTGEKGIIFSATGSFAWKEVAEGIAKAGVELGQFSSTETKSISLEEAAKNWVGGDEQIV

SEQ ID NO: 364967 - protein, 250 aa, Zea mays
  unsure (1)..(250): unsure at all Xaa locations
  Clone ID: MRT4577_96017C.1.pep
MEGKEEDVRLGANKFSERQPIGTAAQGTDDKDYKEPPPAPLFEPGELKSWSFYRAGIAEFVATFLFLYISILTVMGIXPAVTFGLFLARKLSLTRAVFYIIMQCLGAICGAGVVKGFQQGLYMGNGGGANVVAPGYTKGDGLGAEIVGTFILVYTVFSATDAKRNARDSHVPILAPLPIGFAVFLVHLATIPITGTGINPARSLGAAVIYNQHHAWADHWIFWVGPFIGAALAAIYHQVIIRAIPFKSRS

SEQ ID NO: 364968 - protein, 194 aa, Zea mays
  unsure (1)..(194): unsure at all Xaa locations
  Clone ID: MRT4577_96018C.1.pep
MEGKEEDVRLGANKFSERQPIGTAAQGAGAGDDDKDYKEPPPAPLFEPGELKSWSFYRAGIAEFVATFLFLYITVLTVMGVSKSTSKCATVGIQGIAWSFGGMIFALVYCTAGIXPILAPLPIGFAVFLVHLATIPITGTGINPARSLGAAIIYNRDHAWSDHWIFWVGPFIGAALAAIYHQVIIRAIPFKSRS

SEQ ID NO: 364969 - protein, 57 aa, Zea mays
  Clone ID: MRT4577_9601C.1.pep
RTYCKCIMHMSMDMNSMRHIFYTKEGKHLKQGIKTLRGTLDTFHSTSSMTFNQMALH

SEQ ID NO: 364970 - protein, 90 aa, Zea mays
  Clone ID: MRT4577_96020C.1.pep
KKLDRGGKDRPPGNILRREKIPEPGPPITNGPSPPTLQRSSRRWRAKPGAGEAQRGYFFNQTRNSPPRGIEPRTWRCYSEALTITLADAW

SEQ ID NO: 364971 - protein, 138 aa, Zea mays
  Clone ID: MRT4577_96021C.1.pep
MGGKEEDVRLGANKFYERQPISTGVQGTDDKDYKEPPPAPLFEPGELKSCSFYRARITKFVATFLFLYISILTAMGVSKSTSKSATVGIQGITWSFGGMILALRYCTGGMYGGHINPAVTFGLFLARKLSLTKAAFYM

SEQ ID NO: 364972 - protein, 35 aa, Zea mays
  unsure (1)..(35): unsure at all Xaa locations
  Clone ID: MRT4577_96022C.1.pep
IAAKCAWNECGXRLQPPVDTSPVAFALRPIDFLWH

SEQ ID NO: 364973 - protein, 203 aa, Zea mays
  unsure (1)..(203): unsure at all Xaa locations
  Clone ID: MRT4577_96023C.1.pep
QYTDVGEHSARTKRTGAHHTHPPLRRTGSIHHACCTENGQHRTHHEPPGGPLFXPHQLKSWSFYRAGIADVVATFLFLYISILTVMCVSESTSTXPTVGIQGIAWSFGGMIFALVYCSAGISRRYINPAATFGLFLARKLSLTRALFYIIMHCLGAICGADVVKGFQQGLHMGNVRGDNVVEPVYTQGDALGAQIVGTFILVY

SEQ ID NO: 364974 - protein, 64 aa, Zea mays
  Clone ID: MRT4577_96024C.1.pep
SSKKNQSFEEAPACEVNGLKIRSPPLVSRNCTNPTIPWTNPISTQIRILLCPPRKIGVFAPSTI

SEQ ID NO: 364975 - protein, 288 aa, Zea mays
  Clone ID: MRT4577_96025C.1.pep
MEGKEEDVRLGANKFSERQPIGTAAQGTDDKDYKEPPPAPLFEPGELKSWSFYRAGIAEFVATFLFLYISILTVMGVSKSTSKCATVGIQGIAWSFGGMIFALVYCTAGISGGHINPAVTFGLFLARKLSLTRAVFYIIMQCLGAICGAGVVKGFQQGLYMGNGGGANVVAPGYTKGDGLGAEIVGTFILVYTVFSATDAKRNARDSHVPILAPLPIGFAVFLVHLATIPITGTGINPARSLGAAVIYNQHHAWADHWIFWVGPFIGAALAAIYHQVIIRAIPFKSRS

SEQ ID NO: 364976 - protein, 161 aa, Zea mays
  unsure (1)..(161): unsure at all Xaa locations
  Clone ID: MRT4577_96026C.1.pep
MGKEEDVRLGAKKISERQPIGTEGAXGTNDKDYKEPPTAPLFXTGELKAWSFYRAGIAEFVATFLFLYISILTVMGVXKDTSKSATVRIQGIDWSFGVMIFALLYCTAGISGGHINPAGTFELFLERKLSLTREMFYIIMQCLGAICGDAVVKXFQHGLNM

SEQ ID NO: 364977 - protein, 200 aa, Zea mays
  Clone ID: MRT4577_96027C.1.pep
RTRGAWSFGGMIFALVYCTAGISGGHINPAVTFGLFLARKLSLTRAIFYIIMQCLGAICGAGVVKGFQQGLYMGNGGGANVVAPGYTKGDGLGAEIVGTFILVYTVFSATDAKRNARDSHVPILAPLPIGFAVFLVHLATIPITGTGINPARSLGAAIIYNRDHAWSDHWIFWVGPFIGAALAAIYHQVIIRAIPFKSRS

SEQ ID NO: 364978 - protein, 146 aa, Zea mays
  unsure (1)..(146): unsure at all Xaa locations
  Clone ID: MRT4577_96028C.1.pep
MEGKEEDGRLGANKFSERQPIGTAAQGTDDKDYKEPPPAPLFEPGELKSWSFYRAGIDEFVGTFLFLYISILTAMGVSKTTSKSATVGIQGIGWPFGDMIFALXIYCTAGISGGDINPEEIYRLLLVRKLSLTTEVLYIIRHGQGA

SEQ ID NO: 364979 - protein, 150 aa, Zea mays
  Clone ID: MRT4577_96029C.1.pep
MEPSLLHVGTSSENCQSLLLLTRTRSVRCKDFDVDACDEHLTAITRLNDEVASLNDQLKTCKRDFDKLKFARDAYTVGRHPSIKDGLGFRKETKNLTIQKAPALNKEKGKAPMASNSQKCHAYIYDRKFSRRSQISRNAHYSRSYDHDAY

SEQ ID NO: 364980 - protein, 125 aa, Zea mays
  unsure (1)..(125): unsure at all Xaa locations
  Clone ID: MRT4577_9602C.1.pep
IRLEGWAFLSPPVRVRARGGLLLIGLAVHQIEMAASDAEYHSFVLGLAWATDDHSIHNALRTYGKVLESKIILDRXTHRSRGFGSVTFSTEEAMLNAIEGMNGQELDSPNITNNEAQSQGGRVGS

SEQ ID NO: 364981 - protein, 57 aa, Zea mays
  Clone ID: MRT4577_96030C.1.pep
QMVQYQHRHIWFHHPVIPCHRTPMLALRVYQHMHPRSPQLHLMTTCARQEAPHRCKL

SEQ ID NO: 364982 - protein, 88 aa, Zea mays
  Clone ID: MRT4577_96031C.1.pep
RQKKKKKKKKKKKKKKKKKKKKKKKKKKKKKKKKKKKKKNSGPPLNLLGVGWALVFFPGGRGVSPPFLLGKTFWPETFWEKVCFFPLG

SEQ ID NO: 364983 - protein, 209 aa, Zea mays
  Clone ID: MRT4577_96032C.1.pep
MSRRLSLPAGSQVTVTVSPTRGKAESPGDGVIKRSGGGIGLTSPAPRHSLGGAGSSTIPTVQLSPVRRSGGSRYASLDGGAGADDSAEFVHYTVHIPPTPERTVAASADSVDAPAPTAYDEDGGVAGVRAQRSYISGTIFTGGLNQATRGHVLNTSANSAAVAASANMSCKMRGCDMPAFLSSGAGGGPCDCGFMICRECYADCVAAAD

SEQ ID NO: 364984 - protein, 64 aa, Zea mays
  Clone ID: MRT4577_96033C.1.pep
RKKKKKKKKKKKKKKGVKKGGKKKKKKKKKKKKKKKKKKKKKKGGAFLRDQSLVTGDWKVLFFF

SEQ ID NO: 364985 - protein, 34 aa, Zea mays
  Clone ID: MRT4577_96034C.1.pep
CLLSAPVVFSVRIIRCIEVGLLFPTATSYVQAYA

SEQ ID NO: 364986 - protein, 51 aa, Zea mays
  Clone ID: MRT4577_96035C.1.pep
DCYVSGQPEWIRLSFKGHFMSDSPVLMLSAPCVAIKRVCCAPDQIWLWHAN

SEQ ID NO: 364987 - protein, 62 aa, Zea mays
  Clone ID: MRT4577_96036C.1.pep
GVMKDIGGGVKVDGRVERVGVHKVAEVSKETHVVSDEDDRHADLLGVEDDRMRGSSREFRTE

SEQ ID NO: 364988 - protein, 72 aa, Zea mays
  Clone ID: MRT4577_96037C.1.pep
GGAGAFMCLMSNLMVLIFASDWTRSSLCRHIRHPGVCSVCTSVLGRLGNKGAVSVRILLHGTSFCFVCCHLC

SEQ ID NO: 364989 - protein, 299 aa, Zea mays
  unsure (1)..(299): unsure at all Xaa locations
  Clone ID: MRT4577_96038C.1.pep
ADPLPPPIRVSSGGRRAWLARAPSCARRRRRPPPASPTTRSSRCSASSPPTPSTASSASPRPGAASSRTRSTASGSRRPWRGSSAGWTATAAPRARGSRAPTPRSRSGRRPPGGSSTSPGWRSRTPTPPCPSCRLPTPRGCXRRDPGRPRRPRAPGXAPGGTSPPTSTRRRATSCATRPRRGGRGCRAPAGSPAPRSGRRSRTCSSTPPRRRRRRRRRRTGSTSTCSSSGSTTWTRCARCTRTRRPTGRGPTGRAPGSTAGGGTGPAAWRSSSRAPAPSPAALCTWWSTPTARAPTTWS

SEQ ID NO: 364990 - protein, 117 aa, Zea mays
  unsure (1)..(117): unsure at all Xaa locations
  Clone ID: MRT4577_96039C.1.pep
SDVERPSPVRSRSNGIYPMWRTGTQILISAIGDRSNGAERPSLLRRESAAAHASPRRRDPPEYRARPRDSSNPILXGPKLRRGVQGQSAGGFTYTAEKSRGRAKAQAASRTRPRNLE

SEQ ID NO: 364991 - protein, 47 aa, Zea mays
  Clone ID: MRT4577_9603C.1.pep
HEGRLKAQSVGDAPHHLLLSHSLMHLLCIGQPLSFPTRPRTRGSTRE

SEQ ID NO: 364992 - protein, 91 aa, Zea mays
  Clone ID: MRT4577_96040C.1.pep
SSYSQTLHASPEDPHLLCCRRSSAARGAPGPDMPDLACGLVRNPRPRMTGSYLGTPANSRPSTTPSPLLAGRDERARETPRLLSRRLSNRS

SEQ ID NO: 364993 - protein, 389 aa, Zea mays
  unsure (1)..(389): unsure at all Xaa locations
  Clone ID: MRT4577_96041C.1.pep
MGQMGNFFAGRVGGRILGVRCVIRYEKDVFFAQTPDMLTVAPLLGSTSTKGSSSTTLWVVAVAVPVSVLLACFLACVLWIRKRRRRVTNVSGTVSVPTMSMEMEQVLKLWRVEESDSEFSLFDFDQIADATDNFSDDHKLGQGGFGPVYKGELPGGLEVAIKRLSSVSVQGLMEFKTEIQLIAKLQHTNLVRLLGCCVQADEKMLVYEYMPNKSLDFFIFDGGDRGRALTWGRRVXVVEIRHEGLLYLHKHSRLRVVHRDLKASNILLDRDMNPKISDFGMARIFCSNVTEANTTRVVGTHGYIAPEYASEGLFSVKSDVFSFGVLLLEIVSGKRTAGFYQYGKFFNLTGYVSTYAYILPYHLRRRIYTNERTRLAEPGDYTDDDRAPT

SEQ ID NO: 364994 - protein, 73 aa, Zea mays
  Clone ID: MRT4577_96042C.1.pep
VVLRAAKFSFLLYSHPGLTDWPSFHQIMQGSPMSGSLVRALPHKPLAPAGVREGRYAWIAPPRQMVTMIRYLG

SEQ ID NO: 364995 - protein, 58 aa, Zea mays
  Clone ID: MRT4577_96043C.1.pep
VLGSGDRRRCECHMSVAIDLLPLLITDETMSPSKARSFSPQGLSIIFSHRSCALSRIA

SEQ ID NO: 364996 - protein, 161 aa, Zea mays
  Clone ID: MRT4577_96044C.1.pep
WFARLGFLFLGLGCCVEWNWDRIFFSPRARLCLCSPYVLIGFSLGWFGSGSGPGIHWSGPASGPGWGGGWAGPPCFFLGCFFGKVLFWSPAVAPPGPGWVFCFAPNAALLFSRVGLARERCSHGCRFFLGFFVGLNLGWAPMYFMFCFCAVFPCPVLFCFS

SEQ ID NO: 364997 - protein, 233 aa, Zea mays
  unsure (1)..(233): unsure at all Xaa locations
  Clone ID: MRT4577_96045C.1.pep
MVGFAGKRKELEQVMDGLSDFSLSGPAAKSRRLDAELPPIMEEEPPAPSMPFQMLGEKINNGVDIPSMEFMMEDLTTHHVPSEDMALVLYKPVDNSAPFGRGISSSSFIVSSDLIRGLKNHAFNQANYHVVEDESPERRNSLALVPWTPPQVSIRSDWVAAEPERTRIFEVPMDADETEVTSMDVEETPEAVSGGFNGENLGQWXTLCDPAVVTKSIRPCYVVKVTTGSLPAC

SEQ ID NO: 364998 - protein, 357 aa, Zea mays
  unsure (1)..(357): unsure at all Xaa locations
  Clone ID: MRT4577_96046C.1.pep
MPLPIPTVVWADIGFDFIEALPRVNGKSVILFVVDRFSKYRHFIALAHPYTVESVAQAFFTDIVRLHGMPQSMVFDRDPVFTSAFWRELMRLMGTKRHMSSAFHPQSDGQTEAANRVIIMYLCCFTGDRPRQWLRWLLWAEYVYNTTYQSLLREMSFRWCTAHAVQKRHYDKQHRPRTYVVGDWALLRLCQRAPSSLPQQTTGKLKPRFLGPYRVIELIKDVVVRLELPPQARIHDVFHVGTLKKYVGTPSSTPPPLPDIHHGVIVPEPAQVDHVRLARGVQQVLVHWRGEPTTSATWEDLDGFCATYLDFQLDDELDLEXGGDVMWGRTYARQQRARDARRSAARASTVGADSSSP

SEQ ID NO: 364999 - protein, 37 aa, Zea mays
  unsure (1)..(37): unsure at all Xaa locations
  Clone ID: MRT4577_96047C.1.pep
MLPFWEKKKKKKKNKKKKKKKKKKKKKKKKKKXKNPP

SEQ ID NO: 365000 - protein, 67 aa, Zea mays
  Clone ID: MRT4577_96048C.1.pep
TIYLREHTGSSNLPGVDGAAHLYLLAAYAIDDLLSCFTFVRAAQAQQGLEYLPERMTARRTSKTKCL

SEQ ID NO: 365001 - protein, 69 aa, Zea mays
  Clone ID: MRT4577_96049C.1.pep
HGFIITSTGHGVSIASHLGRYYSMLGTFKAYLNIVCYTTICFDVKPITVWSIMGPLKLPWGGVGIDIGI

SEQ ID NO: 365002 - protein, 45 aa, Zea mays
  Clone ID: MRT4577_9604C.1.pep
DVSCSLPSDEQSQCPLCPLERVSDGEKSVKKTVLRVKLSGRTGRV

SEQ ID NO: 365003 - protein, 88 aa, Zea mays
  Clone ID: MRT4577_96050C.1.pep
MGAYKYIQELWRKKQSDVMRFLLRVRCWQYRQLSALHRAPRPTRPDKARRLGYKAKQGYVIYRIRVRRGGRKRPVPKGATYGMPVHHG

SEQ ID NO: 365004 - protein, 46 aa, Zea mays
  Clone ID: MRT4577_96051C.1.pep
RPVPVNLNLWLELALQKKTAKETAACHTSSDTITTPGCAPLMYPLH

SEQ ID NO: 365005 - protein, 71 aa, Zea mays
  Clone ID: MRT4577_96052C.1.pep
GGKNMVVNVLDLFTIRATVKPTAISEASTSLIQLCGPKVVYHLTLMIQKTLNHTNLSSKVSHQSYIEQDTW

SEQ ID NO: 365006 - protein, 70 aa, Zea mays
  Clone ID: MRT4577_96053C.1.pep
ETILLLCALLLQQRSCMIYILSYWPGRIKAFGCLLMLSRNLCTVLLWKIAYSSRCDGFLLPLSGVSRCPI

SEQ ID NO: 365007 - protein, 122 aa, Zea mays
  Clone ID: MRT4577_96054C.1.pep
ETNPSPATSFKKKKRYSKKRKAIEVTVDASFHGAAAPVVGYFPTGYDPLAAAEPPRARLFCHEKHHNRVELVVGAPGGGPDFVGRSYAGEAAAPQLCGYALGVLDKATGTLKIVPISSNKIL

SEQ ID NO: 365008 - protein, 39 aa, Zea mays
  Clone ID: MRT4577_96055C.1.pep
EHVSPVFIWAFKRKPLTHACIQIDLYLSLSDGRSAILSS

SEQ ID NO: 365009 - protein, 60 aa, Zea mays
  Clone ID: MRT4577_96056C.1.pep
YTYHCFLAYHLMLNAFLIYIHMLTFHVTQTDTAQDKVGLHINCYLHIIIFFSPKKFLLEY

SEQ ID NO: 365010 - protein, 40 aa, Zea mays
  Clone ID: MRT4577_96057C.1.pep
AKRAFVHWYVCEGMEEGEFSEACEDLAPLEKDYKEVFADF

SEQ ID NO: 365011 - protein, 46 aa, Zea mays
  Clone ID: MRT4577_96058C.1.pep
RACVMGSVSLSVGVSALLSVFSPFGSDVNHFGWVGVCTCGWLLPLV

SEQ ID NO: 365012 - protein, 53 aa, Zea mays
  Clone ID: MRT4577_96059C.1.pep
TDRLHRADLTDGYFVCLMIGYAFGLTGTYIGLYLMNTRPCQALTLSLTPFEQH

SEQ ID NO: 365013 - protein, 128 aa, Zea mays
  Clone ID: MRT4577_9605C.1.pep
ARGKVSFRIPYYTQWGQNVLICGSDRLLGSWNVKKGLLLKPSHQGEELIWSGSIPVPPGYQSEYSYYVVDDRRNILRWEVGKKRKLLLPDGFQDGQSLELHDLWQTGSDNIPFRSAFKDVIFRTSWSL

SEQ ID NO: 365014 - protein, 45 aa, Zea mays
  Clone ID: MRT4577_96060C.1.pep
TVIFCLINHLYFMGIPCRTGEAPFHRNGSHNLSLRRRQMFYVICL

SEQ ID NO: 365015 - protein, 75 aa, Zea mays
  unsure (1)..(75): unsure at all Xaa locations
  Clone ID: MRT4577_96061C.1.pep
VEVGDELRGPGGGSVADGAGARVSSPWARGRGSSRRRNPGPPACVALPWLGGWCGLASRKQGWFDRHXLXFXPLV

SEQ ID NO: 365016 - protein, 76 aa, Zea mays
  Clone ID: MRT4577_96062C.1.pep
VGAVRGPPRAVVRVVVVLVGAWVRPPAAAVPAGVVALVGVGVPGPAAVVVVGRRVGLSAALGELGRAGSCVGNPAG

SEQ ID NO: 365017 - protein, 174 aa, Zea mays
  unsure (1)..(174): unsure at all Xaa locations
  Clone ID: MRT4577_96063C.1.pep
DSARAPERCYPQPRRARPPPQPRRSRARPASTPRGADIAPSMLSSVFANLAFKVERMVRLCYDCLHMDFMNVHFVPNLTIGDTVIQSLRKHXTTAYLHCHLMVTKPSYYTQPLGKAGASGITFHIKVVRDNWQDLIPSINSKGMCTEVSLNXATPVQEVFPLQLSEHPLELPLV

SEQ ID NO: 365018 - protein, 171 aa, Zea mays
  Clone ID: MRT4577_96064C.1.pep
MAFYYAIALLGMLAVFSSGGNALDDNMLKTTVYIQQLPYQNQRGVAEGTAVISWYIKDGPGASANTIGHAEGLVILTDIARSSWLITTDLVFDGGSLAGSSLQVMGQHESSGQWSIMGGTGQFTMARGVIEYKTIQEDSSSRTFEVCIYAYYTPMNGWKAGLALGDTGSKP

SEQ ID NO: 365019 - protein, 93 aa, Zea mays
  unsure (1)..(93): unsure at all Xaa locations
  Clone ID: MRT4577_96065C.1.pep
DSSERRSLQVQYTRVACNWNGLDIAFRVDAGSNANYLAMGIEYESGDGDLRAVXELKHSGAKVPPERSWCGGDCEEKPRSHRHPKQLPGRLPP

SEQ ID NO: 365020 - protein, 92 aa, Zea mays
  Clone ID: MRT4577_96066C.1.pep
NEPIPWPNRPAQRTPKMANRRNPGKGESPLTERGGTYYGRVYKPKQHGRRLWGALKQRAKKGPDPGALGRNRANKTGGYSRDWPGTKGVGLN

SEQ ID NO: 365021 - protein, 158 aa, Zea mays
  Clone ID: MRT4577_96067C.1.pep
KKKKKKKKKKKKKKIKPKKKKKKKKKKKKILKKKKKKKKKGFVLGPWGPPGRAHPNFFFLKGPPPKGFLKNLGGTLLALGLNHNGNLLLQIILGKGVQGPLGLFFWELFAWKTLWGLFARLIKGGLFVGGIFLGLLPGVGWRGKGHHLLHGWGRPPLK

SEQ ID NO: 365022 - protein, 60 aa, Zea mays
  unsure (1)..(60): unsure at all Xaa locations
  Clone ID: MRT4577_96068C.1.pep
PKGSRFFFCPVGPPWFXGKHFVFGQVFKGMDVVKALEKVGPRKGSPSXKVVKVLFLGHLP

SEQ ID NO: 365023 - protein, 73 aa, Zea mays
  Clone ID: MRT4577_96069C.1.pep
FYQLKPGRGGIGGASPSTYSHTLNRYYCAADPVSRFTESVNSNRAIFCKLNWRFWFNPYPVYCSKLRPILYPT

SEQ ID NO: 365024 - protein, 63 aa, Zea mays
  Clone ID: MRT4577_9606C.1.pep
DRICGPLGAADWLVKHQHCVHDGHHWDVGTHSAGNCVTRIFKGITDYEVNMHELCALKSYKKL

SEQ ID NO: 365025 - protein, 53 aa, Zea mays
  Clone ID: MRT4577_96070C.1.pep
VAWAARRLQVLSVLCRSAGRAMESLAAGGFHAPRSRRWSPKIRTGPAGGQLSP

SEQ ID NO: 365026 - protein, 155 aa, Zea mays
  Clone ID: MRT4577_96071C.1.pep
MAAAIAASLIRRTTSSPYRRLLLPTFSHLHRPAPQSPSPWPPSQHRFLSSDATDDPDRKLPPLDPKQLWRELSTAEPATGSSRLPKATWDDVVALTRRFAKDPAIADQALALYIPSSEFPTYARHFRHFIPARLSQESAEQLLSLPGEDAHALLL

SEQ ID NO: 365027 - protein, 32 aa, Zea mays
  Clone ID: MRT4577_96072C.1.pep
MAVHYWTALFLLLSCLFCISNASAGDADPDYR

SEQ ID NO: 365028 - protein, 57 aa, Zea mays
  Clone ID: MRT4577_96074C.1.pep
RNRHPLFVLFLFWGGDPPQHRRGFLKTPHASPIYGTQFFLHLLLGGGASSTPGAWAH

SEQ ID NO: 365029 - protein, 56 aa, Zea mays
  unsure (1)..(56): unsure at all Xaa locations
  Clone ID: MRT4577_96075C.1.pep
PWIFAWTQTRFHLPVWLGFGAAXMYXVAILQGHPMICSRMYNEWPFFRVTLXDLLE

SEQ ID NO: 365030 - protein, 60 aa, Zea mays
  Clone ID: MRT4577_96076C.1.pep
YFLHFFFYFFINILYSIICFLRENQIIFIVTCQSVFAPLPKYWECTCLVVRECTFEPVPV

SEQ ID NO: 365031 - protein, 88 aa, Zea mays
  Clone ID: MRT4577_96077C.1.pep
ICLRTSHALVRTDVQYPTAEFTGDLVQVLVGAQVCQPFTRGMASFMARWSLVRLLLGSRLERAGLPSLISWYWTCFSTASSLGGVSMF

SEQ ID NO: 365032 - protein, 87 aa, Zea mays
  Clone ID: MRT4577_96078C.1.pep
GPTCYRSPSRRRHSMTTTRTAATAGLSGWASHIPRSSTSTVPSTYPSSTTTVTKTTRRPLKVPAQNLGASPLARRPMTSSCRRSSRT

SEQ ID NO: 365033 - protein, 77 aa, Zea mays
  Clone ID: MRT4577_96079C.1.pep
LRSLCAYLKSGHAFQFFWESNYVLFLDVCCSNLYGYNRFRDLSLITSCIPICFVIGFLTMPKHSVLTHTGAWENGIS

SEQ ID NO: 365034 - protein, 134 aa, Zea mays
  Clone ID: MRT4577_9607C.1.pep
PLNGFPRPPQMGGDIKYVDWSLPGAKHHHMFLPGFPPFLKRGIGGKKHMGPENGKLFGKFGWAGGFKKTKVFFKKLKSNRAFMIVLSPSFWGILFFGSPLPGGFCFPGPVKFGFGRFFCKFPPPTGKRVFFPPS

SEQ ID NO: 365035 - protein, 410 aa, Zea mays
  Clone ID: MRT4577_96080C.1.pep
MGASRDVHLLSSAFLFVFLAYHAAQNLQSTVNTDENLGSISLGVLYTSFTAFSAAGSAVVRWMGSRRALVAGTSGYLLFIAANLLPSWYTMVPASLYLGFTASIIWVGQGTYLTSAALSHARENNLPEGPTLGSFNGEFWGMFASTQVIGNLISLALLRNGKDGGSITGKNLLFAVFLGCMIVGIVLMCLLSKRDEKKDNTSTHSSFGAMLKYIIAPLKDKRMLLTIPLIAYSGLQQAFVWAVFTKSIVTPVLGISGVGGAMAIYGAADVVCSLVAGRLTSGLRSAAFIVSVGAILQAIVLFWLLLFYSPMDGLLGAAIPLFIGALWGVGDGVLNTQLSALLGLLFEDVKEAAFAQLKVWQSGAIAVIFFLSPSITLQAMLLLMAAALVISFGSFLFLTLVVEKSSPVRA

SEQ ID NO: 365036 - protein, 444 aa, Zea mays
  unsure (1)..(444): unsure at all Xaa locations
  Clone ID: MRT4577_96081C.1.pep
MAGADAGLASAAGDVEEAAPLVAGPGSRRAPASVMGASRDVHLLSSAFLFVFLAYHAAQNLQSTVNTDENLGSISLGVLYTSFTAFSAAGSAVVRWMGSRRALVAGTSGYLLFIAANLLPSWYTMVPASLYLGFTASIIWVGQGTYLTSAALSHARENNLPEGPTLGXLNGEFWGMFASTQVIGNLISLALLRNGKDXGSITGKNLLFAVFLGCMIVGIVLMCLLSKXDEKKDNTPTHSSFGAMLKYIIAPLKDKRMLLTIPLIAYSGLQQAFVWAVFTKSIVTPVLGISGVGGAMAIYGAADVVCSLVAGRLTSGLRSAAFIVSVGAILQAIVLFWLLLFYSPMDGLLGAAIPLFIGALWGVGDGVLNTQLSALLGLLFEDVKEAAFAQLKVWQSGAIAVIFFLSPSITLQAMLLLMAAALVISFGSFLFLTLVVEKSSPVRA

SEQ ID NO: 365037 - protein, 178 aa, Zea mays
  Clone ID: MRT4577_96082C.1.pep
MLSVGLTPNIVTYNSLIYGLCKSGELSRAVSLFKKLWTKGISPNAITYNTLIDKHCKDGYITEAFKLKQRMIEEGIHPTVFTYSILINGLCTQGYMEEAIKLLDQMIENNVDPNYVTYWTLIQGYVRCGNMIEISKIYDKMHIHGLLPTNVSGDVKQSCPAIHNPNRETCQMKMHSQC

SEQ ID NO: 365038 - protein, 100 aa, Zea mays
  unsure (1)..(100): unsure at all Xaa locations
  Clone ID: MRT4577_96083C.1.pep
VXGLXWPVALAXXXXRLGXXXXVXGXVXXAFLFXPXXVXPLSLXXXXCXPFLXCPXXLXXXXPFXXFCRXXXXACCLXRXVVCLLPFXALLLXXAWXCPV

SEQ ID NO: 365039 - protein, 82 aa, Zea mays
  Clone ID: MRT4577_96084C.1.pep
KGTNKGPIFGGALFLSKFFKTQKGAMGKKKGGEWNPPELTGGKKKIASFFGKSIIKGIPRKPQGGGGKTQVGEKNPRGHSLF

SEQ ID NO: 365040 - protein, 106 aa, Zea mays
  Clone ID: MRT4577_96085C.1.pep
QSHSILYPCFIPRKNVCTGGEETPLTESGSSYFGADSLDSVKKQSFGSKRSNSFSFSGASSHSMERHRYLQRGMLSSSKALRTAFESNIASRSEKQAQPLNRLIWK

SEQ ID NO: 365041 - protein, 115 aa, Zea mays
  unsure (1)..(115): unsure at all Xaa locations
  Clone ID: MRT4577_96086C.1.pep
PPIYRNFSTKPFYHSTQNPSSXNPTNITPFFQNLLSHIQTRIYSMSQNIKTKIYQIVTKIDHLYQIINDLQINIVTLTPPKILIHPNPFYHFLLFHNSQKFHKTHKYHTFHKSHK

SEQ ID NO: 365042 - protein, 41 aa, Zea mays
  Clone ID: MRT4577_96087C.1.pep
KPPGWIKKKKKKKKKKKKKKKKKKKKKKKKKKKKKKKKKKK

SEQ ID NO: 365043 - protein, 79 aa, Zea mays
  unsure (1)..(79): unsure at all Xaa locations
  Clone ID: MRT4577_96088C.1.pep
IIRXYTLQHAGTNFSKKTAQRPTAAWNNRRNNSKWSARHKNTASPTAEEGLSSQYQSTPNEVAHDPHNMPGPGPTKDKN

SEQ ID NO: 365044 - protein, 142 aa, Zea mays
  Clone ID: MRT4577_96089C.1.pep
MSKRGRGGSAGNKFRMSLGLPVAATVNCADNTGAKNLYIISVKGIKGRLNRLPSACVGDMVMATVKKGKPDLRKKVMPAVIVRQRKPWRRKDGVYMYFEDNAGVIVNPKGEMKGSAITGPIGKECADLWPRIASAANAIVKK

SEQ ID NO: 365045 - protein, 116 aa, Zea mays
  Clone ID: MRT4577_9608C.1.pep
FLTHSGWNSTMEGIVEGVPMVCWPFFADQQINSRFVGAVWRNGLDMKDVCDRVVVESTVREAMESEEIRRSVHALAEQVKRDVADDGASALEFKRLISFITELSTSAAQGTPSSKS

SEQ ID NO: 365046 - protein, 93 aa, Zea mays
  Clone ID: MRT4577_96090C.1.pep
ISTGTWHLHWPPRHVSDAAPFAETLGSRTKRKQEREGKSHGICIPESLHFLSHRSPREFPPLSRQEQRVLRIQERDRFRQVQLLSARSSPGVE

SEQ ID NO: 365047 - protein, 140 aa, Zea mays
  Clone ID: MRT4577_96091C.1.pep
MSKRGRGGSAGNKFRMSLGLPVAATVNCADNTGAKNLYIISVKGIKGRLNRLPSACVGDMVMATVKKGKPDLRKKVMPAVIIRQRKPWRRKDGVFMYFEDNAGVIVNPKGEMKGSAITGPVGKECADLWPRIASNANAIV

SEQ ID NO: 365048 - protein, 140 aa, Zea mays; identical to SEQ ID NO: 191935
  Clone ID: MRT4577_96092C.1.pep

SEQ ID NO: 365049 - protein, 140 aa, Zea mays; identical to SEQ ID NO: 191935
  Clone ID: MRT4577_96093C.1.pep

SEQ ID NO: 365050 - protein, 140 aa, Zea mays; identical to SEQ ID NO: 191935
  Clone ID: MRT4577_96094C.1.pep

SEQ ID NO: 365051 - protein, 140 aa, Zea mays; identical to SEQ ID NO: 191935
  Clone ID: MRT4577_96095C.1.pep

SEQ ID NO: 365052 - protein, 95 aa, Zea mays
  unsure (1)..(95): unsure at all Xaa locations
  Clone ID: MRT4577_96096C.1.pep
RRSREEDAPTCLRQQWLQQIVPALTHLAMAYPACYFQQLLAFNQLTGSHCDGCLQXTSEXLITLAVPNPWDTEFLQQQXLLPYRQFSLMNPGLPW

SEQ ID NO: 365053 - protein, 63 aa, Zea mays
  Clone ID: MRT4577_96097C.1.pep
GSIVSVWKCMTAQALAASSSRKVLLPGSTMEVGREHAVVLLHHAPSQPSYSKRVRAPFITYCP

SEQ ID NO: 365054 - protein, 140 aa, Zea mays; identical to SEQ ID NO: 191935
  Clone ID: MRT4577_96098C.1.pep

SEQ ID NO: 365055 - protein, 140 aa, Zea mays; identical to SEQ ID NO: 191935
  Clone ID: MRT4577_96099C.1.pep

SEQ ID NO: 365056 - protein, 55 aa, Zea mays
  Clone ID: MRT4577_9609C.1.pep
FCCLPEMKTVAVQRVCLPRGGIMLLCFRLLILPKRFGTSVLLNILIIVFCFRHLL

SEQ ID NO: 365057 - protein, 54 aa, Zea mays
  Clone ID: MRT4577_960C.1.pep
SCRRSACLGAWPAQEQAAGFGQILPRDSGRVGFGFRVRMELPLSPQDNGDRKQG

SEQ ID NO: 365058 - protein, 111 aa, Zea mays
  unsure (1)..(111): unsure at all Xaa locations
  Clone ID: MRT4577_96100C.1.pep
GASVIMGVSPGPLSVLXQLCITKFSYWLTPFTDHKTSPVMFGAMADLGKYKTTVKVQTIPLLKNPVEDIYYYVPMVGISIGSKRLDVPEAILAPRPDSTCGTELDSATTLA

SEQ ID NO: 365059 - protein, 140 aa, Zea mays; identical to SEQ ID NO: 191935
  Clone ID: MRT4577_96101C.1.pep

SEQ ID NO: 365060 - protein, 247 aa, Zea mays
  Clone ID: MRT4577_96102C.1.pep
PTTPRGFMIDGVSMPVPGKIVRYTIKENYPGKFLPELTFAQVEKLRASFRPITSLPVPEAPPLHYVGNSHSAPSAAFLPPSASSSDSTQPAAYVPHPSAHVLTPAAQLVPNEPYACPDSHLPAPTAQFAAPAYYVTATAHQYQAGYQTYGASPATYHYTQAPPLQLVYVQAQHPVPEHVTDPACPSDPSYDANGNDPYLFDAVKSQYLETTSGRAAAPHEVAAKNPQLVMHCVYAPGSECATGKTTQ

SEQ ID NO: 365061 - protein, 117 aa, Zea mays
  unsure (1)..(117): unsure at all Xaa locations
  Clone ID: MRT4577_96103C.1.pep
SEESREAWWEEELEHIYRIPWMILETILRPRFLIFQIXVINTRMLXGGKTSLLVDWNSWAGPGGPFMLLLVFGVNPKGMVHFPLVLRLVKSVNLLMDLAVFVPAILFTKLNVRNVFA

SEQ ID NO: 365062 - protein, 489 aa, Zea mays
  Clone ID: MRT4577_96104C.1.pep
MESFLSAVLGELISRSINLIINKLSKMNMEESLQRALLRAQVIIEEAMGRHITNQVILLQLGVLRDAMHRGYYALDAFRYQPHYGEDGNPAVRRFVRLSKVPCAKDLYFSGPTVQFQEQLQEALDKLSSMIVDMNELVMFLMSYPRLYRQPYNKHILLGNCMFGRQMEAQLVINFLLHTKPHSSEELYVLPVVGPHRVGKSTLIAHVCKDERVRDYFSEILWLHDSDFTDDELTLRQGCAMKRQLFLSNFKKGKRFLVVIELYGNLCEDAWNKFYRASRQSFLSGSKIIVTSCSDKIVKFGTAPALTLKHLSHEAYWYFFKTLTFGSIDPEMHPRLAQLAMEIARLQNLSINAAYVTSYLLRDNLNIHFWCKVLSFLRGYIQKHVSKFGTHPFDLINKNKPVQLGRMASPSEDFMICRQYHRSPHEEVPEIRFQDVFYGSIKKNGKFEVLVWRSQIPPYYSYVTACEIRERKNTGAKRKRCMKDRTTSS

SEQ ID NO: 365063 - protein, 59 aa, Zea mays
  Clone ID: MRT4577_96105C.1.pep
MFLLYLISGSRCRPNMHACGGNWSTHPTKCMCSPPHCHSTVINYQCVPTKSYYIYTHGY

SEQ ID NO: 365064 - protein, 259 aa, Zea mays
  unsure (1)..(259): unsure at all Xaa locations
  Clone ID: MRT4577_96106C.1.pep
IGYLEAGRAELQLQLLQKIQQQNLLSQLNPQHQSQLIQQLSQKSQEILQQQVLQHQFGGADAMGQLKHLQQTPLNHNTGSLPPQQLVRSHSALTESEEPSSSTVPSGSRISPINSFSRANQGTRNLPEMPATPHIEHLLQEIQSKTDNRIKNDIQGSKETVHAPNRHLASDQLDASSATSFCLDESPREGFSFPPVCLDNNVQVDPRENFLIAENVDTLMPDALLSRGXSGNGICNXFWTRDHRDVENELSSAAFSSQS

SEQ ID NO: 365065 - protein, 110 aa, Zea mays
  Clone ID: MRT4577_96107C.1.pep
KKKKKKKKIKKKKKKKKKKKDKPYKRYQTYIHIHATSYLLASWLPNSFHWPSVYNLGPVNPLPCPNLITFLPVQLLPAPILTHWPQLLVLPNGFSALMPIGTPLATGHSA

SEQ ID NO: 365066 - protein, 122 aa, Zea mays
  unsure (1)..(122): unsure at all Xaa locations
  Clone ID: MRT4577_96108C.1.pep
RAVVXAGAPGLAPRAVPARRPAAAAAGAIVPGYQPTPSQVCEAKVLVKERSGRARHGAPAQSEAVRSACRRADADAELPCPDGMEGVVVGVARGGAVPPPVRAGFVRGDDVISFDQDRITPL

SEQ ID NO: 365067 - protein, 107 aa, Zea mays
  Clone ID: MRT4577_96109C.1.pep
MGDRAYAPAVKPVPVRATNGTANGGGVGPPRPAPPSMVPGGRVPPPPMYRRRPAQSRPPARRPGRSARGWCCACCLWLTLVLVGLAFLGAIAAGVFYVVYRPRPPTL

SEQ ID NO: 365068 - protein, 40 aa, Zea mays
  Clone ID: MRT4577_9610C.1.pep
HSCVPDQEVLDALIQAVFNDRCAILNGGDTERLFQIASEL

SEQ ID NO: 365069 - protein, 108 aa, Zea mays
  unsure (1)..(108): unsure at all Xaa locations
  Clone ID: MRT4577_96110C.1.pep
KLAISKTSTERLVRRHGHSAVPVGYWESQTNSYPKGDFXLVGQXTFTGPXCRGDXVTIQVDGNLLATTDLSQYKDPGIWIEXILRVDYLVITGQGNLDRQGPTLWNKN

SEQ ID NO: 365070 - protein, 86 aa, Zea mays
  Clone ID: MRT4577_96111C.1.pep
RPWGVCGAAKFLWFLMMDVAQVCRSRGADGVRCHRFRRRRSRPGSRLGAPSAFPNPWAAFQELSGCHMGEERHGLAGVKDYLMHFG

SEQ ID NO: 365071 - protein, 140 aa, Zea mays
  unsure (1)..(140): unsure at all Xaa locations
  Clone ID: MRT4577_96112C.1.pep
MVVLARSSTARTAHARRNGLRESGNLRRIHQHAFNEHEHTSTLRRHMKRWRQLLYQLPPMFDQLRAPRASRNFALLEVQLQVGNLHDVNVKTGLPATTSTDRLEXLDDNLHILGVXFVCGDHRLQTTDXIITVHTESFDG

SEQ ID NO: 365072 - protein, 153 aa, Zea mays
  Clone ID: MRT4577_96113C.1.pep
IKKDCTQYHLNVAVPSPEKFSSDDVEEYPGEIHYSSCRIVLNLHRRALSLKVVNKADRPIQIGSHYHFIETNPYLVFDRKRAYGMRLNILAGTAVRFEPGDAKSVILVSIGGHKVIKGGNGIADGPIDSSSLNVVMQKVNANSFGHEDFQMQG

SEQ ID NO: 365073 - protein, 394 aa, Zea mays
  Clone ID: MRT4577_96114C.1.pep
MLATASPHLQAAARRLFLAVPVNQGCSSIRLPRRCFGRYASVRAASVTAPPAKEGADDLGFLEMSSGTRRRYYMLGGKGGVGKTSCAASLAVRFANNGHPTLVVSTDPAHSLSDSFAQDLSGGTLVQVEGPDSPLFALEINPEKAREEFRTVSQKNGGTGVKDFMDSMGLGVLVEQLGELKLGELLDTPPPGLDEAIAISKVMQFLEAQEYSMFSRIVFDTAPTGHTLRLLSLPDFLDASIGKILKLRSKIASATSAIKSVFGQEVQQEDAANKLEQLRERMVKVRELFRDTESTEFIIVTIPTVMAISESSRLHSSLQKESVPVRRLIVNQVLPPSTSDCKFCSIKRKDQTRALDMIRTDPELKGLNIIQAPLVDMEIRGVPALNFLGDILWK

SEQ ID NO: 365074 - protein, 77 aa, Zea mays
  Clone ID: MRT4577_96115C.1.pep
KRHMTIQACGIAVVLDVEVVIVDNISQIILSMGERKCGDGEREQQENSGREPGEQRRRDHPQTDRSHIRSTSVRKRR

SEQ ID NO: 365075 - protein, 106 aa, Zea mays
  Clone ID: MRT4577_96116C.1.pep
MPSSTPSTVAEEAPTAPAPAIEVDAGGASSSIPPPTLEETEVIFGRRLRSDAEPEVAPIPLPQVLSRAHQALHETEATIQREWEALEAEHQLLEVCFVAEGCVMCL

SEQ ID NO: 365076 - protein, 61 aa, Zea mays
  unsure (1)..(61): unsure at all Xaa locations
  Clone ID: MRT4577_96117C.1.pep
FQFSXXHRRPGSVAVQRHTHAHTHKHTHTHTDTAPNAEESRARTTAERNAPAQRTTTDPKG

SEQ ID NO: 365077 - protein, 82 aa, Zea mays
  unsure (1)..(82): unsure at all Xaa locations
  Clone ID: MRT4577_96118C.1.pep
EDKKFLESNLAPMQKEGTFSGQGKIMGWNPPINNGTGPSKVLTIGGLNNKSTMVSPASIXEDRPPVTKVISKGRLNLRWLKA

SEQ ID NO: 365078 - protein, 76 aa, Zea mays
  Clone ID: MRT4577_96119C.1.pep
EKTTKGLFLTGCGHHHKALSPTDIHGFDEVLNNKPIPVLSAHVVILRVGTRGFPGLHKQKPFRWDWFLEINKLVTL

SEQ ID NO: 365079 - protein, 108 aa, Zea mays
  Clone ID: MRT4577_9611C.1.pep
PSGCRTTDTVSDISLAHLPIRRISLPLPVASSHFHPLCVSLISSPSRKTPLPSEDFDFSWLAHRLRLFGEIQNFFLSLSPSFSIRSTPGSRSVRRSYPKSSTRDPLVF

SEQ ID NO: 365080 - protein, 94 aa, Zea mays
  Clone ID: MRT4577_96120C.1.pep
GPPKKTPVFKSNPEKAPPPKDFMAGSFSSEGGPFLKGGVPRLIKNPGFVFRPKGFSPQWAMEPGFPGLKEKKKLWAGWQPGPPPPDDRCLSPFL

SEQ ID NO: 365081 - protein, 62 aa, Zea mays
  Clone ID: MRT4577_96121C.1.pep
RIMTLTALHNHFKPECSDPHATVTLSLLQALAHIAEHNQDILTTHLHQIATNSTTKPYDITT

SEQ ID NO: 365082 - protein, 705 aa, Zea mays
  Clone ID: MRT4577_96122C.1.pep
CLAKAVEGAGPGPGAIGMFGKLGPRICKLLGGQGVQAKAGLLGIMGSLAQVGAISSQNMQQTLQSIRDCLENSDWATRKAAADTLCVFATHSVHLIGDGTAPTIAALEACRFDKVRPVRDSMIDAVQLWKKLTGEDANDGRNKDLADGEGKLDSRRSIQRGGKSESFDDSSPDSPSNNVKGSSIAEKAAFLLKKRPTLTDRELNPEFFQKLETRKTDDLAVEVVVPHKTLQSHLRGEDETEEDDDPVGPADSNGSAEDEANLTQMRASFNFQNIRDKWAGQRGNRNKITKARTTDVEDRGEPSTKDSTAAAMNISGEGPFINNKTNWLAIQRQLSHLERQQTSLMNMLQDFMGGSHDSMVTLENRVRGLERVVEEMAREISLSSGRRGGGPALGFDSSPGRSSKHNGFHEYSNSKYGRSGDGRMGFAERYFSADAMASGTKNQSWRPDSEPWDSYAYSGSRSGMNVRRGLDSVSSDNRMARNERSNDQVGPRRGWDKGQGPFRFGEGPSARSAWRASKDEATLEAIRVAGEDNGNSRAAARVAIPELDGEALNDDNQGDERGPLWEAWTRAMDAVHLEDMDSAYAELLSTGDAELLVKLMEQTGPVVDQLSNEVANEVLHAVGQFLMEESLYDVALNWLQQLTDLVMENGSDYLGIPLDAKRDVLLGLHEATAIDLPDDWEGATPLQIMKQLASSWHIDLQQLIN

SEQ ID NO: 365083 - protein, 49 aa, Zea mays
  Clone ID: MRT4577_96123C.1.pep
RIPNFAPRLLVSRSRMSASPVCQIVQVCASTSRRKERCRHYRTGGLARE

SEQ ID NO: 365084 - protein, 58 aa, Zea mays
  unsure (1)..(58): unsure at all Xaa locations
  Clone ID: MRT4577_96124C.1.pep
FTLTPHQFIVNMYQSVPTISITGFMAFYEPTPHGPLWKLGXCFIGAHHTVFHFGQTAI

SEQ ID NO: 365085 - protein, 34 aa, Zea mays
  Clone ID: MRT4577_96125C.1.pep
HQFIFAMPRPDPYRTPAAPPPVSTSPVHLAQEVG

SEQ ID NO: 365086 - protein, 492 aa, Zea mays
  unsure (1)..(492): unsure at all Xaa locations
  Clone ID: MRT4577_96126C.1.pep
RNLQPGGRGPLDQRHIRGEESSEDPNDADGEAVTAEQRFLGSPAPGPGCWHLNSSMRSKKIFGLSISLVLINLASILERADENLLPAVYKEVXLALHYDRPAVLAIGTAFWALSTGAVGVSQYFGQVAFWRAINGVGLAIVIPALQSFIADSYKDGTRGAGFGLLSLIGSVGGIGGSVLATIVAGGDYYGFPGWRLAFISVAFVSFLIGLLVYLYTVDPRKLSPSHFGGGEDNERLHLVSNGILPPHSIWKDSWIAAKSVMKVRTFQIIVLQGIVGSLPWAAVVFFTMWFELIGFDNSSSAALNSFFAIGCASGSFLGGVIADVLSRYYPDSARVMCAQFSAFMGIPFSWILLTVIPQSVDYWSAYAVTLFLMGITISWCATCANNPMFAEVVPPRHRTMIYAFDRAFEGSFGSLAAPAVGLVTEKIYGYNAKAVDLSHGSVDGAYALSRGLLTMMIVPFALCLMFYTPLYTVFKRDRENARLASIKEQELT

SEQ ID NO: 365087 - protein, 107 aa, Zea mays
  Clone ID: MRT4577_96127C.1.pep
MGSMGVEADDDGSIVKASLQRCEPSGDAAYGELRALLARLHDPATRRDARLILTALHRHQQHSSSRAGVSAGRGEAGVPAVRGGARRGHQQAGVGARRAAVPASCRI

SEQ ID NO: 365088 - protein, 567 aa, Zea mays
  Clone ID: MRT4577_96128C.1.pep
LGTSRAGRDAKSNHRSNHAEVFFPTRRSPVLAPRHLVVGHWLTASCNLQPGGRGPLDQRHIRGEESSEDPNDADGEAVTAEQRLLGSPAPGPGCWHLNSSMRSKKIFGLSISLVLINLASILERADENLLPAVYKEVSAAFDAGPTDLGYLTFLMNFLKSIASPLAGVLALHYDRPAVLAIGTAFWALSTGAVGVSQYFGQVAFWRAINGVGLAIVIPALQSFIADSYKDGTRGAGFGLLSLIGSVGGIGGSVLATIVAGGDYYGFPGWRLAFISVAFVSFLIGLLVYLYTVDPRKLSPSHFGGGEDNERLHLVSNGILPPHSIWKDSWIAARSVMKVRTFQIIVLQGIVGSLPWAAVVFFTMWFELIGFDNSSSAALNSFFAIGCASGSFLGGVIADVLSRYYPDSARVMCAQFSAFMGIPFSWILLTVIPQSVDYWSAYAVTLFLMGITISWCATCANNPMFAEVVPPKHRTMIYAFDRAFEGSFGSLAAPAVGLVTEKIYGYNAKAVDLSHGSVDGAYALSRGLLTMMIVPFALCLMFYTPLYTVFKRDRENARLASIKEQELT

SEQ ID NO: 365089 - protein, 36 aa, Zea mays
  Clone ID: MRT4577_96129C.1.pep
LFFLFYDFLYFIFPASRLKLGLLGLIKVLACLLTLN

SEQ ID NO: 365090 - protein, 103 aa, Zea mays
  Clone ID: MRT4577_9612C.1.pep
NQFRQTTFQRGRTTPRQNLERWKKKQVFSAFGAPTTKSPGLLLGKHDHSFFGTGQTLEQKGGGSLFCSTRKHSHPFPFLIRLQWCPELCFGVNRGITELFLEP

SEQ ID NO: 365091 - protein, 57 aa, Zea mays
  unsure (1)..(57): unsure at all Xaa locations
  Clone ID: MRT4577_96130C.1.pep
GALLASGSANCPVKLWDVASSXRSPKAXDAKGSSANRLSLLKALPTKSFPVYSVRFY

SEQ ID NO: 365092 - protein, 73 aa, Zea mays
  Clone ID: MRT4577_96131C.1.pep
NACTTNKPQAHTPPGRKHTYMFDCSTTLLQINSPKTITFMYEVKILIKQLALSNDHNNPLKSKSPKIHTLSKA

SEQ ID NO: 365093 - protein, 254 aa, Zea mays
  unsure (1)..(254): unsure at all Xaa locations
  Clone ID: MRT4577_96132C.1.pep
MVPIPKADELKDLFSLKGKVVVVTGASGPTGIGIEAARGCAEFGADLAITYNSRAEGAEKNAKELNEKYGVKVKAYKCQVGVYSQCEQLVQDVIKDFGKVDVFIANAGKTADNGILDATVEQWNEVIETDLTGTFNCARAVGLHFRERKTGSLVITASMSGHIANFPQEQTSYNVAKAGCIHMARSLANEWRDFARVNSISPGYIDTGLSDFVPEDIQKLWXSMIPMGRDGXGKKLNGAYVYFASDASSYCTGS

SEQ ID NO: 365094 - protein, 119 aa, Zea mays
  Clone ID: MRT4577_96133C.1.pep
MMKRMVILRRCHPPPPLSVLFGRCRSAGVRYGECRRNHAASMGGHAVDGCREFLAEGEEGTAAALRCAACGCHRSFHRRMVQRCCPCDGADAADVALAAAAARRDDCSPESSASSTTPS

SEQ ID NO: 365095 - protein, 159 aa, Zea mays
  unsure (1)..(159): unsure at all Xaa locations
  Clone ID: MRT4577_96134C.1.pep
ASNPLALGNVVGTQPPTQXPQFLPTLSPLAMVTPAAYVQQQQLLSXSPLPVGNAPTYLQPQLLPQIVPALXTLAVATPVASLQQLVPFNXLTLSNFGGYLQQPPQLLNPLVVANPLVPPFLQQQQLVPYTQFSLMNPVLXRPPPPLGGAFFRLHMRCTR

SEQ ID NO: 365096 - protein, 82 aa, Zea mays
  Clone ID: MRT4577_96135C.1.pep
LYLCLWEWKCWLIYLLLKETPLCHLTPPVIAANRMLCWLLNEANYCGRVGCKSGGSSIGYTMCGVCNKVLVSTCTYGGSCEL

SEQ ID NO: 365097 - protein, 66 aa, Zea mays
  Clone ID: MRT4577_96136C.1.pep
LAQGRSCIPCHPRTPLETLSHVSFSIHILSLELPVKYFSGHGKCWFSETPESFYARDDPSHLSSVT

SEQ ID NO: 365098 - protein, 48 aa, Zea mays
  unsure (1)..(48): unsure at all Xaa locations
  Clone ID: MRT4577_96137C.1.pep
KAPQHQTQLQHRGGAVIVXGAQAPGMGRGNPSRPPREFRPTRPKTLGR

SEQ ID NO: 365099 - protein, 84 aa, Zea mays
  Clone ID: MRT4577_96138C.1.pep
TEIKRIRNNLCHSLSGEQCSCPVVPFKFLNYSAHCRHQFADFFFDFLDVGKSMIHYLERDWLPARPSLSVSSHSGPWRHAKEVQ

SEQ ID NO: 365100 - protein, 79 aa, Zea mays
  Clone ID: MRT4577_96139C.1.pep
HPSLSGCAQGFGKSSLICLTAVEFSSGTPNGHKACLSSCSPLLNPFSQRFTPTFMSVFVVPLRLLFWTQPHFWCTLFGY

SEQ ID NO: 365101 - protein, 404 aa, Zea mays
  Clone ID: MRT4577_9613C.1.pep
MAQRMLLRASGPRRVYYGFTRSFSTVLDTPVDPGTQQIRLATPRTTVFENALNAKAPRTNWTKEEISEIYNTSLIDLTYASALVHRRFHDPAAIQMCTLFNIKTGGCSEDCSYCAQSSRYDTGLKATKLSSVESVLEAARIAKENGSSRFCMGAAWRDMRGRKTNLKNIKEMIKGVRGMGMEACVTLGMVDAAQAKELKDAGLTAYNHNVDTSREHYPSVITTRTYDERLNTIKNVQEAGIHVCTGGILGLGEKARDHVGLIHTVATLPAHPESFPVNALVPIKGTPLGETQAISFDAILRTIATARLVLPTTIIRLAAGRHTMREEKQILCFQAGANAVFTGEKMLTTACNGWEEDKAMFQRWGLRPMKMEETIGEKRKVPGQEEAEAVVAAAEAEATVQALA

SEQ ID NO: 365102 - protein, 43 aa, Zea mays
  unsure (1)..(43): unsure at all Xaa locations
  Clone ID: MRT4577_96140C.1.pep
LFLDSMGGGAWPFLSGGXMWGVNSGNERXLXLLTXYAEPSLRD

SEQ ID NO: 365103 - protein, 87 aa, Zea mays
  Clone ID: MRT4577_96141C.1.pep
VDRANMPGHAFVDEHVMGHIEGQQLVADGMAGHDGADCAQSTGVHEVKTKDMANMMKDCEEPRKFAPTGLWLGPTKYMVMQGEPGAR

SEQ ID NO: 365104 - protein, 101 aa, Zea mays
  Clone ID: MRT4577_96142C.1.pep
GANKIWREFKYRFFFRGKLPPTTAMAGVFFFFFWGGYGEMGIYIPGGGHPLLHRSTGRTGRTTTLIFGVRTGEPGCVTWQAGGPDQTRPPGLGTTGRPGRS

SEQ ID NO: 365105 - protein, 340 aa, Zea mays
  Clone ID: MRT4577_96143C.1.pep
MQRKLAQPFEAKHQVKIKTLRWVVEEESEGGRRGCLAEPRGEGERHLQGHNLGETATMSVPHGRRQDLELAIDDFDEELIDPELRYSFQRNSKSIQQTLALLTYRNLFGIAIRLPVMLLRDRRACFSDRRGEGRLTVDGAHRGRKEWRAFSGSLLRSNGVEVHVPLHGADAAQLARISWNKVQHLCAAWCFMNQYFLLIACLQLWSLITPVNPASTWGPLIFIFAVSATKEAWDDYNRHNLTYALMTVVVQVTSLKGVYYYFYQIFRNRAEARALEQSRRRLGDGSVGMLQSLTIAALSGCVNVLLTNPIWVVVTRMQVITHPGLTVSMARAIIHRSWDQ

SEQ ID NO: 365106 - protein, 65 aa, Zea mays
  Clone ID: MRT4577_96144C.1.pep
MDHWKRGRGDSAPNWLLTRIYFFPLHFKLKKGPENKETTGKGAWTTWVFHGATFLKSMTCKASTQ

SEQ ID NO: 365107 - protein, 42 aa, Zea mays
  Clone ID: MRT4577_96145C.1.pep
LQDQPTKPGRRKKVPYRTAHTPNRSRRRGLRNSRGGGGCKAG

SEQ ID NO: 365108 - protein, 158 aa, Zea mays
  unsure (1)..(158): unsure at all Xaa locations
  Clone ID: MRT4577_96146C.1.pep
MWLGPHMAQRLTRSHAGLARSCRRHVIHRARTRRTPPPPPPAPLLALPAPPPPTRXRPTSPPPLSRPPAXPAPPRRPPPPPPPPPPAPPPPAPPPRPAPPDPPTPPPPPTPPPPPPRPPPPLYHPPPRRPVPARPAQPPPPHTPLTPPPPPPIPTPPP

SEQ ID NO: 365109 - protein, 236 aa, Zea mays
  Clone ID: MRT4577_96147C.1.pep
MAGGGDELKLLGTFASPFVMRAKLALSFKGLSFEDVEEDLANKSQLLLESNPAEKKVPVLIHNGKPVCDSRVIVQYIDEAFSGNGAPLLPADPYERAVARFWAAYVDDKLLASWLQAARGKTEEEKAEGLKQTLVAVETMEAAFKTCSKGKPFFGGDRVGYLDVTLGGLVVWVHAGAALYGMRLFDDAKSPFLAAWVERFGALDAAKAVLPAVERVVEFAKMRQAQAAAPATAGGN

SEQ ID NO: 365110 - protein, 44 aa, Zea mays
  Clone ID: MRT4577_96148C.1.pep
RGGGGFLKNFFGFFFFFFFFFFFFFFFFFFFFLTPQTQTNLNSF

SEQ ID NO: 365111 - protein, 115 aa, Zea mays
  unsure (1)..(115): unsure at all Xaa locations
  Clone ID: MRT4577_96149C.1.pep
TTHARVTQTRNSPPRSFTSARARPXNGCQCKPFCPDCKLLPGRAPPAKTRFGGRSETFCAFPERPRGRRTKPVPVKNSLPEGVKNPALGGALNYTFTLFTTRGKGSATFLKRTPV

SEQ ID NO: 365112 - protein, 60 aa, Zea mays
  Clone ID: MRT4577_9614C.1.pep
ESLVHLPQSPRRAKSKIIKVSVVTPLVSVARSNGSPLDPNSVGRAGYTGSVLCRACELSL

SEQ ID NO: 365113 - protein, 80 aa, Zea mays
  Clone ID: MRT4577_96150C.1.pep
TRDPDSSGARGSSDPRPQRSGPPSVRPNATERENDSRSSGGVCMLWVLKLRTFRSGGAAEAAGGGGTRERDFAGRSLVRR

SEQ ID NO: 365114 - protein, 51 aa, Zea mays
  unsure (1)..(51): unsure at all Xaa locations
  Clone ID: MRT4577_96151C.1.pep
SSSSLPCFSCGEKDPSASSNSLSVCWGIGSGEXRLSLRPHAFLPPVYYQXL

SEQ ID NO: 365115 - protein, 26 aa, Zea mays
  Clone ID: MRT4577_96152C.1.pep
RMIVTPKSAMPANNFPVVTCRSGITD

SEQ ID NO: 365116 - protein, 38 aa, Zea mays
  unsure (1)..(38): unsure at all Xaa locations
  Clone ID: MRT4577_96153C.1.pep
TTLCCNSKTSPENGTLYXGMYIIYVMAQRLILKMAQTI

SEQ ID NO: 365117 - protein, 57 aa, Zea mays
  Clone ID: MRT4577_96154C.1.pep
IWRAVYVLQLLSACCLECRDVYCFENGLGHGICEGFMFIVVSGFFRKKNVVSCTVNI

SEQ ID NO: 365118 - protein, 71 aa, Zea mays
  Clone ID: MRT4577_96155C.1.pep
SSIKKLKLVPNEKVLWFFHFRPGNHCNIFLSLPTSAENVFPKCIFCQLHYVCEHKYMTCPLSKTNYSRLTL

SEQ ID NO: 365119 - protein, 105 aa, Zea mays
  unsure (1)..(105): unsure at all Xaa locations
  Clone ID: MRT4577_96156C.1.pep
ATAVLFLALNLLLLTEANTXESCPTPTPPVEPPPPPPAATPPPWRSGTCPLNALKFGVCAPMPTLSKRKDRKVPDEPLXTLIKCLADLEARRCLCTVIKANLLGV

SEQ ID NO: 365120 - protein, 189 aa, Zea mays
  Clone ID: MRT4577_96157C.1.pep
MENKSASSSCVISPAATSTMSSAGGESSWAVHIANFLASMPQDDIGTTDDPQAAVSGGGGSFSSSFGSFGDASSFITSQLMCGGDDDESLQDTACSSAAGQKMATMESFGLKQMAAMDGAKESNMPHHLQLMAKYVEAVGSKQQVTGVGDQQAINSSSNSEKALLYESNELRKRGLCLVPISMLINYLG

SEQ ID NO: 365121 - protein, 86 aa, Zea mays
  unsure (1)..(86): unsure at all Xaa locations
  Clone ID: MRT4577_96158C.1.pep
MSPFHTLYGRSCRTPLHWDQPESLSVVHDVFHVSHLKKCLXVPEDQLPMEGLQVQEDVPLFRQPPTPTSSPSSITTSHPSLSLSTP

SEQ ID NO: 365122 - protein, 109 aa, Zea mays
  Clone ID: MRT4577_96159C.1.pep
MHRSDVSLLLFFFLLALSLGEYDCRDEIQRIKAGNPNISHREAFSAAAKNWAHFPHIHFGLMPDHQGLKTTSLLPQDHQRKDGLLKEGLYAAAAAAAAHAAANMGIAPY

SEQ ID NO: 365123 - protein, 107 aa, Zea mays
  unsure (1)..(107): unsure at all Xaa locations
  Clone ID: MRT4577_9615C.1.pep
MQQKMEIQHKVLCELRPYQKQALHWMTQLEKGNCNDKAETMLHQCWEAYCLADKXDIYIALELXASQIRYLISVLCKXRELVVYLNSFTGDGGIRFRSTIKTVRGGV

SEQ ID NO: 365124 - protein, 59 aa, Zea mays
  Clone ID: MRT4577_96160C.1.pep
KPNPKLGYFLPQRGGPNTRPKIWGAFLFHYNNTNWPIFPRGRGKKTPMTHQAVKFTPFF

SEQ ID NO: 365125 - protein, 77 aa, Zea mays
  unsure (1)..(77): unsure at all Xaa locations
  Clone ID: MRT4577_96161C.1.pep
MTEARLATAHMNMVPNRREAQVRQMRLDITMLLHDKQEDTERIMAVHVIMKHNFMADNEIIELLXELIDTRLSIIAK

SEQ ID NO: 365126 - protein, 76 aa, Zea mays
  Clone ID: MRT4577_96162C.1.pep
SEFGSRASLPASVSKRVRQPHGPGRGTQSLEDKHKCKKNHPIHHCAAPLLRPIRTHRRQHRNLRARSSAVILCEHP

SEQ ID NO: 365127 - protein, 84 aa, Zea mays
  Clone ID: MRT4577_96163C.1.pep
KNKGSAGLKDSITYLLGASRLNSSGLGSPNVQFCEPPFCNPGIGFNPAVPLLNRLGENPGFASLGLFEEAPPFLAIEKFPRPNG

SEQ ID NO: 365128 - protein, 44 aa, Zea mays
  unsure (1)..(44): unsure at all Xaa locations
  Clone ID: MRT4577_96164C.1.pep
LEHDRRKRGNSFVIPDTALTPSMQMLHLNGLQYIQVMXAYSIFG

SEQ ID NO: 365129 - protein, 93 aa, Zea mays
  Clone ID: MRT4577_96165C.1.pep
SARDRLNLFLETWRAYMQKSLSLTTMLAPKRLPQWLSVRKVHAGSQSSDGPGHLDCHSNDLEGQLLTSLSPVQTALLPEANALADHTTELAKQ

SEQ ID NO: 365130 - protein, 224 aa, Zea mays
  unsure (1)..(224): unsure at all Xaa locations
  Clone ID: MRT4577_96166C.1.pep
MSALRILVPVKRVIDYAVKPRVNKSQTGVEKAGVKHSMNPFDELSVEESVRIREKKRAPGGVEDICVISAGPPKAQDVLRTAMAMGADRAIHVELKEGEEIEPLTVAKLLQKAVEQQKSNLVVLGKQSIDDDANQTGQMLAGLLGWPQATQASKVEFGANXRLLLQRRWDGGVKTVRAKLPMIITTDLRLNEPRYASLPNIMKAKKKICKDKLEGFWIGWSDRL

SEQ ID NO: 365131 - protein, 68 aa, Zea mays
  Clone ID: MRT4577_96167C.1.pep
LSRSLVLALLGFLSPGWYPFLFWLLLICSSTSLVLFLRAPMAGAVMSRLVSGSAALLLFLAFFSRCVR

SEQ ID NO: 365132 - protein, 151 aa, Zea mays
  Clone ID: MRT4577_96168C.1.pep
MYMQLATGTGIAPFRSFLWKMFLEEHEDYKFTGLAWLFLGVPTSDSLLYKEELEKMKEMAPDNFRLDFAVSREQTNAAGEKMYIQTRMAEYREELWELLKKDNTYVYMCGLKGMEKGIDDIMLDLAAKDGIDWMQYKKQLKKGEQWNVEVY

SEQ ID NO: 365133 - protein, 48 aa, Zea mays
  Clone ID: MRT4577_96169C.1.pep
SPKWLVPTIADGSASRGERQAPCLIRGWVGAPAGASCAFIRSRRVRAR

SEQ ID NO: 365134 - protein, 177 aa, Zea mays
  unsure (1)..(177): unsure at all Xaa locations
  Clone ID: MRT4577_9616C.1.pep
PPAAVAQPPSQGETERSXTETAGAPGLDGEDTAHTLTLRXPGSAPXAAAAXLGRAAAPAPARPDPDRKRATXDADPGRAXPRAAXADXAPAPKXXEGGXPPGRAXRKNAXADAAGXSKAAKXXKGAXDGAPXXRKADXQAXAGXDQXRRAPQDKXXXHXTXRKXADDERKXADAXNG

SEQ ID NO: 365135 - protein, 123 aa, Zea mays
  Clone ID: MRT4577_96170C.1.pep
CIGSSLRWCGPPRARCRSAGAPPPAPRSYRCCCSYRRVPGTRFRFNRRRLSRPVCDLRQVAVLMRVTPPVDTRGCYCNAGSSLFFLSQAPGRHSLPGEDLATPPARAVLARLVRAAIKQGDRL

SEQ ID NO: 365136 - protein, 127 aa, Zea mays
  Clone ID: MRT4577_96171C.1.pep
MPLTLRARRLVFRSLVLLPPRAVTMPSWWKRSKSAFHRSPVTPFSSASTPSSPARASTSCVQPGGRAGRRDLLAPPKLTRQRKLRHVDDLYVALGDLRVDVSDRSSSSSPPQQRRLATASEAIEIPV

SEQ ID NO: 365137 - protein, 92 aa, Zea mays
  unsure (1)..(92): unsure at all Xaa locations
  Clone ID: MRT4577_96172C.1.pep
MLFNSPKSAKRIGVQFLSVASADCFGRDVSPTHFASLLKECRSVNTVRQIHQKIIACGLLSXPSSLLSVPLAPLPSHSYVSPKSLGTGVVAS

SEQ ID NO: 365138 - protein, 57 aa, Zea mays
  Clone ID: MRT4577_96173C.1.pep
CTQLKRKQAHPFLGVKPQKASIWYTKHPDFLGPPSEYNHQTHARALRFRLINHQKVH

SEQ ID NO: 365139 - protein, 165 aa, Zea mays
  unsure (1)..(165): unsure at all Xaa locations
  Clone ID: MRT4577_96174C.1.pep
SPYXHSYYNSLSFILQLHYFLKPYTLPNLISFXHIPLSPSFIISNIPSPITLPNIYSSLISNLLLLISSHLSSFIIIVYYSTFYLLTLYHLPIPSPFSFFPSFLTTITFFPLQTLNHCLLYISYLILYVTSTPKNFNRHHISHIFSSPFIYFFFYLFNLTIHISL

SEQ ID NO: 365140 - protein, 56 aa, Zea mays
  Clone ID: MRT4577_96175C.1.pep
PPSSGREIRRVCPKTGMYSLCAPRKTVQKKDFFDAVNKVLKGSPKFSAPPQYMGFP

SEQ ID NO: 365141 - protein, 68 aa, Zea mays
  unsure (1)..(68): unsure at all Xaa locations
  Clone ID: MRT4577_96176C.1.pep
MADGKNTRISNGKKGGKKKTEHPISKKDWNDIKALXVFNVRNIRTTHRCTTQGTRIDYEGVNHRDFDD

SEQ ID NO: 365142 - protein, 73 aa, Zea mays
  unsure (1)..(73): unsure at all Xaa locations
  Clone ID: MRT4577_96177C.1.pep
FPMKKKMSPLSCXTLIVFRXILLISSLAVSYFSLYIPSMHRCLALFFSQDMLTKISYSVTQYSMLRRKQSLAK

SEQ ID NO: 365143 - protein, 130 aa, Zea mays
  Clone ID: MRT4577_96178C.1.pep
KPPFSPYITPKQIKGEKKKTPTPRPPPPKGQTPAHGPRGLGDPTKGPNMGEKGANRVTGGNCKNPTKPNNKKQKRKKGETKGAQKKKKKRGGATGPLPPKKPGNPAGQKNQKNRQEAGRGDWGIGPFSEK

SEQ ID NO: 365144 - protein, 79 aa, Zea mays
  unsure (1)..(79): unsure at all Xaa locations
  Clone ID: MRT4577_96179C.1.pep
VETMXEKKGRGLPAYLRRWKKDTRGAPCHELYGSYSKPVLFFQNSAVKELTVSDLVRSTNNFDQANIIGGGGFGLGYKA

SEQ ID NO: 365145 - protein, 145 aa, Zea mays
  unsure (1)..(145): unsure at all Xaa locations
  Clone ID: MRT4577_9617C.1.pep
MSKERNHINVVNVGHPNSNKSTTTGHLIYKLAGIHNRXITQXEKDXADEMNNGAFKYVCVVXRDLADEERXITIDIALDKXRPPSITETCIEATGHHDFIKKMMTGTSHADCAVLIIVLHHCPCPETGISKDAQTREHALLALTL

SEQ ID NO: 365146 - protein, 90 aa, Zea mays
  Clone ID: MRT4577_96180C.1.pep
GTGIAELIALEISQQTNAPIAECCTKVCLEESMDVFNRLYQLKELSTVENAGLLSKAEELCLTLSSLEKLGLLSKAEDLGLLHLVETAAG

SEQ ID NO: 365147 - protein, 172 aa, Zea mays
  Clone ID: MRT4577_96181C.1.pep
MSARGVRPGVLHHKENNPADAQPGKRQRTAAGAGRQPLAAAPPPQEEPMVFSGREDVDALLNEKMKGKNKMDYKGKSEQMMEYIKKLRACTKWLLEREDANLVEIERITGQLDATHKQHSEIVAVLKNTIEETKSICEELQKQCASLQEALKTVEAKMDALRSLGDEREARM

SEQ ID NO: 365148 - protein, 43 aa, Zea mays
  Clone ID: MRT4577_96182C.1.pep
MCLEEVEVESLIQVALLCTQGSPLDRPKMSEVVRMLEGDGPGR

SEQ ID NO: 365149 - protein, 80 aa, Zea mays
  Clone ID: MRT4577_96183C.1.pep
MHDQTIMKWILIHIGQAGIQVENPCCAVNCHDPGMHAEGDIAGEKTIDTGGEAFHTLFSDTVAGKTVLGVEYDDQCTDCH

SEQ ID NO: 365150 - protein, 45 aa, Zea mays
  Clone ID: MRT4577_96184C.1.pep
ARDYMRCACLWCQTANTCMASSTDFKDRAIGQRLDGQGFPVECEL

SEQ ID NO: 365151 - protein, 72 aa, Zea mays
  unsure (1)..(72): unsure at all Xaa locations
  Clone ID: MRT4577_96185C.1.pep
MDAPAAEAQGCGGSQIVLIHGACLGSWSWFTVAPALSAAGYRKDTPDLSASGVDPXRSLPEVPTFREYTGPL

SEQ ID NO: 365152 - protein, 69 aa, Zea mays
  Clone ID: MRT4577_96186C.1.pep
ILCPSSRSSAAGWTPSGVTVGAHLVAPPRGSEITAQLWLVVGANLWVLAAVEVTSGVAVVLVSLCAAPQ

SEQ ID NO: 365153 - protein, 107 aa, Zea mays
  unsure (1)..(107): unsure at all Xaa locations
  Clone ID: MRT4577_96187C.1.pep
QNQDSPTIHRYKCLKTGWSRPKVIDSRVGRKSKGCTLMPKIVYGPDKSTSDYLPNKIINFVIHNXSELETLMMHNTTYCXTFAHNVSTNTHKEILGAVAATGSNSCE

SEQ ID NO: 365154 - protein, 63 aa, Zea mays
  Clone ID: MRT4577_96188C.1.pep
ISNQAIIVLFLTMLLSCMSEPDVCTYAYGGTLNCPIRCAGSRVRGLVGGTRGDCSCAYAWITW

SEQ ID NO: 365155 - protein, 76 aa, Zea mays
  Clone ID: MRT4577_96189C.1.pep
RQRTRGKKKKKNKKKKKRKKKKKKKKKKKKKKKKKKKKKKKKKKKKKKKKKKKKKKGGPFLKFQSLITLNFKLKVF

SEQ ID NO: 365156 - protein, 76 aa, Zea mays
  Clone ID: MRT4577_9618C.1.pep
SATPIVTFLSTLWEKIIPKKKKKKKKKKKKKKKKKKKKKKKKKKKKREREKKKKKKKKREKKKKKKIKEKKRGGGV

SEQ ID NO: 365157 - protein, 121 aa, Zea mays
  unsure (1)..(121): unsure at all Xaa locations
  Clone ID: MRT4577_96190C.1.pep
LTSSPAEGHPRNRRSSSRLNPSNSAKFRQTQPVGPRNTLPNQPGRSTQAASRGDGPGVERPCGAGRGGAGPCIGVDTARRYVHILAGHRLSXIPAVLGRAGALALEPAHTDPHTGRHLLRA

SEQ ID NO: 365158 - protein, 74 aa, Zea mays
  Clone ID: MRT4577_96191C.1.pep
KNPKNLTGVISRKVYKKINFGPLQGLNDHKPGPILKYIGSGPVNKKRGGTPGGSRGSFLEWACEHEKPHSKWGG

SEQ ID NO: 365159 - protein, 104 aa, Zea mays
  Clone ID: MRT4577_96192C.1.pep
KITLFAAFCELIARSSDYRNPQLCTKKKNIALETYRASQWNVKLFLVSFIARVPHVAKQQGSAHFVTIKPDLWAKFLLGIVKKLVITGLASWLAESFVLLLLLV

SEQ ID NO: 365160 - protein, 584 aa, Zea mays
  Clone ID: MRT4577_96193C.1.pep
MSSPSPSPPAPAEEEGRAPTKYVLITGGVVSGLGKGVTASSIGVVLKACGLRVTCIKIDPYLNTDAGTMSPFEHGEVFVLDDGGEVDLDLGNYERFIDVTLTRDNNITTGKIYQSVIEKERRGDYLGKTVQVIPHVTDEIKQWIQSVSSVPVDGQTRPADVCVIELGGTVGDIESMPFIEALRQLSFSLGKENFCLIHVSLVPVLGVVGEQKTKPTQHSVRELRALGLTPDLLACRSAQPLIGSVKEKLSQFCHVPVENILNIHDVPNLWHVPLILRNQKAHEAIIKQLNLARSAGPPELRDWTDMAESYDNLNNSVKVALVGKYTNLTDSYLSVVKALLHASVACSLKPSIQWIAASDLEDATAISAPDAHAEAWETLKGSSCILIPGGFGDRGISGMILAAKYARENRVPYLGICLGMQISVIEISRHVLGLEDADSEEFNKDTPNHVVMYMPEVSKTHMGNTMRLGCRRTFFSKPDCLTSKLYGSPPHVDERHRHRYEVNPSFVPMLESAGLHFVGCDESRNRMEIVELQDHPFYVGVQFHPEFKSRPRRPSPPFTGLIMAATKQLGAISNSSNGFVGASD

SEQ ID NO: 365161 - protein, 577 aa, Zea mays
  Clone ID: MRT4577_96194C.1.pep
MGFSFFTSRAGARLLDGIARPGFSTAALLLTAASGGGLVAYADSAAESAPDPSQDAPRKKVVVLGTGWAGTSFLKNLDCSRYEVKVISPRNYFAFTPLLPSVTCGTVEPRSIIEPKNKDATFCEAECFKIDANRKTVHCRSAVGTNLDGNGDFMLPRDYPGVALGATVSTFNTPGVLEHCCFLKEVEDAQKIRKGVIDCFEKASLPNISEEEKRKILHFVVIGGGPTGVEFAAEMHDFLVEDLVKLYPAIQDLVKITIIQSAEHILTMFDERIASFAEQKFKRDGIEVCTGFRVIKVSDDLITMKRKSDGEEVSVPYGMAVWSAGIGTRPVVMDFMQQIGQTNRRALATNEWLRVRECEGVYAIGDCATVSQRKIMDDISTVFKMADKDNSGTLTLKEINGVLEDICIRYPQVELYMKSMHMLDIADLIKGAVGDSHKESMVVDIEEFKKALRHVDSQVKNAPATAQVAAQQGQYLAQCFNKMEKCREEPEGPLRMAGGSGRHFFRPFRYKHFGQFAPLGGEQAAAELPGDWISMGHSTQWLWYSVYASKQVSWRTRVLVVSDWTRRFIFGRDSSRI

SEQ ID NO: 365162 - protein, 92 aa, Zea mays
  unsure (1)..(92): unsure at all Xaa locations
  Clone ID: MRT4577_96195C.1.pep
GGGGPGCCGSGPWLRLGRWSVSFLLLRPFACVRVLFVGVGSGLSWLVAPLACFGGVGGVPGGCALGVPLSXAFFLASYEGSVFAWVGRSIGS

SEQ ID NO: 365163 - protein, 59 aa, Zea mays
  Clone ID: MRT4577_96196C.1.pep
RTVRSSYGQQIVQFSYDSVDDLVDKLGAPVGCRAACSISEAAYGALEHPVNGLEDSPLM

SEQ ID NO: 365164 - protein, 103 aa, Zea mays
  Clone ID: MRT4577_96197C.1.pep
EGILLPRDLPGLRCRNVSLQRGIELEDLSKHYYDAWSDSNFAGMMKAVEPFARKLGAALLGNTPPRGLRWKGTIVMAVEQKRGGSFIIATYPTSRELLCLLEP

SEQ ID NO: 365165 - protein, 77 aa, Zea mays
  unsure (1)..(77): unsure at all Xaa locations
  Clone ID: MRT4577_96198C.1.pep
QFAPARARDEEXRPKERXKKHAEXXSXPXXXXTEKTTEKEXXDDEDEEEKKDFFFGEVEXEKFFFFFIFFFGGGPPR

SEQ ID NO: 365166 - protein, 79 aa, Zea mays
  Clone ID: MRT4577_96199C.1.pep
DAWVFFFFFFFFFFFFFFWFVFFFLGTGRAFFEIMKLKGFVFPNVNIPITLKVHGILGAVYKETFSKVATKNNCFLGSN

SEQ ID NO: 365167 - protein, 26 aa, Zea mays
  Clone ID: MRT4577_9619C.1.pep
VKHIHPFLNTFVTHIFLKLCHMKTAL

SEQ ID NO: 365168 - protein, 23 aa, Zea mays
  Clone ID: MRT4577_961C.1.pep
LEHEQDRFRNIKHNLLECSTYYI

SEQ ID NO: 365169 - protein, 74 aa, Zea mays
  Clone ID: MRT4577_96200C.1.pep
MVVDRAIMEKPETMKKVMLDVIGRYRKRRRCRDDGYVHLKYTAEGDGASEDDTLGLGMNADDFDECADHLVYHC

SEQ ID NO: 365170 - protein, 67 aa, Zea mays
  Clone ID: MRT4577_96201C.1.pep
LLCCLLVSPNVSMYHRGPFGNLVLTRSTHVLYPFSSHGIHLRCESVRTVRLIQTMSELIVRKVRFGF

SEQ ID NO: 365171 - protein, 75 aa, Zea mays
  Clone ID: MRT4577_96202C.1.pep
LANSRSPVPAPDPRPAVDVSNGRRPLIHGSPCRHPLRDLRRHPSASWRAYGQRHRSNSLAGDGVELDSRRATTST

SEQ ID NO: 365172 - protein, 84 aa, Zea mays
  Clone ID: MRT4577_96203C.1.pep
GSRTSGSARTAMDASPELQQFLEQEKHKMMMSEMVTKLTNVCWDKCITSTPGSKFSSGETTCLTNCAQRYLDMTVIIAKRFEMQ

SEQ ID NO: 365173 - protein, 72 aa, Zea mays
  Clone ID: MRT4577_96204C.1.pep
PSVYGSPNRWHYNDIGSLCSFLPSDSGDWLKYNGTPRLWYHNLGGAMMQFMSPSPALCIDSLVYGDRCAAVP

SEQ ID NO: 365174 - protein, 113 aa, Zea mays
  unsure (1)..(113): unsure at all Xaa locations
  Clone ID: MRT4577_96205C.1.pep
THHALRTINTLTTLGARILALLALLALVVSATYAYIIPQCSLAPSAIIQQLLPXHTSMGFKHPVVQVYKLQLAFAASVLQQPIAQLQQQFMSHLNLKTIVMHQPQQILTSLNH

SEQ ID NO: 365175 - protein, 70 aa, Zea mays
  unsure (1)..(70): unsure at all Xaa locations
  Clone ID: MRT4577_96206C.1.pep
AWYDSRSGAVSDRTQLXRVDHGAGEGPCVLAANSRRQPALDHVSCPCLQSRQTICKGDMKDSPGGLEGPN

SEQ ID NO: 365176 - protein, 196 aa, Zea mays
  unsure (1)..(196): unsure at all Xaa locations
  Clone ID: MRT4577_96207C.1.pep
MWSSSQASTRGVVEMGRVEAGPSHFPKRPAPQNSARVNLSRTHTVKPTSAGDRSGISVKCNLGWSSQPSLDLRHHFRGYSSASEAVLTSQSDDIIRLPRLFRFLQKPLAKFISEVRAPKSKEGYAXIGGGSPLRQITDAQAEALREXLHGKDVPANVYVGMRYWHPFTEEAIEQIKRDGITXKLVVLPLYPQFSIS

SEQ ID NO: 365177 - protein, 176 aa, Zea mays
  Clone ID: MRT4577_96208C.1.pep
KRSAELQVPELAAFSRSKKAEAGTTYLCYLNGSAMDLEIVGRHALLFDDDATAELVNSGVSLVPWAAVGAADLLLDRHDVRHLLDRVPPRPHRAYSMALLYAPSPDGVSETELDRERYLDLPAGDGEYEGSGDAAPSGINEDTFRADYNVLPSSYGYPARSDEPNSSNVLLEPSFY

SEQ ID NO: 365178 - protein, 363 aa, Zea mays
  unsure (1)..(363): unsure at all Xaa locations
  Clone ID: MRT4577_96209C.1.pep
LRTSKRAQRCASVRGXSPLRQTTGATTEALREPSHGKDVPANVYVGMRYWHPFTEEAIEQIKRDGITKLVVLPLYPQFSISTSGSSLRLLESIFREDEYLVNMQHTVIPSWYQREGYIKAMATLIENELTKFQEPQKVMIFFSAHGVPLAYVEEAGDPYKAEMEECIDLIMEELEKRGITNPCILAYQSRVGPVEWLKPYTDETIIELGQKGVKSLLAVPISFVSEHIETLEEIDVEYKELALESGIKHWGRVPALGCEPTFISDLADAVIESLPYVGAMAVSNLEARQSLVPLGSVEELLAAYDSKRDELPPPVIVWEWGWTKSAETWNGRAAMLAVLALLVLEVTTGEGFLHQWGILPLFR

SEQ ID NO: 365179 - protein, 112 aa, Zea mays
  Clone ID: MRT4577_9620C.1.pep
MPQPLHTTLHAVAFKAKDHNKISSERSTYANSLQPASHPPSSPLLICCVGRQGRAAAEVSSSAMGKVCCSKEAQEEAGIDLLGLLVAAIIALVLMLLCTTPRRRCVAVYPCC

SEQ ID NO: 365180 - protein, 134 aa, Zea mays
  Clone ID: MRT4577_96210C.1.pep
SDEEVNRALWHSETTTKSYAVLSAFFESSLFWNNGPFWNKGPEAIDAQLLELRRATLSKPPAWLPQDIPPGPPAELQLFSLSAPTFTKPAWLPHPDMAPVRGFPKAAREGKKAETELEQAKATTTAAVNCILFE

SEQ ID NO: 365181 - protein, 569 aa, Zea mays
  unsure (1)..(569): unsure at all Xaa locations
  Clone ID: MRT4577_96211C.1.pep
MISSRLVSSGYSRPVRLHLRSPGPDTPLYQSRPPAHFSHPRAASGAGEPSRRSSNDPSLSRPFSLPLPAQGEERERMWSSSQASTRGVVEMGRVEAGPSHFPKRPAPQNSARVNLSRTHTVKPTSAGDRSGISVKCNLGWSSQPSPDLRHHFRGYSSASEAVLTSQSDVRKLFVGNEKIGVLLLNLGGPETLDDVQPFLFNLFADPDIIRLPRLFRFLQKPLAKFISEVRAPKSKEGYASIGGGSPLRQITDAQAEALREALHGKDVPANVYVGMRYWHPFTEEAIEQIKRDGITKLVVLPLYPQFSISTRGSSLRLLESIFREDEYLGNMQHTVIPSWYQREGYIKAMATLIENELTKFQEPQKVMIFFSAHGVPLAYVEEAGDPYKAEMEECIDLIMEELEKRGITNPCILAYQSRVGPVEWLKPYTDETIIELGQKGVKSLLAVPISFVSEHIETLEEIDVEYKELALESGIKHWGRVPALGCEPTFISDLADAVIESLPYVGAMAVSNLEARQSLVPLGSVEELLAAYDSKRDELPPPVIVWEWGWXVTTGEGFLHQWGILPLFR

SEQ ID NO: 365182 - protein, 92 aa, Zea mays
  Clone ID: MRT4577_96212C.1.pep
FNCLVLLLIKIHSPNCLIGEISYIYLNEHNLLEVLQYTYHNKSYIVIYNTRRRKNDPKHYDGHNIPHVIHPKYTMPNIVSYVQDAYIALCTL

SEQ ID NO: 365183 - protein, 102 aa, Zea mays
  Clone ID: MRT4577_96213C.1.pep
MADSKATFTVTLRTLKFMTNRLLARKQFALVVIHPGRSNVFKAGAKERLAKAYEVKDPNNIFVFMFRTHFGGGKYTVFGLIYYNLEAAKKFEPKYRLFTNGL

SEQ ID NO: 365184 - protein, 327 aa, Zea mays
  unsure (1)..(327): unsure at all Xaa locations
  Clone ID: MRT4577_96214C.1.pep
MEKLNLGMIQHGTLTQLKLESVLLQRIIDAQRTDKGMKCIREKMKAGSTKMYQDLNQHYWWTKMKIEIARYVVRCDTCRRVKEVHMKTAGPLQSLPIPTWKWEDISMDFIVGLPQTAKGFDSIWVIVDRLTKIAHFLPVKTDHPVDVYAQLYIARTLSLHGIPKTIVSDRGPQFXSKFWSELPKSLXDHVYLKVSPIKGVNQFEVKGKLAPRYIGPFPILEQCGPVAYRLQLPETLSVVHNVFHVSQLKKCLRIPDRTIDVVDVALEPYLTYSEHPIQVLDQKDRITRKRTLKFYKVQWNQHTEDEATWETQDFLKKNFPFSSSISF

SEQ ID NO: 365185 - protein, 53 aa, Zea mays
  Clone ID: MRT4577_96216C.1.pep
NDSNSIQCILIDGLILLPKKKVHSDLAAYLSTFVSFYFIPTIFFPIPLLTSTN

SEQ ID NO: 365186 - protein, 108 aa, Zea mays
  Clone ID: MRT4577_96217C.1.pep
RGGFQPRGARGGKIPPASNSGETFPTTTQHQNGRGQLPLVPIWVPGPGAGLNPWALPNVWGRLKKLFFSGLGLGLGDPRVSDPCPRPCRPTLSGGVRAGRRPRRRGPT

SEQ ID NO: 365187 - protein, 83 aa, Zea mays
  unsure (1)..(83): unsure at all Xaa locations
  Clone ID: MRT4577_96218C.1.pep
CIDAPLHESSGGARTEWRPQMGAVLSSLESRQKSASGAHPVVAEKRCPRQLLYRRWWPVAVRFRALHPPGSLXVKNXGMLAFR

SEQ ID NO: 365188 - protein, 65 aa, Zea mays
  unsure (1)..(65): unsure at all Xaa locations
  Clone ID: MRT4577_96219C.1.pep
NAQAGTVDGRKVDAAEAXKIAGIEGGFFKLNPKEGLDIANGTSVGSVLAATVMYDANVLASLLEV

SEQ ID NO: 365189 - protein, 84 aa, Zea mays
  Clone ID: MRT4577_9621C.1.pep
GPKKTVPPPQKKGTGWGIAWVKTPGFLFTPSFFQGFKPGFPFGLNPPAPFPFKPQKGALPSMVGWFTNPPPLIKLALPPPVLFH

SEQ ID NO: 365190 - protein, 432 aa, Zea mays
  Clone ID: MRT4577_96220C.1.pep
MAILKTRSTSMFTTKPQNIDRFSCSIVSATRLYGRREMEGGEEVEKEGNMSQLAGVQFLLSNEGKEVPLSSIEDRTACLCLFFSAHWCRPCRSFTPTLLQAYTALRSAGKSVEIIFVSLDRDEASFRDHFQGMPWLAVPFDAAGLLRQKLCARFAVERIPALIPLSASATPSSGLGSGEDAVRLVGEYGVDAYPFSAQRRRELESMDDARREGGRLQELLGCEERDYVISADDIKIPIADLAGKTVGLYFGAHWCPPCHVFTKQLKEVYNELKILRPGSFEVIFVSIDRSKGEFQASMSSMPWLAIPYSDAARKRLTRIFSVKGIPGLLILGLDGKALKTDGRTAISAYGAAAFPFTESRVSEVGEALKREGDKLPRRVNDPRHRHMLELDMAKAYVCDECQQKGRYWVFSCKQYNFDLHPSCVGDNKVDNI

SEQ ID NO: 365191 - protein, 71 aa, Zea mays
  unsure (1)..(71): unsure at all Xaa locations
  Clone ID: MRT4577_96221C.1.pep
APVQPNQAAEVTGKLVETXHTDVLHLLESPKAHKAKAAEAMDILHNEAHQHNANTQTSQLAASSLTECILS

SEQ ID NO: 365192 - protein, 73 aa, Zea mays
  Clone ID: MRT4577_96222C.1.pep
TLMATTSQNLNDAERISHRHCKSSICTDLHATVLCMMGHAEARDLTNVHTDYHAAIAKIAKTYERSATEHDLA

SEQ ID NO: 365193 - protein, 95 aa, Zea mays
  Clone ID: MRT4577_96223C.1.pep
RTRPPWCALAPLSLQAGWSTPGLKSVCLGSTIGICHVLAGAGLLWRPGRLFAIWCPTPRLCWCQEHVLEPAPCSTGCWGKRKGPHPLEPNSELTY

SEQ ID NO: 365194 - protein, 133 aa, Zea mays
  Clone ID: MRT4577_96224C.1.pep
MPGGLMTPGRNMPTAAAMIGGLASYAASFGQNMMDGHHQLAMMQQQHQNHGQQQAATSESDARGPRHDELLMESKSGSDNMEGGARSGGSGGEELQEEDLGLRQPARKKRYHRHTQHQIQELEALSRPSNLAS

SEQ ID NO: 365195 - protein, 138 aa, Zea mays
  unsure (1)..(138): unsure at all Xaa locations
  Clone ID: MRT4577_96225C.1.pep
MTLKRHNCGSSKHGRRHMPVIQCSNCDQCCRKXKAIKKVHVKNIHEQVVIRDLHEECVYDGYHLPKLYAKVHQLLWFAIHADIVRVRSVEKHRDRKHADHLTLREDRPPGGQECLRPRPGDRATDPTAASASCYDIGL

SEQ ID NO: 365196 - protein, 76 aa, Zea mays
  Clone ID: MRT4577_96226C.1.pep
VVLRTEDVWRCSNGQVVEVPAELVAAGSRTPSPKTKASQLVGRFLAASEPAVSVQLGDHWHLAYCHTNQALLRPRS

SEQ ID NO: 365197 - protein, 139 aa, Zea mays
  Clone ID: MRT4577_96227C.1.pep
MSSDTTFKRYVEVGRVVLVNDGPSAGKLATIVEIIDHNRALIDGPSTGVPRQSFTFRRMVLTPYVLKKLPRAAGTSTVKKVFDASEVVAKWDKSAWAQKRKATEQRRNLTDFDRFNVMLLKKQRRRLVQAAAAKAKKSA

SEQ ID NO: 365198 - protein, 89 aa, Zea mays
  Clone ID: MRT4577_96228C.1.pep
MEKAAGVSAARLAVAAAAVLLCLLLLLAAGPQGVSGADGRRKTASPYDKLISCRVLGNCDKNKGPEATRPGKPVNKYTRGCSKIDKCRD

SEQ ID NO: 365199 - protein, 74 aa, Zea mays
  unsure (1)..(74): unsure at all Xaa locations
  Clone ID: MRT4577_96229C.1.pep
IALCLLTNIDGKSPQIETMVSGCGDSVSIDDLLQLNVQHLETVVSSCGDSVSIDDLLQLNVQHQIKLTFAGXRV

SEQ ID NO: 365200 - protein, 48 aa, Zea mays
  Clone ID: MRT4577_9622C.1.pep
REILHISRGQGRNQAGAHDQGRESLTSTESTTATYIVAIQHYYAWTLF

SEQ ID NO: 365201 - protein, 88 aa, Zea mays
  Clone ID: MRT4577_96230C.1.pep
TFSHTMHTARSSMLLSPAAANPHRRVLTDTTHGINRTTDPKSGEETRRKRSVRPSSTSKTHYGAQYFTWRTRTGTQYHLYSTTIIACA

SEQ ID NO: 365202 - protein, 93 aa, Zea mays
  Clone ID: MRT4577_96231C.1.pep
DFWFGGFLNLPPDSDRFRPPDLPPGMGVPPGLAQGPFCPCFHLGRYVIFLPVPPPGPVFRPLALFRWLKIKTGSLPLFHVLFLSPLDFIFVQF

SEQ ID NO: 365203 - protein, 36 aa, Zea mays
  Clone ID: MRT4577_96232C.1.pep
LLLIHYSALALQRQELEELDQRKGRSSSYHRCRCLL

SEQ ID NO: 365204 - protein, 95 aa, Zea mays
  Clone ID: MRT4577_96233C.1.pep
QTQPPQIWEFKIDPKFHPFYPFPPDYIFCSAGGGGGGLPSYTLSPSRRHCWFLTNWFFGLMAIVHSTDTCIFGEENPTPRILAPPSPGIRTSTRP

SEQ ID NO: 365205 - protein, 283 aa, Zea mays
  unsure (1)..(283): unsure at all Xaa locations
  Clone ID: MRT4577_96234C.1.pep
MAEDDAAAAAGSPILDLPEPLLLHILGFLTDARSRHRAALACRRLLAAERATRAALSLRGDPRSHAFLFLRPAFCFPALERLDLSLVSPWGHPFLSSAAPSADAVAPSVTAEEVAEQNAFIAARLAYCFPAVSSLAVYCRDPTTLASLTPHWRSGLRSVKLVRWHQRPPGLDAGADLEPLLEDCPALRTLDLSEFYCWTEDIEPALAAHPAAAAALTELDLGLAGATDGFHAAELEAIXGSCPSLQKLVAPCVFNPRYIDFVSDDALLTIXXRCPKLAILRLR

SEQ ID NO: 365206 - protein, 80 aa, Zea mays
  Clone ID: MRT4577_96235C.1.pep
LNGAGMHASPTLIPTGAYRFSICPNQAHAPTCTQMNVGPLADLDTNAPPSLLGCGLLLTKPDRMRPTTNLWTCPTLQTYE

SEQ ID NO: 365207 - protein, 464 aa, Zea mays
  Clone ID: MRT4577_96236C.1.pep
KGDWLCPKCDFMNFAKNTVCLQCDAKRPKRQLLPGEWECPRCNFLNYRRNMSCFHCEHDRPSDEYANRQMEAKQSALRNRLERPPRKSDISSAWNFDFEDNESDGADVAAFEYADSSKVRRESSSAGSMSYRGVSKGSDDEEYRMAETMTTGRGNKFSERDSLPSSRDGFNDFDDEDDDIDSYELDLSKGSHTGGVSRMSYSDLESASDSEGFSEIDNSRESRYGNSKESRYDNGRESRNDNNRESKYAAKVEDEFEDHHSLRSTHLADSWQKTRGRSGSNDYRRASFGSESDDEINSYPDEDIDKGPRNNGSRSQGSTNRASVRHNALAYSDDEPFSDDVDSGMADRFGPRQTKSSTNIKDNFRDTRRNLNGRRSSGDRYGRTERNERDRYGRTEQRNERDRYGRTERNERFNNFDMHRGGSVLDKGRGARGNQLDSGSRGLQRNARRNWDRSGGFDGRHKGV

SEQ ID NO: 365208 - protein, 88 aa, Zea mays
  Clone ID: MRT4577_96237C.1.pep
VIHGGWSGASTGRSRQKYSGDLWYRHGVGGLSTWDAEGAPRSVREQQRGTRPPASPFTRTAPGTFRRASPAMGNPKPGAPGICMFHGQ

SEQ ID NO: 365209 - protein, 771 aa, Zea mays
  unsure (1)..(771): unsure at all Xaa locations
  Clone ID: MRT4577_96238C.1.pep
MSRKPLLPTCGSSTPPPLFLLRRLLPRRRATSSPPPPSTRRRTAAMPPRAGDSAAAAAAAASFRLGMVRVVSFLVGGLNLAVLLLGLYLIDAVLPSGCGGGXLAFASAPALSGVRVLSMIGAARAQHATADAIAKRHLHESDASVAADAVARHEIRVRYKRWLWWTRFGMAVGALQLVAAIYLMFVIVRDLSNERRSTSCFFGXVFDHGIREALCCLGRAKYLTVLEEDEVYSVARLLGDLVAYRASGTGHLELLAGLALLQKHGNLSELQTDLVEASHELLQVAAFLRGFSXACYTXPLLDFGRNPILFPCAWVYRQGVLTPWARRRRPALDGDNWWRGHAAAFLRFVNIPPKALLKGRVCQSKREAAYFVVVLHDKRTVVIGVRGTETPEDLITDGLCRECAFTMEDLDGLVNEQLPATTRERVISTFPHYGHGGIVESARELFMQLNGENTSSGRLGFLSTLLGEGSECHGYKVRLVGHSLGGAVATVLGMMLYGKYPSVHVYAYGPLPCVDFVIAEACSHFVTTIICNDEFSSRLSINSILRLRSAAISALSDNSPADTAMIQKLARRILHVNRYHDNGPDDGIIQGYADHTRTADTTVPNERQISHQIPLCNTELDLHNTQNGFFRYNGSSASIDEHLSYEGISSGHDMQIIPLDGADSGFEGHQTSYREIPVEPPEMFLAGLIVHIVRQRRSLFPLWKCWSIQETEPPYKAVLAKRENFRDIVVTPYMFTDHLPWRCHFAMQKIVEAQTPMRRAHSDPPVQQHLV

SEQ ID NO: 365210 - protein, 38 aa, Zea mays
  Clone ID: MRT4577_96239C.1.pep
SPVSSGGGRPTFALLTDRGVFSPSLSRAVFVPPPARPL

SEQ ID NO: 365211 - protein, 147 aa, Zea mays
  unsure (1)..(147): unsure at all Xaa locations
  Clone ID: MRT4577_9623C.1.pep
MKKKKKIKNPPLGLASNLGVFPLPAGGIKTGGVAPNQKMGNGGDKKGGGHEKNWDGMVKKRKTPKVLDLWPPCCGPRRMISKGMDXGQLIFRGGQRDVYCNSELPGATRMFSYRIRINPTVFMYKGGEKNERENGGVPKKKGTTLIH

SEQ ID NO: 365212 - protein, 106 aa, Zea mays
  unsure (1)..(106): unsure at all Xaa locations
  Clone ID: MRT4577_96240C.1.pep
RSLDRSIDISXYEMYYELHLELELVCHLEGPVEDRSRSGCQVRLNDREIDGDDLWDDSGHDLGSIMRRITIDLPXDLQHMGRDRLCDPVATTVARMLYDNYCDDYY

SEQ ID NO: 365213 - protein, 230 aa, Zea mays
  unsure (1)..(230): unsure at all Xaa locations
  Clone ID: MRT4577_96241C.1.pep
GLNLXALLLGLYIMDAALPSECGGGLXIASAPVLAGARXVLSMIGATRAQHATADAIAKRHLHQSDASVAADAVARHEIRVRYKRWLWWTRFGMAVGALQLVAAIYLMFVIVRDLSNERRSTSCFFGQDEADRVSVRALIALFLILSWVVIIVQCFTGSDILRWRSFYATHDMAWKAHYREVFDHGIREALCCLGRAKYLTVLEEDEVYSVARLPGDLVAYRAFGTGHLE

SEQ ID NO: 365214 - protein, 250 aa, Zea mays
  unsure (1)..(250): unsure at all Xaa locations
  Clone ID: MRT4577_96242C.1.pep
MASSSTCVLKKNYRCDRSLQQFYTGGPFAVGLAPGGDGEGGAEAEAFLACACGGEVRVVSSADASAIGEPVDGDSEAITALALSPDSRLLFAAGHSRLIRAWDLASRACIRSWKGHDGPIMAMACHVSGGLLATAGADKKVCVWDVDXXGFCTHFLRGHXGVVTSVMFHKDPKRLLLFSGSEDGTVRVWNLETKKCVAVLKEHFSAXTSLALSDDGQTLLSAGRDKXVTAWDIRKYSSKKNIPTYEMIEA

SEQ ID NO: 365215 - protein, 87 aa, Zea mays
  unsure (1)..(87): unsure at all Xaa locations
  Clone ID: MRT4577_96243C.1.pep
VALQARVFYRLSXPPAPPSSSPRSGRAAVYSDVVYSSCSVTCACSCLQILKLLMVVVVMDEMNHRCGGGSSFYTARVRGRHSLACGT

SEQ ID NO: 365216 - protein, 88 aa, Zea mays
  Clone ID: MRT4577_96244C.1.pep
KRTPRGSHGPPLAPLPIGFPGFLGPLAPIPITGAGINPVKNLGAPIFYNRGYGGRAPWVFWGGPFMGAALGALSPQGIIRALPFKNRF

SEQ ID NO: 365217 - protein, 92 aa, Zea mays
  Clone ID: MRT4577_96245C.1.pep
NRRLWVNWWSDAAFGLCLVGNQGSGAVLMFLLRNLKSLFDLRWIRGESTSNPTSLNRVWHCSYERERERIMCLLRGRVDNGVKVRNWAPLSA

SEQ ID NO: 365218 - protein, 91 aa, Zea mays
  Clone ID: MRT4577_96246C.1.pep
MKMDDVQEIEQRSQSQIFWTQEMSACALKYLAQLVADGIRVDKGFKSSHYNQCAKVVKERFQVQVSGSQVTNHLKTWRTRWSANLLIIADV

SEQ ID NO: 365219 - protein, 40 aa, Zea mays
  unsure (1)..(40): unsure at all Xaa locations
  Clone ID: MRT4577_96247C.1.pep
DXXGLLLRKKRSLLRXWRVFGLWKTMKDRGIGYVFKTVWV

SEQ ID NO: 365220 - protein, 130 aa, Zea mays
  Clone ID: MRT4577_96248C.1.pep
SGRPTRSVKRREGQDHHGSRHSYDGKGRRGPPGDPLRPMTGLRDTAASCKLALERPLPDFSIHQMHDNDDYHIVFNRGRAAAGFLISAQWATKINECSTGDVKSRYAAFSLRLLSSYGWAIMCNENGGLN

SEQ ID NO: 365221 - protein, 52 aa, Zea mays
  Clone ID: MRT4577_96249C.1.pep
LRSLAASFPNIRAVNAVAYCDYSYAFASSSKLDTKNPPHEATRTKAQIIQSL

SEQ ID NO: 365222 - protein, 286 aa, Zea mays
  unsure (1)..(286): unsure at all Xaa locations
  Clone ID: MRT4577_9624C.1.pep
PAGPGYLEGKTRSLLIPPAPLTACGDWPLLRVMRGIFEGGLDATGRAEQEEDYDDAGGDWGDEDLEIVDASNVIENGDAGHADESETNEEDGDEEGGWDLEDLELPPEADTPKARGPERSALFVAPTPGVPVSQIWTQKSSLAGEHAAAGNFDTAMRLLSRQLGIKNFAPLKALFLDAHMGSHTFLRAFASAPVIPIAVEKGWSESASPNVRGPPALVFSFAQMDDKLKAAYKATTEGKFPEALRQFLNILYTIPLXLVVDSRREVDEVKELIEIXXREYVLGLRM

SEQ ID NO: 365223 - protein, 112 aa, Zea mays
  unsure (1)..(112): unsure at all Xaa locations
  Clone ID: MRT4577_96250C.1.pep
KSAILEADVRDVVXRHCDALRLTDSDRVCSTSHHDDICPRLSSWARCTAHHLMSSGECSLYACCQIMACISRQSWVCPRDPSCSSKKMAMSVHEYRLVQNQCRLTEYPTRKF

SEQ ID NO: 365224 - protein, 64 aa, Zea mays
  unsure (1)..(64): unsure at all Xaa locations
  Clone ID: MRT4577_96251C.1.pep
KQAYSIRGPGGYFIQXNPTLSLFPVSLLDIAYILIIKKQTSKHHVFSYYFNHLSNFSSSKNHPL

SEQ ID NO: 365225 - protein, 120 aa, Zea mays
  unsure (1)..(120): unsure at all Xaa locations
  Clone ID: MRT4577_96252C.1.pep
MRSSAISDVTEIQYEYAKDXQKNLIWTILXSAQDEVKRMTAAPLVISLVMEKPDGNNGIRGSTTXDNYYVRILSTIKRDVLKPLPLVAVPPHSKRVVEALXPKAXSTITLLGLHEKTEVT

SEQ ID NO: 365226 - protein, 159 aa, Zea mays
  unsure (1)..(159): unsure at all Xaa locations
  Clone ID: MRT4577_96253C.1.pep
PVFCNSLVARVVPRFIKSYWKSVSKIVGPRGFTNIHQVPSPKFIMVLXRRAICRVSLSIGVRSXRSNQGSTRKGPXIEIGSTQGSSTAIRXWLLEASQXRPGXNMAFKLGKELVYRCXGSGGRLRKKQANHRIAKANRAIAQFGYSIAQVQVRCGMYPD

SEQ ID NO: 365227 - protein, 71 aa, Zea mays
  Clone ID: MRT4577_96254C.1.pep
AAFFFFFSFFFFFFFFFFFFFIVFFFFLTQEQGPFFWDIIQTDDRELTQPSLNLFDTRQRPPSGGTYVYQT

SEQ ID NO: 365228 - protein, 48 aa, Zea mays
  Clone ID: MRT4577_96255C.1.pep
FILNDHINSIIKHPFYSKTYLRALFLSYYQVSSKPNEINLFLPQKSCF

SEQ ID NO: 365229 - protein, 78 aa, Zea mays
  Clone ID: MRT4577_96256C.1.pep
LSTAAAAGPPRRLSRHGLLTGNQQLTCALPLVPRRNPASQRLQESGAAFRPRALQEPAPQHQLLKNRLGRPARCPRPR

SEQ ID NO: 365230 - protein, 96 aa, Zea mays
  Clone ID: MRT4577_96257C.1.pep
GFNRFPYRRIWSAFRHRSVIPGSSQGSSFVCSQGNQCFICWGFTATRAPLFFLGLALLEGIFLPEVRCIAFGPIDKGARLNVKPFRWALYMFWPWG

SEQ ID NO: 365231 - protein, 40 aa, Zea mays
  unsure (1)..(40): unsure at all Xaa locations
  Clone ID: MRT4577_96258C.1.pep
VDXVVXVATLWCRWVPSPQLGAREMDARRRGSDRGNVRXR

SEQ ID NO: 365232 - protein, 147 aa, Zea mays
  Clone ID: MRT4577_96259C.1.pep
PSPTSPWPVMAGSSPPNRTRARRGSISPDEVRRRYEPTGRGRKGGTCGGGGGARRPSGSDSAASGSYSMSGRSDSIASDTESGSDRGSSRSKKTRMSKRLQGEEIQANCVRKRSRPSDQKHLYLVLDDWKDGPSIHQIDADDDDADL

SEQ ID NO: 365233 - protein, 76 aa, Zea mays
  unsure (1)..(76): unsure at all Xaa locations
  Clone ID: MRT4577_9625C.1.pep
RILSSMSSRSVAAHPWHDLXIGPVAPTIFNCVIDIPMCSKVKYELDKKTGLINVDRLLYSSFVYPHNYGFIPRTLC

SEQ ID NO: 365234 - protein, 70 aa, Zea mays
  Clone ID: MRT4577_96260C.1.pep
NGPPWDSLKASNPKEGKIFFEDPLERPKVLKNWPAKALRGARKTLLPGKEKSTFQAPGTQETGEGAFNPW

SEQ ID NO: 365235 - protein, 177 aa, Zea mays
  Clone ID: MRT4577_96261C.1.pep
GDGMNRPAEGGREVPAVVAAAPGDHLVLIRPRPAPIQCQVDLIRSRPTRNPGQVRNLASEFDYNWAQAPSTTKDPVFRPLYILLADRGSSRSKKTRMSKRLQGEEIQANCARKRSRPSDQKHLYLVLDDWKDGFSIHKIDADDDDADLGQPPVLRLVLPAPGFPMRFAVVGSNIVIV

SEQ ID NO: 365236 - protein, 246 aa, Zea mays
  Clone ID: MRT4577_96262C.1.pep
MSLRRWKSFFPAFAAIDTAIETATGARSRDKFRQLRSELVEMLCDAADDDVDRVKGLCRLLDSAMAEALLTLHVVPVTTTMLTTTGVDKAVEGLLSHEDGKVRALARDILIKWAQGGVLDTTVLAAPPSTPRMRPQAQRPETAILLADTPKISDEKMPPVVSNAGGDRVRSGQTGDAKRKHPGYYREADADDEKRQRKVPEKVEDRPRKMEPDIKSRSIWRSRDTRAGARREAGDQGHETRAGRAA

SEQ ID NO: 365237 - protein, 123 aa, Zea mays
  unsure (1)..(123): unsure at all Xaa locations
  Clone ID: MRT4577_96263C.1.pep
MGFFSLFLVASMPIIQVLLIGVIGAYLASGFSNVLTTSARRDMNKVVFTVFTPSLMFASLAKTVTLADVISWWFMPVNIAITFMIGGTLGWIACHILKPPQHFRGLIMAFCSEGNXLGNLLLI

SEQ ID NO: 365238 - protein, 144 aa, Zea mays
  Clone ID: MRT4577_96264C.1.pep
PRDAIQQLVAKGDALSREHVHKTTTLPLGAMTHSSPYSRKKNKNKPRQLPIRHALIGRYNTFLLYSGIRRWQVAAAMCIYITYPCALTASYQGMLRSEHRKAFDGIISNSTVWGLQKHLYSYTRACIGPRYIIILRQTSSEFRG

SEQ ID NO: 365239 - protein, 81 aa, Zea mays
  Clone ID: MRT4577_96265C.1.pep
KKKKKKRKGNILKKKKKKKTQKAEHGPSIGRGGRNFDDGVGIFNQQTFLKAGYLIIQIKISEGRVDKKNETLEPHPNHPWK

SEQ ID NO: 365240 - protein, 423 aa, Zea mays
  unsure (1)..(423): unsure at all Xaa locations
  Clone ID: MRT4577_96266C.1.pep
MGFFSLFLVASMPIIQVLLIGVIGAYLASGFSNVLTTSARRDMNKVVFTVFTPSLMFASLAKTVTLADVISWWFMPVNIAITFMIGGTLGWIACNILKPPQHFRGLIMAFCSAGNLGNLLLIIVPAVCDEDGNPFGDDSSTCRSRSLSYSSLSMALGGLFIWTHTYSLMQKSGKLYHKMQSKSIQCPADSDEEHEQAKEDGPAGCADEEAPLPTSVKPREHEHXKKKNTKWRPLSCPARARSLTRXWTKLKDAIHQFIKELMAPPTISAIIGFVVGLVPWLKSLIVGDGAPFKVIQDALQLMGDGTIPCITLILGGNLTQGLRKSGLKRAVIVAVLCVRFVLLPLIGIAVVRAAYGLGFLSRDPLYRYVLMVQFAVPPAMNIGTMAQLFDVGQEECSVIFLWTYLVAAVALTAWSTVFMSVLS

SEQ ID NO: 365241 - protein, 40 aa, Zea mays
  Clone ID: MRT4577_96267C.1.pep
GGGKNSSHYNPNVYSCLTKRACCFWPNFSFLSRQYLLNNL

SEQ ID NO: 365242 - protein, 53 aa, Zea mays
  Clone ID: MRT4577_96268C.1.pep
KSPRGTCAPHTVTGAPHTARTCRNGQAHILSLETPRCRAGFFMWFGAQASRKG

SEQ ID NO: 365243 - protein, 123 aa, Zea mays
  Clone ID: MRT4577_96269C.1.pep
KGEKKPNPPPKKEWGGDPPLETLGPGKRFFFWGPKNGLLPKKHVPRDIFPVWGWGGSTEPPFGGGGKNSWGRGLSKIKGPVPPGGAKTKKKLKNRACFVLFPRALPPRPGKTVPPVLVFFSGD

SEQ ID NO: 365244 - protein, 238 aa, Zea mays
  unsure (1)..(238): unsure at all Xaa locations
  Clone ID: MRT4577_9626C.1.pep
MASSAGLALCAQTLVVRGGSRFLAFSTTGSDDDCVFTYDCSTAEKKATPEDKGEDGQPADTGSDSILASTFSKSGRYFALTDDSKRLILFRTKPWQCLSVRMVVRRCTALTFTASEDRVLVADKSGDVYSFSVLEPDGCGRLELGHLSMLLDVAVSPDDQFVLTADRDEKIRVSWAAAPHSIESFCLXHTEFVSRILVVPSHPELLLSSXXDGTLRLWEYRKRRQLXQGCDLXGLQEP

SEQ ID NO: 365245 - protein, 76 aa, Zea mays
  Clone ID: MRT4577_96270C.1.pep
NAQGSTGVHLARHQRTTQGPGQIDHHHYNRAQDHGRYYNHMGVLLDNGMVLDHDGTHKLLEGQGLVSKLGAGYTKG

SEQ ID NO: 365246 - protein, 101 aa, Zea mays
  unsure (1)..(101): unsure at all Xaa locations
  Clone ID: MRT4577_96271C.1.pep
SKSCSSQDIQSEYSGCPTNLIMVSQTTSMLFVGRFGLAQWMNRKGRLGFKLKARNSGLQMGDPSGFTLRDQLPXGAVGHIMGVGHRVGXLKNTGALGQIPV

SEQ ID NO: 365247 - protein, 86 aa, Zea mays
  unsure (1)..(86): unsure at all Xaa locations
  Clone ID: MRT4577_96272C.1.pep
MVRWLTYRKRHSYATKSNQTRVVKTPXLGGKLVFQYTKKRASGPKCPVTGKKIQGVCAAHLSILSSRYCVRSLHHAPCRDFNFNAA

SEQ ID NO: 365248 - protein, 117 aa, Zea mays
  Clone ID: MRT4577_96273C.1.pep
DLFIRSQVMADKGVCFHVSRVGLRIFEARVSLFNAKHSPLLANSFVNKILVHRDVGVSRVIVDASQVIAQVTWPTIRLYLAPYSSSCKLSGLECIDRCRWSLCLFLIRYCGVVFDGT

SEQ ID NO: 365249 - protein, 30 aa, Zea mays
  Clone ID: MRT4577_96274C.1.pep
VRTGPGRMSAAHCTSPYLHLGPTTLAAGPW

SEQ ID NO: 365250 - protein, 67 aa, Zea mays
  Clone ID: MRT4577_96275C.1.pep
MHILRHSCILNLFVHLLLWQNEAALESTTDAGKQASIKEADKHCKAIFGKLTRGATCLKSNPGVIAL

SEQ ID NO: 365251 - protein, 76 aa, Zea mays
  Clone ID: MRT4577_96276C.1.pep
TMLHGIAFHPRKLLKLRRCTKLGSAVLLPPDRKSSTMVLCTFGPAIGCDAIWTALSGPACHTVFCCVEFPGSASVT

SEQ ID NO: 365252 - protein, 116 aa, Zea mays
  Clone ID: MRT4577_96277C.1.pep
SWAPWGVGNWTPDFGNQGPDSSEKWKKKKGFFFTGLRFFYFPVSYWLARPPFFPNRLLGNLPQSNEYPVQFLFRFRLKALAWLYFFDWFNLIWNPKNWKTLQHGLWPTLHYLGRIF

SEQ ID NO: 365253 - protein, 63 aa, Zea mays
  Clone ID: MRT4577_96278C.1.pep
LSSPCRKSAGIRCEPEWIILISCHYNNIKQHSLSYEGHFSTGRHSFLCTVSFTDHQQTFGAPG

SEQ ID NO: 365254 - protein, 66 aa, Zea mays
  Clone ID: MRT4577_96279C.1.pep
PVSNVIPVSGLPIKRKMLAAPVFGSYSSIRPGNSQLPSDGGFGRTRSLSEVGDIRCSVRVYRYVIV

SEQ ID NO: 365255 - protein, 130 aa, Zea mays
  Clone ID: MRT4577_9627C.1.pep
MLQQLKSELAAAAAAAMDPQRTRCWVRRRAVEVEEQQILLESHAYDLERQRLKWDRFRANKERDMERARLQNDRLRIQSRRLLLMLRHKEVELDMAEANSSSVDHHPGASPLAAHQQTRGSSPSTAGHPN

SEQ ID NO: 365256 - protein, 92 aa, Zea mays
  Clone ID: MRT4577_96280C.1.pep
RDVESLIACHRSQSHSESILLTSTIVQNQYGEKFTTRCYSTTIYCQQRKSGKTAKVYSDSDRLIIHLPPESPDTEENPPETGLTLDETVDGN

SEQ ID NO: 365257 - protein, 57 aa, Zea mays
  Clone ID: MRT4577_96281C.1.pep
DGLQQACHGAVNLASTRTKFGRRLSHAQHSRLEHHCWHFSHNFCTIPSRIWDGLLNK

SEQ ID NO: 365258 - protein, 109 aa, Zea mays
  Clone ID: MRT4577_96282C.1.pep
VDASWLVPSFSMLALAFVMDFVGMRMNKPLYTMSYTLATAGAAGLLFAGIYALVDLYGFRRPTIAMEWMGKHALMIYVLVACNILPMFIRGFYWRDPNNSLLKVIGIGA

SEQ ID NO: 365259 - protein, 78 aa, Zea mays
  unsure (1)..(78): unsure at all Xaa locations
  Clone ID: MRT4577_96283C.1.pep
FLGPALFLRHPLFLGEGGCTHTIISSFPSPSTTTXXKILCLCFVLSCATADYPNLPDYFIQFHVYCYTFRAWFVTNVT

SEQ ID NO: 365260 - protein, 53 aa, Zea mays
  unsure (1)..(53): unsure at all Xaa locations
  Clone ID: MRT4577_96284C.1.pep
PDGLRIVVSVDGKGKSFVRAVVWXDXGSAVSEFDGDSKRVLSCDFKPKRLFRI

SEQ ID NO: 365261 - protein, 54 aa, Zea mays
  Clone ID: MRT4577_96285C.1.pep
WANSLSLGLPYRSKHGLTDRPCVKKKKKKKKKKKKKKKKKKKKKKKVLCVVTTA

SEQ ID NO: 365262 - protein, 61 aa, Zea mays
  Clone ID: MRT4577_96286C.1.pep
VSLKEGEAAAVVNHSSPRERPGRDKMQIFVEHARQRKTNHPARSNSRRRHATMYKAQDPRT

SEQ ID NO: 365263 - protein, 50 aa, Zea mays
  Clone ID: MRT4577_96287C.1.pep
MLCQQQILICPVKKKKKKKKKKKKKKKKKKKKKKKKKKKKKKKKKRGGPF

SEQ ID NO: 365264 - protein, 59 aa, Zea mays
  Clone ID: MRT4577_96288C.1.pep
LIVLNTRTPVWEWWSVQGFGCGTRLTGHTGSGPPYGTGIRFLEPALRPSPILFEIDIIY

SEQ ID NO: 365265 - protein, 57 aa, Zea mays
  Clone ID: MRT4577_9628C.1.pep
PRVRGRSGGGLLTQNTRPPRQAETYAQCYTRSGPSEGRSSSAVRPHRQLYGGRGKTR

SEQ ID NO: 365266 - protein, 134 aa, Zea mays
  Clone ID: MRT4577_96290C.1.pep
NCCCCFVRRFMMDQLVFYESRAAAADPHRDMRLDIDNMSYEDLLALGESMGNVNTGLADEKISKCVKEVVCCSSDQTQTDQDDQDDGSCVICLEGYRDKDMLGILKCRHDFHAGCIKKWLQTKNSCPVCKAAAA

SEQ ID NO: 365267 - protein, 79 aa, Zea mays
  Clone ID: MRT4577_96291C.1.pep
DFCVFLFAGALPSRLIVASYATALDLIVHLRPHTHVMPKHWFFDGTVTWLQNRLLDYLHFHVFDFLETTFLYSLNTVNE

SEQ ID NO: 365268 - protein, 103 aa, Zea mays
  unsure (1)..(103): unsure at all Xaa locations
  Clone ID: MRT4577_96292C.1.pep
SRSRVFGGGEGXRQVQKMHPSPKKILVYPVILSVSGPSRKVXAPXAIPRQHHARSGTPPQPRAAARGARAEVAARQQQHVGRVVAAHGARPPDVARRRRPGPG

SEQ ID NO: 365269 - protein, 507 aa, Zea mays
  unsure (1)..(507): unsure at all Xaa locations
  Clone ID: MRT4577_96293C.1.pep
MTSNFTPNVWAWIASLPPFTQWRTSTMSLCICATPSASSSSXQPQPSINLSVTKTTSIAQPPYVIFSVFANYSMPVSLWKSQPVHLKTKAQQTLDEQDIIHIFVNIVDSVLKYCPDKNSSFRFPGAQQPRGNFSDVFNIAFLSLAFLLCIFEVPRDLRPGCLGSLGAQLTGSRCRDAAKSLVRMLGANLEDQWMQTMNLAVTNWIVELRSSSRSSGPPSPLFSYAVSASGLWKVQLYCPVIAMGMEEAAETPQDERLLFSLIYQQVECVIQLAYRTTRRDNWIDVEVKVDNVRCDVDSLVSETLMAERGYGSEEKHFPSRVMLQITPTQQSDVLSVSVGKSNDNPTHEFGIEKGFEGSFEPPNAFGLKASVTESLTLAMKPWKFEQSVHGNTATLNWFLHDGVNGREVYSSKPSKISLLQPKAWFRDRYSNAYRPFTKQGGVIFARDEYGDSVWWKVCGATLGQTMNWQIRGWIWLTYWPNKQRTFHNETRWLEFRECLQLPLTKFP

SEQ ID NO: 365270 - protein, 421 aa, Zea mays
  unsure (1)..(421): unsure at all Xaa locations
  Clone ID: MRT4577_96294C.1.pep
RDLRPGCLGSLGAQLTGSRCRDAAKSLVRMLGANLEDQWMQTMNLAVTNWIVELRSSSRSSGPPSPLFSYAVSASGLWKVQLYCPVIAMGMEEAAETPQDERLLFSLIYQQVECVIQLAYRTTRRDNWIDVEVKVDNVRSVVLTCKNQLFLXMNWIQVYILFPRNSYYDXYINQLYXKTFVHIHGLSNNKTTXRGEKKPLTFGSYHRCDVDSLVSETLMAERGYGSEEKHFPSRVMLQITPTQQSDVLSVSVGKSNDNPTHEFGIEKGFEGSFEPPNAFGLKASVTESLTLAMKPWKFEQSVHGNTATLNWFLHDGVNGREVYSSKPSKISLLQPKAWFRDRYSNAYRPFTKQGGVIFARDEYGDSVWWKVCGATLGQTMNWQIRGWIWLTYWPNKQRTFHNETRWLEFRECLQLPLTKFP

SEQ ID NO: 365271 - protein, 712 aa, Zea mays
  Clone ID: MRT4577_96295C.1.pep
MTTKSATFKKPKPCEPTNKAKSSVLSPAEEPRVPNQLASHNVTNGQCSILGPPSATSSMVAPVLRTDSTTQLLSTRNNTVDSNNLGSVHLQGNSELKKPRLAKVPGSMMLSNAERSAGGILGSGAHREVIQNSDPSHRDAKIKDQTGFRQGASSSNRTIRCQRCNEYGHSTHFCEVEKLRLSSGKPLSERNLKDASAKRNKTSEVSTLASSEKTPSREPEHVVKCAINQNLINGPNDGIPAPSSHVKKHSLSPRANVSIPGSGVDCSKPKFKNNDPSLSGTAGIFVHNGRIMPNDHRDEPAQGFSAGDEPTSSTVPELGWIWQGGFELQRTGSSPELCDGFQAHLSCSASQLVLDAVKKFPSKVQLEEVPRKNSWPTQFQKNGPTYDNIGLFFFARDVQSYENHYSKLVENMLKNDLVLRGSVGTVELLIFPSNILSKNFQRWNMLYFLWGLFRVSKKDSSNLPSYLSTSRVEQNFNDDLQAMDWMPSTHSFSQNRSDLAELDPGLLKSTNFEPSLEASREVCLDGENSLNQLVRRRALDNHLDSDAKACSTISNGAMGSSAMSMQRKHQKPDYPEHQDKTRDTFGGNVSERDFDVNTVPVTCSVSLTHLQEEPGKLSTAIDLMDIDHGVSAGALDRSHASGGAGKRSFETAEVADEVPEHKKTKLDNNACTNDGNSDKLMPGSSSSDGKRVFPLDLNAVGDEDIVNIPAFR

SEQ ID NO: 365272 - protein, 83 aa, Zea mays
  Clone ID: MRT4577_96296C.1.pep
EKRCHLKFTRPLQLIFCKITSLYPQELFLESSRLIQPLFQAFENKYKLFFSFTTHNLIAIAKPTHSRFPNKPPLNNQPTLTQT

SEQ ID NO: 365273 - protein, 65 aa, Zea mays
  Clone ID: MRT4577_96297C.1.pep
YLRPHDKVWPRVYSLLVDKYVFHVPILKMCLLRLKNVLVQIVVSRNLRLHPRGSFSSDTLVYSAP

SEQ ID NO: 365274 - protein, 432 aa, Zea mays
  Clone ID: MRT4577_96298C.1.pep
MPNDHRDEPAQGFSAGDEPTSSTVPELGWIWQGGFELQRTGSSPELCDGFQAHLSCSASQLVLDAVKKFPSKVQLEEVPRKNSWPTQFQKNGPTYDNIGLFFFARDVQSYENHYSKLVENMLKNDLVLRGSVGTVELLIFPSNILSKNFQRWNMLYFLWGLFRVSKKDSSNLPSYLSTSRVERNFNDDLQAMDWMPSTHSFSQNRSDLAEPDPDLLKSTNFEPSLEASREVCLDGENSLNQLVRRRALDDHLDSDAKACSTISNGAMGSSAMSMQRKHQKPDYPEHQDKKRDTFGGNVSERDFDVNTVPVTCSVSLTHLQEEPGKLSTAIDLMDIDHGVSAGALDRSHASGGAGKRSFETAEVAAEVPEHKKTKLDNNVVPISSGPRENACTNDGNSDKLMPGSSSSDGKRVFPLDLNAVGDEDIVNIPAFR

SEQ ID NO: 365275 - protein, 67 aa, Zea mays
  Clone ID: MRT4577_96299C.1.pep
ITQMGVNAPGEHNGRLPMGSTHVKTNGMGTGYRLLGPQYTGFLHLARNIMGKPFYAALTRSRRPIRA

SEQ ID NO: 365276 - protein, 49 aa, Zea mays
  Clone ID: MRT4577_9629C.1.pep
NFYHLNVGKEREVNGIVAIRYIRNMGLYQEHKHKLISIFLPPQDKIMHQ

SEQ ID NO: 365277 - protein, 84 aa, Zea mays
  unsure (1)..(84): unsure at all Xaa locations
  Clone ID: MRT4577_962C.1.pep
KKPRGIFFKCLAPRFRVRFFXFHLRFCLGSFFFSQXSLAQMGFFRGVFCPSTNGASHFWNLKQLCFPGLLYPSPDGSPLISLLV

SEQ ID NO: 365278 - protein, 97 aa, Zea mays
  Clone ID: MRT4577_96300C.1.pep
VSVLASIGGLYAFSVAICLCLMSQCEARIKKLRDEDTRMLKILSKRRAQRNWDKLRKFVMYTWGLSNLDPSDRTCQQPEGSVMDSRHMRREAIRQGI

SEQ ID NO: 365279 - protein, 343 aa, Zea mays
  unsure (1)..(343): unsure at all Xaa locations
  Clone ID: MRT4577_96301C.1.pep
MRPMASNGMASAPSPFFPPNFLLQMQQTPSDHEHQEQHHHHHHHEHHLAAPPLHPHHNPFLPSSQCPSLQDFRGMAPIMLGKRPMYXGRAGXGGEEVNGCGGVNEDELSDDGSQAGGEKKRRLNVEQVRTLEKNFELGNKLEPERKLQLARALGLQPRQVAIWFQNRRARWKTKQLEKDYDALKRQLDAVKADNDALLSHNKKLQAEILSLKGREAGGSSELINLNKETEASCSNRSENSSEINLDISRAPASEAPLDPTPPPGAGGGGMIPFYPPSVGGRPASAAGVDIDQLLHTSAPKLEQHGSGGAVVVQAAETASFGNLLCGVDEPPPFWPWADHQHFH

SEQ ID NO: 365280 - protein, 141 aa, Zea mays
  Clone ID: MRT4577_96302C.1.pep
PPQVEQGASAPLPLRVALPLARRLSASPAPSLFFLASAPLLAVGAFLASEGFPSPGLPFPPFWSHGPVFGPPCCFFSPVAPAPLPLVLPPFFFPFSALEFGPFSLVPWFLSPRGRTPVAAFAFPGPFPFFLALPTKTKHPP

SEQ ID NO: 365281 - protein, 74 aa, Zea mays
  Clone ID: MRT4577_96303C.1.pep
KKGQPSQLGGFTPGFYNGKGSLENNKKLLAPKPSCYGLNKFLKLFFKMNNEKFYYFFEKNSPCFDCVSCGTLLC

SEQ ID NO: 365282 - protein, 122 aa, Zea mays
  unsure (1)..(122): unsure at all Xaa locations
  Clone ID: MRT4577_96304C.1.pep
VVSAPLPGASAWGCLWAGLARGPLWSVAAGVCLSVAGPPGLPGGVGGLWVCRGLVRVFLVPALVVFCLWVGWPVLVFXPFVAFSGLVGFRGLPPPGXSXXFXFSLRRXKXFFIVGGGRSRGS

SEQ ID NO: 365283 - protein, 88 aa, Zea mays
  unsure (1)..(88): unsure at all Xaa locations
  Clone ID: MRT4577_96305C.1.pep
SSCFCSSQKVXHRLNDDWAYGNDLEARPCDFQAEAXALRXANMERFNARRYDRTHSNPDFWPVDNCLQSVLGQRVDLXXDFQMNYDLW

SEQ ID NO: 365284 - protein, 61 aa, Zea mays
  Clone ID: MRT4577_96306C.1.pep
RRRLPGHYIASRLMLRRPPSSPSRRKVAIRRQGIISRNTVRQKEHRTLAALTCFTEAQDET

SEQ ID NO: 365285 - protein, 164 aa, Zea mays
  unsure (1)..(164): unsure at all Xaa locations
  Clone ID: MRT4577_96307C.1.pep
KKPPAARPDPRPPGGPQGTQTAKXREXXHXQGGQXGNQXXAKXXEXXXDEHGXDXTXRXXGTAGXEXERXKGXHXEAXXGRXXPXAXXXDXEXGTXDXXRXGPXGQXXRXDNXXXGQXXAGNNXAKGXXXEGXEXKDXXXXXARKEAENXDXXQGXQXXHPXGG

SEQ ID NO: 365286 - protein, 47 aa, Zea mays
  Clone ID: MRT4577_96308C.1.pep
YGRQLARRTSRLLCGRGRISSHLLLNIRESSKPKSSSLTVQVSTHSG

SEQ ID NO: 365287 - protein, 140 aa, Zea mays
  Clone ID: MRT4577_96309C.1.pep
GFTLAELDIRTSRGLRVVLRVRVGIPISVGSVSAPTSSLEGECSGSFFNVSAQIQGTQGFPFARQRMILPGRRLVGGGFLSDCNIRRPSTVETGPRPLGCSSAVGCSSCSCSGLSSVCSCVSGKGLPSLFFVWNVPVSRG

SEQ ID NO: 365288 - protein, 196 aa, Zea mays
  unsure (1)..(196): unsure at all Xaa locations
  Clone ID: MRT4577_9630C.1.pep
MPRRRSRSRSRRPTAASRLEAPEGRPAYVCASKSLDYPVPASALRHWAPDPPEVSSGRPRRGSTVYVQMTPEMDLEARRIGYAFIAPDPEAAGLEDADTKALVRSAIHATAPDLQFELFAXPNDGRHXCLRFALPEDRVAAMAKQPFELDGYSVQIGPDPKSCIQSRLDYLVHINLHNYPKEERTEENIHSNCFSI

SEQ ID NO: 365289 - protein, 98 aa, Zea mays
  Clone ID: MRT4577_96310C.1.pep
DSWADSWSDSWVGMPRGLAGFVGPRFPVYFARGPIPGMIFLVTISHPLPLRLDMMIGPYHDSLIAGLSTLRATLLIELLAVQQHTPLGMMNALHCKNY

SEQ ID NO: 365290 - protein, 47 aa, Zea mays
  unsure (1)..(47): unsure at all Xaa locations
  Clone ID: MRT4577_96311C.1.pep
MSTMGKNRYPSPXXPNYXXLHXNKNXXGRRLHKXXPAYLCGCYPLLK

SEQ ID NO: 365291 - protein, 109 aa, Zea mays
  Clone ID: MRT4577_96312C.1.pep
QSIDTSPIYLAREREECYASYHGVRQRECSRCRVGAAASPTGVSSDYRDGPPHWRRIPHTADDLHIIARELGHPVRGILCGETCVFLPCYTAAMSCQCIGQNCMMRYLD

SEQ ID NO: 365292 - protein, 78 aa, Zea mays
  Clone ID: MRT4577_96313C.1.pep
KNQAYQSLARVKQIHVERILNYILTPWVLHQVYLNAMVLHCFTGLQIYSLSRWRDPIWGPSELLVGPYYGNHDMISTP

SEQ ID NO: 365293 - protein, 83 aa, Zea mays
  unsure (1)..(83): unsure at all Xaa locations
  Clone ID: MRT4577_96314C.1.pep
RSQCVCFESVSKLRAMACYEYEIMMMADGGVVSSTGLMGRFWRAVCCVVWVQXGRRLAMCPGVLCYHPSIILSKPHVLCEKYV

SEQ ID NO: 365294 - protein, 87 aa, Zea mays
  Clone ID: MRT4577_96315C.1.pep
QRRVLFFFFFFFFFLLFFFFFFFFFFFFFFFWKQKGKHPFQNKIAKRFRGGQKSGPELATQLKTHNQGLTREGGLPLSGFLFGKGPI

SEQ ID NO: 365295 - protein, 59 aa, Zea mays
  Clone ID: MRT4577_96316C.1.pep
MASNCCRTFVFNFFRSCGQSLSRRTCLFHQARISLRCCQSSCCRNEIQRICVLVHCNFV

SEQ ID NO: 365296 - protein, 47 aa, Zea mays
  Clone ID: MRT4577_96317C.1.pep
NIDIICIPSSTITRRLLTPIWWIVITEYKKFITLSLNYIKSSKILLS

SEQ ID NO: 365297 - protein, 101 aa, Zea mays
  Clone ID: MRT4577_96318C.1.pep
QKQPPGQVISFFFFGARHNSMIQVAMAPFPFQWLAPKGGSPLYLGISITVLGRNQISPLQVTNYLVSRVGNPKACIAFSIYRLASVTGKSQPDWIPTCGLL

SEQ ID NO: 365298 - protein, 87 aa, Zea mays
  Clone ID: MRT4577_96319C.1.pep
QVWRWSKGFFFQGSTFCCFGPRPSKRGVVLDLGWKNGLTWGLKPMVFSNPLGPGKTLRLVSRWFRADCLPGVLVFFFAFALVFVSAP

SEQ ID NO: 365299 - protein, 82 aa, Zea mays
  Clone ID: MRT4577_9631C.1.pep
VGACGKSYVAAVASTWNNQNYFSISSKSLALQVRPVLGMGVSWDGQPMWPGCGWLTYRVYPFICSVVMFFNIKNVHEPFFTH

SEQ ID NO: 365300 - protein, 96 aa, Zea mays
  Clone ID: MRT4577_96320C.1.pep
WFWQEEQVWCSADSCRTESPGHEIEGASPHLQGVRLASVCPSLDPTHVGAFGTRSTFDSFCRMHAVLQSSPMHPPYALMIYHIINHSKNKFSPLAS

SEQ ID NO: 365301 - protein, 78 aa, Zea mays
  unsure (1)..(78): unsure at all Xaa locations
  Clone ID: MRT4577_96321C.1.pep
GHSLGEPQRPWRARSRSGGNGSRRCGHVAKRESVQSRPSVSSSSAGSTPCFQKLILYXFPPTDRLGVAVHCNLQNKSI

SEQ ID NO: 365302 - protein, 81 aa, Zea mays
  Clone ID: MRT4577_96322C.1.pep
NMVTLLTSGCFVTQLPTYLYLLRDLHNKLDNLNPSIKPFLSTSKAKYTPTHCHKSTQDFLDKIQPLFLVLRKHLDGAVSMI

SEQ ID NO: 365303 - protein, 198 aa, Zea mays
  Clone ID: MRT4577_96323C.1.pep
SNSRPAAEPQLPAGSPPDGPQLDPPNPSGRQPSSIHAPTPKNRRGERKKNTTKNNSRSRWPAANPPAPPQIRRERRRESHGPRLPASAATRPPPPPPSLSLSLEEREEREGRKEAGSGGLGREEKIIDVMGIKVVCEFRGVGFFFKCLNLNGCRTAGAAVERPGGFLCGCACRVGVELLWRLLRYRIGKVLNRPSCRI

SEQ ID NO: 365304 - protein, 131 aa, Zea mays
  unsure (1)..(131): unsure at all Xaa locations
  Clone ID: MRT4577_96324C.1.pep
AHILQHHLLPLSQIATAXSQEQPCLPLNQWGALYRSAYLQXQILLPFGQIATSCTTSTMKQQHSITFYHQSVANTATVLQLLQLLPFVQLALTXPACLYQHHMIVGVIFQMDYNLEFNNEGARLLNVAYLK

SEQ ID NO: 365305 - protein, 473 aa, Zea mays
  Clone ID: MRT4577_96325C.1.pep
MGSVVALYSWMVRGHLHPMVQLADRLAGHGVPITMAIADVPSSSESHDTVARLSATYPSVSFHLLQAATARSGDEADPDADPFITLIADLRATNPALLAFVRSLPSVKALVIDFCGCALDAAAEVGLPAYLFFTSGASPLSVYLHIPVMRPDVSFGDMGRSLLHFPGVHPVPASDLPEVLLLGPRNEQYRATIGLFEQLPRAKGILANTFEWLEPRAVRAIEQGSPRPGEPVPRLFCVGPLVGEERGGDGKHNECLTWLDARPARSVVFLCFGSASSLPAEQLREIALGLERSGHAFLWAVRAPVAPDADSTKRFEGRGDAALEALLPDGFLDRTRGRGLVVPTWAPQVEVLRQPAIAAFVTHCGWNSTLEAVTAGVPMVCWPMYAEQRLNKVFVAEGMKLGVVMEGYDEAMVKAEEVEAKVRLVMESQQGEELRGRLAVAKDEAAAAALETAGSSKAALDDFISNLQISRNQ

SEQ ID NO: 365306 - protein, 76 aa, Zea mays
  unsure (1)..(76): unsure at all Xaa locations
  Clone ID: MRT4577_96326C.1.pep
FLGTPPAFPADFPTESRASASHSSQRHCSPPGLRAPPVRTSLPPASSPPWLRSXRSLSLHKSGRLRWIGKHNSRLE

SEQ ID NO: 365307 - protein, 51 aa, Zea mays
  Clone ID: MRT4577_96327C.1.pep
SILRIQGYRQHAAPMSKVFTLDSVTKHKCKQDSWLIIGSKEYDVTQTWVYH

SEQ ID NO: 365308 - protein, 101 aa, Zea mays
  unsure (1)..(101): unsure at all Xaa locations
  Clone ID: MRT4577_96328C.1.pep
MESTVERISSSVQSWVKDHELAAIGGVWAAAVGASVAYSRRKAPQRXRACASSTPGCTRRRSRSPSSAAPPSSTATATAAAGRGPTTSTSTSTRSXAGHRR

SEQ ID NO: 365309 - protein, 208 aa, Zea mays
  Clone ID: MRT4577_96329C.1.pep
GRPGLLPGLGWRIPSPWGLDLAPLGLGAAMGGGCAGLGHQVLRLRGRIRGPLGLGLRPGAGLSHPAATGEGVACAGVDGGNRKRLRRAAVCHTRQEWGDIYATTNVPLHQPSLPLQRDQALAIINKLSNRRVSSSSSVVSEISYNDEPALTRSHSMISEMQFSSGSSGNSVYKSFQRDNLPNNSDEASVSEISENVNHLSGQDDLRLE

SEQ ID NO: 365310 - protein, 310 aa, Zea mays
  unsure (1)..(310): unsure at all Xaa locations
  Clone ID: MRT4577_9632C.1.pep
KCRESETEIDDKHETNRKEDDKARVPAGLLLLSVHSCPISIVVKKTEQGKKPGDISVAKKKKKRGWNSGSLRTQIHSCXGMKPKLCGQEQECRDLFRRSLFIVGEFGGNDYNSPLFAFRPLAEAHDMVPHVVESIGRGVERLIAEGAAELVVPGVLPIGCFPVYLSIFRRQPAGGYGARSGCVKELNTLSWVHNAALRRKVEELRARHPGVRIVYADYYTPAIQFVLHAEKYGMLKQTPRACCGAPGVGEYNFNLTSKCGEPGAYACPDPSNHWSWDGIHLTEAAYGHIARGWLYGPFADPPILDAKHLG

SEQ ID NO: 365311 - protein, 119 aa, Zea mays
  Clone ID: MRT4577_96330C.1.pep
LSFSACYRETDDVLPRQASSEQGTSKEKQPEQITQDSPAAQCGQKRQRSDDNASGRAATNLQGQLVEILDRSSQMVAAQLEAQNMNSRLDREQRKDQVSSLLGVLGKVADALYRIADKL

SEQ ID NO: 365312 - protein, 121 aa, Zea mays
  unsure (1)..(121): unsure at all Xaa locations
  Clone ID: MRT4577_96331C.1.pep
MESTVERISSSVQSWVKDHELAAIGGVWAAAVGTSVAYSRRKAPQRXRACASSTPGCTRRRSRSPSSAAPPSSTTTATAGAGRGPTTSTSTSTRSXAGHRRRRQREPAVELVGGEGRTVAD

SEQ ID NO: 365313 - protein, 122 aa, Zea mays
  unsure (1)..(122): unsure at all Xaa locations
  Clone ID: MRT4577_96332C.1.pep
MESTVERISSSVQSWVKDHELAAIGGVWAAAVGASVAYSRRKAPQRXRACASSTPGCTRRRSRSPSSAAPPSSTTTATAGAGRGPTTSTSTSTRSXAGHRRRRQREPAVELVGGGGAEEEEL

SEQ ID NO: 365314 - protein, 121 aa, Zea mays; identical to SEQ ID NO: 365312
  unsure (1)..(121): unsure at all Xaa locations
  Clone ID: MRT4577_96333C.1.pep

SEQ ID NO: 365315 - protein, 121 aa, Zea mays
  Clone ID: MRT4577_96334C.1.pep
GGTHHFPGIFVGKRYIPRTNSGDGRSLKPDKTSLASPPCFPFRLGHNTISFTPELHWTALDWTGPKNGCWLLNGLPCFSPKGKPNKNPSFLPRPNPCMYRPTEASLPSRPVPAGQFPKAKG

SEQ ID NO: 365316 - protein, 121 aa, Zea mays
  unsure (1)..(121): unsure at all Xaa locations
  Clone ID: MRT4577_96335C.1.pep
MESTVERISSSVQSWVKDHELAAIGGVWAAAVGASVAYSRRKAPQRXRACASSTPGCTRRRSRSPSSAAPPSSTTTATAGAGRGPTTSTSTSTRSXAGHRRRRQREPAVELVGGEGRTVAD

SEQ ID NO: 365317 - protein, 193 aa, Zea mays
  unsure (1)..(193): unsure at all Xaa locations
  Clone ID: MRT4577_96336C.1.pep
MKQEGSARRRGADKAKPPPGGEQEPPPPAPQDVEMKEEAAAGSGSTGEGDGKAAATEHSQRELDTVTLEDIKEHVRQLEKAVSGKEPRFVLRALRMLPSTSRRLNHYVLYKAVHGFFTSNNATRDFLLPFLEEPMDTEADLQFRPRTGKAASAPLLPEVEAYLQLLMVIFLMNSKRYXEAQKISDDLMQKIST

SEQ ID NO: 365318 - protein, 122 aa, Zea mays
  unsure (1)..(122): unsure at all Xaa locations
  Clone ID: MRT4577_96337C.1.pep
MESTVERISSSVQSWVKDHELAAIGGVWAAAVGTSVAYSRRKAPQRXRACASSTPGCTRRRSRSPSSAAPPSSTTTATAGAGRGPTTSTSTSTRSXAGHRRRRQREPAVELVGGGAEEKEEL

SEQ ID NO: 365319 - protein, 113 aa, Zea mays
  unsure (1)..(113): unsure at all Xaa locations
  Clone ID: MRT4577_96338C.1.pep
LVPQSGCLNSCEYTKPTYDAYAXNKHCLPSQXLLNQAHRTFLQPINIDLVLIEHYGGNPSKIYFATRXLHEVXSQVSYAHPDQYDRCCSQLPIQSYGPALILECPNNGHCISN

SEQ ID NO: 365320 - protein, 114 aa, Zea mays
  unsure (1)..(114): unsure at all Xaa locations
  Clone ID: MRT4577_96339C.1.pep
MESTVERISSSVQSWVKDHELAAIGGVWAAAVGASVAYSRRKAPQRXRACASSTPGCTRRRSRSPSSAAPPSSTTTATAAAGRGPTTSTSTSTRSXAGHRRRRQREPAVELVGA

SEQ ID NO: 365321 - protein, 191 aa, Zea mays
  unsure (1)..(191): unsure at all Xaa locations
  Clone ID: MRT4577_9633C.1.pep
DAWAQRKQHRRTGRARPSPISPRSPGPPAKRCDGGDREIARRRRPAAAGDDLRRPRRXRNXGPPRAPAPPPPLGRRXRSPSCPSRPPTXPRRXTARAQTLSPQARRRRGPSRRSRPSPCRRHRXAREVQAVGNDPRRGQPSPRAAHRRARPRPRFPLPHRLXQDGQRRRRRXRSPSTSTRRSPPSGAARPR

SEQ ID NO: 365322 - protein, 122 aa, Zea mays
  unsure (1)..(122): unsure at all Xaa locations
  Clone ID: MRT4577_96340C.1.pep
MESTVERISSSVQSWVKDHELAAIGGVWAAAAGASVAYSRRKAPQRXRACASSTPGCTRRRSRSPSSAAPPSSTATATAAAGRGPTTSTSTSTRSXAGNRRRRQREPAVELVGGGAEEKEEL

SEQ ID NO: 365323 - protein, 155 aa, Zea mays
  Clone ID: MRT4577_96341C.1.pep
SRQQQRGRRRGPWTSCGASSPPYREDPLLHQPARGGATTFCNHDAAVFPAILGFEVYRLDLKDRRWARVKKLPGDRRALFVSHGSSFAVRSSETAGCRSNCIYFVGNKWYCSLCNRDAGKTWGVYSMEDREVLFEHAVTEPGPCSAATWFLPSVV

SEQ ID NO: 365324 - protein, 84 aa, Zea mays
  Clone ID: MRT4577_96342C.1.pep
MEGAGRDANPLRSYRIGRTLGIGSFGKVKIAEHILTGHKVAIKIINRLKIRSLKMEKKVKREIKLLRLLMHPYIIPPYEVIHTP

SEQ ID NO: 365325 - protein, 202 aa, Zea mays
  unsure (1)..(202): unsure at all Xaa locations
  Clone ID: MRT4577_96343C.1.pep
MGSNNASCALSVLLLIVICAAAALRADASQADRLREFIRSRRNSRPSDDKGAFKVTNVPQQRVATSSLLSTSSYSDSEQSAMKAADKITALPGQPDGVDFDQYAGYVTVDETNGRALFYYFVEAPQDASTKPLLLWLNGGPGXSSFGYGAMQELGXPFRVNSDNKTLSTNTNAWNNLANVIFLESPAXVGLSYSNTTSDYEL

SEQ ID NO: 365326 - protein, 58 aa, Zea mays
  Clone ID: MRT4577_96344C.1.pep
DIYGFLFFLLLGWKKSSLASQISFQWRHLVGASYAHRCAAACSMSAARSGSIDQPVRG

SEQ ID NO: 365327 - protein, 73 aa, Zea mays
  Clone ID: MRT4577_96345C.1.pep
RANGRATNKRRTAEQNEQLAICNQGLKREAMRQPEGLTRKKKGAHLSAVGGGRGGWLSSHARRPPSFQRIWTL

SEQ ID NO: 365328 - protein, 40 aa, Zea mays
  Clone ID: MRT4577_96346C.1.pep
RRPSSDGFSRRYLVLRRQRKRWWGGKVSLKVPFPPCCCVF

SEQ ID NO: 365329 - protein, 85 aa, Zea mays
  unsure (1)..(85): unsure at all Xaa locations
  Clone ID: MRT4577_96347C.1.pep
VPVPVGSPPCSLASLVVRWSLPLSSLPRRARSAGFRLVLGACLSFVSAGSVAPGGLAGASXFRRRCFPACLAGGRGRFGGRRRRV

SEQ ID NO: 365330 - protein, 88 aa, Zea mays
  unsure (1)..(88): unsure at all Xaa locations
  Clone ID: MRT4577_96348C.1.pep
MVCTGTGAGGKDKKVAXGSRIGGPXRRXSVSRSVXAELHYPVIRIGRYLKIWPYAHCVXTSSPVYLGGGFICLSHEHLEFDGNADYYR

SEQ ID NO: 365331 - protein, 150 aa, Zea mays
  Clone ID: MRT4577_96349C.1.pep
MDYTLAALKIFGSQLAGCTEAPCSEGCSAAQMLSGIRFQRAWVQGMILSTDYNESGGGRLLLDDGSCVANLFVLPREAEGRFWRPGMYVMVIGAYIAAESRDNYPSIKVHKMVDLSSQPDREAMWYMEVAEAYSLFYLPFSVAASPPPPS

SEQ ID NO: 365332 - protein, 66 aa, Zea mays
  Clone ID: MRT4577_9634C.1.pep
PEFGPRGPLKSKGARVLSSSRAPAPRTWAPPGVFMFKRPTKLNHFSPPGLGSRRFFWKPNHPGGDP

SEQ ID NO: 365333 - protein, 95 aa, Zea mays
  unsure (1)..(95): unsure at all Xaa locations
  Clone ID: MRT4577_96350C.1.pep
MDSHREESSSPFDIGFASDVDANDMFMVLTSLQHTLLHHHILNIYSGSLTQTWISHNSXLSYIPSEHQSCLSYVARQDSQMLRSIHQRAFTATNP

SEQ ID NO: 365334 - protein, 81 aa, Zea mays
  Clone ID: MRT4577_96351C.1.pep
IPPAPAPASLIRSFLLAVPPPPYSTTSSSAPNVDSFSAMPLDRPSSPNIFLPHMLAAAAFHPVRTPRFCTRAWMLTALLLW

SEQ ID NO: 365335 - protein, 56 aa, Zea mays
  Clone ID: MRT4577_96352C.1.pep
HAPLRKLESFKEAGFFFFFLAQTLHMFSTYCITGIYTPITIYYLQCSGRDHAILDD

SEQ ID NO: 365336 - protein, 64 aa, Zea mays
  Clone ID: MRT4577_96353C.1.pep
TASSCRRSWPRRRAASAAAGAAAGEASVRRPSRRSRRTGLPRSTDSRRCSGTAIADRTRGRPES

SEQ ID NO: 365337 - protein, 110 aa, Zea mays
  unsure (1)..(110): unsure at all Xaa locations
  Clone ID: MRT4577_96354C.1.pep
STLSNTRTVTLSCILNTYXPRMYIDDGQRVINFIAQALKKEPLTVYGHXKQTKILQYVSDLVKGXLLNLIESEHEWPFNLXYPGXFTILNLDNVXVHYTINXNSRIEFLK

SEQ ID NO: 365338 - protein, 102 aa, Zea mays
  unsure (1)..(102): unsure at all Xaa locations
  Clone ID: MRT4577_96355C.1.pep
MVQRLTYRKRHSYATKSNQTRVVKTPGGELVYQXQGIPHLRPAEYKRSRLARNQRTVNRPYGGVLSGTAVRERIIRAFLVEEQKIVKKVLKIQKTKDKASKS

SEQ ID NO: 365339 - protein, 104 aa, Zea mays
  Clone ID: MRT4577_96356C.1.pep
LFFGFLPPFLFLAKTGCRPPHTPGNSLFFGQKKKMGPLKGSNFQVLTMLSKKPGKKKKIFFFLKACPDAGDLDQIPQHLGQIGTKPLEGPLEQPLSPKQALKER

SEQ ID NO: 365340 - protein, 119 aa, Zea mays
  Clone ID: MRT4577_96357C.1.pep
MVQRLTYRKRHSYATKSNQTRVVKTPGGKLVYQYTKKRASGPKCPVTGKKIQGIPHLRPAEYKRSRLARNQRTVNRPYGGVLSGTAVRERIIRAFLVEEQKIVKKVLKIQKTKDKASKS

SEQ ID NO: 365341 - protein, 119 aa, Zea mays; identical to SEQ ID NO: 365340
  Clone ID: MRT4577_96358C.1.pep

SEQ ID NO: 365342 - protein, 138 aa, Zea mays
  unsure (1)..(138): unsure at all Xaa locations
  Clone ID: MRT4577_96359C.1.pep
MAARDEAIADAVPNKDISRTFQAGLQLPLRRXSAQILKIMKKRERMGXAAPPVYLSADLEYLDAXGLQLGANSARHNKNTRIVPRIIQITTTNNKKLTKLLGAATITSGRSMPQXIHQELLSNNAGSSNASTVDDHHN

SEQ ID NO: 365343 - protein, 367 aa, Zea mays
  Clone ID: MRT4577_9635C.1.pep
MGVRLPVAWSAVLVLLVRAAVAREYAAIFNFGDSLVDAGNLVVDGIPDYLATARLPYGMTHFGYPTGRCSDGRLVVDFIAQELGVPLLPPSKAKNATFHRGANFAITGATSLDTPFFVERGLGKTVWNSGSLHTQIQWFQDMKPKLCGQEQECRDLFRRSLFIVGEFGGNDYNSPLFAFRPLAEAHDMVPHVVDVIARGVEELIAEGAADLVVPGLLPTGCFPMFLSTFVGKPAAAYGPRSGCNRELNTLSWVHNAALQRKVEELRARHPDVRIVYADYYTPAIRFVLHAEEYGMLRQTPRACCGAPGVGEYNFNLTSKCGEPGAYACQDPSNHWSWDGAHLTEAAYGHIAKGWLYGPYADPPILHP

SEQ ID NO: 365344 - protein, 51 aa, Zea mays
  Clone ID: MRT4577_96360C.1.pep
HYHNWDTPIQLICTLGTHSGDANKTKINPPFGLHTLYIWRDVPLNGPCGNK

SEQ ID NO: 365345 - protein, 152 aa, Zea mays
  unsure (1)..(152): unsure at all Xaa locations
  Clone ID: MRT4577_96361C.1.pep
APGPGHGRHGAAAAEGPETARXPKHPSGHGEGPRGDAAIPPSSTGRGKETSTLAREGPSRSRQRQGSRGTGEGTRSRSRGAPREQTAAPEXDTTPAATGTKPKAPPPRRRWVARGKTRAPFISPRHGQGSQAALRTXRRTHTEGAPPRQGPR

SEQ ID NO: 365346 - protein, 59 aa, Zea mays
  unsure (1)..(59): unsure at all Xaa locations
  Clone ID: MRT4577_96362C.1.pep
KNPPPPPRRKKFRPSPPQXKAPVPKKSPPPPKKPPPKKPPPSKKPPPPFRKPPSLKPKN

SEQ ID NO: 365347 - protein, 69 aa, Zea mays
  Clone ID: MRT4577_96363C.1.pep
SIGQPGLIDATRCLANSVSGVFSRDPREWSKIIMRWRMQRAEQIHGSCVGHLVTHALSKNIADGSCYRY

SEQ ID NO: 365348 - protein, 158 aa, Zea mays
  Clone ID: MRT4577_96364C.1.pep
HKHTSDSSSPEDDPEAVRSKDAAEATRSEELVVEGRKSHPCLVWSPSPETTAPATAGATRVPHGRRRRRCRRLPRLAQTPLPCALAAHSLRTHRHRLPARLGSVVFARSWWSTAIGRPPRGGTTAGPRIATAVYRRPEGTAAADHTPERTVTTTKTSW

SEQ ID NO: 365349 - protein, 45 aa, Zea mays
  Clone ID: MRT4577_96365C.1.pep
SVCALAFASPDVSALTMDVVFPGPSLYVGSVVLVPILISQFSVVC

SEQ ID NO: 365350 - protein, 99 aa, Zea mays
  Clone ID: MRT4577_96366C.1.pep
FKRRGFGSCSKFVCRPWTSQERREKEKEIATRRSAMADKARASLTDALPYEVRACLSVYGAFAFDSTACAFDAGFYVLFQSRNLIRSSYFESFRLLLDR

SEQ ID NO: 365351 - protein, 85 aa, Zea mays
  Clone ID: MRT4577_96367C.1.pep
MMASHIWMTHTSASSVMEPSQPVSRSALAHSTRGDPIHVWLSAFINHEQLVSECVLTFTIGCVCVLIVLDGQFLLLFKYPVAQKE

SEQ ID NO: 365352 - protein, 123 aa, Zea mays
  Clone ID: MRT4577_96368C.1.pep
MASASVPMAFSLSSVINNNKPSSEAFFRPLPLRQPKRTLFTTKAVSNSKAQINASLKEKAVAGLTAASVTASMVVPEVAHAAGYEFSPSLKNFLLSIFAGGFVLVAIFGAVIGVSNFDPVKRT

SEQ ID NO: 365353 - protein, 94 aa, Zea mays
  Clone ID: MRT4577_96369C.1.pep
THASADGGAQQDGSKMATDFLECMLKMEREGGDGKATFTMTDVKSLLLDMVVAGTETMSNTVEWAIAEMLQKPGVLRKGQEELDMVVSRDAIVE

SEQ ID NO: 365354 - protein, 138 aa, Zea mays
  unsure (1)..(138): unsure at all Xaa locations
  Clone ID: MRT4577_9636C.1.pep
GAGAGTPTAATKRNPRGTSARRKSRTAHGTAPPAXRRXRTXAARATERRHKGRGRANPTRKDDEEQAGRGTNKGXEGKAAQAHRRRGAXHAEXATREKGNGXTANGGSHPPKGXGPKRKPDKDRKARXDRKGRGRAAD

SEQ ID NO: 365355 - protein, 254 aa, Zea mays
  Clone ID: MRT4577_96370C.1.pep
MPVSRIAVGAPGELSHPDTAKAAVAEFISMLIFVFAGSGSGMAFSKLTDGGATTPAGLIAASLAHALALFVAVSVGANISGGHVNPAVTFGAFVGGNISLLKALVYWVAQLLGSVVACLLLKIATGGAAIGAFSLSAGVGAMNAVVLEMVMTFGLVYTVYATAVDPKKGDLGVIAPIAIGFIVGANILAGGAFDGASMNPAVSFGPAVVTGVWENHWVYWVGPLAGAAIAALVYDIIFIGQRPHQQLPTTAADY

SEQ ID NO: 365356 - protein, 48 aa, Zea mays
  Clone ID: MRT4577_96371C.1.pep
AFGWFWLRVLGHPGALFGGAAVPCVVFVAVASLVGGFSLVPGLFLSVF

SEQ ID NO: 365357 - protein, 103 aa, Zea mays
  unsure (1)..(103): unsure at all Xaa locations
  Clone ID: MRT4577_96372C.1.pep
KYVSKQRQHHLELLQCEIKDFPCSYLELPLSIWKPTNAELLPLIDKVADKLPGWKAMLMVEXGRLVMVKVVLSSIPVYLMLTMDLPKWVINAIDKRRSFLWKG

SEQ ID NO: 365358 - protein, 38 aa, Zea mays
  unsure (1)..(38): unsure at all Xaa locations
  Clone ID: MRT4577_96373C.1.pep
YGITQSWWSRTYSLPSCLKQCTVKKTPVFLGMVLGXLF

SEQ ID NO: 365359 - protein, 267 aa, Zea mays
  unsure (1)..(267): unsure at all Xaa locations
  Clone ID: MRT4577_96374C.1.pep
VYTLASLQHPNLCKLIGYHARDESNERMLVYERLHHGSLDRLLFGRPEGRLMDWSTRLKVALGAAKGLAFLHDEGPFQAMYDDFSTSNIQIEKDFTAKLSGYGCVGFNSEEERSKASVTATNLSEETLEKGVLTPKSNVWSFGVVLLELITGRKNLDVRSAKEERNIVKWGRPFLTDDSRLSLIMDPRIKGRFPPKAARTVADIILKCLHRDPSERPTMRAVVESLASVQDIKVPCPYPLSVPSXRTRKVMLXSTSLNGIXPQHPVM

SEQ ID NO: 365360 - protein, 165 aa, Zea mays
  unsure (1)..(165): unsure at all Xaa locations
  Clone ID: MRT4577_96375C.1.pep
MPEKHGAGARGTRDLTGQPFRKKGYMTVTMYLSTYKIGDYIDDNVNGAVHKGMPNKLYHRRSGSVWNGTKRAISGEINKQINGRIIRKRIHVRVQHVQAYGRTEEFRXKKAKNDQLKEDAKARGEVISNERQTERPTPGSMAEGATLETATPIAYDVANDLKGGH

SEQ ID NO: 365361 - protein, 99 aa, Zea mays
  unsure (1)..(99): unsure at all Xaa locations
  Clone ID: MRT4577_96376C.1.pep
MGCFHSTAKRQHPGYEDPVDLASQTSFSVSEVEALFELFKSISGSVIDDGLINKEEFQLALFKNQRKENLFANRIFDLFDVKKRGAIDFXDFVRALSSN

SEQ ID NO: 365362 - protein, 147 aa, Zea mays
  unsure (1)..(147): unsure at all Xaa locations
  Clone ID: MRT4577_96377C.1.pep
MGCFHSTAKRQHPGYEDPVDLASQTSFSVSEVEALFELFKSISGSVIDDGLINKEEFQLALFKNQRKENLFANRXHLLDNHTHLNFITTILCFENYCHQLNLHXTGXIFDLFDVKXRGAIDXGDXVRAXNVFHPNIPMDEKIDFSFK

SEQ ID NO: 365363 - protein, 105 aa, Zea mays
  unsure (1)..(105): unsure at all Xaa locations
  Clone ID: MRT4577_96378C.1.pep
MVQMAVLAPTGDMTAGRRTGKLLLNSCHEQLAHQRKDREMATPQLEFRXAINXEDMFEMRKHRLAALGQDLSTTATDQPFGSTGTSTFVVRAFSEYXGLRKALDP

SEQ ID NO: 365364 - protein, 78 aa, Zea mays
  Clone ID: MRT4577_96379C.1.pep
MGCFHSTAKRQHPGYEDPVDLASQTSFSVSEVEALFELFKSISGSVIDDGLINKGFWETIPMPLQTEITNSVARVQLP

SEQ ID NO: 365365 - protein, 56 aa, Zea mays
  Clone ID: MRT4577_9637C.1.pep
GASKLVPVGFGVQKLPLMMSLVFALVFVLTLSGAHFWAEPVSVYVPRCGILSFNKI

SEQ ID NO: 365366 - protein, 101 aa, Zea mays
  unsure (1)..(101): unsure at all Xaa locations
  Clone ID: MRT4577_96380C.1.pep
MDLPAVDITPNLGATARGPAALGVEELPALCSTVSSSLRDTGALXVMDPRCSGADNDRLLDVEQRFLFRSRDTERLQELAHLHYQGGVTPVGVGVPRSLVD

SEQ ID NO: 365367 - protein, 41 aa, Zea mays
  Clone ID: MRT4577_96381C.1.pep
SKIVKFYFWMVLIMIHFINRWIYTNYLLLEGHNSVRFLQIR

SEQ ID NO: 365368 - protein, 82 aa, Zea mays
  Clone ID: MRT4577_96382C.1.pep
DSMRKFLENISNEPPCQDPIKRAIRALLEVVESGGQNVEQARIPQEHGLRSRQQPQTYRSDDDMWSRRPPQVPAIQPGSARP

SEQ ID NO: 365369 - protein, 92 aa, Zea mays
  Clone ID: MRT4577_96383C.1.pep
SIKVHPKVPTRAGSNFVFYSIPQVTYHLNVLSTRGPTQTHCFMLSIPDFPDVPGRHDPRTARSDPAPVPARGLPGGGRLIVFPPHQHRHHLL

SEQ ID NO: 365370 - protein, 72 aa, Zea mays
  Clone ID: MRT4577_96384C.1.pep
SFTRPVLATARLIIRWCAKMRATPYGTPWDSLSSMRLEDLTDAYKSPHINPSEITNYNGTNTLNHPYRKADT

SEQ ID NO: 365371 - protein, 57 aa, Zea mays
  unsure (1)..(57): unsure at all Xaa locations
  Clone ID: MRT4577_96385C.1.pep
TTLPFICAFLLLPFMSPMMVIFPMFPNIFFSTTSSFYCPCVVXALYLNSYLTYSFSL

SEQ ID NO: 365372 - protein, 86 aa, Zea mays
  Clone ID: MRT4577_96386C.1.pep
WRGNEGNIPLALKRMNPGPRKGRGNPKGPLPFLQKKPHGFWAFPFFPGPRTNHLQGKIGLLTLARKLGGPGQQDPKGCGRITHFLY

SEQ ID NO: 365373 - protein, 118 aa, Zea mays
  Clone ID: MRT4577_96387C.1.pep
GPDDPSTGNISFSLDPASSNLQMFIWNGTLPYFRSSVVNDVSVSGGTYQANNTSVTYQGILVDTGDEIYYTFTVLAGSPYMHFSLHYTGKMRILAWENSTSSWVVIFEGPSVGCDLYA

SEQ ID NO: 365374 - protein, 231 aa, Zea mays
  unsure (1)..(231): unsure at all Xaa locations
  Clone ID: MRT4577_96388C.1.pep
MMTMDLIGGYGRADEQVAIQEAAAAGLCGMEHLILQLSRTGTSESSPVGSSEAPEQQVDCREITDMTVSKFKKVISILNHRTGHARFRRGPVVAQSQGPAVSEPAPVRASSSRSMTLDFTKASSGYGNDAGFSVSAASSSFMSSVTGDGSVSNGRGGGSSLMLPPPPSXSCGKPPLASSAASTGAGAGQKRKCHYHAHSENGAGGKYGASGGRCHCSKRRKIRVRRMTPVP

SEQ ID NO: 365375 - protein, 149 aa, Zea mays
  unsure (1)..(149): unsure at all Xaa locations
  Clone ID: MRT4577_96389C.1.pep
GTPRTPRPCLRRVPLPNGLLLRPTGTLAPRPSSLGSCPDPTPRHTTWRRTRRSRASGVHRRRGGAAPRAWCCSFAGVPDSPDLRPIPSSAASPAAASRKLPPKSPPAASFYGSPTSSRLAGLGGLIDPXRILSPGRVSPIDPDGDQSAL

SEQ ID NO: 365376 - protein, 51 aa, Zea mays
  Clone ID: MRT4577_9638C.1.pep
MEMKKIACAVLVAASAATVALAAEAPAPAPTSGSSVDVPAVGTACRPVLTC

SEQ ID NO: 365377 - protein, 169 aa, Zea mays
  unsure (1)..(169): unsure at all Xaa locations
  Clone ID: MRT4577_96390C.1.pep
MMQNIRDSSQQDRRVYVGNLSYDVKWHHLKDFMRQAGEVPFADVLLLPNGMSKGCGIVEYATREQAQNAVATLSNQNLMGRLVYVREDREAEPRFSAPXRSXGDFGGGMGRGGGYGGFGGNNAAAGGQPEHDRSMSXLPYNVGWQDLKDLFRQAGNNGQVLRADVHIAP

SEQ ID NO: 365378 - protein, 629 aa, Zea mays
  unsure (1)..(629): unsure at all Xaa locations
  Clone ID: MRT4577_96391C.1.pep
IGYLEAGRDSFHWTARLLAATPRTRRPCLRRVPLPNGLLLLRPTGTLAPRPTTTSSLGSCPDPTPRHTTWRRTRRSRARASTGGAAXAPRAWCCSFAGVPDSPDLRPIPSSAASPAAAXRGXLPPKSPSAASFYGSPTSSRLAGLGGLIDPRRILSPGRVSPIDPDGAVPLPPPTPPPPPPPAEYPAAVGTAEQPAPVLASALPSAAVAPQVVSVREEADAHAAGVLDLKLFLRGRDGRCVLMELDSTVLCGCSDFFAAMAPHEDAAATAAGAGAAGKTIEVDGVDNLDAFRAAVELMYDSDPMRGLAAAGVSRAIDVLEVCSSIMFSKGIKTCLTYIEAVPWNENEEEKLKNLFARFTFDEAISQDILARLRPHNWKSSDDLAVQLIQSVTNSTSTMARKDMQSLVNGLLSKSSVYQKDSSGLNKESLYQICYSCLESLVDLFEEAIEPTYYTGQAVVVRGSKPLIERISTQTENLNWLLDILVNIDIAEEFVELWAKQGRLIRMHEQASAIVRYELSRISAGVFIALGKGKVQCRGDVRSLLFHGWFSTMLLDFGWLQRCPKGLDLRSLEENLGRGLLTLPLRQQQCLFEEWFQFYATKGPECPNLIRAFQVWWRRSFIRSLVEPQN

SEQ ID NO: 365379 - protein, 150 aa, Zea mays
  unsure (1)..(150): unsure at all Xaa locations
  Clone ID: MRT4577_96392C.1.pep
QASDQTSPRPPIPTSPTRADTPTPRQPRPVEEQQPAAGHADGRRGRDRAYKGSEGGGTAXEDQAPTKRDPTANGLKAETTRDERPRGPTNRXPKGXKRXPAPAKKTEXRPAPRGAKDPNEAAXERKRRNXPSGKEGXRSXEAAHEHAKEK

SEQ ID NO: 365380 - protein, 100 aa, Zea mays
  Clone ID: MRT4577_96393C.1.pep
MTGSMDLPAKGGFSFDLCRRNRDPRHTAPAPRTLVTSPPPTPWRTTPSRRSWTSTTRRSALRGPGSSTRRTGKARCSSPLPFSGFFNSFDGADFDDDDLA

SEQ ID NO: 365381 - protein, 67 aa, Zea mays
  Clone ID: MRT4577_96394C.1.pep
SYYIESVSMYDASQDQMYGHLNRDLYDDVLILKDVNSGMVCINVVFVGSHNMFIPPPSIMVLIDIKV

SEQ ID NO: 365382 - protein, 73 aa, Zea mays
  Clone ID: MRT4577_96395C.1.pep
MEDDAISTLMDIDDSPLSAAGAGFLDEEDGEGEMFFAPHRAARGGAGDARGPLPFSGFFNSFDGADFDDDDLA

SEQ ID NO: 365383 - protein, 160 aa, Zea mays
  Clone ID: MRT4577_96396C.1.pep
MVRGSLCMCSSASLLLFWLHLYDLTKEGSLDGPHLHTVYPHGSTDTLPFATMGSGSLAAMSVFESKYKEGLTREEGIQIVCEAICAGIFNDLGSGSNVDVCVITKGKTEYLRNHQLPNPRTYASSKGYSFTKGQTEVLSSKVTLLKQKVEVAEGGDAMEE

SEQ ID NO: 365384 - protein, 128 aa, Zea mays
  Clone ID: MRT4577_96397C.1.pep
SPKSASPGINTRLVFVRRRSLDDHPLSRYLHRLSISSSVHQHHLMVDSVLVLRIAWLIHVPFPQLTRIREIGSDFPIQAICRALGEYRAANSVFTRFLLGEYRAANSVFTRFLGFLDDTRNDDEIVSK

SEQ ID NO: 365385 - protein, 80 aa, Zea mays
  Clone ID: MRT4577_96398C.1.pep
GLSPFPPGGQGLFPRNPGGLEKGIPLKPLQKRIAQNGPLPQSLSGIGPPKFSYGAFCRRGNPPLKKIPKVRGGLTPHLGN

SEQ ID NO: 365386 - protein, 41 aa, Zea mays
  Clone ID: MRT4577_96399C.1.pep
YQALRVDLSEASPAAVATKKERLGLDFLSLTCTYEAPLPRV

SEQ ID NO: 365387 - protein, 62 aa, Zea mays
  Clone ID: MRT4577_9639C.1.pep
KPGPTHAFGPIKEVETLYLNLTYLSGGSENYSCALTLKLNHAIKQDTEAEFLMDRRAKMSYI

SEQ ID NO: 365388 - protein, 42 aa, Zea mays
  Clone ID: MRT4577_963C.1.pep
SLLGGLKLCAWSLKNQDAELLHSEPVIWCQHSVVAVDAWLVF

SEQ ID NO: 365389 - protein, 80 aa, Zea mays
  Clone ID: MRT4577_96400C.1.pep
PHTLIRTIYTTQLNRSIDSTPTPLLLGTLLLLLPSSLLLLLRSRGKRTATPIPIETADAHHHDMTHQLTRPNRTPADTPI

SEQ ID NO: 365390 - protein, 268 aa, Zea mays
  unsure (1)..(268): unsure at all Xaa locations
  Clone ID: MRT4577_96401C.1.pep
MSTHLLRHDGNTPNIMTMTAAQPSRATSIISSHEAAPPSSRDEQTNMNNKEKKKTDKKSTEYVIKSGLAGGFAGCAAKTVVGPLDRVKILFQTRNPQFAXYTGSWAGFPEAMRDIYATAGLRGLFKGHSATLLRIFPYAGVKFLAYEQIRARVIKNKAQETPVRRFVSGSLAGMMSVFLTYPLEVIRVRLAFETDENARSSLATIVRKIYSEQAPRVHRPENPITATATHLVDTVTPRSGLPNFFRGFTPTLLGMIPYAGRSXLXHDL

SEQ ID NO: 365391 - protein, 72 aa, Zea mays
  unsure (1)..(72): unsure at all Xaa locations
  Clone ID: MRT4577_96402C.1.pep
MSKLESESVKDAIFHIVGDAKEKNRKFTETVELQIGLKNXYDPQKDMRFSGSVKXLPHIXRTKKNVCMLVDA

SEQ ID NO: 365392 - protein, 55 aa, Zea mays
  Clone ID: MRT4577_96403C.1.pep
EPIKPTPMKGGSCAPASFIAYFAISAVTPWLVLCTTIRACLVYYLTCHTLPNFSD

SEQ ID NO: 365393 - protein, 70 aa, Zea mays
  Clone ID: MRT4577_96404C.1.pep
MLIRPAPVMSNQGRNAMPLNAPKADTQEYHDTDVAYLHNKNDEEKALKELNAHAQRGAIEGSGLTMRGLK

SEQ ID NO: 365394 - protein, 93 aa, Zea mays
  Clone ID: MRT4577_96405C.1.pep
LDGIARLGDSINKIIEVQHDRKQERKKVAETPLEISRLRLKAAQEQKEVKLLEVYSSLLQQDTSQLSNQGKITREKALPKMELKLFGDSENMM

SEQ ID NO: 365395 - protein, 67 aa, Zea mays
  Clone ID: MRT4577_96406C.1.pep
ERVVPPSLDTFFYPIGLTTLGGGLPLYQKIQNLFTILNTPSLTTIHSFKPKNYRTIAMMFSKTSVLL

SEQ ID NO: 365396 - protein, 39 aa, Zea mays
  Clone ID: MRT4577_96407C.1.pep
GRLTSHPPYMYRRLFIGAATPCHCPYLSIMRLNSLTTMP

SEQ ID NO: 365397 - protein, 50 aa, Zea mays
  Clone ID: MRT4577_96408C.1.pep
VPLQKIVLFTYYIIFQCLSYIKNTCHCFKILTLHLFQNNSSSVFCQLFAL

SEQ ID NO: 365398 - protein, 115 aa, Zea mays
  unsure (1)..(115): unsure at all Xaa locations
  Clone ID: MRT4577_96409C.1.pep
AREGRGLRCGGGGLSSAMASGGSSSGYSSYKAPGLRGALLEAAHLSCLEDRYPLXPHLGWGHFGVIRACSDLVTGEAXACKYIDKXRLVSPHHVRXVRLEIHVMGRLGGPPNGGG

SEQ ID NO: 365399 - protein, 129 aa, Zea mays
  Clone ID: MRT4577_9640C.1.pep
FIRSTSCWVSSRACLWLLEMLLNNCREPVHRQVIDNGLLPILVKIVKKKTDLPVREKLFLLLDATQTSLGGAKARLKAAGGRANGDGTRKTRTRDRPRAVPAPEANAELQANIDKRRLITYANAKSKSE

SEQ ID NO: 365400 - protein, 59 aa, Zea mays
  Clone ID: MRT4577_96410C.1.pep
FCTVVGGPVMPGFGSGLHPKGNQFLLFSPPKMCQLGCAPPFPQAGQKFGFISARMSWGL

SEQ ID NO: 365401 - protein, 50 aa, Zea mays
  Clone ID: MRT4577_96411C.1.pep
TLSTFSLQSLIVCFRFFFIGAGCVSHQFPPPPSVSHQLFLMRLSTRPGCM

SEQ ID NO: 365402 - protein, 203 aa, Zea mays
  Clone ID: MRT4577_96412C.1.pep
MLLSAGPKLSQNSTDLEHEVAMNLCFLPKQTHIYIWYICQFVVTILLLVFWPTNGLGSLPCMNTFMSFMRSVGAELLSRTKEKDDEDDGDYDMVFDAEGSMHLVKKAVAKTPSASSDSRPTGRGSVVARATAGRHRLEPDSSIRVDMGSEMTSEDGGKLARAGKSGARKVLQRLFRVIQSVLVIAALNAPLYMMLLFKDWIDR

SEQ ID NO: 365403 - protein, 65 aa, Zea mays
  Clone ID: MRT4577_96413C.1.pep
FPLLESKRNRFSPITMGGSVIKNILSPYKIQLIINSSSRSLLKKKKKKKKKKSCTSSDSTSCGKP

SEQ ID NO: 365404 - protein, 97 aa, Zea mays
  Clone ID: MRT4577_96414C.1.pep
PPSSSLVALPIGTGGCQYAVAYPVSFYTNPTHSWYGHQAVEVSGQCLSLQTRPFVKRAAAASDGGFKKCSSHLDLIRDIEGSLPLYTAHHGLQNHFS

SEQ ID NO: 365405 - protein, 175 aa, Zea mays
  Clone ID: MRT4577_96415C.1.pep
FNSPSTQPSTTQTPSYTIKMRFSYIATALFAAGAANAQIDSVIASLTSAAGSLPSNVASDVESLASRITSGAAGLPSGAASAASSIGSQITSGAAGLPSDAASAASSIRSSADAAASSIRSEAESALSSATASLGSAASSATSSAGSQSTGAANQNALPAMGAAAAGIFAIAGLL

SEQ ID NO: 365406 - protein, 228 aa, Zea mays
  Clone ID: MRT4577_96416C.1.pep
EAGPAGTSPPSDRRSTPVQVPARQEAGASRLHRTPTGPQQAPNKPARWRSWCCARLQPSTRPPGCSLRRRGGGGGSWPSPQRRPPRRPARCRPSTAAATGSWAVVIVSAMGVLRPDLIVKNIIPVVMAGIIGIYGLVVSVLISNGLSQHSSLFTNFIQLGAGLSVGLSGMAAGFAIGIVGDAGVRGTAQQPRLFVGMILILIFAEVLGLYGLIVALLMNSKAGGADEC

SEQ ID NO: 365407 - protein, 97 aa, Zea mays
  Clone ID: MRT4577_96417C.1.pep
PPTDTSMPAQRSLDEPVPAWCDTTNFWRAYTEKCTSTDGGCWLRNTQALYYKPKVSVTENAPEVELQLKELHRSERLEHTHYGGHPKWLDLTSTWRV

SEQ ID NO: 365408 - protein, 137 aa, Zea mays
  Clone ID: MRT4577_96418C.1.pep
MAEFSWLTALGFAFLTFNSGMAVYRSNGDAGSVVFVAVSYLDLVALFACLRLYERLDRHSPRRERLKAAVWALTTLLTVMFTYKVAEVMPLAVKLLVWAMAAATTCGGFYVFFVHDDKPYQQLQDASAAAERGDVAN

SEQ ID NO: 365409 - protein, 33 aa, Zea mays
  Clone ID: MRT4577_96419C.1.pep
ASYVALCFLFYTVTTPLESLRYNKVPQNCEYRL

SEQ ID NO: 365410 - protein, 54 aa, Zea mays
  Clone ID: MRT4577_9641C.1.pep
FSSSGEDEGDPLRAGRARPSPPLVSAQLGRHLISSPLPSVRVARGPLRSLELMS

SEQ ID NO: 365411 - protein, 71 aa, Zea mays
  Clone ID: MRT4577_96420C.1.pep
QKKLGHKTVIFSFNNCQAQWQSQIPGGLNPPVGLRGKENFRPLILKKGSPQPGGLEGPKNLGKKFNFLVFF

SEQ ID NO: 365412 - protein, 58 aa, Zea mays
  Clone ID: MRT4577_96421C.1.pep
PFSQLAASKPSLNWDTSSRCRIYTSSERITKHPYYDYNNECTYVQLAMTDPANPYHQH

SEQ ID NO: 365413 - protein, 107 aa, Zea mays
  unsure (1)..(107): unsure at all Xaa locations
  Clone ID: MRT4577_96422C.1.pep
TKPHVFKSPNSNTYVIFHXAESEDLSGQXQTQATNQFKASDSTQTISNPHXWPGTVRQXDEEVYXTAVEANDIKLAITHACHSRSKAAKALKDHNCDIGTSIMDLTT

SEQ ID NO: 365414 - protein, 54 aa, Zea mays
  Clone ID: MRT4577_96423C.1.pep
TPPPPRLLILNRPTPGFKTKSTNPCLISLAMEKKTRSTFKVVFALLSKKLMPYS

SEQ ID NO: 365415 - protein, 147 aa, Zea mays
  unsure (1)..(147): unsure at all Xaa locations
  Clone ID: MRT4577_96424C.1.pep
SLFLFFFPAGGSGLKVPPGPXPPGGKKPAQNHCPGPPRAWQRPPRQXLGKPPSSGPAQSPSGGSPPKPQPPHGTGVLGPPPPKKPPKKKPGSKKGGPNPRGGKTRALKXSPGWGGADPLDPKXQPPPENNYPRLGGGPPXNGGPPRP

SEQ ID NO: 365416 - protein, 141 aa, Zea mays
  Clone ID: MRT4577_96425C.1.pep
MRHDLVALLLRASSISVSGGACAAQTLHPLALKSGRATEARVATALAVAYARWGLVAHARRVFDEAPRRDLVLYNAMVSCYASHGLAREAWALFAAARRSGIAPDGFTFSALLRPPPRRGRHPTAGAADDGLPAQDGSPGA

SEQ ID NO: 365417 - protein, 90 aa, Zea mays
  unsure (1)..(90): unsure at all Xaa locations
  Clone ID: MRT4577_96426C.1.pep
EHRNLVCLCYGHLRQKDWXACNIGLLMSSAVFYGTHSYHSLWLWKGNEQICRSTDSAPMKFICYLPQSLYTAAASLTHAPKCCRPTRVVP

SEQ ID NO: 365418 - protein, 399 aa, Zea mays
  Clone ID: MRT4577_96427C.1.pep
MPPCCSPTTSAVTAAAASPGASRSGGLLRRSRPAPAAVNCKKIDSLRSINGAPPCIPVSNRSLLTPVTLPVFRDPNMRNDTRLRIFSGTANPSLSQEIASYLGLELGKITIKRFADGEIYVQLQESVRGCDVFLVQPSCPPANENLMELLIMIDACRRASAKNITAVIPYFGYARADRKSQGRESIAAKLVANMITEAGANRVLVCDLHSSQAMGYFDIPVDHVYGQPVILDYLASKTICSDDLVVVSPDVGGVARARAFAKKLSDAPLAIVDKRRQGHNVAEVMNLIGDVRGKVAVMMDDMIDTAGTISKGAELLHQEGAREVYACCTHGVFSPPAIERLSSGLFQEVIITNTIPLKEEKSFPQLTILSVANLLGETIWRVHDDCSVGHEPYSSLDID

SEQ ID NO: 365419 - protein, 91 aa, Zea mays
  Clone ID: MRT4577_96428C.1.pep
VSEFRNFHTQAELSKTKHTTAEQAVRQEMPPDIQQLKTFTAGRKKASLGKKGLNGARPTWEGGTTIPQKGGTNPTPTRTGGLLLGGPTGTP

SEQ ID NO: 365420 - protein, 163 aa, Zea mays
  unsure (1)..(163): unsure at all Xaa locations
  Clone ID: MRT4577_96429C.1.pep
PGLSAPSPQERGSRKHTRNGENAAKKGGAEXPKQRKXKKNARGTXXEXDXEXNDNPGGGGXXXXXPXTTXXXXXRXXPXXHXXXXEXXQKKXNXDPTKRXXGTEXXEHXNXXPGXEPSAKPPAQXPNXPDKDKNXSXKXXREXKXQEKXNNHXEXATKXSRGG

SEQ ID NO: 365421 - protein, 82 aa, Zea mays
  Clone ID: MRT4577_9642C.1.pep
GKKKGGEQGKWPAYGGETSTYTYSLITPMPGVGLQKKIGAPTLYAVCGYSRQKMYKGSYVFTKACKHALASSKCRAHTHKQR

SEQ ID NO: 365422 - protein, 113 aa, Zea mays
  unsure (1)..(113): unsure at all Xaa locations
  Clone ID: MRT4577_96430C.1.pep
SLSGRRSSLGGSARXMVVLQQYVESTRRAPSGTGPCIGGGEPXVTWXESDGLQRSVAVTITPCSANDXRQRRPFVAXRTRMTRAAVVLHNYTKPLARREAGPRSQWAVGIXLS

SEQ ID NO: 365423 - protein, 65 aa, Zea mays
  Clone ID: MRT4577_96431C.1.pep
HVLVETGDDEHCLKTRRAIDILVLRYVSLWNLQLYSKLGESSHLAHEWITDANGTLPDTLKRVSS

SEQ ID NO: 365424 - protein, 106 aa, Zea mays
  unsure (1)..(106): unsure at all Xaa locations
  Clone ID: MRT4577_96432C.1.pep
MKKREVKFVQRPSGVRFNRYCVYRVRESRQLPLGLGLGAPSLYAAVLARVSAAFNGPLARAVVFGVHIDGXHLVVEGLLIAVIVFQLSRKSYKPPKKPLTEKEIDE

SEQ ID NO: 365425 - protein, 76 aa, Zea mays
  unsure (1)..(76): unsure at all Xaa locations
  Clone ID: MRT4577_96433C.1.pep
MSAVLARVSAAFNGPLARAVVFGVHIDGHLVVEGLLIAVIVFQLSRKSYKPPKKALTEXEIDELCDEWEPSXLCPP

SEQ ID NO: 365426 - protein, 97 aa, Zea mays
  Clone ID: MRT4577_96434C.1.pep
SQRAARNPREASHEPHDRLSHKTYVPRLLCPFALGCDCLGSHGIARAGNLEPSPSTVVGSSDFGRGCTGVAALDCRACAHCISEARTPGVRPIIAPV

SEQ ID NO: 365427 - protein, 70 aa, Zea mays
  Clone ID: MRT4577_96435C.1.pep
WATGNPPEGVKDILENRQKDMGFFHPWIEKGLIDRFNDVVKKNFVPLSYPDAVELLLGSKKEFEFPVMHE

SEQ ID NO: 365428 - protein, 87 aa, Zea mays
  Clone ID: MRT4577_96436C.1.pep
RIDERERHMQIEVERKTLALGERDYDSIISQKRTEVYSLEQKIKVLLREKDIINRNADERVKLGLKKDALESSKDKLNEIVNEHKDK

SEQ ID NO: 365429 - protein, 45 aa, Zea mays
  Clone ID: MRT4577_96437C.1.pep
DVLAVQICLSLETVTQRCNSLWFEMDHTRHVIPRIVTLQCAHKQN

SEQ ID NO: 365430 - protein, 84 aa, Zea mays
  Clone ID: MRT4577_96438C.1.pep
FGGRARSSVVHVGFVLLVQGVRAAADGTELAEILQCACGASLSSGSRPRRRRPPHLAYGGVTEWWWCFSSRHGSSALMLLQGSY

SEQ ID NO: 365431 - protein, 86 aa, Zea mays
  Clone ID: MRT4577_96439C.1.pep
SLYAWRISFRGARQQIRVRDRSRGEVPRERFASRTAGVHGLDTYSGRLIGTYVRGLAWKRERDSSALCWWRRWRRGVYRSAAARVE

SEQ ID NO: 365432 - protein, 77 aa, Zea mays
  Clone ID: MRT4577_9643C.1.pep
PPLFFFFFCRRGFNSNFRSGLKNARINHVFPMVDEPFKVSLRATKPEGLKGLKSPYSILNKKWILTPPTPSDILALN

SEQ ID NO: 365433 - protein, 46 aa, Zea mays
  Clone ID: MRT4577_96440C.1.pep
KGKVCLSEIRGLFYTCRCFLSPKSILKFPSAFMISILELSTGSLSP

SEQ ID NO: 365434 - protein, 114 aa, Zea mays
  Clone ID: MRT4577_96441C.1.pep
HKKARTTGADAGANPEKTGTGAGGGTRFPHREPNESPEETRAKARPGGKGKPLTRPQNIPTRKHKGENPGAQKRELINNKSSARTAPYTVRKPGRPPAKKNYPTPEERGGEKWA

SEQ ID NO: 365435 - protein, 96 aa, Zea mays
  unsure (1)..(96): unsure at all Xaa locations
  Clone ID: MRT4577_96442C.1.pep
KKEEIKKKKKKKKKKKKKKKKKKKKRGGRFKKSKFTYPCMQRNSFFIVQPKLNXLAVVXKNVVXKNLGVTKLNRFEENPLFASWRKNKKARTNRLF

SEQ ID NO: 365436 - protein, 72 aa, Zea mays
  Clone ID: MRT4577_96443C.1.pep
SLFLFFFFFFFGVFFFFFFGGPKKMGGLVYKCPRKPLALFPVLPLCFSIKKRFKTDVAHQFPTPSRGGPRGV

SEQ ID NO: 365437 - protein, 88 aa, Zea mays
  Clone ID: MRT4577_96444C.1.pep
IKAAMVKKLPLKNKMETFLTKKRKESPIENNILEAQKSRVSKKFDLKKLVFFYPKGHRHQFLIKGRGFFQGRELFTASNGRGGLFALT

SEQ ID NO: 365438 - protein, 44 aa, Zea mays
  Clone ID: MRT4577_96445C.1.pep
LRYTDGALLRILVILPHAWNVMRNQHTDYSCQDSVIGTRGTIRT

SEQ ID NO: 365439 - protein, 82 aa, Zea mays
  Clone ID: MRT4577_96446C.1.pep
SSNSCMSMSASGVLENVQLEFATRFRSHFRRLQDSHDKASKNSDSYVNSIATLFLENVELGFCEEFRTHYLWLQDRLNKMSK

SEQ ID NO: 365440 - protein, 40 aa, Zea mays
  Clone ID: MRT4577_96447C.1.pep
MAAAARHLRTVKWFNDTKGFRFIYPEDGSEDLFLHQSWIK

SEQ ID NO: 365441 - protein, 77 aa, Zea mays
  unsure (1)..(77): unsure at all Xaa locations
  Clone ID: MRT4577_96448C.1.pep
SDRWPADDRCQGKDETGAGSLSNHPVSAIYSISCIPTVKRMHLVLXXSQFGGMHPSTVSNQSGYVFNALLXRILSAS

SEQ ID NO: 365442 - protein, 218 aa, Zea mays
  unsure (1)..(218): unsure at all Xaa locations
  Clone ID: MRT4577_96449C.1.pep
LKQKKAHLMEIQVNGGTIADKVDYGYKFFEKEVPVDAVFQKDEMIDIIGVTKGKGYEGVVTRWGVTRLPRKTHRGLRKVACIGAWHPARVSYTVARAGQNGYHHRTEMNKKVYKIGKAGQESHDASTEFDRTEKDITPMGGFPHYGIIKGDYLMIKGCCVGPKKRVVTLRQSLLKQTSRLALEEIKLKFIDXDTSSKFGHGRFXTTDEKQRFFGKLKA

SEQ ID NO: 365443 - protein, 44 aa, Zea mays
  Clone ID: MRT4577_9644C.1.pep
IQSVELIVCLLERSIFYSLLQWFMIRDVVKKAPAEVQRGVVVSV

SEQ ID NO: 365444 - protein, 222 aa, Zea mays
  Clone ID: MRT4577_96450C.1.pep
MATAADIRVSIGYQTRFGLRLAAALSSPPPSPASNSAFSPLSLHVALSLLAAGAGGATRDQLAAALGGDAPAGADGLHALAEQVVQLVLADGSGAGGPRVAFADGVFVDSSLKLKPAFEEVAVGKYRADTQSVDFQKKAAEAAGQVNSWVEKITSGLIKEILPPGSVDHTTRLVLGNALYFKGAWTEKFDASKTKDSEFHLLDGSSVQAPFMSSTDKQYIVA

SEQ ID NO: 365445 - protein, 101 aa, Zea mays
  Clone ID: MRT4577_96451C.1.pep
SQSTQSHCLKHVDSSPPSLMTLTNPANLVVVITGCDTGFGSEITEDLYQRGRFTIYATCLTDQAVENYNARQSSRIRALQVDVTRQNDVHRLPAQVAAECP

SEQ ID NO: 365446 - protein, 369 aa, Zea mays
  unsure (1)..(369): unsure at all Xaa locations
  Clone ID: MRT4577_96452C.1.pep
MGQLVPADGSGPLSPRVAFADGLFVDASLKLKPAFEEVPVGKYRADTQSVDFQKSGHINQNLSRKGAGGPRVAFADGVFVDSSLKLKPAFEEIAVGKYRADTQSVDFQKKAAEAAGQVNSWVEKITSGLIKEILPPGSVDHTTRLVLGNALYFKGAWTEKFDASKTKDSEFHLLDGSSVQAPFMSSTDKQYIVAYNNLKVLKLPYQQGADKRQFSMYILLPXAKDGIWSLAEKLSSEPEFLENHVPMHKVPVGQFKVPKFKISFGFEASELLKGLGLQLPFSAEADLSGLVDSPEGRNLSVSSVFHKSFVEVNEEGTEAAAASAATVVLRSFTMPQDFVADHPFMFLIREDLTGVVLFVGHVVNPLLAP

SEQ ID NO: 365447 - protein, 51 aa, Zea mays
  unsure (1)..(51): unsure at all Xaa locations
  Clone ID: MRT4577_96453C.1.pep
ERLGLSKGLLKRATVRAVFGKTGNPFECVVGDERTDKIAPHAYXKEKEATN

SEQ ID NO: 365448 - protein, 255 aa, Zea mays
  unsure (1)..(255): unsure at all Xaa locations
  Clone ID: MRT4577_96454C.1.pep
MLSLRSVSGSNSSRGIAAVVGVGPRLGSAVARKFASEGYTIAILSRDLEKLSQLAEEIAQAAKAQVFALRVDCADARSVREAFEGVLSLGPVEVLVYNACEPPGANEDARPAPFLAVTPDAFHRALAVSAGGAFHCAQQVIPGMVERGXGTIIFTGSSASVTGFAGYSDLSSGKFALRGLSQSLAREFQPAGVHIAHVIIDGVIGERRSLTRSSRAGGDTAGADPDAVAQSYWHVHAQDKSAWTHEMDIRSPSFM

SEQ ID NO: 365449 - protein, 56 aa, Zea mays
  Clone ID: MRT4577_96455C.1.pep
LKPTHMHYLYFYHINGLINIHDHLKLTRALQNQPNPTYLCTIPSLLLILQPAVLPT

SEQ ID NO: 365450 - protein, 57 aa, Zea mays
  Clone ID: MRT4577_96456C.1.pep
RYLREKDPSYHQLSLVVRQGEQPRESYLLLSNLVEDQMAGTSSYVDWIQQIHRQTQS

SEQ ID NO: 365451 - protein, 154 aa, Zea mays
  Clone ID: MRT4577_96457C.1.pep
LSWCSSVYDLGRIRKAMFVACYDILCVRQGEGAHSVDHHYDRGPADIGSLHSAKGPRQVLGLEQVTRARYPWPPYPYPPRTSSIGLAWDHVGILMGCHGWYDLALCTLAAAAGRRDGGGQRGRQNGLADLHDGRRVRPRCDDLHEIVRERGSRP

SEQ ID NO: 365452 - protein, 810 aa, Zea mays
  Clone ID: MRT4577_96458C.1.pep
MSRPAFQQPVQNMPPPPIGSAATFGNQAAYQSGGPPVGGTLQSLVEDFQSLSLSSVPGSLDPGVDVKGLPRPLDGDEEPVKLIESYPFNCHPRYFRLTTHAIPASQSLVSRWHLPLGAVVHPLAESPDGEEVPVINFGSAGVIRCRRCRTYINPYATFADAGRKWRCNLCTLLNDVPGEYFCALDASGRRYDTDQRPELSKGTVEFVAPTEYMVRPPMPPSYFFLIDVSVSAVRSGLLEIVAKTIKSCLDELPGFPRTQIGFLTFDSTLHFHNFKSSLSQPQMMVVADLDDVFLPLPDDLLVNLVDSRHVVESFLDSLSNMFHDNVNVESALGPALKAAFMVMSQIGGKLLVFQSTLPSLGIGRLRLRGDDVRAYGTDKEHTLRVPEDPFYKQMAAEFTKNQIAVDIFSFSEKYSDIASLGSLAKYTGGQVYHYPSFQAPTHGDKLKLELSRDLTRETAWESVMRIRCGKGVRFTTYHGHFMLRSTDLLALPAVDSDKAFAMQLSLEETLMTTQTVYFQVALLYTSSSGERRIRVHTAAAPVVTDLSEMYRQADTGAIVSLLGRIAVENSLSDKLDSVRQQLQLKLVRSLKEYRNLYVVQHRIGGRLIFPESLKFLPLYILAICKTLALRGGYADVSLDERCAAGFSMMILPVKRLLNFIYPSLYRVDEVLTMEPNKIDGWLKRLPLTFQCLDTGGLYLLDDGFTFLVWLGRMLPPELVNNILGVSLANFPDLSKILLRECDNELSRNFMKILRYLREKDPSYHQLSLVVRQGEQPREGYLLLSNLVEDQMAGTSSYVDWIQQIHRQTQS

SEQ ID NO: 365453 - protein, 53 aa, Zea mays
  Clone ID: MRT4577_96459C.1.pep
GLRTHGGVVEDVACDNRNADFLWMMIFGAISLLKLPIIPLFNSLLLRIPMVSM

SEQ ID NO: 365454 - protein, 137 aa, Zea mays
  Clone ID: MRT4577_9645C.1.pep
NASRTVLVSASPSRRAASPTTENMGCVIRAQRKAAGVSCARPTPHHRRNTPAYDPSTTRESNVYLKGVCTDVILYPIRWTTATLKATYRQPVMHKYHKEIVVAVGGLCHTCAHSSIVQRRRATLIHRSIWMPLRGNT

SEQ ID NO: 365455 - protein, 793 aa, Zea mays
  Clone ID: MRT4577_96460C.1.pep
MGPASIFGNQAAYPSAGPPVGGTLQSLVEDFQSLSLSSTPGSLDPGVDVKGLPRPLDGDEEPVKLMEAYPLNCHPRYFRLTTHAIPASQSLVSRWHLPLGAVVHPLAESPDGDEVPVINFGSAGVIRCRRCRTYINPYATFADAGRKWRCNLCALLNDVPGEYFCGLDASGRRYDTDQRPELSKGTVEFVAPTEYMVRPPMPPSYFFIIDVSVSAVQSGLLEVVAKTIKSCLDELPGFPRTQIGFLTFDSTLHFHNFKSSLSQPQMMVVTDLDDVFLPLPDDLLVNLVDSRHVVESFLDSLPNMFHDNVNVESALGPALKSAFMVMSQIGGKLLVFQSTLPSLGIGRLRLRGDDVRAYGTDKEHTLRVPEDSFYKQMAAEFTKYQIAVDIFSFSDKYSDIASLGSLAKYTGGQVYHYASFQAPTHGDKLKLELSRDLTRETAWESVMRIRCGKGVRFTTYHGHFMLRSTDLLALPAVDSDKAFAMQLSLEETLMTTQTVYFQVALLYTSSSGERRIRVHTAAAPVVTDLSEMYRQADTGAIVSLLGRIAVENSLSDKLDSVRQQLQLKLVRSLKEYRNLYVVQHRIGGRLIFPESLKFLPLYILAICKTLALRGGYADVSLDERCAAGFSMMILPVKRLLNFIYPSLYRVDEVLTMEPNKIDGWLKRLPLTFQCLDTGGLYLLDDGFTFLVWLGRMLPPELVNNILGVSLANFPDLSKILLRECDNELSRNFMKILRYLREKDPSYHQLSLVVRQGEQPRESYLLLSNLVEDQMAGTSSYVDWIQQIHRQTQS

SEQ ID NO: 365456 - protein, 811 aa, Zea mays
  Clone ID: MRT4577_96461C.1.pep
MSRPAFQQPVQNMPPPPIGSAATFGNQAAYQSGGPPVGGTLQSLVEDFQSLSLSSVPGSLDPGVDVKGLPRPLDGDEEPVKLIESYPFNCHPRYFRLTTHAIPASQSLVSRWHLPLGAVVHPLAESPDGEEVPVINFGSAGVIRCRRCRTYINPYATFADAGRKWRCNLCTLLNDVPGEYFCALDASGRRYDTDQRPELSKGTVEFVAPTEYMVRPPMPPSYFFLIDVSVSAVRSGLLEIVAKTIKSCLDELPGFPRTQIGFLTFDSTLHFHNFKSSLSQPQMMVVTDLDDVFLPLPDDLLVNLVDSRHVVESFLDSLPNMFHDNVNVESALGPALKAAFMVMSQIGGKLLVFQSTLPSLGIGRLRLRGDDVRAYGTDKEHTLRVPEDSFYKQMAAEFTKYQIAVDIFSFSDKYSDIASLGSLAKYTGGQVYHYASFQTPTHGDKLKLELSRDLTRETAWESVMRIRCGKGVRFTTYHGHFMLRSTDLLALPAVDSDKAFAMQLSLEETLMTTQTVYFQVALLYTSSSGERRIRVHTAAAPVVTDLSEMYRQADTGAIVSLLGRIAIENSLSDKLDSVRQQLQLKLVKSLKEYRNLYVVQHRIGGRLIFPESLRFLPLYILAICKSLALRGGYADVSLDERCAAGFCMMILPVKRLLNFIYPSLYRVDEVLTMEPNKVDDVSLKRLPLTFQCLDTGGLYLLDDGFTFLVWLGRMLPPELVNNILGVSLANFPDLSKIVLRECDNELSRNFMKILRSLREKDPSYHQLCRVVRQGEQPREGYLLLSNLVEDQMAGTSSYVDWIQQIHRQTQS

SEQ ID NO: 365457 - protein, 240 aa, Zea mays
  Clone ID: MRT4577_96462C.1.pep
AASTDRPDRPHAGDGNGAGNRSSIGIEICENRDGNFEKALTHAAGLVKFLMAHLGLKIGNVVSHQHWSGKNCPRPIFNRPGGFEGFKRMIEDSLNDMVVENHNKDAGTQGLGIAYMEGVNINLRRGPSTSSDVIRKLNKPESYIVWEEREGWLNLGNSWVKYDSSYIYFARRQTSNIGKLVVVDTNELWVYGSANWNDKIKTVKKGEAFTIQDELQVNGSNMYKCKYFYITTNPQFVYVK

SEQ ID NO: 365458 - protein, 206 aa, Zea mays
  unsure (1)..(206): unsure at all Xaa locations
  Clone ID: MRT4577_96463C.1.pep
VRSLMPFSPYRXLNFHAMPDPIXEMIHEAQQAMDIHFHSPAFQHPPTEFIREGDDDRTVCREIRHNSTGCLRMMDQCDKCREILSVDCSTNNPSQAKLRRALDESLQVAETLTRTYNELLQSYQWKMLNTSSLLEQLHEQFNWVSRLASLTQGDDQYYLRVTTVASHTSDSDVPSGVTEVVVKLFDSDPITVTVPVEVSRKNPKFM

SEQ ID NO: 365459 - protein, 206 aa, Zea mays
  Clone ID: MRT4577_96464C.1.pep
TSGVAYGVRVTHAEREQFERQQGWSIKKMYSSKTKKQSQGPGNAEDAEVREPAEEYAPVIFAQDAYKHVISFDLLSGADDRDNVLRARESGKGVLTAPFKLLNNRLGVISTYAVYKYELPPNARPQERIQAAIGYLGGIFDIEALVDKLLHQLAGKQSIMVNVYDTTNDRRISMYGSNDTGSGMCQVSTLNFGDPSRKHEMHCRFI

SEQ ID NO: 365460 - protein, 102 aa, Zea mays
  Clone ID: MRT4577_96465C.1.pep
LLTSKKLAASSAGARLINQLDSILAAVPWTLAVRRVAALDKLEADLSKFDDGPFFLGQFSLADVAYITILERVQIYYSHLRNYDIAEGRPNLQEFIEEMNKI

SEQ ID NO: 365461 - protein, 110 aa, Zea mays
  Clone ID: MRT4577_96466C.1.pep
NYVHLQLFLPHCSVRTYKIVAALDKLEADLSKFDDGPFFLGQFSLADVAYITILERVQIYYSHLRNYDIAEGRPNLQEFIEEMNKIEAYAQTKNDPLFLLDLAKNHLKIA

SEQ ID NO: 365462 - protein, 178 aa, Zea mays
  Clone ID: MRT4577_96467C.1.pep
IQFATLSNEEPDACSISLILFQTRQASDTITWKSISKLLLFSFLNKKFRPYDFPRNVFTCRLPYCIAYFCPLCKPIFYHLSNDFALNINKLSFGHMQLMTSHYQDSGDPSLPCVNSRLTRSGKRSAAKLKQSLRYTRCEQFLSKGQGLISYLSSPWHCSPGQPPSRSCARRRAWCARP

SEQ ID NO: 365463 - protein, 130 aa, Zea mays
  Clone ID: MRT4577_96468C.1.pep
ASACSSPAFHTAQSTPAASVASSARRPAGGAKPLLATRRILLRYLRFLVPLCRKARALRRLPVPAGRVFFSAPRTRALATATPARRSTSSASSPSPSAAAEYWCHGNADVAVRDAILHCKKSLLTACAEC

SEQ ID NO: 365464 - protein, 100 aa, Zea mays
  Clone ID: MRT4577_96469C.1.pep
LELDVSSSPVAALDKLEADLSKFDDGPFFLGQFSLADVAYITILERVQIYYSHLRNYDIAEGRPNLQEFIEEMNKIEAYAQTKNDPLFLLDLAKNHLKIA

SEQ ID NO: 365465 - protein, 39 aa, Zea mays
  Clone ID: MRT4577_9646C.1.pep
PMRPPTHPVDRMHHVEKPMDSLDYDDTIYLTTVQTPMTT

SEQ ID NO: 365466 - protein, 73 aa, Zea mays
  Clone ID: MRT4577_96470C.1.pep
QQTPQRRRRPQPPPQQLPTTQPQRTPQSRRRRRPQPQPQPQQKRAPQTQQPTTKSPPQTLPQPPQQSKSKPQR

SEQ ID NO: 365467 - protein, 111 aa, Zea mays
  unsure (1)..(111): unsure at all Xaa locations
  Clone ID: MRT4577_96471C.1.pep
HSTQHQLLTTSIPITPHNTPTCFQXLLKQHIPXHLTQLTTPNPTFYFQHXSKSNQLTTXNSSTYLQHLQHTLNPLSPANTSLSKLLQHLQLHPYHHFSSLNPPFLLQQHIL

SEQ ID NO: 365468 - protein, 100 aa, Zea mays
  Clone ID: MRT4577_96472C.1.pep
LELDVFFSPVAALDKLEADLSKFDDGPFFLGQFSLADVAYITILERVQIYYSHLRNYDIAEGRPNLQEFIEEMNKIEAYAQTKNDPLFLLDLAKNHLKIA

SEQ ID NO: 365469 - protein, 44 aa, Zea mays
  Clone ID: MRT4577_96473C.1.pep
WGGFFFVGLGKVKPWKEPKPFLIPWCPLVQFKSLTGDYYNKRGV

SEQ ID NO: 365470 - protein, 102 aa, Zea mays
  Clone ID: MRT4577_96474C.1.pep
MATRRQWWWWCLLLLAAWCCAAAAQSPPAADPLQSKCQGDFGKLTDCMDYARRGLRDRLVTLLMDRPPLKGAAAVFFYPPVDSFSCCVPLAHVYSVLSHKKK

SEQ ID NO: 365471 - protein, 63 aa, Zea mays
  Clone ID: MRT4577_96475C.1.pep
KNRAYCEIGSVGSFQSQWDKLYTNLNKAGYTTNASSTHSSISAANAKGSSYDFKAYVKIPYSA

SEQ ID NO: 365472 - protein, 87 aa, Zea mays
  Clone ID: MRT4577_96476C.1.pep
MATRRQSLGLRFDRLMALPAACNLPNSNVSLCITLLNLKPGSADYALFANASKITPSAGGNPASDSAAGSGVKLRAGVSGGVALAVV

SEQ ID NO: 365473 - protein, 170 aa, Zea mays
  Clone ID: MRT4577_96477C.1.pep
MAPADAARRLLLLLAVAGAVLRPAAAEIKQESFKDDSRGTILFEKFGFSHRGSVSIALTGAKAVSKLAKPDPAQLGFFLLSDEDLFEAIYEQPPPTDLNPNPDPNTGCVLASRYVIPLFTFAELDASGNCNKTFPVSHPDEYSLFFANCAPETARPMEVRTDMYNTNSDG

SEQ ID NO: 365474 - protein, 181 aa, Zea mays
  Clone ID: MRT4577_96478C.1.pep
MATRRQWWWWCLLLLAAWCCAAAAQSPPAADPLQSKCQGDFGKLTDCMDYATGHAASPSSTCCGDAGDTEKARPECLCYIIQQTHTGRNQVQSLGLRFDRLMALPAACNLPNSNVSLCITLLNLKPGSADYALFANASKITPSAGGNPASDSAAGSGVKLRAGVSGGVALAVVSAIASSLF

SEQ ID NO: 365475 - protein, 92 aa, Zea mays
  unsure (1)..(92): unsure at all Xaa locations
  Clone ID: MRT4577_96479C.1.pep
EQHIKHFTVPSLAFKIKCLLGLLCIFASAATPTIFPQCSQAPISSLLSPNLLPTLSSQCXNPILQPYKIQHAISAIILPLSPLLLQQSYYLF

SEQ ID NO: 365476 - protein, 58 aa, Zea mays
  unsure (1)..(58): unsure at all Xaa locations
  Clone ID: MRT4577_9647C.1.pep
PATXAAXXTGSSARRTXPXPAPSCDXLSXYVIYXXIYTRXPYIHSHIYTYSIMYTVRP

SEQ ID NO: 365477 - protein, 78 aa, Zea mays
  Clone ID: MRT4577_96480C.1.pep
RPRGPRPDFPGAPHACVSLLSIEDTIGQLHAHGARSPPKELLAPLRVAWSPGLTPTAPARCYIAMGTLPPYYKWEAGG

SEQ ID NO: 365478 - protein, 38 aa, Zea mays
  Clone ID: MRT4577_96481C.1.pep
HHIIIMYLYTCKLKLRIYIACHAHSNMRIEYIVHTEIF

SEQ ID NO: 365479 - protein, 58 aa, Zea mays
  unsure (1)..(58): unsure at all Xaa locations
  Clone ID: MRT4577_96482C.1.pep
APEGGGGLDCXENADLCDRAERIVXGEPSVLQLRAPSKRFGELHGQVGEXRRLVDEDG

SEQ ID NO: 365480 - protein, 91 aa, Zea mays
  Clone ID: MRT4577_96483C.1.pep
KLSGRYRRHCGLGFSEVEDHDGEGDVAGDDDEDDSPDAESPDDSDSDSESEKEESAEELHAAAHPDDTEDPKSKKDAKSSYKMMFVKSSGS

SEQ ID NO: 365481 - protein, 84 aa, Zea mays
  Clone ID: MRT4577_96484C.1.pep
GGRSSAGPASFLARLRVLPFWRLFVSGPAALVRLRRLLPFVPLVLSCPAAFWRPRVVGGALFCACLLLFGGEVPLAVVKGPLVV

SEQ ID NO: 365482 - protein, 124 aa, Zea mays
  unsure (1)..(124): unsure at all Xaa locations
  Clone ID: MRT4577_96485C.1.pep
ISHLFSNNGNQTTGATYTPWPLILLSFPTHVANATTISQCSXASHHPLTTPYLHINDNSIVQPSQIHHPIRSNILPLSASFLHHPXFIYHQPPLLHLDSHKISAHQLRQLLLSLLSTYSHQHTF

SEQ ID NO: 365483 - protein, 188 aa, Zea mays
  Clone ID: MRT4577_96486C.1.pep
YTCPRMVVSASGAVDHDEVVDQVRKLFTGFSTDPTTADQLVEANPAIFTGSEVRVENAEMPLAHIAIAFKGSSWTDPSSIPLMVTQSILGSWNRSIGVGNCSGSALARGISNGGLAENLMAFNTNYRDTGLFGIYTSAPPDALHDLSRLMMEEFRRLAFRVSETEVARARNQLKSSILLHFDGSTAVS

SEQ ID NO: 365484 - protein, 62 aa, Zea mays
  Clone ID: MRT4577_96487C.1.pep
AFASSTSALDSAHRQPAAAGSRRWPRPRPMILVVSLACSTFFFFRTSAGERIDQQQQQWLSE

SEQ ID NO: 365485 - protein, 237 aa, Zea mays
  Clone ID: MRT4577_96488C.1.pep
PLSFAVRTCGTAAMGSGFIAKGLTIVNSAGPGKGQAVALRVGGDLSVVYQCAIQAYQDTLYVHSGRQFYADDDIAGTVDFIFGNAAVVLQSCDIQARRPSPGQKDTVTAQGRTDPNQNSGISIHRCRITGAPDLGGTPVYLGRPWQRYSRTVVMESFLDRSLSPAGWLEWSGQFALSTLYYGEYGNTGPGAGTSRRVTWTGVHTSLSKSDAARFTVAEFILGDEWLGGTGVNYISGL

SEQ ID NO: 365486 - protein, 51 aa, Zea mays
  unsure (1)..(51): unsure at all Xaa locations
  Clone ID: MRT4577_96489C.1.pep
ARSRCGGCISTGCRASRLRGRRDRKVRNXIWCFNPQKRECTRPGKSEEARR

SEQ ID NO: 365487 - protein, 164 aa, Zea mays
  Clone ID: MRT4577_9648C.1.pep
KPVVEVVSDELQDEVVDVGEAEPGAGEDGVEGEEELPEPGVVLRRQLVGQYNSRLRELIIDLNAGLPGARFCLANVYDLVMELITNYPNYGFQTASVACCGNGGSYDGLVPCGPTTSLCDARDKHVFWDPYHPSEAANVLLAKYIVDGDSKYISPMNLRKLYSL

SEQ ID NO: 365488 - protein, 64 aa, Zea mays
  Clone ID: MRT4577_96490C.1.pep
LPKAVEAGTNAEASTAGSLILTATARTVCLRSRQSQVSGHGPATVSYHSLQRRPISVSRNHPPA

SEQ ID NO: 365489 - protein, 29 aa, Zea mays
  Clone ID: MRT4577_96491C.1.pep
CRKFQFKWNGFNMMLRYNSDSFNSRLLQS

SEQ ID NO: 365490 - protein, 114 aa, Zea mays
  Clone ID: MRT4577_96492C.1.pep
PLTPIKKPKAVMENFFNIRQETVAKKSFPGQFIQEDPNFSENVFQTNFFSTYSSSKSNLLATVHGSSNSKGLAQKKFSKPLKNVVGSLGQHSQCLNICCEIDKQFTNGFPYVPF

SEQ ID NO: 365491 - protein, 84 aa, Zea mays
  Clone ID: MRT4577_96493C.1.pep
KQRFKAKKKSLDHQIKFLNARPTLVPPPPVFPPFGFPAPQGPPPPPRPKLLMPVIGPPGFPMWQFIPPSNVAPSDAPRSCPPVG

SEQ ID NO: 365492 - protein, 126 aa, Zea mays
  Clone ID: MRT4577_96494C.1.pep
KTQVFPVLKGVFFFQGLVFSKGLTFFKRGGGGTPQRFFLNLGWPPPKRGTLFRLTKRGGSFYYPGWFRDKVFSGPQLPKKFWLWADPWVPPGISGRVLGGYQLFLLGGGLKLGGIMGIAGSWGKMF

SEQ ID NO: 365493 - protein, 77 aa, Zea mays
  Clone ID: MRT4577_96495C.1.pep
IWVYCPEARTFKKKGQILGGACLTVFGGKPHSVFFPKTLFIICPRYLNFSNHPTVGFNHMGLFGRVNPLLILPREFA

SEQ ID NO: 365494 - protein, 65 aa, Zea mays
  Clone ID: MRT4577_96496C.1.pep
TGSQRWRAGRCQLLSGLYGPSSEPDDAVAITKVNSTIYCSSASSSMNTLCSSRAPAPTRQDEQNP

SEQ ID NO: 365495 - protein, 67 aa, Zea mays
  Clone ID: MRT4577_96497C.1.pep
KARRCLGRGSLGLFTVRAPFPPSAFAARLFDARHSIASYVSLLLISRTRPRPGNSGSGLCGRAICSS

SEQ ID NO: 365496 - protein, 62 aa, Zea mays
  Clone ID: MRT4577_96498C.1.pep
QTYSFFPFRDGNLRLRLRRHSRRRNASAHHRQLTNADYRGDIHSRINCCFLLCNPAICPCCT

SEQ ID NO: 365497 - protein, 151 aa, Zea mays
  Clone ID: MRT4577_96499C.1.pep
THFNPFEPEPPFPRWASLRVLGVTWQDAGKVELVDGSSYLGQPLPFTISTLIWIEVLVIGYIEFQRNAELDPEKRLYPGGSYFDPLALAADPEKKERLQLAEIKHARLAMVAFLGFAVQAAATGKGPLNNWATHLSDPLHTTIFDTFGGSS

SEQ ID NO: 365498 - protein, 71 aa, Zea mays
  Clone ID: MRT4577_9649C.1.pep
RRPRRFWLAGVPAQSPGEPPRPGLKLAFSEREKPGRAEGRMEKGVPPKDSKGEGLNRGPDDEPGKRTSFTP

SEQ ID NO: 365499 - protein, 55 aa, Zea mays
  Clone ID: MRT4577_964C.1.pep
KANKMNKKKQIITTNLMKAKNNRLKINNPLFRLQQTLPKPDPLIVGSLKRYVGAG

SEQ ID NO: 365500 - protein, 68 aa, Zea mays
  Clone ID: MRT4577_96500C.1.pep
APTRCSRVLTAATLDRACSAVYGAFGFSFVPLESVAQWMQIFRMPPLAAAVAGASNAAFFNTFDNEVC

SEQ ID NO: 365501 - protein, 276 aa, Zea mays
  Clone ID: MRT4577_96501C.1.pep
MAGVVVVFDFDKTIIDVDSDNWVVDSLGFTEPFERLLPTMPWNTLMDTMMGELHAHGRTLDDVAEALRAAPVVAGVPAAIKAAYALGCDLRVLSDANAFFIDTVLAHHGLLGCFSQINTNPSHPDADADGRLRIGPYHDLHGCGVGTCPPNMCKGQVLDRILREASSSAAGRKRVVYLGDGRGDYCPALRLAREDFVMPRRGFPVWDLICEDPARLQAEVHPWADGAELEETLLRLVGRARVEEAALLPPLDCKLESMPVAAQEGMGPIMPLGVKH

SEQ ID NO: 365502 - protein, 128 aa, Zea mays
  unsure (1)..(128): unsure at all Xaa locations
  Clone ID: MRT4577_96502C.1.pep
SRCARRPPLGGSAQRRSGRCPHGRRGVLLWASGRLFCCSRRHLVGAAVVGPVVLQRGAWGAALLLRHLCVRPRLRAVRRLLLAVATWLAVVAPEPRRRVRRFVLQFPPXVPRLSXELAAWVGPGLPGR

SEQ ID NO: 365503 - protein, 194 aa, Zea mays
  unsure (1)..(194): unsure at all Xaa locations
  Clone ID: MRT4577_96503C.1.pep
MVISSTAMAVTFIKVSFFGEGRITMRKIVGKPKVVVSGSPWYGPDRVKYLQPLXSGEPTSYLTGEFPGDYGWDTVELSDDHETFVKNCXLEVIHSCCAMLGALGCVFPELLCCIGDKLSEAVWFKAGSQIFSEGGLYYLGNPRLIHAQSILGIWACQVMLMGAVEGYRIAGGPLXEVVDPLYAVGRLEPLGLAD

SEQ ID NO: 365504 - protein, 123 aa, Zea mays
  unsure (1)..(123): unsure at all Xaa locations
  Clone ID: MRT4577_96504C.1.pep
MEIQTSGKPIDMLMEKVLCMNILSSDYFKELYQMKTYHEVIDEIYNQVDHVEPWMTGNCRGPSTAFCLLYKFFTMKLTVKQMHGLLKHPDSPYIRAXPKILWTWYEPYLKDDEEFSPGSNGRM

SEQ ID NO: 365505 - protein, 55 aa, Zea mays
  Clone ID: MRT4577_96505C.1.pep
LNPSNPPLDWSKRTCPNVLSLWESSYVLHMIVLFSYILHLGVLLIVVDKHHELDR

SEQ ID NO: 365506 - protein, 195 aa, Zea mays
  unsure (1)..(195): unsure at all Xaa locations
  Clone ID: MRT4577_96506C.1.pep
MEIQTSGKPIDMLMEKVLCMNILSSDYFKELYRMKTYHEVIDEIYNQVDHVEPWMTGNCRGPSTAFCLLYKFFTMKLTVKQMHGLLKHPDSPYIRAIGFLYLRYVADPKILWTWYEPYLKDDEEFSPGSNGRMTTMGVYVRDLILGQYYFDSILPRVPVPVVRQVTTNLEKMKLPTXXSXGDWETARHGSEDTGR

SEQ ID NO: 365507 - protein, 71 aa, Zea mays
  Clone ID: MRT4577_96507C.1.pep
HTRNASRMHGHIIDMWAHSYSMVQCGPLVDNLTRPCLFVVHVLALIHDKEHRDFRPHITTISTDGTGRSIS

SEQ ID NO: 365508 - protein, 71 aa, Zea mays
  Clone ID: MRT4577_96508C.1.pep
PSHPPMCVTRYFEHSAIYKLIITVVIRASKASYLSNPCFFLHMQKHILVYQIAVIVLLTLLFKHCVHQTII

SEQ ID NO: 365509 - protein, 48 aa, Zea mays
  Clone ID: MRT4577_96509C.1.pep
SRNIAIFHSFVKPKSGGRGIFLFSQSDLVRVPLLLTMTTSYSMTMLKL

SEQ ID NO: 365510 - protein, 109 aa, Zea mays
  Clone ID: MRT4577_9650C.1.pep
ERIEGGRRERAGRCRQLGYHRFPLVHPVPWGQSDRGQPLWVLVVGAAAAARRAQEEMAVAREPVGMAVVAKPGRRQVGVQGRQTVATRQAPRRPGRARSTAGTGKFIRS

SEQ ID NO: 365511 - protein, 51 aa, Zea mays
  Clone ID: MRT4577_96510C.1.pep
PPSFGNAPALDERGFLHTTVEAKTEGPDERMEQQAGAGCGNELALDEKTAA

SEQ ID NO: 365512 - protein, 84 aa, Zea mays
  Clone ID: MRT4577_96511C.1.pep
FQAQRIMVQMNVSLSRVLQWKEPGMVDRHSNMALSVESDGNPSGHDPRQLVAGSFHGISICVLRTDANSREVGNRTQQEPDKFT

SEQ ID NO: 365513 - protein, 87 aa, Zea mays
  Clone ID: MRT4577_96512C.1.pep
MQSAKVKANDMVSSATEKVNEGSAKMHGKTGDATAATHGENEIANDAARAKNDQFNADMHHDNVDHRTVTAIGHYSTRVPLNRPHGH

SEQ ID NO: 365514 - protein, 27 aa, Zea mays
  Clone ID: MRT4577_96513C.1.pep
MELVLVISLPLVALVVIVAIILCIICR

SEQ ID NO: 365515 - protein, 82 aa, Zea mays
  unsure (1)..(82): unsure at all Xaa locations
  Clone ID: MRT4577_96514C.1.pep
TSHARAGFRQPQCXVAAQSAIGAGDQRGLGFQVFKHRCVSFVCLPAALRRLTGRGLAGGMKFHQRIHRHRALPHRADHHRVD

SEQ ID NO: 365516 - protein, 27 aa, Zea mays
  Clone ID: MRT4577_96515C.1.pep
MELVLVILLPLVALVVIVAIILCIICR

SEQ ID NO: 365517 - protein, 132 aa, Zea mays
  Clone ID: MRT4577_96516C.1.pep
EIVPSLSLGLFLALALNICAPQPALAVSCGTNKSLNAFFGSRQWGDQLLHVEHPKLSTKLLRVVTYDINYPQPGDIKGTITYIEALDQYSDKNGGCAILQNGGAGSSNVKLLLKSQRNHGLEFVVRIYGKRY

SEQ ID NO: 365518 - protein, 94 aa, Zea mays
  Clone ID: MRT4577_96517C.1.pep
KIGNPHERGSSAKTRTPLALFLRTGCPPPCKIHTAPVGQRTMRGATKGVGTRGFIREASWRRPLGITRPPREPYLKGPPPPGPPVGLVPHPNPR

SEQ ID NO: 365519 - protein, 103 aa, Zea mays
  Clone ID: MRT4577_96518C.1.pep
WVICEWQVHMSMASSSLAAPPSAPFSNRIFSHSFFLLCSRHSSQSLQHERPLLGSAAGVSEPVLVHEPVCLYNEWRLVGVVTRVLSCSIAQEHPHPRVRPRVG

SEQ ID NO: 365520 - protein, 90 aa, Zea mays
  Clone ID: MRT4577_96519C.1.pep
FESRCSHSCPCSSPCSGFGCTAPGWSAVRGRRTSCTPTRCIPLLSLHSAEPKLSSTFILLAGGGGDSLLSCRVLSSGLQMIVRASTKRTP

SEQ ID NO: 365521 - protein, 123 aa, Zea mays
  unsure (1)..(123): unsure at all Xaa locations
  Clone ID: MRT4577_9651C.1.pep
TGAFLMGLGPDHGCLMGGXLVAGMGSGXKLMIAPGYTAAAGPTLKRGXLTSFPEENNNWRNLLEYASNLAFERLPVHLIWWAMFLVGTKPTIXLGVTELTMAESARWLVMPCRIDNPRSMLQK

SEQ ID NO: 365522 - protein, 94 aa, Zea mays
  Clone ID: MRT4577_96520C.1.pep
ERDAERATYKSVGIASLSVAIAPATIAMPNITLERGHTLIVTYIATHNGHNPTPKTVSDTRRSGTTTVLPVADPYPRAATTIDKAPPNLLTNVE

SEQ ID NO: 365523 - protein, 59 aa, Zea mays
  Clone ID: MRT4577_96521C.1.pep
GELILHAAAGTCVPVSGPQSRARQSGCSHDGRAPCCVLAPPCRAESGAVRCCGVVTRWV

SEQ ID NO: 365524 - protein, 72 aa, Zea mays
  unsure (1)..(72): unsure at all Xaa locations
  Clone ID: MRT4577_96522C.1.pep
LFVADWNPVGFHEVGYGFGEPRXVFPLNGGVNIVPPLGGPKPPQPKQGLRVGFQGVEGPPFSVFGGGFPKPA

SEQ ID NO: 365525 - protein, 248 aa, Zea mays
  unsure (1)..(248): unsure at all Xaa locations
  Clone ID: MRT4577_96523C.1.pep
RSQEEEELGGGPTDSDISGAAIAVGDDHAEGARRPVCYESSRRSDTCEAAGDVRVVGRAQTVLVGALDREWKVKPYCRKHDAFALSHVKEWTLRPLVGGSDGDEAPRCTVNSSATAFVLSTGGFTGNLFHDYTDVLIPAFITARRYGGDVQLLVSSHKPWWAAKYMPVLQQLSRHELVDADADGEVRCYPRVVVGPTFHRELGVGAETKAPGGEEEGVSMPEFRAMLRRALGLERAAAAPSGDRWDXR

SEQ ID NO: 365526 - protein, 72 aa, Zea mays
  Clone ID: MRT4577_96524C.1.pep
HKKKLHERPNISIKYRMHSSTKKKLHERPTIFTKYRMHSSTKKNYTSGPTFLLNTGCILAQKKITRAAQHFY

SEQ ID NO: 365527 - protein, 83 aa, Zea mays
  unsure (1)..(83): unsure at all Xaa locations
  Clone ID: MRT4577_96525C.1.pep
RPFFFFFFFITKLRGFFKICGLPFFFIQRHTEEVFYRTFSTFRFLLTYTIVLNLAXKPYSRTYHNFYQTPITPLRSPNVXKKT

SEQ ID NO: 365528 - protein, 76 aa, Zea mays
  unsure (1)..(76): unsure at all Xaa locations
  Clone ID: MRT4577_96526C.1.pep
MGTAMGKGAGECVLSRLHGVGGRIGDSLSAHPNMLDAGLAKLQNLRKGLLQSCQVVAPYKXSVASAVQRELKDGAF

SEQ ID NO: 365529 - protein, 108 aa, Zea mays
  Clone ID: MRT4577_96527C.1.pep
LETRALGRLDPVLKSQGRVDTITGEPTNQQKHHQILYFSHSGEMQPTGSRGLKITLPSYGFWEGNNIPLFNLGGKNGGGDVVRKGEAAVPGHFLGRGEHRGDLNVSPL

SEQ ID NO: 365530 - protein, 67 aa, Zea mays
  Clone ID: MRT4577_96528C.1.pep
EPKVSLHIASITAKASSAPCVQIIHDPKVLGLEFQLISNLKEGTTNDVLLVGGRWVCQSKLDKGQQL

SEQ ID NO: 365531 - protein, 44 aa, Zea mays
  Clone ID: MRT4577_96529C.1.pep
FNFEQAGSTASAWEEQAPFCTPSPECRCYARIISKLPALQHQPL

SEQ ID NO: 365532 - protein, 85 aa, Zea mays
  Clone ID: MRT4577_9652C.1.pep
KRKNFQTHRKDLINLVWKSKKKKFHKKWLDPKNPTWPKRVSTGFPLQTPQETFLGTIVRSRHEPTGTNKAKKFPGLNMPPREGPT

SEQ ID NO: 365533 - protein, 85 aa, Zea mays
  Clone ID: MRT4577_96530C.1.pep
MGVPGGAFPSPLKLKKSFFGSPLGPPLKKALFLKGKGFFSPPGSFFKFFVVINPPGLFFFIKGFFPPFLFQNSGKNFFWGIFWNP

SEQ ID NO: 365534 - protein, 128 aa, Zea mays
  Clone ID: MRT4577_96531C.1.pep
PPLRASRRNTFQAEAAETAKRADQNQNQGGLSLKVSMAGPPYLRRGDLRLSKGSRELRGVLDPLLTNSFSGGEKGGGNNNQNALVYKAKDGNLMLAENVPWDMLIFSCRKLRIMKGFAFEARGSLIHT

SEQ ID NO: 365535 - protein, 220 aa, Zea mays
  Clone ID: MRT4577_96532C.1.pep
MAANGGGYRAEDDYDYLFKVVLIGDSGVGKSNLLSRFTKNEFSLESKSTIGVEFATRSLQVDGKVIKAQIWDTAGQERYRAITSAYYRGAVGALLVYDVTRRATFDNVGRWLRELRDHTDQSIVVMLVGNKSDLRHLVAVSTDDAKEFAEAESMYFMETSALDATNVDSSFSEVLTQIYQIVSKKTVEASEEGAVAPGKGEKINVKDDVSAMKRVGCCSN

SEQ ID NO: 365536 - protein, 62 aa, Zea mays
  Clone ID: MRT4577_96533C.1.pep
TTTDMYARPRILEMVHKRSAHSHKQLFPADLAIHTLIFMHQRPFKITPCAPLHSRDRADDHS

SEQ ID NO: 365537 - protein, 113 aa, Zea mays
  unsure (1)..(113): unsure at all Xaa locations
  Clone ID: MRT4577_96534C.1.pep
ARGEGGGRLGRXGGKDDQGGKRRMPRIRAWAAGAGRGGSTPQISPTTAAAGATGRARFGRWTTDGARRAVVPLTNWIIASDPRKPGPTSQGRAHQQWSPRPVPLPEAMLDTSC

SEQ ID NO: 365538 - protein, 103 aa, Zea mays
  Clone ID: MRT4577_96535C.1.pep
RSRPRPGRFGVLRPATGGLAKPGGLRPELPEEQQNQGAGALFLNGHASAPSARSEQEQPVAGGQSLASWSLEVRLGSRGRTRPTYKFWLASALIPTVLVAATE

SEQ ID NO: 365539 - protein, 56 aa, Zea mays
  Clone ID: MRT4577_96536C.1.pep
GENNPKLCGPGLCFFPSRPFYLKSPLCVRPLCFTPKKSFLPRDVMVFPLYWGLTPN

SEQ ID NO: 365540 - protein, 105 aa, Zea mays
  Clone ID: MRT4577_96537C.1.pep
KNSPLPLPGGPKNYITGPGPETLGKPFKFQFHNLPEAKKKLGESPGPKEKKNGKSTPRVTGKYLQQVVKKFGGKFFNKKGAGSFCSIPQTGDPGHNFFIITWKGE

SEQ ID NO: 365541 - protein, 95 aa, Zea mays
  Clone ID: MRT4577_96539C.1.pep
LLRPYVNARVIRGPHVQPSLRGLLRPHVTRLLWTPRVANFSSSFGAPSYRDGGDGGSGWARSTAHRSVALCRRGRLRPSLSIDAAIASRCLVRRH

SEQ ID NO: 365542 - protein, 125 aa, Zea mays
  unsure (1)..(125): unsure at all Xaa locations
  Clone ID: MRT4577_9653C.1.pep
NLSIHQHVPLFICHPLGKYGLGVFVFLFDRYLRAPGGPCASCPWVLILQRSARLSGLSHNGLANPFAXVGVFARLSAWGPPPHLLGGLGGTFWLSGGFPVLNVSACGFFAPRGLVWPRGPCPPRF

SEQ ID NO: 365543 - protein, 33 aa, Zea mays
  Clone ID: MRT4577_96540C.1.pep
RRGFMIGRSLIRHRVRNMSLIHRRMTSSPRHRR

SEQ ID NO: 365544 - protein, 180 aa, Zea mays
  unsure (1)..(180): unsure at all Xaa locations
  Clone ID: MRT4577_96541C.1.pep
KVVRRARSCGCGLRRRTPIGTKWYWGHQVNQPAGLHKLEGQDHLHXIICQGVPTPSMCPXINXYERRCAMRNYMTDSLVXPTLNXSCGINDLVEQTPLCADARADRGXQNFMIXELDYADCSSCCSXTAGHLMDRSKVTIQNQDAMIKSAWLSEPYKGIVDCFKRTIKDEGSSCLWRGNT

SEQ ID NO: 365545 - protein, 140 aa, Zea mays
  Clone ID: MRT4577_96542C.1.pep
HTQKHLQLMIHEYGAAGQADPYGVNSYDDELQVTGTVGLHGGHASLHHERIERARLTSCEAFLDVFEYLFGYRLRFGVYGVKCNSTGGTWYHRHSAKWYASFLRRAQLTPLALPDGAYSQRPLTRVRCGSSGISGHQRSR

SEQ ID NO: 365546 - protein, 108 aa, Zea mays
  unsure (1)..(108): unsure at all Xaa locations
  Clone ID: MRT4577_96543C.1.pep
MPLAIQEDDGGASGARSATKVMSASGSGKARRFMRQVTGRNIDTDLHVAVRRGDAAALRRALLDASGAEAATEEAPDDLEAGPIAVAQAAQXAAETPFVAMAHRGHLG

SEQ ID NO: 365547 - protein, 84 aa, Zea mays
  Clone ID: MRT4577_96544C.1.pep
MAAKRSCCLMLLGLSASDATATIIRQCSHAHIASLITQYLSPAASTMSETSIAQRYRIQHAIATGILPASPLLVQHPTALLQHL

SEQ ID NO: 365548 - protein, 66 aa, Zea mays
  Clone ID: MRT4577_96545C.1.pep
IVGGEILDLVLEVYLTAGLVLLVTALGFVVSEGVCTMLGGSLLAFHHSEGCQSLLGNGKPNPCHPL

SEQ ID NO: 365549 - protein, 65 aa, Zea mays
  Clone ID: MRT4577_96546C.1.pep
KLRLKPRAKTGLRYIPYKRVTLTSFEPLKKGPRLSWGTLPGPRKTLWGNKGPCGEGPHGGEPWAP

SEQ ID NO: 365550 - protein, 58 aa, Zea mays
  Clone ID: MRT4577_96547C.1.pep
MAASRRAAAAMLCLAVAVAAVLAAEKSGAEAERPGCFCDCMKNRCMTLGASAADKFDC

SEQ ID NO: 365551 - protein, 82 aa, Zea mays
  Clone ID: MRT4577_96548C.1.pep
ALTVCLVYLVGSMVAGACRGISRTTSSMRTRTSRLTPRALRRLDTSLYKSSRCMKAVRSLIRSICDFCFWHFVCLWLSFIYF

SEQ ID NO: 365552 - protein, 59 aa, Zea mays
  Clone ID: MRT4577_96549C.1.pep
VPARRRDRKYLPRSISTLPTMQGTIQGGVNLRAGCPSATTGTILPYCTDTAIDYCLAPY

SEQ ID NO: 365553 - protein, 51 aa, Zea mays
  Clone ID: MRT4577_9654C.1.pep
MYSIIYMESYLQIDTCIRLDSLRVNYGSSVSTCMLLCWIGTPQAAICIAWL

SEQ ID NO: 365554 - protein, 79 aa, Zea mays
  unsure (1)..(79): unsure at all Xaa locations
  Clone ID: MRT4577_96550C.1.pep
IILSISTICTISDKITPHVVSWFTSXEATQDEEFEVMYGEDDDEDKDDEDDDDYDTKTKGATGGXEGQQXERPVECKQE

SEQ ID NO: 365555 - protein, 60 aa, Zea mays
  Clone ID: MRT4577_96551C.1.pep
TNTPDRRRAPSALNYPHHGGSGGGGGGGGDGPSYRSYLPAPTSESGKRPQLNLAQLLCSS

SEQ ID NO: 365556 - protein, 61 aa, Zea mays
  unsure (1)..(61): unsure at all Xaa locations
  Clone ID: MRT4577_96552C.1.pep
GAPVVACLCDQXLCFGLFCGPLAPVVLSVPVCVSLFPWLWPPCGCLQIRTICVVVFFLKXG

SEQ ID NO: 365557 - protein, 53 aa, Zea mays
  Clone ID: MRT4577_96553C.1.pep
MTHPSSNVEIWYEAYIIVEDVHAARLALLVILCCQKYTTNYRSATAQKTWFQK

SEQ ID NO: 365558 - protein, 77 aa, Zea mays
  Clone ID: MRT4577_96554C.1.pep
IFCNILTVTKCPFFHGFDPVCNASYWLVLSITSFRVIDLLFDLKLANMLQICYIQNTLDKCAADSFRGLSDATLTIA

SEQ ID NO: 365559 - protein, 157 aa, Zea mays
  Clone ID: MRT4577_96555C.1.pep
MVTTHVHKRACEVAGHPTKYISYWQPAAGCWQVVLRVVCSLRLRPGDDHCFVHAIHKLGGQDKATPKRVLQLMGVGGLTISHVKSHLQMYRNMRNDIGMQGTTMQLVHRAEEHVYGRGGMHMELCADTQRRRQPQPQPQCGHDECDGPACCCIVVCR

SEQ ID NO: 365560 - protein, 105 aa, Zea mays
  Clone ID: MRT4577_96556C.1.pep
GKKHNPQFFGGVIKKKFGFSGGNKNLVNKKFSCSRPKGGGAPLKHWFLVFLQKPTPEQALQGVFPNTFLPGRGPILWGLPGPGKVFTKRPLSMDKMGNLCFCYPF

SEQ ID NO: 365561 - protein, 123 aa, Zea mays
  unsure (1)..(123): unsure at all Xaa locations
  Clone ID: MRT4577_96557C.1.pep
PAGGFFCAGCCGRRSPCVPYRGKVRAAVAVRASPSPSTSTWIRRRGPCTRTAEPYYSRMLMDCDVLTIYYDDAREPAGXHALVFLHGALGACTSPDNRRLFDPLIYRIVQFDLRSASRMTPHV

SEQ ID NO: 365562 - protein, 136 aa, Zea mays
  unsure (1)..(136): unsure at all Xaa locations
  Clone ID: MRT4577_96558C.1.pep
QTHAYMTYNSXAHRTLLSNTHHIKPCLFXPPCRCSVHARRSYAQDAAALPRPKLLCLAVCRRRRSSNTVGSMDQATRSLVRCDATQLPIKRTTTDAGVVVCRNMTADRTSADRSRNHPTGVIAEWRLGKLVRRWWP

SEQ ID NO: 365563 - protein, 41 aa, Zea mays
  Clone ID: MRT4577_96559C.1.pep
QNQSIQGPLYYLSLVDTLISSYVIKFELVSQKSLDTRDITA

SEQ ID NO: 365564 - protein, 140 aa, Zea mays
  unsure (1)..(140): unsure at all Xaa locations
  Clone ID: MRT4577_9655C.1.pep
HGRETNRAEQKKPGEQRGKNTPPGEGGXPPPPPPPNPPQTNPTGAPPGAKTRAGGPKPPPPPPPKSIPKPTPHGPNPPLEKKKPNPRGMLGRTTTTPGGGERRPPPPPPPXPEKRKGRPXRKEGNPGLKGGKTTPPPGGG

SEQ ID NO: 365565 - protein, 106 aa, Zea mays
  Clone ID: MRT4577_96560C.1.pep
MASVKIAVVLLACATLMATAAAYAPYRPEPEPCKTQAMYFKNCLLLVSECEKCCTGVVADPACFCEVEREAEIQCAPGHHCSRADKKIKIHEMNLSCMKNLKCKRA

SEQ ID NO: 365566 - protein, 59 aa, Zea mays
  Clone ID: MRT4577_96561C.1.pep
ELALTCSTTPSPARCRLDLVVIPCVIKKTQESGEDEASSVMFTKYSTQGLNQNPCRIRR

SEQ ID NO: 365567 - protein, 79 aa, Zea mays
  Clone ID: MRT4577_96562C.1.pep
GRGDPFSFRASARLGTLYIFFLVFKTSKSTQKKIISYHFKMYLLCGNCYHNKHHALGSEYKITIVEKGPQLQAATVLSP

SEQ ID NO: 365568 - protein, 79 aa, Zea mays
  unsure (1)..(79): unsure at all Xaa locations
  Clone ID: MRT4577_96563C.1.pep
FRAVELSXVXXAXXXRLRVXXRRHGXLMQLMKMXXXXKGSXRXDXCRWASVPWNGXLXSXCRXGYGXXCYTXMNXXXAX

SEQ ID NO: 365569 - protein, 80 aa, Zea mays
  Clone ID: MRT4577_96564C.1.pep
LRGKRLVFVGDSLNKNMWESLICILRNSVKDKSKVFEVFGRSQFRAEGSYSFLFQDYNCSVEFFRSPFLVQEWEMPVSNG

SEQ ID NO: 365570 - protein, 24 aa, Zea mays
  Clone ID: MRT4577_96565C.1.pep
FRFRVQLCMSCLTMLIYDILHGPY

SEQ ID NO: 365571 - protein, 681 aa, Zea mays
  unsure (1)..(681): unsure at all Xaa locations
  Clone ID: MRT4577_96566C.1.pep
ELLNNLIRHNASNQMLLKDXMGFDPLISILRVRXPKIRRGSAFNFTQQKTVNLLAALNTVELLLMVGPSGEAGKDANKNANQTALAQKNILDHLLLLGVESQWAPVALRCMALRCIGNLVLRNPQNLDSLARKQVGEEPHVQPALNAILSIILRTSIAQEFVAADYVFKCFCERNPNGQALLASTIAPHPNQGDIHEPASDMPFGSVLLQALVSSDVNGDMEACCRASSVLSHIIKDNLQSKDRVLQIQLETSTASLGRTEPVLHRIVTCLSIAASMEGENDQNNQLEEPYIQPFILRLLIIWLVDCSNAVNCLLESAVHLNFIIELASNKRYAACVRGLAAVVLGACILYNASHEKGRDAFAVADAISQKIGLTTYFLRFDELRRSLAHPLPEQHHRKELSRSSANSMSDFQEIEEDETNKDDQHPVLSEIFDSQFVNLLSKLEADIRENIMDIFSRTKTATAVLPTELEQKNGEVDGEYIKRLKSFVEKQCNEMQDLLARNAMLAEELLRTGGGTTTDTSQKPSSGRERVQIEALRQELEGAKRQIGALKTEKSQIEAEANNQRNLSVKLESDLKSLSEAYNSIEQANYRLDAEVKALRQGGSVPYPDVEAIKAQAKEEAEKDSEAELNDLLVCLGQEQTKVEKLSTRLAELGEDVDTLLQGIGDDTAIPDDDDEDDEE

SEQ ID NO: 365572 - protein, 235 aa, Zea mays
  Clone ID: MRT4577_96567C.1.pep
MPKSHLHVSHGPIAIWIMGATCAKPGQWDGSRASPSRPIHTATTTPLPPQFPPPDTCCHPHDQKQNQAPSTHSHTPHQVKQGARSTATAAFMNSSFIGLKPAAAAAQATAAASSPMKQQVQVAPEGRRAALLGLAAVFAVTATTAGSAKAGVFDEYLEKSKANKELNDKKRLATSAANFARAYTVEFGSCQFPYNFTGCQDLAKQKKVPFLSDDLEIECEGKEKFKCGSNVFWKW

SEQ ID NO: 365573 - protein, 109 aa, Zea mays
  unsure (1)..(109): unsure at all Xaa locations
  Clone ID: MRT4577_96568C.1.pep
APQLALPAPPPPPPLXPPSPPKPPIVXPRSASSAAASGGRGGAGAEAAAAEPAXGSSVVRSATVLARTLVACEEKRERRHREVLELEERRLRLEEERTEVRRQGFAGLV

SEQ ID NO: 365574 - protein, 107 aa, Zea mays
  unsure (1)..(107): unsure at all Xaa locations
  Clone ID: MRT4577_96569C.1.pep
GVTISRSLVXARTAXLSGSNRSQEIKXKLVRTITEAGGQVDYVEIVGQESLVPVERMDXXCVICVAAWFGKDTKGSRSCSVDVPEMEEQVGWSLVYTYHLPCKWTKS

SEQ ID NO: 365575 - protein, 82 aa, Zea mays
  Clone ID: MRT4577_9656C.1.pep
ASCATKPLRSWSPGPHDLRVPYLSCTLIFRRCTSSILGLVYFYPLPSTSHRWRQARPGSRRTLHWRMSGSRREADRTSGSCS

SEQ ID NO: 365576 - protein, 90 aa, Zea mays
  unsure (1)..(90): unsure at all Xaa locations
  Clone ID: MRT4577_96570C.1.pep
KYGFSLFGTWHGFPFWSCPGGGGALAGFTWVTCLFTLCRCPLNGLIYTGGTGTICLSSNLDSWTPEHLIMMVYGGGSRPXAFFTQHGWAD

SEQ ID NO: 365577 - protein, 122 aa, Zea mays
  Clone ID: MRT4577_96571C.1.pep
IQISFSISTSNTALCPYSFTQGLAGSRGLNLFIFNFNYQSMQYTTIPANSLKDSDICDARHSPLKSELDRQVILVSKKKLIPRADITKARPRKIAERRACFTKKPQHMPGLQVPPPERLHLG

SEQ ID NO: 365578 - protein, 237 aa, Zea mays
  Clone ID: MRT4577_96572C.1.pep
HASAHFRPRAVRAAIRAQASAVEAPATAKAKKESKKQEEGVVTNLYKPKEPYVGRCLLNTKITGDDAPGETWHMVFSTEGPSLPARGLRIRGEKKRKEKMMTVSTSCYMCRFLVRAPPLKSRSAVRCPSAAPPGASGATSTSKLVLEVKERLAREHPGLPTGRYGRDDDDMVLWFLKDRKFSVDEAVSKLTKAIKWRQDFGVAELSEESVKSLYQTGKAYVHDSLDIYGRPVLIVVA

SEQ ID NO: 365579 - protein, 158 aa, Zea mays
  Clone ID: MRT4577_96573C.1.pep
MVFSTEGSQNPVGKKKRKEKMMTVSTSCYMCRFLVRAPPLKSRSAVRFPSSAPTGASGATSTSKLVLEVKERLAREHPSLPTGRNGRDDDDMVLWFLKDRKFSVDEAVSKLTKAIVSSNSLIPVKLTPNSFFTRSIISWYGNRVHISTSNLQFSFQLH

SEQ ID NO: 365580 - protein, 86 aa, Zea mays
  Clone ID: MRT4577_96574C.1.pep
GLGFYVVCSWSSSSGRYGPHTHRLGSGWTRATPIISVAALTDRSVIITTAIPRQLWCIVSVYSFSLLDLGKMQGPDHPCFSLYVTT

SEQ ID NO: 365581 - protein, 98 aa, Zea mays
  unsure (1)..(98): unsure at all Xaa locations
  Clone ID: MRT4577_96575C.1.pep
MTAQTQEELLAADLEQQEIHDDXAVVEDDDEDDEDDDDKDDDNVEGDASGRSKQTRSEKKSRKAMLKLGMKPVTGVSRVTVKKSKNILVVISKPDVSE

SEQ ID NO: 365582 - protein, 103 aa, Zea mays
  Clone ID: MRT4577_96576C.1.pep
KKVHKHCHPLNLGFLDQLVQTVFSPKIGGRIPPPQKKFSPLPKKQTKNFLDRINESPKINYLFPICKKKPWEQKIPRGNALWNSPPAKTKKPNLKKGIFSNNV

SEQ ID NO: 365583 - protein, 51 aa, Zea mays
  Clone ID: MRT4577_96577C.1.pep
QGLYYWAAMRVELAIPWGSLLQTARFRCLGQISPAVPERRLLGTYTTADGQ

SEQ ID NO: 365584 - protein, 89 aa, Zea mays
  unsure (1)..(89): unsure at all Xaa locations
  Clone ID: MRT4577_96578C.1.pep
THYSLNEMSQNDNNVGSLFKMEYAEDEDALSITKXADASVCVLIDSISASQTGGDGFCVNLYDYERNSNGWINKLLFLDGDKNMRKRYG

SEQ ID NO: 365585 - protein, 52 aa, Zea mays
  Clone ID: MRT4577_96579C.1.pep
STPTTTRLRLSTCTPLSRYCPTNMLQLLKATKAIPLKKDHIDAQATQRSKYS

SEQ ID NO: 365586 - protein, 231 aa, Zea mays
  Clone ID: MRT4577_9657C.1.pep
QSWFCLFGFSYPLGLPFFFFFKVSRTVGVASFFFRERLDWPWVRSQPFVLREIGKASSVKSSFTGLYAKLPVEDQAAKVYTAEIFQKFFNEIGHSFHCNYNILERNESVVTYIVSEHVDQTNKVDYKVAYDNVQGDIWCLCRLYQSKGILCRHALTVLRQELVLMIPQKYIIHRWCKDCKQTCASISQPVSAGNQELGSYDDLYKLGHLYFAEVVEFGSMNSESKEYALSI

SEQ ID NO: 365587 - protein, 111 aa, Zea mays
  unsure (1)..(111): unsure at all Xaa locations
  Clone ID: MRT4577_96580C.1.pep
VSDPSGFAVKWYTRKGNWNLVGNNFPVFFIRDGIKFPDVIHPFKPNPRTDVQEDRRVFHFLWGPPRSLNTFFFLLDEPGVSLHYPPKEGFGVNTFTXMSAERKAQPLKLTL

SEQ ID NO: 365588 - protein, 89 aa, Zea mays
  Clone ID: MRT4577_96582C.1.pep
PPPPPPSIHPSVGSYLRTFVVALTYFLSDDWFVIYFTTVAIACFGVGGDSDGEGSSVTFNRILLPFFFLFFNFVLPKLVRGLAIKFTPP

SEQ ID NO: 365589 - protein, 206 aa, Zea mays
  unsure (1)..(206): unsure at all Xaa locations
  Clone ID: MRT4577_96583C.1.pep
VKIADGIAQGLLYLHNLSXIRIVHRVLKASKILLDXDLNPKISDVGMARIFPSDATQATASRLVGTXXGYMANEXASDGLLSIKSDVFSLVLMVYLYGVLHXISFHKTWELWKDRRWNKFNDQSFGDDYELEELMKYLAXAVVLLCVMRKKTIDHPTMPDVVATLSSDGITLPEPKQPAYSYAKLNVSVTVLSSKNDVTIPSPNGR

SEQ ID NO: 365590 - protein, 45 aa, Zea mays
  Clone ID: MRT4577_96584C.1.pep
RYSFSSQHCYGYDVGLCGARSARANKPRGAARSPIDAQREREQEQ

SEQ ID NO: 365591 - protein, 273 aa, Zea mays
  unsure (1)..(273): unsure at all Xaa locations
  Clone ID: MRT4577_96585C.1.pep
AGXKKKKALAQPLVSLCARSSLVPSRSSLLPPLSPLCSRRTPGLLPWRDCSLPRALFCTASLASLPELIHSKLRARWCSDRDSLLRRAQLPQAASAAALGLKLPCITPCSPSRAELCLCSSPAPMEAPIGSPYRLTLLFVRPWSHPAQPRLLRRAQLLCAAVHPSSASASLLPALRVGRFSLARLLPCCSPRCSFSLPSLRSSSSSPARAFCPTVFSSPRTXVPVPARPRPWFQHSSAHPRISCSDCASPARRPCRXSCAQPHXLPARPPLHF

SEQ ID NO: 365592 - protein, 123 aa, Zea mays
  unsure (1)..(123): unsure at all Xaa locations
  Clone ID: MRT4577_96586C.1.pep
PISSRIRSARNGGTLPRPPVPVPRRRVVPPTPSAPTLATELVSCSCSAEDGQAGFFTRLRRLIKEKAKSDVEKLFSGFYKTRENLSVVDEXLLTYWNLADTDRVLNNLKEALIVSDLGPKISF

SEQ ID NO: 365593 - protein, 134 aa, Zea mays
  Clone ID: MRT4577_96587C.1.pep
MKSGERPKQMRGVRQESRRFRLLVIVAGFFLVSLTFVVISKPDSILSSLNLSISRAEGGASAWRLACDDARTHPLPNTASRAPFFLRLHPLCNHMHSPCKRRRSVTRIEATGWLLAAPARANRRRRAGGRGHSV

SEQ ID NO: 365594 - protein, 65 aa, Zea mays
  Clone ID: MRT4577_96588C.1.pep
AFQQIPSFFLLFFFRQRKLFFPHTKKRIRRVQRYRLISPLCIVIEPGTFFFFSFVSFGVTIVIPS

SEQ ID NO: 365595 - protein, 40 aa, Zea mays
  unsure (1)..(40): unsure at all Xaa locations
  Clone ID: MRT4577_96589C.1.pep
SIVDSYTGFPGAWATFTIRIDWRFLEILDIIGLCLKXLIK

SEQ ID NO: 365596 - protein, 373 aa, Zea mays
  unsure (1)..(373): unsure at all Xaa locations
  Clone ID: MRT4577_9658C.1.pep
SYEDLRSAQMRPPMVTGLPVEDQAAKVYTAEIFQKFFNEIGHSFHCNYNILERNESVVTYIVSEHVDQTNKVDYKVAYDNVQGDIWCLCRLYQSKGILCRHALTVLRQELVLMIPQKYIIHRWCKDCKQTCASISQPVSAGNQELGSYDDLYKLGHLYFAEVVEFGSMNSESKEYALSIMREVRDKVISYEKSLRDQRVDSHVSTANFAYNPVNEDFTDDALPISLSTKGWDLTQGQSKRSRKKKLATPTVLDTLKKKTKRAYNKRRNATANTLNTSATATDGITDGTNVQQNPVNEGWQLASTSAPETFSYGVXGYNLSIFYISLLFQELVKFTHILTNVHFCXENISFDLSQYNNAPSFHWPESSSRSQLH

SEQ ID NO: 365597 - protein, 140 aa, Zea mays
  unsure (1)..(140): unsure at all Xaa locations
  Clone ID: MRT4577_96590C.1.pep
YCDCDYGAXRLTQCSLYLYYLWLGFLTXSWKTKKXKTVFSSSAEVEYRAMAYTFKEITWLKGLITTLGVDHPAHIPLFCDSQSAIHISTNPVFQERTKHIEKDCHQVRDTVQDKLIFSKHISTIGQVADLFKKLLLPPDV

SEQ ID NO: 365598 - protein, 77 aa, Zea mays
  unsure (1)..(77): unsure at all Xaa locations
  Clone ID: MRT4577_96591C.1.pep
GIPGSTHAFGGAKSGCIWYYXPENHWWISEGIKKRPESSGTNPALHSNHLYLATTSTDCKFQMVSTFIKGVNPKGSP

SEQ ID NO: 365599 - protein, 90 aa, Zea mays
  Clone ID: MRT4577_96592C.1.pep
MSAKIGRVLQTRQFAQAATKHAEGNAYVRPESTRTTKLPNGLSIVSIENYSPISRFSVLIRAGARFEPFDQQGITHALRLAAGHSTKSSS

SEQ ID NO: 365600 - protein, 234 aa, Zea mays
  Clone ID: MRT4577_96593C.1.pep
MASSSKGAAASSLCIKLVACLCFLGLSQGRGTAKPPFTLRNLPPLEKASSFPAMRHDSYDYIVVGGGTAGCPLAATLSLKYKVLVLERGGSPYGNRNVSYMENFHIGLSNTAPDSSSQAFVSTDGVINARARVLGGGTCINAGFYSRASSSFVQDVGWEEDLVNESYPWVEDKVVQWPKIAPWQAALRDGLVEAGVSPFNGYTYDHVSGTKVGGTIFDANGHRHTAADLLAAGD

SEQ ID NO: 365601 - protein, 44 aa, Zea mays
  Clone ID: MRT4577_96594C.1.pep
TSFFFFFFFISLQQGLVPPPFTEGDLLHFINLGGAVAHPSVLAL

SEQ ID NO: 365602 - protein, 72 aa, Zea mays
  Clone ID: MRT4577_96595C.1.pep
VLTKHGQTDRRRTILDSKGRSGATSRRPGSRSTEHEDGRALQCCLAPHRFGRRQSLQRLRGVDLVKMGDHLL

SEQ ID NO: 365603 - protein, 74 aa, Zea mays
  unsure (1)..(74): unsure at all Xaa locations
  Clone ID: MRT4577_96596C.1.pep
GEVKCHKYSRRRPXDNGWSYMVEKFGHQGKRGAEGGWKFISLPDGSSRPLNDMEKMHVKRETPKRRRRIIAPYK

SEQ ID NO: 365604 - protein, 228 aa, Zea mays
  unsure (1)..(228): unsure at all Xaa locations
  Clone ID: MRT4577_96597C.1.pep
MALVPSGGAGACKDEAALGLPWSEMFRSASRRRPKQESDDAPPKKPALKTAGAKEMKAKPSSVGTGAGAGADIAGLSLEPDARLALYIAMAHAGLATALLVLYGLYLLLADFLRPLQWALLCSVPLRETQRALVAFWEPPLRGGLSAALLALPLAVLRSSTATLADARAALLRRPLPSSPAFPRLLRWLVSFFFFLILFERLXAATALLLLXFALAFFAASPSSTRCL

SEQ ID NO: 365605 - protein, 64 aa, Zea mays
  Clone ID: MRT4577_96598C.1.pep
GDYEDYRVPLRLVTACKCSQCATDRRFVQGEHLTGVHAYDDTKLIETDWSMMRNQAAANMKRHA

SEQ ID NO: 365606 - protein, 70 aa, Zea mays
  Clone ID: MRT4577_96599C.1.pep
NYFIKTRLLPPFFFFFFFFFFFFFFFFYLKILSGYKYSKAMYRLHHFFFALVSGEPCATKKPPRPADLVR

SEQ ID NO: 365607 - protein, 58 aa, Zea mays
  Clone ID: MRT4577_9659C.1.pep
ARLSQWSATLSALRRSPASHRGISTRSVRQRHEFQLTPHDQQPQYLANRAYSRNAHQG

SEQ ID NO: 365608 - protein, 63 aa, Zea mays
  Clone ID: MRT4577_965C.1.pep
GSWGKTVAAPYNSLIQKLMVHSTQPTRFFKVYGTKLVVLFTMDLKVTNILPRVKPPNLGETRS

SEQ ID NO: 365609 - protein, 94 aa, Zea mays
  Clone ID: MRT4577_96600C.1.pep
QKLKIPPHPPVQKMPNQKVWKVTNQKLRPLPKVKFAPKEGGPLPGAGGETIRGGKVQKWVICTFSLKPTHVFFVKKQKIICKVVFFRPSNKVYI

SEQ ID NO: 365610 - protein, 204 aa, Zea mays
  unsure (1)..(204): unsure at all Xaa locations
  Clone ID: MRT4577_96601C.1.pep
MDTKIFSLLMLLALSTCAANATIIPQCSQAPIAILYPHTFHNLAXSMXDNPSLEPYRLQQAXVAGSNIPSSALLRQQSPALSSVQSLAQXTISAQQLXQQLALPXCNQAAVYYLDPYSAYQQFVPFNQLSTLNPAAYLQQQLSPFSQVATDYSEHQQLLPLNQLSALNPAAYLPYLILLPLSQIATASRAYLLTQHQVLSLYQQ

SEQ ID NO: 365611 - protein, 556 aa, Zea mays
  Clone ID: MRT4577_96602C.1.pep
IRHEAPLQPLPEPTASSLLSSSSTKSTAPPLICEGKPREISDLLSRLLSLAWIRFKPISLCNGDITLFSCSGIAIAHKGYHLTMCLTSASLVRAFDGKTNEQYYELKIKVRCEGNEVYKGFLAEYDLDHNFAVVNIDAFLGVHVGSSQCVLESVLRGEAYVVGRGVSGDLISRSVELGCDLSVSKHGQDLESKTSEAWEGGIVFSLNGESVGMNLFLVMGRTIFLPWGTIFEHLQHFGKSWQRFGAHVVGQSNSRPEGQEQLDLDSMGYPLPSTKGIDGMILVNTFEEFFGDIHGKGVWSKFSGQASSSLSSNVVALASYNGGKRFFACTGFFIPWNESTIILTSASLIRSSGDGSDIVENLRIVVSPCDGKIREGTLELYNLHYNVALVSVKDFYVRSPANTVCIRYSSQVAAVGRCFESGALMATSGKLVPWTGTLDCDCLVRSSCKITKAGIGGPLVTLDGNVLGMNFYDKKIGTPFLSMPDIFLILKSSKSHPSAGPFWKMDGDDAARLNRWPVPMPCWRLPNYVDEDKSDDDDSDDSVEYSYVRGVKVILL

SEQ ID NO: 365612 - protein, 61 aa, Zea mays
  Clone ID: MRT4577_96603C.1.pep
GLHQPAPLLHKLHSGHVRTKNMWAQTATTACASTPCWIRLSSIEFITYNQLSGLYCTVYLH

SEQ ID NO: 365613 - protein, 57 aa, Zea mays
  Clone ID: MRT4577_96604C.1.pep
SLKPKHKRRNGPRACENSQGRVHIKILRGEREDTEVGESVKKKTLYKLEAIPNGGRT

SEQ ID NO: 365614 - protein, 155 aa, Zea mays
  Clone ID: MRT4577_96605C.1.pep
NTVCIRYSSQVAAVGRCFESGALMATSGKLVPWTGTLDCDCLVRSSCKITKAGIGGPLVTLDGNVLGMNFYDKKIGTPFLSMPDIFLILKSSKSHPSAGPFWKMDGDDAARLNRWPVPMPCWRLPNYVDEDKSDDDDSDDSMEYSYVRGVKVILL

SEQ ID NO: 365615 - protein, 51 aa, Zea mays
  Clone ID: MRT4577_96606C.1.pep
TALLVVVASMLFCPGKIANACFNNLACQIFSQNTPVCCCRAVLPCPHSHDL

SEQ ID NO: 365616 - protein, 146 aa, Zea mays
  unsure (1)..(146): unsure at all Xaa locations
  Clone ID: MRT4577_96607C.1.pep
GGKTPTKKWRIPRKHNAGRGAPLAGPPQREPKKGPPQQGVAARQGPXKQGVEGKXGVPESREKGSPNPPGGPKGPRXPPAPRPGPPLGXPPPRAAAPRGPGPGPNPARFRGEPGPSGEPRYRGPGXAVPPPGXGGNAGGPPGGPPP

SEQ ID NO: 365617 - protein, 127 aa, Zea mays
  Clone ID: MRT4577_96608C.1.pep
LYDCIVLATSTFIRNTLRPPERSPVLVSSILVQIESKANGHCSVLGHRSGRPKVTALQRFGRPRGEGEGTTPTHDLRTMGASANLDLLAAVHRNPSHRPTVVVPARALSRRPYAAAQTQSRSAPTRP

SEQ ID NO: 365618 - protein, 225 aa, Zea mays
  Clone ID: MRT4577_96609C.1.pep
MPPVKWLMHWHPSPGATLNSQILAEACGCAESLGGSKDGRWKTSIFFYRAMTRDGAGGPAVQQHPDLPRELLGVALHERPGLYFSIVRAQRLVLQADAAFPQVMEKLQSYRIRVALNFEGFQYQLGDFCLRIGKCVPNNSEALRGIMMEVEYYPLTSIEKSKAVMEDFFDIWQETVAKKSLPGQFIHVDSNFSEYGLSDQYSFQHTAVQYATCLQQLMAAVTVRG

SEQ ID NO: 365619 - protein, 80 aa, Zea mays
  Clone ID: MRT4577_9660C.1.pep
HLPSMYQFSGTGSLHNHSFFSFHGYLQLPIDLSEPCKLGQMPLNRPDVSLWIPQEIICPFSDEAVCNKMFIASPSSSVFA

SEQ ID NO: 365620 - protein, 89 aa, Zea mays
  Clone ID: MRT4577_96610C.1.pep
EKAFGLSKILQCLFCPKMASCRGKCLLKDKGGGFGILNQSSLENPSLWLNKWNWLRNRDLRLNCQNQPNGGQGWSKYAQLDPNKIEFLF

SEQ ID NO: 365621 - protein, 66 aa, Zea mays
  Clone ID: MRT4577_96611C.1.pep
RAVLPPPFKKLWGLGYPFKEHIEQHVFYVGPNVPLVVLIRPPIYLIIWGKLCRTYKKPPPVLVRAP

SEQ ID NO: 365622 - protein, 155 aa, Zea mays
  Clone ID: MRT4577_96612C.1.pep
PQIFFFFFLAIDRDHFFLLHGSSTAYTGVAVGSSRTQGPTLSPCRGVYIHAHRSMACICMHAHTLVALRWRCVAAGGACSGFARQYSLDRGLLLWLQAKIPRPRRPVVVAVAGNKSLEPGKASSKNCPDHWSDELQCKQIHRRRRGRSSRLPRAS

SEQ ID NO: 365623 - protein, 47 aa, Zea mays
  Clone ID: MRT4577_96613C.1.pep
FPLLFGRTHGTLVRFWDGPPIEIEKRGMKNSSYDTSLRSEYNAGPHN

SEQ ID NO: 365624 - protein, 87 aa, Zea mays
  unsure (1)..(87): unsure at all Xaa locations
  Clone ID: MRT4577_96614C.1.pep
MASGELACTYAALILSDDGIAITAEKVATIVKAANIKVESYXPALWGELLEKRNDEDLILSVGSDGGSAPVAAEEPGEGAVTATAPS

SEQ ID NO: 365625 - protein, 60 aa, Zea mays
  Clone ID: MRT4577_96615C.1.pep
FTRPPNLASDRGLFPPSELSRSPLQCPTGRERGPMNPTLSPADSRRPELAPSAPLRDIGL

SEQ ID NO: 365626 - protein, 42 aa, Zea mays
  Clone ID: MRT4577_96616C.1.pep
RGTRYLNPVLSVYTRATACVIARSPRLSTCTTSKLQPFAEEA

SEQ ID NO: 365627 - protein, 272 aa, Zea mays
  unsure (1)..(272): unsure at all Xaa locations
  Clone ID: MRT4577_96617C.1.pep
MAIRMSNNVIGALNLVTLLLSVPILVSGIWLRSRADGTECDHLLSTPAIALGAVLMAIAVAGLAGACFRATWLLWLYLLAMLVFIVALLCFTVFAFAVTNRGAGEAVSGVGYREYRLGDYSTWLRRHVESRKDWARIRSCLADAHVCRRLEERESKDAAGLARLGLSPVESGCCKPPTSCNFTYTGGTEWTRTAAGSAPAGRDCSAWGNDEDDLCYGCQSCKAGVVDALKRDWKRAAIVNVVILSFIVVVYSVGCCAFKNSRRDNYAYHXXK

SEQ ID NO: 365628 - protein, 118 aa, Zea mays
  Clone ID: MRT4577_96618C.1.pep
SCTGMSVRVWRRASSLEARMFRFVFNFNPNGVAACSTSFRKLLWLVGPVCPFKRYLGGFGFFWSQFFLSPVMVGGFRVMPPPFLPQGFLMTGVSAPRAPPKKKKKKKNPGGGACCRGS

SEQ ID NO: 365629 - protein, 140 aa, Zea mays
  unsure (1)..(140): unsure at all Xaa locations
  Clone ID: MRT4577_96619C.1.pep
GSPEVGFLVERIEMASADVEYRCFGVGLAXATDDHSLHNXFNTYVEVLGSKXIILYRETQRSRGFGFGTFSTGEAMLNAIEDMNGKEVDGRNITVNEAQSRDGRXGGAVVGYGGDPWEASSTTMWSAVMSTSDYGVRSLL

SEQ ID NO: 365630 - protein, 60 aa, Zea mays
  Clone ID: MRT4577_9661C.1.pep
LLGHATTIFRRIFVRTQQYTYTRILIEFADEEVCARACVSVYIYIYGVYLWADMICPRLR

SEQ ID NO: 365631 - protein, 59 aa, Zea mays
  unsure (1)..(59): unsure at all Xaa locations
  Clone ID: MRT4577_96620C.1.pep
WKAYFKIILTSDPKLPSIVFSVHDAXAPFTAVLNGAAKDVNDSTHTSAMITNDGIAINP

SEQ ID NO: 365632 - protein, 125 aa, Zea mays
  Clone ID: MRT4577_96621C.1.pep
DLAFLGPQGPGWPGYPFSGPGGPPPPQGPGRAGPPGLGPSWGVWSPLCPCVPRLSGSSGAFFLSIRPMVSPLVPFFPLALWYVLLLWPFCFFFFFRKPETYIFTELKKKKKKKKKKKKNKKKIKK

SEQ ID NO: 365633 - protein, 101 aa, Zea mays
  unsure (1)..(101): unsure at all Xaa locations
  Clone ID: MRT4577_96622C.1.pep
MAPFGDGGVGCGDGGEALRGWDPLRSGSAPPTMEGAAAAAAAAERRVFGGGGDGASFFSGIDGLMFGARMXRGQQVPRCRRSSGTFWQFYIFICWTIWPTV

SEQ ID NO: 365634 - protein, 105 aa, Zea mays
  Clone ID: MRT4577_96623C.1.pep
PNPTQPPGGLIKLGGGAQNKGDRDGDRTTGRKEGRQHARGGRRGPAERAALADHAEPDTQRAPPTGPAPAPDHPMARAASQGLGPGHDVQCHHGLTAERHREKRE

SEQ ID NO: 365635 - protein, 84 aa, Zea mays
  Clone ID: MRT4577_96624C.1.pep
LTSNDLLDLGPEFNDQQPYALGGWWPPRQLRLRECDSYALCLTKDYRSSMVQCWVSFIPRYICSKCFVSTYLFNFERYSVYFYL

SEQ ID NO: 365636 - protein, 69 aa, Zea mays
  Clone ID: MRT4577_96625C.1.pep
MADWGPVVIATVLFVLLTPGLLFQLPAHGRIVGFGTMHTSGLAILVHAVLYFALITIFLIAIGVHIYAG

SEQ ID NO: 365637 - protein, 131 aa, Zea mays
  unsure (1)..(131): unsure at all Xaa locations
  Clone ID: MRT4577_96626C.1.pep
TGCFFLTRGRTSDTGGTIPWARARTHIPQRGLIHRKGVPIDLIRPVMLRLHTFQPILLNIXSLVKDMXMIITIXREGGNTWYIYCIRHYCTKEFCNYYHRYGYDCHLNEITDIFTLYCRTLLQTDTPELMA

SEQ ID NO: 365638 - protein, 69 aa, Zea mays
  Clone ID: MRT4577_96627C.1.pep
MADWGPVVIATVLFVLLTPGLLFQLPAHGRIVGFGTMHTSGVAILVHAVLYFALITIFLIAIGVHIYAG

SEQ ID NO: 365639 - protein, 63 aa, Zea mays
  Clone ID: MRT4577_96628C.1.pep
LGLRRAPCFNCSRFGGGGVYCVKPLVGVPEGGALGGGPILSGSWALLFFLNYSRPFLRCLVRL

SEQ ID NO: 365640 - protein, 69 aa, Zea mays; identical to SEQ ID NO: 365636
  Clone ID: MRT4577_96629C.1.pep

SEQ ID NO: 365641 - protein, 61 aa, Zea mays
  Clone ID: MRT4577_9662C.1.pep
PCRGTFNCFSGHIQAHKSHLAILYIQNQTYLAVNYIHSLLTLAFYNTNTSKYVANLQQHGI

SEQ ID NO: 365642 - protein, 128 aa, Zea mays
  Clone ID: MRT4577_96630C.1.pep
SPVPLSCSYVQPYVPAYSLVRVEAKGVMSAPLDVIVRVLGVLALRKLVEGAQLVRPGGPDNRAHPLQHVVPNGESCKARVLSIISPISCVYIWFSTVGSQIPVSALSLRCIRPRCTSHVSRTSPVAHT

SEQ ID NO: 365643 - protein, 117 aa, Zea mays
  Clone ID: MRT4577_96631C.1.pep
KVAGSLPRCRQQHLQPVGGGGEVVCAAGAVPVPRRAFRGSGRRSGEGGTSARRQVSTVVVASQLHVVYAPAVASVYPLRVKLQCSGYDPVSSLVCLCLPAIYLCTTAIHNSVSLRYA

SEQ ID NO: 365644 - protein, 74 aa, Zea mays
  Clone ID: MRT4577_96632C.1.pep
GNTPEFCKGLFNFSEKNKMGAGKIKTPAFQKGPEIMRLETGCFFYLPQGGYSAAPIVCRNNKPQGCKKKKAYLP

SEQ ID NO: 365645 - protein, 138 aa, Zea mays
  unsure (1)..(138): unsure at all Xaa locations
  Clone ID: MRT4577_96633C.1.pep
HAFAETHLSILTINDLTTVGCNTLSLLALLALFVSATNAFIIPQCSLAPSAIIPQFLPPVTSMGFEHPAVQAYRLQQALAASVLXQPIAQLQQQSLAHLTIQTIVTQHLPALSHLFVVNPIAYLLQQLLAFNPLSLAN

SEQ ID NO: 365646 - protein, 90 aa, Zea mays
  unsure (1)..(90): unsure at all Xaa locations
  Clone ID: MRT4577_96634C.1.pep
NIESRSTKSTYHACTIHRCVHRSAVAHEGALASGRWSTVVRRGKVGAGELPWRRRAVNSVVEVDXWRCGAGPPLKCTRPVCPSVRGRVKG

SEQ ID NO: 365647 - protein, 103 aa, Zea mays
  Clone ID: MRT4577_96635C.1.pep
PRPGSIMGPSMLTSMFPETPIFCKPYALGPFCFRGPQAVVKALFPPVGCPTIVITQLDPPGARSSWFAQPDPRKGEKKKKPTRVGFFFFHPIMAVPPLWALSV

SEQ ID NO: 365648 - protein, 125 aa, Zea mays
  Clone ID: MRT4577_96636C.1.pep
TTTFWEGQINGRFGITIIVVMPTQKHHPRGSTNKGWPTLRGTGKKAWGPKGLGLPWIRTCMRATNLFYLWRGGEKGTDGGRDLWLLTVGELPEAAHSGPLALVVVVQDPGRPLMLGHPHLRVARD

SEQ ID NO: 365649 - protein, 80 aa, Zea mays
  unsure (1)..(80): unsure at all Xaa locations
  Clone ID: MRT4577_96637C.1.pep
LHXPPEASXPSYSPLGSQTXPRCFFSFRFAPDPSXSSLCSFRXPXXSLXXPXVXASLVSPAAXXXXXXIPXXWXXTXPFP

SEQ ID NO: 365650 - protein, 102 aa, Zea mays
  unsure (1)..(102): unsure at all Xaa locations
  Clone ID: MRT4577_96638C.1.pep
VRLDLRQVAQARPSPPPRHRPASSRHSNSRRAGSAAAGGRAAAIHRSACCGAAHMAGAERVLPRCSMARHATAGGQXXLIIIKKGADDQMNEMVRTRAVGPG

SEQ ID NO: 365651 - protein, 641 aa, Zea mays
  unsure (1)..(641): unsure at all Xaa locations
  Clone ID: MRT4577_96639C.1.pep
MAVGATAAKLHLSSAAAAARRPSLLHLAAVAVLCSLSYLFGIWHHGGFSAGPAAGGATSSSSVSIATAVSCSSPALTTAPSSPPAGPLDFAAHHTAEGMESEAALRQRSYEACPAKYSEYTPCEDVERSLRFPRDRLVYRERHCPADGERLRCLVPAPRGYRNPFPWPASRDVAWFANVPHKELSVEKAVQNWIRVDGDRFRFPGGGTMFPRGAGAYIDDIAKLIPLHDGSIRTALDTGCGVASWGAYLLSRDILAMSFAPRDSHEAQVQFALERGVPAMIGVLASNRLTYPARSFDMAHCSRCLIPWQLYDGLYLIEVDRILRPGGYWILSGPPINWKKHWKGWDRTKEDLDAEQKAIEAVARSLCWKKIKEAGDIAIWQKPTNHIHCKAIHKVSKSIPFCSNQNPDAAWYDKMEACITRLPEVSDLKEVAGGSLKKWPEGLTAVPPRIASGSIEGVTEEMFVEGTEXRKKRVGYHNSVITQLRQDGRYRNLLDMNAKFGGIAAALVNDPLWVMNMVPTVGNSTTLGAIYERGLIGSYQDWCEGMSTYPRTYDLIHADSLFTLYNGRCEADNILLEMDRILRPEGTVIIRDDVDMLVKIKSITDGMRWNSQIVDHEDGPLVREKLLLAVKTYWTLDDSKQ

SEQ ID NO: 365652 - protein, 91 aa, Zea mays
  Clone ID: MRT4577_9663C.1.pep
FLAPCVNHFVVAFKSVHVIRHPPMVLNVMFPRLVNKGVRPPVGTCFFRGRGQKATSHGGWILVLSPRVAAVVYYAPPVGVSVVDHKHTVVM

SEQ ID NO: 365653 - protein, 104 aa, Zea mays
  Clone ID: MRT4577_96640C.1.pep
SPQYTTNWATSRPKHWAARSWRKYHGSRWPKSGHGAEYHHEHILQRVPARAVGMNGGAHHEAREEQRRTRAGLSHSEPNRVSEATARHELLLERPRARADHLKI

SEQ ID NO: 365654 - protein, 67 aa, Zea mays
  Clone ID: MRT4577_96641C.1.pep
CARKTGPTKSHWVQSGFAFGVGLNMKHATWACYEIRTSCNKSPLGKGQFGILHVLYKELSPRYKSHR

SEQ ID NO: 365655 - protein, 60 aa, Zea mays
  Clone ID: MRT4577_96642C.1.pep
VAAYRTWHKQGVPNAHSEQHGKDGTRGRTWATRERTAAAGEQMNASRGTQHKRARERKPG

SEQ ID NO: 365656 - protein, 51 aa, Zea mays
  Clone ID: MRT4577_96643C.1.pep
RARVDCDATPVPNCIDSYSVPTWCLQWMSSGPITPTSVPSLPPTGRPSPAP

SEQ ID NO: 365657 - protein, 108 aa, Zea mays
  Clone ID: MRT4577_96644C.1.pep
ALPKVYVLGVIPVTKHAVLEFFLPSLGWAVITCLAVAPNLVVGVGSSLLCSGPLWLPGSHSAAGVRSQVVAFVFVTLFAGPPLGWWGCHSRLERTARTVMQRRRNYQR

SEQ ID NO: 365658 - protein, 104 aa, Zea mays
  Clone ID: MRT4577_96645C.1.pep
NLGGGGFVSSGPCLRGFHTHVDLSAPKALKLPNFPPASSPCFDSFLNSSFYMAPILAFNTLFIVGDYFFVSLPRFLGSYSTYARAIFFPLWEVLASRPDKEAPP

SEQ ID NO: 365659 - protein, 129 aa, Zea mays
  Clone ID: MRT4577_96646C.1.pep
WESKEVFSRDGHLKLSTQVFFASIDQRSERAAGESACTALVAVVADWFQTNQDLMPIRSQFDNLIREGSLEWRRLCENETYRERFPDKHFDLETVLHAKIRPLTVAHSKSFIGFFHPQGTEDVTGFDFL

SEQ ID NO: 365660 - protein, 64 aa, Zea mays
  Clone ID: MRT4577_96647C.1.pep
LHMVVSYSHLVRIAQFHRAIKFTPHSFSETSSLDPCNSGISAHILDVSLLQWPHTPPLHPFLSE

SEQ ID NO: 365661 - protein, 146 aa, Zea mays
  unsure (1)..(146): unsure at all Xaa locations
  Clone ID: MRT4577_96648C.1.pep
SGSRACAQHGFFRAVNHGVAPGRAARLDAAARTFFALAPHNKQRAGPPSPLGYGCRSIGFNGDAGELEYLLLHANPAAVAHRARSIDTDDPSRFSNVVNEYVGAMRQLACEILDLLGXGLGLKDPRSFSRLIADTDSDLLLRINHY

SEQ ID NO: 365662 - protein, 72 aa, Zea mays
  Clone ID: MRT4577_96649C.1.pep
LSTSKEYFGGGSSYYYSTHIVTPQICTMTRVVFHNDASSLITVTHQKSLGGRGDPHAHGISHAVLLAGTCTS

SEQ ID NO: 365663 - protein, 61 aa, Zea mays
  Clone ID: MRT4577_9664C.1.pep
LLRTTVCCSVSFLSINANTSCNPVYVTTKVFTWRMQAGCGKVCASVARTRSSAKLSGEDIS

SEQ ID NO: 365664 - protein, 148 aa, Zea mays
  Clone ID: MRT4577_96650C.1.pep
MSIKCHCSAIHVLLQNNVTSFLQLATDQVTSKMDQKQYWTGDQNKYQYHTIENFAESFRTSYLPLLVEDKLCSPHNTGKNKEVKVNAGRRVSRWNIFKACFSRELLLLKRNSPVHIFKTIQITVMALVISTLFHVGASDDLLINRVPN

SEQ ID NO: 365665 - protein, 86 aa, Zea mays
  Clone ID: MRT4577_96651C.1.pep
TRLKSPHSSRTRLKRLGSRKGGRQRDEHLGRGLGPRETFKIGWGKEGSPEGRKGEGPGSCCRCHCFRWKRLKGLGCPCRWALSYPG

SEQ ID NO: 365666 - protein, 71 aa, Zea mays
  Clone ID: MRT4577_96652C.1.pep
ASPWRRPILRARHPEVMSKKLTREVTIQAVQKTAHGQSGHKGKKHCQVAEVPGGGGRSPVGGKPTAKRERW

SEQ ID NO: 365667 - protein, 43 aa, Zea mays
  Clone ID: MRT4577_96653C.1.pep
LLIFISLELITPLLTHFHFRWILRAIGNTAPPGIWGHYNHSSK

SEQ ID NO: 365668 - protein, 73 aa, Zea mays
  unsure (1)..(73): unsure at all Xaa locations
  Clone ID: MRT4577_96654C.1.pep
MLVAIFSLQSECVELVAVIYPFITSDYMTYMFXFDSLLVVWXLSVITLMDSKTLLFGDKRVTVFGIRSPEVIP

SEQ ID NO: 365669 - protein, 90 aa, Zea mays
  Clone ID: MRT4577_96655C.1.pep
FIVEKKMCFSWWTRELYSLKLQGEGLHSGSYNSLVPRLVTAFQWVGCKKTHMCIADLSCSHVSLVFSVIWRILALNLGKGQLLQLVCRLD

SEQ ID NO: 365670 - protein, 92 aa, Zea mays
  Clone ID: MRT4577_96656C.1.pep
NCGRVDDEHGGDDLIGAIPSDVVEVAHAPCLRPVQLLRHGLEEGEDGSRDETPDGASVHRYHCHPRFNTTGSSTMLPAIAFVLHVLHGRLDE

SEQ ID NO: 365671 - protein, 56 aa, Zea mays
  Clone ID: MRT4577_96657C.1.pep
PRLQYGDGVLIGLSLCSVSKAQSVCYGSFSLNCCPHCLYGLYPLFDFLYYPGTAFN

SEQ ID NO: 365672 - protein, 233 aa, Zea mays
  Clone ID: MRT4577_96658C.1.pep
MNPRVVVSQTPPHLDSESVTSSAQTSTSHMPLHHYPEDQQYQPYTDRVEDDDPPPSYTVVDNEGPHANPFDLLPVSTSSLGLHPFKGTSNDKTVYYLDKRLDTDPEFLEQHVNDLAKEPPRPYVRVQGVDRKSGESKNGIDFDIHIELTPLLYQEMATRRSWRRIRAVNNFDKVRRGTAKMTRAPGFGGSGPPEEGTPGVSQWCYRYCTKKAGLKAFVLERRITGWGFCTRGG

SEQ ID NO: 365673 - protein, 88 aa, Zea mays
  unsure (1)..(88): unsure at all Xaa locations
  Clone ID: MRT4577_96659C.1.pep
MTASMMSASALGAACSGSALPTAAGPPRSARCAPKRNAIPTMPHEESGRMLTAQIPTPAQXQKRKRRYPPVEESLRLKAKTHFLICNN

SEQ ID NO: 365674 - protein, 51 aa, Zea mays
  Clone ID: MRT4577_9665C.1.pep
ELELVNHVGMELTVDQVVVGMVVGVIALAKHACARDDKLYNVTESVTKYVF

SEQ ID NO: 365675 - protein, 58 aa, Zea mays
  Clone ID: MRT4577_96660C.1.pep
EELKGFQSLASQNLLQSVSIPSNPYVLKITEQALSELIIVPWDAWSTERAQSLRHSNT

SEQ ID NO: 365676 - protein, 92 aa, Zea mays
  unsure (1)..(92): unsure at all Xaa locations
  Clone ID: MRT4577_96661C.1.pep
GYPQQIFLFNQQAAXNSPVYLQLQQLLPFTQLAGLSPATYLIQPQLLPFYQYAVPNAGTLLQLHQXLSFNQLALTNSTSFYXQQPIIVGALL

SEQ ID NO: 365677 - protein, 48 aa, Zea mays
  Clone ID: MRT4577_96662C.1.pep
ELLNRLQDFQNQSYVDLLNVFCRMRCLLELINLIDTYSIISPCSKYIL

SEQ ID NO: 365678 - protein, 52 aa, Zea mays
  Clone ID: MRT4577_96663C.1.pep
EFSLTKIRVLHWSCFRCLVKSYLQKNQFKAIKYGNFHSAQYQVFPLHNHPNI

SEQ ID NO: 365679 - protein, 97 aa, Zea mays
  Clone ID: MRT4577_96664C.1.pep
WFFYNITGFFFFLLHILIGRRGPLLIYFFRTFDLHRLLTSTSVLKEKVSIPCMEQHLQHTYPACFFIGKTWPPYPHAGTTFYSQLFLQRDTGHLWDG

SEQ ID NO: 365680 - protein, 162 aa, Zea mays
  unsure (1)..(162): unsure at all Xaa locations
  Clone ID: MRT4577_96665C.1.pep
MLIPKADRKKIHEYLFRXGVLVAKKDFNLPKHGDIDTKNLYVVKACQSLTSRGYVKTRFSWQYYYYTLTPEGLDYLREWLHLPAEIVPQTHIKQQRSAPPRGMLGGDGERRGGRGAPRGDRGDREGGYRRRDAGEKPEGAAPGEFKPEFRGGFGRGRGAPAS

SEQ ID NO: 365681 - protein, 329 aa, Zea mays
  Clone ID: MRT4577_96666C.1.pep
MTMDHHRAAPSLSTEEKRRIERVARCVARDRDGGDLTEKLLLRLLGLTRNARRWGFLAPDHPLHPYYLQHKICYYYNEESYRIPHRGMLAKGRKVAGRREEMSANYAFGPQDDDAIIKHRLLTRTTTTRGEPPLKKLQKKFMSFATEIEKDADNISDCERLYKAFLHEINTFELPLLKSKAVVDANIREKESFNELQVEIERQILHAKTDIEDLKKQLEQSKIERQHKEECEAIRKLICLQPPRSETEKLIADLEKEITDLKAENVACIRTLELRKKQFALLLHVVEELQISIEDEQKSIADELRAIAGEQKMSMEEGSVGASDSMVVD

SEQ ID NO: 365682 - protein, 77 aa, Zea mays
  Clone ID: MRT4577_96667C.1.pep
ICKTLPDSDYSREDGGLICEKGRGSFTKLLFRSGITRSRPLDQQPTTQITPDSSMNRYDAQDPQILTLRSGFNESPI

SEQ ID NO: 365683 - protein, 102 aa, Zea mays
  Clone ID: MRT4577_96668C.1.pep
PPILGQWVEFLGPQCSPPGPPFFFPQSPFFRHQFFPPLRRVDPPPRSQAFFGLVLQSFLHQHPQNGQFSGFLAAQKAHHLPAFLGLHHPIPCPFLFAGGFPP

SEQ ID NO: 365684 - protein, 76 aa, Zea mays
  unsure (1)..(76): unsure at all Xaa locations
  Clone ID: MRT4577_96669C.1.pep
TSCTPSSPWHPVPSFLLLAHSYQLSPXLLVSTWFGFVYLLPCCDPPPPLITYVMTPEIIYACVSVNLVSAGASARL

SEQ ID NO: 365685 - protein, 113 aa, Zea mays
  Clone ID: MRT4577_9666C.1.pep
MASGQESREELARMAEEGQTVVPGGTGGKTLEAQEHLAEGRSHGGQTRSEQLGHEGYSEMGSKGGQTRKEQLGHEGYSEMGRKGGLSTMQESGGERAAREGIEIDESKFRTKS

SEQ ID NO: 365686 - protein, 224 aa, Zea mays
  Clone ID: MRT4577_96670C.1.pep
SRRRLSHHSRAAARSAAPERSHLVPDAELLLPAFFSPSSLCSLLLFFSCLLTSPSISLALCYRGRHGRPRSSAPSLRPTPRRPCRRRRLGRPPCPLQELRADPAACRPPPPVRRRESPDPPVSDLPRHPSPVPDVSSAPESQASDTTRPCLLCPGGRHGGHRLSVSIRPPSDPCWCSPGTRHGGCRPSRLDPSAPGSTAEQPRSVACSATPWPAKASAEADKAH

SEQ ID NO: 365687 - protein, 277 aa, Zea mays
  unsure (1)..(277): unsure at all Xaa locations
  Clone ID: MRT4577_96671C.1.pep
MEAQTDSAPGGGDDLAIMREQCRTLEESISTRREAQLDLIGSLQHLVPDLVPSLEQSLRLIAAFNGRPFVPTXPQRQRPRAEPQXSPSTAAPSPARXLHTPQDLAGVLPSFRRXARGAGTSGGIHAVRTMVAVCLLELVPFAEIDAAALARRLQSETSSASEAERAALADLAAELGGSAPAAVALALRRIAEDSGGLQIEEAFIGGKQMTMVWAIDRSKLLKELPESASVLQIQPPPTPQVVPLDTDTNIIPRPPPLQQSDMWGNQCHRCSTSRGMK

SEQ ID NO: 365688 - protein, 56 aa, Zea mays
  Clone ID: MRT4577_96672C.1.pep
GLISVQHAHKEYSLPPIDSVYVSTSIIIITVQTCYILTNIFSCCACGISHMIPIFF

SEQ ID NO: 365689 - protein, 95 aa, Zea mays
  Clone ID: MRT4577_96673C.1.pep
LESSSTDRTKSGNGGRVPFTHDRKEAAATLALIGKTKVELRHTSRGGCSFKRDLEGGDSIIPSGGGAIRSHLAGRTDADTPHLGQSTVDFAFSLP

SEQ ID NO: 365690 - protein, 52 aa, Zea mays
  Clone ID: MRT4577_96674C.1.pep
FLVQSATLLLASNPQYVQILIQVVIIYAPNQSLRFSHYHIIRRSDAVDHIVT

SEQ ID NO: 365691 - protein, 178 aa, Zea mays
  unsure (1)..(178): unsure at all Xaa locations
  Clone ID: MRT4577_96675C.1.pep
FFFFFFFFFFFFFFFFFFFFFFFFFFFFWPSPKDPPPPRENPPQGPPPXGRPLDPPPQKTPGPTPGPGNRVPPEGPPPXGKTGVNPPYPPGKGPQAXPFRKIPXPGNRGSRKHGGPLPPQQKGPXGPTAPTGGLFGFPGGSPTFPSQPNKRGFEPQTGGGFNWMGGSLTLGGGPQAFL

SEQ ID NO: 365692 - protein, 56 aa, Zea mays
  Clone ID: MRT4577_96676C.1.pep
PTLFVLKTYLSISKNRNNPLTIMIIFNMHAYKSCTSLVYYFFTNSLYNTNNTNVRT

SEQ ID NO: 365693 - protein, 77 aa, Zea mays
  unsure (1)..(77): unsure at all Xaa locations
  Clone ID: MRT4577_96677C.1.pep
QSRKVLCSYFRPLLQALQSMTMSSESXLNLNEHGQQWFSTPGRLTTCPSMLYTKMRKQNMHDPAEDAFPGQSVRTRA

SEQ ID NO: 365694 - protein, 249 aa, Zea mays
  unsure (1)..(249): unsure at all Xaa locations
  Clone ID: MRT4577_96678C.1.pep
HSQKFSAKCELPFSHSKGSFMIVTPGGKIATNQLNQSVPIQLGSHIVKTTLLVLGLENVDIILGANWMTLHQVVLDVASRTVEVNSLFCGNFTLILPSQGSTQSCAFSMTELPLKKIPVVYEYADVFPDELPGMPPDRDIEFAIELQLGTTPISKRPYRMPPAELAELKRQLQELLDKRFIRPSTSPWGCPALFVKKKDESLRLCIDYRPLNAVTIKNKYPLPRIDVLFDQLVRAKKFXKIDLRSGYHH

SEQ ID NO: 365695 - protein, 262 aa, Zea mays
  unsure (1)..(262): unsure at all Xaa locations
  Clone ID: MRT4577_96679C.1.pep
PFLQYSLHPGSTKMYHDLKPLYLWTRMKREIAQYVLECDTCQRIKASHLKSAGALQPLSIPSXRXDDISMDFIVGLPNTSHRHDSIWVIMDXLTKVAHFLPVHTTDKAQKYAELYIDQIVCLHGLPRTIVSDRGAQFIARFWEQLQESLGTKLIRSSAYHPQTDGQTERVNQILEDVLRACAIDCGKNWDKHLSLAEXEFAYNNSYQSSLKMAPFEALYGRRCRTPLNWSQPGEREVFGPDLVTEAERKVTLLRKNLESPCR

SEQ ID NO: 365696 - protein, 160 aa, Zea mays
  unsure (1)..(160): unsure at all Xaa locations
  Clone ID: MRT4577_9667C.1.pep
MASGQESREELARMAEEGQTVVPGGTGGKTLEAQEHLAEGLYPTAGRPCDPLIFLSLVCAINPLLLRVSSQEELIINXRLCWSVRAGRSHGGQTRSEQLGHEGYSEMGSKGGQTRKEQLGHEGYSEMGRKGGLSTMQESGGERAAREGIEIDESKFRTKS

SEQ ID NO: 365697 - protein, 3104 aa, Zea mays
  Clone ID: MRT4577_96680C.1.pep
MAISQEDCIVAHWAEKKRKAPMAAPSAQAQRFRTVSHNQSRGFQQQAGRWVIRPPQQQQQLAPNRYPAPAPRNNQPPQQQQFRQGNGNKCFTCGNVGHYAKNCPRNQQRQMPAPNQDKGRKQKVQVRQGKLNFTALEEVPEGAPIMTGTFSVYNQPALILFDSGASHSFISQKFSANCKLPFSHSKGSFMIVTPGGKIATNQLNQSVPIQLGSHIVKTTLLVLGLENVDIILGANWMTLHQVVLDVASRTVEVNSPFCGNFTLILPSQGSSQSCAFSMTELPLKKIPVVCEYADVFPDELPGMPPDRDIEFAIELQPGTAPISKRPYRMPPAELAELKKQLQELLDKGFIRPSTSPWGCPALFVKKKDESLRLCIDYHPLNAVTIKNKYPLPRIDVLFDQLVGAKVFSKIDLRSGYHQIKIRASDIPKTAFSTRYGLYEFLVMSFGLTNAPAYFMYLMNSVFMPELDKFVVVFIDDILVYSKNEEEHAGHLHVVLQRLREHHLYAKLSKCDFWLKEIKFLGHTISQEGIVVDPDKVQEVMNWRPPTSVRQIRSFLGLAGYYRRFIPDFSRIAKPITELLKKEVKFAWSQKCEDAFHALRQHLTTAPVLAQPDSSKPFDVYCDASGTGLGCVLMQDNRVIAYASRALRPHEQNYPTHDLELAAVADLNMRQRRWLELIKDYDLEVHYHPGKANVVADALSRKLQCNCILMDSRVNTLCDELSKMQIEMIPSGSLSHISVEPALQDQIIMAQLSDKGVQIIKKNLHQKVEKYDCFRQDEKGVLWFKSRLVIPKDRDLKKKILDEAHLSKFSMHPGSTKMYHDLKLLYWWTRMKREIAQYVSECDTCQRVKASHLKSAGALRPLSVPSWKWDDISMDFIVGLPNTSRHHDLIWVIVDRLTKVAHFLPMHTTDKAQKYAELYIDRIVCLHGLPRTIVSDRGAQFVARFWEQLQESLGTKLIRSSAYHPQTNGQTERVNQILEDMLRACAIDCGKNWDKHLSLAEFAYNNSYQSSLKMAPFEALYGRRCRTPLNWSQPGEREVFGPDLVTEAERKVKLIRKNLEAAQARQKSYHDKRRKPLQFEVGSFVYLKVSPTKGVQRFGIKGKLAPRYIGPYEIVEACGPVAYKLKLPSKMSAIHSVFHVSQLKKCVRLPTEILAEPELEIEPDLSYQEYPSKILDCKERSTRAKSIKMFKVQWSNHSEEEATWETEEFLRSNFPDCLPKEAVVVESTYLARNLKKTIGKELKDCNLADGEYVLIPEQGPVQEEDQEQASEAAIEDLPAAPAVEGKPRYGGYKCGHCTAAAGVSGALYAKPMNSPTPASGGDSRFSSDFLSRDGFPSILWEVLNSAGYPTPPLYTVQLYEEHRVPRCQVWLTLEAHPLQPGWRSLDSETIGLMTDDTVEAAAMKTLTTFCGYHPLEMVMHPLGLFPAEKKDDPMWCNRVSHVKDVWAMYPDLVGRVTVQCMSALYRLQALQSDAMTLLANTAQAAKLTLDNREDFVVDLSTELVEKDLQVERLSQRITTLEQQVEIRDNTIDVLENQLHDVQRELEEANDHLDMHHQEMEANEAGSEGEEAPEELGPAPGANGTTSVIPPSPEFLSTQPPLFTKAEDPLDADVWLRVVESKFPLLTGDCPDEAKARFAAQQLRGPARTWWDHFRAMLPADHEVSWEEFKTAFRGHHIPASILDRKLNEFLALNQGTRTVLQYAQAFNDLCQYAGYHADSDEKKRDRFRRGLNTKLRERLNTVRADSFNELVNMAISQEDCIVAHRAEKKRKAPMAAPSAQAQRFRIVSHNQSRGFQQQAGRWVIRPPQQQQQPTPNRYPAPAPRNNQPPQQQQFRQGNGNKCFTCGNMGHYAKNCPRNQQRQMPAPNQDKGRKQKVQVRQGKLNFTALEEVPEGAPIMTGTFSVYNQPALILFDSGASHSFISQKFSANCKLPFSHSKGSFMIVTPGGKIATNQLNQSVPIRLGSHIIKTTLLVLGLENVDIILGANWMTLHQVVLDVASRTVEVNSPFCGNFTLILPSQGSSQSCAFSMTELPLKKIPVVCEYADVFPDELPGMPPDRDIEFAIELQPGTAPISKRPYRMPPAELAELKKQLLDKGFIRPSTSPWCCPALFVKKKDESLRLCIDYRPLNAVTIKNKYPLPRIDVLFDQLVGAKVFSKIDLRSGYHQIKIRASDIPKTAFSTRYGLYEFLVMSFGLTNAPAYFMYLMNSVFMPELDKFVVVFIDDILVYSKNEEEHAGHLHVVLQRLREHHLYAKLSKCDFWLKEIKFLGHTISQDGIAVDPDKVQEVMNWRPPTTVRQIQSFLGLAGYYRRFIPDFSRIAKPITELLKKEVKFVWSQKCEDAFHALRQHLTTAPVLAQPDSSKPFDVYCDASGTGLGCVLMQDNRVIAYASRALRPHEQNYPTHDLELAAVVHALKMWRHYLMGTHCNIFTDHKSLKYIFTQADLNMRQRRWLELIKDYDLEVHYHPGKANVVADALSRKLQCNCILMDSRVNTLCDELSKMQIEVIPSGSLSHISVEPTLQDQIIMAQLSDKGVQIIKKNLHQKVEKYNCFRQDEKGVLWFKNRLVIPKDQDLKKKILDEAHLSKFSMHPGSTKMYHDLKLLYWWTRMKREIAQYVSECDTCQRIKASHLKSAGALQPLSVPSWKWDDISMDFIVGLPNTSRHHDSIWVIVDRLTKVAHFLPVHTTDKAQKYAELYIDRIVCLHGLPRTIVSDRGAQFVARFWEQLQESLGTKLIRSSAYHPQTDGQTERVNQILEDMLRACAIDCGKNWDKHLSLAEFAYNNSYQSSLKMAPFEALYGRRCRTPLNWSQPGEREVFGPGLVTEAERKVKLIRKNLEAAQARQKSYHDRRRKPLQFEVGSFVYLKVSPTKGVQRFGIKGKLAPRYIGPYEIIEACGPVAYKLKLPSRMSAIHNVFHVSQLKKCVRLPTEIIAEPELEIEPDLSYQEYPSKILDCKERSTRAKSIKMFKVQWSNHSEEEATWETEEFLRSNFPDCLPKEAVAKRMTFEEQFCPNNNNPHPFPISLTLRFTPKGLWPESRDEIPLRGEGCDTPVSPRVSLKQPNQKPSFYVNQSKHEHQNNLSEKEFTKYILKSVMIKTIETFER

SEQ ID NO: 365698 - protein, 165 aa, Zea mays
  Clone ID: MRT4577_96681C.1.pep
MPPKFDPSEVKVIHLRATGGEVGASSALAPKIGPLGLSPKKVGEDIAKATGDWKGLRVTVKLTIQNRQAAVSVVPSASSLVIKALKEPPRDRKKEKNIKHTKSIPLDEIIAIARTMRFKSMAKDLKGTTLEILGTAFSTGCKVDGRSPKDVSDDIRAGEIEIPEE

SEQ ID NO: 365699 - protein, 3210 aa, Zea mays
  Clone ID: MRT4577_96682C.1.pep
MATYQEFLSTQPPLFTKAEDPLDADVWRHVVESKFPLLTGDCPDEAKARFAAQQFRGPARTWWDHFRAMLPADREVSWEEFKTAFRGHHIPAGILDRKLNEFLALNQGTRMVLQYAQAFNDLCQYAGYHADSDEKKRDRFRRGLNTKLRERLNTVRADSFNELVNMAISQEDCIVAHRAEKKRKAPMAAPSAQAQRFRIVSHNQSRGFQQQAGRWVIRPPQQQQQAPNRYPAPAPRNNQPPQQQQFRQGNGNKCFTCGSVGHYAKNCPRNQQRQMPAPNQDKGRKQKVQVRQGKLNFTTLEEVPEGAPIMTGTFSVYNQPALILFDSSASHSFISQKFSAKCKLPFSHSKGSFMIVTPGGKIATNQLNQSVPIQLGSHIIKTTLLVLGLENVDIILGANWMTLHQVVLDVASRTVEVNSPFCGNFTLILPSRDSTQSCAFSMTELPLKKIPVVCEYADVFPDELPGMPPDRDIEFAIKLQPGTAPISKRPYRMPPAELAELKKQLQELLDKSFIRPSTSPWGCPALFVKKKDESLRLCIDYRPLNAVTIKNKYPLPCIDVLFDQLVGAKVFSKIDLRSGYHQIKIRACDIPKTAFSTRYGLYEFLVMSFELTNAPAYFMYLMNSVFMPELDKFVVVFIDDILVYSKNEEEHAGHLHVVLQRLREHHLYAKLSKCDFWLKEIKFLGHTISQAGIAVDPDKVQEVMNWRPPTTVRQIRSFLGLVGYYRRFIPDFSRIAKPITELLKKEVKFVWSQKCEDAFHALRQHLTTAPILAQPNSSKPFDVYCDASGTGLGCVLMQDNRVIAYASRALRPHEQNYPTHDLKLAAVADLNMRQRRWLELIKDYDLEVHYHPGKANVVADALSRKLQCNCVLMDSRINTLCDELSKMQIEVIPSGSLSHISVEPALQDQVIMAQLSDKGVQFIKKNLHQKVEKYNCFRQDEKGVLWFKSRLVIPKDQDLKRKILDEAHLSKFSMHPGSTKMYHDLKPLYWWTRMKREIGQYVSECDTCQRIKASHLKSAGALQPLSVPSWKWDDINMDFIVGLPNTSRHHDSIWVIVDRLTKVAHFLPVHTTDKAQKYAELYIDRIVCLHGLPRTIVSDRGAQFVARFWEQLQESLGTKLIRSSAYHPQTDGQTERVNQILEDMLRACAIDCGKNWDKHLSLAEFAYNNSYQSSLKMAPFEALYGRRCRTPLNWSQPGEREVFGPDLVTEAERKVKLIRKNLEAAHARQKSYHDKRRKPLQFEVGSFVYLKVSPTKGVQRFGIKGKLAPRYIGPYEIIEACGPVAYKLKLPSKMSAIHSVFHVSQLKKCVRLPTEIIAEPELEIEPDLSYQEYPSKILDCKERSTRAKSIKMYKVQWSNHSEEEATWETEEFLRSNFPDCLPKEADCNLADGEYVLIPEQGPVQEEDQEQASETAIEDLPAAPAIEGKPRYGGYKCGHCTAAAGVSGALYAKAMNSPTPASGGDSRFSSDFLSRDGFPSILWEVLNSAGYPTPPMYTVQLYEEHRVPRCRVWLTLEAHPLQPGWRSLDSETIGLRTDDTVEAAAMKTLTTFCGYHPLEMVMHPLGLFPTEKKDDPMWCNRVSHVKDVWAMYPDLVGRVTVQCMSALYRLQALQSDAMTLLANTAQAAKLTLDSREDFVVDLSTELVEKDLQVERLSQRITTLEQQVEIRDNTIDVLENQLHDVQRELEEANDHLDMHHLEMEANEAGSEGEEAPEELGPAPGANGTTSAMPPSPMAARQRRGQNEQAPPPPPPAPTVQELMAQQNEILRQLLQRQPHQQHHGGGQHQRPPAMATYQEFLSTQPPLFTKAEDPLDADVWLRVVESKFPLLTGDCPDEAKARFAAQQLRGPARTWWDHFRAMLPADHEVSWEEFKTAFRGHHIPAGILDRKLNEFLALNQGTRTVLQYAQAFNDLCQYAGYHADSDEKKRDRFRRGLNTKLRERLNTVRANSFNELVNMAISQEDCIVAHRVEKKRKAPMAAPSAQAQRFRIVSHNQSRGFQQQAGRWVIRPPQQQQQPAPNRYPAPAPRNNQPLQQQQFRQGNGNKCFTCGNVGHYAKNCPRNQQRQMPAPNQDKGRKQKVQVRQGKLNFTALEEVPEGAPIMTGTFSVYNQPALILFDSGASHSFISQKFSANCKLPFSHSKGSFMIVTPGGKIATNQLNQSVPIQLGSHIVKTTLLVLGLENVDIILGANWMTLHQVVLDVASRTVEVNSPFCGNFTLILPSQGSSQSCAFSMTELPLKKIPVVCEYADVFPDELPGMPPDRDIEFAIELQPGTAPISKRPYRMPPAELAELKKQLQELLDKGFIRPSTSPWGCPALFVKKKDESLRLCIDYRPLNAVTIKNKYPLPRIDVLFDQLVGAKVFSKIDLRSGYHQIKIRASDIPKTAFSTRYGLYEFLVMSFGLTNAPAYFMYLMNSVFMLELDKFVVVFIDDILVYSKNEEEHAGHLHVVLQRLREHHLYAKLSKCDFWLKEIKFLGHTISQDGIAVDPDKVQEVMKWRPPTTVRQIRSFLGLAGYYRRFIPDFSRIAKPITELLKKEVKFVWSQKCEDAFHALRQHLTTAPVLAQPDSSKPFDVYCDASGTGLGCVLMQDNRVIAYASRALRPHEQNYPTHDLELAAVVHALKMWRHYLMGTHCNIFTDHKSLKYIFTQADLNMRQRRWLELIKDYDLEVHYHPGKANVVADALSRKLQCNCILMDSRVNTLCDELSKMQIEVIPSGSLSHISVEPALQDQIIMAQLSDKGVQIIKKNLHQKVEKYDCFRQDEKGVLWFKSRLVIPKDQDLKRKILDEAHLSKFSMHPGSTKMYHDLKLLYWWTRMKREIAQYVSECDTCQRVKASHLKSAGALRPLSVPSWKWDDISMDFIVGLPNTSRHHDSIWVIVDRLTKVAHFLPVHTTDKAQKYAELYIDRIVCLHGLPRTIVSDRGAQFVARFWEQLQESLGTKLIRSSAYHPQTDGQTERVNQILEDMLRACAIDCGKNWDKHLSLAEFAYNNSYQSSLKMAPFEALYGRRCRTPLNWSQPGEREVFGPDLVTEAERKVKLIRKNLEAAQARQKSYHDRRRKPLQFEVGSFVYLKVSPTKGVQRFGIKGKLAPRYIGPYEIIEACGPVAYKLKLPSKMSAIHSVFHVSQLKKCVRLPTEILAEPELEIEPDLSYQEYPSKILDCKERSTRAKSIKMFKVQWSNHSEEEATWETEEFLRSNFPDCLPKEAGM

SEQ ID NO: 365700 - protein, 98 aa, Zea mays
  unsure (1)..(98): unsure at all Xaa locations
  Clone ID: MRT4577_96683C.1.pep
EDFGRRGCPLGGVLPSXRPNGPGGPPPLDFLPQGRVGPPPPPGGGPVLKIGVLFAPGGAPRGGGGLFLFRAPPGRGVLLFKWGSFCPPFRSFHEILAF

SEQ ID NO: 365701 - protein, 105 aa, Zea mays
  Clone ID: MRT4577_96684C.1.pep
KMLGGNRKLPLNNRRQSILVVYGKVKEKIKKTRGLNQRNFFYPFFTFRITGTAVTPAADKLKEREVLPHQATAGGGTTTREGATMGFGFLVTFPSFGPKLLKLDL

SEQ ID NO: 365702 - protein, 82 aa, Zea mays
  Clone ID: MRT4577_96685C.1.pep
ETGLLLLCFQVMYISLLQRLGHLRVSIYNSMPRGRRLLYEMNDTHSRQSWACTHRMEGQDVHARKGRFSRTTAQMTGAFRSP

SEQ ID NO: 365703 - protein, 48 aa, Zea mays
  Clone ID: MRT4577_96686C.1.pep
LRHQLRRRSTYLETNVRDDEGTRFGGPMLAPTSSSLLPDQHMTTCSRR

SEQ ID NO: 365704 - protein, 46 aa, Zea mays
  Clone ID: MRT4577_96687C.1.pep
LILGISQMEPGLSDCEFQYKCSPIVIDGNCMSHVAGLMAVTFYRVV

SEQ ID NO: 365705 - protein, 40 aa, Zea mays
  Clone ID: MRT4577_96688C.1.pep
LSDIISQPLTVKFSCSIAHSIPIHPVCCIEHLIFIVFGLM

SEQ ID NO: 365706 - protein, 72 aa, Zea mays
  Clone ID: MRT4577_96689C.1.pep
AVSVPGYLRRLVPSGEPQYGCRRLISICGLCIMNRGCDFVGFMYILCPLYCTQNSFAAVRLESLCALRLVLQ

SEQ ID NO: 365707 - protein, 191 aa, Zea mays
  unsure (1)..(191): unsure at all Xaa locations
  Clone ID: MRT4577_9668C.1.pep
SIGPEMGRFVGKVGHWNSSDDLEFFEVGEAVKVTGELSGPGGPITFRAKIGKGKRLVNWGACLQEFGVIATFKGVGGIAQTGFKNPPWVDGELLVLFGXXXLSYTLGAQSSVSCAVCLCRVFWFFFVGLAFPSGGTPRRGGVVACLLFERAVAGPGSKCSVESVAWGVFFFSALGPFWFSWVPWPSLLSLL

SEQ ID NO: 365708 - protein, 40 aa, Zea mays
  Clone ID: MRT4577_96690C.1.pep
LFQRVAPLIMREALPNFHFISLIKPKKVTFLHTFTNYIFL

SEQ ID NO: 365709 - protein, 73 aa, Zea mays
  Clone ID: MRT4577_96691C.1.pep
WVVYFEGPFLFRKQMARLITGPLLEADICKQFNLDFQTAAQNIQIYAVTSDTKSSLYFLRYLSGQCLKLRRLT

SEQ ID NO: 365710 - protein, 78 aa, Zea mays
  Clone ID: MRT4577_96692C.1.pep
KTKTVSQHHLKCTKRKAKGVNPLVNPFDSNLLRSSHPPQLNQLSAKSTTASPSYKGTPTTGGSPEKKWRLMKTITFRF

SEQ ID NO: 365711 - protein, 106 aa, Zea mays
  Clone ID: MRT4577_96693C.1.pep
MVNVPKTRRTFCKGKNCKKHTLHKVSQYKKGKDSVHAQGKRRYDMKQKGYGGQKKPVFHKKAKTTKEIALRMECTECKFKKQLAIKRTKHFELGAEKKKKNQVIAY

SEQ ID NO: 365712 - protein, 48 aa, Zea mays
  Clone ID: MRT4577_96694C.1.pep
GQNICFYPLFGDFLSYFGEYKVYFFFCRSGLFIYHRSCTVSFSLCLRI

SEQ ID NO: 365713 - protein, 123 aa, Zea mays
  unsure (1)..(123): unsure at all Xaa locations
  Clone ID: MRT4577_96695C.1.pep
SLIYYTLLHTTLPXXHXKSNHTXSQHHXAHXSHHXHHXTNKXHHSHXTHKHNLHHXXHPHXYXLIYHPXLTPIRHQTPSHHQPPLSHYYHXHHSISSSTTILSYILYTTPPIKKHIIYTSRPL

SEQ ID NO: 365714 - protein, 53 aa, Zea mays
  Clone ID: MRT4577_96696C.1.pep
HVRACGSTGISGDRISDLTLGRGMRFSTQSSQIMWRMVFVDVGSVSSSYSSSA

SEQ ID NO: 365715 - protein, 45 aa, Zea mays
  Clone ID: MRT4577_96697C.1.pep
RPVEYGNVYLSWETSQRWRYVIHSLLVLGHHKTPRVRGRVGGRVG

SEQ ID NO: 365716 - protein, 53 aa, Zea mays
  Clone ID: MRT4577_96698C.1.pep
HNTILLIHKHILITKTSVNFIMTKSICSSHYHFHIQLHSLTTQLYSIIKNNIP

SEQ ID NO: 365717 - protein, 48 aa, Zea mays
  Clone ID: MRT4577_96699C.1.pep
LSQARLLPTRGVQCPPLGKGVLFITGGTGLCPGAHSELTHGCLPRNSS

SEQ ID NO: 365718 - protein, 44 aa, Zea mays
  Clone ID: MRT4577_9669C.1.pep
SFWLPSLVPCVLSWVCRFARCLGVGEGDLVFKSPLGVGCHVWVR

SEQ ID NO: 365719 - protein, 95 aa, Zea mays
  Clone ID: MRT4577_966C.1.pep
GVWRRASPQCLKNHVCVYSNSLVYILALCDYEPLELILVAQRSVHIHLSMPFVFQNFRCQGLMFLVFLDFVSALLSLSYDLYLTRLLSSSLTLLV

SEQ ID NO: 365720 - protein, 98 aa, Zea mays
  Clone ID: MRT4577_96700C.1.pep
PGPQSSQVGAGCSPRMAHRMYAACIATKTCACVLTGGLPASVRVRVSLCDPGPMDKRVEPVEDRVEPGPRGPGGLQAPGWPNPRSSAGASALKKGQKR

SEQ ID NO: 365721 - protein, 87 aa, Zea mays
  unsure (1)..(87): unsure at all Xaa locations
  Clone ID: MRT4577_96701C.1.pep
GRFFFFFIEEERRRFDEIEALVLASLFXRRRRQTNSKMDMRQHLRLHKEVSVSCHRFPFPCTDAVWRTLLVSVASPSSTTRRLVRSA

SEQ ID NO: 365722 - protein, 131 aa, Zea mays
  unsure (1)..(131): unsure at all Xaa locations
  Clone ID: MRT4577_96702C.1.pep
RMTMHIPRSLPERQDHFLRYKELKPRVKAPSDGCPPLPAEEAKLVADIDAETEKINAFLLDQEEELIIRHRELQNHNLAHAGXAGQSRXPALNEAEVTCMRMEIVNXHRDIELVLNYSSNNYIRRRSSSSS

SEQ ID NO: 365723 - protein, 69 aa, Zea mays
  Clone ID: MRT4577_96703C.1.pep
RPVPGTRLLVGVDLLRRPLVIDYPYIGLTWRGRASTILGPYTLSFRLFLHRFELEKTNFHRLGIQYPLL

SEQ ID NO: 365724 - protein, 227 aa, Zea mays
  Clone ID: MRT4577_96704C.1.pep
MTTAFGARPKRRLNRVMDALNFEYPDYERLDRGAEGQKRKRVASALDEEAAKLVKKDEKTLKKRKLSPESKVGASKKKKNAALKRKTTDIGDEAPSTPPATDVEEILKTPPLASASKTPAIDSIAAAEAAPTEAESAEAETTEDVNLDATVAEIDTMLLDAAAEEAAAAAEEIPGTVAGKGKEKAEDISEEEDFNFKDILGQELSKAEKEELKEYVISCGYRPGALL

SEQ ID NO: 365725 - protein, 809 aa, Zea mays
  Clone ID: MRT4577_96705C.1.pep
MARVRSTARVTCDGEEVEAAETAPISEVMKQSGLVVPEDVSDEGAPAAEADSHLEFGRSTVTEDDMSKLMKLGYFSEAKKKLIRFGREEITPKLEKDEVVVFKSFFKAGLRFPLNEMIADVLEKFGIYLHQLTPNAKVRLSTKAREDELHENFGCYNFAYRKDAKSPVISYHTKWPAGWKTEWFYVKVDEKKEKLVQSPLELIFGETRPRCDMKPESPCQIALGEFRVIAEHIGTKDLVQEFLAFRVFPTLKEWDMPKLKGEKKRKELVRLPYYYKFKKHFKEPCQEWLDTIEVIGAEGQKRKRVASVLDKEAAKLVKKDEETLKKRKLSPEPKMAASKKRKVAALKRKTTDIEDEAPSTPLVADVEEILKKEKEPSVAKKPDEPKKQRIIHVVEVIEQTPPLASASKTPAIESTAAAEAAPTEAESAEAEIAEDVNLEATLSEIDTMLLDAAAEEAVAAAEEILGTVAGKGKEKAEDTSEEEDFNFQDIIGQELSKAEKEELKEYAISCGYRPGALLFGGVNEESLGCLRDHTGAKAVSNLSKSVGLPKVEVDLSRYRRQHIAGSLFYANFKSLLLSKVLRMQQDLKDKKNEIIIEGLEKKIKDHEATLEKKDFVFQTMEAKLKAEAEKNSNLWKSLKELEEKCVDFGNQCLQRLKQVFNSVGASTEKFSPSVENLPETFEHIEGEVDALGEVIAGHTDFCALLASQGTAVAFMKSGCTHGKIVNKPNFNLSSVDIIDIPSLARSIGKRFITQIWVKGGRKMAGDEARSHLKPERLLNFFAFYFGGIFRVDFSRFALYFGGISVDFSL

SEQ ID NO: 365726 - protein, 942 aa, Zea mays
  Clone ID: MRT4577_96706C.1.pep
MREEVRSSAAAAAPDPPPGRSASPPPTPVASSAGASSPPAQTNVASIDWLDSDQVSKAGSSHIAPPTSRPALSTNANGAAMDCLQSSCRPWERGDLLRRLATFKPLTWASKPKAASSLACARRGWVNIDMDKIECESCGAHLIFTALTSWSPAEVISAGEAFAEQLDASHQNNCPWRGNSCADSLVQFHLTPSALVGGFKDRCDGLLQFTSLPAIALSAIESMKLTRSVQIDRVLSQSVTVLSGELGYRTDSTTGIDIAQQDETCCYSQAQKLISVCGWEPRWLPNVQDWEENSTRSARNAGSAEPDGQFHSQFPEHHQNSNSVSIKKDKGKGKMHVKDSGCSMRSPLLDCNLCGATVRIWDFRSVPRPSHFSLNNIDMPDTGRKPVLVRGISATSGINGLVTEGAERENVEGRDEAGIVEGKSLSNAQVDLNLTMAGGLPSNNSALPPMPGHLNYGGMGRDLVIGQPTGSELGGRAASIESRGPSSRKRNLEEGGSTADKPISRLQPADSIEGTVIDRDCDEVDDAAQDSGARSKRPRCFNLFDINRPSSSGAGPSRNLSFDLDIDVNRLDTSNAEVPSALRNPFPRDSMRASSVIAMDTVHGMEENSMESVEYHPCDVDDVNKPSSALRSGVMSDMLDPNYSNQAQQSSFVQPAAETESNAREIGGSSMNGGEEVLNAETTPAFARDQLSLGVSGGSVGMGASHEAEIHGTDVSEHKTGSVVGDADPIPELIETMGHTGESAPGPALMDEFVPEEVGREGPNGDSQDMASRLAVRADSGSKICGSTKADSVESGEKTSRENSAHPSLSCNARVFSGIDASKDEVTGIMLTNDDYDPGSGLGATNGGNDYETGLPDFDPIRHHNDYCPWVNGNVAAACCISTGSSTALSGWQLTVDAIETLQSLGQAQNQTMQSDSAASLYKDDHVPPSRKLLKSANHSKS

SEQ ID NO: 365727 - protein, 84 aa, Zea mays
  Clone ID: MRT4577_96707C.1.pep
KEHEKKRDADLLAWLQAMFGFQKDNVSNQREHLILLLANVHIRQIPKSDQQPKLDDRALDTVMKKLFKNYKRWCKYLGRKSSLW

SEQ ID NO: 365728 - protein, 208 aa, Zea mays
  Clone ID: MRT4577_96708C.1.pep
MARMLPVKRGQHCSPFLCGNVKIAFPFGLIPEGAAQTSCGVGVGFQVRCYDAIPRLGFSQSEITLKILSIFYHNRSLLLADRPWFTYFNTTTSTKGCRIPPANTSSRLVPPLSVSSDNQNLIFYNCTKPPSPGEGLVATVCHNTTFVRAADGRRSDESGGYVLQGCTATRVPVLGVSGKVNASNYDQLVWDGFLATWQLPPTPSGLVW

SEQ ID NO: 365729 - protein, 123 aa, Zea mays
  unsure (1)..(123): unsure at all Xaa locations
  Clone ID: MRT4577_96709C.1.pep
FWVGCVYGNNDESXFSLLCHSDLQRMIQKGSSSHIIHCYHCACAHTDXVYLEQRPLNAKENGXIVSTMHIVQXGPHHTKRAIPQLIHGYNTSLKHSTXVDPHTAIAHDYYDFHGIQQGIEPNI

SEQ ID NO: 365730 - protein, 109 aa, Zea mays
  Clone ID: MRT4577_9670C.1.pep
MASGVAVDDTCGKEFTVLVRSTPRKYRAIICKLTDDLSSVCVEKTLPAANITKCSAQEDWKKFVTELPQNDCRFAVYDFEYHTSECVSKNIIISILWSPETANITSTML

SEQ ID NO: 365731 - protein, 92 aa, Zea mays
  Clone ID: MRT4577_96710C.1.pep
PGWTPGFFFSKKFLKWAFGMSLVGNLDPSAFCVRFLVQSCAPPGLVPQLGSPFGEPWWFSKAVRFCRCFCMLLRPVFLSGSDLGYCFRVSFS

SEQ ID NO: 365732 - protein, 54 aa, Zea mays
  Clone ID: MRT4577_96711C.1.pep
RPGGARPPPPRGPPRGPLAPPEGGFNPEKPPGPGSRDLPGPEQEVYPWALGIII

SEQ ID NO: 365733 - protein, 93 aa, Zea mays
  unsure (1)..(93): unsure at all Xaa locations
  Clone ID: MRT4577_96712C.1.pep
KPLGPPGPQGPKPGGPFPWGGGKGPNLPWSPPGKPPRGPPPKGGKKRGPFQNGPQGPPPLKGQKRGPPPFFNFCPPGXPKNPPPFFYKNGTFF

SEQ ID NO: 365734 - protein, 133 aa, Zea mays
  unsure (1)..(133): unsure at all Xaa locations
  Clone ID: MRT4577_96714C.1.pep
HLTKGWGGALARGVVSATGGAVTRKEEVSVTLTIDCTKLLEDKIIEVGSLQQFLQDRITVISLNAGILSYYNTIFRXVDHGTVSFDRSLSXKYLNYXLPNNYLXKKHNPXRDWLHVDAANNNRTTYDLHCFNI

SEQ ID NO: 365735 - protein, 83 aa, Zea mays
  unsure (1)..(83): unsure at all Xaa locations
  Clone ID: MRT4577_96715C.1.pep
PAAFPPKLDPSQVVEVFVRVTGGEVGAASSLAPKIGPLGLSPXKIGEGIVMETAIVWMGLRVSVGLTVLNRLAKVSILRSVGA

SEQ ID NO: 365736 - protein, 134 aa, Zea mays
  Clone ID: MRT4577_96716C.1.pep
MKFTTFVPFLFALGAAAQQSAPVVGEAVLDLSENRPSHADVERSDVQLVGTNSRNPRSLRSGNLLKRECQGANSYGCSAKGWCWKECGSGNWCWTAHNGGSGQWISCGSSNDCNRNQACSIGGCGECGCSGCTK

SEQ ID NO: 365737 - protein, 59 aa, Zea mays
  unsure (1)..(59): unsure at all Xaa locations
  Clone ID: MRT4577_96717C.1.pep
LCSIXLKLIXXYTLPQGTGNXVXHXRPATVTXPKVPXCXPXXSXXNRXTYFGSIPRELX

SEQ ID NO: 365738 - protein, 149 aa, Zea mays
  Clone ID: MRT4577_96718C.1.pep
MAAAPPRWWPLLLQLAIALGILLAAAEAWTGEIRGRVVCDVCGDAAIGPEDHALEGAEVAVLCITKSGEVINYQAFTNSKGVYTVAETMPESDRWDSCLARPMSSFHLHCTRRGDAHSGVKFTYNKSSGNPHTVKPFLYKPATVPLYCS

SEQ ID NO: 365739 - protein, 149 aa, Zea mays; identical to SEQ ID NO: 365738
  Clone ID: MRT4577_96719C.1.pep

SEQ ID NO: 365740 - protein, 94 aa, Zea mays
  unsure (1)..(94): unsure at all Xaa locations
  Clone ID: MRT4577_9671C.1.pep
TRALIHLEIQLEMKVTIIFILDNPRNRKNTQYTNIMEHLXFTHLNTRNLLHTEIKSNSENRTMIKNMIKEGKIIPSEITIKLLQETMIKNENDK

SEQ ID NO: 365741 - protein, 90 aa, Zea mays
  Clone ID: MRT4577_96720C.1.pep
NNSHSMCYFCIDAYRKCKCPSKGAIETSHDVSISFVDKTNSSLWLLAAHVHSMVCVHTHQCSCSLSGRPVSTSLVYLAPLPVNVWFIVQT

SEQ ID NO: 365742 - protein, 173 aa, Zea mays
  Clone ID: MRT4577_96721C.1.pep
MDPSELPELSRTAMLICCKVCGGPEEVDKRFLICDHYLCLYKYYHISCLTTEQIASDVQMGSQRWYCPSCLCRVCLCDTDDDQIILCDCCDQGYHLYCLSPPRRKVPKGHWDCEPCKERREKEKRILMLHRKDYDEDILKSGEFHGPNLLLKAAKKVKRDEEVKVAKTKSTRK

SEQ ID NO: 365743 - protein, 188 aa, Zea mays
  Clone ID: MRT4577_96722C.1.pep
SFRCLILSLSHLMTCASSPPPPPRAMKRELAFALQSLSEISASPGRTRSGRPISSLPNPLASASPKRRKRSAPLGLASAADLISPPTPPIDAEPPNQPLRDIIQPLHGSNPPTASDHRSDSNADQELIPQTMLEAPQPSHLETAIGCATATEVSAVKVIANPNLPASENSAAEDSAMEVIAKPKVDRE

SEQ ID NO: 365744 - protein, 186 aa, Zea mays
  unsure (1)..(186): unsure at all Xaa locations
  Clone ID: MRT4577_96723C.1.pep
MDMPVASHIHYHPSWQATIRSSPSNREAAMATRRSRATRLEADLTGKNVYXRADLNXPLDDAQDITGDTRIRSSVPTIRLLLXKGAKVILARHLGRXNGVPPRTDLKPLDPRLCDLLGVRFQMLDDCLGQEQVNCADALPQXSSVPIESTWLPEDENNQSVCAPKLSSVADLDATEAIGTMHRAHT

SEQ ID NO: 365745 - protein, 115 aa, Zea mays
  Clone ID: MRT4577_96724C.1.pep
ECSWPIFPVVLIWQPCKSYPLMVPLAVRKVRSRLRSTSSLPVESPMPLWPCVDLLRPCGVSPTPIRKHVRASAAVPYPSRSARPPSRAAAASSAQSLDVSRAAHARALFGYFPGR

SEQ ID NO: 365746 - protein, 66 aa, Zea mays
  Clone ID: MRT4577_96725C.1.pep
PLSSSCCAEMPELGFDDLEARRIEHKASACIGCLLVVIARCVGRGERRLDLFHAAVLVMWPWIPSM

SEQ ID NO: 365747 - protein, 75 aa, Zea mays
  Clone ID: MRT4577_96726C.1.pep
PRTWIPPPPRGSAAPFGPSSPGALAGLAPRDKQPPGPNPRKNDGVTTRTYVRDVFVFSLFKNPAKVVCGGTCFLN

SEQ ID NO: 365748 - protein, 97 aa, Zea mays
  unsure (1)..(97): unsure at all Xaa locations
  Clone ID: MRT4577_96727C.1.pep
NKNFYFLFFPLRLKFDMFTTLTHFFAWVPTQFRRLVFALQCDNGCEFDNATHSFLTHGIQLRRSCPYTSXQNGRAERIIRSTTKQNVLENAFIIPAT

SEQ ID NO: 365749 - protein, 53 aa, Zea mays
  Clone ID: MRT4577_96728C.1.pep
VPYYLVEPRVRCSLATDVFSVLDAPSLLSGGGCMFIGFDSFPDCFAMVVLIVI

SEQ ID NO: 365750 - protein, 110 aa, Zea mays
  Clone ID: MRT4577_96729C.1.pep
GPGAGGGFSVAVGAIMHSCLCPLPLMRGGHCPCMKFPPATRQIKTATTTTTATFDMVSVQSAVHLKRTSHTTSAIPILQNQPVPGHACNCSLSTLTSTARAAGTTSPLVN

SEQ ID NO: 365751 - protein, 65 aa, Zea mays
  Clone ID: MRT4577_9672C.1.pep
LHLESEEEMLLLSIELQHLDTIMSHFITAFTFCKLVLICLNHHSPMLSLTKFLYHIQFTNNKINT

SEQ ID NO: 365752 - protein, 93 aa, Zea mays
  unsure (1)..(93): unsure at all Xaa locations
  Clone ID: MRT4577_96730C.1.pep
TASCVREQRCMELRQQSAEVVMLGHAGSEARERGPPVHVECLPPCPGLTREHNWARRDARSACVCLHHIGGAEPAAAPRRRSPRHERXPRIPP

SEQ ID NO: 365753 - protein, 141 aa, Zea mays
  Clone ID: MRT4577_96731C.1.pep
QPPCVGSPCFFGLFFFQDYWFVPLPLFLFCFFVEFGKETPNLVGGGAPQNLWGKKKGGFSKKTPQGFEKNKKKKNNFFFFLKKKKKNWACKKKKKACTSCPVPAPTPVGFKTTIPPMPMLILLVKPPIIMCVVLLMYYINR

SEQ ID NO: 365754 - protein, 34 aa, Zea mays
  Clone ID: MRT4577_96732C.1.pep
LRVRKIGPLKRPGPQSCLHFFSCFELLKFLLVFY

SEQ ID NO: 365755 - protein, 43 aa, Zea mays
  Clone ID: MRT4577_96733C.1.pep
PAYELIEGVIQLMAVPLRKTVKIHSRKADSRKPLAAHYHRLST

SEQ ID NO: 365756 - protein, 37 aa, Zea mays
  Clone ID: MRT4577_96734C.1.pep
GHISVNGRLRSDTTLESLSTIRCHLEVEAYLPGADMI

SEQ ID NO: 365757 - protein, 356 aa, Zea mays
  unsure (1)..(356): unsure at all Xaa locations
  Clone ID: MRT4577_96735C.1.pep
MKKATSLSELGFDAGDASSGFFRPVSGDSSTPTSQHHRRRLTKVSVIGAGNVGMAIAQTILTRDXGRRDRAGGRGPGQAPRGDAGPAARGGVPAAHAPRVRHRHVRDQGLGPGHRDGRGAADPGRDEARPAPAERGAVPQDRAAAGGAVPRRAAARRVQPRXRAHLRRLEAFGLPGQPRHRIRHQPRLVQVQVPSRRAPRRQRPGXVQAYMVGEHGDSSVAVWSSVSVAGMPVLKSLQESHRCFDEEALEGIRRAVVDSAYEVISLKGYTSWAIGYSVASLAASLLRDQRRIHPVSVLARGFHGIPDGNDVFLSLPARLGRAGVQGVAEMELTEEEAKRLRRSAKTIWENCQLLGL

SEQ ID NO: 365758 - protein, 89 aa, Zea mays
  unsure (1)..(89): unsure at all Xaa locations
  Clone ID: MRT4577_96736C.1.pep
WYFCFFVHFLLFVNKFKSXHFDCNSCLKGERGKAFGDRYYARQAVYDTXGXPEKNRDIGHVDLKQLLAKRKTGLPKMVVPQNARGPRTP

SEQ ID NO: 365759 - protein, 68 aa, Zea mays
  Clone ID: MRT4577_96737C.1.pep
MAVGTGATSMCVAQGLGKPLCAGSYTTSLRGVALAPRRSAARMAVVRASSAHHEQHPANEWADAADVA

SEQ ID NO: 365760 - protein, 445 aa, Zea mays
  Clone ID: MRT4577_96738C.1.pep
MGGGTAAEPPAWMAAAARRWLENAGATVEDAPGRAFNALPLSGVRVSLAERGRALCSLRVPPQLTDAEGNWHTGAIAAAADDVCAAAIMSVEGIIKVSVHYDISYFTPAKLHEEVEMDGRVVEQKGRMTAVTVEIRKKESGELVAIGRQWMTASRPKIKRMTQCSKDTITLAFFVHRMGKYFVSHLSSTVVAKLILSFGLLQQLASSYIYFFEVEHVTREEKFMQAYDLIELFRPETVSTKTRLLSLELLQGLLKGVSNVFIKKFHFIDSVKAYLSYALLRASVSSSPVVFQYACGMFSVLLLRFGESLKVGVGLMIFQQLGGINVLGFYTSYIFSSAGFSGKLGTTLIGVIQMNITYTASDGGNITLSDGKKFAKRRGNDGIPYQQLEMGGQAPNSSGLDNTATTTDDWEDNWDDDLDDEAAANGLPLRSQTNSKDGWNVDWDD

SEQ ID NO: 365761 - protein, 60 aa, Zea mays
  Clone ID: MRT4577_96739C.1.pep
CIHLTKTRIILVIQTSYQKKIQLSPLQPYYTIYKNKTLLLLPKYITLTNIKQRSTYSINY

SEQ ID NO: 365762 - protein, 366 aa, Zea mays
  unsure (1)..(366): unsure at all Xaa locations
  Clone ID: MRT4577_96740C.1.pep
AGKNEDPKSKILVTSKHVIEHHKLQNTTILLKTLNASTEQVCNSITEGAGLSTQQLEALVKTRPSEEEEKKLLDYGEEYQHVGSXAENFVKVLLTIPMSFPRIEAMLYKETFDDEVAHLRMSFALIRGACSKLRSSKLFLRLLEAVLKTGNRMNVGTIRGGANAFRLDALLKLSDIRGADGKTTLLHFVVQEMERSQGSKASDKPSGTSGSCQATLAEREGCSEMGTEFVSELSNELGNVKKVASIDLDTLKSSISNLSRGLARLIXLSGRTLPCNDRNKNFLQCMRSFQTHAENTMLELKVDEAEVLQQVRELTEYYHGEVGKNECNLLHIFVIMRDFLGLLDRVCREMRGSKHMQPLNIVLPLR

SEQ ID NO: 365763 - protein, 133 aa, Zea mays
  unsure (1)..(133): unsure at all Xaa locations
  Clone ID: MRT4577_96741C.1.pep
LEANTYGLPSSKHSCAFNQLCTSNRGAYYETQLSRFXRLATAYSQNKHFIAFNXIELTEPRCLFGACRLLPSTXIDAVRRASLLPLNLLMIFYQQFRRLPXALLQLQEVKPFVQLDLTKPASYQQHLIXGGAL

SEQ ID NO: 365764 - protein, 229 aa, Zea mays
  Clone ID: MRT4577_96742C.1.pep
MEDDEEKPSQRITNKQEEDEEDDLVFPGFRFHPTDLELVGFYLKRKVEKKGFRIDIIREIDIYKHDPWDLPNEARHVVQGAGGDKDDWYFFCLRGRKYRNSIRPNRVTGSGFWKATGIDKPIHDGGAGERVVGLKKSLVYYRGSAGRGTKTDWMMHEFRLPSAELVELHDAGIWTICRIFKKNTSYTRRCQQQKQEHGSKRSHHQQQEEQELQYYYDYYRYHHTISTVT

SEQ ID NO: 365765 - protein, 151 aa, Zea mays
  unsure (1)..(151): unsure at all Xaa locations
  Clone ID: MRT4577_96743C.1.pep
SSGNNAEYFFFFFFFFFFAFFFFFFFFFFFFXKETXTGGHTNIYKKSLQYSIKKEGGGRLFLAKQGGLFNFFPGLITRAGRGTYGYVREAYKLGRGNLADLVAXGGHAGGESAGDPPLAGDGGDGAHVDPFDAGGPGSFGLVPRLRGDFWC

SEQ ID NO: 365766 - protein, 72 aa, Zea mays
  Clone ID: MRT4577_96744C.1.pep
MSEEKHHHFFKHHKKDEEHPGSEYGYSETAVTATGEGEYDRYKKEVKEYKHRQYLGKARSIIDGALTLYEKY

SEQ ID NO: 365767 - protein, 58 aa, Zea mays
  Clone ID: MRT4577_96745C.1.pep
AIRSWHLLRCEVPSVSLKCQFDRVLHRFLSCYKGNAKAVGYLNLYAQMVRATTLELSV

SEQ ID NO: 365768 - protein, 64 aa, Zea mays
  Clone ID: MRT4577_96746C.1.pep
LIAAVQAPRPRIPRACANIILVTAFGFLYRCCSIASRNYGIGGGSLSILKVVANNTNLVREPQG

SEQ ID NO: 365769 - protein, 64 aa, Zea mays
  Clone ID: MRT4577_96747C.1.pep
TSGDPCGRAGASASSSEEAERAAIAERGFFLHPSPRGAEPPRLLPLFPVVSPRMAASAAAPSSE

SEQ ID NO: 365770 - protein, 58 aa, Zea mays
  Clone ID: MRT4577_96748C.1.pep
PFSLNLTLRTPSHVHTLEIIRAPHIDYVSHSRSLRKYFWSPKKKKQKETKIEKGEERN

SEQ ID NO: 365771 - protein, 94 aa, Zea mays
  Clone ID: MRT4577_96749C.1.pep
LTTAAAAACECDNLRGGVGAGGGDICLPGWGCGGRRERQPASASSSEEAERAAIAERGLFLHPSPRGAEPPRLLPLFPVVSPRMAASAAAPSSE

SEQ ID NO: 365772 - protein, 93 aa, Zea mays
  Clone ID: MRT4577_9674C.1.pep
KLARIKEIAEAVYESHYVNTSLVMKLERPESEGLDICTSDCSDIRIFTLYIYILVVVRIWYKLLIFSIRAFVYILRFHWMSSLTMLSCLLLVN

SEQ ID NO: 365773 - protein, 230 aa, Zea mays
  Clone ID: MRT4577_96750C.1.pep
MADESWRVPTPVQELAATATLEEPPSQYVLQEKDRPGSPLVADDMPEPLPIINLSRLSEDATEAAKLESALQSWGLVLVTNHGIETSLMDGVMDASREFFRQPLEEKQKYSNLIDGKRFQVEGYGNDRVATERQILNWNDRLHLKVAPEDERNYTHWPKHPESFRDVLHEYALETKRVRDGIFRATAKILELDEDHFVSLISDRAAAFARFNYYPPCPRPDLVNGVQPHS

SEQ ID NO: 365774 - protein, 92 aa, Zea mays
  Clone ID: MRT4577_96751C.1.pep
DLLLSIFSLIICRSNHSSSFYSSDRLFKSPEHGMDFSPQRKSGERDPVSFVEHDDSDDDFGAESTASNKPSAHSHDRTKSKPKTSHGSSTHA

SEQ ID NO: 365775 - protein, 48 aa, Zea mays
  Clone ID: MRT4577_96752C.1.pep
LFFIIFIALIFSYSVRGSSEFCEARVDLFPGAIGLGHQITPNDCLREG

SEQ ID NO: 365776 - protein, 47 aa, Zea mays
  Clone ID: MRT4577_96753C.1.pep
YSHGRCYCGGRVWHQRLPRSSGLRCSNFTRLVTCCAGYCQLTAVPTG

SEQ ID NO: 365777 - protein, 97 aa, Zea mays
  Clone ID: MRT4577_96754C.1.pep
YLAKLHVYRNQNPPKKDSSTERNGQFTEKCSSDKILEAARHSGQHWREKGSDGRRHPSCRRQCESHGRLGFLPSVRATLVLDHVHVEALTAPALLHV

SEQ ID NO: 365778 - protein, 112 aa, Zea mays
  unsure (1)..(112): unsure at all Xaa locations
  Clone ID: MRT4577_96755C.1.pep
SGAHLYYMCPSGSYFEYHALAIGSSSKAXKTFLEHRLQGSPTFTPDQLDKDTLSTMKEALQGEKLSGSNCHVAIVGRKKGGTVHQFQVIGTARVQQLIGSMQTAYHPRRHGQ

SEQ ID NO: 365779 - protein, 72 aa, Zea mays
  Clone ID: MRT4577_96756C.1.pep
GFLGWGSSCPPDSCKAGVFALGQGACGRGPDLMTRVFWGAFCSHADGVPGSFVEEWVCFLEVLSRLAFSARE

SEQ ID NO: 365780 - protein, 198 aa, Zea mays
  unsure (1)..(198): unsure at all Xaa locations
  Clone ID: MRT4577_96757C.1.pep
LQGGKKKKKIKKKKKKKQKRKKKKKKKKKKKKKKRGPLSPLLNRHPEGPPPRRKNLLLKFNARPARATRQPPRPDGGFPFPPRGGNSGGKRFSPSRRGLLGAKPPQRDRNQRGENPREGSPMGANEIPFPGKGRPRNXITYGLARLQENATDDFVFRAMERAINKTVAIGELLKRRIAGPPQKTXMESLDITQXWEPL

SEQ ID NO: 365781 - protein, 43 aa, Zea mays
  Clone ID: MRT4577_96758C.1.pep
LYLTASSPSVIPSQQHKTYTFSYGPELLHLCLLVTLMQSSVGI

SEQ ID NO: 365782 - protein, 80 aa, Zea mays
  Clone ID: MRT4577_96759C.1.pep
ARARTVVHALTPRAAAPDNDGDLAALAPGTHVRTTGALNGGARRGGLSTGLRVAPPRHVGAVCVGCTGRRRGGGHRTARL

SEQ ID NO: 365783 - protein, 88 aa, Zea mays
  unsure (1)..(88): unsure at all Xaa locations
  Clone ID: MRT4577_9675C.1.pep
GRRINNLGVRPPGQLQLPAPVPHPLLVCQLSAHSPAAFIFLTHTSTFLWVVGGFYHXLLVLSHHNNYYFSPFLSFFTLLLSYINLSSS

SEQ ID NO: 365784 - protein, 53 aa, Zea mays
  Clone ID: MRT4577_96760C.1.pep
RNPTTKQPIQARVQHRLKKERHVAPSITLYTGLVYLWDGFQMVETYACAPRVR

SEQ ID NO: 365785 - protein, 100 aa, Zea mays
  Clone ID: MRT4577_96761C.1.pep
ITQTSSILLAPVTFFTECFRSTLTFFQSAGLNVNQVLTRCLFAGLCLHAYHQMTYMTLAMVSPITHSVGNWVKHHIVIVTSQLLLKTPRSTINSLRSAIE

SEQ ID NO: 365786 - protein, 117 aa, Zea mays
  Clone ID: MRT4577_96762C.1.pep
TLTWGAVFFVSGPLILISGPVFFTGGTGKNLGVPHFNPFEAVPLLAGSRFTHLARTAPSSKRVVTLNGKGDPPCSGALTPGGVGVPLRGTFTLAGALGPPPWGPFPSFFPKFPGFSR

SEQ ID NO: 365787 - protein, 43 aa, Zea mays
  Clone ID: MRT4577_96763C.1.pep
LVFFFFFFFFFAPAAKDFLNGLLNPNRGSIKGHEFPQGPMKQN

SEQ ID NO: 365788 - protein, 83 aa, Zea mays
  Clone ID: MRT4577_96764C.1.pep
RIEILGRTLSLKDNHWRRIRSNSPPSYRAGCTKYKQHCASSNNRFTKLLDLNPSALKAPHTTPYIYNPDPCTADFWNHMLGHW

SEQ ID NO: 365789 - protein, 117 aa, Zea mays
  unsure (1)..(117): unsure at all Xaa locations
  Clone ID: MRT4577_96765C.1.pep
PPGLAPPPPGAPPFPKRAPPMFRPGPTRAQAPFPFFSPAGLKVTPHPCPXKKSLVPPRPVQPDGIXPGRPRSLEGPPRFFCWGGPKPGRPPPPPQSFSPAGSQSGSPPPPVRPGAPR

SEQ ID NO: 365790 - protein, 1000 aa, Zea mays
  unsure (1)..(1000): unsure at all Xaa locations
  Clone ID: MRT4577_96766C.1.pep
MGSICNAGVGDLTPKHESSTLGGQWQGSDTVFMRSNEHHNTENCRKWDMTGLDAVSLKLVEGDKASRNWWRKLELVRVLLSEYVQDQSHLEALTYSAIYLKWIYTGQIPCFEDGGHHRPNKHAEISRQIFGEIERIYYGKNTSSQDLLVIRKIHPCLPSFKSEFTASVPLTRIRDIAHRNDIPHDLKQEIKHTIPNKLHRNAGPEDLIATEAMLARITKTPGVGNEAFVXEQFQIFYSELKYFFIVCSLLEQLCCGGGSXNESGLEPLXGGVKTKKNLDQLEDAKDLDENGGVHVLLKTLLSLSYLRSILMKGLESGLRNDAPDSAIAMRQKRRLCEIGLEDYSFVLLSRYINALEALGGSASLAEGLPTNTSLWDDALDALIIGINQVCFSGWKPNECSAIVNELLSWKQKGLSEFEGNEDGKYIWALRLKATLDRTGRLTEEYSEALLSIFPEKVKVLGKALGIPENSVRTYTEAEIRASVIFQVSKLCTVLLKATRAVLGSSVWDVLVPGVAHGALIQVERIAPGSLPSSMKEPVVLVVNKADGDEEVKAAGDNIVGVVLLQELPHLSHLGVRARQEKVVFVTCEDDDTIKNMRLLEGKHVRLGASSNNVDLSVVSNKDDCAAMSSEPSAGGDLFAQQFSLLTTDKKLELSEQKSYTSVANGMSGVLELSEASIESSGAKAAACGTLSVLSSMSNKVYNDQGTPAAFRVPAGAVIPFGSMEDALKKSGSIKSYTNLLERIETAQIENGELDSLSSKLQATVSLLSPSEEIIESLKKTFDQNVRLIVRSTANVEDLAGMSAAGLYESIPNVSLSDPRSFGAAVGQVWASLYTRRAILSRRAAGVPQRDAKMAVLVQEMLQPDLSFVLHTISPVDHDPKLVEAEVAPGLGETLASGTRGTPWRLSCHKLDGKVTTLAFANFSEELMVLNSGPTDGEMSRRTVDYSKKPLSVDATFREQFGQRLAAIGQYLEQKFGSAQDVEGCLVGPDIFIVQSRPQPQ

SEQ ID NO: 365791 - protein, 243 aa, Zea mays
  unsure (1)..(243): unsure at all Xaa locations
  Clone ID: MRT4577_96767C.1.pep
MLIVVELGLLCNMPILQQLHLEEELLRRTSDNWCVINDGMAPATILTGLHXRVSELVDIQPVLWDQVPIVRRFSGGGTXIVDWGTVVVTFICNKNAVAGLQIYGKNFXQIGEFHLRENDYAFSXRKFGGNAQSITKNRWLHHMSFLWDYDVKNMDYLKIPKRAPEYRLARXHTDFLCRMKEYIPSRPVFTDGVTAALGEHFSVQPVDLQAALSGDEGFVPSTKLLSQQDLEKKLFRPKNPLKI

SEQ ID NO: 365792 - protein, 199 aa, Zea mays
  Clone ID: MRT4577_96768C.1.pep
VVWLALQGRRQPLFWGQLTPLRYCRPLMRLVTMSRMPILQQLHLEEQLLRRTSDNWCIINDGTAPATIVMGVSGRVSELVNIQLVLRDKVPIVRRFSGGGTVIVDQGTVFVTFICNKNVVAGLQPFPRDIMSWSGQLYGKVFDRFGEFHLRENGKKPHRFLVPHEGVHTFAISFHRWGHCCPGRTLLSSAHGSTSNSFR

SEQ ID NO: 365793 - protein, 62 aa, Zea mays
  unsure (1)..(62): unsure at all Xaa locations
  Clone ID: MRT4577_96769C.1.pep
GGGGPRGRVQSPTRWPXXXFLALAHAATFLSGVPLKGSGIHPCQPPNQKEVGKVNPNPGEVK

SEQ ID NO: 365794 - protein, 61 aa, Zea mays
  Clone ID: MRT4577_9676C.1.pep
IPIIALSILLYWNRTTLSYFLKRVSYKSETKLKKERKNKVWIKKKKKKKKKKVLCVVTTAY

SEQ ID NO: 365795 - protein, 297 aa, Zea mays
  unsure (1)..(297): unsure at all Xaa locations
  Clone ID: MRT4577_96770C.1.pep
NCIGFGLTKFVYVICFSLDLPLVKIQIWLLQGWLGWVSGATRPLMRLVTLSNMPILQQLHLEEELLRRTSDNWCVINDGMAPATILMGVSGRVSELVDIQLVLRDKVPIVRRFSGGGTVIVDQGTVFVTFICNKNVVAGLQPFPRDIMSWSGQLYGKVFDRFGEFHLRENDYAFSHRKFGGNAQSITKNRWVHHTSFLWDYDVKNMDYLKIPKRAPEYRLARNHTDFLCRMKEYIPSRSVFTDGVIAALXEHFSVQPMDLQAILSGDEEFVPSTKLLSQQYLEEIVSSKESLEIIES

SEQ ID NO: 365796 - protein, 129 aa, Zea mays
  Clone ID: MRT4577_96771C.1.pep
MAQRQGRGSGAVALAAAAAVLLCVLLHAHVAESAVFTVGDRGGWSFSTGTWTNGKRFKAGDVLVFKYDSTAHNVVAVNAAGYKGCSAPRGAKVYTSGNDRVTLARGTNYFICSIPGHCQSGMKIAVTAA

SEQ ID NO: 365797 - protein, 56 aa, Zea mays
  Clone ID: MRT4577_96772C.1.pep
SRSVFTDEVTAALGEHFSVQPVDLQAVLSGDEGSVPSTKLLSQQDLERNCFVQRIP

SEQ ID NO: 365798 - protein, 75 aa, Zea mays
  Clone ID: MRT4577_96773C.1.pep
VKGHELAAIMFKYDSTAHNVVAVNAAGYKGCSAPRGAKVYTSGNDRVTLARGTNYFICSILGHCQSGMKIAVTAA

SEQ ID NO: 365799 - protein, 129 aa, Zea mays
  Clone ID: MRT4577_96774C.1.pep
MAQRQGRGSGAVALAAAAAVLLCVLLHAHVAESAVFTVGDRGGWSFSTGTWTNGKRFKAGDVLVFKYDSTAHNVVVVNAAGYKGCSAPRGAKVYTSGNDRVTLARGTNYFICSIPGHCQSGMKIAVTAA

SEQ ID NO: 365800 - protein, 128 aa, Zea mays
  unsure (1)..(128): unsure at all Xaa locations
  Clone ID: MRT4577_96775C.1.pep
VFMPELDKFVVGVIGDILIXCENKENLQXHLRIVLTRLREHKLYAKFSKCEFWVDQVPILGHILSAERVVVDPRQVTNIIECKPSTTGHLVRXSFFGMSRYYHQFIPNFFKISKPITKLLKNNVKFNW

SEQ ID NO: 365801 - protein, 230 aa, Zea mays
  unsure (1)..(230): unsure at all Xaa locations
  Clone ID: MRT4577_96776C.1.pep
CRELIMILWQKRRRIADKLNGKVLPAVIQQLKVKTRGLGHLTVTKASYFSAQVDDSTNTHNRHVVKSYLHECTCLEWQHTGKPCQHALALITAQDSVDVELEDFVHDFYSVQRFKNAYKRIIEPLPDKTQWPHVDLPFVVGAPLDKRGRGRYKKLRIKSCLEGGNSKGKKVAAEKGKEADREAANEVDVQAENQSEKSKKKMIRGKRRCKKCGELGHXDPSYKCPLNGTK

SEQ ID NO: 365802 - protein, 136 aa, Zea mays
  unsure (1)..(136): unsure at all Xaa locations
  Clone ID: MRT4577_96777C.1.pep
HPTSYLRSRFARRQESHGTREDNRPYERGLEPRVFEDSVAHAFXDTYNANPELNSDLMDLYINNASQKDVTGSRKPVVIHAPDRLRKALRKHHVRLVRELEKKLSGKDVEIVATRRIVRPPKKGSLVLSPCTRTLT

SEQ ID NO: 365803 - protein, 107 aa, Zea mays
  unsure (1)..(107): unsure at all Xaa locations
  Clone ID: MRT4577_96778C.1.pep
GVDPPEPPEPEXTDTHGKDWQDAKATGHGKPTGAXCRYNGGSCGYKDVNKPHFNSKDACGNTXICKDAPGMTESCFETNCDXPAGCSRPTLVVSMTDMTDEPMDDYH

SEQ ID NO: 365804 - protein, 46 aa, Zea mays
  Clone ID: MRT4577_96779C.1.pep
PPSGPEGFLFCHGKLVPFSLGHCKSLSKMWVAYLALMRCLGSFFHS

SEQ ID NO: 365805 - protein, 86 aa, Zea mays
  Clone ID: MRT4577_9677C.1.pep
SSHIDESHSGPLRLLTLQQAIRSASAAGYPSRCIYHAISTAYCLHYTSCSATLYPLARLKISICIEPLGPSELCQQQEQMTPPLVC

SEQ ID NO: 365806 - protein, 77 aa, Zea mays
  Clone ID: MRT4577_96780C.1.pep
KCDYPSGIGPTPHIVMCRGALELGLHCNTRDSLSHRQVGPPRRMSLLQSEAIDAEPAAHLGPGALPPWPGRCLKFWP

SEQ ID NO: 365807 - protein, 242 aa, Zea mays
  unsure (1)..(242): unsure at all Xaa locations
  Clone ID: MRT4577_96781C.1.pep
MDPNFNGVWSASEMDMAKSLIPSQITNKTYTNDMETKHIDFVDDLQAMFPWKEKHQVTNLYVELLVEIMRAQSNNQHVVPSSVLVNDNFGMLSKPMDNMKVIEGYLMDEMEAMRILEEQPNMLNVIHKKKRHGVKFWTTDEHMNFLRGLEAFGRGEWSNISKYFVPTRTPVDISSHAQKYFRRQECTTGKQGFNIDNVSFYGTQPWVQNNPSSCEALTFTGXXAYNTXYNDLDEKHVGFHSF

SEQ ID NO: 365808 - protein, 80 aa, Zea mays
  Clone ID: MRT4577_96782C.1.pep
KKLSIHGKSMMNKTNRRNSQELCVLSVCVPIRIPLNQVLLEISVDLLHLLNNLQFFDFFKIAGCLDGSFQNTLKGYRRQL

SEQ ID NO: 365809 - protein, 364 aa, Zea mays
  Clone ID: MRT4577_96783C.1.pep
NVPMLGIDIVWCYFVLRDVSCLEVAGARLEKARLGFERSHGKDSTRFRILQAGRQADLAIYVRLELLEGVVAYHNGHVEKARESLTSAHAKYLQLQVPDEAISMLMDMGYEARSAKRALKMTGYDIQSSVELLCEEREKKLRRREEDRVRQREILKQMAYGKTPMNKAVDMQKLKGLTAIGFEKYLAAEALRINENDADKALDLLTNPEQNCTLQSKIQARRSRASCGFGAGSSRSRAAVARAAPAINNSHTLDNAPPHPADGDAPPHAAVGGAPPHAADGDAPPMNNEETANQDEIMIGEVAADDEDEDANSHPVPARDASMESELANELKGDALDDYDIDVSNEGQAIAEYLSLLEAAPSSS

SEQ ID NO: 365810 - protein, 51 aa, Zea mays
  Clone ID: MRT4577_96784C.1.pep
IQTLPGSVKIPYLNYLLNKLAHLIIVNTTLIFYYSNFFYLTNIFKHLFEQA

SEQ ID NO: 365811 - protein, 56 aa, Zea mays
  Clone ID: MRT4577_96785C.1.pep
LATPFPGKTASLTLDHSEDLGHGMVRGHVPRSTVNLRIAPKRLHGENNNIIGARLK

SEQ ID NO: 365812 - protein, 78 aa, Zea mays
  unsure (1)..(78): unsure at all Xaa locations
  Clone ID: MRT4577_96786C.1.pep
TSRHWVRKIGHCPLFHILPSLQCTAVIKRITELAVKNTKADPRRPGGGLAIYLASELHLPHLHPWKNVPSEXSSAPAP

SEQ ID NO: 365813 - protein, 93 aa, Zea mays
  Clone ID: MRT4577_96787C.1.pep
LRSLYNTVPNDDWNDSDAVASELGAKDCWTLPPATADQARLLLCDCAMYCISVTKFICTLVLLEHHEVAPMHRVSTTTPTRAPSLAEKPGIPW

SEQ ID NO: 365814 - protein, 113 aa, Zea mays
  Clone ID: MRT4577_96788C.1.pep
PVFAHLGKGVGYQVVSLFEIPRAALVFHQIAAQAELFSLGRNFFSLMAFGYSRDPVGGFVPVSLAQGILHHAPFGGFWSQRGWWLPPGFTLCSQCVVLFLFRSFSLPAAAPLW

SEQ ID NO: 365815 - protein, 49 aa, Zea mays
  Clone ID: MRT4577_96789C.1.pep
TDTHVWRGAFTTFDDFCPIISGCLSSVIHEHDHQCTMAGMVNISLSMAL

SEQ ID NO: 365816 - protein, 170 aa, Zea mays
  unsure (1)..(170): unsure at all Xaa locations
  Clone ID: MRT4577_9678C.1.pep
MATSSGSCLIISLLVVVVAAALSASTASAQLSSTFYDTSCPSAMSTISSGVNSAVAQQARVGASLLRLHFHDCFVQGCDASILLNDTSGEQTQPPNLTLNPRAFDVVNSIKAQVEAACPGVVSCADILXVAARDGVVALGGPSWTVLLGRRDSTGSFPSQTSDLPPPTSS

SEQ ID NO: 365817 - protein, 114 aa, Zea mays
  unsure (1)..(114): unsure at all Xaa locations
  Clone ID: MRT4577_96790C.1.pep
VMXASSSXSASHSAPYGTVGLPITPWGSAEHISCRVHCLQTGFTAVVXETKGHQSTVFVNGASQSLSCSDHVSMYHMCMHVYAIGSTSLVKKMTNNDVMLQHYFSSLLTYLAYY

SEQ ID NO: 365818 - protein, 50 aa, Zea mays
  Clone ID: MRT4577_96791C.1.pep
AAVVSRLRLGCRHHHRRVKERRARDQLRERLDVHDLRLRRARLTPSLRVS

SEQ ID NO: 365819 - protein, 187 aa, Zea mays
  unsure (1)..(187): unsure at all Xaa locations
  Clone ID: MRT4577_96792C.1.pep
MGKDDAIDSGAGGGEFAAKDYTDPPPGPLIDAAEMGPWPLYRAGPAELIVTLLILYITECTVIXHMHHTDAPAASADAAXCVGVGQLGIAWIFGGMIFVLVYCSVDISGGHINPVDTFGLFVAREVSLLRALVYIAAKCHYAICGVSLMKAFQSAYFNRNGDVDNSLASVYSRGTGLGAEIIGTCMC

SEQ ID NO: 365820 - protein, 92 aa, Zea mays
  unsure (1)..(92): unsure at all Xaa locations
  Clone ID: MRT4577_96793C.1.pep
MGRVIRGQRKGAGSVFRAHVKHRKGAARXRPVDFAERHGYIKGIVKDIIHDPGRGAPLAKVVFRDPYRFKKRTELFIAAEGIHTGQFVYCGK

SEQ ID NO: 365821 - protein, 62 aa, Zea mays
  Clone ID: MRT4577_96794C.1.pep
MHSSFTATLDLAFAISTDSRAGTVRTRLDDDTQESAPRNRTVARRGDSSGCCCAASLRADCR

SEQ ID NO: 365822 - protein, 114 aa, Zea mays
  Clone ID: MRT4577_96795C.1.pep
LAAAELAAARAEVKAAEAADADRAAAAELEVMRGSSVDSSVSGDGSTNDELRLAREAAQEHAAQWAAAHPHGGARGGSPDGRGHADGAPDGGGWVDGGRGLYRRRRYPSPDRYH

SEQ ID NO: 365823 - protein, 100 aa, Zea mays
  unsure (1)..(100): unsure at all Xaa locations
  Clone ID: MRT4577_96796C.1.pep
YIEMWSSKXPPSXQTFSALKHXHLQKXINHTTSYNKPRTTKTLLDTDPHLKKNSTNLLINPTNKINPPLYINHSIQPNTPMHKHTVQQQTSPGIIPLHHI

SEQ ID NO: 365824 - protein, 420 aa, Zea mays
  unsure (1)..(420): unsure at all Xaa locations
  Clone ID: MRT4577_96797C.1.pep
MQLDQWPARTRHTGAVNTVTTRMADTDKNALQQLIQTHMAAVAMEQKLATPETTGGSPYRPFGTYVLCSPEGAACVDNATAAAQMLYATFASRSSPGAESPEAAHSCYGELVLKMPQHLLLKRCLRVDDTRATPNYDDGVSLALEASGIDATAMEASTARQWLKTSKRAGRRPSLNCACLATQLGRITPLRAQIEWYKAVFDAEMGYYDAFKQRRSPRKYSKVNLNRMKLGQFWDRVLTMLDAGQLPHDFHRRAKWVNASRFYQLLVEPLDIADYHRHGHHLTSGSYMTHGRERRYELFDRWWQEKGCXRWRWHHVLHVGSVGEQXRRSKYAGLTQDPCFWARVEEAREQTESARRERDAAELAMKLEELQEFERYARELVATKEVSVDVLAPQSSYTLWVEDWNQLKLRDDVRTMLLRF

SEQ ID NO: 365825 - protein, 66 aa, Zea mays
  Clone ID: MRT4577_96798C.1.pep
RTRGTIHWTRCTNTCHSACTRAIPLDSTTAYLDAILSAAMLTTVGMTLLRGLILCTSLQIKVGATC

SEQ ID NO: 365826 - protein, 37 aa, Zea mays
  Clone ID: MRT4577_96799C.1.pep
RFKWVIFDLYSMSPLDAGGQFMTSLPSGVRACVHVCV

SEQ ID NO: 365827 - protein, 120 aa, Zea mays
  Clone ID: MRT4577_9679C.1.pep
APRLRGVLFQGVPVGQPHVHIFSRGNPGEGENSAKTVGAGGCPVHFNPPLSFRGPGPRILVALGVKKKTPLGCPPPQKEGISGGRLKQKKGEEKKKFVRVWSFGGPPPPSPLLVLFWGGS

SEQ ID NO: 365828 - protein, 48 aa, Zea mays
  Clone ID: MRT4577_967C.1.pep
AVVPGLDQEVHILSTVPLQRSKGVKKKSKKGRWKRCRDPISTNQCFLG

SEQ ID NO: 365829 - protein, 50 aa, Zea mays
  Clone ID: MRT4577_96800C.1.pep
TVPQALPCCFLRQTESQIERYIAYPHGAPSHQYLFLAPRSTLTLTYIHAA

SEQ ID NO: 365830 - protein, 123 aa, Zea mays
  unsure (1)..(123): unsure at all Xaa locations
  Clone ID: MRT4577_96801C.1.pep
MVRRCTPAAIANLRPPNLSPAVSSEREHPVLXPYMIQQAXITAGILHVSPLILHQSSDVLHQLPLEHSWAQNIRAQQLRQLVLADLAAYSQHQQCLPFNQLAALNSASYLQQQHLPCRQLAAA

SEQ ID NO: 365831 - protein, 107 aa, Zea mays
  Clone ID: MRT4577_96802C.1.pep
QVHKVDLEAKQRVEINRLQCDSVLFLGHNDSLCLSAQVHPELKSNHAYFSDDFKEVAVSLKNCMRDMGVMDLENSVKKEIVSQIWSNWPCPTWITPNLMKLNQAFNR

SEQ ID NO: 365832 - protein, 91 aa, Zea mays
  Clone ID: MRT4577_96803C.1.pep
RGLFFFFFSNTQEGCVVEGKRACGPGQTEHTQHKHTLTLTKHTPHRHIQHPNTCLLIGYKTFLSLSRVKKRAQVLSSSRNPQSHLVFKSIL

SEQ ID NO: 365833 - protein, 570 aa, Zea mays
  Clone ID: MRT4577_96804C.1.pep
MVVNDKEKESLFNEPRDDKPTNSGSSHKKKDRKKKRRIKKIVYYDSDGSSSSPRDDDDDDSSSKKKTVNQNYSFDYSRIPYNSNAHLLSIPLGKPPHFDGEDYSFWSHKMHSHLFSLHPSIWEIVENGMHFDSTDNPVMIHEQIHKNAQTTTVLLASLCRDEYNKDTLKISHEENDATMITKMELVEGELGRLKTLVNKIRSYGSTRWTDHDVVRLMLWSFTVIDPHLVNLIRENPRYTKMTPEEILGKFVSGRMMVKEARYVDDALNGPLPVYEPQPVALKATSSRETLPSKVAQVEAAGLNEDEMVLLIKRFKTALKGCKEYPNKNKARGKRSYFKCERSGKKEKKKSYRKAKGEAHLEKEWDSDCSSSDSDDEGLAASAFNKSFVFPNERHTCLMAKEKKGLDRTKVDKINELIDALNEKYRLLEKQEDILYEEHDKFVSVQKSLALEIKRNEMLSSELSACHETVSSLKSVNDDLNAKLEEANKSSSCVEHVSICNRCKDFDVDACNEHLMSITKLNDEVASLNAQLKTCKINFDQLKFARDAYTIGRHPSIKDRLGLRKETKNLT

SEQ ID NO: 365834 - protein, 397 aa, Zea mays
  unsure (1)..(397): unsure at all Xaa locations
  Clone ID: MRT4577_96805C.1.pep
MGMVVNDKEKESLFNEPRDDKPTNSGSSHKKKDRKNKRRIKKIVYYDSDESSSSLRDDDDSSSKKKTVNQNYSFDYSRIPDEYNKVSGLDNDKQIWDTLKISHERNDATMITKMELVEGELGRFAMIRGEEPTQTYNRLKTLVNKIRSYGSTRWMDLDVVRLMLRSFTVIDPHLVNLIHENPRYTKMTPEEILGKFVSGHMMVKEARYVDDALNGPLTIYEPQPVALKATSSREALPSRVAQVEVAGLNDDEMALIIKRFKTALKGRKEYPNKNKTMGKRSYFKCGKTGHFIAQCHDNENYQAQERHDKSEKKKNYKKAKGEAHLGKEWDSNCSSSDSDDEGLTASAFDKSSLFPNERHMCLMAKEKKVSVRNTXYTTSSDDDSSCRRFDPGGSLDR

SEQ ID NO: 365835 - protein, 64 aa, Zea mays
  Clone ID: MRT4577_96806C.1.pep
TVKNLVVPSMLARSSLRVLAGRTTRIRYSTMATPFKIQLEPQNSGLLGMKLGQSEASKATDLLQ

SEQ ID NO: 365836 - protein, 60 aa, Zea mays
  Clone ID: MRT4577_96807C.1.pep
FRPPLHRTVSTIGSHNPVGLVPTLKSFNRHLVDNIHCTEHLAKHNMLSVLPNCCHFDDEK

SEQ ID NO: 365837 - protein, 399 aa, Zea mays
  unsure (1)..(399): unsure at all Xaa locations
  Clone ID: MRT4577_96808C.1.pep
MSLGPVKRKRDIQKQLRXKYFRKNQGLLLEQLISSDENARNNTKIFSLEELKKATNDFDTSRILGRGGHGMVYKGILSDQRVVAIKISKIMEQGEIDSFINEVAILSQINHRNIVRLFGCCLETEVPLLVYDFVSNGSLFEILHAAEASNDFQLSWDDCLRIALEAAGALYYLHSSASVSIFHRDVKSSNILLDGNYTAKVSDFGASRLVPIDQTHVVTNIQGTFGYLDPEYYHTGQLNEKSDVYSFGVVLVELLLRKKPVFTNETGTKQNLSNYFLWEKKMKPVTEIVAAQVLEEATEEEINIVASLAEKCLRLRHEERPTMKLVEMTLQFLRAERLNSSSDVPASKQEVEELLGTSASYSDSLGSDTLLDNKAATTSQQSKGYYSLEQEFASTTLPR

SEQ ID NO: 365838 - protein, 374 aa, Zea mays
  Clone ID: MRT4577_96809C.1.pep
MENKSDDLQHEHGMPDQTSRPFTSLLLSATSVAQAAQQDTGSDIKSLSLLHGSSLLPPDDGYIWKARAQNIVPGCEYPTMYYKCAQDNCNTNKLVVCSADGHQVLETVLSGCHNHPRQQDCDLPIPKVSKTDTSMPVSREGDDEQLSSSSDSDEDDVDQARVEGDGSVTRHVPHPAERITAQTGTANSHRHAGRRRPKSKVWEEFSAVLRDDKIQWAECKHCKMSLGGTSTGRTTHLRRHLKICPALPATDRMQKQRSSPHPGSTIESIWKFDQDRSLELLIKVLVSNLFSSPLTSSTTFRQLWAGICPTNDVLSDAAIEEKFLSIFENEKLKLKEEIALAPGGVFLTAASSSLETKNFIFLTVHFIDKEWKLE

SEQ ID NO: 365839 - protein, 88 aa, Zea mays
  Clone ID: MRT4577_9680C.1.pep
LRCLGGLRCFNIVFQRLVIILFFVFHIDSFLPLGDLSFFFLTRVLVRCFPSSPWPSSLAPRRFPSLSLASWSLFIFFFFFFFFFFFFF

SEQ ID NO: 365840 - protein, 244 aa, Zea mays
  Clone ID: MRT4577_96810C.1.pep
MSSYSPPPPLPPRDQSMDTEAPNAPITRERRLNPDLQEQLPKPYLARALEAVDPSHPQGTKGRDPRGMSVLQQHAAFFDRNGDGVIYPWETFQGLRAIGCGLTVSFAFSILINLFLSYPTQPGWLPSPLLSIRIDNIHKGKHGSDSETYDTEGRFDPSKFDAIFSKYGRTHPNALTKDELSSMLQGNRNTYDFLGWLAAAGEWLLLYSLAKDKDGLLQRETVRGLFDGSLFERLEDDNNKKKSS

SEQ ID NO: 365841 - protein, 193 aa, Zea mays
  Clone ID: MRT4577_96811C.1.pep
MTGGCCLPRLPSDGCAMDISSSSGPAANIEPDQLICPLDGDREVVGYENDEINVVAVEHGDEDAQGTQVANKIQQTSFVPEVGMAFESENSAYEMYNSYAGKIGFSIRKGTTKHRPDGSLYMKHLVCSNEGFGKSESSKGITRTGYGARVQFSVSKEGIWIVQKIIVDHNHYLASPNKKKNLRSQRRVTEADR

SEQ ID NO: 365842 - protein, 72 aa, Zea mays
  Clone ID: MRT4577_96812C.1.pep
IQIPKFQQIIKKFVLHFDMRRNVFSLLHGYTNFSQPNTAKLGPRAASQSSHRRTFYFDMLVFTEAPICSHIL

SEQ ID NO: 365843 - protein, 111 aa, Zea mays
  unsure (1)..(111): unsure at all Xaa locations
  Clone ID: MRT4577_96813C.1.pep
LHILIVVWALRRGVVLRAAESRQDEERAEGLSAEDLNELPCHAHECKAGAGAECXVCLXAFQAGDRCRVLPRCDHGFHAQCVDQWLRKSRVCPVCRAEVGGGADREGNAER

SEQ ID NO: 365844 - protein, 164 aa, Zea mays
  unsure (1)..(164): unsure at all Xaa locations
  Clone ID: MRT4577_96814C.1.pep
PPVPGPPRFPPFGPPFFWPSPCPFPPNSPTPLNRTSPRVLSPSRSRWPPPSSERSPIGFPAAPPXCQLPPRAPPGLPRGQQPRVVAQVPPPPRIQRQGFISFFPNKCPPLPPRYFWGLPKFHFLGGSAPPPVNWALLIWFRSPLPISHFFLGRAGGINFLICFT

SEQ ID NO: 365845 - protein, 80 aa, Zea mays
  unsure (1)..(80): unsure at all Xaa locations
  Clone ID: MRT4577_96815C.1.pep
NSRXRLARVPQKTQRRTNPDADVPSDXVSPIYFLWDFGIVPNXXEVLXSNFCKGLKNXNQKCVYLGFRSQNYLVXXLMPV

SEQ ID NO: 365846 - protein, 271 aa, Zea mays
  unsure (1)..(271): unsure at all Xaa locations
  Clone ID: MRT4577_96816C.1.pep
WDLEPAGKFESRSEAGPWGDHERLPPPPPPGPGATPSQSRTPPSSPRSRRCLPHRASAPARAPSAAAAPPTRRRRRVLPPPVSTSDSFPRRAPPPRRSPSRSLGPVPSPSRAPPSSPXSSPSPAPXPANAPSAASAPHLRRRRRGPLQPNSTSACPPRRASPPPRRSPVPGPISPRAPPSSLAPAPPHLPPPXSPQPASVSAKGXPASETSGPPSPXDGEPQAPTRRAPFPRSRRPRXPSPASPSESRPKTKPVSIWQMKLTRSTRRCLII

SEQ ID NO: 365847 - protein, 35 aa, Zea mays
  Clone ID: MRT4577_96817C.1.pep
NSALHFLQPINHKYLFSTVTTTQLPNTPTYKKKFS

SEQ ID NO: 365848 - protein, 83 aa, Zea mays
  Clone ID: MRT4577_96818C.1.pep
TQQRGLTSKNAARHYGTHMGHWQGTITQTMNESRPTRTHTHGELDDTKNQQRTAPVGTIRTSTCPAFYFFDGFPSPFSLAVFT

SEQ ID NO: 365849 - protein, 450 aa, Zea mays
  unsure (1)..(450): unsure at all Xaa locations
  Clone ID: MRT4577_96819C.1.pep
MSVSCGLEWVVCLGCTRWAWKRLTYIGAYDSETWPPASADEFEPVPRLCRAVLANYDDELSSPKFAPPEHGYFDIDPKGILKRATYKEVGNACPPYLVYVDEAHKEIILAVRGLNLVRNADYKVLMDNKLGMQMFDGGYVHHGLLKAAKFILERETETLRNLLRRYGPEYKLILTGHSLGSGIAALMTVLVVNNRKEFDNIPRSRVKCYALAPARCMSLNLAVKYADVINSVVLQDDFLPRTPTPLEYIFGSIFCLPCMLFLICLRDTFKQDKRKFKDPRRLYAPGRMYHIVERKFCRCGRFPPEVRTAIPVEGRFEHVVLSCSTTXHHGIYWIERESQKALELMINSKKETTPPPQQKMERLQSFEEEHKNALQRAKTLDVPHAADLSEEEIQEDSTAPPSDTHSETTTETKSGGRTSWDELMEKLFTRDEDGRLVVNKDAMAREIVVL

SEQ ID NO: 365850 - protein, 50 aa, Zea mays
  Clone ID: MRT4577_9681C.1.pep
HGQQTILWSECKFPSRLGNITRVVTHQCMLPTTGTQTAFKGHISTRAELR

SEQ ID NO: 365851 - protein, 162 aa, Zea mays
  Clone ID: MRT4577_96820C.1.pep
MSVSCGLEWVVCLGCTRWAWKRLTYIGAYDSETWPPASADEFEPVPRLCRAVLANYDEELSSPKFAPPEHGYFDIDPKGIPKRATYKEVGNACPPYLVYVDEAHKEIILAVRGLNLVRNADYKVLMDNKLGMQMFDGGYVHHGLLKAGKFILERETETLRNL

SEQ ID NO: 365852 - protein, 161 aa, Zea mays
  Clone ID: MRT4577_96821C.1.pep
MYAPGRMYHIDPCQYLGLMYVGTAVRTAIPVEGRFEHVVLSCSTTSDHGIYWIERESQKALELMINSKKETTPPPQQKMERLQSFEEEHKNALQRAKTLDVPHAADLSEEEIQEDSTAPPSDTHSETTTETKSGGRTSWDELMEKLFTRDEDGRLLTVVSC

SEQ ID NO: 365853 - protein, 67 aa, Zea mays
  Clone ID: MRT4577_96822C.1.pep
TWIDGNYGDDESSTYTHVPKDDDDGTETAKEITTPDYPHIPRIKVRKDLQVFVRVKATTAMKQNRRE

SEQ ID NO: 365854 - protein, 163 aa, Zea mays
  unsure (1)..(163): unsure at all Xaa locations
  Clone ID: MRT4577_96823C.1.pep
IVKELSKRNQAMEKKLSESDKEMLFLRESMKDTGRRIQELEYQYEKLQSNYNSLVPLLGSRHDNMEGPSIILMGGYRGSTCLSSLDSFCPTTDRVVPLCSMSSARAYAAAVALKDHLYIFGGGNGSSWYHTVECYRMGSNKWIACPRLKHAKXSLAGPTATEF

SEQ ID NO: 365855 - protein, 108 aa, Zea mays
  Clone ID: MRT4577_96824C.1.pep
QIVVHVEAGFQSAHLVEAQEPLVIPAANVRNHLFVVRPCLRQHPSRSRGIHHRWNWSSQPEEGWHRVADSCGVRSSNIRRPPQDVPYSEDRINELGVEQQPVRLCSLP

SEQ ID NO: 365856 - protein, 95 aa, Zea mays
  unsure (1)..(95): unsure at all Xaa locations
  Clone ID: MRT4577_96825C.1.pep
PKXAPTRPPHLHALTXSHGEAGTPAERKRRNAPERCERTQLTGGQRTYLIGLCPTSLLAMPPQARFHGLPRLRAAGAHLRSAARADPWSTGRALQ

SEQ ID NO: 365857 - protein, 54 aa, Zea mays
  unsure (1)..(54): unsure at all Xaa locations
  Clone ID: MRT4577_96826C.1.pep
TVIASGRPARCACLXDLGNLNLSDTTEKIIAEYIWIGGSGMHPRTKPRTLPGPG

SEQ ID NO: 365858 - protein, 109 aa, Zea mays
  unsure (1)..(109): unsure at all Xaa locations
  Clone ID: MRT4577_96827C.1.pep
AXMNTVYAPWRTGCSLQRRRAPGHDHCDLLARDLSWYAGISTLLTPLHPPGCCRLGPLLLHDLRLMSGGWLLQQCRTDLRAVGHAAAECHHSSSELDCRRSVRVICLLF

SEQ ID NO: 365859 - protein, 65 aa, Zea mays
  unsure (1)..(65): unsure at all Xaa locations
  Clone ID: MRT4577_96828C.1.pep
GYXPEKFGSTAFNFMLQSANRFGRGLKKKNFFKPPGWKKKKNLFLNPLKTTWALNEKFSRGGGFF

SEQ ID NO: 365860 - protein, 59 aa, Zea mays
  Clone ID: MRT4577_96829C.1.pep
EDGSQALEIDPRLVWLRPSTQAEMFLFLHRNTSAAKQSSGSTHTGIRSVPNGAGVHCTI

SEQ ID NO: 365861 - protein, 52 aa, Zea mays
  Clone ID: MRT4577_9682C.1.pep
TLYMITTNIMRSILYFSHLFVLQIKSSTTFIFVPTSYAEAHRMKLAPSNHMT

SEQ ID NO: 365862 - protein, 70 aa, Zea mays
  unsure (1)..(70): unsure at all Xaa locations
  Clone ID: MRT4577_96830C.1.pep
QSALEAEMKDIFVRYRGFVKRNGVGVFAVVLXEADVSKAILGYITANLIQSIALVLSSINAFTTKFKNAD

SEQ ID NO: 365863 - protein, 150 aa, Zea mays
  unsure (1)..(150): unsure at all Xaa locations
  Clone ID: MRT4577_96831C.1.pep
MRSEFCGTLHHYTGQXDLYRLLXEGDPILRIDMKLGYDLIYXYEDERDAYDAIRGVGNAYLGYDRRKLCEQWPKXKWNRXPKSRDRPTADVLSTKTLFXMKSDLIHTNDQDIEKHLQPYGMIANIDIQRIFVFAHFETHEEVSAVANNTD

SEQ ID NO: 365864 - protein, 103 aa, Zea mays
  Clone ID: MRT4577_96832C.1.pep
LLRLSVDAPRDLDGGGVGPHPSAQDPYNFLALRTIILRFPIVSSPPSATSIARPCHWFFSSSCRRQHYPGGGGGGTSRTRRERDGAGRRLGGGRRSWGQHRRH

SEQ ID NO: 365865 - protein, 49 aa, Zea mays
  Clone ID: MRT4577_96833C.1.pep
AVFSLSRSPYLGWDGTARTRPSFSPLFTYRFCAHRRGTPSSSAAFRMSA

SEQ ID NO: 365866 - protein, 61 aa, Zea mays
  unsure (1)..(61): unsure at all Xaa locations
  Clone ID: MRT4577_96834C.1.pep
LLDDDDDMADLYLSRKLAGASSPVSGSGGPNWFSAXPTTGSKISRPNWFPKKKKKTLLLSI

SEQ ID NO: 365867 - protein, 78 aa, Zea mays
  Clone ID: MRT4577_96835C.1.pep
AAPSACGTRSERRRQPRGDSVCQPPALIPGAQYSLGGAAWCDRPSPLPGGSEFILLRGCRAGVVLAVAMCDAWVAGIP

SEQ ID NO: 365868 - protein, 32 aa, Zea mays
  Clone ID: MRT4577_96836C.1.pep
CKYKFRKMSNVRTMKSLRKRSQHIFPTEKMNH

SEQ ID NO: 365869 - protein, 118 aa, Zea mays
  Clone ID: MRT4577_96837C.1.pep
MRSKFKDEHPFEKRKAEAERIRQKYADRIPVICEKVEKSDIATIDKKKYLVPADLTVGQFVYVIRKRIKLSPEKAIFIFVDEVLPPTAALMSSIYEEHKDEDGFLYITYSGENTFGEA

SEQ ID NO: 365870 - protein, 89 aa, Zea mays
  Clone ID: MRT4577_96838C.1.pep
SDRIIAPKNSTKLSATVSKVYKRCPWIIVLLYIMMDLTHLYHIKQYRPDMRRHGPENGSRYTSKDQACPLFFWACVAIKYHFLLPYVRD

SEQ ID NO: 365871 - protein, 157 aa, Zea mays
  unsure (1)..(157): unsure at all Xaa locations
  Clone ID: MRT4577_96839C.1.pep
MSNLIATKRVDLLAPYLALDQGSRVQAEYIWIDGDGGLRSKTMTLDKAPAAVSELKEWNFDGSSTNQAPGDNSDVFLRPVAIFKDPFXRGGANILVLCECYDNDGSPNVSNYRAHANKVMKAAEXRXPWFGLEQEYTLFDADGQXVFGWPKNGFPGP

SEQ ID NO: 365872 - protein, 113 aa, Zea mays
  unsure (1)..(113): unsure at all Xaa locations
  Clone ID: MRT4577_9683C.1.pep
GADQAVRQPFQSRFDLLLLLAGPNTTRLASKLARGPTVIMASSETAVAPFKGLKSAAGFPVSRRRTRSLGNLRNGGGIRSMQVWPAYGTKKFKTLSYLPPXLSTDNLLKQVDY

SEQ ID NO: 365873 - protein, 505 aa, Zea mays
  Clone ID: MRT4577_96840C.1.pep
MSGGTPDSPVRQTRVTFGWFCSFIFEPFLGLGIGSLGLRVRPSSKDIEALIAPLWSLLKNEMQIHFEMSTSTDDAEMDTVLSLLAGESSDSALVEPMAITDGQELGEVVKAQKPEGARPKRSRRVSRSIAPVEEKRKKRQLRRLSSLDQGVGPFAPVPDETPVEALPKVDTKDRDCAPAAAFIFYEDEEEEEEVLLIRKNSRHCRGSEGGSDIPSPALSTLVSLQGLSISNFDQALKDVIPEDMLTEPTADDVMAICLEVPGDGLEVSQVVSRASSTLEGSLQCQDAGLSHLTPMEVTKELSALEVATAEDPTPEGGAGGYLAPEGVVGSDPALVGSASYNPAPKSVVGSDPALALVDGMSVQLRLCGAAVPEEALSLMQWNPLLLQKQIANSKASNAATLSDMAQRCSDLEEKQLVSSKDSTIKDLESARLATKVSEDNCTILKAQRDKAMDKAVHAGRILMRRPGVVVPDDIIADVKAAPDASSRPSSSIAPVKDIAKGVSMQ

SEQ ID NO: 365874 - protein, 52 aa, Zea mays
  Clone ID: MRT4577_96841C.1.pep
RNLAPGRGALNPRAAPLRGSPGLFRLWGPPCKLLLNPPWKKRNCSKRAPFKC

SEQ ID NO: 365875 - protein, 261 aa, Zea mays
  unsure (1)..(261): unsure at all Xaa locations
  Clone ID: MRT4577_96842C.1.pep
AAAARPSRRRTSGTATRPTSPTRRRTSTAARARGSSTYEKAVALMKQLPDDDPRSFAQQWRVHCAYCDGAFDQVGFPDLEIQIHNCWLFFQWHRFYLYFHERILGKLVGDDKFALPFWNWDAPGGMSLPAIYANKSSPLYDERRDPAHQPPFTLDLDYDGTEPTIPRAQQIDQNLMIMYRQMISGAKKKELFFGMPYRQGDQPDPGAGTVESIPHNPVHFWSGDPRQPNGEDMGNFYSXARDPLFFAHHGXIDRLWSVWNG

SEQ ID NO: 365876 - protein, 546 aa, Zea mays
  Clone ID: MRT4577_96843C.1.pep
MLIATTMPRGFAFAAPCRSLQTTTVRCKATGAADRRDVLLGLGGAAASGLLRSSSSLSSGGAPIQAPDLRNCHPPDLPDTAEDVNCCPSPGIVDFTPSPRLRVRPAAHLVDAEYVAKYEKAVALMKQLPDDDPRSFAQQWRVHCAYCDGAFDQVGFPDLEIQIHNCWLFFQWHRFYLYFHERILGKLVGDDKFALPFWNWDAPGGMSLPAIYANKSSPLYDERRDPAHQPPFTLDLDYDGTEPTIPRAQQIDQNLMIMYRQMISGAKKKELFFGMPYRQGDQPDPGAGTVESIPHNPVHFWSGDPRQPNGEDMGNFYSAARDPLFFAHHGNIDRMWSVWNGLRPGNSDFTDPSWLDASFLFYDEEARLVRVRVRDCLDTAAPGYAYQDVALPWLNAKPAKETGSPAPTAGALPATLNQTVRVAVTRPKTSRTRKEKDAKEEVLVVQGIEIADHSSRFVKFDVFVNDSQSGGGMPAAAQCAGSVALTPHAVRPGKGKGTVKTVARFGICDLLDDIGADGDKTIIVSLVPRCAGDMVTVGGVGIEYVG

SEQ ID NO: 365877 - protein, 529 aa, Zea mays
  Clone ID: MRT4577_96844C.1.pep
MAMMDKWTGLGSALASMLFLWSMVQNHLPAAFGYRLSTWGNKLASLFSPYLEITISEYGAERFRRSDFFLAAEAYLSDACSRRARKLRADLGKDSKNLQVSVDDNDEVTDAFSGATIWWYASKQLARSQVISFYPGEDERRFYRVVFHRRHRDLVVGEYLPRVLEEGRAVTVRNRQRRLFTNNPSGSWNSYRGKSVWSHVPFEHPATFDTLAMDPDDKEDILDELRAFRDAKAYYTKVGKPWKRGYLLYGPPGTGKSTMIAAMANFLDYDVYDLELTAVKNNTELRKLFIETTGKSIIVIEDIDCSVDLTGKRKDDKKRASAEADDKPKTPTDPDKDEGSKVTLSGLLNFIDGLWSACGGERIIIFTTNHKDKLDPALIRRGRMDRHIEMSYCRFRTFKVLAKNYLDVEEPHELFGQIEKLLEETDMSPADVAENLMPMSKKKKRRDANACLESLVEALKQAKEDAAAAAAAKALADARAAKEEAEEAKEKEAKEKDEATNSKGAADPAGKDTKMSNGDVTANKEGDDE

SEQ ID NO: 365878 - protein, 37 aa, Zea mays
  Clone ID: MRT4577_96845C.1.pep
ENKRLLIDSSLHDLYQKRLQETCSDLFYGDSRTRVRS

SEQ ID NO: 365879 - protein, 82 aa, Zea mays
  Clone ID: MRT4577_96846C.1.pep
VKGFLGVSPPFCLRGEKFSPLRACLSDALLCDSKAAFFQIICPISVPPMYLVWVPLFPLFGGKTLAMYLPQFAYLKGWAFFP

SEQ ID NO: 365880 - protein, 380 aa, Zea mays
  unsure (1)..(380): unsure at all Xaa locations
  Clone ID: MRT4577_96847C.1.pep
GYLEAGRVXYEEGVWFFVPLANRLGIASWKEQLENLCFKYLNPEEHRELSSKLTESFDEELITSAVDKLDKGLRDAGVSYHNLSGRHKSVYSIHSKMLKKNLAMEEIHDIHGLRLVVDNEEDCYEALCVVHKLWPRVTGRFKDYISRPKLNGYRSLHTVVMGEGVHPFEVQIRTREMHLQAEYGFAAHWRYKEGTCRHSFVLRMVEWARWVLTWQCEAMDRERTASLGSDDGTVSVRPPPACPFPQHAEDCPYSYTRQCNHDGPLFVILLEHGKMSVQEFPANLTVMDLMDRVGANSSRWSPYSIPMKEDLRPRVNGEPICDPDRRLNMGDVVELTPALPRKSLSGYREEIQRMYDRGGFALXPGAAAAAAAAPDAAERQ

SEQ ID NO: 365881 - protein, 218 aa, Zea mays
  Clone ID: MRT4577_96848C.1.pep
PRCRPGSSDRSFFFLTRAALLSPCTRRAHSSARSFPWTLLSAEVSPSSPGRCAAPLASSPSFCPLTMLFLKSCQPTSPPPGGAELLPLAWIRPSFYGSWPRPSSPAFVPMASSWPLLEFHLAAPWLAPSACRAPLVKLVPMAPRASFPSRACSSSSARSWELPYACPVPRSRHPRSAQSPSSDFAWSPAVPRTRPSPCCCVGRSFLLARPTMVAAQVS

SEQ ID NO: 365882 - protein, 264 aa, Zea mays
  Clone ID: MRT4577_96849C.1.pep
RPAGRAFLQEGARVPKEITVEEIKQTTQQFVDAAIRANKAGFQVLELHYAHGYLASSFLSPHTNRRTDNYGGSFENRIRFALETADAVRKVWPQEYPLFVRISAADFIDPVHADNGQWTVEDSVELAKQLKSVGVDVIDCSSGGNSPFYKTPTRGEGYQVPLAEQVKAEAGINTAGVGSIYTPSYANSIVQEGKVDFVLLGRQLLDEPSWPTRAGDELGFSVNRLDQYKYGKFKKFPLYKSDRSYCYGELVLTYQKKKKKAPRA

SEQ ID NO: 365883 - protein, 94 aa, Zea mays
  unsure (1)..(94): unsure at all Xaa locations
  Clone ID: MRT4577_9684C.1.pep
HAPSIIFIYXIDSIGSAIVGFITGEGDNXVHRTMLELINHLDNFXSSHNIKEFMTTNSIDIIHQSLLSPLPINSNIEFPNPIEDSKFDISNIQS

SEQ ID NO: 365884 - protein, 216 aa, Zea mays
  unsure (1)..(216): unsure at all Xaa locations
  Clone ID: MRT4577_96850C.1.pep
MLPSRRKSAVLGVVALSSSVLVLLHAFSLPAASALSVGLARRHRHDATPGLAAGGCDVFSGSWVLDGGSSASAAYTGYNCPLIDAEFNCQLYGRPDSDYLRYLWKPAGCELPXFDGADFLTRMKGKTVMFVGDSLGRNQWESLVCLLHAAAPQSPAQLVSADPLXHLVDIDVVQGKRVLMLDDISENAESWRDADVLSFNSGHWWTHIGSMQGYGR

SEQ ID NO: 365885 - protein, 83 aa, Zea mays
  Clone ID: MRT4577_96851C.1.pep
GRRGSLAKLERRAVYHEEMATLPRGGPLGTRDQPHLRTDALLLATNTSPVKSLPFFCGNHMTSGADEQLGGAGMPWHMCFSGH

SEQ ID NO: 365886 - protein, 256 aa, Zea mays
  Clone ID: MRT4577_96852C.1.pep
MLPSRRKSAVLGVVALSSSVLILLHAFSLPAASALSVGLARRHRHDATPGLAAGGCDVFSGSWVLDGGSSASAAYTGYNCPLIDAEFNCQLYGRPDSDYLRYLWKPAGCELPRFDGADFLTRMKGKTVMFVGDSLGRNQWESLVCLLHAAAPQSPAQLVSADPLYTYKFLEYQVTVSFYRAPYLVDIDVVQGKRVLMLDDISENAESWRDADVLSFNSGHWWTHTGSMQGWDYMGESGRYYEDMDRTVAFQRGLTP

SEQ ID NO: 365887 - protein, 257 aa, Zea mays
  unsure (1)..(257): unsure at all Xaa locations
  Clone ID: MRT4577_96853C.1.pep
CDVFSGSWXDXGSSPSAAYTGYNCPLIDAEFNCQLYGRPDSDYLRYLWKPAGCELPRYVRGRERQPCLMNPRQPVAVSAALITXCTVSACTCRFDGADFLTRMKGKTVMFVGDSLGRNQWESLVCLLHAAAPQSPAQLVSADPLYTYKFLXSCKHMYQLDCLAEEIGPNIIXYVRWSIEQEYQVTVSFYRAPYLVDIDVVQGKRVLMLDDISENAESWRDADVLSFNSGHWWTHTGSMQGYGRVELHTPIRGNPLRS

SEQ ID NO: 365888 - protein, 143 aa, Zea mays
  Clone ID: MRT4577_96854C.1.pep
PAGFHRRPHPPASPLPSHADTPALSQPAMARASLPSRIPLSVASHWPLPMSPSFPKHSPTQRVFGPPAKSAHRLAPVAWCGARTGQRSRTPTMASFGLAYPTSAVTTRCSVCGVVVVAQFSPPWKVQPAKWSSRSSASLSQQP

SEQ ID NO: 365889 - protein, 66 aa, Zea mays
  unsure (1)..(66): unsure at all Xaa locations
  Clone ID: MRT4577_96855C.1.pep
NITIYDAGLKRKGGDEIPYCVHLVSWEKENVFSEALEACRIGCNKYMTKSARKDAFHLRVRXHPFM

SEQ ID NO: 365890 - protein, 98 aa, Zea mays
  Clone ID: MRT4577_96856C.1.pep
MGKPVDVELGGGAGGLEIARDGGGGPWGGRLLGAIGRTVSFRCGFALLLAVGVLIPALFLLVPSRQEGYISDDHDVLADVKDIDAKGRRAQKDKKSLR

SEQ ID NO: 365891 - protein, 69 aa, Zea mays
  unsure (1)..(69): unsure at all Xaa locations
  Clone ID: MRT4577_96857C.1.pep
AXELTLXXSSQXQXXAXCXQDIXNGVLVXXXRWXXSSSRXSNXLPLXVVVLXHKEXXIVXQCFIPXASX

SEQ ID NO: 365892 - protein, 69 aa, Zea mays
  Clone ID: MRT4577_96858C.1.pep
MDAQQWPATATISASEIQLRTTFSDSLLTGDHGRPLPAAGDDSRPHRRHGVATAMACLAEMKAIRQRKW

SEQ ID NO: 365893 - protein, 99 aa, Zea mays
  Clone ID: MRT4577_96859C.1.pep
APVRKLGIRLERLGRLDRKVEFPLPDWWHKRLVFQMGGCLTPQMNRVWARCWQVAQLVCRWKPTKPLWCPVLTLMVTTLSIVNLAASEVLLILCNVCNY

SEQ ID NO: 365894 - protein, 58 aa, Zea mays
  Clone ID: MRT4577_9685C.1.pep
QTQENRTGAFLDHHHQKINRQYKTSQHIHVQIPTLKKALFFCSTRLRHLNPKTRGYHG

SEQ ID NO: 365895 - protein, 240 aa, Zea mays
  unsure (1)..(240): unsure at all Xaa locations
  Clone ID: MRT4577_96860C.1.pep
TLEGLPDEDETVDTFEWVFNAFKTCMGPEGPRVILTDQDPAMPVALGRVFPNTIHRLCLWHVQNRYMPYLNELYARFEEEDFKSRSQSIIHHPLTVTEFEAAWAMMLDDFHLHDNISLTRMXISLTRMYEIRKDWILAFLKQDYCGLMVSTQSSESMNKLVKSAHVDANTPLHQFAXXMLKLLHGRKMKEAKEALGCMGQKETNTLYMFEIRVARTYXRAVMNRFHESLKYATAYRIAHD

SEQ ID NO: 365896 - protein, 94 aa, Zea mays
  unsure (1)..(94): unsure at all Xaa locations
  Clone ID: MRT4577_96861C.1.pep
RQHLQQQXLKTXSHITXXXNPXTYXQQXLLASNPLALANVAAYQQQQQLQQFMPVLXNXPGGGPXXYLQLLSSNPLXVGNAPTYLQQQXLQQIV

SEQ ID NO: 365897 - protein, 36 aa, Zea mays
  Clone ID: MRT4577_96862C.1.pep
ICPTYYIPNEMTSRNRSPLLLGWPAFCVSKRKKISI

SEQ ID NO: 365898 - protein, 869 aa, Zea mays
  unsure (1)..(869): unsure at all Xaa locations
  Clone ID: MRT4577_96863C.1.pep
MTTPCTSDGRNAVTPPAALPAPGIVEEGNTVHQSLMGTSQRIPMRTIGEHEQDTPHILQSHDDSIDQRLVPKVGMTFSNVDEAYKFYSRYAYEVGFPLKRYRERKNCKWLNCSMEGKRAERGNGTPKVRNTISKRTQCRAGMKLKKIYDDAKENIISVRIDLIHLEHNHEFFRKDTEKNQLQCNKTHDPEYMEFLSAMQESRIPQHCIMDFVSEMHGGPENVPLTTQDMINLKKARQRERNANDVSKLLSFFALCKKDNPQFFSDFQLDQEGKILSIFWSHASQQADYIDFGDAVTFDTTHKTNLYDKPLGMFVGCNHHLQCTVFGFTLLGDETVDTFEWVFNAFKTCMGAEGPRVMLTDQDPAMPVALGRNRYMPYLNELYARFEEEDFKTRFQSIIHHPLTVTEFETAWAMLIDDFHLHDNISLSRMYEIRKDWIPAFFKHDYCGLMVSTQRSESMNKLVKSAHVDANTPLHQFAKQMLKLLHSRKMKEAKEALGCMGQKETNTLYMFEIRVARTYTRAVMNKFHESLKYATAYKISHDPEGGVNEWVVQHTSRSNKIVWGQHQFKVIADVDAGKYECECKHWEHTGLLCVHLLRTFMHLQIDRIPSEYILQRYTYSAIQDVTFSRDDKNLKGKDGETKSYRQKMLLKKSMKVVHHASLSKAGYDRALEMMDELLLLLSRLEPDIEGDDSTSDGEGIQVIQLVPTLQEGGVSDTXNVLCHNKYWNSTXYGQLTTSTALIDESGTDLTIKKKLDFNVSGVSLRRPDNAKPKGRTIRDTEKRVIKLGAKGDKKKNRKCQRCGIADGHNSRTCLSVEENRLRLASLTGRKRGRPIGSRNKGSSSAPNWNEACTSKKHQGGVTDNDSSSGE

SEQ ID NO: 365899 - protein, 361 aa, Zea mays
  Clone ID: MRT4577_96864C.1.pep
MTLEIVKQTAQQDCADLVKAAKDKHLRVKGPVRIPTKVLHITTRVSHCGEGLFFSTARDVLGIVSSKFLMEPAVLNRERVALDKKNRMPMLFDDYSDENFYGVQRKYSIVARVEVKFPIEPRYRDRQHYILADINGAKIEAIATRYEIVKYFNSLLHEKHVYKMHNVWFGLNPGAFNFRHLNGTMELYFTQHTIVEPYAVPVQMPPFPKHIFLNLDDIAELPNKTLVDIMAIVVHLDTIHRTMWGTIRKIVIMDARWSLHTIKVWGDLLNKNALRWALANENYSIIIGTMFRRFRKQECLESTDHTCAFPILTTECIPYTDDMFAGAATELMIVETFDTRLVGAAFPILTICFRCNARAST

SEQ ID NO: 365900 - protein, 131 aa, Zea mays
  unsure (1)..(131): unsure at all Xaa locations
  Clone ID: MRT4577_96865C.1.pep
SILCRSTNFASMDNTASPDMVYLHKCPVHFRIDFLSQLLPSSYSRSXTIYTIMVRTMASTLLIFLIRHASLVKPLSQAGNFIIARHIHDLQLDHGHNLFPDQXLRSPYTSLQAYRPVLFLKTSHLDKIPLL

SEQ ID NO: 365901 - protein, 98 aa, Zea mays
  Clone ID: MRT4577_96866C.1.pep
RNPIQGVVLERQLILESHLPATAISSIISWHSGLWQIEVGMLKEYWTPLSKLILFLYARGDRSRLSTYEKPMSAQNLLRCRPKVSVVCQQPGAQGHVP

SEQ ID NO: 365902 - protein, 88 aa, Zea mays
  unsure (1)..(88): unsure at all Xaa locations
  Clone ID: MRT4577_96867C.1.pep
VPEPTVVMAARALCMLGLVLALLSSSSAEXEYVGLSANQCAVPANDRVDCGYPHVTPNDCNNRGCCFDSRIPGVPRCIKPRQEAECTF

SEQ ID NO: 365903 - protein, 62 aa, Zea mays
  Clone ID: MRT4577_96868C.1.pep
ALSLNTSLPRQPVEWIFYKAHAFLRLGKRRLIRHAYMKCARTDTLTKDTDAMLTQAGTNRRG

SEQ ID NO: 365904 - protein, 91 aa, Zea mays
  unsure (1)..(91): unsure at all Xaa locations
  Clone ID: MRT4577_96869C.1.pep
SVLMQLVTCGSLSVKDHGNAGVVRTCKPNLAHXMMMGELDCLSENLKLMGIKLEEQEYFSGSLVETKKTQRDGPVERYPALKRSSSYNAER

SEQ ID NO: 365905 - protein, 58 aa, Zea mays
  Clone ID: MRT4577_9686C.1.pep
PTFELAGNPKKKDRSFQMGGNNSKSYLLYTQAGIRLNLGQFSVFFHRGRGGATLGRTV

SEQ ID NO: 365906 - protein, 94 aa, Zea mays
  unsure (1)..(94): unsure at all Xaa locations
  Clone ID: MRT4577_96870C.1.pep
IFYLPFLQFLFFFLVFFFFFLPLSPFFFFFFFFFFFFFFFSPQTSAPNSPQTSAQRKSWKSRQKRRSHSPQASAPNLTTLTRFCVLXIHNNLYP

SEQ ID NO: 365907 - protein, 33 aa, Zea mays
  unsure (1)..(33): unsure at all Xaa locations
  Clone ID: MRT4577_96871C.1.pep
LAPNILFELYTCIHTEDVYKRTKDLLMSAXLLI

SEQ ID NO: 365908 - protein, 79 aa, Zea mays
  unsure (1)..(79): unsure at all Xaa locations
  Clone ID: MRT4577_96872C.1.pep
GTRLHHAQACIQELMQERQQYHQEIDSLARQATEDKMARRSKDQEKMSAALXSLQEELEDERRLRKHSETLHRKLGKEL

SEQ ID NO: 365909 - protein, 59 aa, Zea mays
  Clone ID: MRT4577_96873C.1.pep
DFHNICAEPSSIALLTHRLTPKQIRRTPGYRARRRASPLLDVYLKRTAPACGDGCSAFT

SEQ ID NO: 365910 - protein, 106 aa, Zea mays
  Clone ID: MRT4577_96874C.1.pep
MPGFSIPKNAAELNEILSSNKYVVIDFTATWCGPCKMITPILEKLSNDYTNVVFVKVDVDDLADIAQEYSVRAMPTLYFMKDGEKVADVVGANRKAIEDNLANLVA

SEQ ID NO: 365911 - protein, 91 aa, Zea mays
  Clone ID: MRT4577_96875C.1.pep
PKRGETGVFVLVWKRFLVGGSLSQRFKGVSHAPKKRFGVEKTPRGGPEVVHPRPQGPGPAQLEEGPQKRGVPPQARVIIARARAPPSFPVP

SEQ ID NO: 365912 - protein, 96 aa, Zea mays
  Clone ID: MRT4577_96876C.1.pep
TSPYPTTPRRTSHSTRVHQLLPPPPYPPPPPPRSHAAPRAPLRALAAHHLLHVQSLRGDTCSSAAVRACTRARRPTKHTLTALTRPSSPPSADEWV

SEQ ID NO: 365913 - protein, 436 aa, Zea mays
  Clone ID: MRT4577_96877C.1.pep
MGACWAAARPLGRAAQQGSRLVTKGRARRALRRGGGKRPGGLWRRQLVLFRSGRRILPELSRYGCCSSSRLHIWRLVPLAGSPRERSWFSVLLPLTVSIATRSIHCSTSGCSTEVVLLVRSEDLRCSIASPVRVCAAVDSLVSVHRGLVLGLPAARCSSSRAGAVDVSLGSGSGSSISVNLPPCRSGRGRRIGFLGQNLVFAELVFPRRQSTCSLRSEADVVCLLFSDQEITAEFCVPASPFPILTLPYTPHNIIHDMSVDWLLVVASMDWPQVTTYKALVSAQAHMEEIIQNLGGMIRELLISFYKRTGKKPKRIIFYRDGISEGQFNHVLILEMDAIRKACASLEDGYLPPVTFVVIQKRHHTRLFPGVHGRRDVTDRSGNILPGTVVDTEICHPREFDFYLCSHAGIQIRTMHTRCLSCDPGFQSVMHCSSSP

SEQ ID NO: 365914 - protein, 374 aa, Zea mays
  Clone ID: MRT4577_96878C.1.pep
MESLLASRSIRSSFSAVASTRGAASPRPSRVATLASAGAGARSRALRAGHTDDMLNAKELVQWENGLSFNDIAARQGIRIRRHCRPTASLKEIEEELGAPLNILEKIIWDKEIEVAEGHAKKPLEEVIQAATKAPPSRDFYGALEAAYKRNGVPALIAEVKKASPSRGVLRENFNPVEIAQAYEKNGAACLSILTDEKYFQGSFDNLEKVRSSGVKCPLLCKEFVIDKWQIYNARSKGADAILLIAAVLPDLDIRKFLQICEELGMTALIEVHDEREMERVLKINGVKLIGINNRSLETFVVDTSNTKMLLEKHGDSIREKGILVVGESGLFTPDDVAYVQNAGVSAVLVGESLVKQECPGRAIVGLFGKELLH

SEQ ID NO: 365915 - protein, 95 aa, Zea mays
  Clone ID: MRT4577_96879C.1.pep
EPSLPSRHVPPFPDLSKQMKKKRRGLLLPPDLVCPTTTEVWRSGQPSYCCSLFLYRFDLCCSLALEKLGENKERREEVVVSLRCANWICLLEGWE

SEQ ID NO: 365916 - protein, 82 aa, Zea mays
  unsure (1)..(82): unsure at all Xaa locations
  Clone ID: MRT4577_9687C.1.pep
MTDSIHACXHARVEKNLSFLKNLYQNWLKEHIACVNGLLLLHNHSLLTRGSIQTIPYRAYLNSIMRSGFDNACMCTTYSWPC

SEQ ID NO: 365917 - protein, 145 aa, Zea mays
  Clone ID: MRT4577_96880C.1.pep
APPLSPQERQWGGQCLRMRIPCLAAMSLNDKPFSHWTSSFAFSISSCASTSRIESVWPARSARERAPAQALARVATREGLGEAAPLMLATAEKEDLMDREARRDSIKRRGRDGWRPTVGSPVSRFPLTTSTCPHPSRGRDGSDAW

SEQ ID NO: 365918 - protein, 122 aa, Zea mays
  unsure (1)..(122): unsure at all Xaa locations
  Clone ID: MRT4577_96881C.1.pep
GVPVRGFREEPWKYRCLGCSRLNCNPPCMQVHKRRTACTGSPLALATTLEDADLTTPSCLDGLFIMAAHHRSVRFCFLSRGMSRREQNRSXNNYRRXALIDSILLAIVVMLCCWRWSADLLC

SEQ ID NO: 365919 - protein, 383 aa, Zea mays
  Clone ID: MRT4577_96882C.1.pep
MESLLASRSIRSSFSAVASTRGAASPRPSRVATLASAGAGARSRALRAGHTDSILEVLAQDDMLNAKELVQWENGLSFNDIAARQGIRIRRHCRPTASLKEIEEELGAPLNILEKIIWDKEIEVAEGHAKKPLEEVIQAATKAPPSRDFYGALEAAYKRNGVPALIAEVKKASPSRGVLRENFNPVEIAQAYEKNGAACLSILTDEKYFQGSFDNLEKVRSSGVKCPLLCKEFVIDKWQIYNARSKGADAILLIAAVLPDLDIRKFLQICEELGMTALIEVHDEREMERVLKINGVKLIGINNRSLETFVVDTSNTKMLLEKHGDIIREKGILVVGESGLFTPDDVAYVQNAGVSAVLVGESLVKQECPGRAIVGLFGKELLH

SEQ ID NO: 365920 - protein, 283 aa, Zea mays
  Clone ID: MRT4577_96883C.1.pep
TLAWSVLISILAVGGAASDEAALLAFRAGLSPGALASWNSSGGGGGGGFCRWYGVVCSRRRRPGRVVALSLASSNLSGTLSPAIGNLTFLRVLNLSSNALHGGIPETVGRLRRLRTLDVGHNSISGALPANLSSCVSLEYLRLEYTKLGGRVPPDIGNTLARLRTLVLRNNSFTGPVPASLANLSSLRYLAVDGNHLGGPIPPGLGGIAGLQHLHLDQNRLDGELPRSLWNLSSLVAFQVNYNMLHGSIPPDIGDKLPAIQYLWLDGNRFSGAIPPSLFNLSV

SEQ ID NO: 365921 - protein, 94 aa, Zea mays
  Clone ID: MRT4577_96884C.1.pep
GQCQKAHPNLKKSGPILPNKSKKGKKEKKYPQRRKGQKTCLPRPKRPPNRGGPNPPLFPMKGKKNVQRSLNKKAPNPRCIKRNPPPGTDKKTKT

SEQ ID NO: 365922 - protein, 71 aa, Zea mays
  Clone ID: MRT4577_96885C.1.pep
YSLTSHFFLSFLDMAITITLGPNGQYQVNGSANELNTNLDLVPISGATKLRRMLNETDELIVCPGVYDGLS

SEQ ID NO: 365923 - protein, 695 aa, Zea mays
  unsure (1)..(695): unsure at all Xaa locations
  Clone ID: MRT4577_96886C.1.pep
PAGIFRYFDNNNLWSPSKGFALCVLLDMQIVMEKSGQXLIYCXMLVKHLEHKNVLKQPDMNLDIIEVTSRLAEHSKAQSSIALMSSISDMVRHMGKSMQSLASDAGPGDNMVKWNSRYGKAVDECLVQLSRKVGDAGPILDTLAVVLENISSSMIVARSTISAAYRTAQIVASLPNLSHQSKAFPEALFHQLLLAMLYPDCETHLGAHRIFSVVLVPSSVAPFSFADTSQTRKIDLRRTLSRTTSVFSSSAALFGKLKRDMLSFRESALQDNTKLLPISENANEISANDAKLFKSQTIQRMVSTRDISLPSSTDTSTSSEPTSNQEXCCHPHAQCSSGKSSXSSLWTQALSPENVPRNYEAISHTYSLMLLFSRAKGSGAEVLVGSFQLAFSLRSVSLQAGFLPPSRRRSLFTLATSMLVFFSKAFNVLALIPVVKQVLTESTVDPFLCLIEDCRLQALDSANESCTKLYGSKEDDELALKSLSNIDMNENQSKETSVPLILDSLEDMSESELSAIRKQLLEEFSADDSCLGSHFTETPSQYPAQNGKLHHKSMEVIPLGFVFEDDTLAEASDSSVEPHLQHPPCNNILDVNRLLDSVLETSQHVGRSSVSTNQDLPFKDVANQCEALLIGKQQKLSACMSVCEKEAGESSVEQSSRQDPQADTFLCTADEQWHPNSCKLPALCPYDRFLATSGC

SEQ ID NO: 365924 - protein, 269 aa, Zea mays
  Clone ID: MRT4577_96887C.1.pep
MDDSVSFNDLGPSKPPSASFYDDMFESYFNRAAEAPEPAPKASSSPSTPPPVFDKPVFDDDPYTADPFDAIPLFGGGGGGEEEDLHGGVRSAAKPERTELEVVGFDEDLFPGLAGSTNFPMEKPAREVERDRQPVGFDDELIPGFDGSMKPAPQMEPETVAFDDDVIPDCSGGTSYPSSAREEPITRQESESISSSKISMSMPEDPFVTLGGTHKSGYSSLGLFSNLLNNIGMPRKEADTTPDNTSGIFQGSDIFTEFKAMPPFSFTSE

SEQ ID NO: 365925 - protein, 395 aa, Zea mays
  Clone ID: MRT4577_96888C.1.pep
MASTKDISLPSSTDASTLSEQTPNQEKDAVTLMLSVRQANLLLSSLWTQALSPENVPRNYEAISHTYSLMLLFSRAKGSGADVLVGSFQLAFSLRSVSLQAGFLPPSRRRSLFTLATSMLVFFSKAFNVPALIPVVKHVLTESTVDPFLCLIEDCRLQALDSAAQSCKLYVSKEDDDQALKSLSSIEMNEHQSKEASVSLILDSLEDLSESELSTIRKQLIEEFSADDICLGSHFTETPSKSAAQNGKLHHKSMEVIPFGFVFEDDTLLEASDSSVEPHLRHLPCNSVLDVDRLLNSVLETSQHVGRMSVSTDQDLPFKDVANQCEALLIGKQQKLSVCMSVCEKEAGESSVEQSSRQDPQADTFLCTADEQWHPNSCKLPALCPYDRFLATSGC

SEQ ID NO: 365926 - protein, 68 aa, Zea mays
  Clone ID: MRT4577_96889C.1.pep
VECKHEVSHPLFISVEEYSHISACFGSPCVVIHRGSSCESYVDEVGNQCIRYGSIGSCWWSVKLWLCI

SEQ ID NO: 365927 - protein, 64 aa, Zea mays
  Clone ID: MRT4577_9688C.1.pep
GCHPPGAQGGMFVFVSGSPPPGPEEPPLKFFRAFPLLPATGSFFVQNSMFPLNFGLKTPQNSFF

SEQ ID NO: 365928 - protein, 49 aa, Zea mays
  Clone ID: MRT4577_96890C.1.pep
GELSMGHLKGKDPFVICIHSICKCVPPIIVCFFFFLLNFFFFFFFFFFR

SEQ ID NO: 365929 - protein, 104 aa, Zea mays
  Clone ID: MRT4577_96891C.1.pep
TTHRRWEHRRTLDRRRVEHAVVVPWHNGGGSGGVGEGFGDLLATTANQCRGQAELHTCHRLENPLHCHLHRSCGRQPGTGEGVSRMEPNLIPDVNNLTGKGVAP

SEQ ID NO: 365930 - protein, 120 aa, Zea mays
  Clone ID: MRT4577_96892C.1.pep
HCSQLPLAGVPSLSPMASAEAVAQVGTYFLRNYYNLLQETPDVFHQFYSEASTMVRVDDLTCNNTASQSCPSAIGKPTACDGTGTVLELTVTHDLPCCEEYFCSLYLYDECSSWKRGDQC

SEQ ID NO: 365931 - protein, 58 aa, Zea mays
  unsure (1)..(58): unsure at all Xaa locations
  Clone ID: MRT4577_96893C.1.pep
KKGIPPPPQKKPDLSKTNPPPFKKKKKKKKKKKKKKKKKKKKKKKKKKQKKKKKKXKV

SEQ ID NO: 365932 - protein, 129 aa, Zea mays
  Clone ID: MRT4577_96894C.1.pep
CRTLYVVSWYLLQIFRVYGAKATNMPHMTHRCSCENTDQCYKMELLYDKSSDSLPSTNCTVLDKVLLSRNTGHELPIKENTNSSRTANFIVINQFCTRVRLHIYQFRSMTYICSHVVIGHNCHSDSHNH

SEQ ID NO: 365933 - protein, 61 aa, Zea mays
  Clone ID: MRT4577_96896C.1.pep
STVDRSAQSVRMADVPLSVGAQVEVHVPVLSPHGNHLRVPQASLRQGRIIRLDAFLLLPSL

SEQ ID NO: 365934 - protein, 155 aa, Zea mays
  unsure (1)..(155): unsure at all Xaa locations
  Clone ID: MRT4577_96898C.1.pep
MGEVEDMYTQDGTVDMKGNPAVKKGTGNWRACPYILANECCERLAYYGMSTNLVNYMKTRLGQVNSVASNNVTNWQGTCYITPLIGAFFADAYMGXRFWTIAIFMIIYIFGLALLTMASSVKGLVPTSCGDXDVCHPTDAQRRVVFGALYLIALG

SEQ ID NO: 365935 - protein, 52 aa, Zea mays
  Clone ID: MRT4577_96899C.1.pep
ETRRREMVCRRRPGPGPGHRRRELQRGRRQRGGKGVGCERLRTRLPTNDAAA

SEQ ID NO: 365936 - protein, 52 aa, Zea mays
  Clone ID: MRT4577_9689C.1.pep
DPRVRVRVEPEHGFHQLNPSPSCSSFTWRSSQVQYQTFQLDINRHNVCAMEV

SEQ ID NO: 365937 - protein, 36 aa, Zea mays
  Clone ID: MRT4577_968C.1.pep
NFFLGPSKKKKKKKKKKKKKKKKKKKKKKKKKKKNT

SEQ ID NO: 365938 - protein, 199 aa, Zea mays
  Clone ID: MRT4577_96900C.1.pep
MGEVEDMYTQDGTVDMKGNPAVKKGTGNWRACPYILANECCERLAYYGMSTNLVNYMKTRLGQVNSVASNNVTNWQGTCYITPLIGAFFADAYMGRFWTIAIFMIIYIFGLALLTMASSVKGLVPTSCGDKDVCHPTDAQAAVVFVALYLIALGTGGIKPCVSSFGADQFDENDEREKKSKSSFFNWFYFSINIGALVA

SEQ ID NO: 365939 - protein, 63 aa, Zea mays
  Clone ID: MRT4577_96901C.1.pep
RAPWRERRCCGSQRRRRLLVSAFRRISSGCCIGAASLHQSSWISPLKSHRSQRADVVAGTDGE

SEQ ID NO: 365940 - protein, 46 aa, Zea mays
  Clone ID: MRT4577_96903C.1.pep
FFFCPCFPPFFRSKGTVHLVKPTNNLQCFICCSVLPPDFYGLKFFF

SEQ ID NO: 365941 - protein, 194 aa, Zea mays
  unsure (1)..(194): unsure at all Xaa locations
  Clone ID: MRT4577_96904C.1.pep
MGEVEDMYTQDGTVDMKGNPAVKKGTGNWRACPYILANECCERLAYYGMSTNLVNYMKTRLGQVNSVASNNVTNWQGTCYITPLIGAFFADAYMGRFWTIAIFMIIYIFGLALLTMASSVKGLVPTSCGDKDVCHPTDAQNGXVCXVALYLIALGTGGIKPCVSSFGADQFDXDDEREKRXKSSFFNGVYFSIT

SEQ ID NO: 365942 - protein, 126 aa, Zea mays
  Clone ID: MRT4577_96905C.1.pep
EWIQPLPLPSHRSSVPPTQLKCGSQSDGLENLSSKPGPAYHSAASQSQGIAPDGQFQDVHRKALETKLSGSLTTTEIADRPVMDVSSTLSSNENGDRAVPPTNGRNEDETESKRRLEKGPCYHPNT

SEQ ID NO: 365943 - protein, 70 aa, Zea mays
  Clone ID: MRT4577_96906C.1.pep
EEYIACSSLNIKTIQICSEIKFWTKRLLVVPVSHNSHVLASEIFLHLDNSSSFNVFIPKVTRKLFFQSQN

SEQ ID NO: 365944 - protein, 87 aa, Zea mays
  Clone ID: MRT4577_96907C.1.pep
MARVYVGSLDPAVTARELEDEFRVFGVLRSVWVARKPPGFAFVDFDDRRDAQDAIKDLDGKNGWRVELSRNASSGRGGRDRSGGSEM

SEQ ID NO: 365945 - protein, 37 aa, Zea mays
  unsure (1)..(37): unsure at all Xaa locations
  Clone ID: MRT4577_96908C.1.pep
QYLPLRXMVEQKCELVADIKKNERCSNKAAAHFNVTT

SEQ ID NO: 365946 - protein, 79 aa, Zea mays
  Clone ID: MRT4577_96909C.1.pep
TRRLKYSVQDKLDHTLLERNLARGYNSVHSSVRYFGDEIMCTLADMVSANFIQITQNKVSVPKSVISVCCFSPDLNLRI

SEQ ID NO: 365947 - protein, 122 aa, Zea mays
  unsure (1)..(122): unsure at all Xaa locations
  Clone ID: MRT4577_9690C.1.pep
KPSXXXEAXXDRGKNXTGXGGEHGKNARRREXANXGSGGGDHGKEXKDREEQAEXQEEHSXXDEDKGKGQXRXXXAXENRXRNGEXXXXXGXTKGAXXQXGGDEAGGRTGSEXRTGXRPTSA

SEQ ID NO: 365948 - protein, 107 aa, Zea mays
  Clone ID: MRT4577_96910C.1.pep
PKSLSFHRRYADRHKSREHYDHSTRGNVRHDPMRRLAHLHGARLPSLPGGPASRRRLLPDLEALVVIARSSSRQDPPSQPPPSLHPTAPTRGRRSSRPTSPGAGRRV

SEQ ID NO: 365949 - protein, 85 aa, Zea mays
  unsure (1)..(85): unsure at all Xaa locations
  Clone ID: MRT4577_96911C.1.pep
MDLSGAGLKAKNVSYELKAVGPTKKSVSRSSRSVLXFLVSLVGRYLKKGRYAHRVCTVAPVYLGVVLEYLSVEVLXLAGNAVCYN

SEQ ID NO: 365950 - protein, 64 aa, Zea mays
  Clone ID: MRT4577_96912C.1.pep
WSYYMREVGEICRVGVGRIRSWLEGRAWGVGCELSKEGVGFVLCGKNFFCTRPFFFFCFYFFLR

SEQ ID NO: 365951 - protein, 111 aa, Zea mays
  Clone ID: MRT4577_96913C.1.pep
DNYIDLRGDRDDPSTARFNDLFCHVVKFAKEGSKSAEIYAVAKDSLSKAFDEVVQSSKNFRGQQNLQSYTMSLKRSIKKFGKGRDSSDKSSKRSAFKHPLMECDDVDDQIY

SEQ ID NO: 365952 - protein, 80 aa, Zea mays
  Clone ID: MRT4577_96914C.1.pep
GHFPSTCLRMISPLVGNPCRLRNRGRRLAPCGSESPRSLPFGCGYGSPGGGGGGSVGGMGPGRGVSRAASTRLFWSWENE

SEQ ID NO: 365953 - protein, 530 aa, Zea mays
  Clone ID: MRT4577_96915C.1.pep
MEVLKKSNTSIEDSDGNDAVPEPVVDLAEHLDVPQSKEVALDKDLRIDGAEKELGANGHSLDRCDSVQEDEDGLSCKEKDLYNCGTKASDEEFSDRLQENHENTQPSNNHNDSVDQSQLPPSSSPTESTDEISSEDEENNDKENMDPSAQNNDVHTLEHLQQAIGGNSRPDDAILKDFLDDEAEEEDDSDNDMTRFKDNEEDDGSDENEVFNDLIAAGYEEKEVDHEKRNELHQKWLQQQDAAETNNVIQRLKFGHREQKESAYEDEDEDEDEDEDEYVADCEEGSQNEDLTPANIVRQNSEKAKQMIAKMFEDDNDTYEHSDDEEIEEHLARQRISKREVDNNTLISPLEDDNSREVFSLIKKLNIAPKPKMRGKQSTSNHEMLMAGRNTIASKSSFLGRTASGSLASSHRSVYRSYVFGRDDSNSSSRSCISTSESNLDLDQTNSSQPKKAKFSSQPKPEGTRATPECNTTSSGVSLFDVLRRTSEQSSQESCSTITESQAVHQFSAFKLSRRFSKVGSKNRQSLDGC

SEQ ID NO: 365954 - protein, 104 aa, Zea mays
  Clone ID: MRT4577_96916C.1.pep
TVQRPCSRHHGPSRTSYYTKHPSCAQMTCQQSSLPLRCTNAPSCSCRVLDHAHRDKALDLVIQVIDELRRMKWALWGNVTRAQIHVDHELGNGHAIGTVTLSIV

SEQ ID NO: 365955 - protein, 46 aa, Zea mays
  Clone ID: MRT4577_96917C.1.pep
YSLFLETIPLLREGESHDRGSPHLIISQLQLPNDDPDMLGDLQMLA

SEQ ID NO: 365956 - protein, 147 aa, Zea mays
  unsure (1)..(147): unsure at all Xaa locations
  Clone ID: MRT4577_96918C.1.pep
KTNRANKVLFFHPKPKKHPFFNLQYKKFWWEAGKRFVKLGLFPKALKTXKRRAFNPLGXKAGIALHKKLAKSWPLPLAAQLVWGGPSLAFPFPGGFRLFVCPPPPCCFFAIQSYPFISPPFLFLGPPHPCRPVGVAQKRFWSPVGAS

SEQ ID NO: 365957 - protein, 83 aa, Zea mays
  Clone ID: MRT4577_96919C.1.pep
NFKVEDSFHQVEDLGPGGLVTNQLIENRLFGPGPGWLAWSTPPHTTIEVLPRKRPATIIALPPFSFLRFCGDSFKWSGPKPLC

SEQ ID NO: 365958 - protein, 114 aa, Zea mays
  Clone ID: MRT4577_9691C.1.pep
MSAMKFCRECNNILYPKEDRDQKVLLFACRNCDHQEVADNNCVYRNVVHHSAGEFTQVLQDVAGDPTLPRTKEVRCAVCGHGEAVFFQATARGEDGMTLFFVCCNPSCGHRWRE

SEQ ID NO: 365959 - protein, 100 aa, Zea mays
  Clone ID: MRT4577_96920C.1.pep
NLTWLKFSLTPINKPSIFLWFCRTAFPCFGPLRKVWLQWYFCFPRVQMAQPVVFFLPFRTPPRNTISPFCLFFFLKLFFFFLGKRCFSWESTMWVRIVAL

SEQ ID NO: 365960 - protein, 189 aa, Zea mays
  Clone ID: MRT4577_96921C.1.pep
GYLEAGRDHFHRHRAPLVDQLSADHSSPVGACRPGLATAAAAAVERGGRGRKNWPRSRGTARKREASSTGTLRARRPCQRSRRRRSCSDHGVGVGDSSSSTRTTTAVKTIRTNQNHYAKHIYRLLSTYCRTKDLCIYICVRPYHHRTGIKLAISLLHDREIARVRVIKYYRCMHDACVCVSIYHVMVCI

SEQ ID NO: 365961 - protein, 145 aa, Zea mays
  Clone ID: MRT4577_96922C.1.pep
RGEGEGEKNWPRSRGTARKREASSTGTLRARRPCQRSRRRRSCSDHGVGGDSSSSTTATTAVKTIRTNQNHYAKHIYRLLSTYCRTKDLCIYMCVHHRRTGIKLAISLLHDREIARVRVIKYYRLLHTIYICMHDACVCVYLYIM

SEQ ID NO: 365962 - protein, 94 aa, Zea mays
  Clone ID: MRT4577_96923C.1.pep
TPNNFPNGVPTLFCFPKPLRSSFGGFAAGQYIFGGKKNTYPLADWGKQKMFPFPGSQNYPFLYFFPPNGSHLILGGEFLFRYPPLGPLLPHVFK

SEQ ID NO: 365963 - protein, 225 aa, Zea mays
  Clone ID: MRT4577_96924C.1.pep
TSSRTRGRTRGRTRGRTRGLTDTAAPLVDQLSADHSPPVGACRPGLATAAAAAVERGGRGRGRKKLAQIERYSTKKRGKRDRGPEGGGPGPKTEGLVRRKLMRLLSLVPFGCRAGPIDDAPSSVDHAAAAAARRRRKRRANRAAQLLGAAAGAPQQWRPSLGDICEEYSSSTDAVKVRKAASWDLARALPRAHGGKQYRYLSICHCAYLSVTVPFVYHCSAPLSV

SEQ ID NO: 365964 - protein, 91 aa, Zea mays
  unsure (1)..(91): unsure at all Xaa locations
  Clone ID: MRT4577_96925C.1.pep
MSTASVFCFLLICDDPDYARHXDETFAANKEAEKEAFEGAERKRKAREEEEARRAREEGERRRRERDRDRGRDRYKDRYKRHRHYDYHDEL

SEQ ID NO: 365965 - protein, 90 aa, Zea mays
  Clone ID: MRT4577_96926C.1.pep
SRIDDTNRGPGIVITLLYLMHTCTHCSTKKPGWQRSGLMNHSLTDAHCRGSNVCHEWTTLQDLLPPVFSESTDLPPLLFQMKELCLQCIK

SEQ ID NO: 365966 - protein, 69 aa, Zea mays
  unsure (1)..(69): unsure at all Xaa locations
  Clone ID: MRT4577_96927C.1.pep
SSPLLCPCRHLSPLLCPCRRLCSSGQASKCSIRPASASYSASQELKMSSSSEGSTCSPLSDYXPSLLXP

SEQ ID NO: 365967 - protein, 158 aa, Zea mays
  Clone ID: MRT4577_96928C.1.pep
MEDLLGSEIGKNDYDWLLTPPGTPRVPALEGAEKTPPTNILPKRTTTRSSSTTRASRDIRQNLGGIRGTSLFPQSIRSAAAKVRPVRASDPGHGISNGDQRYSDNGSSVNGHLSGDSNGVLSRNGGSSTDSPDRGSIGTKETLSELDIYGSSRYEAML

SEQ ID NO: 365968 - protein, 130 aa, Zea mays
  unsure (1)..(130): unsure at all Xaa locations
  Clone ID: MRT4577_96929C.1.pep
TYFEKEVGQHRGPLAHXYAAMPWDTRCTRCPPSIDKLXDRFEKDKSVLIPKVDCDEHQSVCTNYGDSGYPTVQWVPRGSLXPKKYEDQRSVEPLHNLLTAEAGTNAKIAAIPSSVEILTSQSFDSSVLDE

SEQ ID NO: 365969 - protein, 86 aa, Zea mays
  unsure (1)..(86): unsure at all Xaa locations
  Clone ID: MRT4577_9692C.1.pep
VQPTKDPPLRSLPPRHPRNAVNSEAHTLREFAKDSTRLVKDXHKRARKEFPKVTARTAIGFVVMGLGGFFAKLIFIPINNIIVGPG

SEQ ID NO: 365970 - protein, 531 aa, Zea mays
  Clone ID: MRT4577_96930C.1.pep
MEDLLGSEIGENDYDWLLTPPGTPRVPALEGAEKTPPTNILPKRTTTRSSSTTRASRLSISQTENGNSTIPTRPARSNSVSRSSIQSALMNGNNRTSVLNTSISSVTSRPTTPSRRGSTVGTPKHSAPAARPVPARSSTPGYTRPSTPASSRATNVISRPSASLSATSRPGSSSGNVPGISRATSLSSSSVPSMSRSSSRSSTPTRQPAIRSSAPAIGRSPSVGRTSSINSFTTTSRSAASTGRNSAPSSAPSSRPSSPNPRPRAPVRPLDIPDFPNETPPNLRTKLPERPPSAGRSRPGMALGIRSTPNTEPSAASAPVKKISVPAVSRSKFSDASSKTSTLTNGHQNRQADRSNIDSQANRPSRPSTGTTDNGFGRSISRRSLDMAIKHMDIRQNLGGIRGTSLFPQSIRSAAAKVRPARASDPGHGISNGDQRYSDNGSSVNGHLSGDSNGVLSRNGGSSTDSPDRGSIGTKETLSELDIYGSSRYEAMLLREDVRNTNWLHGLDDKPDQSPLFDHRFEPLPEPFSPL

SEQ ID NO: 365971 - protein, 206 aa, Zea mays
  Clone ID: MRT4577_96931C.1.pep
AEQNHWCGDITGVGMQSGEKGPPRVLLRGVAPASCDCSLHGGRPCVGHLTPCAGTRRPCSSAQSRLLLLLSHLSRASVTGLGEMHAVRSSAGTTVASSSVALCGRCAVGQYRERPLNRPIPAVGPGRVGQGVSWAHLELHRGDRGREGVGIVEEFLTGAAGPRIAACHHHHARIFARRDVSSEKQVDTWSLKCPVKNWYHWERRMG

SEQ ID NO: 365972 - protein, 41 aa, Zea mays
  Clone ID: MRT4577_96932C.1.pep
WRPDSCCPLGILCFSGASTELKKKTDPFPNYMYHRKEGRQM

SEQ ID NO: 365973 - protein, 83 aa, Zea mays
  unsure (1)..(83): unsure at all Xaa locations
  Clone ID: MRT4577_96933C.1.pep
DAWASAWATALALLYSAAGAASECTILCXRCNLNVRWPKACNVYGRFCERAMADMILYLMSSLLNLVLLMLNILTIHKSSSYY

SEQ ID NO: 365974 - protein, 105 aa, Zea mays
  Clone ID: MRT4577_96934C.1.pep
MKTTGLLTILFTSMAATAIASPNALPMGVEVVERDGKTIVREVPHALLSRGLEPRCRECVGQGGSCTIGDGSCYAEDPPLYCTWCGDKCGSRCVRQGQTCQQTCV

SEQ ID NO: 365975 - protein, 54 aa, Zea mays
  Clone ID: MRT4577_96935C.1.pep
EQNMVGLRTRHLGRPPSWQVCLVRPVLGPPGPRLGAHTFSVNLRRSIRGRLGTR

SEQ ID NO: 365976 - protein, 37 aa, Zea mays
  Clone ID: MRT4577_96936C.1.pep
STFYSQEIHNLSPKPKLTTACRSPCNVSYMRLQGYSS

SEQ ID NO: 365977 - protein, 77 aa, Zea mays
  unsure (1)..(77): unsure at all Xaa locations
  Clone ID: MRT4577_96937C.1.pep
SIEGLSSLTXLNNTARQXAFQRTPDYVEEARRKMAEAAAHAGHKTAHAGQAIQGRAQEAGTGGGAGAGPSGGGRASS

SEQ ID NO: 365978 - protein, 68 aa, Zea mays
  Clone ID: MRT4577_96938C.1.pep
GGGHLPFRQRYNLEGRTGRAHLQKRQMAKRGCASRRIRWGKPGVSQAQGWKTTARGTKLGDPKKKRIR

SEQ ID NO: 365979 - protein, 83 aa, Zea mays
  Clone ID: MRT4577_96939C.1.pep
SSGNNAEYAGVRFPMCFIFLFSYVSGCFDMFLLSPRSLPFQSVSFYFIRLIQFIVFLFAFNKKFTGEGKQQQAPKNASFAPNS

SEQ ID NO: 365980 - protein, 67 aa, Zea mays
  Clone ID: MRT4577_9693C.1.pep
AVVTTQSTFFFFFFFFFIFFFFFFFFFFFFWTTKKKMGHKSFIYLIYPPRGGANGKKGKGRRGQDRS

SEQ ID NO: 365981 - protein, 43 aa, Zea mays
  Clone ID: MRT4577_96940C.1.pep
FQEKIVSVVPNGLNVFLQPFSISHHRLSPPMDLSHRYLPRPLN

SEQ ID NO: 365982 - protein, 79 aa, Zea mays
  Clone ID: MRT4577_96941C.1.pep
FYSTAASTHGPVLDLAGRANKNNSACAPHALTLISDSWRVWLHSSFLRQNHERRTCTSAACRTNCLSPYQKNTYISTTA

SEQ ID NO: 365983 - protein, 125 aa, Zea mays
  Clone ID: MRT4577_96942C.1.pep
GGPWCHGPLGPKNNKRGSRWGPPWGAPGPLTWKRKGKISWRPRNWNERLKLLCVTASHPGRLGPRAWKLKPRARRQLRRGGPPTWRFKGSFMPPSKARGPPENYAPKVPSGGSVPPPSHGGQGIC

SEQ ID NO: 365984 - protein, 113 aa, Zea mays
  Clone ID: MRT4577_96943C.1.pep
DVAFKFWTCFIYNEILCGVQGRRVSFKNTLIVMTSNVGSTSISKGRQSIGFLKEDTESGSYFAMKSLVMEELKAFFRPELLNRIDEMVVFRPLEKTQVCFLYILLRSCSAGNS

SEQ ID NO: 365985 - protein, 61 aa, Zea mays
  Clone ID: MRT4577_96944C.1.pep
KRATNKIRGFQSNPNTHNQPVGVPSPLGGHLKSPPPAAMYYLWPAPVCVVSFFGVGEVEPY

SEQ ID NO: 365986 - protein, 74 aa, Zea mays
  Clone ID: MRT4577_96945C.1.pep
IRHEARALHSSDTSALGCTQTAHDKQPTRYGLHTTTFSDQVSLKPFQRVDSPTFSFLAWDLNAMFYHGPKFNTI

SEQ ID NO: 365987 - protein, 77 aa, Zea mays
  unsure (1)..(77): unsure at all Xaa locations
  Clone ID: MRT4577_96946C.1.pep
SKRFRYGWQLDRTDEGTKILYSHRTRDRCPHNKVKEDTAHGQRKHPEIQVRDPKTLFFGEKEVAELGXKNPDEYPWG

SEQ ID NO: 365988 - protein, 64 aa, Zea mays
  Clone ID: MRT4577_96947C.1.pep
RNSRIGGPLTEKHDSSKGPRRRLRTSESRSQQPRPGSGNLKQIPFRVTRMIALSAWFPPSLRRG

SEQ ID NO: 365989 - protein, 64 aa, Zea mays
  Clone ID: MRT4577_96948C.1.pep
QVLEEIGVVPSCCHTSLLCSRVILQGIFKARALLRRSCSRSSFEALRYSITCSGIASHTTSQCI

SEQ ID NO: 365990 - protein, 58 aa, Zea mays
  Clone ID: MRT4577_96949C.1.pep
KVCQKVTYLFLPRLVIKRIYVFSGYPRNSFIIPYVLARARTPPLCLGRKHFLEFLDNC

SEQ ID NO: 365991 - protein, 55 aa, Zea mays
  Clone ID: MRT4577_9694C.1.pep
GPIQLGFMWMTFDSQDLGLCNSRVMPLFPHVGCYLADFKNEHVVFVPPPLRPGRF

SEQ ID NO: 365992 - protein, 266 aa, Zea mays
  unsure (1)..(266): unsure at all Xaa locations
  Clone ID: MRT4577_96950C.1.pep
TPSRXSSLDYTPKRKGNNPQLPTSTPXRCPSASASARRAAPASPPSARHRPLRXPPSTSSSPNPHTXSPTPTSSSASTSTPPPPTTWTSSPTSTATSPQPSHPEPSSTCTSRPRPSSAPATSPPSFPTAGPPPRLAASPSRWWRPPLVPARSMPTSRCSASSTLSISRVPXLPRRCPRPPPRCSPPPRRRLRWACIRFLEAVSWSEDKEARVINLARLLPADEAADLLARVSPLVAAGGWSFFRCGRGRQVTLRSDAARPDPLGDP

SEQ ID NO: 365993 - protein, 60 aa, Zea mays
  Clone ID: MRT4577_96951C.1.pep
VILLVNLLEMLGTTVWSICIGGFKLTYKPSMLIDGRLLLQFHIFYPVHFYLSCNVHVCGS

SEQ ID NO: 365994 - protein, 93 aa, Zea mays
  unsure (1)..(93): unsure at all Xaa locations
  Clone ID: MRT4577_96952C.1.pep
HVFSDILYPPLVTCVSGWISGLPTNVHGAVVDMAYNLGCPGVKAFTNMKKARVAKTWASAAAQAADSRWCSQVGSRCTRDXACLYHRSIAHPA

SEQ ID NO: 365995 - protein, 96 aa, Zea mays
  Clone ID: MRT4577_96953C.1.pep
PADAAAAERLVPLTRVESKQSPVLTSADTVCQPGRRDGSWASEVAERSAKRPYRHRDYDYDWREDVMNDEHAGVFFCTNLRCAGYPTRCILVMSGA

SEQ ID NO: 365996 - protein, 88 aa, Zea mays
  Clone ID: MRT4577_96954C.1.pep
IYHVLLLQLQLIVLKEDHLLNFIFIQMLIILVHYIIFNYFKKEKKNNKLENENEIVNSYQSSSNDRFINSSLFIDIDSCIVISSVLDR

SEQ ID NO: 365997 - protein, 80 aa, Zea mays
  Clone ID: MRT4577_96955C.1.pep
WVGSVSGRPGPKRVVAYGMTGIAVHLVSRCPWFCIISCDVPIRSTFGLPVVFCVNNSGFRCLVWEFINPLTKVVPRPLSP

SEQ ID NO: 365998 - protein, 80 aa, Zea mays
  Clone ID: MRT4577_96956C.1.pep
SREHYLYLLNSDDEPDRHGDCAAGAACYPAISVQAPPARIQLPADIDSHRSTFIFRRHCICSFPRRALHQVVREHSYLST

SEQ ID NO: 365999 - protein, 39 aa, Zea mays
  Clone ID: MRT4577_96957C.1.pep
HIQPQLSRDIQSLRNTCILHSCVLVFHTLIRITGPSMSM

SEQ ID NO: 366000 - protein, 52 aa, Zea mays
  unsure (1)..(52): unsure at all Xaa locations
  Clone ID: MRT4577_96958C.1.pep
IKGFPRFLQQXTLWNTERATRGGTLPNISEATLQRSGRYKSQQVNVLFVEDR

SEQ ID NO: 366001 - protein, 164 aa, Zea mays
  Clone ID: MRT4577_96959C.1.pep
TTLSSIHKGSRFQYVPLFLQSREAGPFITEVCTLSQAAHCEGLDRSHIPGTQTKSDTQPNLIWRSCSREAAWGLWGQNLPTLVLHLCFFNTRHKHCVSLTEVYPPDARYHQKMCSQTCHSGNKDNRLANKVQQAEAFQEYTECPGKMYHSSCYGVHPGIHSHSH

SEQ ID NO: 366002 - protein, 213 aa, Zea mays
  Clone ID: MRT4577_9695C.1.pep
MAVVSALAKYKLVFLGNQAVGKTAIITRFMYDKFDDTYQATIGIDFLSKTMYLEDRTVRLQLWDTAGQERFRSLIPSYIRDSSVAVIVYDVTDRQSFLNTSKWIEEVNTQRGGDVLIFLVGNKTDLVDKRKVSTDEGEAKAQEHGAMFMETSAKAGFNVKPLFRKIAGSLPGLDALSSGKQEDMVDINLRPASGSSASGAAAQLEQKSGGCSC

SEQ ID NO: 366003 - protein, 661 aa, Zea mays
  unsure (1)..(661): unsure at all Xaa locations
  Clone ID: MRT4577_96960C.1.pep
MTDWVYMPWVTPSANPVRFVVRSPPPSCCQSRLGNRIVRESSMKGLLLLLLWAWAAATWVSVSAVTRLGRGGAGEQPLSRIAVERVVLAVNDAAYVKASPLVLGHKGENSEWADVEFFHPNPSDDDWIGVFSPANFSDAICEAENTGTPVLCTAPIKYQFANFENDGYNKTGKGYLKLQLINQREDFSFALFSGGLSKPKLISVSNKVAFANPKAPVYPRLAQGKSWNEMTVTWTSGYDITEAVPFVEWGEKGGRRLLAPAGTLTFDRNSMXACGSPARTVGWRHPGYIHTSFLKDLWPDSPYTYRLGHRLMNGTRVWSKSYSFKASPYPGQDSLQRVVIFGDMGKAEADGSNEFSDFQPGSLNTTYQIIRDIEDIDMVVHIGDICYANGYLSQWDQFTAQIEPIASTVPYMVGSGNHERDWPVTGSFYGNLDSGGECGVPAQTVFYTPAENRAKFWYATDYGMFRFCVAHTEEDWRPGTEQYRFIERCLSSVDRQKQPWLVFLAHRVLGYSSCAYYESEGTFEEPMGREALQELWQKYKVDLAFYGHVHSYERTCPVYQSQCVVDASDHYSGPFQATTHVVVGGAGASLSEFAASKIQWSHFTDFDHGFVKLTAFNHSSLLFEYKKSRDGNVYDRFTISRDYRDVLACSVDNCPRTTLAS

SEQ ID NO: 366004 - protein, 99 aa, Zea mays
  Clone ID: MRT4577_96961C.1.pep
MKGRLLLLLLWAWAAATWVSVSAVTRLGRGGAGEQPLSRIAVERVVLAVNDAAYVKASPLVLGHKGENSEWADVEFFHPNPSDDDWIGVFSPADFPDAT

SEQ ID NO: 366005 - protein, 274 aa, Zea mays
  unsure (1)..(274): unsure at all Xaa locations
  Clone ID: MRT4577_96962C.1.pep
PRGRPGQYLLANFENDGYNKTGKGYLKLQLINQREDFSFALFSGGLSKPKLISVSNKVAFANPKAPVYPRLAQGKSWNEVSLLAIRQKDRRSSILLXSTLYQNGRRSHCGDNLTVDDXVTNLRMATILLLFFFXMTVTWTSGYDITEAVPFVEWGEKGGRRLLAPAGTLTFDRTSMCGXATILPNSLGMNKKKKEAFEXSLLTLHVMYHQSFHPNLQTQXPARTVGWRHPGYIHTSFLKDLWPDSPYTYRLGHRLMNGTRVWSKSYSFKASPYP

SEQ ID NO: 366006 - protein, 135 aa, Zea mays
  Clone ID: MRT4577_96963C.1.pep
MFSATRALRQAAVHTERTPLIKFLGPRTIPSNLDHTPKPHPASGAEKLPESWSGYGNGDAAASHKNFSSYRDHVQQHGPLQKSGFGGTSAASLGSVNAPKGVAFDLSEFPARFHRARLNAAEIEAIESGGAALFG

SEQ ID NO: 366007 - protein, 186 aa, Zea mays
  unsure (1)..(186): unsure at all Xaa locations
  Clone ID: MRT4577_96964C.1.pep
NVKETLRDRQTVLLSPWPPPSPGAAAATATDAATRRPPPRLRRPPPQPRLRGGGGSRSRSRSTRPPPPSRRRRVRVRRCSSSRAPRTTTTPRPSSSPRGGRCRPSGRTRRSGCGSRRRCRPRVPTTTSTATRGPPSXAAERRARTPRRRRRRWRREERGGGEEVGGRAPGRPLARAVRGAGSGGAP

SEQ ID NO: 366008 - protein, 119 aa, Zea mays
  unsure (1)..(119): unsure at all Xaa locations
  Clone ID: MRT4577_96965C.1.pep
NRLNLRQPKEVLQLTPFGHLEGQXIWCRQLPQHVTADLGWYXKKHWXMPLNTTXASVNSAAYLQQKLPFTQVGVDYPHEFVTFNQVVVLXNSAAYLQPXQLLPSKHLTDVSPDAFLTQQ

SEQ ID NO: 366009 - protein, 67 aa, Zea mays
  Clone ID: MRT4577_96966C.1.pep
GSRPPVVLLNQVCRRIVRTQRIVFPVRSNFFNSTVYYGSNLVSIWSGEYMAPEPCRPSGVLRCVDPF

SEQ ID NO: 366010 - protein, 144 aa, Zea mays
  unsure (1)..(144): unsure at all Xaa locations
  Clone ID: MRT4577_96967C.1.pep
RPSAWSRPRPVAALPALASVAAVAGGVFFPXRSXAGWXXRWVGSAWPXAVALAGXWXPPSGXWGXXAAXXGVRPSXGSRFSAASAXXPXFXAPGPPLVLXFSVGPXPXLXCGGGSVXLLGGXVGPPXFGXXXSXXLXFGXXFCG

SEQ ID NO: 366011 - protein, 128 aa, Zea mays
  unsure (1)..(128): unsure at all Xaa locations
  Clone ID: MRT4577_96968C.1.pep
GLARXILVIANGMAACYSLLQGGRCLVSILTGGGVLINRPMAWAIFSCDQASISIIIIIVAVSLYAFSWSLSLCSCMHVCLFVIVEWLVNCSAIASSNKFRGRGSTQPDAKNTCDQNKRCWTALTFKQ

SEQ ID NO: 366012 - protein, 119 aa, Zea mays
  Clone ID: MRT4577_96969C.1.pep
TKPKARIPYFFWTEKKKTNLEARHHNHDHPPGDQPRGTKKKAKKNQGPSAQGSLNQGRGRGQGGGKPPPGARGAMGRAFFDVLLAHRSRVFFRGGAGRVGHGGPRGALARGGLAFASLG

SEQ ID NO: 366013 - protein, 58 aa, Zea mays
  unsure (1)..(58): unsure at all Xaa locations
  Clone ID: MRT4577_96970C.1.pep
MHWWDPRVVDLSLHWNILXSLCLKKKKKKKKKKKKKKKKKKKKKKKKKKKKKKRGGRF

SEQ ID NO: 366014 - protein, 89 aa, Zea mays
  Clone ID: MRT4577_96971C.1.pep
LPGPRVFEPPLPGMVSPPGVFRFRFAGSLCGCLFAPWSGRAGSPGGFAFFGCCPLCPCAWVRLASLWWTWPFLVVFFVWRVCFAFAFFF

SEQ ID NO: 366015 - protein, 127 aa, Zea mays
  unsure (1)..(127): unsure at all Xaa locations
  Clone ID: MRT4577_96972C.1.pep
ATRSLSRRGTDVIPRTXSGTGKTAPCXSGTWHQPEYALTKWQALILDPTHDLLRNSKAMRALVDYLVDTCILXGKSVPEDPRILASGVHAVVGTPTRVLDMVYKPSLRPDNIKMFEWYQADDMLCRG

SEQ ID NO: 366016 - protein, 67 aa, Zea mays
  Clone ID: MRT4577_96973C.1.pep
IDQSYFLVAIWHGKIKVYVHGKVVYVHGKVIDLPLLVQEYSSEVLIRCSLVHLNRALIIYNGCNLVY

SEQ ID NO: 366017 - protein, 69 aa, Zea mays
  Clone ID: MRT4577_96974C.1.pep
MAWENKSEELALVEFREAMERANIEKITDKMLGYQMILKKARTLILKRMLTMSKSDLGSQVMSFLTSQL

SEQ ID NO: 366018 - protein, 85 aa, Zea mays
  unsure (1)..(85): unsure at all Xaa locations
  Clone ID: MRT4577_96975C.1.pep
EVSDVVGDVIDCVAAVETANATHERAEAARQRRRRVLRDGGRAHRRRHQLMGALKDAGARIEESAESESSAWGSGAXKTARGRFL

SEQ ID NO: 366019 - protein, 458 aa, Zea mays
  Clone ID: MRT4577_96976C.1.pep
MLSAAGVRMDAEKETLFEATLSLQDQLKESQVALLVEQEKAEAAVKEADVAKAAWACRICLNAEDALRIVMISVTNHFPSFEALALVQIERTLEDISQKLQLVQRLHTRFLLLPNLQDVTRTIQHPSIHEWSSNGMHRSICFVNKATGYILIAEPPSFLTIYDVIAIIVSHRLGAPMILPIASVFACPDGSEKEVLQILHLGSDFGVSKREGRYDASLGAELLSQDARQVQFLPLRPFYSGEIVAWKTGKEGEKLRYGRVPEDVRPSAGQALYRFPVETAPGEIRMMLSSHVYSFKSVSMADLLSAPSQVNGDVALGGQEKLLATNTGTEVTKDADAGLEYGKVSSTELVQAVHDMLSAAGVRMDAEKETLFEATLSLQDQLKESQVALLVEQEKAEAAVKEADVAKAAWACRICLNAEVNMTIIPCGHVLCNRCSSSVSRCPFCRTQVARMMKIFRP

SEQ ID NO: 366020 - protein, 181 aa, Zea mays
  unsure (1)..(181): unsure at all Xaa locations
  Clone ID: MRT4577_96977C.1.pep
AILQVPLFKGGAALCQRDYLGEARRIGVPTSGDQSSVRERSESKGVPVRETXFSWQYXYYWYXLTNDGXIEHXLRNYXLNLPSEIVPATLKKSARPPGRPFGSGPPGDRPPRGPGRFEGDRPRFGDRDGYRGGPRGAPGDFGGDKGGAPAEFQPSFRSSGGRPGFGRGGGSGFGAGPTSSS

SEQ ID NO: 366021 - protein, 90 aa, Zea mays
  unsure (1)..(90): unsure at all Xaa locations
  Clone ID: MRT4577_96978C.1.pep
QQRRQRGEDTXKXRSXAXXXXAXXASAAXXTSGGXGXQTPPXXXPPPXXXPAGGEXPPQQQPQPXQXPXQPPQXSPGQQXGXRGGGSXGS

SEQ ID NO: 366022 - protein, 261 aa, Zea mays
  unsure (1)..(261): unsure at all Xaa locations
  Clone ID: MRT4577_96979C.1.pep
GRENHEAHASSSSGLSDAELFLHPFDDTTALASQTWEEDLQAILCSIPETRAVVPAASTAMCADGSSTCCSGPDIVAAHHVPRSATATTKDAAFSGSPDTILEEMAENPLDMYFPPLPTTSGQSGMMMMSDTTWAPEHRFREEFAGSCALGCAELRFCSEDVASAGVFHKQPGSATAVVLDAVPVKDLSFQKLQHGMSQLDLATRGRIRDSLYRLANRLEQTHCVARTSXRMGSNXMLRYVWQVRNRTGGAKRRRRPPWIG

SEQ ID NO: 366023 - protein, 93 aa, Zea mays
  Clone ID: MRT4577_9697C.1.pep
SRGLLMEFFHLFLVRHVVPCHITSILHTIARSRCVRFGLLHSFFSVVSSVCAVLYALALCNQELRPRHLPFFSLTLRLVLGKSTSSIKQHLKS

SEQ ID NO: 366024 - protein, 60 aa, Zea mays
  unsure (1)..(60): unsure at all Xaa locations
  Clone ID: MRT4577_96980C.1.pep
CWQLRGGDSSSIISQGNRYIRASIMAVKVIINHYAKEGVWKNXVLDTEDDLYMNSAMFNT

SEQ ID NO: 366025 - protein, 134 aa, Zea mays
  Clone ID: MRT4577_96981C.1.pep
GRFFFFFFGCFFFFFFFFFFFFFFFFKKPQECEIQLFFGRNQGRGTYHRQPGTEHPPYTLFLGEGDVFGDPLNKGGPGYLYKRPGGKPYFLGHGIYNPFGVLLVMVRGLFALFENCPPTTRGRPLLTMFLRACN

SEQ ID NO: 366026 - protein, 85 aa, Zea mays
  Clone ID: MRT4577_96982C.1.pep
QFDFLEITCCQAGHYPSRKGPSEIGSMPFPPGVGERSNGEIGNNENYEVITADSAIDESNVGNRILRNMGWQEGLVSSCPTYFSV

SEQ ID NO: 366027 - protein, 93 aa, Zea mays
  Clone ID: MRT4577_96983C.1.pep
NSQASFPTLPKLYFPFLAPKKNFFPHILITSDLKKPYLPPPNSLSNNSPFLKVNFNQNIPPHSPFQKFPQPQWKMVPPLYPYFNLLLFFFLPL

SEQ ID NO: 366028 - protein, 67 aa, Zea mays
  unsure (1)..(67): unsure at all Xaa locations
  Clone ID: MRT4577_96984C.1.pep
CDTGCTLAGATKHPLITHVDMQVSAQDXWCLYRLASRARHSTPVRQSYSGRFVQLVDQQHGRSRPAR

SEQ ID NO: 366029 - protein, 204 aa, Zea mays
  Clone ID: MRT4577_96985C.1.pep
ASPPPPEESGTTGRAPSSAASPHATPRTQPPETGRGGRQEEDKKVTKPSRPARGVETEITPPSPGIYTATEQPLPFSARRPRLVWRKSKRARRTRRSDERNAAAGSSSSWARNKAGVGEGKGSEQRNATSRRTPPARHTTTPTPLTFFSLSLPPLAGCVSRVSLFLLVSLPVSLSHSTQWRRAARERDEKRGGEEAEREPVLMR

SEQ ID NO: 366030 - protein, 65 aa, Zea mays
  Clone ID: MRT4577_96986C.1.pep
RFPQLTRLFSNLWKNLEIAWKGEKIHSVYFYGISFFSGLNPYYFVFEKSGIDPIHISALAKDSYP

SEQ ID NO: 366031 - protein, 65 aa, Zea mays
  Clone ID: MRT4577_96987C.1.pep
MLKGVCWHSHLGFLYPNGNFAVLLAFKTQKFGGLRPKKKKKKKKKKKKKKKKKKKKKKKKKKKKK

SEQ ID NO: 366032 - protein, 72 aa, Zea mays
  unsure (1)..(72): unsure at all Xaa locations
  Clone ID: MRT4577_96988C.1.pep
TGAFWLAIVTPSAPRSRYFTRTGGQSAVGGPPTTGTVLPGEGQQALPVRRKKPARLEVDIVXXKKXXXKKEK

SEQ ID NO: 366033 - protein, 70 aa, Zea mays
  Clone ID: MRT4577_96989C.1.pep
TPDSSSCTHQKARFLQLRQMGGAFRDGAAPDLCARKSFLSSLSIMRRTIFSRRTTACLRVYKAPSSQGSL

SEQ ID NO: 366034 - protein, 221 aa, Zea mays
  Clone ID: MRT4577_9698C.1.pep
MVFFKARRMDPELVLPARPTPAETKALSDLDDQRTLRYYETVIAFFRSRRGYSSHRRRPDDPAKAIKAALAEALVYYYPIAGRLREAAGGKLVVDCTAQGVVFVEADADVRLEELGRPLLPPYPCVEELLCDAGETRAVIGKPLVLMQVTRLKCGGFVIGFHMCHSIADGFGMVQFFRCVAELARGEKVPTLLPVWRRELLTRHRSNTTANHTATVRSESD

SEQ ID NO: 366035 - protein, 51 aa, Zea mays
  Clone ID: MRT4577_96990C.1.pep
KLFSTSNNLLFSAAQPRTRAWRISLVATTTQARPTARLKGTPSGIIAQRLS

SEQ ID NO: 366036 - protein, 149 aa, Zea mays
  Clone ID: MRT4577_96991C.1.pep
LRRVLNLRTYSWCGLASEPELGPFTFGVPGFLCRVVVTRRDLGGGAKDGKLPPNPNLPYREDCWSEGETAALVDAWGSRYLDLNRGSLRRPQWQEVADAVNSRPGASARRQTTRGSGGDARGGRVHLMDGPDKHLRPQPRQDRRRSHRS

SEQ ID NO: 366037 - protein, 55 aa, Zea mays
  unsure (1)..(55): unsure at all Xaa locations
  Clone ID: MRT4577_96992C.1.pep
MSKSVALHTASGLXGRSTTCXLKSTLDEYDKYHGYYPDKDESSKSNYTHILNKYY

SEQ ID NO: 366038 - protein, 85 aa, Zea mays
  unsure (1)..(85): unsure at all Xaa locations
  Clone ID: MRT4577_96993C.1.pep
IYLHSPPSMWCHTVGAPHLTANPPFNGRTXHVQVDFHFVRDPVARKAMEVRIISSKAQLADVMTTPLSKAPFVKNCSNLHIGTLL

SEQ ID NO: 366039 - protein, 508 aa, Zea mays
  Clone ID: MRT4577_96994C.1.pep
MAAFAVPSLSSRILLASPHSPPTLLRLRRAGGRSLELSSRRGGSARLRVVRRAVTEEDSGAARGDEEVEEDPEEPVAGRDLVTLAACLVGLLTGVSIVLFNLSIDVYSFGIVMWEFLTGEEPYSGGIVNDSLRPQIPSWCDPEWKGLMESCWSSDPAERPSFTDISQRLRKMAAAMNVNIAVDDPTPSDNLSSADFMGENLCHGDSKACFRYEILESIYQHLRKVLLGRFLIVLDNLWDSVHLAKLQGELGSNVSILVTSRREIQLNMPRSTLFHLDPLSERFSLDLVKEVASSYFPAGDIPETAMEEIVKMCGGVPLALKSVASQLRPERSVKELLSLIRAISPPKSDYGTTDIQDRVLASLKLTYHLMSPSLKLCFAYCAIFAKGYEIDREGLCHQWIALGLTEKMYAEDRVRDLLIMSFLRDPEPPAITRSSSGGSSKLKMHDLVHDLAMLVADDELLVINQECVVFKSDSPRYAMVFACKLENLHKNKLLARVKGSSYKKILMD

SEQ ID NO: 366040 - protein, 138 aa, Zea mays
  Clone ID: MRT4577_96995C.1.pep
GRAVRSSPLLVPSTAIADTPPPQPPIPSIVAAPRRDYWCPALSPVPYAAIVTYAVVVPCIANAQAMFFDSDEAEYHTTPIRSPYDRVNMGFFSDEVALSLHKEQFIPSPRSSRVDGLDLNSSGVEFQNIASFQDLRQS

SEQ ID NO: 366041 - protein, 177 aa, Zea mays
  Clone ID: MRT4577_96996C.1.pep
AGPTELQRMGLGLVVGALAMTTAGTVEHFRKARATAAMSSDLHIMWQVPQYALIGVSEVMMYVGQLEFFNGQMPDGLKSFGSALCMMSMSLGNYFSDIIVSAVTRLTTTRGRSGWIPADLNEGHLDKFYFLLAVLAVADFAVYLVCASRYGSGKVDGRSSDDEEEGAAGQVTSPAYA

SEQ ID NO: 366042 - protein, 42 aa, Zea mays
  Clone ID: MRT4577_96997C.1.pep
MPKGAKKRAKLKKQQQQGHPDDGGNTNASSGNGNGSDNNNNA

SEQ ID NO: 366043 - protein, 93 aa, Zea mays
  unsure (1)..(93): unsure at all Xaa locations
  Clone ID: MRT4577_96998C.1.pep
MVIPPPARAARVTRFLKPYLLRMHFSXQEKLLRPNMESTRDVAAAAKIGKLLGERLLLKGIPAVSIHMKREQKYHGKVKAVIDSVREAGVKLL

SEQ ID NO: 366044 - protein, 96 aa, Zea mays
  Clone ID: MRT4577_96999C.1.pep
SLLILLGLCASSNTATIFHKCSHAPISYLFPPYLSPAAICVCENPIPHPYTIQHAISVGILHLSPLFLQHSSTLLHHSPLAHLSALNIRAQQLPPP

SEQ ID NO: 366045 - protein, 168 aa, Zea mays
  unsure (1)..(168): unsure at all Xaa locations
  Clone ID: MRT4577_9699C.1.pep
SQTHRKEIIERLDVMTGELLDEFVKEVGKLPSRIIFFRDGVSETLFYKVLTEELQAVRLACSRHPGYKPAITFVVVQKRQHTRLFHREKNGGGGGGGGGGSTHYADQNVPPGXVVDTVITHPREFDFYLCSHWGTKGTTRPTHYRVLWDENGFXSDEMXQLIHXLCYT

SEQ ID NO: 366046 - protein, 65 aa, Zea mays
  Clone ID: MRT4577_969C.1.pep
PRTKARNSARGERPLFYMATTALLPGGILEMQGRKNPSPKTAGRITVRVPPARAQQEQHVKEEEA

SEQ ID NO: 366047 - protein, 37 aa, Zea mays
  Clone ID: MRT4577_96C.1.pep
RLILQDIDANGTYTIELKDSHEEDICEVVLVESPRKD

SEQ ID NO: 366048 - protein, 96 aa, Zea mays
  Clone ID: MRT4577_97000C.1.pep
VHIDVGGHMYTSSLATLTKYPESRIGRLFDGTEPIVLDSLKQHYFIDRDGQMFRYILNFLRTSKLLIPDDFKDYTLLYEEAKYVQLQPMLLEMERW

SEQ ID NO: 366049 - protein, 114 aa, Zea mays
  Clone ID: MRT4577_97001C.1.pep
MVIPPPARAARVTRFLKPYLLRMHFSNKYVSAQVVHTPTATVACSASSQEKLLRPNMESTRDVAAAAKIGKLLGERLLLKGIPAVSIHMKREQKYHGKVKAVIDSVREAGVKLL

SEQ ID NO: 366050 - protein, 114 aa, Zea mays; identical to SEQ ID NO: 366049
  Clone ID: MRT4577_97002C.1.pep

SEQ ID NO: 366051 - protein, 66 aa, Zea mays
  Clone ID: MRT4577_97003C.1.pep
SRCTYAYAYSYSHSYTVSLPRSVAFLGAVLIARSLRTKNTRFSHRIFRLPKHRTQFVPYPNSLTNP

SEQ ID NO: 366052 - protein, 75 aa, Zea mays
  Clone ID: MRT4577_97004C.1.pep
AGNGAGSKRTRRRRCSPWRLPRQSIGVMHILTKAVFNEGTSTTVFVFYRHAVAAVLLLPFSFLERWKHMSPSGNL

SEQ ID NO: 366053 - protein, 81 aa, Zea mays
  Clone ID: MRT4577_97005C.1.pep
QIPQMGRGDYLWLVPFFKFGQNSGLGGEPPGKLAGPTWWGGLLGLQNRFDYYKKQWGLLVQNGKPFGVKDLVLVASTMGKI

SEQ ID NO: 366054 - protein, 47 aa, Zea mays
  Clone ID: MRT4577_97006C.1.pep
GEWGTQAEFRVTESWVSGECQKTKRLLSQALCSVPVSDRGLSSRELS

SEQ ID NO: 366055 - protein, 74 aa, Zea mays
  Clone ID: MRT4577_97007C.1.pep
CPRARASILYSARPLFFFFFFFCEELWGHLYILWDNPITGKKIPHSKGHWSVPCPCMQFTLQQNGRINLKTQAN

SEQ ID NO: 366056 - protein, 269 aa, Zea mays
  Clone ID: MRT4577_97008C.1.pep
MASERGDGVREGREQRQSSQRPERHGGSERESKEEEEKKKMEQEEACSSSLRQCRICHDEEDERRSAMESPCACSGSLKYAHRGCVQRWCDEKGSAVCEICLQNFEPGYTVPPKKTQPADVAVTIRDSVGVPRPQHEPEEEEEQELVDVALIGASDPEYAECARAAGRSASWCRSVAVTFTVVLLLRHLVTVVTVGAANQFAFGLLTVYLLRASGILLPFYLVMRLISVIQQGQRQYRLRLLQEQRRHALRSGRLHGQEQQQQHVILVR

SEQ ID NO: 366057 - protein, 130 aa, Zea mays
  Clone ID: MRT4577_97009C.1.pep
MADHHRDRGVLGGGGAFGDRSGHGGYGGDHHEQHQQKQPAMMCALKAATAATAAGSLLVLSGLILAGTVIALTVATPVLVIFSPVLVPAAIALAFLSAGFVTSGGMGVAALTVFSWMYKYLTAQHPPGRR

SEQ ID NO: 366058 - protein, 60 aa, Zea mays
  unsure (1)..(60): unsure at all Xaa locations
  Clone ID: MRT4577_9700C.1.pep
DPASAPLLSPAQLPTASQPQPXRHFYEHGLRPLYEASLLSYINATPALASLLCCFCYLDS

SEQ ID NO: 366059 - protein, 283 aa, Zea mays
  unsure (1)..(283): unsure at all Xaa locations
  Clone ID: MRT4577_97010C.1.pep
LGTSSRPGREGREREGWCEGGKGAKAKQPTTRETRRLRERERERFGNRESSEEEEXMEQEEACTSSLRQCRICHDEEDERRSAMESPCACSGSLKYAHRGCVQRWCDEKGSAVCEICLQNFEPGYTVPPKKTQPADVAVTIRDSVGVPRPQHEPEEEEQEQVDAALIGGSDPEYAECARAAGRSASWCRSVAVTFTVVLLLRHLVTVVTVGAANQFAFGLLTVYLLRASGILLPFYLVMRLISVIQQGQRQYRLRLLQEQRRHALRSARLHGQEQEQHVILVR

SEQ ID NO: 366060 - protein, 112 aa, Zea mays
  unsure (1)..(112): unsure at all Xaa locations
  Clone ID: MRT4577_97011C.1.pep
VSSIYIFVNRAQHQGMKHVDXLHFVRESIAVREVRVHHVXTSSQIADIFTKGLPSSLFSEFRSILNGCCSKTFNYGGVMGIEHSPCKSDICNTQLTQQIRVLFPLTILNFRK

SEQ ID NO: 366061 - protein, 84 aa, Zea mays
  unsure (1)..(84): unsure at all Xaa locations
  Clone ID: MRT4577_97012C.1.pep
RTIDLWRRRENVRESSQRTYXTHLKAPXXADLRSEFFTSSQRHGGLWGVRRTRTQVLASPRPDXAKQASWGXLMDGRDTDRARR

SEQ ID NO: 366062 - protein, 59 aa, Zea mays
  Clone ID: MRT4577_97013C.1.pep
MVMAAVGVGGAVAFLLPQRRLGAFSLERRSVVVARGGARVVRGRCVRDGDLGGVVDLFR

SEQ ID NO: 366063 - protein, 116 aa, Zea mays
  Clone ID: MRT4577_97014C.1.pep
MTSEAQSVSAIHEAREGEGSKSRKRKQSHVGAALEDYVEFKKSQTNKALDALKELSMRKCMEEMEAIGGFTEEEKSYAVEVFESGINREAFMSTMNHNVQRMWLKRKIRVLSGSNI

SEQ ID NO: 366064 - protein, 80 aa, Zea mays
  Clone ID: MRT4577_97015C.1.pep
SPWKTYRTCGQVRKPYKCRSTEAASSRMTIKMKERMLWQSDSRTLIKMYTDTVHSWLHFAVMAMNMDVGVPLKFCITVLG

SEQ ID NO: 366065 - protein, 93 aa, Zea mays
  unsure (1)..(93): unsure at all Xaa locations
  Clone ID: MRT4577_97016C.1.pep
KLKALLGRRILKGDAPNXTLLQTAMDPSNLLAHEAASVLVQIHDAEAIPALVAILKNLSLHPYVLHDASXSLSYYSLXNNIPVLDEILTTDPS

SEQ ID NO: 366066 - protein, 92 aa, Zea mays
  Clone ID: MRT4577_97017C.1.pep
PFQQHGWMSSVLPHDLAPKEKIYTGLYLADSRFSVYYCNNSSKRMLIKDQGRSTSTSSYQQQQQQQPECVHRRRCTCPGGRSIFFFFFFFLL

SEQ ID NO: 366067 - protein, 152 aa, Zea mays
  unsure (1)..(152): unsure at all Xaa locations
  Clone ID: MRT4577_97018C.1.pep
KDVADQVNQSTGLNKLDVRFPPGXIIYEGVRARNIXSDXSFYERRLATRXNYITLILXAPXMSVSGGINVTAMHTTLWAYAYALQXAPTXMIEWKTCGGPRCWSXKTDAAMMERDKLLSXNXDEMIQHARLXETHKDVADYFKLTIDDEGFS

SEQ ID NO: 366068 - protein, 72 aa, Zea mays
  Clone ID: MRT4577_97019C.1.pep
EGSVMLQSQFPAKIRWHSTGHESIVPPKNTGGVLNTEHHQWNDGYSGNALMHRTAMRFQPEQHIYWLMSTPN

SEQ ID NO: 366069 - protein, 59 aa, Zea mays
  Clone ID: MRT4577_9701C.1.pep
CPLLMFITNNELGQHGLEENVMKIDNLTSKLALMWDVDSGSCIRRALSGDCSSLTQYFV

SEQ ID NO: 366070 - protein, 48 aa, Zea mays
  Clone ID: MRT4577_97020C.1.pep
KGHVCGPLGLYKTHPSFNIASHPQKHTCVCERLFLFDGGLPRLICPML

SEQ ID NO: 366071 - protein, 61 aa, Zea mays
  Clone ID: MRT4577_97021C.1.pep
VPVAQLPHQPIWGFRCHSALFMIHNFWKISFILPPLLLVSPHPVNVCRLTAFGHTYIIRVV

SEQ ID NO: 366072 - protein, 112 aa, Zea mays
  Clone ID: MRT4577_97022C.1.pep
VEQDGRRIHGVVNKTQAFSNVFVGCSLIDMYMRCGKVDEARRVFDAMPEHNLVTWKVMITGFTQNGRSEEALKYMFLMQQEGYVVDEFVLSTVLSSCGDFQLKSDRISFIVQ

SEQ ID NO: 366073 - protein, 41 aa, Zea mays
  Clone ID: MRT4577_97023C.1.pep
PPTIIKIITEFFTKEPRQTMNATECVAQRCALQYAILSPTF

SEQ ID NO: 366074 - protein, 81 aa, Zea mays
  Clone ID: MRT4577_97024C.1.pep
PRDRPSLYGDGAIVAVCVADNGFDRCDPLTHSWGPISGEGEGPTAYGTSHRRAHYPVEAPRPSTTISSLPPGNAITAYPAQ

SEQ ID NO: 366075 - protein, 241 aa, Zea mays
  unsure (1)..(241): unsure at all Xaa locations
  Clone ID: MRT4577_97025C.1.pep
MEARYEALRRATEEVAAVDAHAHNLVEHGSAFPFLRCFSEAEGDALALAPHSLSFKRSLRDIAALYNCEALLEKVEKFRSAEGLKSIGSKCFQAANLSVILIDDGIAFDKMLDLESHKAFAPVVGRILRIERLAETIINAESFSGSRWTLDSFTESYIAKLNSVSNQIVALKSIAAYRSGLEINPNVSKTDAEDGLRKELTGPRPFRITNKNLIDYLFTCSLGIAVSLSLPXXIHTGLEIR

SEQ ID NO: 366076 - protein, 136 aa, Zea mays
  Clone ID: MRT4577_97026C.1.pep
SSRCFDGCCLCYGLLPLTYGHGYEHGLPLAHGLGHGYGHGMSHGYGHGLGHNLGHGYGHGLGHGLGHGYGHGLSHGYGHGAYLAPAYAKIAVAPAVSGYASSVLHAVPAKVAIAPVIAHGHHGLHGLHGLSGAYHK

SEQ ID NO: 366077 - protein, 91 aa, Zea mays
  Clone ID: MRT4577_97027C.1.pep
GFFLCGFFLLFYKIFLIKQEAYSTICIVLHFFLYLTTFVWAGGNKNIYRKPTRFISLKETHRKKKEKEYRSGLSCLLLGMALMHWWRYRDH

SEQ ID NO: 366078 - protein, 438 aa, Zea mays
  Clone ID: MRT4577_97028C.1.pep
MPVAASAIYFLNLRGDVLINRLYRDDVGGNMVDAFRMHIMQTKELGTCPVRQIGGCSFLYMRISNVYIVIVVSSNANVACAFKFVVEAVALFKSYFGGAFDEDAIRNNFVLIYELLDEIMDFGYPQNLSPEILKLYITQEGVRSPFSSKPSEKPVPNATLQVTGAVGWRREGLVYKKNEVFLDIVESVNLLMSSKGSVLRCDVTGKILMKCFLSGMPDLKLGLNDKIGLEKEAQLKSRPAKSGKTIELDDVTFHQCVNLTRFNSEKTVSFVPPDGEFELMKYRITEGVNLPFRVLPTIKELGRTRMEINVKVKSVFGAKMFALGVVVKVPVPKQTAKTSFQTTSGKAKYNASIDSLVWKIRKFPGQTEATMSAEVELISTMGEKKSWNRPPIQMEFQVPMFTASGLRVRFLKVWEKSGYNTVEWVRYITRAGSYEIRC

SEQ ID NO: 366079 - protein, 90 aa, Zea mays
  Clone ID: MRT4577_97029C.1.pep
STPWKKRMAPFCSAGKTGSLYLLLLGPASNQKPGSPRPLFQKNREGWIMNSRGCFPQKRTPFFGHVHNAGPLVFLKGRPKKRPFPFDCSC

SEQ ID NO: 366080 - protein, 170 aa, Zea mays
  unsure (1)..(170): unsure at all Xaa locations
  Clone ID: MRT4577_9702C.1.pep
GVQADGHMPGDETLAGGDDAFNAFFSETGAEKHIPRAVFVRLDPTVIHEVRTGTYRQLFHPEHLMSVKEDAADNFACGLYTMGREISDLGLDLIRKLADDCTGLQGFLVFNAVGGRTDSGLGCILLERLSGDYWXKSKLGFTVYPSPQTSTSLVEPYNSVLCTHSVLEHT

SEQ ID NO: 366081 - protein, 95 aa, Zea mays
  unsure (1)..(95): unsure at all Xaa locations
  Clone ID: MRT4577_97030C.1.pep
PPPPPPGRPPXYKAPGPPGARQRGGPAPPPXKGGGAPXGPPPRPPRPSGSYAGGRRTRPPLARGNPLCPRKGQTGENTPTPPPQLYIYSHVWSLD

SEQ ID NO: 366082 - protein, 145 aa, Zea mays
  unsure (1)..(145): unsure at all Xaa locations
  Clone ID: MRT4577_97031C.1.pep
AGSGQVLAPARLXGLVLLSLFLGGVERTATESAPPDGVSLTVAMSDQLWRMALPVGASMDHPLANPFGPGSLGLEPVALPPVLVEAPGVDVLRDRVLLYAARLREMGKDVELAEFPGEQHGFSVLRWGQANEELIRILKQFLHRK

SEQ ID NO: 366083 - protein, 249 aa, Zea mays
  unsure (1)..(249): unsure at all Xaa locations
  Clone ID: MRT4577_97032C.1.pep
GHWTAPCRGQASNTWRAPSSAARSPXTAAGTHATPRVAAAFASTSSSSSVVVPLRSPLDHRLLRHLRSEITYLAERRPPHVPPSSFKSFAVEDRPGEQWVRLRASAGGGGEEVKVEATMFDGAAEPVPDDAPLFRRVESLERGPRLHLSLIVEVARGDRVLGFVCSAWPDDLAVRHVLTLAAGGGSSGGRRGGRDFEKLGGEEREAVTKFLKEREVDAELAGFLHDYMANKEKMELLRWLKTVESFLNK

SEQ ID NO: 366084 - protein, 68 aa, Zea mays
  Clone ID: MRT4577_97033C.1.pep
LARTIAHKPIRADPRGKPTISLDNPWLPSFGAESFVYFGSSRSDPPPLSPRRAFGSFRRNSFFPTPCP

SEQ ID NO: 366085 - protein, 64 aa, Zea mays
  Clone ID: MRT4577_97034C.1.pep
LVLGLEELEAQSGSTGITTSNPGKLEVPDSKEKKKVKVAKTIKSVESLQANNSSFNDHISSSFI

SEQ ID NO: 366086 - protein, 168 aa, Zea mays
  Clone ID: MRT4577_97036C.1.pep
MRERKIPVLVGITILFVVHVSGFYWCYKNGDLIRPLMMLPPKEIPPFWHAIFIILVNDTMVRQTAMVVKCLLLMYYKNSRGRSYRRQGQMLTIVEYFLLLYRALLPTPVWYRFFLNKEYGSLFSSLTTGLYLTFKLTSVVEKIGKGWCVAAKERTSCLCARKKDAKDL

SEQ ID NO: 366087 - protein, 212 aa, Zea mays
  unsure (1)..(212): unsure at all Xaa locations
  Clone ID: MRT4577_97037C.1.pep
IGYLEAGRAAQTAETPPTPPTHRHRHRHLGSSSGSSTLATPQGSDHIDRHPDRPCSSDAYHHQLSKPARPWRCRRLRKRQALSRASCCATCRPAWWPPPSTAQLQSSVCRRAAXSGRRGPGGVSPPAAPSRSVTERAPRHPEAGERRASPPRSSNDGDDSKRGYAAHERRDGVGGDHAHGDARTRPXWSPGTRWWRQNAWRTGGGESARGLA

SEQ ID NO: 366088 - protein, 197 aa, Zea mays
  Clone ID: MRT4577_97038C.1.pep
MALSPSAQATSPLARQLLRHVSSGLVAAAFHRPAPAISLPSAPRGADDVALAASHHQRLWPAPSPKGRPGAPRQGSGGQVHHAAPAMATIASVVTPPTNALTAATTHVVTRGPARPGLPAQGGGGKTHGAPAAAKARAVMRGPAPPARPKEGSGGKVHVVSPAAMSSASVLMRGPAPPGHPAEGAGGRGGSIHAIAS

SEQ ID NO: 366089 - protein, 63 aa, Zea mays
  Clone ID: MRT4577_97039C.1.pep
YDAQERVRIAHLVEQGAANPSVSRSNLVPGPEKMDLLNGSCCTSFAMDWGNFLLKIYLVFSLE

SEQ ID NO: 366090 - protein, 55 aa, Zea mays
  Clone ID: MRT4577_9703C.1.pep
MESTGARTARMMPQLETGPQKWVVLGPTGLFRNALNAADMAGGEPGDEEEGWVRY

SEQ ID NO: 366091 - protein, 95 aa, Zea mays
  Clone ID: MRT4577_97040C.1.pep
ARRGAEQRGEALWPQQLVVGETPPPPRGDAHPPAKGQHSCVSLRTSTPLRTPPAGEHGWRTKQKPQRAKYPCTKIYRKTVWTYRGSEMLKTPRVN

SEQ ID NO: 366092 - protein, 104 aa, Zea mays
  unsure (1)..(104): unsure at all Xaa locations
  Clone ID: MRT4577_97041C.1.pep
ASKTCDISKVGATRDRXTDSTQAIHDTWTLARCARGETSMLIPKGHYLXGTLYSRGPGMGDIIIQLDGILLGSNDLTKYTVSWTQVSHGNHIVIHGSGTLDGQG

SEQ ID NO: 366093 - protein, 75 aa, Zea mays
  Clone ID: MRT4577_97042C.1.pep
HCELTSHLLQRGCEFSKAIRILSGYVVGACTESPAGMSSESQKRRSAIKYKSFWKSSELLMGILVYEPAQLLAIA

SEQ ID NO: 366094 - protein, 54 aa, Zea mays
  Clone ID: MRT4577_97043C.1.pep
NSAHQPQEVALSIAPYYCYRCGNLACMLELDRLLRPSLIQNGAIRNKETAISSS

SEQ ID NO: 366095 - protein, 72 aa, Zea mays
  unsure (1)..(72): unsure at all Xaa locations
  Clone ID: MRT4577_97044C.1.pep
GDPFCLPPFIQVAAVSLAAFLAHRPLFPFSLHIAPIVGTLPHLFQWPPFVQRALPTLAVFFFGPXIKGGALF

SEQ ID NO: 366096 - protein, 78 aa, Zea mays
  unsure (1)..(78): unsure at all Xaa locations
  Clone ID: MRT4577_97045C.1.pep
HDSTTPSVSFYLSLDSVKLHYXATNKKNRRESLTRYTPRSMERESNDGRPLLFSRVLGFTPGVTTASPTELWLLNLKL

SEQ ID NO: 366097 - protein, 70 aa, Zea mays
  unsure (1)..(70): unsure at all Xaa locations
  Clone ID: MRT4577_97046C.1.pep
NHVFFPLPFIFFSTLFPLLTQFSLFFLFFPITIFPPFKIQSSHPSFYNSINTPFGFSFIPPHLXLFKFSI

SEQ ID NO: 366098 - protein, 89 aa, Zea mays
  Clone ID: MRT4577_97047C.1.pep
MASTMEVSIHDPVVTERRRGRTPRTGTRMGELDHYWGGRHRRDPGAPHSDPHRVISTWTDAFDLGEAACVHHHVSRHRIPPPAPTGDLA

SEQ ID NO: 366099 - protein, 124 aa, Zea mays
  unsure (1)..(124): unsure at all Xaa locations
  Clone ID: MRT4577_97048C.1.pep
DDGTKSGAGGGEXAAKDYTHPAPAPRNDAXAEQRARAVDRAATGERRATPGRGTKTFFFLMAVMEHTKAPELCASSALGRAGVLVIACAFGTVHLXVLVYCNEXISEGHINPAVTFGLLLACMG

SEQ ID NO: 366100 - protein, 69 aa, Zea mays
  Clone ID: MRT4577_97049C.1.pep
SVREALLAGIVFHTVYSGSKSGSLDLGVAYTHKEDRDAIDLMVMPDAHTETVLLEAVNDRRAQLTNLTS

SEQ ID NO: 366101 - protein, 81 aa, Zea mays
  Clone ID: MRT4577_9704C.1.pep
LSRSCPLSLVCCASFSLPVPPPALPVPVAFPFVSPALRPCLRPVPAVFRPVRSPLLPRGVTTAFAFLTLPRASFCFRGLQP

SEQ ID NO: 366102 - protein, 329 aa, Zea mays
  unsure (1)..(329): unsure at all Xaa locations
  Clone ID: MRT4577_97050C.1.pep
MIIVADAGGFLPAXDHSPWDGVTVADFIMPFFLFIVGVSLTLAYKRVPDRVEATRKAVLRALKLFCLGLVLQGGFFHGVHSLTFGVDLTKIRLMGILQRIAIAYLLAAVCEIWLKGDDDVDSGYGLLRRYRYQLFVGLVLSIAYSILLYGMYVPDWEYQIAGPGSSSRSRISVKCGVRGDTRPACNAVGMVDRTILVIDHLYRRPVYVRTKECSIDYPENGPLPPDAPSWCQAPFDPEGLLSFVMAIVTCLIGLQFRHVIIHFEXNEXKHRGRIASWLVPSFSMLALAFVMDFVGMRMNKPLYMMSYTPATAGGAGLLFRGIYVLVGPS

SEQ ID NO: 366103 - protein, 91 aa, Zea mays
  unsure (1)..(91): unsure at all Xaa locations
  Clone ID: MRT4577_97051C.1.pep
YQLGIPGSTHDVRPRVRYDPSTVMFFFRNKHIMIDLGTGNNNKINWALKDKQEFIDIVETVNRGPRKGLVRLMPQKNXSNKFRYQESKQSP

SEQ ID NO: 366104 - protein, 63 aa, Zea mays
  unsure (1)..(63): unsure at all Xaa locations
  Clone ID: MRT4577_97052C.1.pep
PPVGFALLLAXSVVXXVLALSSXAXALLARPALAAALGXRPXPXLPLAXLLCVVLGLVRXVEX

SEQ ID NO: 366105 - protein, 78 aa, Zea mays
  Clone ID: MRT4577_97053C.1.pep
AHAGKEREGCNKTANEAHPRGGRGGGGGGYGGGRRDGGGYGGGGGGYGGGRGGYGGGGGYGGANRGGGYGNNDGNWRN

SEQ ID NO: 366106 - protein, 178 aa, Zea mays
  unsure (1)..(178): unsure at all Xaa locations
  Clone ID: MRT4577_97054C.1.pep
SFFFFFFFFFFFFFFFFFFFFTGPAGRPKGGSPAHGRPAQGDPSPGPSRAKPRPKPAPGGKGNPPTIPNNKKPGSKKKKARGAKGGSQPXKWGGANRPPPRGKTRPPSPRKKXGQPPGRGGGRKGRPPPSPXGHGAPGRAAAGRGISSPKGGGAVTHKTGGQRRKKQENKRHRKGQDP

SEQ ID NO: 366107 - protein, 108 aa, Zea mays
  Clone ID: MRT4577_97055C.1.pep
PRCCLAPTRDKCCLLPGTPAASTVTPSCCRVPGGPRATTHAGGLFRLRKRASCARLWPCRPPWIPGGCFLPRAGAPGTVLCSGNMFEGYLAATVNTPPAVASALPVAQ

SEQ ID NO: 366108 - protein, 72 aa, Zea mays
  Clone ID: MRT4577_97056C.1.pep
GLCSPLWAPWSFLLVVCCVVFRLPVVGCPLRLCCPAGPVCRSRLRPGVVPRERGRVGRPGPSGPVPAGGPPP

SEQ ID NO: 366109 - protein, 117 aa, Zea mays
  Clone ID: MRT4577_97057C.1.pep
MMSSLKLTEVVSKRWGGGGSSSKVTSPSAAACPRGHFAAYTREGRRFFVPIAYLASDTFRELLSMAEEEFGEPGARPIVLPCSASHLEQILDAFRSGGGAKKKKKEKESAGRISKIW

SEQ ID NO: 366110 - protein, 137 aa, Zea mays
  Clone ID: MRT4577_97058C.1.pep
ARNSVREYTYNAIFGSNACCTTIGVAPKDKVGHDNCGIIEGLMTTDHAITDTQKTDEGPPATDWRGGRTVSFNIIHSSTGAAKAVGTVLTELNGKLTGMCFRAPTEDVPAVDITARIENGASYEEIKKASNAASEGP

SEQ ID NO: 366111 - protein, 91 aa, Zea mays
  Clone ID: MRT4577_97059C.1.pep
DSLSLSLSLYVYWNIIAYFTGGGGVPFKFCSVLQIRISNCLLLLAFFNTIELYTIFVHCCNCSCLQLSFSFPLLVRPFFSISLSCPLSAHA

SEQ ID NO: 366112 - protein, 54 aa, Zea mays
  unsure (1)..(54): unsure at all Xaa locations
  Clone ID: MRT4577_9705C.1.pep
XYKKIXXTXFQHQHHFFFIFFIDYSKNFLKSTHFNISIQLIFTLITLFPFLLHQ

SEQ ID NO: 366113 - protein, 95 aa, Zea mays
  Clone ID: MRT4577_97060C.1.pep
KIGEKWDRQGENGQMMSCTCLGNGKGEFKCDPHEATCYDDGKTYHVGEQWQKEYLGAICSCTCFGGQRGWRCDNCRRPRGEPSPEGTTGQSYNQY

SEQ ID NO: 366114 - protein, 45 aa, Zea mays
  Clone ID: MRT4577_97061C.1.pep
HYRRAMTSHARVRKLGIRLERLSCFKFWCSQKANHVTELLFWNPV

SEQ ID NO: 366115 - protein, 80 aa, Zea mays
  unsure (1)..(80): unsure at all Xaa locations
  Clone ID: MRT4577_97062C.1.pep
IMALPNHEPPICGAPARSRACPGARTAPSPHGNRQGSGIRTNILTQRNTSNTWPGLLTGLRRISGAKVTLXLETYNSVEK

SEQ ID NO: 366116 - protein, 91 aa, Zea mays
  Clone ID: MRT4577_97063C.1.pep
STPTAAAPSPPSSRAPPPRPRPAPRPPAAPPPAPGPRPGRPRPQPPPRGPPRDGQGPSPSPFDPPAPPSPPPPLTQQPSVWRRVRSYVKCI

SEQ ID NO: 366117 - protein, 459 aa, Zea mays
  Clone ID: MRT4577_97064C.1.pep
MAPHGDIDLAKAYHHVTVSMREHTEKVMVKLTAPHTGKGDTAPLDIVVVLDISGSMRGTKLEHMKHAMTRFIIEKLGIRGDRLAIITFESKAHKVFDLSSMLPDQVKKAVAVVEGLKAGGDTNIKAGLEAGLDVLKTRRGHSHNASCIFLMSDGHENVDKARTLLDRVGEHSVVTFGFGEKSDEQLLYDIAYHSHAGTYHHVREKEDENQLMKAFAFLAIYRSISMLDLKVTVSAHKEAAGAIIRGVDPCRYRVDGPHGDGSFTVHFGDLAREESRRILVDVQLPQVQHEQKDKPVIHVKYEYSSPKKVKVTNTLDIKMNRVQNPGQAAMNPNVSRELARRAQVEHLRKVMDLANKKNLGAAKDEVERARNALNSITHDTDDAVDSLFNELDNIEEFLETYDIYNKLGRSYLLACISSHERQRYAERGGAAPVDLYLTQRMNKYLDQAHKVHKNPKTKI

SEQ ID NO: 366118 - protein, 66 aa, Zea mays
  Clone ID: MRT4577_97065C.1.pep
SKPCVQCKKQPPPPPPMLMAPPPPPAPAAIDHTGPKDVGMDVETELSTVRQRGSSQNQRTLTPSPR

SEQ ID NO: 366119 - protein, 58 aa, Zea mays
  Clone ID: MRT4577_97066C.1.pep
ATAIQQVQEHQQEEYKEDLQVLLRGNQLGVSRVREQQGKVPTYYSTVQYTYLSERKKP

SEQ ID NO: 366120 - protein, 63 aa, Zea mays
  Clone ID: MRT4577_97067C.1.pep
EFLAAAVHLPKHVSASHTEIEVWMMHWPLVPSHYLVICQTDQLRSDPISAVKLSILSNSAFRP

SEQ ID NO: 366121 - protein, 63 aa, Zea mays
  Clone ID: MRT4577_97068C.1.pep
RQRTRGVVSSCGHDRPVGAIGLKRRQNMGTISAVPEIRDRHITSDDDDILRNKLEVLPRKIVS

SEQ ID NO: 366122 - protein, 84 aa, Zea mays
  Clone ID: MRT4577_97069C.1.pep
GQWPAMAWRPHPRPSSLQTSSSKCSRRPPIMTTTTSFDRSSSITNDGDRQCSEKKYRREGIYLDNSGGGECMQQGRRKEKVVPL

SEQ ID NO: 366123 - protein, 134 aa, Zea mays
  Clone ID: MRT4577_9706C.1.pep
RPQSSHQPSPSPARPWPTPAPHPQHPSSPSSSPTTSAAPTPSALCPPTALRTPSSTCLPTPCSSKTAPSRLPACRTSLPAAQPSTASSTRRTEASLATSTTRSLSWISMALTRRLRLMFLLSLSSATPCNRPAL

SEQ ID NO: 366124 - protein, 418 aa, Zea mays
  unsure (1)..(418): unsure at all Xaa locations
  Clone ID: MRT4577_97070C.1.pep
MRPMASNGIASSLSPFFPPNFLLQMQQTPSDHDPQEHHHLPAPPLHLHHNPFLPSSQCPSLQDFRGHAQIHPYSELXLASQQPPTPNPIDPXLVLTHALAPVVDAXAGMAPMLRKRPTMYCGADDVGVGGEEASCGATNEDEVSDDGSLQAVGPGEKKRRLNVEQVRTLEKNFELGNKLEAERKLQLARALGLQPRQVAIWFQNRRARWKTKQLEKNFDALRPQLDAVKADXITRSSPLRILGISTEHFGWAGQNICTLIYTNSQRLINRSLLMHAXILALKGREAAGGSSELINLNKETEASCSNRSEDSSEINLDISRTPPASEGPMDHPPPPPPHHAAGGGLIPFYPSVGGRHSIAAGVGMDQLLHASTPKLEQHGDGCAVAVQAAETAGSFGNLLCGVDETPPFWPWADHHHFH

SEQ ID NO: 366125 - protein, 96 aa, Zea mays
  unsure (1)..(96): unsure at all Xaa locations
  Clone ID: MRT4577_97071C.1.pep
ATSNAHPPASPTTSTLSASSASTRPLSKAPTPRTSKTPSTTPPASAXPDLRVLQLVAPHFPRPAXPWPPPPSPPPSAASRPSPSLPSASLASSSST

SEQ ID NO: 366126 - protein, 183 aa, Zea mays
  unsure (1)..(183): unsure at all Xaa locations
  Clone ID: MRT4577_97072C.1.pep
KVDIEYPFTFEGXXEIYKCVGCNIDWHKGKNLTVKTIKRKQKHKARGAVRTVTKQVPADSFFNFFKPPVIQENQDESKIDLEDQAILSTDFEIGHFLRARVIPKAALYYTGDIVEDDDDDDYDEEEEEEEEEGDEEEDEESESDQESRPTGKQQQRVHGVANKKKSGSGAGGANQTPAECKQQ

SEQ ID NO: 366127 - protein, 263 aa, Zea mays
  unsure (1)..(263): unsure at all Xaa locations
  Clone ID: MRT4577_97073C.1.pep
MAATLFSTSLLPQFLSLSAKPAAAAAAPSAAAFPSGLPQLHALSAAXWALGRSSPXAAATAAVTEELEAEGRSGGDEFSDDLRVFVGNLPFSVDSAQLAGLFEQAGSVEMVEVIYDKLTGRSRGFGFVTMSSVEEVEVAVDQFNGYVLDGRSLRVNSGPPPPRDRSSPSPQRPRGDANRVYVGNLSWGVDNSALANLFSEQGEVLEARIIYDRESGRSRGFGFVTYGSAEEVENAISNLDGADLDGRQIRVTVAESKPPRQQY

SEQ ID NO: 366128 - protein, 199 aa, Zea mays
  Clone ID: MRT4577_97074C.1.pep
RTGLPGVAASVAAATGALLLCWLQCRRRKAGRSASERLAAMRLLSEAATSSGVPVYSYGEIARATNSFSHTHRLGTGAYGTVYVGKLPGTGSAPALVAIKRLRRRHHHDEDEDAAAEAALLLNEIKLISSVSHPNLVRLLGCCLDGGEQVLVYEYVPNGTLSQHLHSAGASTGGRGALTWRARLGVAVETAGAIAHLHG

SEQ ID NO: 366129 - protein, 65 aa, Zea mays
  Clone ID: MRT4577_97075C.1.pep
GRACQIGKSLVLNRIIREIIVRSYFIFFAVFFICKSFLATISNRFFLKTGPTFKFKGITKSKWAL

SEQ ID NO: 366130 - protein, 108 aa, Zea mays
  Clone ID: MRT4577_97076C.1.pep
RDSWPPDWRPSASDEGHAGDLAYRPSDTSFHLRPNPFALVHIEVASMHGPSLNLMHGTRPRLTLLNIGRQLLGLPTCLLHIRRAGTRLHDICVVSCFSDLKHLIDMYY

SEQ ID NO: 366131 - protein, 117 aa, Zea mays
  unsure (1)..(117): unsure at all Xaa locations
  Clone ID: MRT4577_97077C.1.pep
XKKKKKKKKKKKKKKKKKKGRKNTKRKKDKKHEKYKKNKXNKKRXKNKLKWTKKKKKRGGGVPGVTHFLPPGMALLFFFFGGHLIIGPGRSFFPTVAADDPGCLPPFLYRRIIPFLC

SEQ ID NO: 366132 - protein, 45 aa, Zea mays
  Clone ID: MRT4577_97078C.1.pep
PGFGFGQVPGTWPFRCPKLPPGGQIPSIVSQLQGFPQKFLDEFRG

SEQ ID NO: 366133 - protein, 150 aa, Zea mays
  Clone ID: MRT4577_97079C.1.pep
VENPWEAQSESQKKRDIWRGKQTKEPLATNNYSKVSTLTLAVRVQSSVPRASVARPLREHRHQRGHQRLVVRGARRHGPRGVRAPRRQAQRRHGGEKDGDGDDRCTVAHMAAGDLISAGSARCTRLGQPGSLTTTNRVRRVLYSAPLLVP

SEQ ID NO: 366134 - protein, 121 aa, Zea mays
  Clone ID: MRT4577_9707C.1.pep
PQMEPTRPDTTADVGLISWCSSTPSSSPKLCSGLQSTSLPRGHFRQLTRPAGPRKQGGPGPLTATGPATTGQHKLFFYWFHCVFYSFPSTLVFTSGRMDIDHISAVVVSSWQGRWQLTRPG

SEQ ID NO: 366135 - protein, 57 aa, Zea mays
  unsure (1)..(57): unsure at all Xaa locations
  Clone ID: MRT4577_97080C.1.pep
VELAALVAAQVAQPLTAMCGLHLQGGGGGPCNAXAGGVYVLRKLCSAVIVWRRWLAA

SEQ ID NO: 366136 - protein, 69 aa, Zea mays
  unsure (1)..(69): unsure at all Xaa locations
  Clone ID: MRT4577_97081C.1.pep
GKAGQLGEGVPVPPDKSKVPVPSDGPFFXRDLKDFAQKDLKKPNVRDWLPVVTANKGPRVYXLRVFNLS

SEQ ID NO: 366137 - protein, 89 aa, Zea mays
  Clone ID: MRT4577_97082C.1.pep
APLQPPVCFCFAVKSGGYRSAAMCVSAVFRAGTAFMTSVGLSPAAGVHLSFISARLVLMLSSVVFLYACFGAPLHPGALWCSLSLLVPC

SEQ ID NO: 366138 - protein, 64 aa, Zea mays
  Clone ID: MRT4577_97083C.1.pep
HDNLCTYVCCIVIGMCPCVATEVKDLYETLIRNNKHHYNMQNPCGKYKGNYLLRLHITQVFVDI

SEQ ID NO: 366139 - protein, 177 aa, Zea mays
  Clone ID: MRT4577_97084C.1.pep
SIAALVSDSIYNFGELLLHPILDSLVNTPHSWLRDLLFAFNRGDLSAYDVLSGNISKVPLLKDHQTFLYQKISLAALTETIFRRPPHDRAMTFSEISQETKVQPKEIEHLIMKALSLGLVKGQIDQVAEIARINWVQPKVLDMKQIEGMRARLKEWDASVNQLGNWIEGVGKDVWAA

SEQ ID NO: 366140 - protein, 75 aa, Zea mays
  Clone ID: MRT4577_97085C.1.pep
TRTFCIWVKSYVVDERCLFNIYINGWIRGLSITKFVVLECKPAMLMLLLSCQESLNPGTTLPQKCFSVTPVQSLK

SEQ ID NO: 366141 - protein, 48 aa, Zea mays
  Clone ID: MRT4577_97086C.1.pep
LFMFYMLCFFIFFSIFYFLYFLTKQLIYYLQHAVHQTETAPCLNCLLV

SEQ ID NO: 366142 - protein, 44 aa, Zea mays
  Clone ID: MRT4577_97087C.1.pep
VFKKKKKRFFLNKNYSLCPLQKKEVPRIRVFTREGLSNIMVFPH

SEQ ID NO: 366143 - protein, 144 aa, Zea mays
  unsure (1)..(144): unsure at all Xaa locations
  Clone ID: MRT4577_97088C.1.pep
MVLLRKTRPTRGKGGTKKEKKRRQGREKAREQGGKQQEKKTTKGETTGRSRRGRKKAATGRTKGAGNDPSTGPTSGGRGGGGGGGEGRTGGARRGGPPTRGGGXRLRGRQQHRRKEGRRGEQKKGPHGRDRWGQKQGDWPTKRG

SEQ ID NO: 366144 - protein, 117 aa, Zea mays
  Clone ID: MRT4577_97089C.1.pep
IKTKRTIQFVDWCPTGFKCGINYQPPSVVPSGDLAKVQRAVCMISNSTSVVEVFSRIDHKFDLMYSKRAFVHWYVGEGMEEGEFSEAREDLAALEKDYEEVGAESDENEDGDDGDEC

SEQ ID NO: 366145 - protein, 64 aa, Zea mays
  Clone ID: MRT4577_9708C.1.pep
PRPKKKTQGRSQPSKRAQKKKENVFKAQRPLLEQSDKVDGRPAQKQRIGELPKALQRFAQKPPS

SEQ ID NO: 366146 - protein, 48 aa, Zea mays
  Clone ID: MRT4577_97090C.1.pep
TFPLKFLERFFWKKTISLKNAKLIGIQFIVPSILNGYRMLGQPVTTYV

SEQ ID NO: 366147 - protein, 98 aa, Zea mays
  Clone ID: MRT4577_97091C.1.pep
QVLRLNTSFACGMWSLRSMSVFRSLFIMDSSLMSTSALPRHGIESLSTQCQARSRMRFHQAGRREQQTLTRRARPSAGTAENYMLGAWTAQRVVVWEP

SEQ ID NO: 366148 - protein, 104 aa, Zea mays
  Clone ID: MRT4577_97092C.1.pep
QSSSFFSSSMSDANASASCKTRSTIRCSKRGGAGGPGIHACCTMHRVVCAIGTREGVGLYMLPAGDPRKRCPRCQTCLPRDLLAPALLIAMLRCRRPPSLLSSE

SEQ ID NO: 366149 - protein, 53 aa, Zea mays
  Clone ID: MRT4577_97093C.1.pep
IYKAVTVDQVRGAPNPIMIHSQGTYLYRVLLSYPKDLAPYEEDTSQVTAKHSL

SEQ ID NO: 366150 - protein, 94 aa, Zea mays
  Clone ID: MRT4577_97094C.1.pep
HLEVLQYYAASLFRMAAEMSRLKREKRFRFVPCQQAMLLADMRFNCSWSCFHCSQSFVESSIGFCQGMYPLYISTNKLSYLVKVDLLMRASYSV

SEQ ID NO: 366151 - protein, 169 aa, Zea mays
  Clone ID: MRT4577_97095C.1.pep
KPERDPHIYWAFLPWPVTGHPKTRIQGHPGPGPKKKAGPSNLYQMGATIQTQNQGCWGGTGTQLLGPASKGLTYKFGGTGLKGRDQKDLPFLKLECRMGQLELLAHLVTGPTGRLGPDHQKRPGNRPRFLLLVHFLNHFSREKDLVYLAKFSETPTLFPFGFKPPGFLA

SEQ ID NO: 366152 - protein, 411 aa, Zea mays
  Clone ID: MRT4577_97096C.1.pep
MAASASSLLAAPASSSCGAISPQLPRGAPAAASVASPSRHSCYLLRASPSRRHRSRFVANAAPTMQPPAESRVSTVVDVDLGDRSYPIYIGAGLLDEPDLLQRHVHGKRVLVVTNTTVAPLYLDKVTWALTHNNLNVSVESVILPDGEKYKNMDTLMKVFDKAVESRFDRRCTFVALGGGVIGDMCGFAAAAFLRGVNFIQIPTTLMAQVDSSVGGKTGINPLRELASGIAEVVKYGLIRDAPFFEWQEKNMPKLLAREPNALAYAIKRSCENKAEVVAQDEKESGLRATLNLGHTFGHAIETGTGYGAWLHGEAVAAGTVMATDMSHRLGWIDDSIRKRVVDILKQAKLPIAPPETMTVEKFKNIMAVDKKVADGLLRLILLKGPLGCCVFTGDYEGNALDETLHAFCDN

SEQ ID NO: 366153 - protein, 33 aa, Zea mays
  Clone ID: MRT4577_97097C.1.pep
VSSLFKLLYGYESQIPCGTMDDGCTLCTTARRI

SEQ ID NO: 366154 - protein, 64 aa, Zea mays
  Clone ID: MRT4577_97098C.1.pep
ILRVMRSPTGPSANWMPLFRRTAVKYGHCTIFSPLWTRERSHWNWMSSWMYKHAKQGSALWETA

SEQ ID NO: 366155 - protein, 464 aa, Zea mays
  unsure (1)..(464): unsure at all Xaa locations
  Clone ID: MRT4577_97099C.1.pep
MAASASSLLAAPASSSCGAISPQLPRGAPAAASVASPSRHSCYLLRASPSRRHRSRFVANAAPTMQPPAESRVSTVVDVDLGDRSYPIYIGAGLLDEPDLLQRXKLYIFSLTVRLEWSACDPYLCFLRHVHGKRVLVVTNTTVAPLYLDKVTWALTHNNLNVSVESVILPDGEKYKNMDTLMKVFDKAVESRFDRRCTFVALGGGVIGDMCGFAAAAFLRGVNFIQIPTTLMAQVDSSVGGKTGINHPLGKNLIGAFYQPQCVLIDTNTLNTLPDRELASGIAEVVKYGLIRDAPFFXEWQEKNMPKLLAREPNALAYAIKRSCENKAEVVAQDEKESGLRATLNLGHTFGHAIETGTGYGAWLHGEAVAAGTVMATDMSHRLGWIDDSIRKRVVDILKQAKLPIAPPETMTVEKFKNIMAVDKKVADGLLRLILLKGPLGCCVFTGDYDGNALDETLHAFCDN

SEQ ID NO: 366156 - protein, 151 aa, Zea mays
  Clone ID: MRT4577_9709C.1.pep
MQIFGKTLTGKTIPLEGESSDPVDNVKAKIQDKEGIPPDQQGLKFPGKHFDECPPPPDYKIQKGSTLHLAPRLKGGTLVRGKTLPGKEIEIDIEPPDSIDRIKERVEKKKGIPPGQERLIYAGKQLADDKTAKDYHIEGGSGLHLGLGLRG

SEQ ID NO: 366157 - protein, 94 aa, Zea mays
  Clone ID: MRT4577_970C.1.pep
ELRTLFLAGKMRVPTPISLMRAPDTRAPKLEASTHVRWGNNNPGNLGDVHVRGLARLAHHCLREKGPLWRTLKIAHTPPLQWGTGSFGPVDKGY

SEQ ID NO: 366158 - protein, 45 aa, Zea mays
  unsure (1)..(45): unsure at all Xaa locations
  Clone ID: MRT4577_97100C.1.pep
XXXXNLLYLIXXHKHGMETLHMGHALHPPLYIKNRPIHYLLLHYT

SEQ ID NO: 366159 - protein, 419 aa, Zea mays
  unsure (1)..(419): unsure at all Xaa locations
  Clone ID: MRT4577_97101C.1.pep
MAPEIQSLCPSTTAALLLLAACLAAAVAAXRRCGXARPPLPAGGGGRRVLFANGLGLTPQMGWNSWNHFQCDINEAVVRSTADALVATGLAKAGYTYVNLDDCWADSERTKEGYMVANPKTFPSGIKALADYVHSKGLKLGIYSSAGTRTCSNRMPGSLGYEERDAKMFASWGVDYLKYDNCYRDGTPETVRFGRMSRALVNSGRPIFYSLCEWGFMEVPKWGGMYGNSWRTTGDINDTWSGMLDNIDLNDAYARYAKPGGWNADPDMLEVGNGGMAYNEYVVHFSLWAIAKAPLIIGCDVTRVSNETLGILSNAEVIAISQDRLGVQGQKVSKYGNDLEVWAGQLSGHRKAVLLLNRGATRSASITAAWPDVGIRRGVAVQARDVWKHETLPGWFTGSLTAVVGPHSCKLFVLTPVPS

SEQ ID NO: 366160 - protein, 337 aa, Zea mays
  Clone ID: MRT4577_97102C.1.pep
MAASLSSALSSMEVMLDALMQRGIGKPEEASSKPKEEEPPPALPSRPTGRGRLPALHRPGGTAAAPWIHRPSPVPQPTQEDDEEKCLVGRELERRAVKAEEEVKQKDEEMRQKEQLIATLQRQVQHYESRLSECEVRMKSVERQITSLQMAHSHSQTAGVSVRRDGSTRHIQGSSRGGLPPSSQPSSVRRQQRGSEPAAADESERTTLAEPVVNQLAREFQTGREAFEHNARAVAEASRLPTSSSTPGSARSVEELKTLKSQFATWKKEYEARLKKTKAELKRLVHAEKRNGAGDRHAHQRRCGWWRIKAPKCCRAPKCCSSFKLPSPKSCCCCFRR

SEQ ID NO: 366161 - protein, 84 aa, Zea mays
  unsure (1)..(84): unsure at all Xaa locations
  Clone ID: MRT4577_97103C.1.pep
VFPFPSRGNAGYGAAKVMLSAACPGSAVIAGVSVRVVLDMADVENAVGKHVRSKNPLNNVLATIKAAQIIKQFKDVPEEXGIPM

SEQ ID NO: 366162 - protein, 212 aa, Zea mays
  Clone ID: MRT4577_97104C.1.pep
MVVLMAPAVEAVKETGTFQKVPALNERILSSMSRRSVAAHPWHDLEIGPGAPTIFNCVIEIPRGSKVKYELDKKTGLIKVDRVLYSSVVYPHNYGFIPRTLCEDSDPLDVLVIMQEPVIPGCFLRAKAIGLMPMIDQGEADDKIIAVCADDPEYRHYNDIKELPPHRLAEIKRFFEDYKKNENKEVAVNDFLPASAAYEAIQHSMDLYATYI

SEQ ID NO: 366163 - protein, 117 aa, Zea mays
  Clone ID: MRT4577_97105C.1.pep
LLPPLLCDHSLPGETFFYKVHHTRTLHRPGSSANVVSKSARSTYCDTHGAHLLLDLPFQNKGNVWPSWEHAHRGASTDNIAWVLRTGDEDLDAKDIFSIGNTEDCIHVWSYPFETRP

SEQ ID NO: 366164 - protein, 256 aa, Zea mays
  unsure (1)..(256): unsure at all Xaa locations
  Clone ID: MRT4577_97106C.1.pep
HRLSLSVLRSAALKPKPNHCSAHSIPAPSSRAILGFLSPSAPPQIWTPPPDPGCLDGARCRSREGDRHLPECPALNERILSSMSRRSVAAHPWHDLEIGPGAPTIFNCVIEIPRGIKAKYELDKKTGLIKVDRVLYSSAVYPXDPMDVLVIMQEPVIPGCFLRAKAIGLMPMIDQGEADDKIIAVCADDPEYRHYNDIKELPPHRLAEIRRFFEDYKKNENKEVAVNDFLPASAAYEAIQHSMDLYATYIVEGLRR

SEQ ID NO: 366165 - protein, 214 aa, Zea mays
  Clone ID: MRT4577_97107C.1.pep
MAPAVEAVKETGSFQKVPALNERILSSMSRRSVAAHPWHDLEIGPGAPTIFNCVIEIPRGSKVKYELDKKTGLIKVDRVLYSSVVYPHNYGFIPRTLCEDSDPLDVLVIMQEPVIPGCFLRAKAIGLMPMIDQGEADDKIIAVCADDPEYRHYNDIKELPPHRLAEIRRFFEDYKKNENKEVAVNDFLPASAAYEAIQHSMDLYATYIVEGLRR

SEQ ID NO: 366166 - protein, 80 aa, Zea mays
  unsure (1)..(80): unsure at all Xaa locations
  Clone ID: MRT4577_97108C.1.pep
SDNCVIGTTYYINNTXVYVMAKDCFXVVTMDAFCXFLRRHFILLYPYVSEAMVTIXHRPWERVYVDGMPHSHGLNVHIEK

SEQ ID NO: 366167 - protein, 130 aa, Zea mays
  Clone ID: MRT4577_97109C.1.pep
EATKRVHNFARANIPMTYCPPALTEQHGGGSKAFGMLEIVLDAPTCTFFPPKTNRCRCEQIPNVILAFCLTLHRAARLSTSTVMVPLHYRALTKISDPTLAAENKGNGPFLVDGAVRGSAAILQLIARKD

SEQ ID NO: 366168 - protein, 124 aa, Zea mays
  unsure (1)..(124): unsure at all Xaa locations
  Clone ID: MRT4577_9710C.1.pep
RRNRAGKTRGQGTKARAAAHDKTPQGKGRWAGXGERQPGNKAAEHRAAQARSGGPSEKANGXRKGRKGGPAPPPTGRKKGRGRSQGGASKPEQRSGKDRKRALRSPRRXEAQKKEKKKKTNPPP

SEQ ID NO: 366169 - protein, 221 aa, Zea mays
  Clone ID: MRT4577_97110C.1.pep
MAQDAGDGGGELPPPVKKKSPAEEEAEKRRKKLTPGSLMKGIIRSGSGDATPAEGDQVILHCTTRTIDGIVVNSTRREHGGKGIPLRFVLGKSKMILGFAEGFPTMLKGEIAMFKMQPKIHYAEDDCPVATPDGFPKDDELQFEIEMLDFFKAKVVADDLGVVKKIVEEGKGWETPREPYEITARITARTADGKEIIPSKEKAYFFTIGKSEVPKGLEMGI

SEQ ID NO: 366170 - protein, 66 aa, Zea mays
  unsure (1)..(66): unsure at all Xaa locations
  Clone ID: MRT4577_97111C.1.pep
HPATAXFFLSRLLILTVSFDHLLLLGSLLHQFVNSSLICSLNLKLNARCLYLVFVFVCTRHLVIFF

SEQ ID NO: 366171 - protein, 104 aa, Zea mays
  unsure (1)..(104): unsure at all Xaa locations
  Clone ID: MRT4577_97112C.1.pep
MGIDLVDGGRTETTKRTGPKSDYVYLKLLAKLYRFLLNKTQMICHAVILNRLFMSXNQPXPISMHCLVKIMAGNEKNIAGIDGTRSXDQMIHVAAAMNVTALWF

SEQ ID NO: 366172 - protein, 40 aa, Zea mays
  Clone ID: MRT4577_97113C.1.pep
MGLVKEGVNMEEGTLQMGMQYRTVSAVAGPVDISDYVGGP

SEQ ID NO: 366173 - protein, 67 aa, Zea mays
  unsure (1)..(67): unsure at all Xaa locations
  Clone ID: MRT4577_97114C.1.pep
SRPAXRHRLXRVTRAAAEAGRRTAAARPAAARARLWRGRARAGASLCGASYPGPRRSRRLGDPRAWA

SEQ ID NO: 366174 - protein, 40 aa, Zea mays
  Clone ID: MRT4577_97115C.1.pep
CSSSLTKNQYICFPFILHVPTFSHILVLCSCWLHLNIIRS

SEQ ID NO: 366175 - protein, 38 aa, Zea mays
  Clone ID: MRT4577_97116C.1.pep
CYKYHKLGRERIRWGHVPFLGMHQKLMQLYIPLRTINR

SEQ ID NO: 366176 - protein, 76 aa, Zea mays
  Clone ID: MRT4577_97117C.1.pep
RESYYVRLRRHLKWTCSLGSIFHMYDEVASSSPALGADLGDMDSHREESPRPFDIGFASDVDANDTLIVLPSLQHA

SEQ ID NO: 366177 - protein, 321 aa, Zea mays
  Clone ID: MRT4577_97118C.1.pep
PTRPITCGATPAMEILSWCGADPGNAFLVPSPYYPGWDRDIKWRTGVELIPVPCRSTDNFNVSVTALEIAYKQAKKRGIRVRGVLISNPSNPTGGIVPKEILHDLLQFAAEKNIHLISDEIFAGSTYGSDKFVSVADVVDELEDFDKGRVHIIYGLSKDLSLAGFRVGVIYSYNEHIVSAAAKIARFSSVSSPTQRLLVSMLSDQKFISEYIKVNRERLRKMYLLFSDALKQLGIECFKSSGGFYCWADMSRYIRSYSEKGERKLWDRLLEEAKVNVTPGSSCHCIEPGWFRCCFTTLSEEDIPVLVERLRRVTDSFKSKR

SEQ ID NO: 366178 - protein, 113 aa, Zea mays
  unsure (1)..(113): unsure at all Xaa locations
  Clone ID: MRT4577_97119C.1.pep
NTTAASTYLNHPVXPNALNIPEQLPQWDMCNFLVNLQYRRLYRSMNSQYLKLLSSQTYQILLYNGDVDMACNFMGDEWFVDSLNQKMEVQRRPWLVKYGDSGEQIAGFVKEFS

SEQ ID NO: 366179 - protein, 45 aa, Zea mays
  Clone ID: MRT4577_9711C.1.pep
DNKGDAHVLTEAIITSTRNISSDRYLAVLCPGHTGSASIQQVHLV

SEQ ID NO: 366180 - protein, 90 aa, Zea mays
  unsure (1)..(90): unsure at all Xaa locations
  Clone ID: MRT4577_97120C.1.pep
DDPXVIMGRRPARCYRYCKNKPYPKSRFCRGVPDAKIRIFDLGRKKAKVDEFPLCGHMVSDEYEQLSSEALEAARICANKYMVKSCGKDG

SEQ ID NO: 366181 - protein, 112 aa, Zea mays
  Clone ID: MRT4577_97121C.1.pep
IKKSLERMLSKGNILIGHSLHRDLCALKIDYSQVIDTTYIFKYANLPTTASPSLNSLCKAVLEYLVREEGEPHNCLKDAEAAMNLVLAKLKNEFNDPIEIAASIVSAKKRCS

SEQ ID NO: 366182 - protein, 34 aa, Zea mays
  Clone ID: MRT4577_97122C.1.pep
SAVSRLFNVSAFKFSPKFARWEKLGLYRHQTNSK

SEQ ID NO: 366183 - protein, 246 aa, Zea mays
  unsure (1)..(246): unsure at all Xaa locations
  Clone ID: MRT4577_97123C.1.pep
NEYYFRTEKVFSLKSFSKLPSIFIKWPESSILWSSATERDGPVQPQRRQPEGKARAHGQPREDDQLLQRVRCQEPEVHGIRVVGGDEVEGFESSDGTEAVVRVCVVDDKLKAKLDILVNPSKTVADYRTHITGASKKDLEGVTSSLVDVQKSLKRMLSKGNILIGHSLHRDLCALKIDYSQVIDTAYIFKYANLPTTASPSLNSLCKAILEXSLRXEGERHNCLKDVEAAMNLVLAKLKTKFYDYV

SEQ ID NO: 366184 - protein, 76 aa, Zea mays
  Clone ID: MRT4577_97124C.1.pep
TTYIFKYAGGPTTASPSLNSLCKAVLEYLVREEGEPHNCLKDAEAAMNLVLAKLKNEFNDPIEIAASIVSPKKRCS

SEQ ID NO: 366185 - protein, 242 aa, Zea mays
  unsure (1)..(242): unsure at all Xaa locations
  Clone ID: MRT4577_97125C.1.pep
WYFLASKVLQIDVSSLTSSSAMLSIDCEMVLCSDGTEAVVRVCVVDDKLKAKLDILVNPSKTVADYRTHITGVSKKDLEGVTSSLVDVHXIVFNIYVFSMNILSHGSYIPFXKLLKRMLSKGNILIGHSLHRDLYALKIDYSQVIDTSYIFKYANLPTTASPSLNSLCKAILGYSVREGEPHNCLKDAEAAMNLVLAKLKNEFNDPIEIAASIVSAEKKMFLNLIISIDDATLLLCGTFLGN

SEQ ID NO: 366186 - protein, 64 aa, Zea mays
  Clone ID: MRT4577_97126C.1.pep
IIFKGTKQEGALELKTPTKKTGTKYPRGVKNGASKSTCQKGGITELRVYSAWKTTGFIRGFSGG

SEQ ID NO: 366187 - protein, 92 aa, Zea mays
  unsure (1)..(92): unsure at all Xaa locations
  Clone ID: MRT4577_97127C.1.pep
TGKVKIMYHKFQVWFKAXYALSAPDQKVSSXGSPIMNNRFVFTGASWVSRAFNKVANSAQDVGTMTKKKMAAEEHHKGSGQSSGGRSYTPRR

SEQ ID NO: 366188 - protein, 71 aa, Zea mays
  Clone ID: MRT4577_97128C.1.pep
DPLGLADDPEAFPELKVKELKNAPLPMFSMFGFFVQPIVTGKGPLKNLPDHIADPVNNNAWAYATNFVPGK

SEQ ID NO: 366189 - protein, 108 aa, Zea mays
  unsure (1)..(108): unsure at all Xaa locations
  Clone ID: MRT4577_97129C.1.pep
MAVKIFWRVILLGLSASVATATIFPICSQAPIASLFFSFLSPDMFSEFVYPIFXPYRIQQAFTVGISPLSPLILQQSSALLHXLPLVPLLAQNIKSQQLQQLVLANLC

SEQ ID NO: 366190 - protein, 120 aa, Zea mays
  unsure (1)..(120): unsure at all Xaa locations
  Clone ID: MRT4577_9712C.1.pep
LVRGSLPVMLNMGAMLVVHPLSSEDTDCEPSVYSKITRVXEELRSELPYQVESDLVADAKGTGPVVNRLVNRXSAPXNRFLLXELGCAFLTDERQEHFGEESNRVFIRISQGELGDRMLE

SEQ ID NO: 366191 - protein, 98 aa, Zea mays
  Clone ID: MRT4577_97130C.1.pep
MEMLSMLKVGYTILRSETPATDLVNTFMDWAARRSLMLLAIFLPPYYIYKLTTSAFAAAVPEDVAGKVVLITGASSGIGEVCQPVQLVCVRVFLLKQP

SEQ ID NO: 366192 - protein, 107 aa, Zea mays
  Clone ID: MRT4577_97131C.1.pep
ELVEHFDPCHPILVGGIGLGEENTGFMQASLKRHRWHRKVLKTKDPIIVSIGWRRFQTTPVYAIEDRNGRHRMLKYTPEHMHCFAMFWGPLAPPKSGVLAVQNLSKQ

SEQ ID NO: 366193 - protein, 82 aa, Zea mays
  Clone ID: MRT4577_97132C.1.pep
ALGRFCAECFVWQHGEACLFAEVPGPVQWAGSLGLCPGLSSLSSVMVLTVGKAPLCRVLRWAEWPVKTNPACFSFSVRTKAQ

SEQ ID NO: 366194 - protein, 74 aa, Zea mays
  unsure (1)..(74): unsure at all Xaa locations
  Clone ID: MRT4577_97133C.1.pep
PPPGTVVLLLPGPVRRIFRARKVSFTNSAATGAAMATTMLGAPFSIVLLAAPVTPAACCVIKWGVRCGGVXNAP

SEQ ID NO: 366195 - protein, 109 aa, Zea mays
  Clone ID: MRT4577_97134C.1.pep
EYCLTLAVARAYSSSLLWDMTRVFLALHSASVRLWFAQLHVLAPLLGFPVGCSCSSLPLWLSVVRELPIVLSPCPLVLWPICRASAASCWWSPWLLVLLGLLLLPLATG

SEQ ID NO: 366196 - protein, 139 aa, Zea mays
  Clone ID: MRT4577_97135C.1.pep
PTDFSFRQGFAKVSLLVARPPQWVSLRPPNPPEFWGRAKKRGPKLTKRGRNRHPRKTGGFKRFNKNPREPKRRFKAANRGGGAKNYVPYVLSVMELPCLSESPPCFEFSPSLFGFSLLPGGGVPPFVFIPINSSNKTFF

SEQ ID NO: 366197 - protein, 69 aa, Zea mays
  Clone ID: MRT4577_97136C.1.pep
LTCVDRYMTRSRHSLKTNALSCLPGLGVNAVLCISTQFGDPTNGVATLALGVNYLPALQLAFLDVHDRL

SEQ ID NO: 366198 - protein, 50 aa, Zea mays
  Clone ID: MRT4577_97137C.1.pep
GRLAKQKPDDPYERAGPKPYKRDLKGLLTGREQNTSPAINNKRAWGQQNS

SEQ ID NO: 366199 - protein, 135 aa, Zea mays
  Clone ID: MRT4577_97138C.1.pep
MSGSKVYTLEEVAKHNTKDDCWLVIGGKVYNVTKFLEDHPGGDDVLLSSTAKDATDDFEDVGHSTTARAMMDEYLVGEIDAATIPSKVKYTPPKQPHYNQDKTPEFVIKILQFLVPLAILGLAVAVRIYTKSESA

SEQ ID NO: 366200 - protein, 57 aa, Zea mays
  Clone ID: MRT4577_97139C.1.pep
PTIPCESRQDLSVLAASCLAQCICSATVGAIAQGLFRLCYAATVRVFADTAWRQVFS

SEQ ID NO: 366201 - protein, 88 aa, Zea mays
  Clone ID: MRT4577_9713C.1.pep
KIADSGEGVPFEGVEICCFNLDGAHYMIYTPVDPLLFVAIKDKDGVLRIAEDDLMEDPAVLDAVDEETEFTALVEEEEALLETVLGER

SEQ ID NO: 366202 - protein, 49 aa, Zea mays
  Clone ID: MRT4577_97140C.1.pep
QKLQGISFNKQSYSMFQRECSLWVQEALIRQTHGGETVMQNLTNPHHLS

SEQ ID NO: 366203 - protein, 188 aa, Zea mays
  Clone ID: MRT4577_97141C.1.pep
NMNCTTWKSHLWVFVNALIDNPAFDSQTKETLTTRQGSFGSKCELSSDFLKKVEKSGVIDNVLSWADFKLSKELKKTDGSKKSRISGIPKLEDANEAGGKDSHKCTLILTEGDSAKALAMSGIAVVGRDYYGVFPLRGKLLNVREANHKQIMDNAEIQNIKQILGLQHGKQYDSTKGLRYGHLMIMTD

SEQ ID NO: 366204 - protein, 70 aa, Zea mays
  Clone ID: MRT4577_97142C.1.pep
QPLSGNGGLGQLIYRFLQVWRLALFVSDYSRRRMGLQYTFTRSTPRKETRYKESYDLEFPGFPNARQWRY

SEQ ID NO: 366205 - protein, 65 aa, Zea mays
  Clone ID: MRT4577_97143C.1.pep
VDNHESPAMPYDSTSCMLHTLMRSPLSLANSFQVDEFVPMSVRIKLVFSATIMNWELLLFSISKF

SEQ ID NO: 366206 - protein, 52 aa, Zea mays
  unsure (1)..(52): unsure at all Xaa locations
  Clone ID: MRT4577_97144C.1.pep
GIHSRXFLTPPPXKSLHASLRTAPMKGYSYXCCSQQVCSVLKLLPAPTVXXG

SEQ ID NO: 366207 - protein, 82 aa, Zea mays
  Clone ID: MRT4577_97145C.1.pep
KKLYIFYYIIFFNYYFFFFFFFFCGVGVLYSKNSRVILLFLMNHPSSGVLRRRENIILNSRLLTAQKKPPLARMQLFAVVEK

SEQ ID NO: 366208 - protein, 70 aa, Zea mays
  unsure (1)..(70): unsure at all Xaa locations
  Clone ID: MRT4577_97146C.1.pep
MHVQDVVLWLPGGVXAYVDISEDGILCIGVGWYSEEGINLVMERDYGTDGRLREVRSKTEVKRRWYQSVP

SEQ ID NO: 366209 - protein, 63 aa, Zea mays
  Clone ID: MRT4577_97147C.1.pep
MNSFINDIFKKLRAESSSSARYSKKPTITSREIQTSVRMVLPGELRKHAVSEGTKAVTKFTSN

SEQ ID NO: 366210 - protein, 70 aa, Zea mays
  Clone ID: MRT4577_97148C.1.pep
GKDPRKQSRGHKSSRINTEDRESHKIIRKRNGRDDDGSIQPPSKLDHQRKMERGDTQDEEHAPLLLRCVT

SEQ ID NO: 366211 - protein, 47 aa, Zea mays
  Clone ID: MRT4577_97149C.1.pep
YAIFYSFEGIKLWNMSNSDQDLILPMLNFVSTTTSELPDDKLCIQVG

SEQ ID NO: 366212 - protein, 121 aa, Zea mays
  Clone ID: MRT4577_9714C.1.pep
SVTVNSDLSSPQPPSAAWSWDRRGSAPWAAAYAARPSRMRTSSASDHTRPNANAGFLPPLVPGWDAAHGTTAPAAAAAVSEVWKSSAARECGALVGGGGIVGVDKIGGLGFLSAMVSSGEE

SEQ ID NO: 366213 - protein, 191 aa, Zea mays
  Clone ID: MRT4577_97150C.1.pep
MGVHARSMSWYMGSPAPGSAAEGEGQRALRSSSGGSDGSFDTNMVIILAALLFALLFAMGLNSLARCLIRWARRAPAGEDGGAGGLKKRALRSIPVEVYGACGADGAAAVAADVCAICLGEFADGEKVRVLPRCAHGFHVRCVDTWLLSHDSCPTCRGSVLDGAKAAASAPAAGGNRRQGSEAAAIAIVIG

SEQ ID NO: 366214 - protein, 84 aa, Zea mays
  unsure (1)..(84): unsure at all Xaa locations
  Clone ID: MRT4577_97151C.1.pep
PPRPTXPGPPPPXPPPCPPARPPPPPRTGWSPRRRSPSRVRGPPTVGSRPRPQSGSEPVIDLQPDARSRIKTLWQATQQKKICG

SEQ ID NO: 366215 - protein, 71 aa, Zea mays
  Clone ID: MRT4577_97152C.1.pep
VSLIRGLNKCKVSTYQMPQQERKCTCRIASEISNKSMWWLMLALESRNKNAMSMPLPIGNFSVVVVVVVVK

SEQ ID NO: 366216 - protein, 68 aa, Zea mays
  Clone ID: MRT4577_97153C.1.pep
TRWLGVFRAPPDQGPPGTAGYRSCGANGWQSTASYGWKVCPMAGLKPPSGTAPPDARGGHLLESPDAW

SEQ ID NO: 366217 - protein, 43 aa, Zea mays
  Clone ID: MRT4577_97154C.1.pep
MTTDRPLELLHMDLFGPIAYISIGGRKISNPRDPKEILEMSSK

SEQ ID NO: 366218 - protein, 71 aa, Zea mays
  Clone ID: MRT4577_97155C.1.pep
LVLLMPLKVLCVGDDSSKKRIGIASIVEFKDFFAWWMLCVCMSLSASKKRMRVAYYGCIAVMDTNKSCGVV

SEQ ID NO: 366219 - protein, 118 aa, Zea mays
  unsure (1)..(118): unsure at all Xaa locations
  Clone ID: MRT4577_97156C.1.pep
SSKPTMKMEAEDMPREPAAGSDETIAELPPAVGKGAQEKEEKPDSMETEAXDEPPKKKGNKTTEAGHEVSYGALAEPDLQKAVEKVYDMAXLLDRGREMKXEKKXAGEAYTDDMRNKL

SEQ ID NO: 366220 - protein, 55 aa, Zea mays
  Clone ID: MRT4577_97157C.1.pep
RVTELSGVAEVRFRLFSCSSLLQVNNAAVSFNEIDTNSVEHAEAVLRTNFYGGQM

SEQ ID NO: 366221 - protein, 217 aa, Zea mays
  unsure (1)..(217): unsure at all Xaa locations
  Clone ID: MRT4577_97158C.1.pep
MLSSTALRPLSPATATTPAYPATATATATATVTSATPGRRSVAVRVLRDYGSIPKREPFSSSRSILDEFFKQEKPLVQRTKDHITDYCTTLEGDDCCSCWDAYFELNKLEQELPQEEISRMVKDSRSDPRYLISSIHHRSDLRKKMAEKAHNSAPSNSPGQTAKPRPFPVPDGLPKTQEEIDEDEEALMPESPYTRLLRXXXRFPDWYTPRPDHETD

SEQ ID NO: 366222 - protein, 154 aa, Zea mays
  Clone ID: MRT4577_97159C.1.pep
SLSSPRTVLASVGRISFVAAAAAAAPLSSSMPHSTEAHRFLQYCFLPIKLLYILLAGTSNCRLAKLHRTSRDCNPNQSQMHNHLGRRRCRWCSTPATNTTEKLLLGRRRRAETPTEDRKAEQFRVLSRRKKGSRLVVTRAAQSGTCRRTPERRT

SEQ ID NO: 366223 - protein, 208 aa, Zea mays
  Clone ID: MRT4577_9715C.1.pep
MPKPPAGFVLDDQGRCIAAASKRIVTIIDDTNNRPLECIIRRVFRSSQDHDCMLLCPVDMPVQVLKSTNFSGWVAVDDDQLTRISQSVAYALARVHMHFVESGFCYTARGGFCFPEEAIQEFHDSGEGVPFEGVEICCFNLDGAHYMIYTPVDPLLFVAIKDKDGVLRIAEDDLMEDPAVLDAVDEETEFTALVEEEEALLETVLGER

SEQ ID NO: 366224 - protein, 121 aa, Zea mays
  Clone ID: MRT4577_97160C.1.pep
KQASCVSKRGRKKDETGSGGSSIKRKKRENTSSAATISTSIPITPAIPIRQVKEEDMRTLMKAGSGPRGIEVDVQNEKGKPSPLEVPISAADPEVVESGHEEAQANVLAVGNMFPEQSAEE

SEQ ID NO: 366225 - protein, 185 aa, Zea mays
  Clone ID: MRT4577_97161C.1.pep
MPARRACSSPIDTMAVFSDLHTDDGLKSLEAHLAGKTYVSGDSITKDDIEVFVAVPSKTDADFPNAVRWYETDSAAVPSRFPGKAVGVNLPAGSAPAAAAPADEADDDDDPDLFGDETEDDIEAPDERAAACKASSKKKERGKSSVLMDVKPWDDETDMKKLGDAVRSVQMEGLTWGALKLVPVG

SEQ ID NO: 366226 - protein, 241 aa, Zea mays
  unsure (1)..(241): unsure at all Xaa locations
  Clone ID: MRT4577_97162C.1.pep
MAASRVGDPAESSRLRIGDEIAWSEISGVYDRDDSLKENTNPKXASSRTTPAEAEAEAARPTAPRSGSLATSSRRRRPSSASPASSARAARGGTTRLPSSPRRPRXGGGGRAPRAAVPEPSSPKVSCIGKVLSDRERGRLGRPPRPRGAAGGCCGGLAFLMRRSRSRNSVECVDQSPPPPPPPLEASRRREKRESAQEAEAEPAPGLGGMRRFASGRRAAEWAAEVDGDGRVATSGPLRVR

SEQ ID NO: 366227 - protein, 79 aa, Zea mays
  Clone ID: MRT4577_97163C.1.pep
SFRLHLLKRHLQARRHLPLQVPQLARCTESVQVPLTMHVHWMTGGALTLHDDAELQRSAVVHDEEEAGGIAVRDHARVA

SEQ ID NO: 366228 - protein, 167 aa, Zea mays
  unsure (1)..(167): unsure at all Xaa locations
  Clone ID: MRT4577_97164C.1.pep
MSTEEPQLGPGQDATRVADQLDRLNMDGEGEVVPRTEEEYAEAQLTLRAIVSSKEAGVIIGKAGKNVADLRDETGVRAGVSKVVQGVHDRVLSVTGSLSGISKAYGLAAKGLLEGAPAMGMGGVIRTDGTHPIRLLISHNQMGTIXIGRQGLKIKQIQDASGVRMVA

SEQ ID NO: 366229 - protein, 68 aa, Zea mays
  Clone ID: MRT4577_97165C.1.pep
PRWDHAHRFIVFQLARNIGQASIQKRVFFFHSRQILPPRFVPQVGQEIDIVFPVNAEAHLGVLRSAAP

SEQ ID NO: 366230 - protein, 102 aa, Zea mays
  unsure (1)..(102): unsure at all Xaa locations
  Clone ID: MRT4577_97166C.1.pep
LFYLRKLAANLIPFPPMHLXNGGVRPPARPCLVDCLAHTAPEMTQKTRYANNNTCTTDPCHQLHQTARAISGGMTSTKEVDQQTINLQNKNFFYXRTGPQLS

SEQ ID NO: 366231 - protein, 84 aa, Zea mays
  Clone ID: MRT4577_97167C.1.pep
HVHKAHMPKAHACKMIQNRQGPENKLHQGLHLWARPSRETGHADTDKAGLCRGPNAGGDPLYGQEQGALQAWSEVAVLGHLQQV

SEQ ID NO: 366232 - protein, 64 aa, Zea mays
  unsure (1)..(64): unsure at all Xaa locations
  Clone ID: MRT4577_97168C.1.pep
LTRVARNKVIKMCKVQLSHHGEDEAKWXREEELHIDFPHLFPRPSIISRTRLFLRGVGFVTPTL

SEQ ID NO: 366233 - protein, 123 aa, Zea mays
  unsure (1)..(123): unsure at all Xaa locations
  Clone ID: MRT4577_97169C.1.pep
SPSHLLLPPRRCTAVFIALHRCCVHKSQASTQVPGKKNPTGYLFISVLDSRPRPGSISLDQFAPLIASRLPAAVDGVVFSLRTLKYCTSAPPILNTLVAAALXRASTLPHPHRSGXSKSARSH

SEQ ID NO: 366234 - protein, 278 aa, Zea mays
  unsure (1)..(278): unsure at all Xaa locations
  Clone ID: MRT4577_9716C.1.pep
MAAAVAVLRAALRRGRPAAASLLHRLPNPSARSLPPPPPLGRALRPLSRLGFSAGFGHSSSTEDFGFGYSPATEDSAAAAKPKTKTKARKHPMKQSRFDFTKVDAALLPTVILVGRPNVGKSALFNRFIRRREALVYNTPGDHVTRDIREGVAKLGDLRFRVLDSAGLETAATSGSILARTADMTGNVLARSQFAIFLIDVRDGLQPLDLEVXQWLRKHASGIHTLVAMNKSESLDEHGFLTAAAGEHTXXXFGDPGCISAETXLGMAELYEILRPLF

SEQ ID NO: 366235 - protein, 74 aa, Zea mays
  unsure (1)..(74): unsure at all Xaa locations
  Clone ID: MRT4577_97170C.1.pep
APRPRXRGRTRGRTRGWRRGPCWRGVCPLPVPTKGVQKETRPNKNHAGLRLMVMLITMCFLLDTTSYYLLLGPS

SEQ ID NO: 366236 - protein, 179 aa, Zea mays
  Clone ID: MRT4577_97171C.1.pep
MEGGAHGFDGSAFRECFSLSWRNPYVLRLAFSAGIGGLLFGYDTGVISGALLYIRDDFRSVDKNTWLQEMIVSMAVAGAIIGAAVGGWANDRFGRRTSILVADLLFFAGAVVMASATGPVQLVVGRVLVGLGVGMASMTAPLYISEASPARIRGALVSTNGFLITGGQLLPYLNHLAFT

SEQ ID NO: 366237 - protein, 180 aa, Zea mays
  unsure (1)..(180): unsure at all Xaa locations
  Clone ID: MRT4577_97172C.1.pep
RYSMKIFSEIRKQKYLEAXLDRHDRAKAVEILVKDLKVFASFNEELFKEITQLLTLENFRLNELLSKYGDTKSARNIMLLELKKLIEANPLFRDKLNFPPFKASRLRTLINQSLNWQHQLCKNPRPNPDIKTLFTDHSCAAPTNGARAPPPANGPLGSIPKSAGFPPMGAHAPFQPVVSP

SEQ ID NO: 366238 - protein, 46 aa, Zea mays
  Clone ID: MRT4577_97173C.1.pep
PLPQASSGRQLLMAQVALVALSMECQWPYRSPLSLVSSIKRLWSKN

SEQ ID NO: 366239 - protein, 75 aa, Zea mays
  Clone ID: MRT4577_97174C.1.pep
KAEGIPSQRVKSETGAFKYFKICFPCISMDISNGPLILKGGLAFFLQTKVQGVIYDSCLLGNKFLAPPLFPCHFR

SEQ ID NO: 366240 - protein, 49 aa, Zea mays
  Clone ID: MRT4577_97175C.1.pep
TFLPHNMFSVTSANNCWSGIHNDLHEAREIRDTGRGDLERRGGVEVRAT

SEQ ID NO: 366241 - protein, 111 aa, Zea mays
  Clone ID: MRT4577_97176C.1.pep
GFFIRLLYLRLLVGIYIPPNGDEVLCATWTWGLGEGARRVRRNGVQRKCPLLLPQLEVMNTVHAHHFRACSFMDCVRLSLEWILISSKSKFSLFFLNPIQTIWNKNNRFVS

SEQ ID NO: 366242 - protein, 191 aa, Zea mays
  Clone ID: MRT4577_97177C.1.pep
AGRKKEESRKNEEHVNLIKEYRAKIEAELSNICDGILKLLDSHLVPSSTAAESKVFYLKMKGDYHRYLAEFKTGPERKESAESTMMAYKAAQDIALAELAPTHPIRLGLALNFSVFYYEILNSPDKACNLAKQAFDEAISQLDTLGEESYKDSTLIMQLLRDNLTLWTSDLTEDGADEGKEAPKGEAGDGQ

SEQ ID NO: 366243 - protein, 186 aa, Zea mays
  Clone ID: MRT4577_97178C.1.pep
KRSLVRRKAVNLIKEYRGKIEAELSNICDGILKLLDSHLVPSSTAAESKVFYLKMKGDYHRYLAEFKTGAERKESAESTMVAYKAAQDIALAELAPTHPIRLGLALNFSVFYYEILNSPDKACNLAKQAFDEAISELDTLGEESYKDSTLIMQLLRDNLTLWTSDLTEDGADECKEASKGDAGEGQ

SEQ ID NO: 366244 - protein, 75 aa, Zea mays
  Clone ID: MRT4577_97179C.1.pep
RTRPPTRPHISNPVNHQRTKHIEIDLHFVRERVAVGAVRVLHVPTASQYADIFTKGLPSSVFTKFRSSLNILPGG

SEQ ID NO: 366245 - protein, 90 aa, Zea mays
  Clone ID: MRT4577_9717C.1.pep
QRIQVCRPQVVQPSERVDRQVHLDSAVDHLLQAVELIVRARVTVILDSGTQVEFVAMHDVTDAVPIVVFVGSQTLLSSGPVVHVTVNYAS

SEQ ID NO: 366246 - protein, 99 aa, Zea mays
  Clone ID: MRT4577_97180C.1.pep
LTHVKGCSMAGSVGPCTGDAGTPGRMGGLWSCPRCSSGVQRVVSLRTAAACCRGAFLRLKRDSPEERIRLPEADRQGDPAGFWRQVVVRGLTSGGEVVS

SEQ ID NO: 366247 - protein, 148 aa, Zea mays
  unsure (1)..(148): unsure at all Xaa locations
  Clone ID: MRT4577_97183C.1.pep
SSGRLRCCFALILGSVARLWSRCARPSXSPVCLSLALGSXERWRCASWRVLXVSVCVXVLSVVVAPGCALGALLGFVALSLAPAFSSACVPPPFSPGCVPAVLLAXFCFCLWGVRSLRLAFSSLPLLFVRACARAXSWVACPAPASVA

SEQ ID NO: 366248 - protein, 294 aa, Zea mays
  unsure (1)..(294): unsure at all Xaa locations
  Clone ID: MRT4577_97184C.1.pep
EAGRGHRPYPQLPRARDQPRARSNLALLSICSTDENVYMAQLSDQAEXYEEMIQYLHNQXKLVMMREGPTRVAADVDLIPMAHTTSCRLAGVARCSHRQHLSSXLEXQQESRTNQQHVHLITEYPAQIEAELRNICAGILKLLDSHLEPSSTAAESXLFYLKMKGDYHRYLAEFKTGPERKESADSTMMAYNAAQDIALAELAPTHPIRLGLALNFSVFYYEILNSPDKACNLAKQVGITYTFLLYMFILPCLGEDLSVHLSLDRNIHKCLLTVAYMVLVLNCSAFRSFLLVLI

SEQ ID NO: 366249 - protein, 601 aa, Zea mays
  Clone ID: MRT4577_97185C.1.pep
MARLPLAACAVAAAFYLCLHLASSSSSAPRLAPAPSDPGRRAGRTAYHFQPAKNWQNDPNGPMYYNGMYHLFYQYNPHGALWGVGNLSWGHSVSGDLVNWAALDTALDPTSPFDANGCWSGSATILPGGTPAILYTGIDANGEQVQNVAFPRDPADPLLRRWDKPGYNPVIPLPADVPGDKFRDPSTAWLGRDGLWRVAVSAEVRGVASTLVYRSADFLRWERAPAAAPLHASRAAGMVECPDLFPVREEGDDGDGQGLDASASGAGVRHVLKLSVMDTLQDYYMVGRYDDAADAFVPAEPERGDDVRGWRRLDYGHVYASKTFFDARGSRRVLWAWANESDSQADDVAKGWSGVQTFPRKLWLDEDGKQLRQWPVEEIETLRRKRVVLRRGTALATGGMNEIVGVAGSQADVEVAFKVSSLAGAEALDPNWLLDPQKLCGEKGASVPGGVGPFGLIVMASSDLREHTAVFFRAFRYHGRYKLLMCTDLTRSSTRAGVYKPPYGGFVDVDVEEHETINLRTLIDHSVVESFGADGRMCITARVYPEHAETSNSHMFVFNNGSGTVEVSKLEAWELAAATVNSVGGNDSLVMSESNNQSESY

SEQ ID NO: 366250 - protein, 176 aa, Zea mays
  unsure (1)..(176): unsure at all Xaa locations
  Clone ID: MRT4577_97186C.1.pep
RRASWRIVSSIEQKEESRKNEEHVNLIKEYRGKIEAELSNICDGILKLLDSHLVPSSTAAESKVFYLRIKGAYQRXFLAELKTGPERKDSVESTIMAYKVVQDIALADLAPTHPIRLGLALNFSVFYYEILNSPDKACNLAKQAFDEAISQLDTLGEESYKDSTLIMQLLXDNLTL

SEQ ID NO: 366251 - protein, 113 aa, Zea mays
  Clone ID: MRT4577_97188C.1.pep
LAVSSSLCTWSTLPSVELKEAVSTMVFDLSANKLLSLEPSRSKILRKSFFDFVRGLISFPLYLPGTAYYSCMKGRQSAMEVLQEVLAERKRLVQVPGAGRGAMETIRRHGGDF

SEQ ID NO: 366252 - protein, 262 aa, Zea mays
  unsure (1)..(262): unsure at all Xaa locations
  Clone ID: MRT4577_97189C.1.pep
VCSFIDMAREENVYMAKLAEQAERYEEMVEYMEKVAKTVDVEELTVEERNLLSVAYKNVIGARRASWRIVSSIEQKEESRKNEEHVNLIKEYRAKIEAELSNICDGILKLLDSHLVPSSTXPESKVFYLKMKGDYHRYLAEFKTGPERKESAESTMMAYKAAQDIALAELAPTHPIRLGLALNFSVFYYEILNSPDKACNLAKQAFDEAISQLDTLXEESYKDSTLIMQLLRDNLTLWTSDLTEDGADEGKEAPKGEAGDGQ

SEQ ID NO: 366253 - protein, 75 aa, Zea mays
  Clone ID: MRT4577_9718C.1.pep
RNGRLRRPRPQIADPAMDGARPAGCARSGALPGLERPAPPHLLRRSQVRHYVPSDCFVGMPCGIHHRRRPRHEGV

SEQ ID NO: 366254 - protein, 358 aa, Zea mays
  Clone ID: MRT4577_97191C.1.pep
MATEEAGRALATKAKLVAAVLVLELLVAGFHVVSRAALDMGVSKMAFLVYRNAAALLVVAPVAYFLDKKDRPPFTLRLLMDFFLLAAVGVTFTQGLYILGLYYLSPTYVSVIQNSVPAITFVMAASLRIEQVNVRSRYGLAKMLGTVVTIAGATVITLYKGTPLLTETAHAEGTTHTLEGTHTLGGWVAGCLIMFANCICLSAWMVLQVPVLKKYPAKLSSFTITLALGFVQLAVVAPFFESDVERWKISSGGELFTILYAGVVVLGIAWYLMIWCINKGGPHFVSVFQPLQTVMVAIMAAIFLGDTLYIGGVIGAVIIVAGLYCVLWAKSKETKSSGDLLVLPERSPAQQNLLQRED

SEQ ID NO: 366255 - protein, 58 aa, Zea mays
  Clone ID: MRT4577_97192C.1.pep
PTRPGGLAFFFSPHRLQLREVLLESGAGFILIYMTSSNFNYPYFFCCLACATDYHFLH

SEQ ID NO: 366256 - protein, 151 aa, Zea mays
  Clone ID: MRT4577_97193C.1.pep
RAPLVPPLQFGNGFVSGAVGQQRGGPVPPAVSPRPVTASAFGKMEGDDLSSLSPSPVPYIFGGGLRGRKPPAMEKVVERRQRRMIKNRESAARSRQRKQAYMMELEAEVAKLKELNDELQKKQVCLYNVCIFVSWGALTYESISPEIVKFK

SEQ ID NO: 366257 - protein, 67 aa, Zea mays
  Clone ID: MRT4577_97194C.1.pep
MATEEAGALATKARLVAAVLVLELLVAGFHVVSRAALDMGVSKMAFLVYRNAAALLVVAPVAYFLDK

SEQ ID NO: 366258 - protein, 57 aa, Zea mays
  Clone ID: MRT4577_97195C.1.pep
TNSEELSFLYLYPSLSTRTVRYLLKLCLCNKAVGPILNFWYHSFPLECTKTQKTDSS

SEQ ID NO: 366259 - protein, 377 aa, Zea mays
  unsure (1)..(377): unsure at all Xaa locations
  Clone ID: MRT4577_97196C.1.pep
DGEAGRALATKAKLVAAVLVLELLVAGFHVVSRAALDMGVSKMAFLVYRNAAALLVVAPVAYFLDKKDRPPFTLRLLMDFFLLAAVGVTFTQGLYILGLYYLSPTYVSVIQNSVPAITFVMAASLXVARGGRLFGIIYNLPRLXIIRQIXLTLGWXNRIEQVNVRNPRIAGATVITLYKGTPLLTETAHAEGTTHTLEGTHTLGGWVAGCLIMFANCICLSAWMVLQVPVLKKYPAKLSSFTITLALGFVQLAVVAPFFESDVERWKISSGGELFTILYAGVVVLGIAWYLMIWCINKGGPHFVSVFQPLQTVMVAIMAAIFLGDTLYIGGVIGAVIIVAGLYCVLWAKSKETKSSGDLLVLPERSPAQQNLLQRED

SEQ ID NO: 366260 - protein, 122 aa, Zea mays
  Clone ID: MRT4577_97197C.1.pep
LWPSNTKKCPCSLSYLHATKSFQASSILAASVSESLSWRSLGTRRIRSFMAKQKIDDQLVDAERQVPEQGNVLWWILRPRSSPWTSPPTAMTGSSFLARSSISSSSPPSCSRRLVTSTSLRQ

SEQ ID NO: 366261 - protein, 76 aa, Zea mays
  Clone ID: MRT4577_97198C.1.pep
VERWVFSPKRSPAYIRVVELVQILGSVNGSLGVQSKIQKSYCQYSLLLAEAGQCHAHNKTTNGERSRLNCLQSAAE

SEQ ID NO: 366262 - protein, 79 aa, Zea mays
  Clone ID: MRT4577_97199C.1.pep
KISSPDSLPPKILFLHNHFQTHYQGARGALPNRHGHSLPRFVNVLSSLMILSSRQRRNPPASRRTPPSPWPLHPRRPRR

SEQ ID NO: 366263 - protein, 87 aa, Zea mays
  unsure (1)..(87): unsure at all Xaa locations
  Clone ID: MRT4577_9719C.1.pep
PTITPQGICFVVGQQISGKXVVIARDELLSMLSXEQVRYGELCVFANKQDLPNTMNAVTSTNKLGLQGKLERHXYMLGNCAATDGGM

SEQ ID NO: 366264 - protein, 147 aa, Zea mays
  Clone ID: MRT4577_971C.1.pep
VLRISSAVRFYWWAESRPGFDHTQFAIAYVVSLLFVDSNFFLLSEFLERVRSQGVALHRSLYRILLSGYVRAGKFDSVIHTFDEMVTSGCREFGVDYNRFIGVLVKNCCFDLVEKYYSVALDKGFCLTSFTYSRWISALCQSERIEL

SEQ ID NO: 366265 - protein, 98 aa, Zea mays
  unsure (1)..(98): unsure at all Xaa locations
  Clone ID: MRT4577_97201C.1.pep
YPRSSAGXIVAAVGDSVSHIKVGTPVALMTFGSYAEFTEVPAKHLLPVPRPDPEVVAMLTSGLTASISLEKAGQMTSGQVVLVTAAAGGTGQFAVQVS

SEQ ID NO: 366266 - protein, 153 aa, Zea mays
  Clone ID: MRT4577_97202C.1.pep
GSHSLWRLLLPLKGACCHWSSLHSNSVHVLGTGINFATENLSVPDPLHCAGHINHDKTQADPRDDDLLFGHENRSHRRKTKGEARGVKKNQLMCARFTERTGKQMELQAPKQSESGASPLMFNTRSPSLCAKGGRAAQTRFVAAGLEVFAPHQ

SEQ ID NO: 366267 - protein, 84 aa, Zea mays
  unsure (1)..(84): unsure at all Xaa locations
  Clone ID: MRT4577_97203C.1.pep
VVSRHPLPSIRFSRSPFPVRLCSSHFWPQHEAAHLRSRSTQAGIQVANEXCELYXLQHGIQADAPMPGDKTIGRGADAFRPFFR

SEQ ID NO: 366268 - protein, 111 aa, Zea mays
  Clone ID: MRT4577_97204C.1.pep
VAILRGDIYSFGVVLLELLTGLRPVPVLTTSKELVPWVLEMSSQGKLVDVLDPTLCGTGHEKQMLKVLGLACKCVNNNPAMRPHIMEVVTCLESINVGLQAQKSVKTQAYT

SEQ ID NO: 366269 - protein, 92 aa, Zea mays
  unsure (1)..(92): unsure at all Xaa locations
  Clone ID: MRT4577_97205C.1.pep
VLDLSKEAXHFVLHRLYSSLGRLKMEGDILAVQIWRTLRLIVAGLDCTTSCLLQVNSDLKLVDPPTVSTATFFTGNNLPLLSNWTNNISSSD

SEQ ID NO: 366270 - protein, 107 aa, Zea mays
  unsure (1)..(107): unsure at all Xaa locations
  Clone ID: MRT4577_97206C.1.pep
PCRRDLALRARYRAAVLSQAHPFTHSATLSIRPPHAAARTDTLEPPQQEAVKPSPTNGRIRYRTPSAADLLPADDVAAXAATATAVAARMRRYSGDGARQQQQMEVL

SEQ ID NO: 366271 - protein, 64 aa, Zea mays
  Clone ID: MRT4577_97207C.1.pep
CAGINGNLMKPDRTLWNPFRTNQPHASVLVQAKSKSITFSGDKELPAMEMTYGTQANSLPCHLM

SEQ ID NO: 366272 - protein, 132 aa, Zea mays
  Clone ID: MRT4577_97208C.1.pep
HFVGGFPLPGNPKPEEVRPPFENGVFPVPVPKAGVKKPGVKSFQFSGLKKHGREVNGWVGFGLGGGFLGFKDPTWVCVLGGCFALVFLGGTCAFQCFLGPVWPLGCSVGFLAQFFFLWELINKTPPPVVFSP

SEQ ID NO: 366273 - protein, 117 aa, Zea mays
  Clone ID: MRT4577_97209C.1.pep
PSQPWSCLTVSLRASSSPFVLLALHLWSSAPISDVFFPSSIFPPLDRASAPPWNHGRAPQLPARHHPVLLPVEQRATVDVAAKTTVQPPSTGPSTARFPWPRALELFPIPSPRPLCS

SEQ ID NO: 366274 - protein, 90 aa, Zea mays
  Clone ID: MRT4577_9720C.1.pep
FSRFLICRHLICIFIYPWTTVSCLYLWLTKFGDRFSLALHKGDHKVRIYFLCTSTVYCIVCKCYFCKHLLMIIYIIYIYTYIYISWITLF

SEQ ID NO: 366275 - protein, 63 aa, Zea mays
  Clone ID: MRT4577_97210C.1.pep
KRGIIELSGQGVHNIKETGPVIAQHIPTRDGLIYYNKPSFLLVPPPITNSRLQWKRVTPEVLG

SEQ ID NO: 366276 - protein, 75 aa, Zea mays
  unsure (1)..(75): unsure at all Xaa locations
  Clone ID: MRT4577_97211C.1.pep
GLMDYAFSYGRTQRMVFSPEEAYTVPHGTKAPCDRKRMLRAKHXRYRQMTATAKARRVPSSGTRTCPGTTSTRWS

SEQ ID NO: 366277 - protein, 55 aa, Zea mays
  Clone ID: MRT4577_97212C.1.pep
PFFFCRQRVKNLFFLPISLGAVYEPKFPFMKRPKVSGQQVTFFGLVGPLACLRIL

SEQ ID NO: 366278 - protein, 150 aa, Zea mays
  Clone ID: MRT4577_97213C.1.pep
MGSYSTSEVLNAAAVGVHHPALRLHELDLKGSMSVEELPTTSGLENGHQAPFVIGVAGGASSGKSTVCKMIIDQLCDQRVVVVTQESFYYGLSDEEMVHVHDYNFDHPDAFDTDLLLSCMEKLKHGKAVDIPSYDFKTHKSVSCARKVNP

SEQ ID NO: 366279 - protein, 68 aa, Zea mays
  Clone ID: MRT4577_97214C.1.pep
YDLISKTPACLQSRAHKRCLRLLFLLGASVGISRYVMSWFGTRSAPVFSPATGTACFFKMTTAIASSS

SEQ ID NO: 366280 - protein, 123 aa, Zea mays
  Clone ID: MRT4577_97215C.1.pep
VHVCHRLYGSGHLAMMSPSRFSPKQECRLWYNFLINMTPNVSISMSGASAGNVCVEHSMRSLRFTNRIELGSCSPLDDAQIDRISLVNRCLPHGFSGTNKFSLLLPDACGHYSHVYTRVLRLV

SEQ ID NO: 366281 - protein, 87 aa, Zea mays
  Clone ID: MRT4577_97216C.1.pep
SELTRSSMFSSATTIPHQVVSHYRPMTTNRSMSMLFYCTHLTSDTISDVIHRKPSRARTVLFVTYTPNSFINVLTSCSVTVEHPSAI

SEQ ID NO: 366282 - protein, 126 aa, Zea mays
  Clone ID: MRT4577_97217C.1.pep
EMLVVYDYSPGGLLSHHLLRRHDCGAVLPWRQRYSIVRALASAVLYLHEEWDEQVIHRSITSSAVFLDPDMNPRLGSFALAEFLSRNERHGGGHHVVVTASSARGIFGYMSPEYMDTGEATTMADV

SEQ ID NO: 366283 - protein, 40 aa, Zea mays
  Clone ID: MRT4577_97218C.1.pep
GFYNNYDMSGYTISVTIAEKSAPKAAPYLWSWVSSVYLNI

SEQ ID NO: 366284 - protein, 102 aa, Zea mays
  Clone ID: MRT4577_97219C.1.pep
YKRGKVLANTILPPLLKRTTSSKKLMLGNPIYSPKPQVFTNPHLIKKRPPKRENRPPQKGEDGTPPKKWKKTPKIDPKRGKSPKKKNKKKKKKFFFFFFYFF

SEQ ID NO: 366285 - protein, 113 aa, Zea mays
  unsure (1)..(113): unsure at all Xaa locations
  Clone ID: MRT4577_9721C.1.pep
QRLMFAGKQLLYGRTLEGYNSXKECTLQMVIRLGGGMQIFVFPLGGESISLEVESSFSIVNVEGKIQAKXGIPPAHXGLIFSGYQLEDGRSLAVFNIQKFSTLXLVLRLRGGQ

SEQ ID NO: 366286 - protein, 55 aa, Zea mays
  Clone ID: MRT4577_97220C.1.pep
SRPTASAYPAAASSERTPPPASTARPPPPAPCSEIGGWPPCPGMVFGSTHCSKVM

SEQ ID NO: 366287 - protein, 53 aa, Zea mays
  Clone ID: MRT4577_97221C.1.pep
FGPGVETGFGWQHPPRQGPPVAPGPEPPVVLRSWRCSYTAGDSEVCLGLAPPF

SEQ ID NO: 366288 - protein, 134 aa, Zea mays
  Clone ID: MRT4577_97222C.1.pep
FLSCVHSHRMLFVVFTGHRVAESDADGVSHVKIQKRKHSIYNMAWIHASMQGTSITLHTIQHVTCCRPHDLVCCGPYVLSAEAFGQRSFPRRSSGRQLRPPSPGAWRSASSAVAPGATAGGERAYQQMSFLLSS

SEQ ID NO: 366289 - protein, 66 aa, Zea mays
  Clone ID: MRT4577_97223C.1.pep
FATSTVDANVKSNSGIVANSDASNTDVQTNTGSVNNSDDYSIDSKPNIGRVAASIQRLESSMGKYR

SEQ ID NO: 366290 - protein, 114 aa, Zea mays
  Clone ID: MRT4577_97224C.1.pep
IRWSIVAWSVCVISPFINLLPSSCTMCIILLWGIPSTIMLVSVSLEVSQLRRVVLGMSIWWSTVVVDISFMWRAIMVVSSVVQVTVRLRWSARISSWWSYSHHAIVIVVSAALF

SEQ ID NO: 366291 - protein, 125 aa, Zea mays
  Clone ID: MRT4577_97225C.1.pep
VTLKKYSFCTLLPYPNISLYMSTMTRKELVPFKRAALDATDAADGIPGSVVLNVDALKTTNKPRYYVFDPANFAEFVPADAAELNLVVQVISVKGSKDELVNDLPQKEIGGAAWTKATILKLHGK

SEQ ID NO: 366292 - protein, 158 aa, Zea mays
  Clone ID: MRT4577_97226C.1.pep
LFGIKLPLFAHHLLPKVFAMITTIYHAKVVGFEGLYQLLMVCPIIQAMLLPSSVIPVFRISSSRSLMGRYRISRCVEILCFLAFLLTLFTNIIFMAEVLFGDSTWTNDLKGNTENPILLPYIVVVLISCGSIGFALFLAVTPLKSACNEAERALSVHS

SEQ ID NO: 366293 - protein, 177 aa, Zea mays
  Clone ID: MRT4577_97227C.1.pep
FGSRAGKRQSVKDATGKVAHSAGSSLRRYNEAALKKEVQELIVSWKSYFETCVCAFIYAPSRNRQMLFDGEKTQSVIQSCDVRPVPLTVHRPTLKEAKRVYCNLTQLYYEMECSTTDETLPDAGSVKNVEQGEGKKKEVAANPGESISDLSTPLELLNKNEAATIPSSKNETTLFMS

SEQ ID NO: 366294 - protein, 72 aa, Zea mays
  Clone ID: MRT4577_97228C.1.pep
NHPKERGEKKRKQQSFKKERGEKPTFGPSIHALNKIKKKRAKRQIFCTFFFAGFTPWGDYPPNFTKEVPLPH

SEQ ID NO: 366295 - protein, 315 aa, Zea mays
  Clone ID: MRT4577_97229C.1.pep
RLEAGKRQSGKDATGKVAHSAGSSLRRYNEAALKKVLNLMLVDFYVCSKSKCLSLFFRCLSFLFALLQEVQELIVSWKSYFETCVCAFIYAPSRNRQMLFDGEKTQSVIQSCDVRPVPLTVHRPTMKEAKRVYCNLTQLYYEMECSTTDETLPDAGSVKNVEQGQGKKNEVTADPGESISDLSARLELLNKNEAATIPSSKNETTPLHEAAKCGNAQLTLELLEQGLDPCVKDARGKTSYSLASDKEVRNTFRRFMALNLDKWDWHAADVPSALTKEMEESQAAKQADKDAKRKARAKELKKLKKKKKKGGRLAI

SEQ ID NO: 366296 - protein, 511 aa, Zea mays
  Clone ID: MRT4577_9722C.1.pep
MAPKRKNQSSAAAVIPPIDLNSQLPFAGRQQDVRTPSWIESPTDLEITEAKVLLAEICLLKERAYKSFFNFVSNPPVGDSGLGFRVRPSPKDIEVLVASLGDLPNDERQVHFEMPTSPGDAEISAMLDMLAGDSSYSVPAETMAVATILELEKIDAGPSAPAAEEVLVEIFTGADPNGCDPADADPNGCDPIRADPNGCDPTRAEPNGCDPVSFIIRIVDEDEEEEEEVPLIRKNSRRYRVSGGSSDIPSPALSVLVGLQQLSIANFDQALEDVVPEDLLLEPTDGDMMDVCSNTPDVGLEVSREASRASSTLEGGLRSQEVGQGRSIPMEVTKNPSALEVAVAENPVFKGGAGGCLAPKGVAGNDPARVGSASYNPAPEGVVGDDPASMGSAGCNPAPEGVRAGSSSHTSMDVHVGSSPPHSDGIIAAHASNEEVALEIAPVDIPSSSHHLASRDLGFPSFFSNLQALVDGMAGQLRSQGASIPEGALSLTQWNLLLLQKQISDLKMSNA

SEQ ID NO: 366297 - protein, 49 aa, Zea mays
  Clone ID: MRT4577_97230C.1.pep
FSFINTSNKFNKFFQQINKYPNSIVPIFPLNNIPLFFTFPLFQKAPFLT

SEQ ID NO: 366298 - protein, 172 aa, Zea mays
  unsure (1)..(172): unsure at all Xaa locations
  Clone ID: MRT4577_97231C.1.pep
GVPRRVYTSTGLYEYRGWDCKVGXTEHRRFTWGLRSMERHAVDFYISDFQSGLRALVKTGYGARVTPYVDECVVIDIDPDNKDMSPEFLRWLRERNLSSDDRTMRLKEGYIKEGSTVSVMGVVQRNDNVLMIVPPSEPISTGCQWAKCVLPTNLDGLVLRCEDTSNIDVVPV

SEQ ID NO: 366299 - protein, 110 aa, Zea mays
  Clone ID: MRT4577_97232C.1.pep
FHEASWLVCFLSVSSFSPLCSSLCSFVQRDDVFLFFVVLKNLFLSSVASSDEDCDEKHNQNTPSFGTDWLDTSHAANSAILTSPFQPADFLLHFHAFIHASVCCIVKKLI

SEQ ID NO: 366300 - protein, 310 aa, Zea mays
  unsure (1)..(310): unsure at all Xaa locations
  Clone ID: MRT4577_97233C.1.pep
MVGHLDFCFASMKNAGQTSFASLNQAVTXLNTEDGYSIXDSFPKPILWAVILLFVMGFIAGGFILGAVHNAILQLVVVVIFGFVAALLIWNACWGSRGAVGFVNRYPDADLRTAKDGQYVKVTGVVTCGNFPLESSFQRVPRCVYTSTSLYEYRGWDSKAANTEHRRFTWGLRSMERHAVDFYISDFQSGLRALVKTGYGARVTPYVDESVIIDINPDNKDMSPDFLRWLRERNLSSDDRTMRLKEGYIKEGSTVSVMGVVQRNDNVLMIVPPSEPISTGCQWAKCVLPTNLDGLVLRCEDTSNIDVIPV

SEQ ID NO: 366301 - protein, 58 aa, Zea mays
  Clone ID: MRT4577_97234C.1.pep
IVSSHSLRFILSCEHFVFYDVHPTQQPCNLPLCFSLWSLPLLSLRLCSYGNLHKLLKK

SEQ ID NO: 366302 - protein, 156 aa, Zea mays
  Clone ID: MRT4577_97235C.1.pep
INNCIIRRHRSSNTKLPGRRRPRSLSRTHRSILHAPHPAVPVLDLCSQVSQAWTRKCRSRAKSLPEIPKVVVVASLQSLRSLLRSLHQTDTQGVQLCRTRRTRSLGRQRLTLDSSKIGSRSQSPWTRTQVPGWAPSRWTVKTGGKPLRTARWRFGF

SEQ ID NO: 366303 - protein, 49 aa, Zea mays
  Clone ID: MRT4577_97236C.1.pep
RIPFHIYDAIKLWRDLILKSSFPQQHDYINVFTLPRFNTLVTLYGPITR

SEQ ID NO: 366304 - protein, 333 aa, Zea mays
  Clone ID: MRT4577_97237C.1.pep
QMLNCVAGLREYFSQTDEIHTVPRIPVMHTMVNAASMKKDQNLQEPDSKTKQADNKHLDMVDEESEDDDDYQVPDADVEEEPTKSDSDAKNSDPIDLSWFSGIIRQDTNEKSRNCWAVPDSKIFKVRSKNFPHDKSKVPAGKYLMELVAVDWFKDAKRMDHVARRKGSAVQVAAEKGMFTFLVNIQIPGPSHYSLVLYFVSNSLKKGSLLQRFADGDDDFRNSRLKLIPSVPKGSWIVRQSVGSTPCLLGKAVDCSYLRGPDYLEVDVDIGSSAVANGVLGLVFGVVTTLVVDMAFLIQANTYDELPEQLLGAARLSHIEPSAAVYPVLDNIS

SEQ ID NO: 366305 - protein, 121 aa, Zea mays
  Clone ID: MRT4577_97238C.1.pep
MTEQAISFAKDFLAGGIAAAISKTAVAPIERVKLLLQVQHASKQIAADKQYKGIVDCIVRIPKEQGVLSFWRGNLANVIRYFPTQALNFAFKDKYKQIFLGGVDKRTQFWRYFAGNLASGG

SEQ ID NO: 366306 - protein, 105 aa, Zea mays
  Clone ID: MRT4577_97239C.1.pep
ARMYMGNRPHGQVTIRWSPPGAGPVQASPWRELDPCPIGHRRACPSPMRPPSLPPWPANLPLMWTSSTDKIEESRYLATLDPTRCHPMWLYHACGRLHSVYRIQQ

SEQ ID NO: 366307 - protein, 96 aa, Zea mays
  Clone ID: MRT4577_9723C.1.pep
SPVHPSAHRIGCVWLPGFGEVLPVQVPCCLVSRTTSWARPNSCTDSLAGRIPEYWSSLLSQVAPMQAWNTRNHFKLVFMLYLLINTSKKKKKKRPL

SEQ ID NO: 366308 - protein, 74 aa, Zea mays
  Clone ID: MRT4577_97240C.1.pep
FQRLTGPFYFPQTQNFTGGGAKQFFLGGALKPQKRVKKNFGGAKHTAPPIGFNQLWGTMLGKGTGAENSTWGGE

SEQ ID NO: 366309 - protein, 194 aa, Zea mays
  Clone ID: MRT4577_97241C.1.pep
MAALYALSPPAGAGAGAAPMSVVSAAPYYSSYPAVTDFLRSGLFRWAGDASSFRGDTYIELVCSPNNPDGAIREAVLPSGGSGVAVHDLAYYWPQYTAITRRADHDIMLFTVSKSTGHAGTRIGWALVKDRDVAKRMAKFIELNTIGVSKDSQLRAAKVLGAVSDAYELPEGAQHRLFDYGRRKMVERWRVLRE

SEQ ID NO: 366310 - protein, 90 aa, Zea mays
  Clone ID: MRT4577_97242C.1.pep
GGKTQPPNGPRHCRRNGKTQNPQKPGDYPIPQGRQSSFDITRPPPLPLFTLKIGKKKRKSTDNTKKEKRKKKKKKKKAHLKQKKKPKPKQ

SEQ ID NO: 366311 - protein, 47 aa, Zea mays
  Clone ID: MRT4577_97243C.1.pep
RRCHTDTSFSWCGTSLPLVHIYWIRDAQIQKEEGLMANTVNLLHNLF

SEQ ID NO: 366312 - protein, 168 aa, Zea mays
  unsure (1)..(168): unsure at all Xaa locations
  Clone ID: MRT4577_97244C.1.pep
MKVNIPNPSTGCQKKLXIDDYHRLPAYYDRKISHEDRRDALGEEFKAHVFQIMSGWDKXGFPMNRGVLTSDRARLXLLRRGTPCFRDYDKRNDERTKKSDRVWIANHDLSDIHLLLVTKVENDLPVLTETDNPKMIEPKRDSNIRNVFNLVKDDHLLKDVNTYRRTFT

SEQ ID NO: 366313 - protein, 123 aa, Zea mays
  Clone ID: MRT4577_97245C.1.pep
PAGILYLASDPTVPLTHAHTPMSPIAFCVFYIFSTSIRTRKASCPLRSIATSSATTRTTKTEPPATTLTPTPRWSPPPPRLITRPTQRMRRNTRHIHILYQDNMHRPPAHCESTRSHTQKGLQ

SEQ ID NO: 366314 - protein, 131 aa, Zea mays
  unsure (1)..(131): unsure at all Xaa locations
  Clone ID: MRT4577_97246C.1.pep
TPKKKNKRNSRNPPAPQNPGKKQPSKNPQPEKKKTKGSPTRPTTTRTPKTPRAPGTXRKNSPNPSPNRGSPGGASPEAFPSDPSPACISPIKPGGVLFWHAKAACRIXGPFCPLVLNLGAKPTKGKFGTLG

SEQ ID NO: 366315 - protein, 76 aa, Zea mays
  Clone ID: MRT4577_97247C.1.pep
GTLPTNPATGLPYTSSSLRKGCHPFTNGNGGRTAAAAVHPLRNHIDTGPFSKLHHLPPGLIALLHPKRAHTSLKQL

SEQ ID NO: 366316 - protein, 55 aa, Zea mays
  Clone ID: MRT4577_97248C.1.pep
SRARRTRLDSERLYTITVLLLLHSLPWIRLAVTYSTVIYQQPIIGGALFQSAYES

SEQ ID NO: 366317 - protein, 170 aa, Zea mays
  Clone ID: MRT4577_97249C.1.pep
STSTMATTFRNIFLKAAEAFCWLIGTVSGMFLLVLALTLFASTSSTHPSPSSAPTASSTSYHGTCDEDELHRLMATHVGYVVCAMAIAMLLMVFVRKVADGAAKDHERVAASEDAAYKAAYDAAEVAKEAIGRAEKEVKELNDPRRVNLALGVLEGDQALADARKKLDAC

SEQ ID NO: 366318 - protein, 90 aa, Zea mays
  unsure (1)..(90): unsure at all Xaa locations
  Clone ID: MRT4577_9724C.1.pep
FSAMDYTYPLSMPLHDADELTKWSLYRSVIAEFISTLLLLYITVDTVIVYKHHTDTASXGPDTAYSSVSIHGIMWAFSGMIFILSYCTVG

SEQ ID NO: 366319 - protein, 81 aa, Zea mays
  Clone ID: MRT4577_97250C.1.pep
QPEGGPLQGRLPVGQRGQGLPRRGRFAALTGHRPPPRPASRRTDPGVTSTPSASAALPRGSFWIACSFPCMCILARNYWMK

SEQ ID NO: 366320 - protein, 69 aa, Zea mays
  Clone ID: MRT4577_97251C.1.pep
LLLTPIVSLIAEGASKSDSQSQSSCRTINSWGCGGRCRTDVTANRPLEIQGRIAAKIGVLSVPSPAVPS

SEQ ID NO: 366321 - protein, 82 aa, Zea mays
  unsure (1)..(82): unsure at all Xaa locations
  Clone ID: MRT4577_97252C.1.pep
VSLFDIKRAGRKLPELIVHEQFVPLHGSLAPGRSGGDAAGPVVTSRGLPSPRGSVRARGRGANGRSLSCPDWRLLLVRLXPA

SEQ ID NO: 366322 - protein, 69 aa, Zea mays
  Clone ID: MRT4577_97253C.1.pep
RVDPASVKKKKKKKKKKKKKKKKKKKKKKKKKKKQKEDLFIWSRAFVLRAGALSYPFLGWRLPLFLLAL

SEQ ID NO: 366323 - protein, 72 aa, Zea mays
  Clone ID: MRT4577_97254C.1.pep
VVRQTDETRCSLSFLDENALSLEHLVHVVVASVIVQRGHVGVSLGCLSVLVDAQSQFEHAVDSAPRVSRRVR

SEQ ID NO: 366324 - protein, 64 aa, Zea mays
  Clone ID: MRT4577_97255C.1.pep
NTLNLAIRPKSATARTPSRPWRPPSRSATPAARDPPRPPPSPSPPQQPPSPPPKEKKRKKKEQT

SEQ ID NO: 366325 - protein, 87 aa, Zea mays
  Clone ID: MRT4577_97256C.1.pep
MLQMQAPLNICSFCTDYCPRVILVLPLYSDMSLPQLETLEIICCGDLREIFHPEDPKLENQDEVVKHFPKLRRIHLHNLPTLRSICG

SEQ ID NO: 366326 - protein, 95 aa, Zea mays
  Clone ID: MRT4577_97257C.1.pep
KPVHPIEAFFLSRFPQSQVYPVPFKCNKKLLRKYPNLFNYPKDISQIPGINSPVNMEPPRNPSSGTPPPITPYGIIPPGPTIDSNPPHARERFGP

SEQ ID NO: 366327 - protein, 115 aa, Zea mays
  Clone ID: MRT4577_97258C.1.pep
HKHTWGKNPGGTHGQKSPNHTRSLHPRGIPHHATPNHPTPKPAKKRLVLKIGPKNPPKPNAGTRVPPGPGDPKPGNHQQGEPQKPGPNAAGPPPARGPRAQNAPQKNRAQKGREQ

SEQ ID NO: 366328 - protein, 80 aa, Zea mays
  Clone ID: MRT4577_97259C.1.pep
LQTSGCQIFLQDQAGKIVTRYCHIIPHIAPYSTFYYPILFFKNIPLFLYFSIFYIFYNFLHFFLLFDYYINYILSFLIFL

SEQ ID NO: 366329 - protein, 423 aa, Zea mays
  unsure (1)..(423): unsure at all Xaa locations
  Clone ID: MRT4577_9725C.1.pep
MAVEYHCCSAAFFEHIVIIIVLVLFAGLMSGLTLGLMSLSLVDLEVLAKSGTEQDRKHAAKILPVVKNQHLLLCTLLICNAAAMEALPIFLDSLVTAWGAILISVTLILLFGEILPQSICSHYGLAIGASVAPLVRVLVWVCFPIAYPISKLLDYVLGHGQTALFRRAELKTLVTLHGNEAGKGGELTHDETTIIAGALELTEKKAKDAMTPLCQTFAIDINAKLDRNLMQEVLEKGHSRVPVYYEKKTNIIGLILVKNXIIXVRADDEVPIKSVTIRKIPRVLEEMPLYDILNEFQKGHSHMAVVIRKNNPSYQPAEQAANDGGTFEVSIAIDDKNNEKVVKNLPPPLQRWKSYPNTQNTSNRGNRPKKWSKDQADVLQVHKEPLPTLSEDEEAVGIITMEDVIEELLQEEIYDETDVHEEQ

SEQ ID NO: 366330 - protein, 126 aa, Zea mays
  unsure (1)..(126): unsure at all Xaa locations
  Clone ID: MRT4577_97260C.1.pep
ENPARAPRRAXGQPHRRAPGXPRRKAAGAXGRDRGDGAAEGKGRRGXADGGNGRGGRERRGRTRRGRRSRRAGAPRRSPTPQSRGSTPEXRRSGPGRRPTRPGRAHNKGNNRQGAKQQERKNQRTR

SEQ ID NO: 366331 - protein, 59 aa, Zea mays
  Clone ID: MRT4577_97261C.1.pep
MSAAMAWYPLPQSGGTGTPSGGGELLDDQSGGWALWSFGSADDDHGAGVVRAETHGSSN

SEQ ID NO: 366332 - protein, 73 aa, Zea mays
  Clone ID: MRT4577_97262C.1.pep
CAQLSISWSLMCGSSLSGGVHPVFSSRRVYSPHSCVQSCSSSASEHFLGISQVALALDSVCGCRRVSFLFVKL

SEQ ID NO: 366333 - protein, 70 aa, Zea mays
  Clone ID: MRT4577_97263C.1.pep
SQPHAMSTTLGVGMQRLSPRHPKPTTQLGMGGPQFVALDPGTCTTIDIHTTLLPPLGLQAIATCSAFPGR

SEQ ID NO: 366334 - protein, 69 aa, Zea mays
  Clone ID: MRT4577_97264C.1.pep
SQPHAMSATLGVRMQRHSPRHPKPTTQLGMGAPQFVALDPSTCTTIDIHTSLLPPLGLQAIATCSAPAG

SEQ ID NO: 366335 - protein, 45 aa, Zea mays
  Clone ID: MRT4577_97265C.1.pep
FYFLFLIAEQGGMINWQGYKLYPDSYKFEQEITNVCILETGALWV

SEQ ID NO: 366336 - protein, 893 aa, Zea mays
  Clone ID: MRT4577_97266C.1.pep
MRRSGLVTSEITPAAEAEQADIEETDSEDDHTIAIPSKPSHLDFGKSTISKADFPKMVKSGYFSEDEKKLIRFGGEETTPKPEKDEIVIFKSFLKAGLRFPLNRMIADVLKKFGIYFHQLTPNVIVRLSVYIWALRSQGVEPFAEGFCRVHELHYQTKARKDGLHENFGCYNFAYRKTTKFPVISYRSKWPAGWKSEWFYVKVDDDKEKLVPSPLELIFGETRPHCNMTPEGPTQIALAEFRIIAEHIGTRDLVQEFLSFKIFPTMKEWAMPKLKKEKKEGELVRLPYHYKFKKYFKEPCQEWFETIEVMSTEILGNYSKKEDQLMTAAFGTRPKRRLNRVLDAIGFEYPDYERLDKGAEGQKRKRVASVLTKDDEDQPKKKKEKLEPKAIAPRKRKAASPKPASPKPASPEPEILARDEEVYVAPSAAEAEEILKVMTESLPVKLSPLAPELTKFFQKDKETSAVESPAKPKKQRIIQVTDVIHRTPSPSSVSKIVVAKTVETAKGAAAEATRVETPEAETGGAETTGAEAGATEDPNLEETLEVIDNILLKMAEEEAAVVAASTATEKEKKQVEDALEGDFKFQDLLGQELTDAEKEELKKYAVSCGYKPGAMLFGGVNEGKLRCLRNHSEAKIIRTLSKSIGLPKLEADLCRYQRHHIAGSLLYANFKSILLSKVLKMQQDLEEEKNKAIIKDLEEKVENYEATLKNKDFAIQDFEIMAKEHEGALEKKDFVIQCMEGSLAEEKKHLETSLKTEMDKNSNLQTSLKELQEKCLSFGSRCVQRLKDVFHSIGASSEKFTPSAANLPSTLEYIEGEVDALDEVIGGHADFYAMVASRGTAAAFLKVTKLEVILSRMTKLMYDEAEVLTKSSLKLDSCFTILSCKNSGETFVI

SEQ ID NO: 366337 - protein, 960 aa, Zea mays
  unsure (1)..(960): unsure at all Xaa locations
  Clone ID: MRT4577_97267C.1.pep
MARVRSTARAEREGDEAEAAETVPISEAMRRSGLVTSEIAPAAEAEQADIEETDSEDDHTIAIPSKPSHLDFGKSTISKADFPKMVKSGYFSEDERKLIRFGGEETTPKPEKDEIVIFKSFLKAGLRFPLNRMIADVLKKFGIYFHQLTPNAIVRLSVYIWALRSQGVEPFAEGFCRVHELHYQTKARKDGLHENFGCYNFAYRKTTKFPVISYRSKWPAGWKSEWFYVKVDDDKEKLVQSPLELIFGETRPHCNMTPEGPTQIALAEFRIIAEHIGTRDLVQEFLSFKIFPTMKEWAMPKLKKEKKEGELVRLPYHYKFKKYFKEPCQKWFETIEVMSTEILGNYSKKEDQLMTAAFDTRPKRRLNRVLDAIGFEYPDYERLDKGAEGQKRKRVASVLTKDDEDQPEKKKEKLEPKAIAPRKRKAAYPKPASLKPASPEPEILARNEEVSVAPSALEVEEILKVMTESLSVKLCPLAPELTKFFQKGKETSAVESPAKPKKRRIIQVTDVIHGTPSPTSVSKIVVAKTAETAKGAAAEATRVETPEAETGGAETVGAEAGATEDPNLEDTLEVIDNILLKMAEEEAAAVAASAATEKEKKQVEDVLEEGDFKFQDLLGQELTDAEKEELKKYVVSCGYKPGAMLFGGVNEGKLRCLRNRSEAKIIRTLSKSIGLLKLEADLCRYQRHHIAGSLLYANFKSILLSKVLKMQQDLEEEKNKVIIKDLEEKVENYEATLKKKDFAIQDFEIMAKEHEGALEKKDFVIQSMEGSLAEVQAENDSLKNELLKQSEKFEQEKKHLETSLKTEMDKNSNLQTSLKELQEKCLSFGSRCVQRLKDVFHSIGASSEKFTPSAANLPSTLEYIEGEVDALDEVIGGHADFCAMVASRGTPAAFQKAGCTHGNILNRPNFGLSASDLIDIPSLAPSIGNRFMTQIWXKWGRKMAGDEARSHLKPDDEVEV

SEQ ID NO: 366338 - protein, 55 aa, Zea mays
  Clone ID: MRT4577_97268C.1.pep
ENFDFRPGMIIINLGLKKGGNGGFLKTAAFGPFGRGGPDFPWEVGEPLQLEKPFA

SEQ ID NO: 366339 - protein, 42 aa, Zea mays
  unsure (1)..(42): unsure at all Xaa locations
  Clone ID: MRT4577_97269C.1.pep
SLPFSTXPPGGNFSTWNQPLNSTVQWIIQASGNTATDTHGEA

SEQ ID NO: 366340 - protein, 153 aa, Zea mays
  unsure (1)..(153): unsure at all Xaa locations
  Clone ID: MRT4577_9726C.1.pep
AINAKDAFARHTDEIWGTQLSKKSVQDKSGRAARRAAEKAQKAKEQAQANAKHAKAEADAQAESLKDTLLKKAASAQKLAEEYAEGIKAAVRGQADEVKKAADHHAKDVPKPEEIKAAAAEKGQGAQRKAGEFIEHLSETMIRKAHDAQXNCR

SEQ ID NO: 366341 - protein, 45 aa, Zea mays
  Clone ID: MRT4577_97270C.1.pep
CLSFSVMFVNRLFVALLSDCYIVNISKHTYLNQMSGLVMPKKKIT

SEQ ID NO: 366342 - protein, 526 aa, Zea mays
  unsure (1)..(526): unsure at all Xaa locations
  Clone ID: MRT4577_97271C.1.pep
MDPRARYPSGMGNGRGGNLNYYGRGPPPQQPHQHHNHQQTSGAHHHQQTSGAHHHQQYAQRXTSTSTSTTATIAISNSSSXIYQQQQQQWLRRSQIARETSGAAVTSEPKSLAPSTAADGVDSSSQDWKAQLKLPPPDTRYRTEDVTATKGNEFEDYFLKRELLMGIYEKGFERPSPIQEESIPIALTGSDILARAKNGTGKTAAFCIPALEKIDQEKNAIQVVILVPTRELALQTSQVCKELGKHLKIQVMVTTGGTSLKDDIVRLYQPVHLLVGTPGRILDLTKKGVCILNDCSMLIMDEADKLLSPEFQPSIEQLIRYLPASRQILMFSATFPVTVKEFKDKYLPKPYVINLMDELTLKGITQFYAFVEERQKVHCLNTLFSKLQINQSIIFCNSVNRVELLAKKITELGYSCFYIHAKMLQDHRNRVFHDFRNGACRNLVCTDLFTRGIDIQAVNVVINFDFPKNSETYLHRVGRSGRFGHLGLAVNLITYEDRFNLYRIEQELGTEIKSIPPQIDQAIYCQ

SEQ ID NO: 366343 - protein, 59 aa, Zea mays
  Clone ID: MRT4577_97272C.1.pep
GSCPCTCIVKKKKKKKKKKKKKKKKKKKKKKKKKKKKKKKKGRHDKKKLKFKYPSITIT

SEQ ID NO: 366344 - protein, 578 aa, Zea mays
  Clone ID: MRT4577_97273C.1.pep
MFRSFRRSGHATLPSLLRSSPPTTPAGRAKGARNRSPDPGANLLVLPNPFPDPNCKSSFATMDPRARYPSGMGNGRGGTPNYYGRGPPPQQPHQHHHQQQQQTSGAHHHQQYAQRQQQQHRHSHNHQQQQQQHQSQQQQQQWLRRNQIAREAAGAAVTSEPKALAPSTAADGVNSSSQDWKTQLKLPPPDTRYRTEDVTATKGNEFEDYFLKRELLMGIYEKGFERPSPIQEESIPIALTGSDILARAKNGTGKTAAFCIPALEKIDQEKNAIQVVILVPTRELALQTSQVCKELGKHLKIQVMVTTGGTSLKDDIVRLYQPVHLIVGTPGRILDLTKKGVCILKDCSMLIMDEADKLLSPEFQPSIEQLIRYLPASRQILMFSATFPVTVKEFKDKYLPKPYVINLMDELTLKGITQFYAFVEERQKVHCLNTLFSKLQINQSIIFCNSVNRVELLAKKITELGYSCFYIHAKMLQDHRNRVFHDFRNGACRNLVCTDLFTRGIDIQAVNVVINFDFPKNSETYLHRVGRSGRFGHLGLAVNLITYEDRFNLYRIEQELGTEIKPIPPQIDQAIYCQ

SEQ ID NO: 366345 - protein, 202 aa, Zea mays
  unsure (1)..(202): unsure at all Xaa locations
  Clone ID: MRT4577_97274C.1.pep
ILDLTKKGVCILKDCSMLIMEEADKLLSPEFQPSIEQLIRYLPXLVDXIDLKLGKEGVETVNFLSFFNKSIXNCVNRVELLAKKITELGYSCFYIHAKMLQDHRNRVFHDFRNGACRNLVCTDLFTRGIDIQATSRPVGFDFPKNSETYLHRVGRSGRFGHLGLAVNLITYEDRFNLYRIEQELGTEIKSIPPQIDQAIYCQ

SEQ ID NO: 366346 - protein, 40 aa, Zea mays
  Clone ID: MRT4577_97275C.1.pep
GDKASTSHPAKQSIKTPADKSRKTPTADKKSPKSGSHGCK

SEQ ID NO: 366347 - protein, 75 aa, Zea mays
  Clone ID: MRT4577_97276C.1.pep
MRMMSDERLRSDATAVLIDRPSGQILSALTGHSKKVTSVEFVGDSDLVLNGSAHKRVRIWRHPVDGNYPCGYTLN

SEQ ID NO: 366348 - protein, 122 aa, Zea mays
  unsure (1)..(122): unsure at all Xaa locations
  Clone ID: MRT4577_97277C.1.pep
EPRDSMHHPAGEVVAGVFLPYLPPAAAAATAPFGFGTGPQSHNHAPADDDGHLLFPCNDDSDLLTLLLPPYSAXGFHYAGQQPLLLDHRHDHDDDKAAQANENRPTHRPWKLDLRGETAGGG

SEQ ID NO: 366349 - protein, 80 aa, Zea mays
  Clone ID: MRT4577_97278C.1.pep
TRDTCDVCGQERETADHIVLRCHFAKTFWLAIGFHIPNDMTVQNLHQIERPSNLPQNEFSSFVILCCWQLWKRRNGFVFR

SEQ ID NO: 366350 - protein, 102 aa, Zea mays
  Clone ID: MRT4577_97279C.1.pep
GQTAREGEPSPPCKPRLGGWVLNAREPPPFFSPLCRGGEKSRVLKGFCKKAGKVLDVFCPTRRFFTFPSLCKGPFVKPKCPPVRRVINFSPGKTAPPLFFPP

SEQ ID NO: 366351 - protein, 55 aa, Zea mays
  Clone ID: MRT4577_9727C.1.pep
QAACATGDSSKENPSLQSHASPRSQARLTSRTLLHYPHLSMKHVPATLDQHHFRP

SEQ ID NO: 366352 - protein, 44 aa, Zea mays
  Clone ID: MRT4577_97280C.1.pep
STIQCEVLYLFKSYCPAVEVVCICITEQVEMLGFSRQGQMEFLL

SEQ ID NO: 366353 - protein, 43 aa, Zea mays
  Clone ID: MRT4577_97281C.1.pep
NSCATSKDTAAAILLVVSYSTNLLDKIKIMTNIVAYLTMLHYN

SEQ ID NO: 366354 - protein, 36 aa, Zea mays
  Clone ID: MRT4577_97282C.1.pep
QEIRKNSYCLYQSHTSIRCTGTSFNKEITMLNFLVN

SEQ ID NO: 366355 - protein, 47 aa, Zea mays
  Clone ID: MRT4577_97283C.1.pep
RVPCASGPSPCELSATTGPSHQLATPLSLSLSLRRPEVKRRQADGAG

SEQ ID NO: 366356 - protein, 62 aa, Zea mays
  Clone ID: MRT4577_97284C.1.pep
IMWPRGVVFRFVIGQQISLSLCPGTDLLPAPPYIEICYYPGKQRFSQRVPFFGPVDPNYNAN

SEQ ID NO: 366357 - protein, 122 aa, Zea mays
  unsure (1)..(122): unsure at all Xaa locations
  Clone ID: MRT4577_97285C.1.pep
SIFSSVSSTVISPSLVSPAGVSASALFSVFSSGASIIISLFSIFPFPAGANLSASSLFSIFPFSSDASSLVSPSAVSSTTPMTAALFSILSSSSTTFASTVXXTTIQCSVVAHPIDSSSGIC

SEQ ID NO: 366358 - protein, 65 aa, Zea mays
  Clone ID: MRT4577_97286C.1.pep
HLIFSLARMYWEMFLTGWSTSVGKNENFVNIGCPFVWVRIPTQWATAGLLKWSLVAPALFPDREF

SEQ ID NO: 366359 - protein, 145 aa, Zea mays
  Clone ID: MRT4577_97287C.1.pep
HDPGFFFPNAEDINPPKGKALRFLLAPLWGFFRKPFKLKCEFWAPFSKINTVLIGPPPPLFFFLRNPGLFPKGLCFFPNPVGWEFPPPLIFMSQKFKLEGPFIGGEIYYPFARWACFKKKKKKKKKKKKKKKKKKKKGILRKKKT

SEQ ID NO: 366360 - protein, 107 aa, Zea mays
  unsure (1)..(107): unsure at all Xaa locations
  Clone ID: MRT4577_97288C.1.pep
KPVTLGLGVKSPIKRSRYDDLYKAVXRTMFVFFXTNGQRCCPTSNVIIHTKIAQKFNERTAAWPTRIIDPDPLQEVCTLWPNLSERRRENIKKHISNAKRRGATILT

SEQ ID NO: 366361 - protein, 110 aa, Zea mays
  Clone ID: MRT4577_97289C.1.pep
KNKKNRKRKRVKIKAPPGEGPKHFFPLGGGGNSHSKSPGPRGSEQMDNLSKGREGKGGYPLLLPGLTPPKLFFGEPPTGQKSRVREGPLPNTPSLPGAQKKKLLIRNPFL

SEQ ID NO: 366362 - protein, 37 aa, Zea mays
  Clone ID: MRT4577_9728C.1.pep
FQIAERKQSGVHPFLSAMTNCYLGLAVHPGALHWPRP

SEQ ID NO: 366363 - protein, 139 aa, Zea mays
  unsure (1)..(139): unsure at all Xaa locations
  Clone ID: MRT4577_97290C.1.pep
MNPAATADPSSSSTSAATLRKRMISIDTARRGADGASPETAPRPDRAGSDKAPQEREEEGSMAASAPAAAAARESDLEAVGEPMSPAGRLFRETHFNCYIVAVIGLGAAVDVAAARAGLEVTLXRHPRFSSVQVNDSDA

SEQ ID NO: 366364 - protein, 61 aa, Zea mays
  unsure (1)..(61): unsure at all Xaa locations
  Clone ID: MRT4577_97291C.1.pep
QALFLFFIIIEILRLCDFSKRYGXILILXLPQKFYRMTFIDTSLYALRPQLKYIIRNPTHS

SEQ ID NO: 366365 - protein, 70 aa, Zea mays
  Clone ID: MRT4577_97292C.1.pep
YARLPWGHGCVRSSIWCRGHVRRGLAKYVHTIGTPGCRENYVVERVHCHRIDPIERRVEYNVMDDWVVEI

SEQ ID NO: 366366 - protein, 142 aa, Zea mays
  Clone ID: MRT4577_97293C.1.pep
VHRFMGTLFVPASVDPRAGVASRDVVVDHGTGLAVRLYRPSRQAVAGGAGGRLPVLVYFHGGAFVVESAFDPVYHGYLNALTAKAGVIAVSVNYRLAPEHPLPAAYEDAWAALAWVVANANANARRGGAGAGDPWLSRHGDA

SEQ ID NO: 366367 - protein, 93 aa, Zea mays
  Clone ID: MRT4577_97294C.1.pep
NSARGESWRQRPPLSRLEQGKGSWVSDRRMALTAADARASTSPSTRKWIRSWSLCTRRSSRTTPCSSRTTMSTPSTTSTAGTRTAMLAEFSPL

SEQ ID NO: 366368 - protein, 84 aa, Zea mays
  Clone ID: MRT4577_97295C.1.pep
QSTLNTMPRHSTGVVVVQHGCAGAPARLGQVRLLGVPKGLQRRVHEGQRRLGMVDGLDQVPRVPPVGTRTQTEINGPRVVVVYG

SEQ ID NO: 366369 - protein, 122 aa, Zea mays
  Clone ID: MRT4577_97296C.1.pep
NFHQKRRPHQGGRELHLLKPRNLQGCDHRPAKNPPRKDAPGGGEPPPRTGAQGEGEPTPQRSRPKKKRSWQGRTPPPSGERPPRGAPDGRCSPPPGWGLPTRGPPQKACPPPSGANHTGGDP

SEQ ID NO: 366370 - protein, 101 aa, Zea mays
  Clone ID: MRT4577_97297C.1.pep
RNTPVLINALSSNGSAYKKLESSTTAPFAGLVRKRTLTLSTLLTNSKWFIIVIYTIFECPLSNMLWYRPLYHTMRFLFNLFQVSIIIEQQFMDMQILNLIP

SEQ ID NO: 366371 - protein, 75 aa, Zea mays
  Clone ID: MRT4577_97298C.1.pep
MHDKYYVTLTSCNGIDTSQDLSPLRSRISECYTQPTKSQRRKKNREKMMKSVSNWLTWRYLLRPRRGLLPPLPAG

SEQ ID NO: 366372 - protein, 79 aa, Zea mays
  Clone ID: MRT4577_97299C.1.pep
YVHKGMFYSWCESVQITQVPVTYHGRDSWEKDRCQIYTRSKCCAHGFISGLLVRCNDVTPNGAHKDLYQLPCSGEWSRL

SEQ ID NO: 366373 - protein, 94 aa, Zea mays
  unsure (1)..(94): unsure at all Xaa locations
  Clone ID: MRT4577_9729C.1.pep
MKLNVSYPATGSQKLFEIVDEHKLRVFYEKRIGTEVEVDILGDEWKXYVLKISGGNDKQGFPMKQGVLSNVRVRLLLSKGHSCYRPTRDGERKR

SEQ ID NO: 366374 - protein, 193 aa, Zea mays
  unsure (1)..(193): unsure at all Xaa locations
  Clone ID: MRT4577_972C.1.pep
MKQWCDDVDRLLGMAHFGSARPKPRSSRRQHEASASVHSPSRPDDLRVELNRKRAGEDVRVSLERARERQQNVEGRNLDHDFAAVAPQTPTGARIQAGVPLTGMGCAALADDLRAATWPSKFRPHLPEKYDGTSNPSEFLQVYITAITAAGXELCARFTANFASTYQRHGVEAHLHAVTQKSSGHSRHAPMTA

SEQ ID NO: 366375 - protein, 141 aa, Zea mays
  Clone ID: MRT4577_97300C.1.pep
MFAASRVRCSDLLVCADMGSWRALTDIKNLVGVAPNPCAVAKKPVLQYSPAPRSFLCHGSWVQVLSNHGVAFFSSGRAEGTKRRQRCKQPADDKVRTRASCSCALAFLGGFDLIWVLLWLLRKFVASWRAKGNLNVSRREL

SEQ ID NO: 366376 - protein, 224 aa, Zea mays
  unsure (1)..(224): unsure at all Xaa locations
  Clone ID: MRT4577_97301C.1.pep
MNMYFEGYGYRGSTFEQTYRCYPASFIDKPQLESGDKIIMPPSALDRLASLHIEYPMLFEVRNTAAERTSHCGVLEFIAEEGMIYMPYWMMQNLLLQEGDMVFIKNANLPKGTYVKLQPHTTDFLDISNPKAILEKTLRNYSCLTTGDSIMVAYNNKKYYIDIVETKPSSAISIIETDCEVDFAPPLDYKEPERPKPTGSSSSDPAAEAQVEXEPKVSPFTGPG

SEQ ID NO: 366377 - protein, 211 aa, Zea mays
  Clone ID: MRT4577_97302C.1.pep
MNMYFEGYGYRGSTFEQTYRCYPASFIDKPQLESGDKIIMPPSALDRLASLHIEYPMLFEVRNTAAERTSHCGVLEFIAEEGMIYMPYWMMQNLLLQEGDMVFIKNANLPKGTYVKLQPHTTDFLDISNPKAILEKTLRNYSCLTTGDSIMVAYNNKKYYIDIVENKPASAISIIETDCEVDFAPPLDYKEPERPKPTAPPSADPAAEASE

SEQ ID NO: 366378 - protein, 66 aa, Zea mays
  Clone ID: MRT4577_97303C.1.pep
LYSSISLWPLYSSQTFDLHVSITLSLHQSFFWVGTARHSSQSFGFRQACCNSNHSQKIRVGHRCGP

SEQ ID NO: 366379 - protein, 197 aa, Zea mays
  unsure (1)..(197): unsure at all Xaa locations
  Clone ID: MRT4577_97304C.1.pep
MSLPPGAVGAVSSPAGITTEQIQKYXXDENKQLILAILENQNLGKLAECAQYQAQLQKNLLYLAAIADAQPPQNPTSHPQMVQPGSMQGAGHYMSQVPMFPPRTPLTPQQMQEQQHQQLQQQQAQALSFPAQVVMRPGTVNGMQQPMQAAGDLQPAAAPGGSKQDAAVAGASSEPSGTKSHKNAGAEEVGADVAEQS

SEQ ID NO: 366380 - protein, 60 aa, Zea mays
  Clone ID: MRT4577_97305C.1.pep
PRVRDWTGLRVTVELTVQNRLDRVSDVNSDAALVVSAIEEHDMNGQKVKIVRNSENIGVD

SEQ ID NO: 366381 - protein, 72 aa, Zea mays
  Clone ID: MRT4577_97306C.1.pep
KHKSATLIYSQKRHNYNIIHNVANFFFGEKQNKISSCVHPKELLFFLVGATIGSTGICLLWGSWRKQVSHYL

SEQ ID NO: 366382 - protein, 40 aa, Zea mays
  Clone ID: MRT4577_97307C.1.pep
IKSLNLKKILHFSKMYLAHFLTHTVLPLVEIFKKILFFQN

SEQ ID NO: 366383 - protein, 110 aa, Zea mays
  unsure (1)..(110): unsure at all Xaa locations
  Clone ID: MRT4577_97308C.1.pep
ADAASSVSPMQRLFDTSREVFANSYPGFVPPPDAVARLSGLLNELKPRDVRVAPSMSVFKHADPTSPPPFGIFCLPKSAIIPLHNHTXMTVFSKILFGSMHLKSYDWAKS

SEQ ID NO: 366384 - protein, 112 aa, Zea mays
  Clone ID: MRT4577_97309C.1.pep
MQRLFDTSREVFANSYPGFVPPPDAVARLSGLLRAGARLAKVNTDAVFDGSSETVVLYPENGGNLHCFTALTPCAVLDVMGPPYHRVHGRDCAYYSASSYSCAGDGNILGSD

SEQ ID NO: 366385 - protein, 106 aa, Zea mays
  unsure (1)..(106): unsure at all Xaa locations
  Clone ID: MRT4577_9730C.1.pep
IAGFILTRRMPGSVVSTRTWCLDPHDGFRADTLSCALPACFQSALDGSACLQWYMSDGIVLGSASSPQTGQRPRRACXLRLMFVSLRISAHRAFDSSQTDAWRTRG

SEQ ID NO: 366386 - protein, 278 aa, Zea mays
  Clone ID: MRT4577_97310C.1.pep
MPVQVGGSKVADPRPARVVDLSPVGDRSRASSKKNRRRHKKADAASSVSPMQRLFDTSREVFANSYPGFVPPPDAVARLSGLLNELKPRDVRVAPSMSVFKHADPTSPPPVTYLHFYGSSEFSFGIFCLPKSAIIPLHNHPGMTVFSKILFGSMHLKSYDWAKSLPAGSNDNALENSDGAGAGARLAKVNTDAVFDASSETVVLYPENGGNLHCFTALTPCAVLDVMGPPYNRAQGRDCAYYSESPYSCAGDAQYSWLKEVHSTFEMEGIKMEPNFIV

SEQ ID NO: 366387 - protein, 103 aa, Zea mays
  Clone ID: MRT4577_97311C.1.pep
SEMRRLIGTLCGGGGKKKISWNDHAVAEEGAGTWHRVGCQGWAQRQCGIGRGARWDLEPGASGSTLSPAPSWLHDVDQAGRLPFLDLFHTRQRTFQPRDTRVL

SEQ ID NO: 366388 - protein, 53 aa, Zea mays
  Clone ID: MRT4577_97312C.1.pep
ATLSQGGSTHSCSLPLLLPMLNTEQSHEDPGSHRIVCVSHPVVISLFLSSRPA

SEQ ID NO: 366389 - protein, 105 aa, Zea mays
  Clone ID: MRT4577_97313C.1.pep
KAQVLGLPYKSGAVEAEASVEATSSSLCSCVSPCSSPPESGLLRQPLREAKAQCVREAAPQTVLDPQQLEVHVEAELLALVHLRAPAVIQHSERHISPATLPTRP

SEQ ID NO: 366390 - protein, 138 aa, Zea mays
  Clone ID: MRT4577_97314C.1.pep
MAFMRTSSNASSGMGVAPDIRETFLELQMKKAFRYVIFKIEEKQKQVVVEKTGATTESYDDFLACLPEKDCRYALYDFDFVTGENVQKSKIFFIAWSPDTSRIRAKMLYSTSKDRIKQELDGFHYEIQATDPTEVELG

SEQ ID NO: 366391 - protein, 152 aa, Zea mays
  Clone ID: MRT4577_97315C.1.pep
WFSWLDACGVRPAVNVSVVALLGPRAFYFLHSGRVLCGAVSGYQFFTGNRFPPVFAYFGVGVGFPSAVGPCGGVFPLGGGGPRAGSPFFPPVCGFPAAPLSLPPLVALCAAVFFCPPGLWPPTRLWGGPLFGWFFVLVRFLGFWVRCVGTPK

SEQ ID NO: 366392 - protein, 87 aa, Zea mays
  unsure (1)..(87): unsure at all Xaa locations
  Clone ID: MRT4577_97316C.1.pep
CWLLLCFCPLASLFFXFFRAGAFFPFLRFSLALACSLALVADFCPSHRLCSVFLLGGLWSIFCLSGVLVSPLSXXLGASGVPLFYPP

SEQ ID NO: 366393 - protein, 68 aa, Zea mays
  Clone ID: MRT4577_97317C.1.pep
FLRAMVCLPHFIYVSLGLLQLELWMKHKTTPVTFLLVYKRALVSLYNVSSITAASSQFPFLWASSTSK

SEQ ID NO: 366394 - protein, 87 aa, Zea mays
  Clone ID: MRT4577_97318C.1.pep
RLEGAFNVDDYISLVRGWDLQGLRRRAAGVHRRFDALLEDILRHKDDARAARRLDQDDDGRYSSKQDKKQATHSKDLLDILMDKADD

SEQ ID NO: 366395 - protein, 72 aa, Zea mays
  Clone ID: MRT4577_97319C.1.pep
HHLLHYDSRHHARDYHERQHPWVHEQGRSYSHHLAECIILGVTTGETLERIMLLGVLLDKIAWGHHKLDYLN

SEQ ID NO: 366396 - protein, 73 aa, Zea mays
  Clone ID: MRT4577_9731C.1.pep
TFLLLAALEQVLYQLRGEPPKLDREAARTEPPTLTTTTTRSAGRHYEENQSLMRQGPDEVQGLHTKFEETNAW

SEQ ID NO: 366397 - protein, 195 aa, Zea mays
  unsure (1)..(195): unsure at all Xaa locations
  Clone ID: MRT4577_97320C.1.pep
LCRRARLXDAVALLXTMPFADASRGPAAGCILTEFCRRGRFAEASELVSKFPSSDVYGAWINGLFGAGELDATMKFLSDKKESEGYILDGRRCDSLIYRLLVRNRLGEVYDLLVQMMEEGIAPGIRTMNAALCFFCKAGLVEVAMDLYRSRVELGINPNKDVYHNLIKALCHGGETDEACLVFEETMEGGYFPGR

SEQ ID NO: 366398 - protein, 107 aa, Zea mays
  unsure (1)..(107): unsure at all Xaa locations
  Clone ID: MRT4577_97321C.1.pep
VLGFASPLFXALPFSSSSXXGALFPCFSPXXCPXFLSSXCLPCALLAPXXSXXWFGWAXFXSPSAXXSLXPPPPRALXXFXXPLGFFLFXLXGXSLRFFGXSRSPSA

SEQ ID NO: 366399 - protein, 82 aa, Zea mays
  Clone ID: MRT4577_97322C.1.pep
MQRLPYTTGLTTLRSYRLLFTFGQVKDFFRKFADRCKATNGNAYWPICLSLPEFYAPRLHLRIHERTSSSMASGPESWTAGV

SEQ ID NO: 366400 - protein, 72 aa, Zea mays
  Clone ID: MRT4577_97323C.1.pep
RVTPRVTHKLKKKKKKKKKKKKKKKKKKKKKKKKKKKKKKKKKKKKKKKKKKKLGAAPFKRSKFSFPGVWKG

SEQ ID NO: 366401 - protein, 63 aa, Zea mays
  Clone ID: MRT4577_97324C.1.pep
HRQAGGFFYFYQNSKISGCTFKNIFKTLFKGGLKGVWGAPIVFLYFPTPLCPLKTHPTLFSPI

SEQ ID NO: 366402 - protein, 236 aa, Zea mays
  unsure (1)..(236): unsure at all Xaa locations
  Clone ID: MRT4577_97325C.1.pep
MASNPKYDNYDFPAQGAEKQDGHAGYLTEDQTAKLEQFRMMLESEGCTDRLDTLTLLRFLRARKFDVEASKAMFLDTEKWRKETKLDETVPVWDYPEKAEINKYYTQFYHKTDKDGRPIYIETLGGIDLNAMYKITTAERMLTNLAVEYERVADPRLPACSRKAGHLLETCCTVMDLKGVSIGKVPQVYSYVKQASVISQNYYPERLGKLYMINAPXWGFSTVWSIVKGWLDPVTV

SEQ ID NO: 366403 - protein, 124 aa, Zea mays
  unsure (1)..(124): unsure at all Xaa locations
  Clone ID: MRT4577_97326C.1.pep
RKLYGAVMSGNVTRCTTXVEEAVCDXEIVPINFVTGEHKSPEHLVRNPFGQVPALQDGDLYLFESRAICKYAARKNKPELLREGNLEEAAMVDVWIEVEVIQYTDVLKSILFQVLIIPXMLGGT

SEQ ID NO: 366404 - protein, 84 aa, Zea mays
  Clone ID: MRT4577_97327C.1.pep
MASSAALLVLALALVGVTVLHVAEAKNKRAAESGEAAEAKKIQDYFCSTLIDGNKGTDLFVSKEFCALSQQSNLVLYGRIHCKG

SEQ ID NO: 366405 - protein, 134 aa, Zea mays
  unsure (1)..(134): unsure at all Xaa locations
  Clone ID: MRT4577_97328C.1.pep
MASTSMVLCSTGLEGKDPNLPAPGVCTQARLKIHATEAKAKPGGACRSPWYRPDRLLYQGPLSGEPASYLTDQLNGXDYXWDTRALSADPETLRKNRELEAIHSRWAMLGALGCVFQELMVRNGVTLSQAVWFK

SEQ ID NO: 366406 - protein, 83 aa, Zea mays
  Clone ID: MRT4577_97329C.1.pep
SRHPVQYICMYSDPALSVSVAHITDESIISRPLALERRPSRWLAGRPPRSGASPVGRVAEKAFLPPPSACLGRTSVGVPKPIL

SEQ ID NO: 366407 - protein, 41 aa, Zea mays
  Clone ID: MRT4577_9732C.1.pep
CPEEEPGSSCPVGVSSSSLVIHAGRRDSNSSISRSMDDRRT

SEQ ID NO: 366408 - protein, 148 aa, Zea mays
  unsure (1)..(148): unsure at all Xaa locations
  Clone ID: MRT4577_97330C.1.pep
GCGPCGWGAGLFVXSCFSGGLXVXFFXCCAXASXXXPVRLGRPRRLRRARXSXAAWGSPAPSPARWPRXVSFFFRRPLFXXXXXGXGXXXGGGXXXXXAFXXXXXXWCXKKKXCPFFPRAXWPXGRSRGPPVRPXRRXPSXRAAXCVL

SEQ ID NO: 366409 - protein, 54 aa, Zea mays
  unsure (1)..(54): unsure at all Xaa locations
  Clone ID: MRT4577_97331C.1.pep
IRAGYVVPAPKYKLSGMARVSPDRVSCVSMCEMLVDVCVCMKSSAXAPDHQGCA

SEQ ID NO: 366410 - protein, 85 aa, Zea mays
  Clone ID: MRT4577_97332C.1.pep
SNRYRSIRTSVNIRELATSSRLLPCRDGEETLMGASLLHDMRRRRARYRYPHKTAAGRTTAFIPSRERHCYAVQAPSSQTVNNAQ

SEQ ID NO: 366411 - protein, 84 aa, Zea mays
  Clone ID: MRT4577_97333C.1.pep
AKARSAAPYQPIHARVLLCWRNPLSFLCSTPPAQKGSLSRRTRREQGPTRIGIHKSRGSVDGEDRQSNSKETNAPCRDDLGLGA

SEQ ID NO: 366412 - protein, 121 aa, Zea mays
  unsure (1)..(121): unsure at all Xaa locations
  Clone ID: MRT4577_97334C.1.pep
INVPRSRFLPVKAASNFQLVQSDLXTLGEGFVTRNSARTNPSNPSIELGPEFKKVGSFLGRFKSKPSIVELDSFKVSRDVWFGFGIVLKGKMTLPAKPGVKLKIPNGXVIGNKDISGPEDL

SEQ ID NO: 366413 - protein, 109 aa, Zea mays
  unsure (1)..(109): unsure at all Xaa locations
  Clone ID: MRT4577_97335C.1.pep
NGDPSKKRRVERSPQMAEAKEKSSPPVIPFDMPPVLXPCETLEKEVRSLKLNLFFMTRKDSDPAQPIGGLPKPNQDLAQKKERLVEKIQRIVFYPPPWPPHHFCPFFLY

SEQ ID NO: 366414 - protein, 105 aa, Zea mays
  unsure (1)..(105): unsure at all Xaa locations
  Clone ID: MRT4577_97336C.1.pep
GVTKYIQALLFAGFLMQKELDYLVGAVANPKKPFAAIVGGSKVXRKIGVIESLLAKDDILILGGGMIYTFYKXQGILVEKSLGEKDNLELGTFLIXKLKAKGVLF

SEQ ID NO: 366415 - protein, 38 aa, Zea mays
  Clone ID: MRT4577_97337C.1.pep
SLNYLLFKSGREGAIFCARSHHHERQLAPVVLLLGRVC

SEQ ID NO: 366416 - protein, 603 aa, Zea mays
  Clone ID: MRT4577_97338C.1.pep
MTWLVLTLLLSSAAAAVETVKVVTTPVFPQIPRLQASKDFQVVVRVEAPPVAQQQARVPVDLAVVLDVGAGGGGSTGSARLDAVKKAVKFIIGQIHDNDRLAVVGPSPNRRLVIGFPSTHEARQNAEKSVDDLEPRGEFASGAGLEEAVKILGELPATASGSSRARFVILVTDTAVTEGSGGRFGKLRRELLPPVHTFGLGAGHDPRALLSIARESQGTYSFVDDQNTDGITGAIAICLSGLKDVVAVGTRVRVEAPVGSGVTIERIESGGYRTNPNTGDDKTYGEVAVGALYAEEVKSFIVHLQVPALPSTSAMTTSSSVDNGGCDKQQLLTVTFAGHYTTRDEGGATSPASPSPTVTTAVLYVQRPQPEALDVAGGGALHRVPVPAVMNLIARFGVLEMVTTFVEDEIWRLSSSSSSTVEVATKLRTQWEQFVQARQFWSGLDLGVLDVEVNRMASILEAAGTRIGSSATAYMLSWLSSYQMQRPTAMGSPSIVAAAFVTVKMQFTLQQATIVNTRPPPCIGGCPACECGCEDRCVQPLPPPVLLPSGRGDDTYRVNPAYPQGVLFNAINQAMEQMYLALVRASNLTRCDDAARVELFLPA

SEQ ID NO: 366417 - protein, 129 aa, Zea mays
  unsure (1)..(129): unsure at all Xaa locations
  Clone ID: MRT4577_97339C.1.pep
EAEAEVAKKAGSMQAVDPAGRISALLALRQLLAMLXPLALLXPFHWRAXAGASDVAASVXASGKRGRXASAVLRVPAVSPMVATRRKIATRRTQEARRVYDLIPRFLCDVFYFYTVHFLPFLCSTRLFR

SEQ ID NO: 366418 - protein, 159 aa, Zea mays
  Clone ID: MRT4577_9733C.1.pep
MYQAIPYSSARAWLMPAAAAEAGVAAVKPEPVATVAEPAAEEERARPDAAAGDDDDGGRAEVGRAVAERPVLVVGRRGCCLSHVVKRLLQGLGVNPAVHEVADESALAGLVPAGAGAAAGALPAVFVGGRLLGGLDRLMAVHISGELVPILKKAGALWL

SEQ ID NO: 366419 - protein, 66 aa, Zea mays
  Clone ID: MRT4577_97340C.1.pep
MSIFECERSALIAMEAKTCFAIASDRNLGVQLQTIATDFQRIYKVHDGFFLGLSGLATDAKTLVQR

SEQ ID NO: 366420 - protein, 60 aa, Zea mays
  Clone ID: MRT4577_97341C.1.pep
HQPVCVRPRMALVTSGIRPQQRHRSTPTGWKVGPAARCVGPTTWSVVSVSSLRGPLGVSV

SEQ ID NO: 366421 - protein, 208 aa, Zea mays
  unsure (1)..(208): unsure at all Xaa locations
  Clone ID: MRT4577_97342C.1.pep
MLSLSFSLLCFCVVDVENSFQTKLRLLSACTSPHGPRRGRRRDRRRRRRLQKMVGSMQAVDPAGRISALLALRQLLAMLXPLALLXPFHWRAXAGASDVAASVXASGKRGRXASAVLRVPAVSPMVATRRKIATRRTQEARRVYDLIPRMQTWTCHAPMPSWWLVCSSDVESYPKSIELWQSFSWFPAPISMAASSCLSVKQQPCGTD

SEQ ID NO: 366422 - protein, 91 aa, Zea mays
  Clone ID: MRT4577_97343C.1.pep
AGLPVALDLHGTVGGQLQPEVPARADLLHVHGLSAALPRWPNGPSVTTMMDRESPPPPPRGCPHRKLRRCAGTGSGSYPMGGPTTPPAPRR

SEQ ID NO: 366423 - protein, 156 aa, Zea mays
  unsure (1)..(156): unsure at all Xaa locations
  Clone ID: MRT4577_97344C.1.pep
MLSLSFSLLCFSFSLLCFCGVDVENSFQTKLRLLSACTSPHGPRRGRRRDRRWRRRLQKMAGSMQAVDPAGRISALLALRQLLAMLXPLGLLXPFHWRXARASDVAASALGLAGKXKAAASVVLRVPVVSPMVATRRKIATRRTQEARRVYELIHR

SEQ ID NO: 366424 - protein, 55 aa, Zea mays
  Clone ID: MRT4577_97345C.1.pep
KSAFSHLALDLKMLRGFCPVPIVFQSFVLWNGILFCPALNYPAGLLIGFSKQGLY

SEQ ID NO: 366425 - protein, 87 aa, Zea mays
  Clone ID: MRT4577_97346C.1.pep
IIYYIQSYNVLHMLRSKCFYNSVQSSLRTIFAASFSSWSTILSIMASAIFLISSSPFGWGPGDASAGSEGRKDTAILLLQTENRVWN

SEQ ID NO: 366426 - protein, 85 aa, Zea mays
  Clone ID: MRT4577_97347C.1.pep
FSRPHESRPSLSLHRASGQCPPPVQHSWRPGQQPSQHRPDDRLASDANHSEASVTGTHPPLQTLASKSSFQGGQVGEPREPRCGT

SEQ ID NO: 366427 - protein, 108 aa, Zea mays
  Clone ID: MRT4577_97348C.1.pep
EKGTPTGTEPKKPPRPPRKPGYTTTRPGTTPPKPRPTPPESRPTAHNYNSTAPPAPLNRHPSRWPKRSRARRRLSRTRCPAATDRPTREPAWAWRTNISLCRIPRAKD

SEQ ID NO: 366428 - protein, 91 aa, Zea mays
  Clone ID: MRT4577_97349C.1.pep
WSPYAGEDVSSKKKRRTPAWCDRILWHGEGIVQLSYIRGESKFSDHRPVCGVFIVEAAVVPDSSRLVKFASGPNMKVGAEELLLASSKYDL

SEQ ID NO: 366429 - protein, 88 aa, Zea mays
  Clone ID: MRT4577_9734C.1.pep
NSFGHQSCSYIYIYHYSECSVVCYNQIHPSIAPSRRSRRAVQTNHTCESSTLHRRLIIGICPLSFRTYSTESLHGLSIASYSVDVDAS

SEQ ID NO: 366430 - protein, 100 aa, Zea mays
  Clone ID: MRT4577_97350C.1.pep
TPIEASCPASFEGQARPALHGLGSWAHWHPALQRQVSPFLAFFVFQKGVVDSNLFPMDRAPPLCPQLCCPPPVVRITSFLDLGPHPVPVLTNCLVVSKAN

SEQ ID NO: 366431 - protein, 122 aa, Zea mays
  unsure (1)..(122): unsure at all Xaa locations
  Clone ID: MRT4577_97351C.1.pep
LXSSHLTNFITTLPLXSXTXNXXTFFFFXFSXKLGGCGGFYXXXXXXIXTIYKNFPHXYSSLXHHYFXHXXFIXTXFIXXYPLXLXHXNXLSPFXXFNXYNXHLFKHXXHFYFFXKKTIXPF

SEQ ID NO: 366432 - protein, 88 aa, Zea mays
  Clone ID: MRT4577_97352C.1.pep
EDQDLKLKKQELELCQTGPYYWNMTAMDKYVTDNKEKFIEVVTLPNDRVSLKMTKSGCLFLSRWLRCFTKTFADRRSWNGYFTFNDFQ

SEQ ID NO: 366433 - protein, 97 aa, Zea mays
  Clone ID: MRT4577_97353C.1.pep
DTKAAKAPESGQPTKANPVLFFFFSPWWTCLTGYFKTGEKKKHLGPPWNYSLDKNLGLQYFALWFWPALNLLFEDPAELDLLVFHPGLHELCLKTVL

SEQ ID NO: 366434 - protein, 86 aa, Zea mays
  Clone ID: MRT4577_97354C.1.pep
SARARAQHSFDFAPPAHVAVRGTIKLEGLLPHHSGHVDQYLLPCAQYRLLRSLGNLYLPALPKPGCIILDMAVSTMKTHSQVLPRH

SEQ ID NO: 366435 - protein, 144 aa, Zea mays
  Clone ID: MRT4577_97355C.1.pep
PRARFIFSLNPNKRTKPGGEHGHRRRGLLRHRATPDTEPAEGATTLTRTCAKAPPPGPPAHTASDRSGDICTSRCLPAIKKANCPPRGGDADNHDATGRLCNGQPAADKTANTLGTTTYPAGNLSRTNRGKRHDKIKRTESQSD

SEQ ID NO: 366436 - protein, 479 aa, Zea mays
  Clone ID: MRT4577_97356C.1.pep
MDPTAAPGSGGTPADSDATSPTNTTVTLPPLTLRDVPRLASSSPAAAAAAAVPNPISRHPYFHPPANFYISPGDVSLRHAFFDLVSAAPSPLVAYRRGGPRRDLAVDPAAARAALVTCGGLCPGLNTVLRELVVGLQELYGVRHVFGVAAGYRGFYGADEDHVRLHPAAVDDWHKKGGTVLKTTRGGFDLGKIVDGIVARGYTQIYAIGGDGTMRGALAIFEEFKRRGLNISITGIPKTVDNDIGIIDRSFGFQTAVEVAQQAIDAAHVEAVSAVNGVGIVKLMGRSTGHIALHATLSSRDVDCCLIPEVDFYLEGKGGLFEFLYERIKKKGHAVVVVAEGAGQELIPRTDDQKREQDESGNTVFLDVGPWLKSELGRWWKREHPDELFTVKYIDPTYMIRAVPANASDNLYCTLLAHSAIHGVMAGFTGFVPGPINGTYSYIPLEDVAVAKNPVDVNDHKWAWVRSVTNQPDFLKSQA

SEQ ID NO: 366437 - protein, 70 aa, Zea mays
  Clone ID: MRT4577_97357C.1.pep
TGGTSYLGGAHWAKGPFPFPPKKPRPPAKKIKLNKKKPRFCRQKKKKKKKKKKKKKKKKKKKKKKKKKTR

SEQ ID NO: 366438 - protein, 57 aa, Zea mays
  Clone ID: MRT4577_97358C.1.pep
SPDSLENIPEKWTPEVKHFCPNVPIILVGNKKDLRNDEHTRRELAKMKQEPVKPEEG

SEQ ID NO: 366439 - protein, 57 aa, Zea mays
  Clone ID: MRT4577_97359C.1.pep
HFRRACPPSKPRHTAMRPLLISAATLVRTDVYPLFAATCIAFRIYGLHLFRSIDLNP

SEQ ID NO: 366440 - protein, 70 aa, Zea mays
  Clone ID: MRT4577_9735C.1.pep
LRTGLNVLIDIYSAVLLSVRSRLVTPFSSVIALAASSMHHFSFVPESSIQGNHTRRVLLDGTQEALASAG

SEQ ID NO: 366441 - protein, 108 aa, Zea mays
  Clone ID: MRT4577_97360C.1.pep
MATSVKRSHSCRCQVLFLLALVLLAFVSASPTPISGQSIDDGRKSKTTVVVGGGNEAIVDEDNDIFNGCHYNNQNPHYSSALFCCSKDKLCWASLPECAANCPCKTNC

SEQ ID NO: 366442 - protein, 41 aa, Zea mays
  Clone ID: MRT4577_97361C.1.pep
SPTHRLLIQSFKPLMQTMLSRKSGVIQGHKLCAINHVYTSC

SEQ ID NO: 366443 - protein, 156 aa, Zea mays
  unsure (1)..(156): unsure at all Xaa locations
  Clone ID: MRT4577_97362C.1.pep
DKEISPQLQDSIKRLMNEETEKVKGFPVDSIVPYTERLKILAGLANPEDLQLSTAERKLVQTYNMKPVLSRPQLIFFXGSNYFEIDLDVHRFSFISRKGLETFQERLKHGVLDLGLTIQAQKAEELPEHVLCCMRLNKIDFANNGQIPTLITAADE

SEQ ID NO: 366444 - protein, 99 aa, Zea mays
  Clone ID: MRT4577_97363C.1.pep
QILWFPLDHMGYQNGWHAYVRFQQEDRGYRHDTMCLCICGQSHLLVVIQYMQNVSEFEKNLTTRHVKHPRWKFVRASGRPYMVLRSICGLRVRFSRMRG

SEQ ID NO: 366445 - protein, 91 aa, Zea mays
  Clone ID: MRT4577_97364C.1.pep
AVLVLKQSLTKRIFISWQNILKWTPLQTFIFTIGTESKGLNRGFKLQKFTAFEITLGPDTHQKTFPLAMKQKKAHAPTPPVRDQENPKAFV

SEQ ID NO: 366446 - protein, 93 aa, Zea mays
  Clone ID: MRT4577_97365C.1.pep
LLLKISSSSNGRFFFKTLPLHSQKKQTLHAQQFLLQKKNCQNNITKNPTIRCSLTPGPNSFTKEKKKIGLIVISFSQTTALKKQPTHKGKPYG

SEQ ID NO: 366447 - protein, 103 aa, Zea mays
  Clone ID: MRT4577_97366C.1.pep
GGPTPAPGGGPPGATVATRAAGPATPTGTGGTERWGPRGQETQFAPALEALGQRGQHRSARGWRGPPVFLNQGRPVPAARPGVNRGPSRPMQQPAWTAERRVR

SEQ ID NO: 366448 - protein, 116 aa, Zea mays
  unsure (1)..(116): unsure at all Xaa locations
  Clone ID: MRT4577_97367C.1.pep
DLWHKQVEEFSXGLEDNAFEYEWEVDSSGRTRDXYDGGYYXALMTFHQDYLLSPPSXRXTSEMWHPTYHPDGRVLIVILSSFADALMGYKLACDRCDNVVSXDHIAFALVSMLMSC

SEQ ID NO: 366449 - protein, 95 aa, Zea mays
  Clone ID: MRT4577_97368C.1.pep
MHAYVSSEFGSRAAGQSSISARGLRAERQGAMAASVALSSGHRMPAVGLGVWRMEKADIRGLIHTALRVGYRHLDCAADYQNEAEVGNDRLLLFC

SEQ ID NO: 366450 - protein, 79 aa, Zea mays
  Clone ID: MRT4577_97369C.1.pep
LLGYLEAKDNFWMCISPSCKKWPCPLYYASMGPGPGNYILLCKVNLNGEVNFCIFHWGVESLKHGLQKKIGRVKRLFFF

SEQ ID NO: 366451 - protein, 116 aa, Zea mays
  Clone ID: MRT4577_9736C.1.pep
LVPLLLYPFPRLLGVYLLIRLSPVFGLLFVPVWPLRFFWFVSAFLPPGFFLFWLPLLAPLGFPVVSPFPPDSAFFRVFPFFACVLFWHRLGRPLVPVPIFRGWYPVLGIGHELTMG

SEQ ID NO: 366452 - protein, 83 aa, Zea mays
  Clone ID: MRT4577_97370C.1.pep
GIACDARRHLFIVLQLAHQCTFENTPDISPEDNQSHGESNLLLVVTMAEYKLAYESELDAFHPSFRYETRDPREDWKTSALRG

SEQ ID NO: 366453 - protein, 35 aa, Zea mays
  Clone ID: MRT4577_97371C.1.pep
QLFKALFQSIPLRLYTRSIAKHYATHIPVLSIHNP

SEQ ID NO: 366454 - protein, 40 aa, Zea mays
  Clone ID: MRT4577_97372C.1.pep
WWYPWRHDSGPEPGSGPQDHLMSTRVLRPCGILLCVLPFF

SEQ ID NO: 366455 - protein, 44 aa, Zea mays
  Clone ID: MRT4577_97373C.1.pep
KWKGKPEFPNHMAFQIIKSGQALLLRPAGRVPRELKEVKKDLNP

SEQ ID NO: 366456 - protein, 70 aa, Zea mays
  Clone ID: MRT4577_97374C.1.pep
KRRPFFLFYIFFYRRKNAEWRCYTLYNRPHHKNYKHTSTLTDRFHILLKTLYTVICNGFYTPDSWRTRFS

SEQ ID NO: 366457 - protein, 145 aa, Zea mays
  unsure (1)..(145): unsure at all Xaa locations
  Clone ID: MRT4577_97375C.1.pep
MQESRRGRGNDVNPHDFVMAYSDHLKHSDQMELPEXADIVNTAMVKELPPYDPDCHYXRAASMCRXKIYLEQGIARVVXFRKIYXGRQKNXSRPTHIXKSSVAAARNILNPLQMMIIINANPKGAPLITNQTRRDLHHRAWKERW

SEQ ID NO: 366458 - protein, 72 aa, Zea mays
  Clone ID: MRT4577_97376C.1.pep
MTPNDDKNKMDASKSATKDKDPVNKSGGKAKKKKWSKSKVRDKLNNLVLLDKATYDKLCKEVPNYKLITPAV

SEQ ID NO: 366459 - protein, 200 aa, Zea mays
  Clone ID: MRT4577_97377C.1.pep
MAVAEPVPGGDVKLFNRWTFEDVQVTDISLNDYLAVTSMKHYTFLPHSAGRYSAKRFRKAQCPIIERLTNSLMMHGRNNGKKIMAVRIIKHTMEIIHLLTDANPIQIIVDAIINSGPREDATRIGSAGVVRRQAVDISPLRRVNQAIYLLTTGARESAFRNVKTIAECLADELINAAKGSSNSYAIKKKDEIERVAKANR

SEQ ID NO: 366460 - protein, 42 aa, Zea mays
  Clone ID: MRT4577_97378C.1.pep
LKPLYLLKLTSTLYLSLILTISYNLPLLTSSYNSLYFIFLYY

SEQ ID NO: 366461 - protein, 101 aa, Zea mays
  Clone ID: MRT4577_97379C.1.pep
WFLSAPLRFCCYFRWLAGLCCAVGVPRFVFVFGSRAAFVDCSWFCLVAWCPLGVLDSRGLPVPAARFAFLLARGCAPGSSAWFSFASCLRRSGSPGAGRCA

SEQ ID NO: 366462 - protein, 190 aa, Zea mays
  Clone ID: MRT4577_9737C.1.pep
MGFPAGYSELVLPKQLLHLLLLLGYVRRFLLWAFDAVGLGDLLDLGDDHQAPPPPQQPQPQQHRRAEFRTAMPAMVIEEALPVARFDELEARVVGGDCAVCLGGIGGGDEVRRLGNCRHAFHRACLDRWMEHDQRTCPLCRAPLVPGALWPADASDLDFSYLGAPVPSPTLLPTLLRPHELLLLAGLGGY

SEQ ID NO: 366463 - protein, 80 aa, Zea mays
  Clone ID: MRT4577_97380C.1.pep
LSTQLLCGCSDCKVLSPAHLTDMMPLRYNHGKQLVCLFFLFTVCAMLMPQITGQTTNGTYIAEREQRSSRILETCNVHTA

SEQ ID NO: 366464 - protein, 45 aa, Zea mays
  Clone ID: MRT4577_97381C.1.pep
AFCCLLIHISRNHGLNYYMFAHRSYLLKESQRLIPKYCIGFLKEL

SEQ ID NO: 366465 - protein, 78 aa, Zea mays
  Clone ID: MRT4577_97382C.1.pep
SSHFVQNRSLRPSTTNPKPAMGGRALGGAKRPDGPGANHTGAGQRSGANPQQGAAAGRGTAPNHPRGGGGGNPRTAGG

SEQ ID NO: 366466 - protein, 215 aa, Zea mays
  Clone ID: MRT4577_97383C.1.pep
RASPATARQPLTAGHLAFSPSSQPQADLARSSPRRRLCCAAGHLIYRRSRRPRQRLGLLLRCRLPVHGRAGPCVAHPSLLRLYSVARIRAAAASSDCVVIEQYLLFTLLLSPASPIPYQVRRMPLPGWTHPAAHPLHRLRWIRRCRGLPGRIPVAATFSDRSAVPLAGSRLPGWIYPCRGLPGRICRFPFYSVAGADTMTGADACAAVGLPGGAP

SEQ ID NO: 366467 - protein, 443 aa, Zea mays
  unsure (1)..(443): unsure at all Xaa locations
  Clone ID: MRT4577_97384C.1.pep
WYQNSARQLCTPRFRFSSPTAGQPPAAPTLQPSPTIVAPGRLNLPSRGRPPSSQPSAPPXSPADLWPPPPXPASSGSLRPPPSLPRPAPSSSPXPASAGSSAPRPAGCYCSTPDGGDDATLARGLAPMGRSCGLPRSATVVPSLGAPPTAAPVQLPGTPAPIPLPGELPRAPVXPPRLGLPSPPLWPVLAXPPXPHPPLSSSIASXPSSAXGVIIRPAAHRVPRARRPTGMSPGPRSXTPDAPRSPAARFPAXPPAPXRRTFTGAPPSPHXPCWPPRPSVPWWGGCAPSGPRXPDAGRTQDPPXSPPRCSPPWLRAPPTXVPHSSGTPAALLPMAPSCQSTGTTDAGPCPAGPAPPXPSSSPPRWFRRCRGLPGRIHVAAVFSARSANPLAGSSTSWLDSSLPWPSRPDPPIPRLFCHGRGHHDRRRRVRCRRPPWRGSLRPG

SEQ ID NO: 366468 - protein, 338 aa, Zea mays
  Clone ID: MRT4577_97385C.1.pep
MGSKDGTGDISEAQGYAADIDSIREAQARIAPYVHRTPVMSSTSIDAMVGKKLFFKCECFQKAGAFKIRGASNSIFALDDEQVSKGVVTHSSGNHAAAVALAAKLRGIPAHIVIPRNAPACKVENVKRYGGHIIWSDASIESREYVCKRVQEETGAVLIHPFNSKYTISGQGTVSLELLEQVPEIDTIIVPISGGGLISGVALAAKAINPSIRILAAEPKGADDSAQSKAAGKIITLPSTNTIADGLRAFLGDLTWPVVRDLVDDVIVVDDTAIVDAMKMCYEILKVAVEPSGAIGLAAALSDEFKQSSAWHESSKIGIIVSGGNVDLGTLWQSMYKH

SEQ ID NO: 366469 - protein, 28 aa, Zea mays
  unsure (1)..(28): unsure at all Xaa locations
  Clone ID: MRT4577_97386C.1.pep
MLWAINFFFFFFFFFFFFFFFFFFFFXF

SEQ ID NO: 366470 - protein, 82 aa, Zea mays
  unsure (1)..(82): unsure at all Xaa locations
  Clone ID: MRT4577_97387C.1.pep
LLHLXLLLLAILLTTVQGLHPSSFVPYLPFILLSASSVSFLIFYIMLLSTSSLSSSLPSISTFFLWSIAMTICTSFSKTFSL

SEQ ID NO: 366471 - protein, 80 aa, Zea mays
  unsure (1)..(80): unsure at all Xaa locations
  Clone ID: MRT4577_97388C.1.pep
GPLPFTQLPALPPAAYSPQQILXPFTHASRRTPCSPFSHSHSCPFFPAVRAPPPPPFXTPQLSPLLDCLLVVISIIKFFG

SEQ ID NO: 366472 - protein, 78 aa, Zea mays
  Clone ID: MRT4577_97389C.1.pep
AIMITWNHCECILSVFLPRPSAYCLYICSLMLITYISFIHHAFFLSGEGSPNQTHLLFRLVLHSSKAPPPSQRLAPHK

SEQ ID NO: 366473 - protein, 98 aa, Zea mays
  Clone ID: MRT4577_9738C.1.pep
VAVVWLVPAAVIFVRLPFGWRGLSCCGSGFSRPFVSPLRCACPVRLWPVSFSSFWVLFWFVAPSCGVGARAGSVCAPALCFAAAGCYKLSNSCFFRTG

SEQ ID NO: 366474 - protein, 71 aa, Zea mays
  Clone ID: MRT4577_97390C.1.pep
HGGLGLGYQTVFQKIGPPGPGYPMGPPNVGYPFVACLATKVRQVPPGDGCIPACRQANSKTHVVVKRGAPP

SEQ ID NO: 366475 - protein, 74 aa, Zea mays
  Clone ID: MRT4577_97391C.1.pep
GFFSIFFFGGGLFQNGQIFGFCGALSSKKGWVWPPVNVALHLKNLVPGQNFFLGPPKYYFGLFSGSNKNKNLCI

SEQ ID NO: 366476 - protein, 31 aa, Zea mays
  unsure (1)..(31): unsure at all Xaa locations
  Clone ID: MRT4577_97392C.1.pep
MGNEKSHINIAXIGHVDSGKSTTTGHLIYKL

SEQ ID NO: 366477 - protein, 126 aa, Zea mays
  unsure (1)..(126): unsure at all Xaa locations
  Clone ID: MRT4577_97393C.1.pep
MADMVSSAVVQETVNRVLSSMQSQYEEXSNAREHMERLEMARIRLEAALDISRKWQITDASLLRWRRKLKRVSRECDDALREHKRRVILQEAEAADERGTVTRWVAGAAWSIMQLPSLLLGTSCLA

SEQ ID NO: 366478 - protein, 109 aa, Zea mays
  unsure (1)..(109): unsure at all Xaa locations
  Clone ID: MRT4577_97394C.1.pep
GGHVLRGAPLWRTPAGRPPPSELFFFFFFFLGWLNKPGRSFFGGGGIHQLKEDLNXXWDPXEDKPTVLLXGGGAXXALWLTCXXXGAINSVPLLPKILELXGLDFFFFF

SEQ ID NO: 366479 - protein, 145 aa, Zea mays
  Clone ID: MRT4577_97395C.1.pep
MKDSDGEGTGGGVARSHPSNLPLPTPQSDPNLQFSGGTDDESSSRNSSSSATGGASPGYYSDYPSSFSGECSPYNMSPWNQTMASPWSHRNEASAAGLGGPPTMAPGTSLISSLVRGEGHIYSLAAKGDTLYTGSDSKNIRVWRK

SEQ ID NO: 366480 - protein, 87 aa, Zea mays
  Clone ID: MRT4577_97396C.1.pep
GAGGDRSGPLPRAGDLGFFLQPPTGTRKGGQNPPPLIKGGMAGNPFRYKGGLPGLDSPDRAISPGFRLPPPTFARTRYKSVVLPDCF

SEQ ID NO: 366481 - protein, 58 aa, Zea mays
  Clone ID: MRT4577_97397C.1.pep
GEKGRPQASPSLSSRQARLVWNLRLCIIWRVDERGALDTGGISKNHVSGKGSPAHYAA

SEQ ID NO: 366482 - protein, 242 aa, Zea mays
  unsure (1)..(242): unsure at all Xaa locations
  Clone ID: MRT4577_97398C.1.pep
NSARGLPLPPMEGVADPGPPPTPPLPPPXAPPXPCPRWNPPAPCPXEPTRGSRPRCTPPPXPMEGAADPGTPARPXSPCPRMDPARSPXSPHALVVEAPARPDAHEYCPSSRGLRPPPPPRQVPSRPXPPSDAPTTPPSPRADSRQARPAPKFPPRXDPPGIAHGSRAPXPLPSMASRVRAPTPPPPPPPLPLAALPSPXSARPRPCLPXPGPLSXPSPMNPXPXRCPQPPSALRFRHLPDS

SEQ ID NO: 366483 - protein, 137 aa, Zea mays
  unsure (1)..(137): unsure at all Xaa locations
  Clone ID: MRT4577_97399C.1.pep
MVREKKLCIPMQXITVLKLALNICVGESGNRLTRAQXVLEQFSDQTPVFYNARYTVRSLGIRRIQKIACYFTVRGEKAMHLLESSLNVKEYELLRLNSSDTGCCGFGLHEHICLGIQVDPETGMYGMDFYIVLERAG

SEQ ID NO: 366484 - protein, 46 aa, Zea mays
  Clone ID: MRT4577_9739C.1.pep
GRRLPCPPIPQVWICSVPPGLNSWMLLGSFLPRPGFWCLSHPCGTV

SEQ ID NO: 366485 - protein, 190 aa, Zea mays
  Clone ID: MRT4577_973C.1.pep
DPRGRPGFLLLILKDGMGFSVAASNCLIAPPYIFAAFVMMGFAWAGDKYHVRSVWVIANGVLALIGLPMIGFSNNVGVRYTGVFLATAAANANVPAVLTWQANNIRGQWKRALCSATLVGAGGIGGIIGGTVFRTQDKPHYVPGVIACMIAAGLIVVIALLLNLKFWRANKRAAAGGKVIEGLEGFRYTL

SEQ ID NO: 366486 - protein, 56 aa, Zea mays
  unsure (1)..(56): unsure at all Xaa locations
  Clone ID: MRT4577_97400C.1.pep
PMPKSPMRSIGIPLPADQLKVLQDNLEWEXVQWSQTSVWVAGKEHPLARVHFLXEN

SEQ ID NO: 366487 - protein, 63 aa, Zea mays
  Clone ID: MRT4577_97401C.1.pep
HSYESNEVCYRECSTIPLLNETAIPYEDVCSSVGIDPSMSSRRVGGSPTFFVCVCSQKGDSKV

SEQ ID NO: 366488 - protein, 80 aa, Zea mays
  Clone ID: MRT4577_97402C.1.pep
VNKPKKHQPLGTLYSVQRSCPQLNFTPRQHRQRVDASTTAMEASKVKTSVSFRVLLHCDEQRVLDLERNLAAFHAELGAG

SEQ ID NO: 366489 - protein, 56 aa, Zea mays
  Clone ID: MRT4577_97403C.1.pep
LIQQKGIDHHKCTYLTASTSRADINFFFLGCQQSNIGAQLQFFLTLTLAAPHTMGD

SEQ ID NO: 366490 - protein, 65 aa, Zea mays
  Clone ID: MRT4577_97405C.1.pep
IQIAMSEITPVAATTMFTCRSFNSRRGWMDGWMDLEREAGLLVLVEVGGVDGVEGPDEAEDPQED

SEQ ID NO: 366491 - protein, 86 aa, Zea mays
  unsure (1)..(86): unsure at all Xaa locations
  Clone ID: MRT4577_97406C.1.pep
GGGGETXTEVNLLCQAWTLTSLFIGLRNRGPPASSWAGRXRSGREVKGPVNRWANWGRSIPTRGGEGCQAPAGCXRIARSRTGRAL

SEQ ID NO: 366492 - protein, 110 aa, Zea mays
  Clone ID: MRT4577_97407C.1.pep
AAAATVVVAAATSVPPVAGVTATLRGCGETKRWGPPAQVILFAPVLFPQAQRVYPRPPRVGCSPFVFLIKGPPGPVVSPVFTRGSRRPRHHPAGIGDQWGRLPPPGFILG

SEQ ID NO: 366493 - protein, 59 aa, Zea mays
  unsure (1)..(59): unsure at all Xaa locations
  Clone ID: MRT4577_97408C.1.pep
FFFFXXXXXXXXXXXXXXKLKHGPEGYKFSSKTETKRVQVQKDPIPKLFLHYLPVTLFI

SEQ ID NO: 366494 - protein, 140 aa, Zea mays
  unsure (1)..(140): unsure at all Xaa locations
  Clone ID: MRT4577_97409C.1.pep
MAASVMLSWVTLKPAGFTVEKTAARGLPSLTRARPSFKIVASGVKKIKTDKPFGINGSMDLRDGVDASGRKGKGYGVYKYVDKYGANVDGYSPIYNENEWSASGDVYKGGVTGLAIWAVTLAGILAGGALLVYNTXALAQ

SEQ ID NO: 366495 - protein, 43 aa, Zea mays
  Clone ID: MRT4577_9740C.1.pep
KSAQAAWMAASTKLTPSTPTTLTENKTRNSEQGAVLIFPKTAG

SEQ ID NO: 366496 - protein, 80 aa, Zea mays
  Clone ID: MRT4577_97410C.1.pep
HASAHASAIMIVDRYVIIALQFIYIDHSSAFVSLYACSLALQFLQSKVLFFTWIYYSLKTSIHCFAFLCLFVDMNKSFVL

SEQ ID NO: 366497 - protein, 62 aa, Zea mays
  Clone ID: MRT4577_97411C.1.pep
SGRPLGVVFFFFFFFLEGRNLIWGVSKVLAGPEQTYSQGTIPSPMAPRRAALLGLYRAGGGD

SEQ ID NO: 366498 - protein, 145 aa, Zea mays
  Clone ID: MRT4577_97412C.1.pep
YNRFLQLVVHIGTKICPVRGRILWELVIFMVRIGRIHGGNQTTQQVDRCAVCRAALDDATAGIRPERGDGRRREAERHGRTSLGAPGTEYAMGSTGGSRPGNQAPSGTKQQPSAATRDEAAALSRQDGETLGKKAKEKKAHTPAG

SEQ ID NO: 366499 - protein, 175 aa, Zea mays
  Clone ID: MRT4577_97413C.1.pep
MEEDLPLIRKTLLLTEARGRKHEQQNVRKGGDTLSHDESKPRRSSSTAAQTSPKRSPRHEQPLSYNRLHTEERAIRRAGYNYQVASKINTQEIIRRFEEKLAQLMEEREIKLMRKDMVPKAQLMPAFDKPFHPQRSTRPLTVPKEPSFLRLKCCIGGEFHRHFCYNGVNNKAIKS

SEQ ID NO: 366500 - protein, 104 aa, Zea mays
  Clone ID: MRT4577_97414C.1.pep
GRRLRARWSMGSLGGLESARVRQVLFRCWESVQSLEQGWWSMSVTGVTPAKIKEVRASSRKRRHLNTQCEKQAVSLATRPILLPVLPGGWARTLARSGGRRARP

SEQ ID NO: 366501 - protein, 89 aa, Zea mays
  Clone ID: MRT4577_97415C.1.pep
LHHQHAINHICVCYVREKFVRTCATSMYICMDCVGYTVVLLETYATAAAKRMLIGIVASDTRLVSGYCSVGRHMCVYLSACMYYVWTTT

SEQ ID NO: 366502 - protein, 206 aa, Zea mays
  unsure (1)..(206): unsure at all Xaa locations
  Clone ID: MRT4577_97416C.1.pep
SFFPLAYIFCRFAGYPNILDSLRSKLKFYLLPWGKVKSHINSVFIGHGESPGSHTSEHLIYLLGGIYNRVLDRYANMGSEMNRRSYDNAWVLDKLNGESERFISIDIALCKFDTTKYYWTAIDAPGHRDFIXTCITXGTSHDVXAVLIIHSTSXGCHAGISKNGHNRDDALLAYTLAAIQMITCCYMMDASTPMYSKAIYDEIVEE

SEQ ID NO: 366503 - protein, 49 aa, Zea mays
  Clone ID: MRT4577_97417C.1.pep
SKEGIPVFAVGVGLRTYDKAFGNYYAQYHIDIKEHLHRFNSPKETKNHG

SEQ ID NO: 366504 - protein, 73 aa, Zea mays
  Clone ID: MRT4577_97418C.1.pep
QSHGLRIDMSDYQNLHNILSVQLIIGSKHLWEFQIDTSTTKKNLLRGLFKLIPSIHIYRTEARLLRILCRDEK
